United States Patent Application Publication US 2004/0123343 A1 - sequence listing, part 8

SEQ ID NO: 20106 - DNA, 4890 bp, Oryza sativa
  Clone ID: PAT_MRT4530_25504C.1
aaggtgggttgtgagcatatggttttgatggttgtgctcatgacaattaaggaccggttcgcgagctactgttgtgaaacatttatcgtgccaaccacaagccagcgtgggcaacggctttatcttttgtatagcatgattcattatagtgcgccagactgagaagtggcgagaagtccatgggggtcgttggggagtccatgccttgttttaaagggggtgattatgatccaggtacggtgcactgtagtgaattgtgttatgcgaggggtattgtcactactcctttccgagatgcctcgccattcaccgagaaatttgatcgaggtgttaggattcgtcagggagctgaggttgatggcttttgaagtaggctatgaggttgctcctgagtatcgtcagattccccatgaccccgacgaggagaagtgtcgtgttcgtgtgacgttggctagtgatagtgaagaccttccatcttttaagtttgaagctggaggaagatcgtactgccatgcttgtcaagaagtagctttggtggccattggagagttgcgacaacactttgaagaagagttggattcatcagctttccagtatcatcctcataagcctcatggtcaagactatggaacctatatctgtcctgatggtgaagagagtgctactctgatgcatgcggtgcatatgcttagtgctatggatgcagtaagtgtggagcgagacaaagcagctcatgaccgggaaaattggaatcgaggcaagatttgcaagttggagagcaaggtgtaccgtctacagaaggaattagctgaacttaaaggagaaatgccgccgccaacacccaagcttcgtctcgtcgcaagaaagagaacctgtccgccacctcgtctccagttagcttcgaagattcgcgtgatgggtgaagctgtgcccgatcgtgctgaacctgtcatcgacatcataagtgatgaggaagaggaggaagatcctgaagaaagagagccagctactccagaggaagaagattcatcgcttcgttccgacgcaaggtggaaggctggaggagaacctatcacttggcaggagttcacagctgcttttaagaagacgcatataccgtcaggtgttgtagctctaaagaagagggagtttagagcactcaatcagggatctcgttcagtcaccgagtacctccatgatttcaatcgtttagcgcgttatgctccagaggatgttcgcactgatgaggaacgtcaggagaagtttttggagggactgaatgataagttgtcttatgctttgatgtctacggatttccaggattttcagcagttggtggacaaagcgattcgccaggaagacaagtataaccgtatggagcagaagaagcgcagggctgcccaatttaaggcacaacagggcagtaaccagaggccgcgtctcgttactggacctcaagttccatcgtaccctcaaggaggatcttcatcagttgtccgtccccaacgccagttctacaacaacaatactggtaatcgtggcaatgacaaccgtaatgtggttgctcgtcctgcagcaactccagttcagaaccagcccgttaggagggaacagggaagcaagccagtgatatgcttcaattgtggtgatccgggacattatgctgataagtgtccgaagcctcggcgtgtgaagaacgctccagccccgaacaacttcaatgttccagcaccgaaggctcgtgtcaatcatgttgcagccgcagaagctcagaatgcaccagatgttgttttgggtacgtttcctgttaactctatacccgcaactgtgctttttgattccggtgctacacattcctttttgtgtaaaagttttgcaatcaaacatgggatggaagttgttagtcttgggagacctttactagttaataccccaggcaatcaagcattttcgacacggtattgtccttctgttactatagaaatagaagaagttcctttcccatcctctcttatcttgttagaatccaaagatctagatgttatcctagggatggactggttatctcgtcacagaggagttatagattgtgccaaccgtaaggtgactttaaccagtagcaatggggaaacagtttctttctttgcatcctctcctaaatctcatggtgaggtcttaaaccaagttgctctacaagagatacctatagtacaagactacccagatgtgtttccggaggatttgccaggtatgccacctaagagagatatagagtttcggatagacttggtacctggaactaaccctatccataagagaccgtacagaatggcagctaatgagttagctgaggtgaagaaacaggtggatgatttgattcagaaaggatacatcagacccagtacttcgccatggggagcaccagtcatctttgtggagaagaaagatcatactcagagaatgtgtgtggattatcgagcgttgaatgaggttactatcaagaataagtaccctttacccagaattgatgacttgttcgatcaactcgaaggtgctacagttttctctaagatagatctccgttctggatatcatcaacttcgaatccgtgaggaagatataccaaagaccgccttcacaactcggtatggtttgtttgagtgtaccgttatgtcatttggactcactaatgccccagcctttttcatgaatctgatgaacaaggtgtttatggaatatctggataagtttgtcgttgtgtttattgatgacattcttatttactccaagacgaaggaagaacatgaagagcatcttcgtctagctttagagaaactacgtgagcatcagctttatgccaagttcagtaaatgtgaattttggttgtccgaagtgaagtttcttggtcatgtcatctcgtctggaggagtggcagtagatccaagcaatgtggagtcagtgttaagttggaagcaacccaagacggtttcagaaattcgtagtttccttggacttgcagggtattaccgcaggtttgttgagaacttttcaaagatcgctagaccaatgactcgtctacttcagaaggatgtaaagcaattacgtcctcatgagaataattacccaacgcatgacctagagttggcagctgtggtgcatgcattgaagatttggcgtcattatcttttcggtaatcgtacagagatatatacggatcataaaagtttgaagtacattttcactcaacctgatttgaacatgcgacagcgaagatggttagagttgattaaggattatgatatggaaatccactatcacccgggaaaagcaaatgtggtagccgatgcccttagcaggaaaagttactgtaatatgtcagaagctcgatgtttaccttgggagttgtgccaagaatttgaaaggttgaacttgggaatagtcagcaaaggttttgtggctactttggaagctaaacctactttgtttgatcaaattagagaagctcaaatgaatgatcctgatatccaggaaataaagaagaacatgagaaggggtaaggccatcggttttgtagaagatgagcaaggaactgtgtggttaggagaaagaatttgtgtcccagaaaataaggagttgaagaatactatcatgaaagaagctcatgaaactttgtattccattcaccctggaagcactaagatgtaccaagacttaaagctacaattctggtgggctagtatgcgacgtgagatagcagaatatgtggctctatgtgatgtatgtcagcgggtcaaagcagaacatcagaaaccagctggtctgttacaaccgttgaagattccagagtggaagtgggaagaaataggaatggattttataaccggtctacccagaacgtcggcaggacatgattctatttgggtagtggttgatcggttgacaaaagtcgctcatttcataccgatcaaaacaacctatacgggacataagcttgcagaattatatatggccagagtggtatgtttgcaaggtgttcctaaaaagatagtgtcagatagaggtagccagtttacttcgatgttttggcagaaattacaatcagaattgggtacccgtttgaatttcagtactgcctatcatcctcaaacagatggtcagacggaaagagtaaaccaaattttagaagatatgttgagagcctgtgttctagattttggtggaagttgggataagaatttaccgtatgcggaattctcatataacaatagttatcaagctagtttgcaaatgtctccgaatgaagcattatatggtcgcaagtgctgtacgccgcttctttgggatcaaaccggtgaacgtcaagtttttgggacagacatattacgagaggcggaagaaaaagtgaagattatccaagaaaggttgcgcgttgctcagtcacgtcagaagagctatgccgacaatcgtcgtagagatttggctttcgaagaaggagattatgtatatcttcgggttacgccgttacgaggtgttcatcgtttttagaccaaagggaaattggcaccgcgttttgtgggaccttttaagattgtgagtcgaagaggtgaagtagcttaccagttagagttgcctccgtcaatggcgggaatacatgatgtgtttcatgtgtctcagttgaagaaatgtttacgtgtacctacggaggaagcagatcctggtcgtatagagcttcaggaagatttaacttatgtcgagaagccagtcagaatcttggaatttccgacgtttcggaggagagcgtttccgttgaggaaggttccgaagcatttgtggaagcccaaggcaagtcacacagatcccaaacaaccctttgagcatgttgatcccgtt

SEQ ID NO: 20107 - DNA, 4899 bp, Oryza sativa
  Clone ID: PAT_MRT4530_25505C.1
atgacaagttggtatcagagccaccttgaccttaggataagccaaatgatgccgccccattcactgagaaatttgatcaaggtgttaggattcgtcagggagctgaggttgatggcttttgaggtaggctatgaagttgctcccgagtatcgccaaatttcccatgaccccgacgaggagaagtgtcgtgttcgtgtgacgttggctagtgatagtgaagaccttccgtcttttaagttcgaagctggaggaagatcatactgccatgcttgtcaagaagcagcgttggtggccattggagagttgcgtgaacactttgaagaagagttggattcatcagctttccagtatcatcctcacaagcctcatggtcaagactatggaatctatacctgtcctgatggtgaagagagtgccactctgatgcatgcggtgcatatgcttagtgctatggatgcagtaagtgtggaacgagacaaagcagctcatgacagggaaaactggaatcgaggcaagatttgcaagttggagagcaaggtgtaccgtctacagaaggaattagctgaacttaaaggagaaacgccgccgccaacacccaagcttcgcctcactccaagaaagagaatctgtccgccacctcgtctccagttagcttcgaagattcatgtgatgggtgaagctgtgcccgatcgtgctgaacctgtcatcgacatcataagtgatgaggaagaggaggaagatcctgaagaaagagagccagctactccagaggaagaagattcatcgcttcgttccgacgcaaggcgcaccaccaatccagtagaagcaggagattggctgcatgcggtggagaagaatttggatttgatccagtgtactgagcaggagaaagtttcttttgcttcgcatcaactgcatagacctgctgctgaatggtgggatcattttcgccaaggcagggctgaaggagagcctattacgtggcaggaattcatggccgctttcaagaagacacacataccaacgggtgttgtagctctaaagaagagagaatttagagcactcaaccagggatctcgttcggtcaccgagtacctccatgatttcaaccgtttagctcgctatgctccagaggatgttcgtaccgatgaggaacgtcaggagaagttcttggagggactgaatgatgagttgtcgtatgccttgatgtctacggatttccgggatttccagcagttggtggacaaggcgattcgtcaggaagacaagtataaccggatggagcagaagaagcacagggctgcccaattcaaggcacaacagggcagtaaccagaggccgcgtctcgttactggacctcaagctccaccgtaccctcaaggaggatcttcatcagttgtctgcccccaacgccagttctacaacaacaatactggtaatcgtggcaatgacaaccgtaacacggttgctcgtcctgcagcaactccagctcagaaccagcccgttaggaaggaacagggaagcaagccagtgatatgcttcaattgtggtgatccaggacattatgctgataagtgtcctaagcctcggcgtgtgaagaatgccccaaccccgaacaactctaatgttccagcaccgaaggcacgtgttaatcatgttgcagcagcagaagctcagaatgcaccagatgtggttttgggtacgtttcctgttaactctatacccgcaactgtgctttttgattccggtgctacacattcatttttgtctaaaagttttgcgagcaatcatgggatggaagttattagtcttgggagacctttactagttaataccccaggcaaccaagtattttcgacccagtattgtccttccgctaccatagaaatagaagaagttcctttcccatcctcgcttatcttgctagaatccaaagatctagatgttatcttagggatggactggttatctcgtcacagaggagttatagattgtgccaaccgtaaggtgaccttaaccagtagcaatggggaaaccgtttctttctttgtgtcctctcctaaatatcatggtgtgatcttaaaccaagttgctctacaagagattcccatagtacaagactaccccgacgtgtttcccgaggatttgccaggtatgccacctaagagggacatagagtttcggatagacttggtacctggaaccaaccctatccataagagaccatacagaatggcagctaatgagttagctgaggtgaagagacaggtggatgatttgcttcagaaaggatacatcagacccagtacttcgccatggggagcaccagtcatctttgtggagaagaaagatcatactcagagaatgtgcgtggattatcgagcgttgaatgaggtcactatcaagaataagtatcctctacccagaattgatgacctgttcgatcaactggaaggtgctacagttttctccaagatagatctccgttccggatatcatcaacttcgaatccgtgaggaagatataccaaagaccgccttcacaactcggtatggtttgttcgaatgtaccgttatgtcgtttggactcactaatgccccagcctttttcatgaatctgatgaacaaggtgttcatggaatatctggataagtttgtcgtggtgtttattgatgacattcttatttactctaagacgaaggaagaacatgaagagcatcttcgtctagctttagagaaactacgtgagcattagctttatgccaagttcagtaaatgtgaattttggttgtccgaagtgaagtttcttggtcatgtcatctcgtgtggaggagtggcagtagatccaagcaatgtggagtcagtattaagttggaagcaacccaagacggtttcagaaattcgtagtttccttggacttgctgggtattactgcaggtttattgagaacttttcaaagatcgccagaccaatgactcgtctgcttcagaaggaagtgaagtacaagtggacagaggattgtgaacgaagtttccaagaactgaagaaaaggctagtgactgcgcctgtgttaattttgcctgattcgaggaaaggtttccaagtgtattgtgatgcatcccgactcggtttgggttgtgtgttgatgcaagaaggaaaggtggttgcctatgcatctaggcaattacgtcctcatgagaataactacccaacgcatgacctagaattggcagctgtggtgcatgcattgaagatttggcgtcattatcttttcggtaaccgtacagagatgtatacggatcataaaagtttgaagtacattttcactcaacctgatttgaacatgcgtcagcgaagatggttagagttgattaaagattatgatatggaaatccactatcacccggggaaagcaaatgttgtagccgatgcccttagcaggaaaagctactgtaatatgtcagaaggtcgacatttaccttgggagttatgccaagaatttgaaaggttgaatttgggaatagtcagcaaaggttttgtggccgctttggaagctcaacctactctgtttgatcaagtgagagaagctcaagtgaatgatcctgatatacaagaaattaaaaagaacatgagaagaggaaaagccatcggttttgtagaagatgagcaaggaactgtgtggttaggagaaagaatttgcgtcccagaaaataaggagttgaaggatactatcatgaaagaagctcatgaaactttgtattccattcaccctagaagcactaagatgtaccaagacttaaagcaacaattctggtgggccagtatgcgacgtgagatagcagaatatgtggcactatgtgatgtatgtcagcgggtcaaggcagaacatcagaaaccagctggtctgttacaaccgttgaagattccagagtggaagtgggaagaaataggaatggattttataaccggtctacctagaacgtcggcaggacatgattctatttgggtagtggttgatcggttgacaaaagtcgctcacttcataccggtcaaaacaacctatacggggaataagcttgcagagttatacatggccagagtggtatgtttgcatggtgttcctaagaagatagtgtcagatagaggtagccagtttacttcgaagttctggcagaaattacaattagaattgggtacccgtttgaatttcagtactgcttatcaccctcaaacagatggtcagacggaaagagtaaaccaaattttagaagatatgttgagagcctgtgttctagattttggtggaagttgggataagaatttgccgtacgcggaattctcatataacaatagttatcaagctagtttgcaaatggctccgtatgaagcattatatggtcgaaagtgccgtacgccgctcctttgggatcaaaccggtgaacgtcaagtcttcgggacagacatattgcgacaggcagaagaaaaagtgaagattatccaataaaggttgcacgttgctcagtcacgacagaagagctatgccgacaatcgtcgtagagatttggcttttgaagaaggagattatgtataccttcgggttacgccgttacgaggtgttcatcgtttccaaaccaaagggaaattggcaccgcgttttgtgggaccttttaagattgtgagtcgaagaggtgaagtagcttatcagttagagttgtctccgtcaatggcgggaatacacgacgtgttccacgtgtcacagttgaagaaatgtttatgtgtacctacggaggaagcagatccagatcgtatagagcttcaagaagatttaacttatgttgagaagccagtcagaattttggaatttccgacgttccggaggagagcgtttccgttgaggaag

SEQ ID NO: 20108 - DNA, 634 bp, Oryza sativa
  unsure (1)..(634): unsure at all n locations
  Clone ID: PAT_MRT4530_25506C.1
cttctttgatgtaggatccagtaaagtctatccatttcagtaattcaaaccctatgtgtcatgcttttgatccggatgctaaggatgggcatgacttacttattgggctgaattctggggatgtgtacacagtatcactgagacagcagttacaggacgtctctaagaagctagttggtgctctgcattataacaaggacggttctgtgaataacagtcgttgcactagtatttcttgggtgcctggaggtgatggagcatttgtcgttgctcatgccgatggcaatttgtatgtgtatgagaagaacaaagatggtgccactgaatcaacatttcctgctataagagatcctacacaattttcagttgacaaggcaaaatatagcaagagtaatcctgttgcgagatggcatatatgtcaaggttcaattaacagcattgcattctcaaatgatggggcacacttggcaactgttggaagagatggctatcttcgcatttttgacttcttaacccagaagctagtatgtggtggaaaaagttattatggtgctctgctgtgctgttcttggagtatggatggaaagtacattntgactggaggtgaagatgatttanttcaagtgtggagtat

SEQ ID NO: 20109 - DNA, 256 bp, Oryza sativa
  Clone ID: PAT_MRT4530_25507C.1
attcacaccttggacaaacacaatagatgtttttttaaaggaggaattcccttatttttttccacttttcacacattattcaaccaaattcatttattaaccttatcatttcattcattttccacctaacctttttaatgattttttttaatcactaaacactttacatccctttcccttctataacaaatacaacctatacccatattttctaatgtattgttataataatatatcttatattctacataatttt

SEQ ID NO: 20110 - DNA, 3735 bp, Oryza sativa
  Clone ID: PAT_MRT4530_25508C.1
atggaaattccgggcgtgacaagttggtatcagagccaccttgaccttaggataagccaaatgatgccgccccattcaccgagaaatttgatcgaggtgttaggattcgtcagggagttgaggttgatggcttttgaggtaggctatgaagttgctcccgagtatcgccaaatttcccatgaccccgacgaggagaagtgtcgtgttcgtgtgacattggctagtgatagtgaagaccttccgtcctttaagttcgaagttggaggaagatcgtactgccatgcttgtcaagaagtagctttggtggccattggagagttgcgacaacactttgaagaagagttggattcatcagctttccagtatcatcctcacaaggctcatggtcaagactatggaacctatacctgtcctgatggtgaagagagtgccactctgatgcatgtggtgcatatgcttagtgctatggatgcagtaagtgtggagcgagacaaagcagctcatgacagggaaaactggaatcaaggcaagatttgcaagttgaagagcaaggtgcaccgtctacagaaggaattagctgaacttaaaggagaaacgccgccgccaatatccaagcttcgcctcactgcaagaaagagaacctgtccgccacctcgtctccagttagcttcgaagattcgcgtgatgggtgaagctatgcccaatcgtgctgaacctgtcatcgacatcataagtgatgaggaagaagaggaagatcataaagaaagggagccagctactccagaggaagaagattcatcgtttcgttccgacgcaaggcggaattgttgcttacatcattggtgggatatggtgaacacgcgcaccggaagtggaagtggaagtggaagtggagctactaacaatggaggagaacccacgctagctcagattctggctcaacagacacaactgatcaacctgttagtgcagcaggcacagaatcagcaagcaaataatcagaaccagaatccacccccacctccccaaaataagctggcagatttcttacgtgtgagaccccctaccttttcaagcaccaccaatccagtagaagcaggagattggttgcatgcggtggagaagaagttggatttgatccagtgtactgagcaggagaaagtttcttttgcttcgcatcagttgcatggacccgctgctgaatggtgggatcattttcgccaaggcagggcgggaggagaacctattacttggcaggaattcacagctgcttttaagaagacgcatataccgtcaggtgttgtagctctaaagaagagagaatttagagcactcaaccagggatctcgttcggtcactgagtacctccatgattttaaccgtttagctcgctatgctccagaggatgttcgcaccgatgaagagcgtcaggagaagtttttagagggactaaatgatgagttgtcttatgctttgatggctacggatttccgggatttccaacaattggtggacaaggcgattcgtcaggaagacaagtataaccgtatagagcagaagaagcgcagggctgcccaatttaaggcacaacagggcagtaaccaaaggccgcgtctcattactggacctcaagctccatcgtaccctcaaggaggatcttcatctgttgcccgtccccaacgccagttctacaacaacaatactagtaatcgtggcaatgacaaccgcaatatggttgcttgtcctgcagcaactccagttcagaaccagcctgtcaggaaggaacagggaagcaagccagtgatatgctttaattgtggtgatccaggacattatgctgataagtgtcctaagcctcggcgtgtgaagaacgctccagtcccgaacaaccccaatgttccagcaccgaaggcacgtgttaatcatgttgcagcagcagaagctcagaatgcaccagatgttgttttgggtacgtttcctgttaactctatacccgcaactgtgctttttgattccggtgctacacattcctttttgtctaaaagttttgcaagcaaacatgggatggaagttgttagtcttgggagacctttactagttaataccccgggcaatcaggtattttcgacacagtattgtccttccgttactatagaaatagaagaagttcctttcccatcctctcttatcttgctagaatccaaagacctagatgttatcttagggatggattggttatctcgtcacagaggagttatagattgcgccaatcgtaaggtgactttaaccaatagcaatggggaaacagtttctttctttgcatcctctcctaaatctcatggtgtggtcttaaaccaagttgctctacaagagattcctatagtgcaagactacccagacgtgtttcccgaggatttgccaggtatgccacctaagagagacatagagtttcggatagacttggtacctggaaccaaccccatccataagagaccatacagaatggcagctaacgagttagctgaggtgaagaaacaggtggatgatttgcttcagaaaggatacatcagacccagtacttcgccgtggggagcaccagtcatctttgtggagaagaaagatcatactcaaagaatgtgtgtggattatcgagcgttgaatgaggttactatcaagaataaatatcctctacccagaattgatgacctgtttgatcaactcgaaggtgctacagttttctccaagatagatctccattctggatatcatcaacttcgaatccgtgaggaagatataccaaagaccgccttcacaactcggtatggtttgttcgaatgtaccgttatgtcgtttggactcactaatgccccagcctttttcatgaatctgatgaacaaggtgtttatggaatatttggataagtttgtcgtagtgtttattgatgacattcttatttactccaagacgaaggaagaacatgaagagcatcttcgtctagctttagagaaactacgtgagcatcagctttatgccaagttcagtaaatgtgaattttggttgtccgaagtaaagtttcttggtcatgtcatctcgtctggaggagtggcagtagatccaagcaatgtggagtcagtattaagttggaagcaacccaagacggtttcagaaattcgtagtttccttggacttgcagggtattaccgcaggtttattgagaacttttcaaagatcgccagaccaatgactcgtctgcttcagaaggaagtgaagtataagtggacggaggattgtgaacgaagtttccaagaactgaagaaaaggctagtgactgcgcctgtattaattttgcctgatacgaggaaaggtttccaagtgtattgtgatgcatcccgactcggtttgggttgtgtgttgatgcaagaaggaaaggtggttgcctatgcatctaggcaattacgtcctcatgagaataactacccaacgcatgacctggaattggcagctgtggtgcatgcattgaagatttggcgtcattatcttttcggtaaccgtacagagatatatacggatcataaaagtttgaagtacattttcactcaacctgatttgaacatgcgtcagcgaagatggttagagttgattaaagattatgatatggaaatccattatcacccggggaaagcaaatgttgtagccgatgcccttagcaggatgtcacgcccagcaattcactag

SEQ ID NO: 20111 - DNA, 544 bp, Oryza sativa
  Clone ID: PAT_MRT4530_25509C.1
agggctccaagttctgtactggagaaaaacaaaagatgctgtcctgccaagccaaagctccactggcgtaatggagactgaggtcctgcgagaacggacacctccaccggtacctatcagccaagtccccacacagcaggactgaacgcctgccttgccacgaaccgtctaactactaactggatccataccccatgttgcctagctagccatgaagaacaagacgcttctgaagaactcaacaggcatgcgtctccaaggaactgatggtgtagaaaactcttatctgataaactggcaggacgggcccaagatcctgatacttgtctgctactgctgagcagctggctcagtaatgatacctagctttcttttgccgtattcccgattatcagctgctttttgttagctcgctatacgactccgattataatatattcgacaatgccagaaaaaaacctaacggctaagacaacaagttgcacagaccatgtctggctataatgcgatgcgttccgcgcttattcaatgcggggtggagtac

SEQ ID NO: 20112 - DNA, 739 bp, Oryza sativa
  Clone ID: PAT_MRT4530_2550C.1
tcaacggaggcggcaggagaggacgcgacggcggtgtgcgggcggtggcggagcgcagggaggacgcggcggctgcgggcggcgccgagcggcgctgaggaggtggacgcggcggcaggggaggacacggcggcggcgggcggcgccgagcggcgcggggaggacgcggcggcggcggatggcgccaagcggtgctgaggagggggacgcggtggcaggggaggacacggcggcggcgggcggcgccgagcggcgaggggaggacccggcggcggcgagcggcgccgagcggcgcggggaggacgcggcggctgagggcggcgctgaggaagggggatgagggcggcggttgcggcaggtgatgcggctgcgggtggcggctgtagcaggtgacgcggctgcgggcggctgcggcaggtggcgccgaagaggggggatgaggacgatgacgacgaggatggcgcgcacggcggcggtggcggggtggggggaaggggggaagccgcgctgagcggccgccgccacctcctcggtgccgctcgccgccgccgcgtccttcccgcggtctatctctttccttgtaatggttgcgatgaagcctggaatgtatctggccggggctgacgtgccaactccaggagttaccacgccggctccggctagggacgagtgcctgaaggctctcatcatttcgacgggacggggcgaggcgtgtgacaggccgcctgctgccacctaa

SEQ ID NO: 20113 - DNA, 1443 bp, Oryza sativa
  Clone ID: PAT_MRT4530_25510C.1
atggcttccatggcaccaccttgcccaactccatggcttctgcaaacctcttatcattctggtcaacaaatttattcccaacaagttgttgatctcatgttacatgttttaatttcccttcttaatttgcattggcctgacactgacagcgagcaaggaggaggaggaggaggtggcgctgcctattttggagagctagaagaagctcttgttcatcaggttgccacactcaggaggagggctcaacaaactgcaaccaccaccacctctcaccatggacacaccactcccttctccactgctgctgctgcagctacagcaacagcaacagctaggcctcctgctacactggacatcttcccatcctggcctatgaggaggagctctcttccaacaccgaaggatggatgttcaaatgtaacggcagacacaacggactccgagagcagcagcaagaacaacggcgatcagggtgcagcagcagccgacatggcgagccagtttgatcagatcccacagcagcagcagaagcagcacaagaagatggcagcaagttccactcacagtgaccacaggatgacaaagacacttgatccaaagataatgagaaggttagcccagaaccgagaggcagcacgcaagagccggctgcgaaagaaggcttacatccagcagcttgagagcagcaagttgaggctggctcagatggagcaggatctcgagagagctcgttcccagggcctcttgctgggaggatcaccaggtggaaacaccagcgcaggagcggcgatgttcgacgccgagtacgggcggtggctggaggacggcgggcggcggatggcggagctgcacggcgggctacacgcgcacctgccggacggcgacctgagggcgatcgtcgacgacgccctggcccactacgacgagctcttccgcctgagggcagccgccgccaaggccgacgtgttccacctcatcactggcacgtgggccacccccgccgagcgctgcttcctctggatgggcggtttccaaccgtccgatctgctcaagacagtggcaccccagctagaccctctgactgaacagcaagtggttggcatctgcagccttcagcaatcatcgcagcaggcagaggaagctctctcccagggcctggagcagctgcatcagtcactagctgagaccgtcgccaatggcggctccgtggtcaacgaagccagccttgggagcttcatgggttacatggcccttgccctgggcaagctgtccaaccttgaaggctttgtcatacaggctgataacttgaggcaacagactcttcatcagatgcacagaattctgacaattaggcaggcagctcgatgtttcttggcaattggcgagtaccataatcgcctccgtgccctcagctccctctgggcttctcgtccccgagagtaa

SEQ ID NO: 20114 - DNA, 501 bp, Oryza sativa
  Clone ID: PAT_MRT4530_25511C.1
ccattcgccattcaggctgcgcaactgttgggaagggcgatcggtgcgggcctcttcgctattacgccagctggcgaaagggggatgtgctgcaaggcgattaagttgggagcccacaccatcgggcgggcgcagtgcgccaacttccgggacaggatctacaacgataccgacatcgacgcgtcgttcgcggcgtcgctgcgtgctggctgcccccagtccggcgacggcagcggcctcgcgccgctggacgagtcgtcgccggacgccttcgacaacggctacttcggcggcctcctctcccagcgcggcctgctccactccgaccaggcgctgttcgccggcggcgggggctccacggacggcctggtcaggagctacgcgtccagcaacgaccagttcgccagcgacttctcgacggcgatggtgaagatgggcaacattagcccgctgacggggtcggccggcgagatcagggtcaactgccgggcggtgaattaa

SEQ ID NO: 20115 - DNA, 517 bp, Oryza sativa
  Clone ID: PAT_MRT4530_25512C.1
atgcatcaccggttaaagccactgtcaactgggcgagggacgctgggcttcctactgcacatgacgggacagggcatacctagcccctcaccgcctgacacaagtcagcgcgtcggtgcaattccgcctgtcccatccatccatcgcctggtcatagaccggtcacagggtggtcgcaggcgcacgtcggtcggcctgcgccgcatgccacgccacgttgcattagatgtgacgggggtggtttccgcaccactcataagtgcgcctggcggatggtgctcacgcccgctcaaggctcccacatggacgccatgtggcggccgagcaagggcctcggggacggttcaacccctcgggcccgagaggtatgacgaggcccatgctgagcccgagtcgtattgtgatggcgggcttaaccatctgtcgacttgcttctccgagcttgcaatggcactctcatctgaaattccagagcaccctcaaagggtcaacttcacattgccgcgcgaatcacgaa

SEQ ID NO: 20116 - DNA, 144 bp, Oryza sativa
  Clone ID: PAT_MRT4530_25513C.1
atgtcgggtgatcaagccgacggcgtttacgaggaattatccgttgggtgcgataactccgcatttgtcgagaatgttctcgataatggagtgtacttgaccataacctacccgaaagagaacggagcgagcccccagcgttag

SEQ ID NO: 20117 - DNA, 308 bp, Oryza sativa
  unsure (1)..(308): unsure at all n locations
  Clone ID: PAT_MRT4530_25514C.1
cccacgcgtccgccacgcgtccgccacgcgtccgggtaggtctgagctgaggttgagagataagancagcaatggcgtccatgaccgggctgccgcacggcgtgcagctgccggccgggcccaggcgcgccggcggcaggtccaggctcgccgtcgtcagggccgacgccgccgtctccgacgtacacaccggacgtcgggcacagctaggcgtggtgttgcatattcatttgtaatctaagatagccttcctttgaatgcgatgtgatgatgcccactgtttaatcaaactgcattgtgattaatct

SEQ ID NO: 20118 - DNA, 504 bp, Oryza sativa
  Clone ID: PAT_MRT4530_25515C.1
atggttaggagctcaccagcaacgacgcgctcgggggaatgggtagccggccgcggcacgctcgcggggacgaggtcgccggccgccgccgctgtcacgggcctcggtgcaggcgtggggacgaggtcgccggccacggccgcgcgtgggtggagggggtcatcggccgtgcgcgggaacagggaggaggtcgccagcggcagccgcgcgcgggggaggagtgccggcgcggcgggcgtgccggcggccggcaggggaggagcgcggctgagaggagggctggcgcgacgggcggcggttggcgacgcggagcacgacgacgactcggggccgccgctcgcttgctcctgtcctgggggctggaagagcagcgcttgcgcactcagcgtggaggcagttggacttcggcgacgtcccgaggcgggcgaggacggcgccgcaggagctcctccagctccggccaccggcgtggtgctcgtgctccgcttccccggcattctctga

SEQ ID NO: 20119 - DNA, 241 bp, Oryza sativa
  unsure (1)..(241): unsure at all n locations
  Clone ID: PAT_MRT4530_25516C.1
gcgctctcctnaagcggtctgctcaaatccaaaccttttgtcaaaactcatattaatataaagtcatgtccactgggggtggtgttcaccctgcgaatattccatatcattaatggaacagaccacctggtgcaatgagtgctcaatctaatctatcttgccggcattataacttaaaaaaaaccaattcatgcggacaatttgcgctggtggaacaacaattttactatcaggacattaa

SEQ ID NO: 20120 - DNA, 2279 bp, Oryza sativa
  Clone ID: PAT_MRT4530_25517C.1
gccgaggccgcggcccgcaagatgcgcgcgccgcggctcccgcccgcgcgcctcccctcgtcaccccgcccctcccgtttcaccaccaccgtctccgatcctaccgcccaacatctcgcctcgccgagaatttcccaaacgaggaagacgggaaaaggagttcatccccatggcggccaaccccccctccccgtgggcgggcggcggcggcgacgtgtcggcgctcccgcccgaagcgcccgccggtgcggtactcagctggacacccggcctcggcggccgccgaccccccacccgcccggcccccccgctgccccgccgccgcgggcggcgacgccgccggccacggcgccctccccgcctccgcccaccccggcggcgctgtcgccgccgaccctggctccggagtccacagcctccgctgccgaggcggacgtcgatgcctcctccgcgtgcgagaccaacgacgttgccgccgcagtcacggccgcctacatcgaccacaggacccacgcgtactacagccggcggttgtacgcggagccttggacgccaggccgccctaggaccgagatcgctggaccagctctgggcgccgccccacctgtaagatcctttccatgacgaggttttggacggtatgggctgagttgttgtgtgccgtacagagccaactggggtgctgactatcatgtaccatgaccgtgaacagttttccaatccagttttttttcccatgctcaaaagaacccagggattcagtacctcacccaggtgctcgcaaagggagactcgggagagtcacccagccttgcgtgcaccagggtgtctgccccgtcggggtcgtgcgctagcctgaggatggtcgggccgctgggggtgggcagggcgtgggggatgagctccgcacggtgcctgaggatgaacccgtctaccatgaagctcccgagggtcagaaagaaaattgaggtgaaaagagacgcatccagatcacaaggagagcgtgcgacttgctaatgccgatccctgtgtaactgtgtggtcgcttctatgttctgctccgcgatgcatttcgagcatgtatcagacttgtagatcgttgccctttgctgccatttgcttcctgagagatatttattatgttgtccggaggagaataatctatttctgaaagaattgtagctgttgtatgggcgtttcatgcacgccccatgggaaatcatccccccacttgggtccattggcttgcctggccaatgtggccctgctgtaaaaaaaaaaaaaaaaatctccgccgtttgcccctcgcatgtacctgctgcgtcggccaagtagccgttctcccacgtctccggcggcgcgtccgtggcgccgatcgccgccatgagcggcagcaggtagctgacggcgatgagcaccaccgccaccgcgagcgcccgcgggaacgtccgctccggccgctccacctcgccggccatggtgctcgcgctgtcccagtagttgaggttccagaagagcgtgttgaagaagagcctccagtctctcttccccttcacctgcacccgcgccgcccaccgccgcggccgcgtcctcggcgccgccatcgccgtcatcagcacgaacggcgccagcgacacgaaccccagggccaccgcgccccacccgacaatgcttaggccgcccaagttgaggaaggagaggaagacggtcatgccgagcaccgtgcccgtgcgcgccctgcttcccgggacggcgaccgccggggcgacgcggccgaggtagtcggcgacgagggccgggaacgcggcgaggttgatgacgcagctgaggtacttccacgtgccgagcagggagccggcgagcgggccgaaggcgcggtcggcccagacgacgaagccgccgttccccgggagcgcggcggcgagctctgcggtgacgagcgacaccgggacgccccacgcgaaggggaaggcgaggaagccgagcagcgcgaacagcgggcccgccgcgctcacggcctgctcggcgccgtacgggccgccggccacctcgaagtagatgaagaagacgagcgggagtagcgtgagcttggtctggtggtggcgttcggctgtcgcgccgccgcagccatgcctggcgacagctgcttggtgcccttgctgttcatcatcttgtggcgtcgccggcgccggcgccggtgcggtggcgccgccatgttcttgtgcttgttgctgtcgctgcggcgatggcctctggttcagttggatttcttggtccat

SEQ ID NO: 20121 - DNA, 516 bp, Oryza sativa
  Clone ID: PAT_MRT4530_25518C.1
atgggttggggattcctgacctcaggttggcaggatttgccatgcgtgttcgctggctctggcttcagtgctcagggcacccctactggcagggacgaagctagcatcaaaacaaggggggatggcctgaaggccccagttgagcaatccgtctctgacatgttcgcggcatctactttcatcatgctgggaaatgcatctccgaggtttgagcacggttgcttctggcctggtgaacaacttcactcgccgggtgtcgaggattgtctcgtttggcgttggatgtctgaccagcggttcttcctttggtttacattccagcaatgccgctggacggctgatctcctccagaagcatggcatcgaccggtggctgtcctccagggcctgcttacgtgagcatctccgcgccggctttgactctctggtgctcctgctggcgttgttgccgcttttgggatctgttgggagtgtagcatggctcggccccttctcgctgcttggagtttgtgtttag

SEQ ID NO: 20122 - DNA, 536 bp, Oryza sativa
  Clone ID: PAT_MRT4530_25519C.1
acccgatcggaagcggcccggctccttctactacgacggcgccaccggcggcgtaaataggagaagatggtcgtactcgataccttcctctttaccttggagtatgtgaacgagggccaccctgacaagctatgagaccaagtgttaatgctgcgcttgatgcctgccttaccaaggaccctgacagcaaggagcgtttgagagacctgcaccaagacaaacatggacatggtctttggggagaccaccaccaagggtaacgttgactaatgataagattggcagggagacatgccggaacatcggatttgtgtcaggtgatgaaaagctaaatgctgaccactggaaggtgcttgtgaacattgagcagcaaccctctgacattgcacagggggtgcacggacacttgaccaagtgccctgaagagagtggagctggtgaccagggacacatggtagaatatgcaactgatgagacccgtgcattgatgcccctgaggcatgtgcttgctaccaagattggcgctcgtcttacgg

SEQ ID NO: 20123 - DNA, 2478 bp, Oryza sativa
  Clone ID: PAT_MRT4530_2551C.1
atgcctatatatgccgacgccaccccggggagttggagcagatcgccctgccggcggcggtgcagaagggcggcgccgccgctggccgacgtgccggaggtggacctgggcggcggcgcctgcagggcggacgcggcgcgcgcggtggtggcggcgtgcgagggacacgggttcttcaaggaaacaaaacacgccgtgccggggagcccgttcgggtacgggagcaagaggatcggctgcaacggggacctcgggtgggtcgagtacctcctgctcggcgtcgccgccgccgccgccgcgccattgcccgcgcacggcgaggcgtcgccgtcgccgtcgtacggctcgttccgcgatatcttaaatgagtacgttgtggcggtgagagcgatgatgtgggaggtgctaaagttaatggcggaagggctaggcctgaaggagaaagatgcgttggttaggctggtctcacacgaggagagtgactccgtgctgagggtgaaccactacccaccacaccctgagttgaagcagcaaggccatggtaggttaaccgggtttggagagcacaccgaccctcagatcatctcggtgctccgatccaacgacacctctggccttgagatctctttgcgtgatggtagctgggcttctgtgcctccggatcgaaagtcgttcttcgttaatgttggagatgtcttacagccaggtggtagaattaaattagaggaactgcaaggttttcttcatgccgtgtcgctccgctccagggcaacacgggaggcgacccgaagccgccccgccgccggccttctctccctcgcctcccccacctcgccgccgcctgagcagccgccggcaaagccggacggcggcaaggacggcggcggcggggccttctaccccctccaacaccctgcggttggggccccgacgggaaacaggcggaggggcggcgacgcgtcgaggcggctccggcgacgccgacggccagaggcagcagagccagcgtcgctgttagcggatctggccccctcgcagccagatcgggacgaagtggcgccggccgcgctgcatcaggacgaggcgctggctggggcagtcgtggcgccggcggagaaggccgctggatggggcagtcgcggcgcgggcggaggcgacgtcgctggcggcggggacgaggcagcgagcctgggcgccgctggatctggctctcccaggccggatccaacgcccgcagctgggccacgaaggaggccggctccggggcggcggcggcggcgatgacgacgagacggcggaggcggcgctgacggcgggagaggcatgggcctggctacgcacagcgcctccggctatggctccccctatttcgacaccggctcccccagtccggatttggcctctctggcgagggaggccggatcccctccggtggctcctcagctgtggacgacgcgacaagggcagcggtcagagggcagcaggaggcgtgggtggccgcggcaggagggcgagtgctgcggctggtctggcgatctgccagagctgtgggtgatggcctaggactgattgctaaagggacgatgcagccgaccggcgacgatcattcttgcgcgaattgggtgtgtgggtttggacgggaaatcgctggcgaaagcctcgccgtgccattggccggctgacgacggcggcgcctttggcgtcgttcccctccttggaggcgtcgttctggcgttgatccctctcctttccctaccgttctccgagtgaaaacctggctccggcttccggacgagcggtgacggagatccacgtcgtgtcctccttggaggcaccgctttggagaaacattttcgtgcaaggatgtagttaatggtctatgcattggcttcgaagcttttcagtacttggttttgatgaggccttcgctgtctagtcccactttttgttttgcggcgggcaatcttcgctccttgcttgtgtttgctaggtgaagtcggagctgcttcgtagggtgacgaagctgggcaacgatgacacgttgcattctctttttaggggttttgtttgttggccgtgaataggatgtggcgtttagacggctttggctgaagttcttcgtgggaagttgaagccacttgaccattgacagcgagttaggtatggatgatgcaaccgatttgaagtcggagctgctgtgtcgctaggcggcaagctcggcaacaatgacacggttgcaaggtcggaacccctttgccgtcttggtcaagcttggtaacgacgttctatgttgggctccgtcagtggtttctgttgttagtgagttgtggcgtgtgcggtgcagctattcagccagccggtagttgttttttcttttcttgtaacccgtctagggtttttactcctgcttattgaaaatataattggcagttctcctgccggtttagtttccaaaaaaaaaaaaaaaaaaaaaaaaaa

SEQ ID NO: 20124 - DNA, 681 bp, Oryza sativa
  unsure (1)..(681): unsure at all n locations
  Clone ID: PAT_MRT4530_25520C.1
gtttccgccgccgccgccgcctccgcctccgcacggccgagcagcggcgagcagccgccggcgtcctgctgcttcctactccgcatcctcgcaacgccggtttttcatcgtttgattgttggagaagaaggagaagaaccgtgttaatctgatctgaccgaagcgagtttgggattatggcgtattacgccaggaggggtggggatagggttagtggtggagtncgcgtgaatcttttgtgccatcccacagtagatcgttggtcaggagagtatgaagtttctatatgggagaaagagatgagacactggccccttggcctcggggttaactcgcggccatcagcgcgcactattgctaagtcttttagcagaaccaaagacatgacctggagacctgatctgtttagtgatagtatggcagctagtggaattgaaactggtacaaaattgtacatttcaaacttggactatggggtttccaatgaggatataaaggagctgttttcagaagttggtcacttgaagcgctttgctgttcactttgatggttatgggcgcccaaatggcacagcagaagtggtgtttactaggagaagtgatgcaattgctgcattgaaacgttacaataatgttctgcttgatggtaaagctatgaagatagaagttattggaagtgact

SEQ ID NO: 20125 - DNA, 1138 bp, Oryza sativa
  Clone ID: PAT_MRT4530_25521C.1
cggtccatcgccctccgtccccatccccaccgtcaccgaagcgacgcgacgcgacgcgactgctgcttgggatttgattagttgtgttgagagatggccacaccgcaactgctgctacgccgcgccttctcctcctccttcctctcctccccattccgccgcccgccactccaccccgcccgctccttcgttcccccccgcgccgccatggcatcctccgccgcgccgttccacatggtccagatccagcgcgacgacacgacttttgatgcctatgttgttggaaaagagaatgctcctggaattgttgttttgcaagagtggtggggggttgactatgagatcaagaatcatgctgtccacatttcccaaattggtgaaggatacagagctctcattccagatttgtatcgtggtaaggttgctcttgatgtagcggaagctcagcatctgatggaaggtctagactggccgggtgcggtcaaggatattcaggcttcagttaaatggctcaaggcaaatggatcacccaaggttggtgttactggatattgcatgggaggcgctttgtcaattgcaagtggagtttcagtcccagaggttgatgctgttgtggctttctatgggacaccaccttctgagcttgccgatgcttccaaggcccaggctcccatccaggctcattttggggagcttgacagttttgttggatttgcagatgtcacggcagccaagtcgctggaggagaagctcaagtcatctggcgtgccacatgaagtccacatctaccctggctgctcgcatgcttttatgaacacatcacctgaggccgtcaagaggaggaaggagatgggtctgactgatgagaaccaggcagcaattgacctggcctggtctcgcttctcgacttggatgggtcgtttccttggatcggcgtgagccatttacgcatatatgttgtcaacctgtcaggttgtatgaataaaatcattcaggccagatgcagagtaattaagtatacccaaaccaaataattgtgctgtgttggactatgtgaacatgccatgctttggtttgcgaattatctgtggttttactgtgctttaaaaaaaaaaaaaaaaaaaaaaaagccaaaaaa

SEQ ID NO: 20126 - DNA, 211 bp, Oryza sativa
  Clone ID: PAT_MRT4530_25522C.1
aaaatatcaatcatgacattccttttcttttttgttgcaaaacggtgtcgatacatcagtaattcaatatgttacaaaagaatgcaacaataaataacagaactacaaaattgttgtctcatgatcctgaagtactgctggtgcatatcgttgttaacagcacgcagacgccttgtagctttaccctgaatccctgagtccatgacagacg

SEQ ID NO: 20127 - DNA, 554 bp, Oryza sativa
  Clone ID: PAT_MRT4530_25523C.1
cacggatacagatacagacacgcgcactccattcgcctcccctccgaaacgagtccgaaacggagagctaagccaagaaaacccagatcgccgccggcgcaaccgcgccgagccgagccatggaccaccgtacctacaagggcggcgtcaaggcgtactggaagcaccgcggctactaccgcctcgacgccgccgcggcgcagcgccgcgcgccgctccccaccgcggagctcggaggaggagcccggcgtggcggcgcagccaccgcaggagcctcgccgcgcgcggcgccaccgcgggtggcgcagtgcggcgcgggctcgggaggcgggtgctgcgggcagctgtcgccgcggcggtggctcgtgcgcctccgggacgcctacgtctcggccatgctgcggctggcgtcgtccccggccgtcgggttcggcgccggcgcgccctactgcaccgcgggccaggagtccttcgcgcgccgctctagaggatccaagcttacgtacgcgtgcatgcgacgtcatagctcttctatagtgtcacctaattcatct

SEQ ID NO: 20128 - DNA, 165 bp, Oryza sativa
  Clone ID: PAT_MRT4530_25524C.1
atggtggaccgcttcggctgcaaccgcctcgacgccgcgctcatcgactgcatcgctcacctcacctcccgcctgccgcatcgcttcctccgccgcgggatcttcttcgctcaccgggcggcaaggggctcagatgcaaaaaagtacgagccaaatgctctttag

SEQ ID NO: 20129 - DNA, 730 bp, Oryza sativa
  Clone ID: PAT_MRT4530_25525C.1
gccggaattcccgggtcgacccacgcgtccgctgcaacagtaggactggacttggtctgtgggctgtaatcccttatctattacttcaaaaggctggcaactttcggagtttcaacgtgatgttattgctcgtaactacatcattactgcagtggaggaatctatacaaatcatcaattcagcaattcaacaattgattacagaaaggacaagtatccttataattttgctttttttaatctaatacgctcgagagctgcatatcatttcattaaagaagagaaccgtatgagtctggaaaccttacaaaaaaatagcaacaaacaattgcgccacggactattttgctggacaaaactaagaacaaaattttgctgtttcattattcaaattccggacaatttaatgtttgttgggaatcatgttgttttttttgaaaaagataacagagatggatcaactttatgtatgtgtcatgtttccatgtgaactagctgaatctttgaagagcatgacttttacactagttgatttttacattccaaaatttttactatgtaaagacatcagctagtagataattaaaatgacccctatgtcgatagtcctccgactggtatttatagtgtaggttggtgggttgaacctcaaccaagaacaggttaatgtcttctggtaaaagttgggttttaccattaagtagatgaaaagccacagcctattagttcat

SEQ ID NO: 20130 - DNA, 734 bp, Oryza sativa
  Clone ID: PAT_MRT4530_25526C.1
acttttcatcacccccttacactaaactttgcaaagtgagacctcctttcgtctcatggaaatgcctcatcttgctgcttttcttcctgccccaatggagctcggcgccggtgcagccactgctgctgctgctacgacctcctggctagcatctgagaatccaagagaggaaacgttggagggaaatgagcctcacagataggagaagagctggcgagcatcttgtattcgagctctcaccacgatctctccttctgctctagctacatttggagcatgatgggggcaaacggccggtgtgagcgtgtggggaattgaggcgtcatggtccgagatatataaatatctctaggtatcttaattaattagcttattattattagttctagattactctcgatgttttcttttgtttctgtttttttttctggtgtattgagaggctgtaagtgacgcattcttggtatggagcttgtttgtgatgttcagacatcttaacagccttcttgagtaacatagtgtgaagagttggagagagtctttaagcctagaatgcatcatttacactttgtaatgcatgtaatcttccttttttcccccgatttcctcgtttctgtctctgcctattgtattctactagtattgttacttagtaggaacttgaatctgtatctatatatgccgattttatatttgaacttactgaataaaaaaaaaaaaaaaaaaaaaaaaaa

SEQ ID NO: 20131 - DNA, 359 bp, Oryza sativa
  Clone ID: PAT_MRT4530_25527C.1
gttgggcttgatgacttaaaaggcctcaggaatgtgtagtcacttattatgagatattgtgacatcatagcagattcaggtatcacacacttatcagatctgacagatgtgaaagaattgctattggcttgatgtagaaacactgatctggctgttaatgatcttagaggcttgtccaagctaacacagatgaatgcggagggctgcccaaagactgctgcctgtaaggaagctatatcaggataggctagtgtggtggtgctgaacatgagtcagtgtggcatcatcagtggaagcagagaaaactatccaggtgatgacatagaggaggaccctaacatgggagcagctcctgttgc

SEQ ID NO: 20132 - DNA, 2685 bp, Oryza sativa
  Clone ID: PAT_MRT4530_25528C.1
gttcgagccggtcatcttacagactaaaaatccattatttttccagtatttacacaactccgttgcagctgagcttgctgccgttacaacgatcggtagccctatacaacaaatcgatccgtaatacgcctacgtcgccatacgttacgtacaccggacacgtactctgagtgcattctactctcgtcgaacacgagcagagaagctgctgattttgctgctcaattcgatccactacacgacggccttcgctggcggtatcacgatcgggctcctcacgacgtgctcgtcggagacccacttgaggttcccctcgacgccggcgacggccggctgccctgcccaccgcacggtcaccgtgaagctctgcttctcgtacgccctggagaagcgcagcaatggcgggtgcacggtgaccgcgacgttcttgggcatgtccaccacgcggggccacaaggagtcgcccttcccgacgttgtccacgctggggtggcagtggaccggatgggtgagcagatccccgaccaggcaggggaggtcagacgccgccccggtggccgccttgagtccggctgggtggtatgccgctcgacggcctttcacttccggagctgtgcggcacagctggaggtggtatcagtccgtccctggtggcgggaagcaggagaggctgacgccgtcggcgaactcggtgtgcatctcgccaggggcccacgcggcgaggatgttcatgccgggcccggtgatgtcaggcttcagaacgcccgggctggccttgttcggcccccgggacgagaagaacgcgacggacggcgccggcgacgaccccatcaccgtccccttgaatgtgacgctcgccgtcggcttgggagtggacttgatgtaggacaggatctttgacccggcggcgtagctcacatgcgacgccggcagcacgtgcgcgtcggcgaatgtggtgtatccttcgaccggcttgttcatcaggatcatgccggcgccgccgtacgcggacacggtctgtccctgctcgacgtgctcgacaatgctgcggctctcgcagagcaccaccttgccgctcacctcctcttcgaccagcgtgctgcagtctcgtgagtcggagtcgccgttcaggcccgggaacaccagcgggagctggcgcccggcggtgttgttccgcggctggtacagggactcgccgtcgaacacctggccgttgccgagcgtcaccgtggtgcgtatcgcccggtccatggtgccggccgcgaccgtgagcatccatggcgcgccgttgcccacggtggcggcgactgggccatcattgccagcggcggagctgacaaagatgccatgctccatggccttgaacgtggcgatggcgacgaggtcgtagttgaacggcgcaccgggggacgcgccgatggagaacgagagcacgtcgacgccgtccttgacggcggcgtccagcccggcgatgatgtccatgatggagcaccggctcctggtgcacaccttgtatatggccaggtgcgcgtgcggcgccatcccggacgccgtgccatgggcgttgccgcggacgtcggcattctcgacgaagttgcccgcggccgtgctcgccgtatgcgtgccgtgccccgcgtcgtccaccggcggcgccgtcgcattgaccgcggcgctgccgaaggcgcgcgcgccgatgatcttgttgttgcatccgccgccggagatggccttgaactcgcaggtgcccttccacttcttgggcggcggcggcatcccggcgtcgccgaacgacgggtggccggagcggctccagaacccatcattgccgaggtgaagcccaaggaaccccggcgaatgggtggtcgccaacggcaagaactcctcggggtacagtctgatgcacccctccttcttcctcatcgcctcagcctcgtcgtcggtgagctgcgcggcgaacccggacagcacgtggctgtacgagtaaatgatcctcgggccatcatcccccgccgcctccggcgtggcctccggcaagaacgagcggtgccacagctcgaccgagtcggcgacgccgccgtcctccctcgggtcgagatgaaccacgtagttcttcctctcccgcgcgcaggagacaacggccagcatcgtgctcccggtgagcagggtgaccgttggatcagaaaacgatgggttcatggcctttcctctaaagaagcccgggcttggagctggaggtggagttactttccggtgaagtccatggatgtcgtatggactccccacgatttcctccgcggctatggcagtgacttgtgaagcagacgtcagtggagcgagctgtatgcgcgccactgagccacagagccaatgctgggcggtaactagctccagtggaagtgcaggggcggcaatgccgatgattcgaatccgcgtcgctcccgtggatcgctggccgtttgttggccaaggagcctgccttatcgaacaatgctcccacagctcgacgtggaaaagagaattccgatgtgtcccaacacatgcgtagatatactggatagatactccagggagatgagctgctgatactgcctgcaccagctgtggttggtactggtaagccaggtcgcacgcttgcttgctgcttgcggccatatttatatccgccagctgactttgatcctccat

SEQ ID NO: 20133 - DNA, 509 bp, Oryza sativa
  Clone ID: PAT_MRT4530_25529C.1
ggcagcgccgcggtcaatgcgacggcgccgccggtggacgacgcggggcacggcacgcatacggcgagcacggccgcgggcaacttcgtcgagaatgccgacgtccgcggcaacgcccatggcacggcgtccgggatggcgccgcacgcgcacctggccatatacaaggtgtgcaccaggagccggtgctccatcatggacatcatcgccgggctggacgccgccgtcaaggacggcgtcgacgtgctctcgttctccatcggcgcgtcccccggtgcgccgttcaactacgacggcgtgaaggagataacccaccgccgcgtctcctgcgccaagctcaaggccatcaccgaggcggagctcaactacccgtcgctggtggtgaagctgctgtcccagccgatcaccgtccaccgcatcgtgaccaacgtcgggaaggccaactccgtgtacaccgccgtggtggacatgcccaagaacagtcgcggtcaccgtgcacccgccattgg

SEQ ID NO: 20134 - DNA, 1134 bp, Oryza sativa
  Clone ID: PAT_MRT4530_2552C.1
atggaggcaatgaagaattttgtcaaaggtcttcaagatgtgtttggtgagaggtatcttaggcgccccaccatggaagataccgaacggcttctccaacttggtgagaaacgtggttttcctggaatgttcggcagcattgactgcatgcactggcattgggaaagatgcccagtagcatggaaggcgggttccaacaatgatatcaatgtattgaaccaatctactgtatttatcaaggagctcaaaggacaagctcctagagtccagtacatgggtatattttacccggcctctacatccaaccagatatatacggtggctgttgttactaaaggccctgtttacatctccgcagtgcactgccccatagtgagtggtggtgccctcccctcaccgcgaatggtagcggcggcatcctccctaccctcaagatccggcgaagccctcccatggcttccagctgtgggatcctgcggtgatgaaggtgtcggtggcttcccgggaggggggggggctattcctgcggtgacaacggtgtcggcggcttcccacggagacctcgtcggagcggtcgattccacgacgaccaatgaatcgagcaggaggaccacatggctgggggcgtggcggctccggccggacctcgtcggagcaacgtgctccgcggccgacaaatcgaccacacacggatgtaggggatgccgacagtgcgacggaaggagatgggaagttgcctatttgccttgccaaggcagcagcatatggcgcaccggcaaggcaatcggcttggctgtcaatgcgacgaaggaggcaatcggcttggctgtcaacttcaacaagtgttccatcactctacttcactattccaaggcacaggttgcagaggttacagagttgttgggttgtccggtgaagcagctccctatcgtctacctcaggctccccctctcgggcgacgagaacgcagcaggcggttgcagcctcatcgcttgcaacaagctgtgtctcccgtttggcaatggggggctaggtatcaaggatctgcagctcatggtcagggatatgtgttctaggcaattggaagactccttgctccccttatcacctgaggcatatgctgatcttcaatag

SEQ ID NO: 20135 - DNA, 666 bp, Oryza sativa
  Clone ID: PAT_MRT4530_25530C.1
gcgaaggcgcgcgcgccgatgatctgttgcatcatccgccgcagagatccttgaactcgcaggtgcccttccacttcttgggcggcggcggcatcccggcgtcgccgaacgacgggtggctgggcaaaataccggtgtcaggagcccaatcaccacgccccggccgaacccggagcggctccagaacccatcattgccgaggtgaagcccaaggaaccccggcgaatgggtggtcgccaacggcaagaactcctcggggtacagtctgatgcacccctccttcttcctcatcgcctcagcctcgtcgtcggtgagctgcgcggcgaacccggacagcacgtggctgtacgagtaaatgatcctcgggccatcatcccccgccgcctccggcgtggcctccggcaagaacgagcggtgccacagctcgaccgagtcggcgacgccgccgtcctccctcgggtcgagatgaaccacgtagttcttcctctcccgcgcgcaggagacaacggccagcatcgctgaggaaacaaccatggacactactacggcgaggaggattcgttgagtcctcatgatgtacactggttggatgctggctcagtggctctcacttgcgacttgtgagtaaaaactggagctgatatgatttgaacaatggtgatgcga

SEQ ID NO: 20136 - DNA, 3711 bp, Oryza sativa
  Clone ID: PAT_MRT4530_25531C.1
gtgacaagttggtatcagagccaccttgaccttaggataagccaaatgatgccgccacattcaccgagaaatttgatcgaggtgttaggattcgtcagggagctgaggttgatggcttttgaggtaggctatgaagttgctcccgagtatcgccaaatttcccatgaccccgacgaagagaagtgtcgtgttcgtgtgacgttggctagtgatcgtgaagaccttctgtccattaagtttgaagctggaggaagatcgtacagccatgcttgtcaagaagtagctttggtggccattggagagttgcgtcaacgttttgaagaagagttggattcatcagctttccagtatcatcctcacaagcctcatggtcaagactatggaacctatatctgtcctgatggtgaagagagtgccactctgatgcatgcggtgcatatgcttagtgctatggatgcagtaagtgtggagcgagacaaagcagctcatgacagggaaaactggaatcgaggcaagatttgcaagttggagagcaaggtgtaccgtctacagaacgaattagctgaacttaaaggagaaacgccgccgccaacacccaagcttcgcgtcacactaagaaagagaacctgtccgccacctcgtctccagttagcttcgaagattcgcgtgatgggtgaagctgtgcccgatcgtgctgaacctgtcatcgacatcataagtgatgaggaagaggaggaagaccctgaagaaagagagccagctactccagaggaagaagatccatcgcttcgttccgacgcaaggcgcaccaccaatccagtagaagcaggagattggctgcatgcggtggagaagaagttggacttgatccagtgtactgagcaggagaaagtttcttttgcttcgcatcagttgcatggacctgctgctgaatggtgggatcattttcgccaaggcagggctgaaggagagcctattacgtggcaggagttcacggccgctttcaagaagacgcacataccagcgggtgtcgtagctctaaagaagagagaatttagagcactcaaccagagatctcgttcggtcactgagtacctccatgatttcaaccgtttagctcgttatgctccggaagatgttcgcaccgatgaagagcgtcaggagaagttcttggagggactaaatgatgagttgtcttatgctttgatgtctacggatttccgggatttccagcagttggtggacaaggcgattcgtcaggaagacaagtataaccggatggagcagaagaagcgcagggctgcccaattcaaggcacaacagggcagtaaccagagaccgcgactcgttactggacctcaagctccatcgtaccctcaagtaggatcttcatcagttgtccgtccccaacgccagttctacaacaacaatactggtaatcgtggcaatgacaaccgcaacatggttgctcgtcctgcagcaacttcagctcagaatcagcccgtcaggaaggaacagggaagcaagccagtgatatgcttcaattgtggtgacccaggacattatgctgataagtgtcctaagcctcggcgcgtgaagaacgctccagccccgaacaactccaatgttccagtaccgaaggcacgtgttaatcatgttgcagcagtagaagctcagaatgcaccagatgttgttttgggtacgtttcctgttaactctatacccgcaactgtgctttttgattccggtgctacacattcctttttgtctaaaagttttgcgagcaatcatgggatggaagttattagtcttgggagacctttactagttaataccccaggtaatcaagtattttcgacacagtattgtccttctgttactatagaaatagaagaagttcctttcccatcctcgcttatcttgctagaatccaaagatctagatgttatcctagggatggactggttatctcgtcacagaggagttatagattgtgccaaccgtaaggtgactttaaccagtagcaatggggaaactgtttctttctttgcgtcctctcctaaatctcatggtgtgaccttgaaccaagttgttctacaagagatacctatagtacaagactacccagacgtgtttcccgaggatttgccaggtatgccacctaagagagacatagagtttcggatagacttggtacctggaacaaaccctatccataagagaccatacagaatggcagctaatgagttagctgacgtgaagagacaggtggatgatttgcttcagaaaggatacattagacccagtacttcgccatggggagcaccagtcatctttgtggagaagaaagatcatacttagagaatgtgcgtggattatcgagcgttgaatgaggtcactatcaagaataaggatcctctacccagaattgatgacctgtttgatcaattgaaaggtgctacagttttctccaagatagatctccgttctggatatcatcaacttcgaatccgtgaggaagatataccaaagaccgccttcacaactcggtatggtttgttcgaatgtaccgttatgtcatttggactcactaatgccccagcctttttcatgaatctgatgaacaaggtgtttatggaatatctggataagtttgtcgtggtgtttattgatgacattcttatttactccaagacgaaggaagaacatgaagagcatcttcgtctagctttagagaaactacgtgagcatcagctttatgccaagttcagtaaatgtgaattttggttgtccgaagtgaagtttctttgtcatgtcatctcgtctggaggagtggcagtagatccaagcaatgtggagtcagtgttaagttggaagcaacccaagacggtttcagaatttcgtagtttccttggacttgctgggtattaccgcagttttattgagaacttttcaaagatcgccagaccaatgactcgtctgcttcagaaggaagtgaagtacaagtggacggatgattgtgaacaaagtttctaagaactgaagaaaaggctagtgactgcgcctgtgttaattttgcctgattcgaggaaaggtttccaagtgtattgtgatgcatcccgactcggtttgggttgtgtgttgatgcaagaaggaaaggtggttgcctatgcatctaggcaattacgtcctcatgagaataactatcctacgcatgacctagagttggcagctgtggtgcatgcattgaagatttggcgtcattatcttttcggtaaccgtacagagatgtatacggatcataaaagtttgaagtacattttcactcaacctgacttgaacatgcgtcagcgaagatggttagaattgattaaagactatgatatggaaatccactatcacccggggaaagcaaatgttgtagccgatgcccttagcaggaaaagctactgtaatatgtcagaaggtcgacgtttaccttgggagttatgccaagaatttgaaaacttgaacttgggaatagtcaacaaaggttttgtggccgctttacaagctaaacctactctgtttgatcaagttagatgtcacgcccggaaattcactagtaatttccgaactaaaggaatcgaatcgggaagaaatcgaactcggtttttttagggataaaacaaaacgagttcgattcggatccaaacctccacgattcgtttt

SEQ ID NO: 20137 - DNA, 5334 bp, Oryza sativa
  Clone ID: PAT_MRT4530_25532C.1
atggttcctggtttggaatggttagttcctggtctggaggttatatttgttcaactggggttggttgttcaaatgtggctgggcctatgcaacatggaaattccgggcgtgacaagttggtatcagagccaccttgaccttaggataagccaaatgatgcctcgccattcaccgagaaatttgatcgaggtgttaggattcgtcagggagctgaggttgatggcttttgaagtaggctatgaggttgctcctgagtatcgtcagattccccatgaccccgacgaggagaagtgtcgtgttcgtgtgacgttggctagtgatagtgaagaccttccatcttttaagtttgaagctggaggaagatcgtactgccatgcttgtcaagaagtagctttggtggccattggagagttgcgacaacactttgaagaagagttggattcatcagctttccagtatcatcctcataagcctcatggtcaagactatggaacctatatctgtcctgatggtgaagagagtgctactctgatgcatgcggtgcatatgcttagtgctatggatgcagtaagtgtggagcgagacaaagcagctcatgaccgggaaaattggaatcgaggcaagatttgcaagttggagagcaaggtgtaccgtctacagaaggaattagctgaacttaaaggagaaatgccgccgccaacacccaagcttcgtctcgtcgcaagaaagagaacctgtccgccacctcgtctccagttagcttcgaagattcgcgtgatgggtgaagctgtgcccgatcgtgctgaacctgtcatcgacatcataagtgatgaggaagaggaggaagatcctgaagaaagagagccagctactccagaggaagaagattcatcgcttcgttccgacgcaagttgctgcttacatcatgggtgggatatggtgaacacgcgcaccggcactggaagtggaagtggaagtggagccaataacaatgagggagaaccaacgctagcccagattctggcccaacaaacacaactgatcaatctgttagtgcagcaggcacagaatcagcagggaaataatcagaaccagaatccacccccacctccccaaaacaaattggcagatttcttacgtgtgagaccccctaccttctcaagcaccaccaatccagttgaagcaggagattggctgcatgcagtggagaagaagttggatttgattcagtgtactgagcaagagaaagtttcttttgcttcgcatcagttgcatggacccgctgctgaatggtgggatcattttcgccaaggcagggctggaggagaacctatcacttggcaggagttcacagctgcttttaagaagacgcatataccgtcaggtgttgtagctctaaagaagagggagtttagagcactcaatcagggatctcgttcagtcaccgagtacctccatgatttcaatcgtttagcgcgttatgctccagaggatgttcgcactgatgaggaacgtcaggagaagtttttggagggactgaatgataagttgtcttatgctttgatgtctacggatttccaggattttcagcagttggtggacaaagcgattcgccaggaagacaagtataaccgtatggagcagaagaagcgcagggctgcccaatttaaggcacaacagggcagtaaccagaggccgcgtctcgttactggacctcaagttccatcgtaccctcaaggaggatcttcatcagttgtccgtccccaacgccagttctacaacaacaatactggtaatcgtggcaatgacaaccgtaatgtggttgctcgtcctgcagcaactccagttcagaaccagcccgttaggagggaacagggaagcaagccagtgatatgcttcaattgtggtgatccgggacattatgctgataagtgtccgaagcctcggcgtgtgaagaacgctccagccccgaacaacttcaatgttccagcaccgaaggctcgtgtcaatcatgttgcagccgcagaagctcagaatgcaccagatgttgttttgggtacgtttcctgttaactctatacccgcaactgtgctttttgattccggtgctacacattcctttttgtgtaaaagttttgcaatcaaacatgggatggaagttgttagtcttgggagacctttactagttaataccccaggcaatcaagcattttcgacacggtattgtccttctgttactatagaaatagaagaagttcctttcccatcctctcttatcttgttagaatccaaagatctagatgttatcctagggatggactggttatctcgtcacagaggagttatagattgtgccaatcgtaaggtgactttaaccagtagcaatggggaaactgtttctttctttgcgtcctctcctaaatctcatggtgaggtcttaaaccaagttgctctacaagagattcctatagtgcaagactacccagatgtatttccggaggatttgccaggtatgccacctaagagagatatagaatttcggatagacttggtacctggaaccaacccaatccataagagaccatacagaatggcagctaatgagttggctgaggtgaagaaacaggtggatgatttgcttcagaaaggatacatcagacccagtacttcgccatggggagcaccagttatctttgtggagaagaaagatcatactcagagaatgtgcgtggattatcgagcgttgaatgaggtcactatcaaaaataagtatcctctacccagaattgatgatctgtttgatcaattgaaaggtgctacagttttctccaagatagatctccgttctggatatcatcaacttcgaattcgtgaggaggatataccaaagaccgcctttacgactcggtatggtttgtttgagtgtaccgtcatgtcatttggactcactaatgccccagcctttttcatgaatctgatgaacaaggtgtttatggaatatctggataagtttgttgtggtgtttattgatgacattcttatttattccaagacgaaggaagaacataaagagcatcttcgtctagctttagagaaactacgtgagcatcagctttatgccaagttcagtaaatgtgaattttggttgtccgaagtgaagtttcttggtcatgtcatctcatctggaggagtggcagtagatccaagcaatgtggagtcagtgttaagttggaagcaacccaagacggtttcagaagttcgtagtttccttggacttgctgggtattaccgcaggtttattgagaacttttcaaagatcgccagaccaatgactcgtctgcttcagaaggaagtgaagtataagtggacagaagattgtgagcaaagtttccaagaactgaagaaaaggctagtgactgcgcctgtgttaattttgcctgattcgaggaaaggtttccaagtgtattgtgatgcatcccgactcggtttgggttgtgtgttgatgcaagaaggaaaggtggttgcttatgcatctaggcaattacgtcctcatgagaataactacccaacgcatgacctagagttggcagcagtggtgcatgcattgaagatttggcgtcattatctttacggtaaccgtacagaggtgtatacggatcataaaagtctgaagtacattttcactcaacctgatttgaacatgcgtcagcgaagatggttagagttgattaaagactatgatatggaaatccattatcatccggggaaagcaaatgttgtagccgatgctcttagcaggaaaagctactgcaatatgtcagaaggtagatgtttaccttgggagttatgccaagaatttgaaaagttgaacttgggaatagtcagcaaaggttttgtagctgctttggaagctaaacctactctatttgatcaaattagagaggctcaagtgaatgatccttatatccaggaaataaagaagaacatgagaagaggtaaagccatcggttttgtagaagatgagcaaggtactgtatggttaggagaaagaatttgcgtcccagaaaataaggagttgaaggatactatcatgaaagaagctcatgaaactttgtattctattcaccctggaagcactaagatgtatcaggatttaaagcaacaattctggtgggccagtatgcgacgtgagatagcagaatatgtggctctatgtgatgtttgtcagcgggtcaaggcagaacatcagaagccagccggtctattacagccgttgaagattccagagtggaagtgggaagaaatagggatggattttataaccggtctacccagaacgtcggcaggacatgattctatttgggtagtggttgatcggttgaccaaagtcgctcacttcataccagtcaaaacaacttatacgggacataagcttgcagagttatacatggccagagtggtatgtttgcatggtgtacctaagaagatagtgtcagatagaggaagtcagtttacttcgaagttttggcagaagttacaatcagaattgggtactcgtttgaatttcagtacggcttatcaccctcaaacagatggtcagacggaaagagtaaaccaaattttagaggatatgttgagagcctgtgttctagattttggtggaagttgggataagaatttgccgtatgcggaattctcatataacaatagttatcaagctagtttgcaaatgtctccgaatgaagcattatatggtcgaaagtgccgtacgccgcttctttgggatcaaaccggtgagcgtcaagttttcgggacagacatattgcgagaagcggaagaaaaagtgaagattatccaagaaaggttgcgcgttgctcagtcgtgtcagaagagctatgccgacaatcgtcgcagagatttagtttttgaagaaggagattatgtgtatcttcgggttacgccgttacgaggagttcatcgtttccaaaccaaagggaaattggcaccgcgttttgtgggaccttttaagatcgtgagtcgaagaggtgaagtagcttatcagttagagttgcctccgtcaatggcgggaatacatgatgtgttccatgtgtctcagttgaagaaatgcttacgtgtacctacggaggaagcagatcctgattgtatagagcttcaggaagatttaacttatgttgagaagccagtcagaatcttggaatttccgacgttccggaggagagcgtttccgttgaggaaggttccgaagcgtttgtggaagctcaaggcaagtcacacagatcccaaacaaccctttgagcatgttgatcccgtttaa

SEQ ID NO: 20138 - DNA, 1377 bp, Oryza sativa
  Clone ID: PAT_MRT4530_25533C.1
tggttctgcaaagaggcaacaggttggcatgtatcaaatctggtgaggcaggagggggggattttaagattatactgcccatgccagtgagctgacaagagagaacaaaaatggagaaagaacacatcaagatggccatcctgaagcaggaacagacattcagacaacaggtcaatgagctgcatcgtgtgtaccgggttcagaagcaactgatgatagagatgcagagcatctcaacccaggctcaagcaaaagcagacaaccgaaccataccaagattggagatggaccatcaacaatggtacagaaactcgggggagaagaaggcccccgaattcgttgaagatttcgaccttgaactcacactggcaactggggctggtactttggcacctttaccaacttgaactccattggcctaagtgacttggatttgttttggcatgcccatagggtttcaccccatgacagtaaaactaatgacaggggagaatcttaaaatccccccctcctgcctcaccagatttgatacatgccaacctgttgcctctttgcagaaccagaagttccttcctttggtctagctagcaagagatcttacttgtgagaggaagaacaagaggaggagaggtagtatagccttggccttctttcttcagatgaattcagaagtaggaattcttggttgagattatactgcccatgccagtgagctgacaagagagaacaaaaatggagaaagaacacatcaagatggccatcctgaagcaggaacagacattcagacaacaggtcaatgagctgcatcgtgtgtaccgggttcagaagcaactgatgatagagatgcagagcatctcaacccaggctcaagcaaaagcagacaaccgaaccataccaagattggagatggaccatcaacaatggtacagaaactcgggggagaagaaggcccccgaattcgttgaagatttcgaccttgaactcacactggcaactggggctggtaggaagcaggagaagccatccaactcggactccggagcaacagtgtcatcgtcgacttctgctgaatcagagtcggagcagcggttccctgagtccaatgtagccctaaggtttcagaatgagagcaagaggcatgatgatcagctcatgcaatctccttggctctatcaatgtttaagtctgaagatggcatgatgacttagctatgatgggtggctttatgagtgttcaaaaactcaaaaatttcagataaaaaaaaaaggctttttttatgtatatgtatatgacactaattcagagtaactggaaggctcaaaagagtgagaaaatgcacacaaaagaaaacatgcaacatgaaaaaaaaaaaaaaaa

SEQ ID NO: 20139 - DNA, 1191 bp, Oryza sativa
  Clone ID: PAT_MRT4530_25534C.1
atgacgcccatcaacggcggagaaaccaggcggcggcagatgaggcagccggtcggtgaaaatgtaaatgcccaacaacgacggcataataggccagtcatgcaggcggaaacaccagtcagcggcggacgaggtggccggtcggtgaagatacaccagctggcgacgacgaagcggccgatcagtgaagacgatgatgcccaacaacggcgtgaggcagaggaaaaggaaaatatcatcgggaggactgcactcgcgaagtttatggccgcgcctcactacgcgtatcaagtgctcaagatgcctggcccgaagggaacaatcactgttcagggaaacatgaaactagcgccgcctcctcttccccggcgccgcctccgattcgtggggaaatcgccgaagacgcgcccccgccagcttcaagtggctttgcctccactgtaccgtctccggccggctgctgttcgtcgccggtgcaccgatcgacgccgccgtctcctccttcgacaccgcggcatcgtctccttccccggcatcacctcctcctcgcccgaagctcgccggagtggcctcctcgtcggcttccagtacctcccggtctccggtcggctcctgtacgtcgccgttcttgtcgtcgacgtcccgtcggtcgcccggctcgtcgtctcgctgcgcctccaccgtcatcgtcatcgcagcggcgtgtttcacgccgtcctcgtctccgtgcagccactgccggctgccctcgtcgtctcctcgccggccccggtcgtcgtcgtcgtcgtcctctcgtcatcctcgtcgtcgtggcgttcgtccctccgtcgagccgtcctcgtccgtcctcgcgtcctcgtcgacctcgtccgcgcctccgtttcgcccgccgaccgtcggagcgccgtcgtcctcgtcgtcccgaaccgcgccgccgccttcctccgcttcggccgccgttcccgtcgttgccgtcgacccggggtgagccgtggaccgcccctttcgtttccctctcctctccgctctctcgggcgccgctccgccgcgccggtggtcgccggcggtgaccatcggggcgcgggtgcgccgtctcccgtcggctgtgccggcgaggccgcctccgggcacgccccgcggctgccaggtagggcccggccgtcagccgcccgcgcccgcgggtgcggctga

SEQ ID NO: 20140 - DNA, 433 bp, Oryza sativa
  Clone ID: PAT_MRT4530_25535C.1
tgttcgtgacatgaacggcctcaagctcgccggattcagcaccacgaagctgggcctcggcagcagcaggaagaggacgacgcgccgccgagggatccggcagcggccatgggggaaatgggcggcggcgatcacggaccccagcaagggcatgcgcgggtggctcggcacgttcggcaccggcgaggacggcgtcatggcgtacgacatgaaggcacgccggatccgccgcaagaaagccaaggtcaacttgcgcgacaccgtcgccgacggtcccaagcggccacggcgttcttcggcgaaacattcgccgcataagcagaaggccaggtcctcggcaccgtcgactgcgagcctgaacgccagcgatgccaagtccaagaccaacaacaaccgggtcagctcgggtgggagcaggaccgacactaccgac

SEQ ID NO: 20141 - DNA, 1699 bp, Oryza sativa
  Clone ID: PAT_MRT4530_25536C.1
atggcttttgaggtaggctatgaagttgctcccgagtatcgccagatttcccatgaccccgacgaggagaagtgtcgtgttcgtgtgacgttggctagtgatagtgaagaccttccgtcttataagttcgaagctggaggaagatcgtactgccatgcttgtcaagaagtagctttggtggctattggagagttgcgtcaacactttgaagaagagttggattcatcagctttccagtatcatcctcataagcctcatggtcaagattatggaacctatacctgtccagatggtgaagagagtgccactctgatgcatgtggtgcatatgcttagtgctatggatgcagtaagtgtggagcgagacaaagcagctcatgatagggaaaactggaatcgaggcaagatttgcaagttgaagagcaaggtgcaccgtctacagaaggaattagctgaacttaaaggagagacgccaccgccaacatccaagcttcgcctcactgcaaggaagagaacctgtccgccccctcgtctccagttagcttcgaagattcgcgtgatgggtgaagctgtgcccgattgtgctcaacctgtcatcgacatcataagtgatgaggaagaagaggaagatcctaaagaaagagagccagctactccagaggaagaagattcatcgcttcgttccgacgcaaggcggaatgcagcaggaacagaatcagcagggaaacaatcagaaccagaatccaccccacctccccaaaataagttggcagatttcttacgtgtgagaccccctaccttttcaagcaccaccaatccagtagaagcaggagattggttgcatgcggtggagaagaagttggatttgatccagtgtactgagcaggagaaagtttcttttgcttcgcatcaactgcatggacctgctgctgaatggtgggatcattttcgccaaggcagggcgggaggagaacctattacttggcaggagttcacagctgcttttaagaagacgcatataccgtcaggtgttgtagctctaaagaagagagagtttagagcactcaaccagggatctcgttcggttactgagtaccttcatgatttcaaccgtttagctcgctatgctccagaagatgttcgcactgatgaagagcgtcaggagaagtttttagagggactgaatgatgagttgtcttatgctttgatgtctacggatttccgggatttccagcagttggtggacaaggcgattcgccaggaagacaagtataaccgtatggagcagaagaagcgcagggctgcccaatttaaggcacaacagggcagtaatcagaggccgcgtctcgttactggacctcaagctccatcgtaccctcaaggaggatcttcgtcagttgtccgtccccaacgccagttctacaacaacaatactggtaatcgtggcaatgacaaccgcaacgtgatagctcgtcctgcagcaactccagttcagaatcagtctgtcaggaaggaacagggaagcaagcccgtgatatgcttcaattgtggtgatccaggacattatgctgataagtgtccgaagcctcggcgtgtgaagaacgttccagccccgaacaactccaatgttccagcaccgaaggctcgtgttaatcatgttgtagcagcagaagctcagaatgcaccagatgttgttttgg

SEQ ID NO: 20142 - DNA, 309 bp, Oryza sativa
  Clone ID: PAT_MRT4530_25537C.1
atggctgtggcagggagagacacagcggcacggcggcagtggcgacaatgcgatggtggtgcgcgacatggcggcagcgtgcagcagtggtgcgacaaggcagcgcacagcacagcggctaagcggcgtggtggcgtggcgaggcaaggcgaaacggccagcacagcaaggcggcagccggcgcggcaatgcagcggcacagcagtggcagtagcggcgcagcgagcagcggtgcagtggcggagcagcaagcacagcacatggcagcggcagcagcggcacaggcacggcagcgcggctgcgaggtag

SEQ ID NO: 20143 - DNA, 292 bp, Oryza sativa
  unsure (1)..(292): unsure at all n locations
  Clone ID: PAT_MRT4530_25538C.1
ggcaaaaccaccgtcatgctttaggccctgcccccccaccccagtccctctacacattggctcacagggaccccccgagacccacacccaggcgcnaacccagaaggcatcaaaccatggcagacgcagaaaantatcttgacccgggcacacaaacactaatcaacacggnccctaaccgtgctccgcaggcttagacatccacncctgcgggacaatgtccgcagcccntcccccaaaaaaaatggactctcccccccccgggcccgtaggggggggccccccgtaggcc

SEQ ID NO: 20144 - DNA, 1796 bp, Oryza sativa
  unsure (1)..(1796): unsure at all n locations
  Clone ID: PAT_MRT4530_25539C.1
ctcgctatgctccagaggatgtccgcaccgatgaggagcgtcaggagaagtttttggagggactgaatgatgagttgtcctatactttgatgtctacggaattccgagatttccagcagttgatggacaaagcgattcgtcaggaagacaagtacaaccgtatggagcagaagaagcgcagggctgcccaatttaaggcacagcagggtagtaaccagaggccgcgtctcgttactggacctcaagttccatcgtaccctcaaggaggatcttcatcagttgtccgtccccaacgccagttctacaacaacaatactggtaatcgtagcaatgacaaccgcaatgtggttgctcgtcctgcagcaacttcagttcagaaccagcctgtcaggaaggagcagggaagtaagccggtgatatgcttcaactgtggtgatccaggacattatgctgataagtgtccgaagcctcggcgtgtgaagaacgttccagccccgaacaactccaatgttccagcaccgaaggcacgtgttaatcatgttgcagcagctgaagctcagaatgcaccagacgttgttttgggtacgtttcctgttaactctatacccgcaactgtgctttttgattccggtgctacacattcctttttgtctaaaagttttgcaagcaaacatgggatggaagttgttagtcttgggagacctttactagttaataccccaggcaatcaagtattttcgacacggtattgtccttctgttaccatagaaatagaagaagtttctttcccatcctctcttatcttgctagaatccaaagatctagatgttatcttagggatggactggttatctcgtcacagaggaattatagattgtgccaaccgtaaggtgattttaaccaatagcaatgggaaaaccgtttctttctttgcgtcctcccctaaatttcatggtgtgatcttaaaccaagttgctctacaagagatccttatagtccaagantcctcacgtgtgttcccggaagatttgtcaggtatgccacttaagagagacatagagtttcggatagatttggtacttgcaaccaacccaatccataagagaccgtgcacgggaaattttcgcgcaagcgtaatccatgttagcgtgagagtgaagaaacaggtggatgattgggctcagaaaggatatattagacccagtacttcgccatggggagcaccagtcatctttgtggagaagaaagatcatactcagagaatgtgcgtggattatcgagcgttgaatgaggttactatcaaaaataagtatcctctacccagaatcgatgacctgtttgatcaattgaaaggtgctacagttttctccaagatagatgtccgttctggatatcatcaacttcgaattcgtgaggaagacataccaaagaccgccttcacaactcggtatggtttgttcgaatgtaccgttatgtcgtttggtctcactaatgccccagcctttttcatgaacctgatgaacaaagtgtttatggaatatctggataagtttgtcgtggtgtttattgatgacattcttatttactccaagacgaaggaagaacatgaagagcatcttcgtctagctttagataaactacgtgagcatcagctttatgccaagttcagtaaatgtgaattttggttgtctgaagtgaagtttcttggtcatgtcatctcgtctggaggagtggcagtagatccaagcaatgtggagtcagtgttaagttggaagcaacccaagacggtttcataa

SEQ ID NO: 20145 - DNA, 1072 bp, Oryza sativa
  Clone ID: PAT_MRT4530_2553C.1
tctcggccggtataccatctcttcatttcgtattccttgtcgatatccaccaaccgttctcgagtgatcaagaaggcgcagagtatggtctttcgtctctgaaggatccgacaaagccttatccgctctgggcgtccccagccgaagttcccttaggttcctcagaggctttgtcaagacgacgtaaagggacattaggataggtttcaatgctaggtgtcttttgtggtaagggatctctgggcaaaacacttggcgatattgtgcacctgatatcaactctgttggagtagaggtaatgggagaatcgctacacctctggtcgaggaccaggtagtagtcgtaacccgaccacttgaagtgaaaatagtgggagaatcgctacacctctggtcgagaaccaggtagtagtcgtaactcaaccactagaagtaaatgtacgagagatcgctacaattgactggttgaggaccagtgagtaggtgtagcgaacgagtaaaattatctctcgaacaccaatggaggttgcggtgcgagagagtgctacgtactggttcgaggaccatggttcgaggaccagcgaacgtgtagaatcatctctcgaacaccaatggaggttgtggtgcgagagattgctaagtactggttggagaaccagcgagcgagtagaatcatctctcgaacaccaatggaagttgcggtgcgagagattgctacgcgcttttctcaagtagtccagccatggccagtgctatgagataggttgtcggtcttagttggtaggttgggcgcgacgactctgcatttgttgagatcgttctcgataatatggtgtactcgaccacaacctactcgagtgctcaactgttcggccaaggcctcacgatcgacgacattaaaccattattctccgcggtagcgacatcttgaagcttggtcgatctcgccggatcgaatagttgatgatgatgattccgatttcgtcggaagacgtactccggtcgtgttagatctccccacagccgaagtcgtcgagtagtttgttgttagagaatccatcttttgaatccat

SEQ ID NO: 20146 - DNA, 237 bp, Oryza sativa
  unsure (1)..(237): unsure at all n locations
  Clone ID: PAT_MRT4530_25540C.1
cttgttttttttttttaagaattaaatcagcggtaccataattctttaaggacggagattcatggagaagaaacatttttgtctttattgacgcgacgttgaagtgagttctgcggtatgggttttttttttggctgtccctccttggggctgttggggtgctacttctttttttcnttttttccccttcctttacctccggactggttggcggtgtgctaggttgtcccggtgggg

SEQ ID NO: 20147 - DNA, 722 bp, Oryza sativa
  Clone ID: PAT_MRT4530_25541C.1
atgtgtaatgtgagactaatcacgaaaaacattgctcaactcacccataaccgcgggcacggctattcgaatagttttactctgatcagaggtgtaccactgtacccacaagatacaatcccacaacatgtcaccatgcgccttagcaccaccacggtacctcggaaaggaactgtgacaatacccctcgcacaacacaactcaccacagtgcaccgttcctggatcataatctccccctcaaaaccagaggcaatggactccccagcgacccccacggacttctcgccgcttcacaatctggcacactataatgaatcatgctatacaaaagataaagccggcacgaccaccggcgctacggaccttggccgggcgattagagggcacctatgcgtagagggcgacgacacgatctcaacggtactcaccaacgcgacgaacgacgacggatggtggccggcggcgaggttatgcggcggcggcggatcggtcgacggcggcggcggcttcacggcgaccgacgacagcggcgagggggcggccgagctagctctccctcacgcgcacttaacggcagtgagaaaaggcggcggcgacaatgcaagcggcggcgcggcgcggctgagcggcggccggcgatggcggcgactagggcggcacggcggcgactccacggggcactagagagctcgggaaagggggcaaacgaaagagggcgac

SEQ ID NO: 20148 - DNA, 4731 bp, Oryza sativa
  Clone ID: PAT_MRT4530_25542C.1
atggcttttgaggtaggctatgaagttgctcctgagtatcgccggatttcccatgaccccaacgaggagaagtgtcatgttcgtgtgacgttggctagtgatcgtgaagaccttccgtccattaagttcgaagctggaggaagatcgtacagccatgcttgtcaagaagcagctttggtggccattggagagttgcgtcaacgctttgaagaagagttggattcatcagctttccagtatcatcctcacaagcctcatggtcaagactatggaacctatacctgtcctgatggtgaagagagtgccgctctgatgcatgcggtgcatatgcttagtgctatggatgcagtaagtgtggagcgagacaaagcagctcatgacagggaaaactggaatcgaggcaagatttgcaagttggagagcaaggtgtaccgtctacagaaggaattagctgaacttaaaggagaaacgccgccgccaacacccaagcttcgcctcatcgcaagaaagagaacctgtccgccacctcgtctccagttagcttcgaagattcgtgtgatgggtgaagctgtgcccaatcgtgctgaacctgtcatcgacatcataagtgatgaggaagaagaggaagaccctgaagaaagagagccagctactccagaggaagaagatccgtcgcttcgttccgacgcaaggcgggattacaccaccaatccagtagaagcaggagattggctgcatccggtggagaagaagttggatttgatccagtgtactgagcaggagaaagtttcttttgcttcgcatcaattgcatggtcctgctgctgaatggtgggatcattttcgccaaggcagggctgaaggagagcctattacgtggcaggaattcacggccgcttttaagaagacacacataccaacgggtgttgtagctctaaagaagagagaatttagagcactcaaccagggatctcgttcggtcaccgagtacctccatgatttcaaccgtttagctcgttatgctccggaagatgttcttaccgatgaagagcgtcaggagaagttcttggagggactgaatgatgagttgtcttatgccttgatgtctacggatttccgggatttccagcagttggtggacaaggcgattcgtcaggaagacaagtataaccggatggagcagaagaagcgcagggctgcgcaattcaaggcacaacagggcagtaaccagaggccgcgtctcgttacgggacctcaagctccatcgtaccctcaaggaggatcttcatcagttgtccgcccccaacgccagttctacaacaacaatactgcaactccagctcagaaccagtccgtcaggaaggaacagggaagcaagccaggggtgtgcttcaattgtggtgatccaggacattatgctgataagtgtcctaagcctcggtgcgtgaagaacgttccagccccgaacaactccaatgctccagcaccgaaggcacgtgttaatcatgttgcagcagcagaagctcagaatgcaccagatgtggttttgggtacgtttcctgttaactctatacccgcatctgtgctttttgattccggtgctacacattcctttttgtctaaaagttttgcgagcaataatgggatggaagttattagtcttgggagacctttactagttaataccccaggcaatcaagtattttcgacacagtattgtccttccgttactatagaaatagaagaagttcctttcccatcctcgcttatcttgctagaatccaaagatctagatgttatcttagggatggactggttatctcgtcacagaggagttatagattgtgccaaccgtaaggtgactttaagcagtagcaatggggaaaccgtttctttctttgtgtcctctcctaaatatcatggtgtgatcttaaaccaagttgctttacaagagatccccatagtacaagactacccagacgtgtttcccgaggatttgccaggtatgccacctaagagagacatagagtttcggatagacttggtacctggaaccaaccctatccataagagaccatacagaatggcagctaatgagttagctgaggtgaagagacaggtggatgatttgcttcagaaaggatacatcagacccagtacttcgccgtggggagcaccagtcatctttgtggagaagaaagatcatactcagagaatgtgcgtggattatcgagcgttgaatgaggttactatcaagaataagtatcctctacccagaattgatgacctgtttgatcaactagaaggtgctacagttttctccaagatagatctccgttctggatatcatcaacttcgaatccgtgaggaagatataccaaagaccgccttcacaactcggtatggtttgttcgaatgtaccgttatgtcatttggactcactaatgccccagcctttttcatgaatctgatgaacaaggtgtttatggaatatctggataagtttgtcgtggtgtttattgatgacattcttatttactccaagacgaaggaagaacatgaagagcatcttcgtctagctttagagaaactacgtgagcatcagctttatgccaagttcagtaaatgtgaattttggttgtccgaagtgaagtttcttggtcatgtcatctcgtctagaggagtggcagtagatccaagcaatgtggagtcagtgttaagttggaagcaacccaagacggtttcagaaattcgtagtttccttggacttgcggggtattaccgcaggtttattgagaacttttcaaagatcgccagaccaatgactcgtctgcttcagaaggaagtgaagtacaagtggacagaggattgtgaacaaagtttccaagaactgaagaaaaggctagtgactgcgcctgtgttaattttgcctgattcgaggaaaggtttccaagtgtattgtgatgcatcccgactcggtttgggttgtgtgttgatgcaagaaggaaaggtggttgcctatgcatctaggcaattacgtcctcatgagaataactacccaacgcatgacctagaattggcagctgtggtgcatgcattgaagatttggcgtcattatcttttcggtaaccgtagagagatgtatacggatcataaaagtttgaagtacattttcactcaacctgatttgaacatgcgtcagcgaagatggttagagttgattaaagattatgatatggaaatccactatcacccggggaaagcaaatgttgtagccgatgctcttagcaggaagagctactgtaatatgtcagaaggtcgacatttaccttgggagttatgccaagaatttgaaaagttaaacttggatatagtcagcaaaggttttgtggctactttacaggctcaacctactctgtttgatcaagttagagaagctcaagtgaatgatcttgatatccaagaaataaaaaagaacatgagaagaggaaaagccatcggttatgtagaagatgagcaaggaactgtgtggttaggagaaagaatttgcgtcccagaaaataaggagttgaaggatactatcatgaaagaagctcatgaaactttgtattccattcaccctggaagcactaagatgtaccaagacctaaagcaacaattctggtgggccagtatgcgacgtgaaatagcagaatatgtggctctatgtgatgtatgtcagcgggtcaaggcagaacatcagaagccagccagtctgttacaaccgttgaagattccagagtggaagtgggaagaaataggaatggattttataaccggtctacccagaacgtcggcgggacatgattctatttgggtagtggttgataggttgacaaaagtcgctcacttcataccggtcaaaacaacctatacggggaataagcttgcagagttatacatggccagagtggtatgtttgcatggtgttcctaagaagatagtgtcagatagaggtagccagtttacttcgaagttttggcagaaattacaagtagagatgggtacccgtttgaatttcagtaccgcttatcaccctcaaacagatggtcagacggaaagagtaaaccaaattttagaagatatgttgagagcctgtgttctagattttggtggaagttgggataagaatttgccgtacgcggaattctcatataacaacagttatcaagctagtttgcaaatggctccgtatgaagcattatatggccgaaagtgccgtacgccgctcctttgggatcaaaccggtgaacgtcaagtttttgggacagacatattgcgcgaggcagaagaaaaagtgaagattatccaagaaaggttgcgcgttgctcagtcacgtcagaagagctatgccgacaatcgtcgcagagatttggctttcgaagaaggagattatgtataccttcgggttacgccattacgaggtgttcatcgtttccagaccaaagggaaattggcgccgcgtttcgtgggaccttttaagattgtgagtcgaagaggtgaagtagcttatcagctagagttgcctccgtcaatggcgggaatacatgacgtgttccatgtgtcgcagttgaagaaatgtttacgtgtacctacggaggaagcagatcctgatcgtatagagcttcaggaagatttaacttatgtggagaagccagtcagaatcttggaaaattttctgggaattatttga

SEQ ID NO: 20149 - DNA, 5088 bp, Oryza sativa
  Clone ID: PAT_MRT4530_25543C.1
atgggggtcgctggggagtccatgccttgttttaaagggggtgattatgatccaggaaaggtgcactgtggtgagttgtgttatgcgagggatattgtcacaattcctttccgagataccgtggtggtactgaggcacatgatgccgcaccgttcaccgagaaatttgatcaaggtattaggatttgtcagggagctgaggttgatggcttttgaagtaggctatgaagttgctcctgagtatcgccagattccccatgaccccgacgaggagaagtgtcgggttcgtgcgacgttggctagtgatagtgaagaccttccgtcttttaagttcgaagctggaggaagatcgtacagccatgcttgtcaagaagtagctttggtggccattggagagttgcgtcaacactttgaagaagagttggattcgtcagctttccagtatcatccccacaagcctcatggtcaagactatggatcttatacctgtcctgatggcgaagagagtgctactctgatgcatgtggtgcatatgcttaatgctatggatacagtaggtgtggagcgagagaaggcagctcatgaccgggaaaactggaatcgagataagatttgtaagttgaagagcaaggtgaaccgtctacagaaggaattagctgaacttaagggagagacgccgccgccaacatccaagcttcgcctcactgcaagaaagagaacctgtctgccccctcgtctccagttagcttcgaagattcgcgtgatgggagaagctgtgcctgatcgagctgaacctgttatcgacatcataagtgatgaggaagaagaggaagatcctgaagaaagagagccagctactccagaggaagaagattcatcgcttcatttcttacgtgtcagaccccctaccttttcaagcacaaccaatccagtagaagcaggagattggttgcatgcagtggagaagaagttggacttaatccagtgtactgagcaggagaaagtttcttttgcttcgcatcaattgcatggacctgctgctgaatggtgggatcattttcgccaaggcagggctggaggagaacctatcacttggcaggaattcacagccgcttttaagaagacacatataccaacgggtgttgtagctctgaagaagagggagtttagagcactcaaccagggatctcgttcggttactgagtatctccatgattttaaccgtttagcacgctatgctccagaagatgttcacactgatgaggaacgtcaggagaagtttttggagggactaaatgatgagttgtcctatactttgatgtctacggaattccgggatttccagcagttggtggacaaagcgattcgccaggaagacaagtataatcgcatggaacagaagaagcgcagggctgctcaatttaaggcacaacagggcagtaaccagaggccgcgtcttattcctggacctcaagtcccatcgtacccgcaaggaggatcttcatcagttgtccgtccccaacgccagttctacaacaacaatactggtaatcgtggcaatgaaaaccgcaacgtagtcgctcgtcccgcagcaactccagttcagaaccagcctgtcaggaaggaacagggaagcaagccggtgatatgcttcaattgtggtgatccaggacattatgctgataagtgtccgaagcctcggcatgtgaagaacgttccggtcccgaataactccaatgtcccagcaccaaaggcacgtgttaatcatgttgcagccgcagaagctcagaatgcaccagacgtggttttgggtacgtttcctgttaactctatacccgcaactgtgctttttgattccggtgctacacattcctttttgtctaaaagttttgcgaccaaacatgggatggaagttgttagtcttgggagacctttactagttaataccccaggcaaccaagtgttttcgacacggtattgtccttccgttaccatagaaatagaaggagttcctttcccatcctctcttatcctgctagaatccaaagatctagatgttatcttagggatggattggttatctcgtcacagaggagttatagattgtgccaatcgcaaggtgactttaaccaatagcaatggggaaactgtttctttctttgcgtcctctcctaaatctcatggtgtggtcttaaaccaagttgctctacaagagattcctatagtgcaagactacccagatgtatttccggaggatttgccaggtatgccacctaagagagatatagaatttcggatagacttggtacctggaactaaccctatccataagagaccgtacagaatggcagctaatgagttagctgaggtgaagaaacaggtggatgatttgattcagaaaggatacatcagacccagtacttcgccatggggagcaccagtcatctttgtggagaagaaagatcatactcagagaatgtgtgtggattatcgagcgttgaatgaggttactatcaagaataagtaccctttacccagaattgatgacttgttcgatcaactcgaaggtgctacagttttctctaagatagatctccgttctggatatcatcaacttcgaatccgtgaggaagatataccaaagaccgccttcacaactcggtatggtttgtttgagtgtaccgttatgtcatttggactcactaatgccccagcctttttcatgaatctgatgaacaaggtgtttatggaatatctggataagtttgtcgttgtgtttattgatgacattcttatttactccaagacgaaggaagaacatgaagagcatcttcgtctagctttagagaaactacgtgagcatcagctttatgccaagttcagtaaatgtgaattttggttgtccgaagtgaagtttcttggtcatgtcatctcgtctggaggagtggcagtagatccaagcaatgtggagtcagtgttaagttggaagcaacccaagacggtttcagaaattcgtagtttccttggacttgcagggtattaccgcaggtttgttgagaacttttcaaagatcgctagaccaatgactcgtctacttcagaaggatgtaaagtacaagtggacggaggattgtgaacaaagtttccaagaactgaagaaaatgctagtgactgcgcctgtgttaattttacctgattcgaggaagggtttccaagtgtattgtgatgcatcccgacacggtttgggttgtgtgttgatgcaagaaggaaaggtggttgcttatgcatctaggcaattacgtcctcatgagaataattacccaacgcatgacctagagttggcagctgtggtgcatgcattgaagatttggcgtcattatcttttcggtaatcgtacagagatatatacggatcataaaagtttgaagtacattttcactcaacctgatttgaacatgcgacagcgaagatggttagagttgattaaggattatgatatggaaatccactatcacccgggaaaagcaaatgtggtagccgatgcccttagcaggaaaagttactgtaatatgtcagaagctcgatgtttaccttgggagttgtgccaagaatttgaaaggttgaacttgggaatagtcagcaaaggttttgtggctactttggaagctaaacctactttgtttgatcaaattagagaagctcaaatgaatgatcctgatatccaggaaataaagaagaacatgagaaggggtaaggccatcggttttgtagaagatgagcaaggaactgtgtggttaggagaaagaatttgtgtcccagaaaataaggagttgaagaatactatcatgaaagaagctcatgaaactttgtattccattcaccctggaagcactaagatgtaccaagacttaaagctacaattctggtgggctagtatgcgacgtgagatagcagaatatgtggctctatgtgatgtatgtcagcgggtcaaagcagaacatcagaaaccagctggtctgttacaaccgttgaagattccagagtggaagtgggaagaaataggaatggattttataaccggtctacccagaacgtcggcaggacatgattctatttgggtagtggttgatcggttgacaaaagtcgctcatttcataccgatcaaaacaacctatacgggacataagcttgcagaattatatatggccagagtggtatgtttgcaaggtgttcctaaaaagatagtgtcagatagaggtagccagtttacttcgatgttttggcagaaattacaatcagaattgggtacccgtttgaatttcagtactgcctatcatcctcaaacagatggtcagacggaaagagtaaaccaaattttagaagatatgttgagagcctgtgttctagattttggtggaagttgggataagaatttaccgtatgcggaattctcatataacaatagttatcaagctagtttgcaaatgtctccgaatgaagcattatatggtcgcaagtgctgtacgccgcttctttgggatcaaaccggtgaacgtcaagtttttgggacagacatattacgagaggcggaagaaaaagtgaagattatccaagaaaggttgcgcgttgctcagtcacgtcagaagagctatgccgacaatcgtcgtagagatttggctttcgaagaaggagattatgtatatcttcgggttacgccgttacgaggtgttcatcgtttccaaaccaaagggaaattggcaccgcgttttgtgggaccttttaagatcgtgagtcgaagaggtgaagtagcttatcagttagagttgcctccgtcaatggcgggaatacatgatgtgttccatgtgtctcagttgaagaaatgcttacgtgtacctacggaggaagcagatcctgattgtatagagcttcaggaagatttaacttatgttgagaagccagtcagaatcttggaatttccgacgttccggaggagagcgtttccgttgaggaaggttccgaagcgtttgtggaagctcaaggcaagtcacacagatcccaaacaaccctttgagcatgttgatcccgtttaa

SEQ ID NO: 20150 - DNA, 4382 bp, Oryza sativa
  Clone ID: PAT_MRT4530_25544C.1
atggtgaacacgcgcaccggaagtggaagtggaagtggaagtggagctactaacaatggaggagaacccacgctagctcagattctggctcaacagacacaactgatcaacctgttagtgcagcaggcacagaatcagcaagcaaataatcagaaccagaatccacccccacctccccaaaataagctggcagatttcttacgtgtgagaccccctaccttttcaagcaccaccaatccagtagaagcaggagattggttgcatgcggtggagaagaagttggatttgatccagtgtactgagcaggagaaagtttcttttgcttcgcatcagttgcatggacccgctgctgaatggtgggatcattttcgccaaggcagggcgggaggagaacctattacttggcaggaattcacagctgcttttaagaagacgcatataccgtcaggtgttgtagctctaaagaagagagaatttagagcactcaaccagggatctcgttcggtcactgagtacctccatgattttaaccgtttagctcgctatgctccagaggatgttcgcaccgatgaagagcgtcaggagaagtttttagagggactaaatgatgagttgtcttatgctttgatggctacggatttccgggatttccaacaattggtggacaaggcgattcgtcaggaagacaataaccaaaggccgcgtctcattactggacctcaagctccatcgtaccctcaaggaggatcttcatctgttgcccgtccccaacgccagttctacaacaacaatactagtaatcgtggcaatgacaaccgcaatatggttgcttgtcctgcagcaactccagttcagaaccagcctgtcaggaaggaacagggaagcaagccagtgatatgctttaattgtggtgatccaggacattatgctgataagtgtcctaagcctcggcgtgtgaagaacgctccagtcccgaacaaccccaatgttccagcaccgaaggcacgtgttaatcatgttgcagcagcagaagctcagaatgcaccagatgttgttttgggtacgtttcctgttaactctatacccgcaactgtgctttttgattccggtgctacacattcctttttgtctaaaagttttgcaagcaaacatgggatggaagttgttagtcttgggagacctttactagttaataccccgggcaatcaggtattttcgacacagtattgtccttccgttactatagaaatagaagaagttcctttcccatcctctcttatcttgctagaatccaaagacctagatgttatcttagggatggattggttatctcgtcacagaggagttatagattgcgccaatcgtaaggtgactttaaccaatagcaatggggaaacagtttctttctttgcatcctctcctaaatctcatggtgtggtcttaaaccaagttgctctacaagagattcctatagtgcaagactacccagacgtgtttcccgaggatttgccaggtatgccacctaagagagacatagagtttcggatagacttggtacctggaaccaaccccatccataagagaccatacagaatggcagctaacgagttagctgaggtgaagaaacaggtggatgatttgcttcagaaaggatacatcagacccagtacttcgccgtggggagcaccagtcatctttgtggagaagaaagatcatactcaaagaatgtgtgtggattatcgagcgttgaatgaggttactatcaagaataaatatcctctacccagaattgatgacctgtttgatcaactcgaaggtgctacagttttctccaagatagatctccattctggatatcatcaacttcgaatccgtgaggaagatataccaaagaccgccttcacaactcggtatggtttgttcgaatgtaccgttatgtcgtttggactcactaatgccccagcctttttcatgaatctgatgaacaaggtgtttatggaatatttggataagtttgtcgtagtgtttattgatgacattcttatttactccaagacgaaggaagaacatgaagagcatcttcgtctagctttagagaaactacgtgagcatcagctttatgccaagttcagtaaatgtgaattttggttgtccgaagtaaagtttcttggtcatgtcatctcgtctggaggagtggcagtagatccaagcaatgtggagtcagtattaagttggaagcaacccaagacggtttcagaaattcgtagtttccttggacttgcagggtattaccgcaggtttattgagaacttttcaaagatcgccagaccaatgactcgtctgcttcagaaggaagtgaagtataagtggacggaggattgtgaacgaagtttccaagaactgaagaaaaggctagtgactgcgcctgtattaattttgcctgatacgaggaaaggtttccaagtgtattgtgatgcatcccgactcggtttgggttgtgtgttgatgcaagaaggaaaggtggttgcctatgcatctaggcaattacgtcctcatgagaataactacccaacgcatgacctggaattggcagctgtggtgcatgcattgaagatttggcgtcattatcttttcggtaaccgtacagagatatatacggatcataaaagtttgaagtacattttcactcaacctgatttgaacatgcgtcagcgaagatggttagagttgattaaagattatgatatggaaatccattatcacccggggaaagcaaatgttgtagccgatgcccttagcaggaaaagttactgtaatatgtcagaaggtagacgtttaccttgggagttatgccaagaatttgaaagttgaacttgggaatagtcagccaaggtttagtggctactttggaagctaaacctactctgtttgatcaaattagagaagctcaagtgaatgatcctgatatccaggaaataaagaagaacatgagaagaggtaaagccatcggttttgtagaagatgagcaaggaaccgtatggttaggagaaagaatttgcgtcccagataataaggagttgaaggataccatcatgaaagaagctcatgaaactttgtattcgattcaccctggaaacactaagatgtatcaggacttaaagcaacaattctggtgggccagtatgcgacgtgagatagcagaatatgtggctctgtgtgatgtatgtcagcgggtcaaggcagaacatcggaagccagctggtctgttacaaccgttgaagattccagagtggaagtgggaagaaataggaatggattttataaccggtctacacagaacgtcggcaggacatgattctatttgggtagtggttgataggttgacaaaagtcgctcatttcatacctgtcaagacaacctatacgggacataagcttgcagagttatatatggccagagtggtatgtttgcatggtgttcctaaaaagatagtgtcagatagaggtagccagtttacttcgaagttttggcagaaattacaattagaattgggtacccgtttgaatttcagtactgcttatcaccctcaaacagatggtcagacggaaagagtaaaccaaattttagaagatatgttgagagcctgtgttctagattttggtggaagttgggataagaatttgccgtacgcagaattctcatataacaatagttatcaagctagtttgcaaatggctccgtatgaagcattatatggtcgaaaatgtcgtacgccgctcctttgggatcaaaccggtgaacgtcaagtcttcgggacagacatattgcgacaggcagaagaaaaagtgaagattatccaagaaaggttgcgcgttgctcagtcacgtcagaagagctatgctgacaatcgtcgcagagatttggctttcgaagaaggagattatgtataccttcgggttacgccgttacgaggtgttcatcgttttcaaaccaaagggaaattggcaccgcgttttgtgggaccttttaagattgtgagtcgaagaggtgaagtagcttatcagttagagttgcctccgtcaatggcgggaatacatgacgtgttccacgtgtctcagctgaagaaatgtttacgtgtacctacggaggaagccgatcctgatcgtatagagcttcaagaagatttaacttatgttgagaagccagtaagaattttggaagaaagcgagaggaaaaccaggaatcgcgttatacggttctgtaaggttcagtggagtaatcattcagaagaagaagccacctgggagcgagaagatgaattgaagtcagctcatcctcatctattcgctagttcttctgaatctcgaggacgagattccgtt

SEQ ID NO: 20151 - DNA, 445 bp, Oryza sativa
  unsure (1)..(445): unsure at all n locations
  Clone ID: PAT_MRT4530_25545C.1
cagacattcgttcaatgttaagcaaaataaaaaaaaaggataccactagattgtcatcaataatactttacgactcgtatgtttgtctatttgcacaaatatttctacaaatgaaaaatagtcatacaaactagaaaagccaataatggcgccatttatttaaagccatttaaaactttttagctaaatattgagagggaaattatctagcgaaagggctaatgtttgcgcactgcgagcggccacactttattttctgctaagtttaattatataactaaagtttatacacctaaaatttttaccacaaaagtntatgtccgattttaatttagattcgaattcaattgtttttaatataaaatagtatgtattataaaagtttctgcatataaattttaggaaacctgtgcatttaattcatgggctacttttatgattatat

SEQ ID NO: 20152 - DNA, 609 bp, Oryza sativa
  Clone ID: PAT_MRT4530_25546C.1
atggcggacgacccgagagagcgagaggtctcgaacgtgctcccgggccgtcgcctcaatccccggggggaaatcttcgagtgcgcgccagggaaggatgtcggggtcacgggcctggtccaccaccatctcgtccaaccatcatgcgagcaccggcctcgtggaggggagcttcttgtcccggcgcatggagatgcccacccggcgccccgcacgttccagccgttcgatggcgtcgtggagctggccgggcccgatgtcgttggcaagatggagggccgcgatctctccagcctggtcctgcaccaagcgccccagatcggcgagggtgtcttgggccgtggcaagctggctggcctaatcgccaggctgcccgcgcgacgccagttccttctccctagcctccagctcggacgcccgtgccgccatcgccgcttcctccgcgcgatgggccactacggcctcggcggccgtggtggttcgggtgcgctcggcggcgacctcttcacggaggcgaagggcggattcggcctcggctgccgtcgcctcgtgggcggccaaagtggtctcgcgctggtccaacgcgcgtgcccgctcctcgagcactag

SEQ ID NO: 20153 - DNA, 413 bp, Oryza sativa
  Clone ID: PAT_MRT4530_25547C.1
ttttgggggttactttttagatgaaacatcctcatctgtcaaatataaaaggacccaatacggtgttgacatgcacagcatcgatatttatatatgcagctgctttgttctctgcaatcattatatcaattaattttttaaggggtgcatctgatgttaacttactattaatatatagatcatagctacaatcagtacgggctaactcaggattattcggatacatccccttaatcgaatttgcttttgccagaagcttcctcatcataaaaccttttagcacaaataaagactcctctctgttgtagcgatgcggctctattttatatgcactactattttagacttaattgaaaaacctcccctgagatatactgcaacagggactgtctatgataaatctgcacaggttt

SEQ ID NO: 20154 - DNA, 145 bp, Oryza sativa
  Clone ID: PAT_MRT4530_25548C.1
aaaatggaaagatgccagtagttcatagaactagaaatactagaacacgtctgatgcttaacgccacaagtacatactgaattaaaaggccacagagaacactcctgtagtcattccgtgcggccatggactctagggggaaaca

SEQ ID NO: 20155 - DNA, 198 bp, Oryza sativa
  Clone ID: PAT_MRT4530_25549C.1
cccagcttcgtccccgccgagggcgtccccggccgcaaccgcatggacggagtcgacgacggcggcgactcgcggatgtacatcgactgtcgacacgtacgcgccctacttcgacgatactactgggccgacctggtcgtgtggtaccttatgaccggggagcggtattaaaaattttttcttatgcatgataatgtg

SEQ ID NO: 20156 - DNA, 2667 bp, Oryza sativa
  Clone ID: PAT_MRT4530_2554C.1
ctctctctctctctctctagcctccgcctcgccccgcctcgccgccgctagggggagaagcggtggcggagagggccgcgtcctcctccattccgcagggggtggtggtggaatcctgtcaagaaccggggttgttgggaatttgggaatttagggctctgcaatttggaggaaggtgaggcgattttttttatctgcggggaatttctgcagtgggggtggttagattgtgctgtcaatggtggtggtggtggtggttcgatgaacatggcgcgttcgggtgacgtcagccgctgccaccggtgtggcctgtggtcgaatggctctgcgccgatcaccgtaagcgcctcgattacgatgcggtcttcgcgggttacagcgcacgccgtgtatctggattatcctaccagaaccgagcagaagaatgggggtaatttggtggtgatgcggcctgaccgacgacggcctagggatgatttcttcaagggtgagggtggtggtggtagtcttgtagttgtgcagccagaccgagaccgacggccgcaggatgattttgggagggcggccgcagattctgagaaggatgtatcacccatccatgctaagccgaggaagccattggaccagaaccccgagggaatggatgtggcaggtttctcaaaacatggaggaaagtgctatgctgacaaccttcgcaggtactgtaacagcgggaagctcatccaggcctgctgtgtgattgatgagatggtgctccatggccagattccggagactaagtgctgcgttaggataatccgcgggctcgttaaaaccggcaaggcaaacaaagctaggcatgttcttgaggttatggtgctttcgggtggggttccggacaccatcagctgcaacatgttgatcgcgcagctttgccgtggtgggcagctgagctcagcactgcaggttctggaagacatgagattcagtggttgctctccgagcggcatcacttttaacactttgattaggtgcatgttcaatcagcgtatgtatgacagggcgatctccttttggaaagaacagttgaggttaggttggccaccatatgagatgacaagcaccttgcttgttgatcttgtttgcaagaattgtggccctcagaaggccttggaagtcttggatgaactttctttggaaggatgtcaaccagatgtcgtcacctataatgctctcatcagtgcatcatgcaaggctggcaggctgaatgatgcaaagttcatcttaactcgtcttgctgctgaagggcttgaaccaaatggtacaacctactgcatcttactccatgccctctgcaacatgagaaggtgggatgaagtatgcgatttgcttgaagacatgaaccaggtgaatcgtgatcctgatgttacaacctacaatatttttatcaattacttttgtaagtatgggcatctggatcaggcaattgatgtgttggagaggatggttatcaacaattgttctcctgatattgtgacctgcaacacactcctgaatgccatctccaaaaagggtatggttgaggaagctcttgggattgctcgctgcatcagagaaaacggatacaagttggttctcatcacatacaataccctcatagatgctttagcaaagaaggctgaagttaagaaagctatggttctgtttgatgagatgcttagtgacgggatcagccccgatgacatcacatatggttcacttgtcatgggtttttgtaagaaagacatggctgatgaggccctggaccttttaaatcagatgctcactctaggctttgaagttaaaacaactacctttgtcatggtgatccaggcattatgtagagatggtaaagtggaagctgctgctgaaataactaaagtaatgttatcaaaaaatagtatccccgggaattcattgtgttcatccatagtcacaaaagttgccaaatcaggctggaataaagaggcacagatgctccaccagaagttagttgagtgtgagatccttaaagaagatgctgaagttattttaagcagctagtagctggagtataagattgttatttagtagcatgaaacatgcagcttctcagctaatcagcagataaattctggaagttgtagatagtgtcctggaagaggcatcctgacgagtgggtgagccggttaaccaagactgtaccccattgttgctaatgaaatgtgaccctatcttataatctactacctccgtttcagtttataaaactttctagcattgcccacattcatatagatgttaatgaatctaggcgcgcgcgcgcgcacacatatatatatatatatatattcattaacatatatataaatatgggcaatgctaaaaagtcttataatatgaaacggaggaagtactacttacgctactgcgacaaacaaattaaatctcaatggaagaggcattgtggatgtcacttcgcatggcattatggcccttgtaaccacattacgacatcgtcgttaagcaggatagattagcatattctggattagcggtagagttcccctaatgtgtttaggtgcagcttgattcttgaattcgtaatctctctatttatttatttatatatataagtgaagctgttggttgccaaaaaaaaaaaaaaaa

SEQ ID NO: 20157 - DNA, 426 bp, Oryza sativa
  unsure (1)..(426): unsure at all n locations
  Clone ID: PAT_MRT4530_25550C.1
atatcaccttaagtttcagaggtgggtttctattatacctgagcttatattttcactttcaaactacaatattttgaaaattcattcaagacaccgccaatggtggtaatgctatcgggcgcactataagaccaagggtttataccatatgcacatggcaagttaaaagccaacagcgcttgagcttgagccagattccggtcaatgtagagattgccaaactgctggaggtgtacctagtgcgctatggcctgaacaacgctaatgtcctggtagtgagattgttgcgccaacagcctgagctgatacaaaactttgttgctcctcagtngaaacgcaatttattgcaagaaagtgcttgccacaaagctatactgctgccttacgaactcattatataggctaagccccttttgctgtaacaaa

SEQ ID NO: 20158 - DNA, 498 bp, Oryza sativa
  Clone ID: PAT_MRT4530_25551C.1
ggtttcgtgttcatctcgccttgcccttggctcgcgtcggggcggatgcggaggcggcgtcgctgtccccgatcgaatgctgccgctgctgcgccccctcactttcgagatctgagcgcgtgacgcccgcctctccggctccgaggagaaatcaatggagaacggaaccaaggctgtcgatgttgggcaaaggcaactcaagatcatggaagaatgtcgtgctgcaacgatcccagattcccaatcttttgtacattctgctctcctctcgggcttggccagcataacatgaagtccaagccccaaagaaacagccccttgtaagaggggttcttcgtctgcacgtgcccaacaacaactcctgcaaccgttttctccactgacaaccgattgaactcatccgggtgacctggcttcttccattaacctatggatgaagctccgtttgaaaaatccaagtaggagtactgcatagccgtctactaatctcttcttaca

SEQ ID NO: 20159 - DNA, 2011 bp, Oryza sativa
  unsure (1)..(2011): unsure at all n locations
  Clone ID: PAT_MRT4530_25552C.1
ttttttttttttgcagagtaaaagacactgaaaggtctcattttattcagagcattttgttcagcagcactcctaccaaccaacgctattcaaatcagagatgaatagctggtgggtctcacaatcagatcaagccattctcatacagttcagccaactccaacatctcaaaactatagctgcctctgcaccaaaatcttaacatttatacagtaacaggcacaacaacgaaatggcaggtaaatttctcctcaatttgccatcgaaggcatcagtttttcagtaccctctgtgattagcacactaaaaaaaagcatgtctggctttgatttattttgttttggtctacacgatgatgctatcatggggacaaaaaaaaagaaggcctggggaaaatccatcaggcttgtatagaactccccatctgttcaatggtgaatggcaattcagtcgcggtacgctgccatgaagccctcatggaatgccttgaagcgggagatgatcgcggggatcttctcctcctgtggcaggattgtgcatctgatgtgccatgtgccaggaacttggccaaatccagatccagggacaacaacaattccggttgcctcgaggagacgaagggcatagaaagcatcaggtgctttgttagcagctttagcagcgtcaattgccttttgtggcagactaagctgagggaagaggtacattgctccttcagttttgttgcatgtaattccctcaagactgttgaaagcattctccaatgcctttgcacggcgagctaatgattggaggattccatctttctctgccttgtatgaagcatatgatgcatctccagcctttggtggattcatgacgaggctggcaaggatctggccagtgatattggaacataagttcactgacgccactttgtagatctgctctctaactggagcactgaagccagtaatctccatgtagcctcctcttttgccacattcaccataatatcccttagaaacagattgaaatgatactaaagggagatcatcctcgttgtatcccatggatctcgctatcttcttgaaagagttaaatttcttgttgtcaacatagatgttctcttggtacacctcatcagccagaagaacaagtccctcatttttgcagaacttcactatgtcccgttggttttcctcagcaagaacctgcccagttggatttcctggattgataactaccaaagccctaacatcaatgcctttcaaccgagaatcttcgagttgcttcttaaggtcagagatctccaaaaccccagcctgttgattcattaagataatacgggacaagagctccaccatgaagagcaatggaggctgagtacaaaggatattgaggaattgggcagagaatgccatctttctcgttccttatcagtaactgcatcatcatgtgaactccagggcttgctccgtcagtaaggaaaatgtcgtctgcatttgcagggtatccgtcacgtgatgcaattccagcagcaattgcatcacgcagccctttgatgccctggctgtggctgtatgctccagttgctcttccaggaatcgaggcaagaattgttgttgctcgagaaatggcatcagcactgaacaatgatttggtttcctccttttccaacaagcatggatgatcacaaagagcaataacctccctgaagaatgtaactggcttctgaccaagagactggggattcccaatgttgcagtataggatctcatcaaaaggaagagaccctggttgagtctgtagctgttgctgcaggcgctgagcatggatcacaatctctccacgcactgcatactcacaattcaaaaccttggggttgaggttgtcgacggcgacgctgggagcagccatggcggcggaagcaccaagaacagagagagaaagtgagattcagcggcagcgttgacgggttgggtttcgtggcgaatcgacggctcccggccggttttttttcnccggccgg

SEQ ID NO: 20160 - DNA, 444 bp, Oryza sativa
  Clone ID: PAT_MRT4530_25553C.1
gttgatggtcattattgatcagtttcgactctcaatattactaaaataaaggaaaactagtgatacttgcaatgcatatatctgttagaacaataatattccactagtattaggtctactaacatttttgcagagaatgacaataaagtggaggagaatcgacatcaacatagacgataaatcaatcggacgatgttgagagttagacttatgcatgaatgggccaagaactcagaattgacacgacatactgggccaaatttcacaagtctacggaggagaacaacagaggaggccacctgccgaatatgggccaggttgggccggcccctggttcggccgaacctcccccggtgccgttggatccaggttttggctggaaggcgtggatcactccccaatgaaggttggagggcaattccgaccattccaactgccacaacc

SEQ ID NO: 20161 - DNA, 303 bp, Oryza sativa
  Clone ID: PAT_MRT4530_25554C.1
cccgggctgcaggaatcggcacgaggcctcgtcgttggctttaccactggcggattcccacactgccccccagccgccgccacggctgaccccgtctccccaccgaatccaccccgcctcccaatttaaccccctcctcctcctcctcccccctctcgcctccttctcctccctcccccaatgcgtcacgccgccatttcttggcctcccactcgccgcagatctttgattcggggggggttcttgcgtcgcgcggatcttggctgaagcgagatgggcaactgctgcgtgacgccggagggc

SEQ ID NO: 20162 - DNA, 102 bp, Oryza sativa
  Clone ID: PAT_MRT4530_25555C.1
atggagttgatgcgagcgccctgggcatgggctacccgcatctgcatcttggtggtggcaccgtatgtagcctcctacatgccacatcaaccaaaggagtaa

SEQ ID NO: 20163 - DNA, 517 bp, Oryza sativa
  Clone ID: PAT_MRT4530_25556C.1
cttttcccccaaacccgcgaccccctctcctcttccccctcgcgcgacgactcttccgaagcacacccccgccgccgcccgcctcctcctcctcctcccccgcccctccatccccccccgacgcccggtggtgactccgacgaggaagcgccccaagaagcgaggtgaggtcggagggagggagggaggaagcagggatcggctcgctcgctcgctcgcttccgcccccaaccttaaaccctagggttcccgcacttcacctgctcatcggctcgaatcttgccgccctcgggcgcgccggccgcgccgcccccgcccctctcccgccccagcgccagcgacgccaccgccgcccctccgccaccgccatcgatttggtctaccatcgtcgtcgccgccatcgccatcctcccccactgcgctgctttcgattcccctaaccggcccgcgtagccgccgccatcgttcctccccgacgccctcgccgtcctcctcgccacagccatcacggtcctcc

SEQ ID NO: 20164 - DNA, 293 bp, Oryza sativa
  Clone ID: PAT_MRT4530_25557C.1
acaagttgttggcttttcttttcccatatataccaggactctccaattaaaaggcccgaaaggcaaagtgtacattgatcaacagcccaggggacaataccctacaccaaccattgtcctcgcctaaccaccaaccggggatgggagcaccgaaaaccaacaaacggggaatggacccctttagaactcgcccaacaaatagttcccccgcggatgaacaactcgaatggagcccgtttagaaccaaaaacttacaaggaaccgtaaatatgtaccaagtgctccaccctccc

SEQ ID NO: 20165 - DNA, 2064 bp, Oryza sativa
  Clone ID: PAT_MRT4530_25558C.1
atggaagaagtcaaggaatctccagtacagccaacgactagtacagctcaaacaatcacttcaagtggcacagctgatttccaaggttttcatggagctcccaagtttgctgtcggagttcctaggaatctaccagctgttgctgccttgcctgctactgccccagtgacttctgcttccctggttaccttgaaaccacctggatcatctcctgtaaaatcagttaacaacccttcagttgttacaatgccccatatggctccatcgcatcttaaatcggataaaggagttaatggtcctcctaatctagtacgcaccggagcaacctatggcaacttgaacaaatcatttcatgatacatgtgctaggtccaatctgaacgctgtacagagttccaatccggtggcgaaaaatcaggacacaaagacagcatcaattgatgctacagcaggaaaccctcttacaggtcatcatgctacaccaagcgtggcacctgttcctccaaaacctacttttgctaaccacagtgaaatagcaaaaagtgttcaacgtgttctgcaccaaccagctaatcatcctagctggattccgccatcaactgagtacatgcgttctcgtttggactgtcaaatatgcaaagtagctatcatggatatggaaagtttgcttgtttgtgatgcttgtgagaagggagcacacttgaaatgccttcagcattatggtaataaaggtgttcctaaagctgagtggcattgtccaacatgcctgacaaagagtaagggcaagcctttgccaccaaaatatggcaaggttacaagaactgctgtcgaaccaaaggctactccaccaccagctggaacgcaggtttcttcgcaaggagcggcagaaaatattgctgtaaaggaaaatcaccaaaaagtggctgtaaatggtaatcttctgaatcaaaactccacgcaagctggcagtgttgctcagagcagtactgttttggctctaggtgttactgctgctgttgcacaatcacagccgctttctatatccagacttccagaaggaaatttaaataatgatgcagccttatctagtgaaaagacggggaatgtgggtccttgcagtagcattgcacatcgtaatgaaaagccccctgatgaactacagagcagtggactgcctgctaacagtaagactggaacccaatcagggaaatctcctaatgaagaagtgtccagtgtattagtttcaggcagtgcggattcaacaaatgataccttgcatgagcagaaatctcatgaaatttctggggaaaaatgctcagacaactcttctattgttgcttctgaagcaaatatcaagtcaaaagcagactctgagctcatttcgggcagagatgtggaaatggttgataatgatataccaccaaaggatcaaaccaacaacattgccactgaggacaaacccagtactcaagaaacctctgaagcacataaaatggaagttgtggaggtgagcgccaatactggaatacaaataagccagggtgacagtgctggcactgaagagaatctccacactgaagtaacttctgttccacacatgatcaatgatgtggcaatggctaccaatgctggaacaccaatatgtccaagcaacaacgttgccattgaagaaaagcccaagtctactgtaatttccgaggtatgtacaaccaaagatacggaaatgactactgatgccactttagatcaaaacaccaatgttgctacagaagaaattcctttgcctgaatcaatttctgcaactgaggatgctgacatgactactgatactggaataccaacaaatcaaagacaggaagtaaatggattggctgaaaatggcagaaaagaacatcccctgggagaaacagataaacacaaatctgaccatagtacgatgcctgatatgtctacagccccacagataacatcaaatggagttatgcattcaaaagatgaagctgcatgtggccatgaaggtgaaattgtggacatcagtgcagcagcaacagaggaaaacaattag

SEQ ID NO: 20166 - DNA, 391 bp, Oryza sativa
  Clone ID: PAT_MRT4530_25559C.1
aaaacatcaactgcaacactaaggagatggtgcaaatctggagcagtgacaacatcaaccaaacttaccattatctcatatacaatgctaagacactcatttcatacataacattgcgtagcttacaatatattattcatcgtcatattctaacaacataaacaagctcataacaggtctataagactacaataactacctatgataactcactatatcttatgctacccagatttacacattcttacttgatgtaacaaaattcatcacggtattggaaagctctactcgattaacatcctaactgtgatcaatttccttgctaacatgtacctgatctttaagtatatattgcgcaacttcaccagcatttttcatattaatgatccca

SEQ ID NO: 20167 - DNA, 948 bp, Oryza sativa
  Clone ID: PAT_MRT4530_2555C.1
tctcgccaggtacaccatctcttcattccgtattccttgacgatatccaccaactgttctcgagtaatcgagaaggcgcagagtatggtcttttgtctctacaggatccgacaaggtcttatccgctctggacgtccccagccgaagttcccttaggttcctcagaggtcttgtcaagacggcataaaaggacattaggataggtttcaacgctaggtgtcttttgtggtaagggatctctgggtaaaacacttggcgatattgtgcacctgatatcacctttgttgaagtagaggtaatgggagaatcgctacacctctggtcaagaaccaggtagtagtcataactcaaccatactggttgaggaccagtgagtaggtgtctctcgatcatttgaagtcgtggtgcgaggactgctgcgttattgctgtagtcgtacctcgaccaatggaagttgcagtgcgggagattgctacgtactggttcgagaaccagcgagcgagtagaatcatctctcgaacaccaatggaagttgcggtgcgggagattgctacgtactggttcgagaaccagcgagcgagtagaatcatctctcgaacaccaatggaagttgcggtgcgggagattgctacgcactggttcgaggaccagcgggcgtgtagaattatctctcggacaccaatggaggttgcggtgggagagattgctacacactggttcgaggaccagcgaacgtgtagaattatctctcggacaccaatggaggttgcggtgcgagagattgctacacactggttcaaggaccagcgaacgtgtagaattatctcccgaacaccaatggaggttgggcgcgacaactctgcatttgtcgagatcgtcctcgataatgcggtgtactcgaccacatcctactcgagtgctcaattgttcctgaaaaatattttctag

SEQ ID NO: 20168 - DNA, 354 bp, Oryza sativa
  Clone ID: PAT_MRT4530_25560C.1
atggccgccaccgcgcgctcgatcgatcatgccagcaacccaaaaactgacgctgtcgctcgccacaccaccgacgccgtcgcctgccgtttgctccgcggctcttcccattccttggaggtcgcacgcctatggcaccatcggtcaccgccgcacatactctttgccgccccttcctctccctccatcacccgcagcgagaaaacctccatccgcagcatgtaccgctgtttgcaggtcttcaacggtaccaatgattatcctacccgacgcccagtagactacccactggaagagcagcaaactgatgaacatcgtctagaagaccaggaaatgaaactgtgcaatccataa

SEQ ID NO: 20169 - DNA, 1062 bp, Oryza sativa
  Clone ID: PAT_MRT4530_25561C.1
accatgttccatcaaaacttaattaggacagaaacatgcagtagccagacacataaacagcagatactccaaatcttttttttttttttttttttttttttttttgtcagctaataaactcccgagtgtcgaattggcagtaattgtggacacaccaattacaaacaacataagagtggcaaattgttccttctcccaacatagatatgggctacatgatagatgctctgcaaactagcagagtaacagattaagtgcctaatggtaatactaacagatgaggcctaaacctacccaaaatgcaatttttcgtctgccgatgtgttagtagtgccgtctttgttgatgtcacttggttacctcatttccatcatcaacagtagctcggataatatgcaccttgaaggttgtaggcttgaccaactgaaatactgtcgcatctccatccaacaatccatggtccaaagcaaagccagcccagccaccacttaggccattcttgtaggcaaggtaattggtatcaaattgctcgtctttctcatccaacaaagtgacaatggcatcatgttttggcaggtaagtctcgcagaaatgcctcggtaagcccaaccaaaatcctcggaccacatgtgaatgtagcattggcttcacgaaggagggaaattcagggtcaagttgtgattccagttcctctgcttttcttgctgcctcgagcctagcttccatggaaattgatccacgggttgccaggtagatactgtcaattgcttttcgtggagaccttttcatcctctctgcgccatctggtgctacctctgcatacttgacctcagggagattagcgaggcgccgagacctcctcggaggcgagggagccacgaccgccgcctcgatgatcctacgcctcttctgcttcatgggggagggggtcttgggggcgacggcgatggcggcggagaggtggcgcaggttgagcgcctccatcttgcgcttgttctcctccaccgtcctctccctcgccgcctcgtacgccgtcatccccttctccatccccatccccat

SEQ ID NO: 20170 - DNA, 246 bp, Oryza sativa
  Clone ID: PAT_MRT4530_25562C.1
atgtatgcttcaatgcgagggccccattcaatagggtggcacgccgaaggtgcttgccggtggccaccaaacaccatggccatcatcccaactcgccagcgccagtatgcgctccactaccaccagctcaacccactattgcttcccttcccccccgtcaaacctcaatcgtgccgcctaattaaagccacaaccgtcgttgcggcagccttcacagtcacgctgatgcaggaggaacaaggaaga

SEQ ID NO: 20171 - DNA, 1782 bp, Oryza sativa
  Clone ID: PAT_MRT4530_25563C.1
atgtccatgtccaagctcctctcgccgcctcccacctcaccaccaggaccagccctctcccggctcccgtgtcgccgtgtagcgccgcctcccgtgctgcccttcccctttcctctccgccgcttgacgtcgcgccgcgtcttcgccaccagctgctcctcctccgactccgaacatgctccttcggcctccagcaccgcccttgccggcgccggagacgacctctccgccggtgtaacccaagaacgcgaaggcgcactgccgtttgttcagctctcctcgggtatagtcctccggaccgaggagcagagcttgctcggggaccacgcgccggcgccggcgccggcctccgccgcttcgtctttcgcgttgctggatgagctcaacggaggctgcagagaggatgaccacctgggagaaactccggcttacccagccgccatgaacgcgctgtacgcggcctgcctcgccgggaacgcgacggagcagctctggaacttcacatggccggccgccgtcgccgtgctccacccggcgagcatcctccccgtcgccgtcctcggcttcttcaccaagctcgtcgtgttcgccgccggcccgttggtcggcgagctcatcagctcgctcccacgcatccccgcctaccgatctctcgccgcaattcagaccgcggcgcatttggtgtcggtggcgacgatcacctacgcgttcgccgtccacagagcggcggcggcatcgctgctcctgcggccgtggttcgccgtgctggtggcgtccaccgccgtcgacaggctcgcctgcgtcgcgctcggcatcatcgcggagcgggacttcgtcgtgcagctagcaggggcaggcaggccggtggcgctcgccaaggccaacgcgacgctcagcagagtcgatctcctctgcgagacggtaggagcatccatcttcgcgttgctgctctccaagaacaacccactcacctgcatcaagctatcctgcgtcatctcgctctgtgccctgcctctgctgattttcctgtgtggagagatgaaccggctcgctgacggcatcttcgatcactctgaaaatacaacctcacacgctgaaaaaacttccagtttcagcatacgaaaaaccgtggaagaggctgtggctaccgtcaggaatggctggagcgagtacatgcggcagccggtgctcccggcgagcctcgcctacgtgttcgtctgcttcaacgtcgccctcgcccccggcgcgctcatgaccaccttcctcatccaccagggcgtgaggccgtcggtgatcggcgcgttcggcggctcgtcgggggcggtggggatcctcgcgacgttcgcgacggcgaggctcgtgaaggagctcggaattctcaaggccggagcggccggtctgatcgcccagagcgcgctcctcggcgccgcggtcgtcgtctacctcaccggcgccgtctcacggcgagccggcgcgctcttcgccttcctcggattgatcgtggcgtcgagggcggggcacatggcgtacagcgcgatcgggctgcaggtggtgcagaccgggaacccggcgagcaaggcgaagctgatcggcgccacggagatcgccgtcgccagcctcgccgagctcgccatgatggccgtggcggtggtcgccagcgacgcctcgcacttcggcgcactggccgcgctctctgccactgccgtcaccgccgccgccggaatgtactgccgctggctggccaatccctccgacgagcttagacggatcttcccgtcctga

SEQ ID NO: 20172 - DNA, 2514 bp, Oryza sativa
  Clone ID: PAT_MRT4530_25564C.1
atggtcccttatatcatccctctatccctcattctgttcatcatccaagctaatccttcgacgggagcccagatcaacgagacaacaattcctcaaggttctcaaatcaacacggtgggcacccagagttgggtctccccatcggggcgctttgcattcggcttctatcctgaaggtgagggcttctccattggtgtgtggcttgtcacaggtgcaaccaggaccattgtgtggactgccttcagagatgatcctccggtttccggtggttcaattctgttaacagctggtggttcacttcaatggattcctgctaaccaaggcagccaagggaagctgatatccgccgcccctaattctgctacctctgctgctatcttggacaacggcaacttcgtgttgtatgatgcgaaaaagcaggtattatggtctacctttggctctccgatggacaccatattaccagggcagaacttgcttcctggcaatcagctgttctcaagcatctccaataccaaccatgccacaggaaagtatcgcctttccaaccaggaagacggcaaccttgtgatgtacccgattggcacagtagaccctggtagtgcatactgggctagcggtacttttggtcaaggcctcctgctcactctttcactagacctcaatggcaccctatggttgtttgacagaaacagttcatatacaaagatgctattcctgacaaatcagtcactgagtacctccccagattcagagagctactaccgtctgacattggatgccgacggcttattgcgactctacgcgcatgtgttcttcaagaaaggaagggagcccctaacaaagatcgaatggttggagccatctagcaacgatcgttgtggtgtgaaaggtgtttgtggtccaaatagcttctgccaagtcactgctagtggagaaaccagctgctcctgccttcctgggtttgaattctcaagtgctaaccaaaccactcaaggttgctggagggtaaggactggcggttgcacggggaatagctctaatggcgacatcggacctacagccacaatggtcatggtgaagaacactagctggtcagatttgtcatacaacgtcccaccccaaacaacaaccatggaagagtgcaaagcaatttgcctctctgactgtgcctgcgagattgccatgtttgacacctactgctcaaaacaaatgcttcctatgaggtacggcaagattgatcatagtagcaacaccacgctgtttgtgaaggtatactcctatgaaccaaaaggtcctatgaggaggactagaagtgctatttcaactgccatgttgatatcaggttctgcattggccatcttctcacttgttgtgctctcagtctctgtattgctcagcaagcgccaccaattctccaggtacacaagggctccacaacatcaagatgctgaatttgataaggagagtgttggcatccgatcgtactctttccatgatctagagttgtcaacagatggctttgctgaagagctaggaaggggtgcatacggcacagtgttcagaggtgtcatagcaaacagtggaaacaaggtcattgcagtgaagaggctcgagaggatggcagaagacggggagcgagagttccaacgggaagtgcgtgcgatcgcactaacacaccataggaacctggtgcgcttgtttggtttctgcaacgaaggcgcgtaccgccttcttgtctacgagtacatgccaaatggctcccttgccaacctcctcttcaagcctgaccctccattacctagctggagcaagagggttgcgatcgcgctggatgtggctagggggttacaatacctccatgaagatatagaggtccctataatccactgtgacatcaagccggagaacatactgattgatggcactggaatggcaaagattgcagatttcggcttggcaaagcttctgatagggaaccaaaccaagaccttcactggagtccggggcacacgtggctatctcgcgccagagtggagtaagaacacggcgataactgttaaggtagatgtctacagcttcggcgtgatgcttcttgagatcattagttgcaggaagagcatggagcttaagatggccggcgaggagtgcaacatctccgagtgggcatacgagtatgtggtctccggcggactgaaagaagtggctgccggagaagatgtcgatgaggttgagcttgaacggatggtgaagatcggtatttggtgcactcaaaacgagccgatgagaaatctgattgtctctacaagagtacttgtgtatgacaagtatctgaatggatggatggtccgggtaaaaacatatggtaagggatacttcttggccattgtttcagcgatctcgaacacaaacttcagaatcattcctaatccagcagcaataaccaccatactgattcagggagaactatacccttctactctaaacattaataactgttcaattaaaaagtaa

SEQ ID NO: 20173 - DNA, 488 bp, Oryza sativa
  Clone ID: PAT_MRT4530_25565C.1
ataatgaattatttttgaaaaggaaaagagggtttattgcatcagcgggctagggtttcggtggaccgggcgcacggcgacggttcacgcgaacggacggccgagatcgacttgatccaaaacggacggccgagatcgaacggtccacgaccggctcacgggagagggcgacgatgacgtcagcgatgacgtcaccaccggcggcggcggctcggcggctcggacggcgcacgctggccggcgaacggcggcacttcggcacgaacggaggacaccaacgggtagagcgtgacgcgacgaactcaccggtgaccaaaggagcggcggaagaccaacggacggcgacggcgacgacgaaggatgtcgggtcccaaaactacgagaggagttctggcgttcccgaggtttttagagagaactggttgagagacccccgtcatctcaatcaggttttcataattcacacacacagctcgcgagataatcaa

SEQ ID NO: 20174 - DNA, 371 bp, Oryza sativa
  Clone ID: PAT_MRT4530_25566C.1
atggactccccagcgacccccgtgggcttatctccgccacttctcagtctggtgccccgcaatgaaccatgctatacaaaaggaaaaagggatttattgcgtcagcgggctagggtttcggtggaccgggcgcacggcggcggttcacgcgaacggacggccgagatcgatccatccaaaacggacgtgtcgagatcgatcggtccacgaccggctcacgggagacggggacgatgacgtcagcgatgacgtcaccaccggcgtgcggcggctcggcggctcgacaaagcaagcccgccggcgaacggcgacgcttcggcacgaacggaggacaccaacgggtagagcgcgacgcgatgaactcaccggtg

SEQ ID NO: 20175 - DNA, 708 bp, Oryza sativa
  Clone ID: PAT_MRT4530_25567C.1
atggccaaatggcggatacctgatatggatggccagagactgacttgtcaagattacaagactacaaggagatacccaaaagaggacagcatggattgggttcaactacaggatgcaatgttaggcttgcgaaaaagggatttattgcgtcagcaggctagggtttcggtggaccgggcgcacggcggcagttcacgcgaacggacggccgagatcgatccatccaaaacagacggccgagatcgatcggtctacgaccggctcacgggagagggcgacgatgacgtcggtgatgacatcaccaccggcggcggcggctcgacagctcggacggcgcaagctcaccggcgaacggcggcgcttcggcacgaacggaggacaccaacgggtagagcgcgacgcggcgaactcaccgatgaccaaaggagcggcggaagaccaacggacggcgacggcgatgaggttgaaacggcggagctcttcagcttgacgacggcgacggtgctccggcggtctacaacgacggcgaaggggcggacgaggacggcgatgacttggcgaccacaacggcggtcttcccgagcgacggcgacgacgagaacgacggcggcgcacggcgggagcgacggcggcgacggcgacgctagggcacacggcgctagggcgtttccgacgacgagaggagaaggcgagggtggcggcgggtag

SEQ ID NO: 20176 - DNA, 2349 bp, Oryza sativa
  Clone ID: PAT_MRT4530_25568C.1
atggccatccaagataaagttgagaacaaagacccaactgtgactgttgggttggccgtgagtagttccaaatccagtaagtacgccgtgcagtgggctgtgaaaaacttctgcaccaatgggatagttaggttcgagcttatccatgttctgcagaggatcaccacggatcaaaccccgatgggcaactatatcccgattgataaagtacgggctgaccttcccagcgcatatgtgaaagaagtcgaatataaagctcgaacgatgctccttttctacaagaacatgtgtgatgagaaggctaaagctgaagtactggttgtcaaaggtgaagatgtggcagaaaccatttccaatgttgtttcaatgtacgaaatccacaagcttgttgtcggtgactcttctcagggcaactttattaggaaatccaagggtactaggacatcttctcaaatttgcagaagtgttccaagcttttgtgcagtttatgttgtctcaaaaggtggtttatccgcagtttattctcctggatttgaaggtcacaagagttctgagctattcctgtccagtgatagctccaaaactgaaatccattcagatgataagccctcattatcagatgccacaccttcgagaagctttagatcaaacttgacatgggagaatctggaaagtttatcatccgcagaccatgatagaccgcgctccttacatgagtatcttactgaaagcacttcagcatctgttggtgataataacagtaattctccatgtgctagcggtcaaacccctcgaccaagtaacgtgcttatctcagataaagctccaatgacaagcagtcccctgcaggaattgatgctttcagaggacatggatgatgtaaatagcgagcttgaaaagctgaggcttgaacttaggcatattaaaggagtgtgcaaacttgttcaggatgagtccatcaatgcttctcagcatgtgactgacttagctgcaaaacgtgctgaagaggaagcccggctcagcgaggtctactccaggatcaacagagtcaatgagcaagcacatcaagagaaggaacaactgaacgctttggaggctcagtgcaggcatgtgagggatcttgcaagaaaagaagctttgcagaagcagattttgcagctgaggacttcgaaggaggctgataagatgcaaaggctggaaaaacttcttgaattagatgggatgtcatactcaacatttacatgggaagacattgaatctgctacatcatcgttttcagaggcacttaaaattggatcaggatctaacggaacagtgtacaagggcaatctacgtcagacatctgttgccataaaagtcctcacttctgacgacagccacaggatcaaacatttcaaacaagagcttgaggttttgggtaagatccgtcacccacatctgctgctgctcataggtgcctgtctggacagaccatgcttggtgtacgagtacatggagaatggcagccttgaggatcgcttgcaactcaaaggaggcacggccccactcccatggtaccaacgtcttcgcattgcttgggaaatagccctggcccttgtctacctccacagctcgaagccgaagccaatcatccatcgtgacctcaagcctgcaaacatactccttgatagcaatttcaccagcaagattggcgatgtgggcctttcaacattgcttccgctgggggatgccttgtcgacaacgcgcacaattttcaaggacacagatctagttggcacactgttttacatggacccagagtaccaaaggacaggccaagtgtcaacaaaatctgacacatacgccttgggcatggttttattgcagctgctcactggaaagccacctgtggggctagcggaccttgtggagcaagcagtagaaaatggtcaccttgttgacatcttggacaagagtgctgggaagtggcctgcacaagaagcacatgagctagcgcagcttggcctaagctgtttggaaatgcgaagcaagcatagaccagatctgaagtgtaaggttcttgtggagctggaacggctgaaaaaaattgccagtgctgtctctgaccctgtacggccagtgatatctggaccaccaagccattttatctgcccaatactcaagaggataatgcaggacccatgcattgcatctgacgggtactcgtacgaccgggtcgctattgagatgtggttgtgcgagaatgacaagtcaccgattacaaaatcgcggcttcctaacaaggatttggttcccaaccatgctctgttatgtgcaattacaagttggaaggcagaagcaagggactga

SEQ ID NO: 20177 - DNA, 4892 bp, Oryza sativa
  Clone ID: PAT_MRT4530_25569C.1
aaggtgggttgtgagcatatggttttgatggttgtgctcatgacaattaaggaccggttcgcgagctactgttgtgaaacatttatcgtgccaaccacaagccagcgtgggcaacggctttatcttttgtatagcgtgattcattatagtgcgcccgactgagaagtggcgagaagtccatgggggtcgctggggagtccatgccttgttttaaagggggtgattatgatccaggaaaggagcactgtaatgggttatgttgtgcgaggggtattgtcacgactcctttccgagatgccgccccattcaccgagaaatttgatcgaggtgttaggattcgtcagggagctgaggttgatggcttttgaggtaggttatgaagttgctcctgagtatcgccagatttcccatgaccccgacgaggagaagtgtcgtgttcgtgtgacgttggctagtgatagagaagaccttccgtctattaagttcgaagctggaggaagatcgtactgccatgcttgtcaagaagcagctttggtggccattggagagttgcgtcaacgttttgaagaagagttggattcatcagctttccagtatcatcctcacaagcctcatggtcaagactatggaacctatatctgtcctgatggtgaagagagtgccactctgatgcatgtggtgcatatgcttagtgctatggatgcagtaagtgtggagcgagacaaagcagctcatgacagggaaaactggaatcgaggcaagatttgcaagttggagagcaaggtgtaccgtctacagaaggaattagctgaactcaaaggagaaacgccgccgccaacacccaagcttcgcctcgtcgcaagaaagagaacctgtccgccacctcgtctccagttagcttcgaagattcgcgtgatgggtgaagctgtgcccgatcgtgctgaacctgtcatcgacatcataagtgatgaggaagaagaggaagaccctgaagaaagagagccagctactccagaggaagaagatccatcgcttcgttccgacgcaaggcgcagggctgaaggagaacttatcacttggcaggagttcacgactgcttttaagaagacgcatataccgtcaggtgttgtagctctaaagaagagagaatttagagcactcaatcagggatctcgttcggtcaccgagtacctccatgatgtcaaccgtttagctcgttatgctccggaagatgttcgcaccgatgaagagcgtcaggagaagttcttggagggactgaatgatgagttgtcttatgccttgatgtctacggatttccgggatttccagcagttggtggacaaggcgattcgtcaggaagacaagtataaccggatggagcagaagaagcgcagggctgcccaattcaaggcacaacagggcagtaaccagaggccgcgtctcgttactggacctcaagctccatcgtaccctcaaggaggatcttcatcagttgtccgtccccaacgccagttctacaataacaatactggtaatcgtggcaatgacaaccgcaacatggttgctcgtcctgcagcaactccagctcagaatcagcccgttaggaaggaacagggaagcaagccagtgatatgcttcaattgtggtgatccaggacattatgctgataagtgtcctaagcctcggcatgtgaagaacgctccagccccgaacaactccaatgttctagcaccgaaggcacgtgttaatcatgttgcagcagcagaagctcagaatgcaccagatgttgttttgggtacgtttcctgttaactctataccgcaactgtgctttttgattccggtgctacacattcctttttgtctaaaagttttgcgagcaaacatgggatggaagttgttagtcttgggagacctttactagttaataccccaggcaatcaagtattttcgacatagtattgtccttctgttactatagaaatagaagaagttcttttcccatcctcgcttatcttgctagaatccaaagatctagatgttatcttagggatggactggttatctcgtcacagaggagttatagattgtgccaaccgtaaggtgactttaaccagtagcaattgggaaaccgtttctttctttgtgtcctcccctaaatatcatggtgtgaacttaaaccaagttgctctacaagagattcctatagtacaagactacccagacgtgtttcccgaggatttgccaggtatgccacctaagagagacatagagtttcggatagacttggtacctggaaccaaccctatccataagagaccatacagaatggcagctaatgagttagctgaagtgaagaaacaggtggatgatttgcttcagaaaggatatattcgacccagtacttcgccatggggagcaccagtcatctttgtggagaagaaagatcatactcagagaatgtgcgtggattatcgagcgttgattgaggttactatcaagaataagtatccgctacccagaattgatgacctgtttgatcaactggaaggtgctacagttttctccaagatagatctccgttctggatatcatcaacttcgaatccgtgaggaagatataccaaagaccgccttcacaattcggtatggtttgtttgagtgtaccgttatgtcatttggactcactaatgccccagcctttttcatgaatctgatgaacaaggtgtttatggaatatctggataagtttgtcgtggtgtttattgatgacattcttatttactccaagacgaaggaagaacatgaagaacatcttcgtctagctttagagaaactacgtgagcatcagctttatgccaagttcagtaaatgtgaattttggttgtctgaagtgaagtttcttggtcatgtcatctcgtctggaggtgtggcagtagatccaagcaatgtggagttagtgttaagttggaagcaacccaagacggtttcagaaattcgtagtttccttggacttgctgggtattaccgcaggtttattgagaacttttcaaagatcgccagaccaatgactcgtctgcttcagaaggaagtgaagcaattacgacctcatgagaataactacccaacgcatgacctagagttggcagctgtggtgcatgcattgaagatttggcgtcattatcttttcggtaatcgtacagagatatatacggatcataaaagtttgaagtacattttcactcaacctgatttgaacatgcgtcagcgaagatggttagagttgattaaagactacgatatggaaatccactatcacccgggaaaagcaaatgttgtagccgatgctcttagcaggaaaagctactgtaatatgtcagaaggtcgacgtttaccttgggagttatgccaagaatttgaaaagttgaacttgggaatagtcagcaaaggttttgtggccgcattagaagctaaacctactctgtttgatcaagtcagagaagctcaagtgaatgatcctgacatacaagaaattaaaaagaacatgcgaagaggtaaagccatcggttttgtagaagatgagcaaggtactgtgtggttaggagaaagaatttgcgtcccagaaaataaggagttgaaggatactatcatgaaagaagctcatgaaactttgtattccattcaccctggaagcactaagatgtatcaagacttaaagcaacaattctggtgggccagtatgcgacatgagatagcagaatatgtggctctatgtgatgtatgtcagcgggtcaaagcagaacatcagaagccagccggtctgttacaaccgttgaagattccagagtggaagtgggaagaaataggaatggattttataaccggtctacccagaacgtcggcaggacatgattctatttgggtagtggttgataggttgacaaaagtcgcccacttcataccggtcaaaacaacctacacggggaataagcttgcagagttatacatggccagagtggtatgtttgcatggtgttcctaagaagatagtgtcagatagaggtagccagtttacttcgaagttttggcagaaattacaattagaattgggtacccgtttgaatttcagtactgcttatcaccctcaaatagatggtcagacggaaagagtaaaccaaattttagaagatatgttgagagcctgtgttctagactttggtggaagttgggataataatttgccgtatgcggaattctcatataacaatagttatcaagctagtttgcaaatgtctccgaatgaagcattatatgatcgaaagtgccgtacgccgctcctttgggatcaaaccggtgaacgtcaagtttttgggacagacatattgcgagaggcagaagaaaaagtaaagattgtccaagaaaggttgcgcattgctcagtcgcgtcaaaagagctatgctgacaatcgttgcagagatttagcttttgaagaaggagattgtgtatatctacgggttacgccgttacgaggagttcatcgtttccaaaccaaagggaaattggcaccgcgttttgtgggaccttttaagatagtgagtcgaagaggtgaagtagcttatcagttagagttgcctccgtcaatggcgggaatacacgacgtgttccatgtgtctcaattgaagaaatgtttacgtgtacctacggaggagacagatcctgatcgtatagagcttcaggaagatttaacttatgttgagaagccagtcagaatcttggaatttccgacgttccggaggagagcgtttccgttgaggaaggttccgaagcgtttgcggaagcccaaggcaagtcacacagatcccaaacaaccctttgagcatgttgaacccgtttaa

SEQ ID NO: 20178 - DNA, 354 bp, Oryza sativa
  Clone ID: PAT_MRT4530_2556C.1
atggacaagccccaaagctggtacaccgcaccaaaagatgtgggccgcatagagtacaacgacagcccttctcagatagtcgaggagttcccggagcaaaccacgtggaatactatactttggagctattctcgcaaaaagcaccgtgttagttttcggatcgtcaaccgaccacttccacaccccatgaacaagccacatccgaacatccctggctcaccgtctaggttctcgggtgttttagccctatcgtggttccgtggttatggtagcgaggaggcgtgtggaccttcccgctacgtggatgctgacaactatggctctagacaacaagatctacattacgtatattga

SEQ ID NO: 20179 - DNA, 722 bp, Oryza sativa
  Clone ID: PAT_MRT4530_25570C.1
ggaaaaggaggattattgcgtcagcggctagggtttgcggtggaccgggcgcacggaggcagttcacgggaacgaacggccgagatcaaccctatccaaaacggacggccgagatccaacggtccacgaccggctcacgggagagggcgacgatgacgtcagcgatgacgtcaccaccggcggcggcggctcggcggctcgggcttgcatgctcgccggcgaacgacggcgcggcgacgcgaacggagggcaccaacgggtagagggcgacgcggcgaactcaccggtgaccaaagaagcggcggaagagcaacggacagcgccggcgacgaggaagaaacggcggcggtcttcgggtcgacggtgacggcggtgctccggcggtcttcggcggcggcgaaggggcggacgaggacggcggcgacttggcgaccacgatgacgacctccccgagcgacggcgacggctggagcgacggcggcgcacggctggagcggcggcgacggcggcggcacaaggtctcacggcgctagggcgcttccgacggcgagagacaaaggcgagggtggcggcgggtagaggagacaccggggatccttttaaaggggctcggaggcgacggcgaaggcccacggcggctgagacggcgaaggaaagatcggggttcggaggaaagagaccgatccgattcgacctcgaatccacgagtttccaaaccgaaa

SEQ ID NO: 20180 - DNA, 538 bp, Oryza sativa
  Clone ID: PAT_MRT4530_25571C.1
gcacgagctcctcttctcatcctccacctctcccttcccttcccttcccttccgcctctacctccagctccacctcacctgcgcgcgccttccccccattgcctccgcctccgccccctcaaccggaggagctcccccggccgccgctccgtggcccgtgtcccgtggccgctctcctccccagccctgggtgggtcggcgtcggcggcgggggaactaaccggagatccacccggacccggagggaagggagggggatccctttgccctttggagggggggtgggttcaggagtggtggcgcggaggccagcgttgttgagtgcgagcggagctcggggtgagctgagatggtgctggtggtgaagcagtaccgctgcacgcactccgcgagctgcctctgcctcaaggggcacatcagcgaggacgcactgttcctcgtcttccgccacatgaactggaacccgaggatgatcgcgctcttctcctgtgtctccaagtggttcgacgacatcgccaagcgcgtgctgtggaaggag

SEQ ID NO: 20181 - DNA, 696 bp, Oryza sativa
  Clone ID: PAT_MRT4530_25572C.1
acggagggagtatgtgtattaggccattggaggattctttcatgttaccgctctcttatcaagtttattgtgagtatctcaaccttcaagatgaactggcacattttaaccttcaccaaggaagtggagattcatggagtttcatttggaataacagttgttatacccctaaaaggttctacaaactcaattttgctaccatccaaacacccagacctctgatctggatttggaaaaccaagtgcgtaatgaaaataaaagtttttgcttggttattcttctgggatagactaaatacaagagatatgttagacaagagacattgtgacaaagaagatgatgatttatcatgtgttctgtgcaacactaaccaaagggaaaccagagatcatcttttctttaactgtccttttagcactgcttgttggcagtttctgggaatctcgtggaatactgatcttgaattttaccaaaggatagcttttacaagatggcagttcaatcagtctggttttctggagatcttcttcttggctgcttggcacatctggaagcaacgaaatggcctcatcttcgggaatttgcagccaaccttcctgtcttggaagtctctctttataaatgaagttcttcttgcatctctgcagaatgaaggaccccctcaagcaatctgttcttaattggttgcaaactcta

SEQ ID NO: 20182 - DNA, 4907 bp, Oryza sativa
  Clone ID: PAT_MRT4530_25573C.1
gtgacaagttggtatcagagccaccttgaccttaggataagccaaatgatgccgccccattcaccgagaaatttgatcgaggtgttaggattcgtcagggagctgaggttgatggcttttgaggtaggttatgaagttgctcctgagtatcgccagatttcccatgaccccgacgaggagaagtgtcgtgttcgtgtgacgttggctagtgatagagaagaccttccgtctattaagttcgaagctggaggaagatcgtactgccatgcttgtcaagaagcagctttggtggccattggagagttgcgtcaacgttttgaagaagagttggattcatcagctttccagtatcatcctcacaagcctcatggtcaagactatggaacctatatctgtcctgatggtgaagagagtgccactctgatgcatgtggtgcatatgcttagtgctatggatgcagtaagtgtggagcgagacaaagcagctcatgacagggaaaactggaatcgaggcaagatttgcaagttggagagcaaggtgtaccgtctacagaaggaattagctgaactcaaaggagaaacgccgccgccaacacccaagcttcgcctcgtcgcaagaaagagaacctgtccgccacctcgtctccagttagcttcgaagattcgcgtgatgggtgaagctgtgcccgatcgtgctgaacctgtcatcgacatcataagtgatgaggaagaagaggaagaccctgaagaaagagagccagctactccagaggaagaagatccatcgcttcgttccgacgcaaggcgcaccaccaatccagtagaagcaggagattggttgcatgcggtggagaagaagttggatttgatccagtgtactgagcaggagaaagtttcttttgcttcgcatcagttgcatggacctgctgctgaatggtgggatcattttcgccaaggcagggctgaaggagaacttatcacttggcaggagttcacgactgcttttaagaagacgcatataccgtcaggtgttgtagctctaaagaagagagaatttagagcactcaatcagggatctcgttcggtcaccgagtacctccatgatgtcaaccgtttagctcgttatgctccggaagatgttcgcaccgatgaagagcgtcaggagaagttcttggagggactgaatgatgagttgtcttatgccttgatgtctacggatttccgggatttccagcagttggtggacaaggcgattcgtcaggaagacaagtataaccggatggagcagaagaagcgcagggctgcccaattcaaggcacaacagggcagtaaccagaggccgcgtctcgttactggacctcaagctccatcgtaccctcaaggaggatcttcatcagttgtccgtccccaacgccagttctacaataacaatactggtaatcgtggcaatgacaaccgcaacatggttgctcgtcctgcagcaactccagctcagaatcagcccgttaggaaggaacagggaagcaagccagtgatatgcttcaattgtggtgatccaggacattatgctgataagtgtcctaagcctcggcatgtgaagaacgctccagccccgaacaactccaatgttctagcaccgaaggcacgtgttaatcatgttgcagcagcagaagctcagaatgcaccagatgttgttttgggtacgtttcctgttaactctataccgcaactgtgctttttgattccggtgctacacattcctttttgtctaaaagttttgcgagcaaacatgggatggaagttgttagtcttgggagacctttactagttaataccccaggcaatcaagtattttcgacatagtattgtccttctgttactatagaaatagaagaagttcttttcccatcctcgcttatcttgctagaatccaaagatctagatgttatcttagggatggactggttatctcgtcacagaggagttatagattgtgccaaccgtaaggtgactttaaccagtagcaattgggaaaccgtttctttctttgtgtcctcccctaaatatcatggtgtgaacttaaaccaagttgctctacaagagattcctatagtacaagactacccagacgtgtttcccgaggatttgccaggtatgccacctaagagagacatagagtttcggatagacttggtacctggaaccaacccaatccataagagaccatacagaatggcagctaatgagttagctgaggtgaagaaacaggtggatgatttgcttcagaaaggatacatcagacccagtacttcgccatggggagcaccagttatctttgtggagaagaaagatcatactcagagaatgtgcgtggattatcgagcgttgaatgaggttactatcaagaataaatatcctctacccagaattgatgacctgtttgatcaactggaaggtgctacagttttctccaagatagatctccgttctggatatcatcaacttcgaatccgtgaggaagatataccgaagaccgccttcacaactcggtatggtttgttcgaatgtaccgttatgtcatttggactcactaatgccccagcctttttcatgaatctgatgaacaaggtgtttatggaatatctggataagtttgtcgtggtgtttattgatgacattcttatttactccaagacgaaggaagaacatgaagagcatcttcgtctagctttagagaaactacgtgagcatcagctttatgccaagttcagtaaatgtgaattttggttgtccgaagtgaagtttcttggtcatgtcatctcgtctggaggagtggcagtagatccaagcaatgtggagtcagtattaagttggaagcaacccaagacggttacagaaattcgtagtttccttggacttgcatggtattaccgcaggtttattgagaacttttcaaagatcgctagaccaatgactcgtctacttcagaaggaagtgaagtacaagtggacggaggattgtgaacgaagtttccaggaactgaagaaaaggctagtgactgcgcctgtgttaattttgcctgattcgaggaaaggtttccaagtgtattgtgatgcatcccgacacggtttgggttgtgtgttgatgcaagaaggaaaggtggttgcctatgcatctaggcaattacgtcctcatgagaataactacccaacgcatgacctagaattggcagctgtggtgcatgcattgaagatttggcgtcattatcttttcggtaaccgtactgaggtatatacggatcataaaagtttgaagtacatttttactcaacctgatttgaacatgcgtcagcgaagatggttagagttaattaaagattatgatatggaaatccattatcacccggggaaagcaaatgttgtagccgatgcccttagcaggaaaagttactgtaatatgtcagaaggtcgacgtttaccttgggagttatgccaagaatttgaaaagttgaacttgggaataatcagtaaaggttttgtggctgctttagaagctaaacctactctgtttgatcaagtgagagaagctcaagtgaatgatcctgatatacaagaaattaaaaagaacatgagaagaggtaaagccatcggttttgtagaagatgagcagggaactgtgtggttaggagaaacaatttgcgtcccagaaaataaggagttgaagaatactatcatgaaggaagctcatgaaactttgtattccgttcaccctggaagcactaagatgtaccaagacttaaagcaacaattctggtgggccagtatgcgacgtgagatagcagaatatgtggctctatgtgatgtatgtcagcgggtcaaggcagaacatcagaaaccagccggtctgttacaaccgttgaagattccagagtggaagtgggaagaaataggaatggattttataaccggtctacccagaacgtcggcaggacatgattctatttgggtagtggttgatagattgactaaagtcgctcactttataccggttaaaacaacctatacgggacataagcttgcagagttatacatggccagagtggtatgtttgcatggtgttcctaagaagatagtgtcagatagaggtagccagtttacttcgaagttttggcagaaattacaattagaattgggtactcgtttgaatttcagtactgcttatcaccctcaaacagatggtcagacggaaagagtaaaccaaattttagaagatatgttgagagcctgtgttctagattttggtggaagttgggataagaatttgccgtacgcggaattctcatataacaacagttatcaagctagtttgcaaatggctccgtatgatgcattaaatggtcgaaagtgccgtacgccgctcctttgggatcaaaccggtgaacgtcaagtttttgggacagacatattgcgacaggcagaagaaaaagtaaagattatccaagagaggttgcgcgttgctcagtcgcgtcagaagagttatgccgacaatcgtcgcagagatttggctttcgaagaaggagattatgtatacctgcgggttacgccgttacgaggtgttcatcgtttccaaaccaaagggaaattggcaccgcgttttgtgggaccttttaagattgtgagtcgaagaggtgaagtagcttatcagttagagttgcctccgtcaatggcgggaatacacgacgtgttccatgtgtctcagctgaagaaatgtttacgtgtacctacagaggaagcagatcctgatcgtatagagcttcaagaagatttaacttatgttgagaagccagtcagaattttggaatttccgacgttccggaggagagtgtttccgttgaggaagtttctgacg

SEQ ID NO: 20183 - DNA, 975 bp, Oryza sativa
  Clone ID: PAT_MRT4530_25574C.1
atgaacgttctttctcgtaaagttgattctaagtcaagtgctttggtttcttcttcatcttctttggatgttgatgcttcttcatcaaaaattgctcgagctatgaataatgctaggaacaggaaaagatgtggtccaaaccgttgctttgaatgtggttcaattgatcatcttcgtttgcattgtcctaagcttgggagaggcaaaagagaagacaaagatggtgagaagaccaacgacaataagccaaagggtacattcaaaggaaggaagatcaaggagaatctcaagaaggcttttgatcaagtctacgtcgcgtttgagccactaagcgacgtagatggtgatagtggagatgaagctaagggaaagaacatctccggtgtttgcttcatggcacgtggtgaatcagattcagagtgtgaaaacaatgaggatcaaactgactggcacgcccgcatctcatcaaggtttggacctgcacaggagctaagcagatctcccaggccgggggaggatggtcgtatttttgaagaaaagagcgaagacaacgacgacgaggtcggctcggccggtcagaccgggtgccaggccggtcagaccgagcgccaggccggtcagaccaacacaggaggtgcggtcagaccggccaggctcgtcgggttccgcgatgacgtcaccaccggcggcggcggctcggcggctcggacgcgcacgctcgccggcgaacggcggcgcttcggcacgaacggagggcaccaacgggtagagggcgacgcgacgaactcaccggtgaccaaagaagcggcggaggaacaacggacagcgccggcgacgaggaaaagcggcggcggtcttcgggtcgacggtgacggtggtgctccggcggtcttcggcggtggcgaaggggcggacgaggacggcggcgacttggcgaccacgatggcgaccttcccgagcgacggcgacagctga

SEQ ID NO: 20184 - DNA, 1554 bp, Oryza sativa
  Clone ID: PAT_MRT4530_25575C.1
gggctcggctagggcagccggccggaggttgaaggagctcccgacaggtggggcccacctgtcggtctccacaggagagaggagcgggcggcgtcggctgggctgattgggccgagaagctcaagtgaatgatcctgacatacaagaaattaaaaagaacatgaggagaggtaaagccatcggttttgtagaagatgagcaaggaactgtgtggttaggagaaagaatttgcgtcccagataataaggagttgaaggatactatcatgaaagaagctcatgaaactttgtattccattcaccctggaagcactaagatgtaccaagacttgaagcaacaattctggtgggccagtatgcgacgtgagatagcagaatatgtggctctatgtgatgtatgtcagcgggtcaaggcagaacatcagaagccagccggtctgttacaaccgttgaagattccagagtggaagtgggaagaaataggaatggattttataaccggtctacccagaacgtcggcaggacatgattctatttgggtagtggttgataggttgacaaaagtcgctcacttcataccggtcaaaacaacctatacggggaataagcttgcagagttatacatggccagagtagtatgtttgcatggtgttcctaggaagatagtgtcagatagaggtagccagtttacttcgaagttttggcagaaattacaatcagaattgggtacccgtttgaatttcagtactgcctatcaccctcaaacagatggtcagacggaaagagtaaaccaaattttagaagatatgttgagagcttgtgttctagattttggtggaagttgggataagaatttgccgtacgcggaattctcatataacaatagttatcaagctagtttgcaaatgtctccgaatgaagcattatatggtcgaaagtgtcgtacgccgctcctttgggatcaaaccgatgaacgtcaagtttttgggacagacatattgtgagaggcagaagaaaaagtaaagattatccaagagaggttgcgtgttgcccagtcacgtcagaagagctatgccgacaatcgtcgcagagatttggctttcgaagaaggagattatgtataccttcgggttacgccgttacgaggagttcatcgtttccaaaccaaagggaaattggcaccgcgttttgtgggaccttttaagattgtgagtcgaagaggtgaagtagcttatcagttagagttgcctccgtcaatggcgggaatacatgacgtgtttcagtgtctcagttgaagaaatgtttacgtgtacctacggaggaagcagatcctgatcgtatagagcttcaagaagatttaacttatgttgagaagccagtcagaatcttggaagtaagcgagaggaaaaccaggaatcgcgttatacggttttgcaaggttcagtggagtaatcattcagaagaagaagccacttgggagcgagaagatgaattgaagtcagctcatcctcatctgttcgctagttcttctgaatctcgaggacgagattccgtt

SEQ ID NO: 20185 - DNA, 840 bp, Oryza sativa
  Clone ID: PAT_MRT4530_25576C.1
atgacgtcagcggtgacgtcaccagcggcggcggctcggcggctcggacggcgcacgctcggcgacgaacggcggcgcttcggcacgaacggaggacaccaacgggtagagcgcgacgcggcgaactcaccggtgaccaaaggagcggcggaagaccaacggacggcgacggcgacgaggttgaaacggcagcggagatcgggtcgacggcggcgacggtgctccggtgatcttcggcgacggcgaaggggcggacgaggacggcggcgacttggcgaccccgacggcggtcttcccgagcgacggcgatgaccggaacggcggcggcgcacggctggagcaacggcggcgacggcggcgctagggtacacggcgctagggcgtttccgacgacgagaggcgaaggcgagggtggcggcgggtagaggagacaccggggagccttttaaaggggataggaggcgacgacgaaggcccacggcggccggcgacgagaaggaaacttcggggttcggaggaaagaagccgatccgaatcgaactcgattccacgaacttccaaaacgaattagccgatgcttccaaaagagaaaaaggtagaggagatcccgaggatcatttcccctctatcaattcggccggaaacggaaaggagcggccggatttggaaggaaacgacggcggcggcgcgctagggtttcgggcggcggcggcgcgaggttgacgacgaccctgtcagcgggcggacgcgcgcgcgcggctgcggtctgggccgacttgggccgaggagagagagaagagatttgggccgactttcggcccaaagccaaaagagactttt

SEQ ID NO: 20186 - DNA, 312 bp, Oryza sativa
  Clone ID: PAT_MRT4530_25577C.1
atggcagtgaatggaagcaatcagcacagcaaggagaaggggaaggggaagggccagctgccaccctccaacggaaccatcgctctagctcaagctcctcacttgttgctgccgcccttcaccggaaccactactccaactctagctcgagcttcccactcactgccatcgccgcccctttcctcttcggccatcgtctctatccacgcctctcatcctggatttatggatagagttgggaaaagaggggaaggagggaagaggaggaagaagaggctgctgacatgtggggcgcacgtggtcccacgctga

SEQ ID NO: 20187 - DNA, 7355 bp, Oryza sativa
  Clone ID: PAT_MRT4530_25578C.1
gtgacaagttggtatcagagccaccttgaccttaggataagccaaatgatgccgccccattcaccgagaaatttgatcaaggtgttaggattcgtcagggagctgaggttgatggcttttgaggtaggctatgaagttgctcctgagtatcgccggatttcccatgaccccgacgaggagaagtgtcgtgttcgtgtaacgttggctagtgatcgtgaagaccttccgtccattaagttcgaagctggaggaagatcgtacagccaggcttgtcaagaagcagctctggtggccattggagagttgcgtcaacgctttgaagaagagttggattcatcagctttccagtatcatcctcacaagcctcatggtcaagactatggaacctatacctgtcctgatggtgaagagagtgccactctgatgcatgcggtgcatatgcttagtgctatggatgcagtaagtgtggagcgagacaaagcagctcatgacagggaaaattggaatcgaggcaagatttgcaagttggagagcaaggtgtatcgtctacagaaggaattagctgaacttaaaggagaaacgccgcctccaacacccaagcttcacctcatcgcaagaaagagaacctgtccgccacctcgtctccagttagcttcgaagattcgcgtgatgggtgaagctgtgcccgatcgtgctgaacctgtcatcgacatcataagtgatgaggaagaagaggaagaccctgaagaaagagagccagctactccagaggaagaagatccatcgcttcgttccgacgcaaggcgcaccaccaatcccgtagaagcaggagattggctgcatgcggtggagaagaagttggacttgatccagtgtactgagcaggagaaagtttcttttgcttcgcatcaactgcatggacctgctgctgaatggtgggatcattttcgccaaggcagggctgaaggagagcctattacgtggcaggaattcacggccgctttcaagaagacgcacataccagcgggtgttgtagctctaaagaagagagaatttagagcactcaaccagggatctcgttcggtcaccgagtacctccatgatttcaaccgtttagctcgctatgctccagaagatgttcgttcagatgaagaacgtcaggagaagtttttagagggactgaatgatgagttgtcttatgctttgatgtctacggattttcgggatttccagcagttggtggacaaggcgattcgtcaggaagacaagtataaccggatggagcagaagaaacgcagggctgcccaattcaaggcacaacagggcagtaaccagaggccgcgtctcgttactggacctcaagctccatcgtaccctcaaggaggatcttcatcagttgtccgctcccaacgccagttctacaacaacaatactggtaatcgtggcaatgacaaccgcaacatggttgttcgtcctgcagcaactccagttcagaaccagcccgttaggaaggaacagggaagcaagccaggggtgtgcttcaattgtggtgatccaggacattatgctgataagtgtcctaagcctcggcgcgtgaagaacgttccagccccgaacaactccaatgctccagcaccaaaggcacgtgttaatcatgttgcagcagtagaagctcagaatgcaccagatgtggttttgggtacgtttcctgttaactctatacccgcaactgtgctttttgattccggtgctacacattcctttttgtctaaaagttttgcgagcaatcatgggatggaagttattagtcttgggagacctttactagttaataccccaggcaatcaagtgttttcgacacagtattgtccttccgttattataggaatagaagaagttcttttcccgtcctcccttatcttgctagaatccaaagatctagatgttatcttagggatggattggttatctcgtcacagaggagttatagattgtgccaaccgtaaggtgactttaaccagtagcaatggggaaacagtttctttctttgtgtcctctcctaaatctcatggggtgatcttaaaccaagttgctctacaagagatccccatagtacaagactacccagacgtgtttcccgaggatttgccaggtatgccacctaagagagacatagagtttcggatagacttggtacctggaaccaaccctatccataagagaccatacagaatggcagcaaatgagttagctgaggtgaagagacaggtggatgatttgcttcagaaaggatatatcagacccagtacttcgccatggggagcaccagtcatctttgtggagaagaaagatcatactcagagaatgtgtgtggattatcgagcgttgaatgaggttaccatcaagaataagtatcctctacccagaattgatgacctgtttgatcaactggaaggtgctacagttttctccaagatagatctccgttctggatatcatcaacttcgaatccatgaggaagatataccaaagaccgccttcacaactcggtatgatttattcgaatgtaccgttatgtcatttggactcactaatgccccagcctttttcatgaatctgatgaacaaggtgtttatggaatatctggataagtttgtcgtggtgtttattgatgacattcttatttactccaagacgaaggaagaacatgaagagcatcttcgtctagctttagagaaactacgtgagcatcaggtttatgccaagttcagtaaatgtgaattttggttgtccgaagtgaagtttcttggtcatgtcatctcgtctggaggagtggcagtagatccaagcaatgtggagtcagtgttaagttggaagcaacccaagacggtttcagaaattcgtagtttccttggacttgcggggtattaccgcaggtttattgagaacttttcaaagatcgccagaccaatgactcgtctgcttcagaaggaagtgaagtacaagtggacggagggttgtgaacaaagtttccaagaactgaagaaaaggctagtgactgcgcctgtgttagttttgcctgattcgaggaaaggtttccaagtgtattgtgatgcgtcccgacacggtttgggttgtgtgttgatgcaagaaggaaaggtggttgcctatgcatctaggcaattacgtcctcatgagaataactacccaacgcatgacctagagttggcagctgtggtgcatgcattgaagatttggcgtcattatcttttcggtaaccgtacagagatatatacggatcataaaagtttgaagtacattttcactcaacctgatttgaacatgcgtcagcgaagatggttagagttgattaaagactatgatatggaaatccactatcacccggggaaagcaaatgttgtagccgatgctcttagcaggaaaagctactgtaatatgtcagaaggtcgacgtttaccttgggagttatgccaagaatttgaaaagatgaacttgggaatagtcagcaaaggttttgtggctactttggaagctcaacctactctgtttgatcaagttagagaagctcaagtgaatgatcctgatatccaagaaataaagaacatcagaagccagccggtctgttacaaccattgaagattccagagtggaagtgggaagaaataggaatggattttataaccggtctacccagaacgtcggcagaaacaacttacacggggaataagcttgcagagttatacatggccagagtggtatgtttgcatggtgttcctaagaagatagtgtcagatagaggaagccagtttacttcgaagttttggcagaagttacaatcagaattgggtacccgtttgaatttcagtactgcttatcaccctcaaacagatggtcagacggaaagagtaaaccaaattttagaagatatgttgagagcttgtgttctagattttggtggaagttgggataagaatttgccgtatgcggaattctcatataaccatagttatcaagctagtttgcaaatgtctccgaatgaagcattatatggtcgaaagtgccgtacgccgctcctttgggatcaaaccggtgaacgtcaagtttttgggactgacatattgcgagaggcggaagaaaaagtgaagattatccaagaaaggttgcgcgttgcccagtcgcgtcagaagagctatgccgacaatcgtcgcagagatttggttttcgaagaaggagattatgtataccttcgggtcacgccgttacgaggtgttcatcgtttccaaaccaaagggaaattagcaccgcgttttgtaggaccttttaagatcgtgagtcgaagaggtgaagtagcttatcagttagagttgcctccgtcaatggcgggaatacatgacgtgttccatgtgtctcagttgaagaaatgtttacgagtacctacggaggaagcagatcctgatcgtatagagcttcaagaagatttaacttatgttgagaagccagttagaattttggaacgccgccgcgacgctctccaagtccgccgccgtcgccggccgtcttcagcaacgccgccgcgcatgcctcgccattcaccaagaaatttgatcgaggtgttaggattcgtcagggagctgaggttgatggcttttgaagtaggttatgaagttgctcccgagtatcgccagatttcccatgaccccgacgaggagaaatgtcgtgttcgtgtgacgttggctagtgatagtgaagaccttccgtcttttaagttcgaagctggaggaagatcgtactgccatgcttgtcaagaagcagctttggtggccattggagagttgcgtcaacactttgaagaagaattggattcatcagctttccagtatcatccccacaagcctcatggtcaagactatggaacctatacctgtcctgatggtgaagagagtgccactctgatgcatgcggtgcatatgcttagtgctatggatgcagtaagtgtggagcgagacaaagcagctcatgacagggaaaactggaatcgaggcaagatttgcaagttgaagagcaaggtgtaccgcctacagaaggaattagctgaacttaaaggagaaacgccgccgccaacatcctagcttcgcctcactgcaagaaagagaacctgtccgccccctcgtctccagttagcttcgaagattcgcgtgatgggtgaagctgtgcccgatcgtgttgagcctgtcatcgacatcatggtgaacacgcgcactggcactggaagtggaagtggaagtggagccaataacaatgaagagaacccaacgctagctcagattttggctcaacaaacacaactgatcaatctgttagtgcagcaggcacagaatcagcaggcaaataatcaaaaccagaatccacccccacctccccaaaacaagttggcagatttcttgcgtgtgagtccccctactttttcgagcaccaccaatccagtagaagcaggagattggttgcatgcggtggagaagaagttggacttgatccagtgtactgagcaggagaaagtttcttttgcttcgcatcagttgcatggacccgctgctgaatggtgggatcattttcgccaaggcagagcgggaggagaacctattacttggcaggaattcacaactgcttttaagaagacgcatataccaacgggtgttgtagctctaaagaagagagaatttagagcactcaaccagggatctcgttcggtcaccgagtacctccatgatttcaaccgtttagctcgctatgctccagaggatgttcgcactgatgaagaacgtcaggagaagtttttggagggactaaatgatgagttgtcttatgctttgatgtctacggatttccgggatttccaacaattggtggacaaggcgattcgtcaggaagacaatcgtggcaatgacaaccgcagtgtggttgctcgtcctgcagcaactccagttcagaaccagcccgttaggaaggagcaggggagcaaaccagtgatatgcttcaattgtggtgatccgggacattatgctgataagtgtccgaagcctcggcgtgtgaagaacgctccagccccgaacaactccagtgctccagcaccgaaggcccgtgtcaatcatgttgcagcagcagaagctcagaatgcaccagatgtggttttgggtacgtttcctgttaactctatacccgcaactgtgctttttgattccggtgctacacattcctttttgtctaaaagttttgcaagcaatcatgggatagaagttattagtcttgggagacctttactagttaataccccaggcaatcaagtattttcgacacagtattgtccttctgttactatagaaatagaagaagttcttttcccatcctctcttatcttgctagaatccaaagacctagatgttatcttagggatggattggttatctcgtcatagaggagttatagattgtgccaaccgtaaggtgactttaaccaatagcaatggggaaactgtttctttctttgcgtcctctcctaaatctcatggtgtggttttaaaccaagttgctctacaagagattcctatagtacaagactacccagatgtgtttcccgaggatttgccgggtatgccacctaagagagacatagagtttcggatagacttggtacctggaactaaccctatccataagagaccatatagaatggcagctaacgagttagcagaggtgaagaaacaggtggatgatttgcttcagaaaggatacattagacccagtacttcgccatggggagcaccagtcatctttgtggagaagaaagatcatactcaaagaatgtgcgtggattatcgagcgttgaatgaggttactatcaagaataaataccctttacctagaattgatgacctgtttgatcaattggaagagtttgtcgtggtgtttatcgatgacattctcatttactccaagacgaaagaagaacatgaagagcatcttcgtctagctttagagaaactacgtgagcatcagctttatgccaagttcagtaaatgtgaattttggttgtccgaagtgaagtttcttggtcatgtcatctcgtctggaggagtggcagtagatccaagcaatgtggagtcagtattaagttggaagcaacccaagacggtttcagaaattcgtagtttccttggacttgctgggtattaccgcagttttattgagaacttttcaaagatcgccagaccaatgactcgtctgcttcagaaggaagtgaagtacaagtggacggatgattgtgaacaaagtttctaa

SEQ ID NO: 20188 - DNA, 513 bp, Oryza sativa
  Clone ID: PAT_MRT4530_25579C.1
atgggcgaggcagacgtagatgttgaagataatgacggtgcagatgatcttggtcaaatgttgcgggacatacctgaggactgcgaaagtgaaaaggaggctaaaaatggtatgagtgacaaggcattttctgagttattggagctcgtaaagaacattcttccggaggggaacgaattgcccgaaacaacgtacgaagctatgaaggccatctgccctctaggactggaagttcagaagatacacatgtccgaacgattgtatcctctatcgcgtaacctatccggacagtcaaacaaggggtacaaggtttgcactcactgtatggatgaaaccgaaaatacgtatctgaagcattgctggaaggttgtgtacatgggccatcgtcgattccttgttgcaaaccaccgtgtacggaagaaaggcaggcacttcgaacagaaggcaaaccaccgtactaagcctaaacatcacaacatgaaagcagtgtttgatatggtgaaagatctgtaa

SEQ ID NO: 20189 - DNA, 1058 bp, Oryza sativa
  Clone ID: PAT_MRT4530_2557C.1
atgggttcaagagatggattctccgacaacatattactcgacgagatctccgaaccatcttctcgtcgactacaagggaaagtgctcctcgcgacgccctgactggtcggccctacgttggttttcgagagatgcagacatatacagcaggaggacggcgcgccagccacccgccatcttgcatgtagcgaacaattgagcacatgagtaggttgtcatcgagtacactccattatcgagaacattctcgacaaatgcggagttatcgcacccaacctgccaacgaagaccaacgacctatctcatagcaccggccatggctggaatagtcgagaaaagtacgtagcaatctctcgcaccgcaaacttccattggtgttcgaaagataattctactcgctcgctggttctcgaaccagtacgtagcaatctctcgcaccgcaaacttccattggtgttcgagagataattctactcgttcgctggttctcgaaccatggttgaggaacagctacgactgatcttcgaccgacagcatagtggtcctcgtaccacgagtcgaaatgatcgagagacacctattcactggttctcaaccaattaatcgtagcgatctctcgtacatctacatctaatggtcgagttacaactactacctggttctcgaccaacggtgtagcgattctcccactatttccactttaagtggtcaagttacgactactacctggtcctcgaccagaggtgtagcgattctcccactacctctactccaacaaaactgatatcaggtacataatatcgccaagtgttttacccagagatcccttaccacgacgacacctagcgttaaaacctatcctactgttcctttacgccgtcttgacaaggccttcgagtaacctaagggaacttcggctggggacgcccagagccgataaggccttgtcagagcctgtagagacaaaagaccatactctgcgccttctcgatcactcgagaacgattggtggatctcgacaaggaatacggaatgaagagagggtgtacccgccgaga

SEQ ID NO: 20190 - DNA, 5337 bp, Oryza sativa
  Clone ID: PAT_MRT4530_25580C.1
atgggggtcgctggggagtccatgccttgttttaaagggggtgattatgatccaggtacggtgcactgtagtgaattgtgttatgcgaggggtattgtcactactcctttccgaggtatcgtggtggtactgaggcacatgatgcctcgccattcaccgagaaatttgatcgaggtgttaggattcgtcagggagctgaggttgatggcttttgaggtgggctatgaagttgctcctgagtatcgccaaattcctcatgaccccgacgaggagaaatgtcgtgttcgtgtgacattggctagtgatagtgaagaccttccgtcctttaagtttgaagctggaggaagatcgtactgccatgcttgtcaagaagtagctttggtggccattggagagttgcgtcaacactttgaagaagagttggattcatcagctttccagtatcatcctcacaagcctcatggccaagattatggaacctatacctgtccggatggtgaagagagtgccactttggtgcatgtggtgcatatgcttagtgctatggatgcagtaagtgtggagcgagacaaagcagctcatgaccgggaaaactggaatcgaggcaagatttgcaagttgaagagcaaggtgcaccgtctacagaaggaattagctgaacttaaaggagaaatgccgccgccaacatccaagcttcgcctcactgcaagaaagagaacctgtccgccacctcgtctccagttagcttcgaagattcgcgcgatgggtgacgctgtgcccgttcgtgctgaacctgtcatcgacatcataagtgatgaggaagaagaggaagatcctgaagaaagagagccagctactccagaggaagaagattcatcgcttcgttccgacgcaagttgttgcttacatcatgggtgggatatggtgaacacgcgcaccggcactggaagtggaagtggaagtggagccaataacaatgagggagaaccaacgctagcccagattctggcccaacaaacacaactgatcaatctgttagtgcagcaggcacagaatcagcagggaaataatcagaaccagaatccacccccacctccccaaaacaaattggcagatttcttacgtgtgagaccccctaccttctcaagcaccaccaatccagttgaagcaggagattggctgcatgcagtggagaagaagttggatttgattcagtgtactgagcaagagaaagtttcttttgcttcgcatcagttgcatggacccgctgctgaatggtgggatcattttcgccaaggcagggctggaggagaacctatcacttggcaggagttcacagctgcttttaagaagacgcatataccgtcaggtgttgtagctctaaagaagagggagtttagagcactcaatcagggatctcgttcagtcaccaagtacctccatgatttcaatcgtttagcgtgttatgctccagaggatgtttgcactgatgaggaacgtcaggagaagtttttggaaggactaaatgatgagttgtcttatgctttgatgtctacggatttccgggatttccaacaattggtggacaaggcgattcgtcaggaagacaaggctgcccaatttaaggcacaacagggcagtaaccagaggccgcgtctcgttactggacctcaagttccatcgtaccctcaaggaggatcttcatcagttgtccgtccccaacgccagttctacaacaacaatactggtaatcgtggcaatgacaaccgtaatgtggttgctcgtcctgcagcaactccagttcagaaccagcccgttaggagggaacagggaagcaagccagtgatatgcttcaattgtggtgatccgggacattatgctgataagtgtccgaagcctcggcgtgtgaagaacgctccagccccgaacaacttcaatgttccagcaccgaaggctcgtgtcaatcatgttgcagccgcagaagctcagaatgcaccagatgttgttttgggtacgtttcctgttaactctatacccgcaactgtgctatttgattccggtgctacacattcctttttgtctaaaagttttgcaatcaaacatgggatggaagttgttagtcttgggagacctttactagttaataccccaggcaatcaagcattttcgacacggtattgtccttctgttactatagaaatagaagaagttcctttcccatcctctcttatcttgctagaatccaaagatctagatgttatcctagggatggactggttatctcgtcacagaggagttatagattgtgccaaccgtaaggtgactttaaccagtagcaatggggaaacagtttctttctttgcatcctctcctaaatctcatggtgaggtcttaaaccaagttgctctacaagagatacctatagtacaagactacccagatgtgtttccggaggatttgccaggtatgccacctaagagagatatagagtttcggatagacttggtacctggaactaaccctatccataagagaccgtacagaatggcagctaatgagttagctgaggtgaagaaacaggtggatgatttgcttcagaaaggatacatcagacccagtacttcgccatggggagcaccagtcatctttgtggagaagaaagatcatactcagagaatgtgcgtggattatcgagcgttgaatgaggttactatcaagaataagtaccctttacccagaattgatgacctgttcgatcaactcgaaggtgctacagttttctctaagatagatctccgttctggatatcatcaacttcgaatccgtgaggaagatataccaaagaccgccttcacaactcggtatggtttgtttgagtgtaccgttatgtcatttggactcactaatgccccagcctttttcatgaatctgatgaacaaggtgtttatggaatatctggataagtttgtcgttgtgtttattgatgacattcttatttactccaagacgaaggaagaacatgaagagcatcttcgtctagctttagagaaactacgtgagcatcagctttatgccaagttcagtaaatgtgaattttggttgtccgaagtgaagtttcttggtcatgtcatctcgtctggaggagtggcagtagatccaagcaatgtggagtcagtgttaagttggaagcaacccaagacggtttcagaaattcgtagtttccttggacttgcagggtattaccgcaggtttattgagaacttttcaaagatcgctagaccaatgactcgtctgcttcagaaggatgtaaagtacaagtggacggaggattgtgaacaaagtttccaagaactgaagaaaaggctagtgactgcgcctgtgttaattttacctgattcgaggaagggtttccaagtgtattgtgatgcatcccgacacggtttgggttgtgtgttgatgcaagaaggaaaggtggttgcttatgcatctaggcaattatgtcctcatgagaataattacccaacgcatgacctagagttggcagctgtggtgcatgcattgaagatttggcgtcattatcttttcggtaatcgtacagagatatatacggatcataaaagtttgaagtacattttcactcaacctgatttgaacatgcgacagcgaagatggttagagttgattaaggattatgatatggaaatccactatcacccgggaaaagcaaatgtggtagccgatgcccttagcaggaaaagttactgtaatatgtcagaaggtcgatgtttaccttgggagttgtgccaagaatttgaaaggttgaacttgggaatagtcagcaaaggttttgtggctacattggaagctaaacctactttgtttgatcaaattagagaagctcaaatgaatgatcctgatatccaggaaataaagaagaacatgagaaggggtaaggccatcggttttgtagaagatgagcaaggaactgtgtggttaggagaaagaatttgtgtcccagaaaataaggagttgaagaatactatcatgaaagaagctcatgaaactttgtattccattcaccctggaagcactaagatgtaccaagacttaaagctacaattctggtgggctagtatgcgacgtgagatagcagaatatgtggctctatgtgatgtatgtcagcgggtcaaagcagaacatcagaaaccagctggtctgttacaaccgttgaagattccagagtggaagtgggaagaaataggaatggattttataaccggtctacccagaacgtcggcaggacatgattctatttgggtagtggttgatcggttgacaaaagtcgctcaattcataccgatcaaaacaacctatacgggacataagcttgcagagttatatatggccagagtggtatgtttgcatggtgttcctaaaaagatagtgtcagatagaggtagccagtttacttcgaagttttggcagaaattacaatcagaattgggtacccgtttgaatttcagtactgcctatcatcctcaaacagatggtcagacggaaagagtaaaccaaattttagaagatatgttgagagcctgtgttctagattttggtggaagttgggataagaatttaccgtatgcggaattctcatataacaatagttatcaagctagtttgcaaatgtctccgaatgaagcattatatggtcgaaagtgccgtacgccgcttctttgggatcaaaccggtgaacgtcaagtttttgggacagacatattgcgagaggcggaagaaaaagtgaagattatccaagaaaggttgcgcgttgctcagtcacgtcagaagagctatgctgacaatcgtcgcagagatttggctttcgaagaaggagattatgtatatcttcgggttacgccgttacgaggagttcatcgtttccaaaccaaagggaaattggcaccgcgttttgtgggaccttttaagattgtgagtcgaagaggtgaagtagcttatcagttagagttgcctccgtcaatgacaggaatacatgacgtgttccacgtgtctcagttgaagaaatgtttacgagtacctacggaggaagcagatcctgatcgtatagagcttcaggaagatttaacttatgttgagaagccagtcagaatcctggaagtaagcgagaggaaaaccaggaatcgcgttatacggttctgcaaggttcagtggagcaatcattcagaagaagaatcaacttgggagcgagaagatgaattgaagtcagctcatcctcatctgttcgccagttcttctgaatctcgaggacgagattccgtttaa

SEQ ID NO: 20191 - DNA, 2688 bp, Oryza sativa
  Clone ID: PAT_MRT4530_25581C.1
atggcgggtgttgtcgtggggagcaagagcaaccgggactggtcggactgcgacgccgccttccgcgaggaggcgggcagggcgatcgtcgcgctgacggaggagggcgagcaagggcacgcgcacgggctctcgctcgcgacggcgctcgtcggcaggtacccgtggtcgccactcgcccgcgccatcctcgcgcgctgctaccttcagcgcaacagtcggcagcaggagagggttcagctcgagctggcggcggtgctcgccccgcgctgcccccacatcgcctcgctgctcatcgacgcgctcatctccatggatttgtttgacgaggcagcggaggtgcgtgaccgcgccctccgcgtggcggagcccaccgacccggcgttgcactacaccttcgtgagcaaccgctactcctccgccgatcatcacgacaaccccttcgatctcgagtacaggaaagcccacggccgagagacgatccgcgggcagcgtgcgaggatcgagaagggcaaggggcaagccgcggcttcaccggagcccgcgtccacgccggagtggccgccggaaaccgtcgacctcggaatcgccggcgatcgctggagccgcatgagcgaggaggagcggcaagcgctcctcaaggtgagttttggagagatgaagtcgtactgccgctcacgagggttgatggatatgacaagtatgctttccgatgctgaggtgttcgtcaagaagggttggtcttgccctttctgctccggaatgatctacgtggaattcgcggctttcaagagtcacatcgatgaggaacatattgtgggcaaagaatttctgtcattagtacccgaaagaatatctgacagtgagagggagcttctcagatcatggagatgggagccaaccgatggagatgatttggcagggaggacaaagatcttgcgcgaggttaaggaaatcgtctttgagctcattgatttggaagtcgtttctctcaaccttctgtacatcatgcacaagttcataatgaaccgggtcaggccagtagcacctttggtagtatccatgtgtgggtcttgtgggattggacagttgagttccacacaccttcaggaactgtgtgaattgctcaagccgcttaagctcgttgtgcagacccagagaggttgggaacatcagaagcatcacaatgatgaacaagagagccagcaagattcgctcgttgtgcatacccatagaggctgcaaccatcataagcgtcgcaatggcgaacaagagagccagcaagattcgcttgttgggattacctggtcccaagagacaggcacactatcttttgattgtgagaagattgcatcaagagaaactgatggttctagccaggcagatcgactttttgcctgtctattatctgaacctttgcttgaggatcccatggaattgtgtttcagcatgtggagagaatgttttgttgatggacctgacattcttaacaacataagtcgagcattgggtaaagcgaagctgaaattcagctcatgggaagagctaaaaggaatacaaggaggtgtttatttccttcctaaggccatttttgagagagatattgacatcaagacttattttgattcttggattggctctgcacgagttgagatgctattaattgatgctgaggtggattactggaaggaaagtcttctgaaaacttgtcaagttgattgccttgcggttatttcacctattgcaaaggcttgcctttgggcaaaattggttaatgatcccctagaggatgctttacttgctcatccacaaaattgtcataaaccacaggttcctttggatgccattctccggtctttgtggcacataaggagattctgcggtgatctctgggagataccatgtatatcccctgatgttaaagccagagtatatcgcgctatcttgttgcgtatcttccgttcttgggaccagtgcaaaacatgtgacctacctagttcagcgatattcatggttgattctttgagaagttttgtgattgatgaaaaggctggaaacatttctgcgtatagagttgttgaatcaatccttgagaggctgcacgtggcacaaactcctttgcattttgagttcaagggtgaatctttggtgccacaaacagcaatagtgcccagccttctgggttgtatatgcctagcacacaatctttttgggttgcacattattgagaagaaatgcaactgtgtgaatgaggtccccatgaaaaccaagtctacattcttccacagtattaatttgggttctgttgaaggaactacgttggagtctttcagtgaactcttgaaagctgtagacaagcagtcagtttgtgacttcaggaatggtggctgtgggcataggattacccgatacctatggtatccaccacattttttcatgatagttttgagatggccagacaacaagggaaaccatattaacatgcataaagtattgatcagcctagcagcggagttggacattagtcatatctacgaaggtctgcaatcagaaagcatgtacactctggtttctgcacaagctgaatcctggaaaggattaatcgaccggtacagtcaggccaatctccgtcctgagatccttttctttgagcatggcaggaagcgtgatcatagactgttgctgtga

SEQ ID NO: 20192 - DNA, 5025 bp, Oryza sativa
  Clone ID: PAT_MRT4530_25582C.1
gtgacaagttggtatcagagccaccttgaccttaggataagccaaatgatgccgccccattcaccgagaaatttgttcaaggtgttaggattcgtcagggagctgaggttgatggcttttgaggtaggatatgaagttgctcccgagtatcgccaaatttcccatgaccccgacgaggagaagtgtcgtgttcgtgtgacgttggctagtgatcgtgaagaccttccgtccattaagttcgaagctggaggaagatcgtacagccatgcttgtcaagaagcagctttggtggccattggagagttgcgtcaacgctttgaagaagagttggattcatcagctttccagtatcatcctcacaagcctcatggacaagactatggaacctatacctgtcctgatggtgaagagagtgccactctgatgcatgcggtgcatatgcttagtgctatggatgcagtaagtgtggagcgagacaaagcagctcatgacagggaaaactggaatcgaggcaagatttgcaagttggagagcaaggtgtaccgtctacagaaggaattagctgaacttaaaggagaaacgccgccgccaacacccaagcttcgcctcaccgcaagaaagagaacctgtccgccacctcgtctccagttagcttcgaagattcgcgtaaggggtgaagttgtgcccgatcgtgctgaacctgtcatcgacatcataagtgatgaggaagaagaggaagatcctgaagaaagagagccagctactccagaggaagaagatccatcgcttcgttccgacgcaaggcgcactaccaatccagtagaagcaggagattggctacatgcggtggagaagaagttggatttgatccagtgtactgagcaggaaaaagtttcttttgcttcgcatcaactgcatggacctgctgctgaatggtgggatcattttcgccaaggcagggctgaaggagagcctattacgtggcaggaattcacggccgttttcaaaaagacgcatataccagcaggtgttgtggctctaaagaagagagaatttagagcactcaaccagggatctcgttcggttaccgagtacctccatgatttcaaccgtttagctcgttatgctccggaagatgttcgcaccgatgaagagcgtcaggagaagtttttggagggactgaatgatgagttgtcttatgctttgatgtctacggatttccgggatttccagcagctggtggacaaggcgattcgtcaggaagacaagtataaccggatggagcagaagaagcgcagggctacccaattcaaggcacaacagggcagtaaccagaggccgcgtctcgttactggacctcaagctccatcgtaccctcaaggaggatcttcatcagttgtccgtccccaacgccagttctacaacaacaatactggtaatcgtggtaatgacaaccgcaacgtggttgctcgtcctgcagcaactccagttcagaaccagcccgtcaggaaggaacagggaagcaagccaggggtgtgtttcaattgtggtgatccaggacattatgctgataagtgtcctaagcctcggcgcgtgaagaacgctccagccccgaacaactccaatgctccagcaccaaaggcacgtgttaatcatgttgcagcagcagaagctcagaatgcaccagatgtggttttgggtacgtttcctgttaactctatacccgcaactgtgctttttgattccggtgctacacattcctttttgtctaaaagttttgcgagcaatcatgggatggaagttattagtcttgggagacctttactagttaataccccaggcaatcaagtattttcgactcagtattgtccttccgttactatagaaatagaagaagttcatttcccatcctcgcttatcttgctagaatccaaagatctagatgttatcttagggatggactggctatctcgtcacagaggagttatagattgtgccaaccgtaaggtgactttaaccaatagcaatggggagaccgtttctttctttgtgtcctctcctaaatctcatggtgcggtcttaaaccaagttgctctacaagagatccccatagtacaagactacccagacgtgtttcccgaggatttgccaggtatgccacctaagagagacatagagtttcggatagacttggtacctggaaccaaccctatccataagagaccatacagaatggcagctaacgagttagctgaggtgaagagacaggtggatgatttgcttcagaaaggatacatcagacccagtacttcgccatggggagcaccagtcatctttgtggagaagaaagatcatactcagagaatgtgcgtagattatcgagcgttgaatgaggttactatcaagaataagtatcctctacccagaattgatgacctgtttgatcaattggaaggtgctacagttttctctaagatagatctccgttctggatatcatcaacttcgaattcgtgaggaagatataccaaataccgccttcacaactcggtatggtttgttcgaatgtaccgttatgtcatttggactcactaatgccccagcctttttcatgaatctgatgaacaaggtgtttatggaatatctggataagtttgtcgtggtgtttattgatgacattcttatatactctaagacgaaggaagaacatgaagagcatcttcgtctagctttagagaaactacgtgagcatcagctttatgctaagttcagtaaatgtgaattttggttgtccgaagtgaagtttcttggtcatgtcatctcgtctggaggagtggcagtagatccaagcaatgtggagtcagtgttaagttggaagcaacccaagacggtttcagaaattcgtagtttccttggacttgcagggtattaccgcaggtttattgagaacttttcaaagatcgccagaccaatgactcgtctgcttcagaaggaagtgaagtacaagtggacagaggattgtgaacgaagtttccaagaactgaagaaaaggctagtgactgcgcctgtattaattttgcctgattcgaggaaaggtttccaagtgtattgtgatgcatcccgactcggtttgggttgtgtgctgatgcaagaaggaaaggtggttgcttatgcatctaggcaattacgtcctcatgagaataactacccaacgcatgacctagagttggcagctgtggtgcatgcattgaagatttggcgtcattatcttttcggtaaccgtacagagatatatacggatcataaaagtttgaagtacattttcactcaacctgatttgaacatgcgacagcgaagatggttagagttgattaaagattatgatatggaaatccactatcacccggggaaagcaaatgttgtagccgatgctcttagcaggaaaagctactgtaatatgtcagaaggtcgacgtttaccttgggagttatgccaggaatttgaaaagttgaacttgggaatagtcagcaaaggttttgtggccgctttagaagctaaacctactctgtttgatcaagtcagagaagctcaagtgaatgatcctgatatccaagaaataaagaagaacatgagaagaggaaaagccatcggttatgtagaagatgagcacggaactgtgtggttaggagaaagaatttgcgtcccagaaaataagaagttgaaggatactatcatgagagaagcacatgaaactttgtattccattcaccctggaagcactaagatgtatcaagacttaaagcaacaattctggtgggccagtatgcgacgtgagatagcagaatatgtggctctatgtgatgtatgtcagcgagtcaaggcagaacatcagaagccagccggtttgttacaaccgttgaagattccacagtggaagtgggaagaaataggaatggattttataaccggtctacccagaccgtcggcaggacatgattctatatgggtagtggttgataggttgacaaaagtcgctcacttcataccggtcaaaacaacctatacggggaataagcttgcagagttatacatggccagagtggtatgtttgcatggtgttcctaagaagatagtgtcagatagaggtagccagtttacttcgaagttttggcagaagttacagttagagatgggtacccgtttgaatttcagtaccgcttatcaccctcaaacagatggacagacggaaagagtaaaccaaattttagaagatatgttgagagcctgtgttctagattttggtggaagttgggataagaatttgccgtacgcggaattctcatataacaatagttatcaagctagtttgcaaatggctccgtatgaagcattatatggtcgaaagtgccgtacgccgctcctttgggatcaaaccggtgaacgtcaagtttttgggacagacatattgcgagaggcggaagaaaaagtgaagattatccaagaaaggttgcgcgttgctcagtcacgacagaagagctatgccgacaatcgtcgcagggatttggcttttgaagaaggagattatgtataccttcgggttacgtcgttacgaggtgttcatcgtttccaaaccaaagggaaattggcaccgcgttttgtgggaccttttaagattctgagtcgaagaggtgaagtagcttatcagttagagttgcctccgtcaatggcaggaatacatgacgtgttccacgtatctcagttgaagaagtgtttacgtgtacctacggaggaagcagatcctgatcgtatagagcttcaggaagatttaacttatgttgagaagccagtcagaatcttggaagtaagcgagaggaataccaggaatcgcattatacggttctgcaaggttcagtggagcaatcattcagaagaagaagccacttgggagcgagaagatgaattgaagtcagctcatcctcatctcttcgccagttcttctgaatcacgaggacgagattccgtttaa

SEQ ID NO: 20193 - DNA, 897 bp, Oryza sativa
  Clone ID: PAT_MRT4530_25583C.1
atgctctcaaaaatgcatatgaaatggttttcctttttagaatggccaagtgccacctttgcctctagcttcataaaaacccagtcctctttggcacagtactatttgctcatgttcgtgaaaatcattgagctctgcaagcttaagggtaaggagaccagggcggagccggaggtttccagcgtcagcaaggcctcggggggcagcagcgagcacatcaacaagctgccaccgccggtgccggtgcaggaggaggaggaggcgccggaatggctggacgtgctgctgcggacgaaattctgggggcagtgcaagcagcactgggacgcgagccgcgcggaggtttgcatcttctgcctccgctgccgccaggtgctctgcccgcgctgcagccatgacgagcccggccaccggctgctcaaggtccgccgctacatgtaccgctccgtcgttctcgccagggacttgcagggcctcaacgttgacgtgtccagggtacagacatacattgtcaatggccaaaagggcgtgcacctgaggcccatgaggaggtccccgcaattcaagcctcacgttggtgtagatatatctcaggatgatttctcaggacctgaagctgagcgtaggcataagcagactctgggaattgtggtggagtcatctcctcaacagagcatcccacaaccatttgatgcctcacctgtgagaaatgaagatgccaccatggttgaagctgagtgtggtcaagttcagacgaatgcgacggagtcggagtcgtcagcggtaggagatgcagatgaggttatacctaaagttactaagttcaatgttgatatccactctttgaggaggcgagttcgcaagcaggcggcaccacagagggcccccttcttctga

SEQ ID NO: 20194 - DNA, 324 bp, Oryza sativa
  Clone ID: PAT_MRT4530_25584C.1
atgggccgtgtggctcaggggctgacggactcatgcggcctgcgctgttgcgtatgcaacaaatccaatttgggggcaagagacgtagtcggcgagcacaaggaggaggggaggagcttgacggaggaggaaacgagctcaattgagctcgccggcgaccacatggacatggaggagctcgatggtggaggggatgaactcgacgcagctccgccgacacttggaggagacgagctcgagcccgccggtagcgtcgggcgctgggggcggacgccggcggcagcggcgctggatcgctgggggagaggcggagatcagcggtga

SEQ ID NO: 20195 - DNA, 692 bp, Oryza sativa
  Clone ID: PAT_MRT4530_25585C.1
actgggaaaaacaagatcaatgattgcacacaagggaatgcccacaaaggtactaactaattaggctttcctttcccatacacatgcagatatacacccccgaagtgaactttgtgctctttatttacaatcttgacatcaaatgttacatcagaatatacttatgtttctactgtactgcagaaacttgtcactgcaagcatcaggtctccacttttctgtcatcactttggtgaactcaagggtgatgaaagcagattatcgctttcattgcaaatcaacaaactacaatccatgagcacgtcttttatgtgcatatgagcagatgaaacaagcaaacatgctagagaagaagacgtgttctatacagtgaatctcgagctagctatacctcttcctgccatcctatcaacacgtcggcgaccaaagggcaagccaaaaaatgatcgaaccacacccccaatctcggtcttgcagagtgggcacactgcatttatcttgagccatttatcgacacattgcacatgaaagaagtgggtgcaaggaagctcacggagctcatcatcatctccgtacttagtaagacagatgcagcacacagcatcttcagctgaaacaatcctttcctttttagttcctgggcccaggatgccaccctcgctaagattctctgagcttgaagcatggtcaac

SEQ ID NO: 20196 - DNA, 459 bp, Oryza sativa
  unsure (1)..(459): unsure at all n locations
  Clone ID: PAT_MRT4530_25586C.1
tctgccaaccacaacggaaggtaatcaacaaacaaatttagcatcagcgtattccacgtttgttgatcgtgttttactttggaagcgaaagtggcaaacggatatctcatcagaacgagatgatgaactagtttctcaaaccgttcaaagagccctacaattgctaagtggaacatttcgatcccctctccatcaccggagaatactaaatagaaatgcaatgaaagctactgagctcttaatgtcaccaatgcagcgtccagataaaaaattaggcacctccgccttctccatattggatgatatacaagttccaactttatccagagcgttcaggtcggatcctcccgatgtcgaagtaagagacggaacaaacaattccgctgaaattccaatgatttcagttttgggaagtgcacctgcagncgtaacatctgctaaagataccccaactcatgc

SEQ ID NO: 20197 - DNA, 468 bp, Oryza sativa
  Clone ID: PAT_MRT4530_25587C.1
atggcccagggcccctttcttcctagcatcgcatctcccaacgccggattgccacccttcccagtgccgtcatggcgccacgccgcatctctgcccaccgccgctcacatgtcctcgccagcgtcgccatccctagcgtcggcccgctcgctgtccccagcaccgccatccctggcgccagcaccggtggtccgaccactatcgtcaacgccgtcgtcacatctgacgggagacggcgcccctgttggagggctgatggtggtgctgccctcgcaaacaaagggacacgacgcccctgctggagagctgttgctggtggttggtgccgccgccatcgtcagcgctgccatcgcatgcaagaggacacggtggccctggccctgctggagagctgcatctgtgatcagtgcaatcctcaaccgctcctcaacagtcatcggcaaatcaaagctccgccctctcctgtag

SEQ ID NO: 20198 - DNA, 475 bp, Oryza sativa
  Clone ID: PAT_MRT4530_25588C.1
atggctcaagggggaagaggggggtggcacccggttggctcagctcggcttcaaagccgagcggagaccatggcgaccggcggtggcgtgcgcggctgccgacggcgacgaccggcggagggaggcggcggcggacggccgaagcggcggcacggccaaaggcggcggcgcacgcgggaaggggagaaaagggagggagagggagtcctcaccagaggggcggcggcgaccagtgcggaaaacaagggtggcgatgacgaccgacgatgccgaggcgcggacgagcggcggcgacacctgggagggagcggagagggggttaggagaggagacgacgaccacggcggctaccattgccagccggagatggaaggcagtgataagacttacaggctggtagtagcagcaggcgctccggtgggattccggcgacgcgaggcggcggccgggaaagctcttgcggcggcgaagctaa

SEQ ID NO: 20199 - DNA, 461 bp, Oryza sativa
  Clone ID: PAT_MRT4530_25589C.1
attctactagacaaagcattggcgaacggctcctgtgctgttcgtgtttagttggtactaaccttgtactaattgacagcaaagcgcttatgtcatggctgcacttaccaccattgttataggcttgtgtgatttgcatcggtatccactaccaagcgtggtggtgacattttgttttgcagcgtgaacatggacacatgatttagatacaaagatgcaatcatacaagaggggaaaaaagaagaaatgtcactgccatacccccaggtcccaatccccaagcctcctatggccaggaacatgcacgtcactgtcctgcccaaatgtttaacggcgcgagagacacgtttctggttactggttgctgctgaattagcggaactcactcgcacacgcggaatcctatgatttttagattagcaatttactccatcatcattgagtagggtcgaactggggga

SEQ ID NO: 20200 - DNA, 495 bp, Oryza sativa
  Clone ID: PAT_MRT4530_2558C.1
ccgttcacacacttcactcacacgagagagagagagagagagagagagaaagctcagagctgcttcctcccaaaagcttcttccaacaacaatggcgtcgttctctcctcctccccgctaaaccgccgccggcgtcccgacccgacgtgcttgttgcctgcatctgcgacaaggcgagaagagaacgggggcccaagcccacgcctcgccgaatcgcgtcggtgctttggatcgtggccatggacatggagacggagaagcagcagcagcagacgaggtgcccgccttggctccaggcggccattgcagacatcgagcagcgggtgcgggcgctggcggtgagcgtgccggaggacgcggcggcgacggcgacggaccactccttcgccgagcgcgccgagaactactaccacaagcgccgctctagaggatccaagcttacgtacgcgtgcatgcgacgtcatagctcttctataggtcacctatcatctgcct

SEQ ID NO: 20201 - DNA, 315 bp, Oryza sativa
  Clone ID: PAT_MRT4530_25590C.1
atggcggcgccgcgacggcggccggcggccgcggccgccgcagtggggaagcacggcggcagcccggcggatgaggaacagtcgtgggccagcggaggtggagaggtagcatgcgtaggacctgcggagctgctcgtcgggcggcgcgctgaacacataccggaatattctatcgtgaccgccctcggccaggactttggtcccctgcgcgaccctccccacggccgcctccccgatgctcggctccgtcctcactgtagaatcgatggagcaatgcaggccatcgataatcacaatgggaaatcaatctcctga

SEQ ID NO: 20202 - DNA, 219 bp, Oryza sativa
  Clone ID: PAT_MRT4530_25591C.1
atggtggtcgcgatgtttatctctgcgatattcatctgcctcgtccgctaccgactcaaagccgccggagagctgtcgaccctcaacctgcgcttgaggttgaagcttcgtatcctcatgtttgctgccgtcgctatgtctctagtttcggttgttctcgctgccttcacttattattatctgattgaggtgaagtttactcagattagagggtattag

SEQ ID NO: 20203 - DNA, 575 bp, Oryza sativa
  unsure (1)..(575): unsure at all n locations
  Clone ID: PAT_MRT4530_25592C.1
atggcgctcgtgcagatgaaggtcacggcggcggccatggcgtggaactttgccgtggaggtggtgccggggcacgtcgtggagccgaggctgtccgtcatactccacatgaagaatgggctcttgtacagagttttaatttatgttggtgtcgagcgtggtgcttcatctgtaccgtgtgcgattaagcaagaaaaatattctgaagagactgaaaatataacagaggccaatagcatcagccagtcaagtggtcaacaagtgcagaactactctgtcctgtcatatatttttatcacagcaaaaatccacaaatctgactatgcagcatgcattgctgactctgtcaactcttatccgtaggagtatatcggtttcatctgatatcatcacatgttctagcagacagcagggcttttttatgtcaaactatttgacccgtccttgattacaagccagatcaggcacaattcccgccccacagtactatgtatgacaaataagacagcatctaactactgcggcacaaaaaaaaaaaatttgaggtcagctnagcttcgctggagtgtggcgct

SEQ ID NO: 20204 - DNA, 739 bp, Oryza sativa
  Clone ID: PAT_MRT4530_25593C.1
aaaaaaactctctctccctcccttctctctcgtctcactctcttctctctcgtctcgctctcttctctctctccctcccttctctcccgcgcactaccgacggttggccggcggaggcggcagtggtgaccgcgccctcccctccgccagatccgggccatccggtgggaggggaggcggcggcagggagctagaggggagcccgtggctgcagctgcccggcggccggacgggaggcggcggcgacaccctcccctccaccagatccggccggaggggaggcagtggtgcctccgctccaccagatccggccgggaggggagtcaacgacgacaggaggggtggcagcagcaagtggcgtggctcacgggcggtggcggcgacgacctcccctctgccagatctggcgggaggggaggtaatggcggcggcggagccctcccctctgccaaatccggcgaggagtaggtagcggcaacgacggcggtgggctccccacgggcgacagtggtgggctcccttgtctctcctgccaccagtgagcacccccaaccgtctccttcgcttgccggctgtgccattgttgatgtttgattcgatgatttaatgatgtttgatgtttgattcagtgatgtaaacttgttgatgaatatttgattgtgtgatgcatgaatttgttgattatgtgatatgtcctttttctagatttttgatttattctgtgagatgaatattgccc

SEQ ID NO: 20205 - DNA, 380 bp, Oryza sativa
  Clone ID: PAT_MRT4530_25594C.1
ttgttttttttattttttttgtttttttttttttattttttaaaaaatttttaaatttaaaattttaaaaattccaaaaaattgaaaaaaaattaaaaaagaaaaaaaaaaaaaaaaaacaaaaaaaaaaaaaaaaaaaaaaaaaaaaaaagggaaaaaaaggaaaaaaagaaaaaagccaaaaaggcaaaagaaagcatgctgcagcaaaacagcagggcaaggttattcgttcgcagcatgtagcgaaataaagcgaacaaaaggctaaaggggggaccggcttaccaaaaagattaggcagaacataaggaggagcagcgaatacacggcggaaaaaaacgacaggtggactagcgaacacttggatcggaacatgg

SEQ ID NO: 20206 - DNA, 928 bp, Oryza sativa
  Clone ID: PAT_MRT4530_25595C.1
gcgcacgcgtgggcgcgatccgtctctcgctcgatcgccatggcggccatgagtgacactggctcgagcttggcgcagtgggccgagctgtaccacgacgcgtcggctgctcacggcggcgtggtggcgaacggtgcggcggcggcggcgacgagcccggcgtcgccggcgggatcgacaggcgggagcccgacgcgggcgccgggggtggaggggccgcgcgtggggaagccggcgaggaggcggtccagggcgtcgcggcgcgcgcccgtgacgctgctcaacacggacaccaccaacttccgcgccatggtgcagcagttcaccggcatcccggcgccgcccgcgggcgcgttcgcggggcccggcggcgttccggtcatcaacttcggctccgactacggcttcaccggcgccgtccttcccttctccgaccacctccaaccgcgccggccgacgttccaggaccaccaacagctcctccgaccgcagcagcagtacaccggcgcaccgttcggttacggcaacctgcagcaagccggcggcgccggcaccggcgccggcgacatgttcagccacgcgctgagctcggccgaggacaggttgctcctgcagagcctccagtcagctcagatgcctacttccgccgctaaccacagcgctaatggttacttcgcctaattaaccaacggttaatcgaagacacatcacaagcaaagaagattcatggaccagttgtgtttaaccccctacaagttaattttaccctctcctcgatcgtgtgcaatttcttttcttcttattactttcacatgtttgttcagttaagagagaagatcactaaaatcagctgatcagctatccatgctgcagcgatgtaaatactcctaattttttcttcaattcgatttcgctctttggtcactct

SEQ ID NO: 20207 - DNA, 617 bp, Oryza sativa
  Clone ID: PAT_MRT4530_25596C.1
gttgtgggtttttttttttttttttttttttgccgaagtcaactactgtaatactccatttatccagaaaaaaggacataattacatactttgaaggcatagctgatgagacaacctaaagatatattatgaggggatcctaaagaatggagctaaatacttagtagcaataaacttgaataggcaagttaaaacttcagtattcattggacacaagaatgttctgaagctatgtagcaatagcacaggaaggcatgaaagggcatttttcagttttcatgagaattagcttccttcctgtaccacaaaaaacttgatttgctagagcaatggttcacgtcatctggaaaatctctcgagcctcctacggcgaatctcctcaaccgatggctccccattccccccagcttggaggtgctgtctatgagaaaaagcatggtcctcacgtgcactgctgcacatttcacagatatctgtcgacggcgagttgtcataagtgcatggctgagcatctccatatacctcgacattctctcttggctgaacccacggccaactctgcctcgacttgggggtgtaaccccttgagggacgggccagcacctgaaaagcttctg

SEQ ID NO: 20208 - DNA, 338 bp, Oryza sativa
  Clone ID: PAT_MRT4530_25597C.1
acagaataccgctatagcacttcaccttcgggtgaccctaaaaggatattgaacttagagaacgtgtgtaatcaacctaaggctaaggcgatccaaggacaacaactatagcgtggtttcggctatagctctatgatgtatccgaacgtggaggattactaggacggaattcagggctgtcaccacctgccatctatctctgacaaatccctgggatacacaacaaacaaaggtaatccaggaggttcgccctatggcttcgccccaggcgcacccctaggactcagtggccttcgcccatagtgatgacgtggtcggatagtgagcttggtggcaaa

SEQ ID NO: 20209 - DNA, 1057 bp, Oryza sativa
  Clone ID: PAT_MRT4530_25598C.1
caactccacagtgcatgttacttcttttgcatggctttgattggggcgagctagtgtcgagactacaaagctcacaatacaggtgaccaagacaatgaaggtgccccagcccaataaattaattcccccagctacccttctcctctctcttccctatcggcatcgcctccctcaacctgttgcccaccgcctgagctccctctccttcgcctctctcctccctatcgccatcgcctctctcaaccaggcgtcacggccgcaaatgcaccacttctcgaagaagaggaagtcgtcgtcgtcttcctcgtcatccgcacatggctccgctctgtctcctgggcgtggaagaggaagttgccgtcgttgtccagcccgtcgatggcgaagtcaaggatccacctcacggcggaggtggcaggatgaaagtgcgacgcttggcctcatagtggctccactccgtttcctccgctgtgtggatgaggaagttgtcatcgtcatccagcccaccggcgacgaagttgaggatccgcctcatggcggcggcggtgaggcagaagcgcgacgcttggccttgtagtggctccactccaactcctccgtggcgtggaagaggaagtcgtcgtcatcatctagcccgccagcggcgaagtcgaggatccacctcacatcgacggtgctccgttggcctccgtgcgtttctccgaaggggatggcacgattcgtttgtgggccatgtgtggactcacgaagagcgagaaaactcatctccctgcgtggagtagctatgtactggacgtgcacgcaattactcgccacgtaggcattcatttgagctggcggcacaaagaaactcaccacgcaaacacactgtgaagggcctaagcgtaaatggcatggggtgggccagaaacgtgtgtgtttcccatgttaatattttttttcgtacgtgtagtattattatatcgaagaaaatatggtgaactaatattacacatctttttctgcagtagctatgtaatggacgtgcactagagttcttcacaaattctactttcga

SEQ ID NO: 20210 - DNA, 2929 bp, Oryza sativa
  unsure (1)..(2929): unsure at all n locations
  Clone ID: PAT_MRT4530_25599C.1
atgtctgttgaagctggtgatattggctgcaatgttgaaactgagatgaatgagcctaaagatgacccagatgatgatcgaatccatgagatgttgttaagtgtacaattcccaaaatgttctattcctgcatcttatgctgaagcgaagaaagttattcgtgcattgggacttggatatgattcaatacatgtttgtccgaataactgtgttttggttagaaaggagttggctaaaatggataattgcccagtatgtggtgcttcaagatggaaggatgaagatacaagaaagcaaattccaaacaaggttttgaggcattttcctgtggttccaaggttgcaaaggatgtttgcatccaaaaagctttcagagcaggcacaatggcacaagttgaagagaaaaccagtgcacaatgaacttagccatccagctgatggcgaggcatggaaggattttgataggaaatatgactggtttgcaaaagatgcaaggaatgtccaacttgacctcgctactgatgggtttaatccatttgggaagatgagcgcctcgttcagcatgtggccagtattccttattccttataattttcctccatgggaatgtatggagcaatccaacttcatgatgggcctactcattcctggtccgacaagcccaggaaaggatatggatctcttcttgcaacccctgattgatgagttgttagatctttggaaaggtgtccctacctatgatgctctgactaagaaatcatttgatcttcatgctacagttatatggtgcattcatgactatccagcactgagcacactttcaggcagagttactacaggttactatgcctgtgttcgttgtgacaaaaatccttgctctagaagattaaggaacaagatttgttatattggccatcgacgttttctcccacgggaccatgtttggaggacaaaattttttttcgatggacagaccgaagaacgtgagcagcctgaggaatttactatggatgagctgaatgagcaattggcgagggtttcacatgttaaacctgggaaccatcctgataacaaaaagagaaagagacaagaagaaggtcaatgctggaagcgaagggcgagtttgtgggatttgccatattggtcaaatttgaagttacgtcacaatcttgatgtaatgcatatcgagaaaaatatatgtgaggcccttctcgggacatttctcgacattacagggaagtcaaaggactcaattaatgcaaggcttgatttggaagatatgggtgtgaggaaaaatttacacttgaagcctgatgggaattcgtacactctcccacacgcttcatatacgatgactaaaacccagaagcttgctttttgtgcttttataaagaatgtgaaattcccagatggatatgcctccagcctatcaaggtgtatttctgctgatgaatgcaaagtacaggcattgaaaacgcatgattatcatatccttctgcagaggatattgcctgtaagcctccgaggaatcctggataaggaaatttatgaagcaattgctgaattaggtaacttttttcagcaaatatgtgctaagacattgaagtatggatggatgtacccagttgagcgtaggttgcttactttgaagcgttttgtgaggaacatggcaagacccgaggggtccattgcagaggcatatgtcgcaaacgagtgcttgaatgcttgctctaggtattttgatgatgttgacacacgacacaattgtgagggcaggaatagagagcgtgtagttttgagagaaggtggcttatctattttccagcatggagtcactcttcttggtgcatcgaggatgacgtacaatgagaaggattatgacaagatgctttggtatatcctcaacaatactccggaggtcgagccatttatagagatatgcaggacagagttggagagtgctggcaatgttgatgttgatagggctcttgctaaggaatttgcaggatggtttaataaacaccttgcaaccagaaaatttgtgcatggagaagaagtcaatgaagacctatatgcattggcaagtgaaccacatcttagagttcatttattttcaggatgtcttgttaatggtgttcgctatcacaccttggaccgtgagagaagtagaaaaacacaaaacagtggtgtcatggttgagggctcacataatggaggagatatagacttgtatggtcagttgaaagaaataattcagttgcagtacaactctgattcgaacagtcaaaggacagtagttttatttcagtgtaattggtttgacacttgtagcaagaagtctaggattaaagatgatggccatttcaaaagtgtcagccatggcagttgctggtacaaggatgatcctttcatctttgccacacaagcaacaaaggttttctacttagaagataacaagcatggtgagccttggaaagttgttcaaaaattttcccataggcacttgtggaatgtgcccgaagaagaaaatgatgacctgccggcccaggcagagcatgaattgtcataccaagatgatgagcaagaaaatactagttttcaggttgcagatcttgagagagcttcaatcaacgagcagcctagcaattatgaagatggtatttgtgttcaggcttccctagttgatcagatccagagggaaagggaattggaagttgaagaaaatggctttgaagatgatgctgacgaaactgtgagacaatatgacagtgaaaatgaagggccaatccatgatgatggtgaatatagtgattttgagtaaaatatctgtgtatggctaagtcccaccataacctgctgttaggccatggctgtcagtttaaattgtgtctgagggtttgattnttgtgtattatgttgtttgaatattt

SEQ ID NO: 20211 - DNA, 2363 bp, Oryza sativa
  Clone ID: PAT_MRT4530_2559C.1
aaaaaaagttgtttgtgccatcagcccatcaccaacggaagccgcgaaaaataggcaaaaaaatccccaaatccaacaacctgtagcccgcttcagtccgacgaccatggccactcctttgctcgccgcgctcctcgccgccgcgctgctcgcctcgccggcggcgccggcggcgtcggccagcggcggcaccatcgtcttcaccaccctcggccgcagccgctacgagttcgacatcttctccctccccctcgcgccctccccccataaccccgccgccgccgccgagctccgcctcaccgatggcgtctccgtcaactacaacggcaacttcgcccccgcctccgattccatcctcttcgtctccgagcgcaacggctccctcaacctctacctctccccggttccctcctcccgccgcgaggcgctcgagtcggcgtcgtcgtcgtcgtcttcggcggcggcgacgatctcgccgctcctcccatgggagccaatcgcgctcaaggaccggccgtcgctcacccccgacggctcccgcctcgtctacgtctccaccgccgtccccgccgcggagccgcgcagcagctgggccgccgtgtactccaccgagctgtccaccggccgcacgcgccgcctcacgccgcttggcgttgcggacttcagccccgccgtgtcgccctcgggcgagtggacggccgccgcgtcgcccggcgccgccggttggagcggcgaggtcgaggacctgcgcactgacatctacgtcttccgcaccgccgacgggtcgcgccggtcgctcgccatccgtgacggcggctggccgagctgggccgacgagaccaccgtcttcttccaccgccgggacagcgacggttggtacggcgtctaccgcgccgagatctccgtcaccggcgacggggtcgaagcggcgtccgtggagcgaatcaccccgccggggttccacgccttcacgccggccgcgtcgcccggcgcgccggggctcgtggcggtggcgacacggcgggcgggctccgactaccgccacatcgaggtgatcgacgtgagcagcgacggcaagaacgcctacttcgaggtgaccaggcccgtggcaccgcgcgtgcaccacttcaacccattcatctcgccggacggcgcgcgcgtcgggtaccaccggtgccgggggagagggaacggcgactcgccgctgctgctggagaacatcaagagcccagggtcaccggacacgttctcgctcttcaggatcgacggctcgttcccctccttctcgcacgacggcaagaagatcgcgttcgtcgggctgccggggatgtacgtggtgaactccgacggctccggtggtcgccgcaagatcttctccgggaacgccttctcgacgtcgtgggactggaagaggaaaggcgtggtatacaccagcatcgggccggatttcgccagcgagaccacggaggtggacgtggtggccatctccctcggcgacgacgacgacgagtcaaccatctcgatgaagaagctgaccgtgggaggcgagaacaacgcgttcccgtcgccgtcgccggacgggaagtgggtggtgttccggtcggggagatccgggaacaagaacctgtacatcatcgacgccgaggacggcgaggccggcggcatccggcggctgacggaggggccatggtcggacacgatgtgcaactggtcacccgacggcgagtggatcgccttcgcctccgaccgccatgccccggggagcggcagcttcgccatctacatggtgcaccccaatggcaccgggctgcggcgggtggtgcacagcggcggcagcggccggaccaaccacccatggttcagcccggactccaagagcctcgtcttcacctccgactacgccgccgtctccgccgagccggtctccaaccctcaccattaccagccatacggcgagatcttcaccgtcgacatcgacgggtccaacatccggcggctcacgcacaactcgttcgaggacggcacgccgtcgtggacgccatacttcctggagccccgagacgtcggcgagacgctgcaagcctcgggcaggtgcgcgttccaggattgccactggctcaacatccaagatgctgcccaacctgaagagctcaactatggcaagagctgctgagtgaagccatggcactggctgatcacgctgaattaagccaataaaccatggatattggagtgcatgaatgtagatataatactgttatgtagtagcatgaatctaccaggaataagatcatgtacactgatgccatcttcagggcaaacgatatcagaattgctacatatctagtttttttttattggcc

SEQ ID NO: 20212 - DNA, 2074 bp, Oryza sativa
  Clone ID: PAT_MRT4530_255C.1
tgaagattaagaaaataatcaacgactacaaatgcaactaacggtaatggcgattagcagcaacagagatgatcgactatgatgacgaagttgcccatgaacggtagcagagtaggctatgttgaagaggcttgataggatgttgatgaagatgagatgtcggtgatccagtcaatagcagtgtagcagccaatgataatgacgaagacgctcatcagcgtttgtgtagtaggtcaaccgtgaaggcaaaatattggaggaaagtagatgttgttgtccactcgtctaaagtaaaataattggagttgctaaagtagaatgttctttctttagttgggaaacaactgaacatagagtcgagaattgtagcttcttgtcgtcgagtagtcattgcttgagtgaagatacatattgaagatgtccaggtagaaatattgaagattggaacaccacttgtagtagtagaataacacggcgtcgaatctggaagtgcatgccaagatgtcgaagctcttgtagacgtcatggctagtgaagtagcaaaacttgcgaagtagtagcaatagagtttgctggtgccgaagataataaaaatgaagtcgctccaccatggtgacaaagttgcatagccgtgataaagtaaacacgagtcggcggcaacaaaagcaaaccagtagcgaagacgcgtagttgtgaagataaaaacactagtcggcgacggcttaaccagtcggtgacggaagatgatgacgaatacgcgcagtcgtggaggcgaacaaaccagtcggcgtcagataaagtgaccaacaatgaagacgatgacgtccatcaatagtggtagcggcataaaccagccgtagaggcgaggacaccagtcaacagtaggcgagacgtccggcgatgaagacgataaggccaatcaacagtggcagaatcatgcagccacggaagtgaagaaaccaatcggcagcagcttgcgttgaggatggtaaggcctattagcggtggcggcgacatggccagccgtgaagatgacaacaccagttggcatcatacgaggcggccggtcggtgaagatgtagacgtccaacaacggcggaataataggctagccgtgcaggcggagacaccagtcggcggcggcgaaggcaagccggtcggcgaagacgtagatgcccgacaacggcggcataataggccagtcgtgcaggcggagaaaccagtcagcggcggcgaaggcaagccagtcggggaagacgtagatgccagacaacggcggcataataggccagccgtgcaggcggagacaccagtcggtggcggcgaaggcaagccggtcggtgaagacgtagacgcccaacaacggtggtgtgaccaaccaaccgtgcaggcggaaacaccagtcggcggcggacgaggcggccggtcggtgaagatgtagacgcccaacaacggtggtgtgaccaaccaaccgtataggcaagggcaccagtcggcggcagacgaggcggccggtcggtgaagacgtagacgcccaacaatggtgatgtgaccaaccaaccgtttaagcaagaacaccagtcggcggcaacgacggcaagccgatggtgatgttctgactgatccattctggcgacgaaataagccagtcatgaaggcaaagacaccaatcggcggcaacgaaggcgactagtcggtgaagaagtaaacgcccaacaacagcggtgtgaccaaccaaccgtatagacgagtacaccagtcgcaagccgcggtgataatgaaggcgtagacgcccgacaacggcggcgtaataggccagccgtgctggcggctagtcggcggcggcgaaggcatgccggcggtgaagatgaagatggccatcaacgggggtgtgaccagctaaccgtgacggcgaggacaccagtcggcgacgttggaggcaggacagcggtgaagtcgtagacgcccaacaacggcgggataataggccagccgtgtaagcggagacaccagtcggcgacggcaaaggcaaccacggccatcggtgaaggcccatcccggtgagatgtcctag

SEQ ID NO: 20213 - DNA, 1221 bp, Oryza sativa
  Clone ID: PAT_MRT4530_25600C.1
atggcctattggcaggttggtctgtacacgtccagtcactgtacaataggtagatttggacatataccgttgcagtaccatgcgtattactactactactactacaaacgaaaaagaggcatgataagaaaagttgccgacttgctgtgtgacctgacggtattttcagtcggtgaatggagatatggagttggacggatgcgacgatcgatggatggaacgaggcatgcacgtgacacgtcgtcgttaagcgcatctcggctcgctcgctcgacgtctcggctgatcagtccgacccgatcgacgttcgtgcgcgcggcaaacgccaacaccgttgatttcgcctggtgtacgtgcgggtgtggaatatcgcacagcagcgtgcgaaagcaaccgcgccatggatcgatccgtagttcggattgtggcacacgatcaaaagcaagcagctcccctgaagacctgaatcctgaaaccctgatgcggagagaccacgtaccggccgctgggccgggccgcgtatgtccatccagtggattgaagggtactacagtgtggcaaaaaacacgctcacacacacacaaaaagaaaaagaaaaaggcagaatatgcttttgtggacatgtcaggaaggttcctggcagagaagttaacatcagaagagggtcatgaacaaatcttccctgggaagcagcttggtacgcactacgaagataactgcattgcgcccgcgatttcaagcccgctagccagcagcaagttcaatcatgcagtgagcctcttttttcttgtgggtgaaaaagaggccagcttgtcttttagcaactgctgcaagctcggtcgaaagggaaaagctgcctaccctggtcctggtacgcgggatctcgtggacagtgatcagtttaacccgatctatgaaaaacaatgccgtatttacacgcacgaatgtgacgtcccccgaccggccgcaacttggatggcagctttaccttcggctgtctcgccgcgcacagttggccaccgcgccacccgcgcaccggcgcacggggctggcacctgcaaatcaacacggatagatggaacgcgacagtcggcagcagcggtagtagttcgcctattgccatgcgtggacacaggcacacacgcggtcggtacggccagtgtcgaccgagccgggcacaatcaattgaagacgtggccaaagaccgccatctgcattgcg

SEQ ID NO: 20214 - DNA, 351 bp, Oryza sativa
  Clone ID: PAT_MRT4530_25601C.1
atgtcgacggtggtgcaggccccgcatggcgcactcacaaggatcggcggcgttcgccgcccggccgcgggagtgtcggcacgatcgaggtcgcggaaggccgcgaaatcaacggtgttggcgtttgccgcgcgcacgaacgtcgatcgggtcggactgatcagccgagacgtcgagcgagcgagccgagatgcgctagcaggagatcgtgtgacaaaggctcaccttaacgacgacgtgtcacgtgcatgcctcgttccatccatcgatcgtcgcatccgtccaactccatatctccattcaccgactgaaaataccgtcaggtcacacagcaagtcggcaactaattaa

SEQ ID NO: 20215 - DNA, 549 bp, Oryza sativa
  Clone ID: PAT_MRT4530_25602C.1
atgcaaccacccggccgcgcgtgctggcacgcatcagcaccactcatttgccgtcttcaactctcacaagttttcgccattatgtatatggccaagatagtcgtcaccggacaggagctgttaagcaagcttactgtcagcagcttgggatggaagaggattggtggctgttcgtctctcgcgttcacgggctgctgcgtcctgccaaatcggcccgattcgcctgcgctagcaacgtccaaggccggccggccggccggcattagccggcacagcacgggccacggccaaagctcgtctctggcttactccggccaagttgcaccggcgattcatcgaatctgccgcacgggtgcatgtcgccgcagtagttcgctggtgcccgtgatagatgcggccgactggccgagcagccagctgcctcccaagttgatttttggatcaaatttgttcacctgggtacctgctcttggtcaaagttggtggcagggcagcagcattttaacaaatgggaatgtgcagacactgacggtggtccccacccagtag

SEQ ID NO: 20216 - DNA, 762 bp, Oryza sativa
  Clone ID: PAT_MRT4530_25603C.1
cattattggaacactaatgaatgttccaaagggaagaccaaggacaatattaatacccgtagtgacttaaaactcatgaacctgaggccagacttgcatccagtagatgatggaggaaaggtggttttgccacctgcgccttacacgttatctccagatcaaaaaaaagcactgcttagtttttttaaagaattgaaagttcctgatggattttcttcaaatataagtcgttgcgttaatatgaaagagcggaaaatgtcaggattgaagagccacgactgtcatgttattttaaatcatatactccctcttgctctgcgtggactgctccctgaaaatatttatgaaccacttgtggagctatcccagttctttaagaaattaaattcgaaggcattgtcagttgaacagcttgaagaaatggatgctcaaataccagtaattctttgtaagcttgaaaaggaatttccaccatccttctttgatgtcatgatgcatttgcctgttcatttggctagagaagctctaattggtggaccaaccatgtatcgatggatgtatttatttgagagacaaattcactacctaaaatcactagttcggaatatggctcgcccagagggttcaattgctgagggatacattgcagatgagtttatgacattaagctctagtgagtactgcaacagtacagagggttcttcaatggtacaatttacctcaacatggaacaaaaaattcatcaactggtttaaagagaag

SEQ ID NO: 20217 - DNA, 834 bp, Oryza sativa
  Clone ID: PAT_MRT4530_25604C.1
atgaggctcgccgtcgcgacgttcctcgccatcgcattgtccctctccctcctgctcgccggcgcgcttgcccggccgcccccggcgccggtgaggacggatgccggcggcggcgcggcgccggctccgcaggacaagggcggcaacctcaccgacgtgctcaacgtcgccggccccttcagcaccttcctcatgtacctccggcagaccaacctcgtggcggtgttcgagcaccaggcctaccggacccaccagggcatcaccatcttcgtccccgtcgacatggccttcgccgccatcgagccatcggtgttggcggggctatcgaggaaccagctgaagcacctgctgatgtaccactcgctggcgaagcactacacgctggcggagttcgacgggctgagccagagcaacccggtgaagacgctcgccggcgggaggtacgcggtgaacgtgacgtacgacggcggcgtggtccacgtgatgtcgaggtggtccagcgccagggtggtcgggagcgtgtacgagtcggcggccatggcggtgtacgagctggacacggtgctgctcccggacgcgctgttccacgcccacccgcccgtcgcggccaccccgcccgtgccggcgctgccgtcgccgccgccccacgccgatcacccgccgcccgacgacgacgacggcgacatcgacgactacgtcccggcgccgccgccggacccggcggcggggaagggcggcgccaagaggtcggcgtccggaccggcggtggtggctcacaaggccgcgagctacggagccgctgccgcgatgaccttgctggtgtcgtgtttgtga

SEQ ID NO: 20218 - DNA, 399 bp, Oryza sativa
  Clone ID: PAT_MRT4530_25605C.1
atgccaatgccaatgccatcagcacttgctcgtggagccgtcggcgtagtggacgacgcagtccttgccgcccggcggtgcgcacttgcaggcgcacccgtagagcgcctcgcctggacggttgcagcaggtgatatatttgtgatccttccagacgccgtcgacatgtcaaaaactattcaactctcgcgcgaagaaacgccccgcgtgcaacgtctatatgcgtatgagtgtgccatgttcttgatggttctttggaggaactggtttgtgaggaatgaactcatccatgataaagtagccccgccaattgaggtctcaaagagattcattgaagcgaagtcgcttgttgctggcggtgatagagagattgtcattaggaaattttttgagccttga

SEQ ID NO: 20219 - DNA, 3758 bp, Oryza sativa
  Clone ID: PAT_MRT4530_25606C.1
ccaacatatcgactcctttgtccgcctgctccgccgccgatacccgcggagccgcgtgggggcggctatgagctcgccttccagaccaaactgaaaagaacatgaatccccacggcggtgggaaccaaatgcgcgagccggcgctcccggcggcggtcggcgcggagctggagcggctggaggcgaggctgggccagctcgcctgcgcggaggcgcggcggcagctcgcggagctcggcgagccggcggcggcgcgggtgctccgggcgattggggaggcgcgccaggtccgtacgctctccggcttcatcaggcacatggcgaaccaggagaggatgaagcgcaacgcgcggggcatccccaccgcccacagcgccgcatgcatctccggcccctgccgcgaagaggaatctatatccactccactgtactacaatgaggttcaaatggatgctcaaacacccaacgacatggtggaggttgggagtcccaaccaacagatgccgctccgtttgcatgacaatggcggttctgtcggacatattgctcgtgtggttccggaccttgctaacccagcagttgggagcccatatggtcgaatatcttctgtgctgctgcagaaccagaactgcgttgaaggttatacgccttcccgtggaatggtttctcctgcgtccaaccaggtggctgtgcagattaactttcctacccaaccaatggctcatgctttgcctaatgatgttatgatgcaggttggtagccctggccaccgcatgccatctgggctgcagagacatatggagattgacagccccatccagccgatcgtttctactccagaaagagtttccaccccgagccctgtgcgggatctatcaagatgtgtcgagaatatggctggcccctcaggaagtcctccatgtcccatttgggtgatgccgcaaattcctccagcaatctgtcctgacacgaccaatgtgttgagggaggtagtgagccctcagatgctagcgctgggagagttggagttcaggaagatatttatgatttttgcttatctttcctggaataagaaaggagtaaagcctccattatctacaccaaaaagtaataacataatacatgcttactctagtgcacattggctctcagcttctgatgccttccagatatcaccctttcttcattatgattctagtgtccagaaccttgattctggtccaggtatgtcaaaagtctaccattgtaatgttgagataagagggggtacagttgtcaaaattttcaagggaccatatattgagaataggaggactcatcttcagaaagttcttggtgatgataacgtccttgtagtaaaatttatggagatatcttcagacactgagactgatttgtctacctatttggaacactaccataaggttgctgaagagggtattgttttgggtttgcgctgctatcgatttttcctttacaaggacggcgggaaagagaataaaatgaaagaagagaatagagaagaagaaaacaagaaatgtacttcatctgtcagatgctactttgttcgcactgagtctgggtggaacatggatgaaccttacatactctctggcagaacgattggtcaggctcgtgacctattcatgcacatccgtactgttctcaccttggcgaaatatatgctcaggtttgctttgatagtctccaaaactatcacattggatgttgatttatcagaagttcttgtcaaactcattgatgatgagccttgcttggatgaacatggcaaagaagtttttagagatggggagcggttgatacatactgacgggacaggccttatatctgaagatttggctcagaaatgcacttatagtaactcaaagggaaaattgttggagccacagcctcttcttattcaactccgcctgttctacaatggatctgctgtaaagggaacagtcctagttgacaagcggcttcctcctaggactatacatatccgaccatcaatgttaaaaataaaaacttatccagaattatctggtgtccaatctgtcaactcattggacatagtctctgcacgaaatgccaagaaaagtctatctggggttcagtccgtgaattcttttgaaatagtctctacaagcaatcgatcaggaaggacattcacatcaaataatttaattgcattacttcactatggaggagttccagaagaattctttatggagcttctgcagactgcgattgaagaggctgacaatgctcgttttgattatgctggcgcactgaacattgcattcaactatgctgacatggaagattcaatgccagcacggatgattctttccggaatcccactagaagagtcgtacttgcaatctaggctggatttcttgtctctactggaaagaaaaggaatcaagaatggaaagataccaattgatgactgctattatttgatgggtactgcagaccctacaggaaaacttggacctaatgaagtctgcgtgatacttgattatggccaagtttctggagatgttcttgtgtataaatatcctggcttacatcctggtgatatacatgtcttgaaggcaacatatagtagcgacatagagaaggttgtgggaaattctaaacatgcgatactcttccctactactggacaacggtctttggctgatgagatggccaatagtgattttgatggtgacatctactgggtctcattaaacccaaagctgttagaacattttaaaccttcgaaaccatgggttccagctattacaccaaatgggaccaagcaaaagggacccgaggattttaatgaatccgagcttgaaagagtgctatttcatgagttcttgaaaacaagatttgcacctagttatgcgcgtgctacggcagctactaactggttagtatatatggatcggctattaactgtttcacttgacgaaagtgaaaagaaactaattgagaaaaagatgctcaagttagttgacctttattatttggctttggatgctccaaagatggggaacaaggttaacttcaatcttgggcttacacaatgtttgttgcaaatgcttttacatggaactgaaatccttattaacttatgctttcatctggtcaatattccacgtgatctaatggtaaaacaatacccccacttcatggaccgcagtccttcgtaccattcgtcgtccatacttggaaaaatctatgataaagcaggtgatccaaaaccgctgcgatctgataatgttcaaccaaccagtatatcatcgctcccatgtttcgcggagagagacgtgcctccagcaatcaagcaactctggcaacaccgctataacgagtacttggctgatagttcacttctctatgccgaagaggcggatgaagaagaaaagaagataaagtttcaggaactctatgaaaagtacaagcatcttcagagttctgacccaatcgctcttgccaacattcagttgctctacggtgcatctgaatttgaagagacaccgagggacctcgacgacgtgttctccgaggcctgtgcaatctaccagatcgcgtatgagaaagcacggtctgccaacaacgtcgccagatgtggcttcgcttggaaagttgccggccgtgcattgtgccatttctacacggtcaagaatgagggtaacgctgtggtttgctcgctccaacttctccgcaacttcagatttaccaagaagtaccgcaagtga

SEQ ID NO: 20220 - DNA, 1342 bp, Oryza sativa
  Clone ID: PAT_MRT4530_25607C.1
atgaggggctcggatccggaccggggcggaggcgagccggacatctccaagctcttctgccactacaaagccctgaccggggtcttccccaaaaccctcgccgagtcgccgggctccgccgccgtccccatcgcgaactactcgcaggctactcctccggccatgaggggctcggatccggaccggggcggaggcgagccggacatctccaagctcttctgccactacaacgccctctacttccacgactccctcggcacctgcgccgtctcctgtgccaccgacgaggatccactccccaatcgtgaagtaggtggctgtgaatattatcctggtggtggtggctgtattatacttctttccagatccttgtatgaacaccacacagatttggatttaaagaatgcgctgcttcatgaaatgattcatgcttatatgtgcatcaaaaattaagggtggaaaaggcaataagcatgaactggaagaaacctctgctgggtttcctcctgatgactctattggtatttctggaatggagtcctcttcaagagacacagctaataagaaaatcaaattgtcaaaggatattggtttggaccgtctaaccgccacaactgttcaggaagcaccgaagcgtccaagaacaacctcactaaagaagaatcaagagtgcagcagacagaagaaaagaaaaataagcaagtgggatggttcctactctgtaatcattgaatggttgaattactattctgtggatgagtcagatgaagatgaggtgcctttgataaataaaagaaccgaaagaagaaagcggcagaagttactgaaacttgttcttgctagggaatccaatagtggcagtgaaggtgctagttctacatcttttgtagaaaatggcagaaattctagcagtgctggctcttaccccctaagccagggggacaatgacaaatctgaaaatgtgcaagctaatcgagttgatgtaagttcattgccagatcatcctgtaagtagtcatgtagcagcagaggatcaagctggccaagctgcatcgtcaccattgaactcaccaactagaggtatcgttgttgacatttcagatggttgatggccagagttccattagtttctttcagctgaggcctggacgtacaattatccagactacagttgtaacacttacttttaattccttgcacctgtctactgctagacatgcaacgggacgatcctgtgaagcatgtgtcttgtacatgtcttcgtttcttcctttctcatttcaccttttcttttcttagcatagatcagttcagtatacttaactctgtcaggttgtgtgacc

SEQ ID NO: 20221 - DNA, 118 bp, Oryza sativa
  unsure (1)..(118): unsure at all n locations
  Clone ID: PAT_MRT4530_25608C.1
ggtggtaggatntctcgccgcgacgcgctgtcgacgcctcctctactgctccaacccagagttccacacgnnccaaagacgtatcagaancccanacangtcgcctttccccnantcg

SEQ ID NO: 20222 - DNA, 394 bp, Oryza sativa
  Clone ID: PAT_MRT4530_25609C.1
cttgggacgaaattctctcgtatgtggttattgggacgaaattcttccgagtattccctcaaaaaaaaattcttccgagtagcctagggtttggggaaccttttccgcgatttttatcatcgtgtcgattagttctttatgtattagaccgtccattcaccgattcgaggtgcacatattttgtacttgcaaaatagggttaaatcatgattcgacaagactgttagcctgaagatgcaaaatacctgtttaaattgtgttatttgtgttcaacacagttcttttatagtaaggaatatatagcatatctgatgtaaggcttcaatgcggggataaattctatgtaatagtgtgtagtgtccattatgttcttataatctctggagttcgatgg

SEQ ID NO: 20223 - DNA, 570 bp, Oryza sativa
  Clone ID: PAT_MRT4530_2560C.1
gggggtcgggcccgaggatgatgtggccacccctccctctgtctcccctaggggtcaggccgcccctgtttcggccccgagggctggggcgccccgaccccccgtgattttggcgccacgtgtatgggcgggttggacgagcgcgccacgccgcatttaatgcagcgcagcgcacgcttatccggtccgtgaccggtcgcagtgtgtgaccggtcacagaccgccggagccggcgtgctaactcctggagttggtgtgtcagtcccgatccaccagaacacaggagtagggtattacgcttctcagcggcccgaacctgtctacatcgcccgtgtcttgtgcatttgctctctcgcgaacattccacagatcgagggtgaagaacctcacttagcgcccccggccgaaccggcaaaggggggcctgcgcggtctcccggtgaggagccccacgctccgtcaactgggtaatgtcacatctctccaaaatacattatattatgagtcggagggattacaaatgctttatatttccatatcagcactaacaacccaatgcttggatcgctac

SEQ ID NO: 20224 - DNA, 1406 bp, Oryza sativa
  Clone ID: PAT_MRT4530_25610C.1
ccggccgggaggaccccgagaggtcgtcgaatggcaactccgcctccctcgaacccgacgacgacgctccgagtcggctctcactgatcgcttctagaagcttccggaaggctccgaccccccgccatggccgcgcccttcttctccacgcctttccagccctacgtctaccagagccaggaaggatctgtgacggcgttccagatatccggcggcgatgtgcaggtcctgcaggtgatggttaagtcacaggaaaagttgaccgtgaaaccaggtacaatgtgctacatgtctggtaatattcaaacggacaacaactacttgcctgaaaatgatggaggtgtgtggcagtggatttttgggaaaagcataagcagcagtgttttcttcaaccctggctctgatgatggatatgttgggatttctgcaccatttcctgggagaatactgcctatggatctagcaaactttggtggagaacttctttgccaggcagatgcttttctctgctcagttaatgatgtgtcagtcacaagtacagttgagcagaggccgcgaaacattgaaattggtgcagaggtgatcctcaaacagaagcttaggggtcaagggatggctttccttgttggtggtggatcagtcatgcagaaaattcttgcccctcgtgaggtgattacagttgacgctgcttgtattgtggctatgacaaccaccatcaactttcagttgaaaacccctaaccaaccgagaagagtagtcttcagtgggggtaaccagcttacagcatctctcacaggaccaggcgtggtcttcatacagagcctaccctttcatcggctttcacaacgcattgcaagtagatcagtggccgctccgagcttgagggacaatcccaagttcttcatccagattgtcatgttcttcttcctcgcgtatgtcatgattgtatcatcgataattctgacagatgtttagatgctgcaacaagctactagtcgcgtatgtcttagagagtcatcaaattgaaagagtaaaatctcttgcaagtttgcaactcaaagtgcattctccaccaccgacccccttgtagatgtgtctcactggctccgtttcaagttgaaaagaaggcagtgcacaactgttgttagaaagttaaatgcaaagttcaatgaatcgttcttttgtaatacttgcagcggcgagatcttgttggtcaatgagttcaattttcacagcatatggtgaatatacactaaggagtgattatatctgcacttattgccagtacatatcgcttaatagattgtcaggattatgtaactagtaatccctccttttttaatatataaacatttgttaatgactaaaaaaaaaaaaaaaaaaaagggaaaaaaaaaaaaaaaaaa

SEQ ID NO: 20225 - DNA, 1686 bp, Oryza sativa
  Clone ID: PAT_MRT4530_25611C.1
tcactcggcctgggcctccccggaggccagctcctgctgctggaggcgctcgagcgccttctggtgcgcccaggtctcgagggtgaggtcgggcttggcgttgagcccgacgccgaggatgacgacggtgaggaacgaggtgacgtagcagggcaactcccagtcctcccacttccgcgactcccccgccggcggcggcggccggttgaataggtagcccttgggctgctcctcgtgccccggggtcgtccaccgcccgcccccctccccgtgcccgccgccgccgcggacgcgcgccccgccgcgcagccgcgcccgcagcatcccccccgctgccgacgagatcgcccgcatcgaagcccccccggttggtgcgcgcgcccgcgtggtggtggtggtggtggagatcggagagaggtcgccgccgatttgggggagaaaggggaagagttgctcagcatggagaatgcacagcgcagctgactcactgaactcaacatcgctactgacagccagcgattgccagtcatggaatgacagcttgtcgactgtcgatggctggaagaggagaggatcaacatcccagcctttgaggcttcctcttgaccatctcatcctcacattgtcgatctcaaggccagagatgtgctccagcatcataccaccggttcggtgcttcaccatcttttggcatccaggcctgtaatcatacagccctcccgagtagtttgtccatctcttgtaggttaggtcgacattcttgaacttcaggttgcgaagcagcccgtgcttcgatccagccaagaatactccgttttctccatctctaatctgcatcccaagtcctctatgtgaatcaactattgtaatgttgtcaaataccagcttcttgaagtcaaagaagctagcgctgccaaacttgatagcgcaagatttagtccgtatccagcagtttgttgccgtcaagttgtaaacaggacctgtggttgatttggggcatatcgcatcgtctccggtgtctatgtggcaatgagtgatggccgtgttgtttgaatcctcaatgtcgatgccgtcgttgttgggagtgtcaaaatccccatatatcgacacattgtggatcattgtattgtcacaccaccagtaggcaggctggttgagggtgatgtcgtggatcgtgacgtccttggagtcgatgaatccgacgagccgcgggcggcactcgtcgccctcgcagtcgccggtggcgttccagctcaccatgatgttcttctgcgggttgggggtgaccacgaatgccccgccctggccgttgatctcgccgccgccggtgaccccggcgccggtggtgttctcggcgaggacgacgtaccagcggcgggactcgggagggtagtccgcctgcctggtcccgcccagcagccgcgccccgggggcgacgtcgagcaccacccgcgagcggaggtggacggtcgccgtcaggtagtcccccggcgccgggaggaggacgcgcccgccccccgccgccgcgcacgcgtcgacggccgcctggatggcccccgtgtcgtaccgcgcgccgtcgcccgccgcgccgtagtccgcgacggagaagacgcgcgcggccgccgcgaacggcagcagaagggacgagacggcgagcggaagcagcagcagcagcggggacgccat

SEQ ID NO: 20226 - DNA, 757 bp, Oryza sativa
  Clone ID: PAT_MRT4530_25612C.1
ttttttttttttttttttttttttttttttttttttttttttcacgaaaactctcagagcagcacaactaaaggaagagaaaataatagaattacaaagcatttcaaaatgttcagggcattcgccatcattggacaaattccacgaggaaacagaacaaaaacagaaacaagagcacagtgttcatcccgcacatctcaaacatcttattgggagtaaaacagatgcagtattctagggttcgaggtgacctgaggcgcgcagatcactcggcctgggcctccccggaggccagctcctgctgctggaggcgctcgagcgccttctggtgcgcccaggtctcgagggtgaggtcgggcttggcgttgagcccgacgccgaggatgacgacggtgaggaacgaggtgacgtagcagggcaactcccagtcctcccacttccgcgactcccccgccggcggcggcggccggttgaataggtagcccttgggctgctcctcgtgccccggggtcgtccaccgcccgcccccctccccgtgcccgccgccgccgcggacgcgcgccccgccgcgcagccgcgcccgcagcatcccccccgctgccgacgagatcgcccgcatcgaagcccccccggttggtgcgcgcgcccgcgtggtggtggtggtggtggagatcggagagaggtcgccgccgatttgggggagaaaggggaagagttcccggccgccccctgagggttccaattgccctataggagt

SEQ ID NO: 20227 - DNA, 219 bp, Oryza sativa
  Clone ID: PAT_MRT4530_25613C.1
atggggagaggagcagcgaacaagggcggaggagtggcgtctgacctcaagctggactgttgtagggggctgtacaagcgaggctgggaggagctggaaagaggagcgggttgcgtggcgttggaggaggcaatgcagcgaagaaaatggggaggtggcgatgcggtggggaaaacagcgggagcaatggaatctgattcccaagctcgcctagcgtaa

SEQ ID NO: 20228 - DNA, 1359 bp, Oryza sativa
  Clone ID: PAT_MRT4530_25614C.1
atggcgtccccgctgctgctgctgcttccgctcgccgtctcgtcccttctgctgccgttcgcggcggccgcgcgcgtcttctccgtcgcggactacggcgcggcgggcgacggcgcgcggtacgacacgggggccatccaggcggccgtcgacgcgtgcgcggcggcggggggcgggcgcgtcctcctcccggcgccgggggactacctgacggcgaccgtccacctccgctcgcgggtggtgctcgacgtcgcccccggggcgcggctgctgggcgggaccaggcaggcggactaccctcccgagtcccgccgctggtacgtcgtcctcgccgagaacaccaccggcgccggggtcaccggcggcggcgagatcaacggccagggcggggcattcgtggtcacccccaacccgcagaagaacatcatggtgagctggaacgccaccggcgactgcgagggcgacgagtgccgcccgcggctcgtcggattcatcgactccaaggacgtcacgatccacgacatcaccctcaaccagcctgcctactggtggtgtgacaatacaatgatccacaatgtgtcgatatatggggattttgacactcccaacaacgacggcatcgacattgaggattcaaacaacacggccatcactcattgccacatagacaccggagacgatgcgatatgccccaaatcaaccacaggtcctgtttacaacttgacggcaacaaactgctggatacggactaaatcttgcgctatcaagtttggcagcgctagcttctttgacttcaagaagctggtatttgacaacattacaatagttgattcacatagaggacttgggatgcagattagagatggaggaaatgtgagcgatgtggtgttctcaaacatcaaaatgagcaccaggtactaccatcctttatggtgggggagagctgaaccgatctacatcaccacatgtccaaggcacccagattccaaagaaggcaccatttcagacattcagttcatcaacatctcatcggtatcagaaaacggagtattcttggctggatcgaagcacgggctgcttcgcaacctgaagttcaagaatgtcgacctaacctacaagagatggacaaactactcgggagggctgtatgattacaggcctggatgccaaaagatggtgaagcaccgaaccggtggtatgatgctggagcacatctctggccttgagatcgacaatgtgaggatgagatggtcaagaggaagcctcaaaggctgggatgttgatcctctcctcttccagccatcgacagtcgacaagctgtcattccatgactggcaatcgctggctgtcagtaggtaa

SEQ ID NO: 20229 - DNA, 406 bp, Oryza sativa
  Clone ID: PAT_MRT4530_25615C.1
ttattatttctttttttttttccaaacacacattgtatttataatagggggggtggttgtttttagaggcagtcataactcaatcaatagggcaacgaaaaggaacggggaccggggaaagcaaaaagagttcaataaaattttcgaaatatttggccccttctccgggatttaaaaaacccattggttaatcacaaaaaaaacaacgggtgccaaaagggcacccaccgaccaaaactcgaggaagggcggaaaccaaagactgccctactccgatggaacgaaccaacaaacacgggcttatatggggcgccaaacgatcaaattaatagctcaaggaaaagccaaacataccccacaaccaagggaaaggaatgaacctccccctccccggaaaataccaggg

SEQ ID NO: 20230 - DNA, 448 bp, Oryza sativa
  Clone ID: PAT_MRT4530_25616C.1
accaaaggaggcaatttttatggacccattcattctttcacataagaagttcattacaggacaggttcattcatcacacaaatcaccgagaccccctcacgcggtttttaaccgtcttcctccctttttggattttggcagaaagctagggccattgagaaaaaaaaaaccatccactaattaattaaacccagggaaaagggaccatgcccggcaacatggagaacggcgtttgaccagctaaggcaaccacgggggtctcaacggcggcgaaccgaaggtcaacggcggcctggcccagttggccctgaacgtgctccccgggggcctcccacagttccggcaccgcctctttgaggtgggggatgctttccagggccacgtccgccccggccaccgccgccgagctccccacaatcaccgtgtgaaatccggcggccttcccggg

SEQ ID NO: 20231 - DNA, 494 bp, Oryza sativa
  Clone ID: PAT_MRT4530_25617C.1
gcacgaggccgatccactctctccctcgaatcgaaaagcgatggtggccttacccccgtagtagcggcgacctcccccaccgagcagcgttggcggcgccctcccccaacgagcggctactgtggcgcccttccccctctccccgcgagcggcggcggcggccgctccctccacgctgtctcgcctccctcgccggcagccgctccctctacactgtctcgccactctcgccccctcctcctctccctcggtggatacggcggcggttgcggcgggttgatggtggccgcgggcggatcggcggcggcttcctccacccccgtttgccttcctcccgcggcaaaggcggcggcggccgcggtcggatccggcaacggcggctccctccgacggctgtggtggcgtcggcggcggttgcgacggccgaggacggctgtgacaacggcggagggtggctgtggcgatggctggtggcggatccggcggcttcttct

SEQ ID NO: 20232 - DNA, 2106 bp, Oryza sativa
  Clone ID: PAT_MRT4530_25618C.1
agaacacaaataagataatagcatcatggctatgtgagcttagagagagaataatgcagagccagagagacagagagaggtaggtgattgataataagaaagaagggaagaagaacacaggtctaaccggaggagggcaagagaagatggtggtgatgatgatgcagaagagctccctggacctggtgcttgtgccatgtggtctggtgatcatgttcggctaccacctcatcctcctctaccggattctccgccgccccgccgccaccgtcatcggctacgagaaccacaacaagctggcatgggtccgccgcatggtgcaggcgagcccggacgagacggggctggcactgagcgtcatctccagcaacatctcggcgtcgacgaacctggcgtcgctgtgcatcgcgctgggctcgctcatcggggcctgggtgagcagcacctccaaggttttcatgacggagctcgtctacggcgaccgcacccaggcgacggccaccgtgaagtacatctcccttctcgtctgcttcctcgtctccttcacttgcttcatccactctgcaaggtactatgtccaagccagcttcctaataaccacgctggattctgatgtcccggcaagctacatccagcatgctgtgatccgaggaggcaacttctggtcaatggggctccgtgcactctacttcgcgacaacgctgctgatgtggatcttcgggccaataccaatgttcacctgctcggtgttgatggtgttcatcctgcacctgctggacagcaattccctgccattgcacaaccatcagttcacaattagaaaacggcatgatcagagagctctggcatctacagtggttacaaggcaccccagccctcagaatccgattctcagtaacccggtcttgtctcctgtaactttttcaataaattaatagatatgtttgctgcaaagcttggaggtttgtatggagtaacattacatgagaatatgagattcaggtacaaaattttcatcagaaatattgcttccctaaaacaaatgctactacatgaaatgtgatgaatccatggaatcgtgacagtcatcgagaaatgtgttgatgttcatcatgattgagctgcaccacatcttgggtcagcataatgcctcatttaagttccatgagaatctcacacaaatagcctttggcatcttcaaattcatgtcaggtagggcaatgcatcacactagcttcctaaatccatcctctatagaagaaccgtgggaacattaggatcattcccactgccttcagcagatttcttcttgcctcgcttcttgagcttctttctaaatctgaattgttctttcatattcttctcccatactttcttatgcttgttgtaaatgaacattgctgcacgagcatcctcaattgggcaatgctctttctgttgtattttagcaccaagtacttgagcagtaagatctttcagtgatctcctcttcccttcccttcgaaaaacctcatattctgaggtatcccttatgtccttctttgggtggcctagtagcaaaaccttaagatcatggtgcaaggcatgcccaacaagaattcttcctttgatcagctcagctacatctttctgaacaacccagaaatctttggctttattcatgtgcttcggtctaatcccactaatatgggtacggtagtcaacaatccgctctaccggtcttgtatattcatcatatacaacgttaccccaagagttaaccttaagtccacagcaatttacagattccatgaaatcctttgatgcttcaaccagtgaaatcaatccaacactcaacatactggtgtcgtcggaggtgggcacgagcttgacctccgccgcctcctcctccgcggcgggctcggtgggcgcgggggccggagaagggtggtcggggcggtgcttgcgcttgccgagggtggtggcggcgacggggcgggggagcttggactggagctgcgcccagttagggtttagggtggaggcgccggctgccttcggcttgggcttgggtttccgcttcgggctcgcggcggcggcggccgccggtggcggcggagaagccat

SEQ ID NO: 20233 - DNA, 144 bp, Oryza sativa
  Clone ID: PAT_MRT4530_25619C.1
atggattacatagacccaaacagaatgaaagaagattggatcaaaggaaagttggaggcggagatcgagttcggaaacagagcaggaatcggctggagtctagatcggctacgattaggatcggttgggtctgagtcgggctaa

SEQ ID NO: 20234 - DNA, 1840 bp, Oryza sativa
  Clone ID: PAT_MRT4530_2561C.1
ggggcgcgtgtgtctttctaagccctcatcctctttcgtgtgcgccaagcttctcccgctcagcccaatggccgaacgggcagtggcgcacaacctctctccgagcgctagcggtgacgacggggagcagaacccgcgccgtcgagctcgtactccaccgtccccctctcgccgaggtcttgggcggggggaggcgctcgaggaggtcgaaagatccgcgacttcgccgcccgcgggcgatggagaaggacggcgagacgaggagcgtcgcctcctcgtctacggcgatggcagcacgccccagggcgcgctccaggctgcgggcgcgctcctgcgtcacccgcccgtcgtccccgatccagagactccggcccgacgttggttggatgacgtggccgacttggtcatgacggcgcagcagcgcctaggcgccggcgggcggtcctccgccaccaagacctctggcgctgctaccgccggatccgcgtcgtcgaggcggagggcgcggcgagcggcggccattacccgccgttcgtcctccattccctcgtcaacgcctccgacccaagaaggtgtgcgtggggggccagatgcccgcctcagtatcgagcgccggcgcaatggtcgtcgtgctgcccacgcaacggagggcgcttcctcgtccggagcgccacttcggtccgggcacgggggccagccccccgtgtccccggttggcggtgccggctgtcgagcctttgtggcgagccttcggaacgtccgttggcccccaaggttccggcccaccatcaccgaaaaatacgatggaagcgtcaaccccgccgagtttctccatatctacacgaccgggatcgaggccgccgggggtgacgacagggtcatggcgaatttcttccccatggccctgaaaggtcaggcgcggggttggctaatgaacttgccacccgcgtcggtccactcttgggaggatttgtgccagcagttcaccatgaacttccagggcacatatccgcgcccaggtgaagaagcggacttgcatgcggtacagcgaagggacgatgagtctcttcgctcgtacattcagcggttctgtcaagtccgcaacaccataccatgcatccccgcacacgcggtgatctacgcgttcagggggggcgtgcggcacaactacatgctcgagaagatcgcctccaaggagccccaaaccaccgcggagctttttcagctcgcagaccgtgtggctcgcaaggaggaggcctggacctggaactcctccggttccggtgtggcagcttcggtcgcccccgggtccgccgctcggtcagggcggcgggacaggaggaggaagaaaaggtcggcccattccgacgacgagggtcacgtcctcgccgtcgagggcgcttcgcgggccacccgaaaggggaggcctgcgagcgacaaaaagaaggaggccggcgctcccagcagggagcgcccaaccggcaagtggtgttccgtgcacaacacctccctccacgaccttgcggactgccgcgcagtcaaaagtttggctgagcggacgagaaagtgggaggaggagaggaggcaggagcgccgtgagggcaaggccccggcggctcccgccggcaaccggcgaagtgaggccaagcagaaggcccccgccgaggacatcgacgatggcgacgatgacctggggttccaggagcctgaggccaccatcgccaccgtcgatgggggagcgtgcgctcacgcttctcgccggagcctcaaggccatgaagcgagagcttctggccgcggcccctacccatgaggcgacrcggcgggcgcggtggtcggag

SEQ ID NO: 20235 - DNA, 660 bp, Oryza sativa
  Clone ID: PAT_MRT4530_25620C.1
cacgctggactagcgctcctcctcgccccgcctccgtccaacgctgctcccgccggcgctccgcctcctccgccctcttcctcctcgccggaaccgatttcgtccccttccggcgtcgccggcggcttttcccgccggtgctccttctccgccctattcctcctcacattccccgttcgcgccgccggagggtcgtccccttccaccgacaccgccgtactccaccgatgccctcgccggaatcgatttcttccctttccgccgtcgccgcaatccacttcataggttcatcttgcgctgattggttcccgtcagatttgagtaggaactaaaggaaccaacactgttctccctgaaccctaagttgatcctgtgcagcccctatcaatggatttgcagccgtggtgcgaaggcatcgtatcccctcatggcgttgcaatcccagtaggagcttgccatcggccacatctggcgtttcacaatcctgctaccgctgattttcagatgatttcacgagcgtgtagacaacagcaattatcaaacaaggttcatccctaaatcagggacaagatgagcaagcagctaaccatttcattaaaattgaggtctttgttgtttgcatggatatgaactgaagaattgagatctttgttgtttgca

SEQ ID NO: 20236 - DNA, 366 bp, Oryza sativa
  Clone ID: PAT_MRT4530_25621C.1
acatgaaatcagacagaataatttatggatgttgttaacgatgtacgagatacgtacattacatatatacacaacaaaatacatagcctcctggcattcagagttcatacatcgaacaatggaaaaaaaatttacgcagaactcattcagatcaagccaatctgacactatggggcatcgacaaatttctcaccaccaagggtgtgtgcctaaataatacacatcgcattccacaaggaaaagatgaaaaaaatcgttctaacatagcctacattttttttttgttcaagagctgcgtcaagtatgctacaaacacaccaatgacctactgggagcataaaggagcaatgcagatgcagttcctgg

SEQ ID NO: 20237 - DNA, 360 bp, Oryza sativa
  Clone ID: PAT_MRT4530_25622C.1
atggcggagcagtctcacgccggcgacggcggcggcggcggcgcgggctccggggagccgacgaactggaggaaggaggcggacgataggctgcggcggctccactccctccagttcggcgcggacgtcgcgctgaagggcaaggaccccgcgggggcgcaggtgctcgcgctccgcctcctcggcttcctcgactcgcaggccctccccggcgacggcggcgcggcgggccacgaggccagcttcgtcgcgcccatccgcgccgcggcgtcatccagcgtcgccgccgccatccgcgcccgcgccgggaggtcagacagctctagaaatctgtggattttggagaattgccgtgactaa

SEQ ID NO: 20238 - DNA, 1326 bp, Oryza sativa
  Clone ID: PAT_MRT4530_25623C.1
atgcccagcggccctgccggtggccttgtgcctgctcggggcccacccgctgacgtcctcacctggggggagctccaagctgagatggagcgcatcctccaggccggcgctcgcagcataggacgcgagatcgaggaggccaaggctgcggcggcggcgtcggcgaatgaacgcgccgacaagctagcacatgacctggtggaggtccgcgaggacttccagaaaatgagggagctggtggccgaaaacgagaggcagcggcaggggcttgagcaccgcatgtcggagctcgagaacaacttgttggagatccgtggctcgctgcgagtcacctacactggcatgcaccagctcgccggggagtgcggcgtcacgaccaccatcccggcgaaccccgatgagttctcactgacgtcttcactcgcggaactagccacggcgatggaggagatcccctccaagcatgcggccaggatcggggacgagacgtccaacgggatctacacctgggcatgccacgtcctcgcgtgcgtaaggttggcgcaccctgatctcgacctcctgaggatcttggatcagggggctgctaatgacgcgtgtaagggcatgatggaagaagtcagtgacttgggggagtctgttctccccctttttgaaggagatgtcgatgtcgatgtcgaggatgtccagcagcgcgggcagcctgagtcgccggtagtcgttccggcacttgcgctcaagccgtatgtgccgcgggacgacgttgatcaaaacttgtccgtggaggcgggcatggcgacgacttccttagacctcgagagtgcattggccgaccgagatcatcgaatccaatattggaggacgaaattcgaggtggccgaactcgagaggactatggtgcaagtcaaaaaggaccaagccgtggaagcactacgaggtcgcgaggtgtggttcgactcgtaccttaggagctgttatacggccatggccggagtctgtagggatctccgagtacctcgcgggaatcccgagtcggcggccgaatacatctcgtggttgaatggggcctgctctcagcttgaaggcatcggcaagtgtatcgacgaggccctgaagcaggagtgtcgtcgatcgagccgatatgctggagggcacgtgctagcctgtatccgagatcactgcccgcagctacacctcgagttcctccacgaagggttttcacattctcggaggactcccgcagagagagatgatctggcgaagtcgatggcgccgcttgcagagaaagtcttccagtccctggactggcgttggccttcctggtag

SEQ ID NO: 20239 - DNA, 531 bp, Oryza sativa
  Clone ID: PAT_MRT4530_25624C.1
ttctctatctctgctgatccacccggcgttggttcgcctataaaaaaagagaggagtttgggggaggaagagagagctcctctaggtgtgatatcctcttctgctcttatctgatcgcccttattgagcacgcattggggtttgctttcctggccccacccacgcccacttacattactgttcgcatatcgctaccccttctccctcttctttaccacctagtcccttcttcttctatgctcccttctccatccccccttccttcttctcttcttcccccttcctttcttctctcttctccttcctccccctctttctctccctccccctcccccttttatctctctctcctctccctcttactctccccttctctttcccccccttctctccctattttctctccccttttttattttctcctctccttccttaccctctctcattccctcccccctcttctttctccccccttctcttctccttctcctcctcttttctccccctcctctttcctccttccctcttttt

SEQ ID NO: 20240 - DNA, 3306 bp, Oryza sativa
  Clone ID: PAT_MRT4530_25625C.1
atgcaggccacgatagggcgcgatggagaatcggcgatgctggtttcggcgtcggtcggcggcggttggcgtgaggggcgaggcggcgtcgcgggtggcgaggaggcgtcgcgatggcggggcgtcggcggcgggacgggtcttcgtcggttgggtgagggtgcagcgatggcagatctgggtcaggtagttgatcgatagccggagaggagcatatggtcggttaaatgcgtgaaatcgagaggattcggaagacgtcgatcgtttgacgggatggaatgtgatctgcaaaataggatgctttcgggctccctgccgagtccatcagttggggctgcttgccgcaacggcaacggcagcttgtcccggcagggtctcgtgtaggagaccctggctgtccccgcctcttccgacacgtacagtgactgtgtcgggacaaacttcacattggtggtcaataatcaggttgctttcactactgatccaagggcagggaggtcttcgcagtattgcacagatgttgctaaagcattggatgctccaattttccatgtgaatggtgatgacttggaggcagtggttcatgtctgtgagcttgctgcggagtggcggcaaacatttcattctgatgttgtggtggatattgtatgctaccgccggtttgggcataacgagattgatgagccttccttcacccagcctaaaatgtacaagataattaggaaccaccagagtgctcttgagatataccaaaacagacttttagaatctgggaagatatccaaggaagatattgataagatgcagaagaaggtcagcactatcttgaatgatgaattccaaaacagcaaagaatatattcccaataagagagactggctctcagcttactggactggattcaagtcaccagaacagatttcacgaatccgaaatactggtgtcaagccagagattctaaaacgtgttggagaagccatgactactctgcctgaaaatttcaagccccacagggctgtcaaaaagatttttgagctgcgtcgtcagatgattgagacgggcgaaggcattgattgggctgttggtgaagcacttgcttttgcaactcttataattgagggaaaccatgttaggttaagtggtcaggatgttgagaggggtacattcagccaccgccatgctgttatccatgaccaggaaactggagagcaatactgtccgcttgataatcttgttatgaatcaagatgaggaactatttactgtaagcaacagttccctgtcagagtttgctgttttgggctttgaattgggctattccatggagaatccaaactcactggttttatgggaagcccagtttggtgatttttccaatggagctcaagtgatatttgatcagtttctgagtagtggagaggcaaaatggctccgccagaccggtcttgtcgtttgccttcctcacggatatgatggtcaggggcctgaacattccagtgcaaggttggagcgtttccttcagatgagtgatgacaacccttatgttattcctgagatggatccaactctgaggaagcaaatccagcagtgcaactggcaagttgtgaatgtcacaactcctgcaaactatttccatgtcctgcgtcgccagattcaccgggacttcagaaagcctttgattgttatgtctccaaagaatctccttcgacacaaggactgcaaatcgaatctttctgaatttgatgaccttgctggtcaccctggatttgacaagcaaggaacccggtttaagcgtctaattaaagatcagaacaaccataaggaccttgaggagggaatcaagcgtttagttctctgttctggaaaggtatattatgagttggacgaagaaagaagaaaaaaggagcgtgatgatgttgctatatgtagagttgaacagctctgtccattcccatatgacctcatccagcgcgagttgaagcgatatccaaatgccgagattgtttggtgccaagaggaacccatgaacatgggggcgtacagctacatcaatcctcgcctcctgaccgcgatgagggcgcttggtcggggcacgatagacgacatcaaatacgttggaagggccccatctgcagccaccgcaacaggtttctactccgtccatgtgcaggagcaaaccgagcttgtgcagaaggcactgcagcgagaccctatcaactctccattttgaacctgtagattttatttggatagccgtgggtaatcaaacctttgatccaacagcaaaattattgcctgtgcagccatttggtgaataatccgcttcggatgtttggtaccgcatgagagaaaccatttgaaacccatgttgggatgcatcattttgtgtttcttaacatcaaattaaaccaagttgcatccaatgcttacttgaggagtagaaataagtcgatgctgaatactgaacttccatgtttttgtgaaatcctcacggatatgatggtcaggggcctgaacaatccagtgcaaggttggagcgtttccttcagatgagtgatgacaacccttatgttattcctgagatggatccaactctgaggaagcaaatccagcagtgcaactggcaagttgtgaatgtcacaactcctgcaaactatttccatgtcctgcgtcgccagattcaccgggacttcagaaagcctttgattgttatgtctccaaagaatctccttcgacacaaggactgcaaatcgaatctttctgaatttgatgaccttgctggtcaccctggatttgacaagcaaggaacccggtttaagcgtctaattaaagatcagaacaaccataaggaccttgaggagggaatcaagcgtttagttctctgttctggaaaggtatattatgagttggacgaagaaagaagaaaaaaggagcgtgatgatgttgctatatgtagagttgaacagctctgtccattcccatatgacctcatccagcgcgagttgaagcgatatccaaatgccgagattgtttggtgccaagaggaacccatgaacatgggggcgtacagctacatcaatcctcgcctcctgaccgcgatgagggcgcttggtcggggcacgatagacgacatcaaatacgttggaagggccccatctgcagccaccgcaacaggtttctactccgtccatgtgcaggagcaaaccgagcttgtgcagaaggcactgcagcgagaccctatcaactctccattttgattactgcgcctttcaccatccaagaagtaccaattcttcttaaaaaacaa

SEQ ID NO: 20241 - DNA, 2214 bp, Oryza sativa
  Clone ID: PAT_MRT4530_25626C.1
atggagggaggccggcagagagcggagagccggcgggcaagcgcggatgtgggcggcgggctactctccgaccaccgcgcgcccttgttctccctcctccgccgctgggacgacgagcttcggaccaagatcaagaaccacctcctcgcgctcggatggaccatcacctccaagcccaacctccctggcctcgcgcccaggctccactacgtctcccccgccagaagcaagtcctactactccctccgccgcctcatccagaccatccacctccaccaccaccatgctgctacccaatcctaatctcaatctcaatctgagtcttgggcccctcttcttgaggaatcggatgacgaccaataccaacaagaagcagatgaagatgccatcgcggggtacattgccttcatggaggagcagaatgccaggcgcggccgcgggcagggaaatgatgaggagcagaggtccatggccaaggagcttcggatcaaggctaaggaccagctcaggtcgttgtggtggacattctcgatgaaggtcaagtacaacggtcgcgaggaactgtgctacacagagccgcgtggccgctcccacatctccctcatcaccgcctgcaaagcctaccttcttcaccacacgccctcgacaacaatggcttcatgcagcaacaacaacaacaagagaccagcgccacccgctgcctgcaagactgccacttctagcaagaagaacaagaagaagaaggcgagcctgcagcaggcgcgcgttctgcgtccacagccaagaaacgaggaggggaatgcgctgacgacggcgcgcgcgaggacgctgctgtcattgctgatcgacaagaagatcctggcgccgagggaccagctcatctacaccacgaagcgagggctcatcaccggagacggcatggtgaaatgcatgtgcggcggctgcatcaacaacaacaacaagaggagggtagcagagtacacggtggccgagttcgcggtgcacggcgacggcgatgtcgcctcttcctcgtcacggcagccttgggcgcgcatgtttgtgggtgacggcaggtcactgtcgcagtgcctggtgcagctgatgatggcggacgacgaggcgggctccggcaggaagaagaagaagaagaagtatttgccgtatgtgtggcgtggtgcaagggtgaagcggaaatgggaggaggacgacgactacgtgtgctccgtgtgccacgactgcggcgagctgctcatgtgcgaccgctgtccgtccatgttccaccatgcctgcgtgggtttggagtccactccgcagggcgactggttctgcccggcctgcacctgcgccatctgcggctccagcgacttggacgatccaccagctaccaccaccacccaaggattcagcagcgacaggatggtcatctcctgcgagcagtgccgacgagagtatcatgttgggtgcatgcgagagagagacaatgggttgtggtatccagaggcggatggagaggggccatggttgtgcagtgaggcctgctcaaagatatacctgcgcctcgaggagctcgctgtcgtccaagccccttgtcgttcagttgcttcgggcttgtcattggtggtgttgagacgcggtgcagcgagagacggagaggaggaggagcacgccaagctgtgcatggccttggatgtgctccgcgagtgtttcgtcaccctcatcgagcctcgcacgcagaccgacctcactgccgacatcgtcttcaacacagaatcggagctgagacggctagatttccgggggttttacgtggtaggactggagaaagccggcgagcttatagccgtggctacactgagagtgtatggagaggaagttgcagaagtgccgctggtagggactagattcgcgcgtcgtcggcaagggatgtgccgccttctcatggatgagatacaaaagttgcttggtgagatgggggtggagaggcttgtgctgccggcggtgccggagatggtggcgacatggacgggaccatcatttgggttcagagagatggggcaggctgacaggcaggatgtagcacaccatgccatcctccgcttccagggaaccatcatgtgccacaagcagctacctcctcaacctcaacctcaacctcaacttgggcacacaacgacgaccccagcaggaagaattccaagtccaataccattgtaa

SEQ ID NO: 20242 - DNA, 311 bp, Oryza sativa
  Clone ID: PAT_MRT4530_25627C.1
cggtgatcacctctcctcaaattattaatccttcctgcacatggcattccaatctcctccgccattgctgagctgctgatggtgacgcgcggcgcagacggtgccggggtacgacgtggccggcgtggtggtgaaggccgggaggaaggtgaaggggctgaaggaaggggacgaggtgtacggaacatcacagaagggctggaggcccagcagcggtgtggcggacaccgcggaggaactgtgcctaacccaacctggttccagcgcgctgcgtgataacgcacagctacggcgtttcgcgagcattatct

SEQ ID NO: 20243 - DNA, 306 bp, Oryza sativa
  Clone ID: PAT_MRT4530_25628C.1
atggagctgttgccggagtggtcgaacatggagttggagccggtgagcgtgggctactacgatggccgggatggaactctcgccggagtggataaacgtggagcgaggatgacgaagccgtcggcgacaagctccggcgtggcatggacaatggaggacctgctcacgatagccaccggcgacgagctttgttgtggcgcgtggacagtggaggacctgctcaatgtgaaagacgtggccgctagcgacgagcttcgacatgaggcatggacgttggaggacgcgtccaccgacgaagacctctag

SEQ ID NO: 20244 - DNA, 478 bp, Oryza sativa
  Clone ID: PAT_MRT4530_25629C.1
gatgatcaatcaactctgctgtctagctaggcggagagatgagattatactactttgtatcgatagacataaacaaaagaaaactacaaatcatatctttgacatgatctggcttgtctatgaggatcataggtaccactcgttgtcaagtgtcatgtaatttaagctaatttatgtctagctagtatacatacactgatcccactgtcgtttgcaaactgaccatggcatgctcaattttgcgggcagcggagaaaatcaacctcaaaatcacatgtgcagacatcagctcgtggtactacctcagatcaggttatttctgatgggtgcaaaccctcacctttaatgagtttagccctagtcagagatctctggtcactgatgattccactcatctttgacggtgacagcctatcagaggtgatagtcacatgtgacgggccagtattttccggccatcagaggtgagggtctccgc

SEQ ID NO: 20245 - DNA, 339 bp, Oryza sativa
  Clone ID: PAT_MRT4530_2562C.1
atgaccttgaatctctggtttgtctatggggcttacaaccagaatactgagcatattgcgtgccttcctatggtttgggacaaccaaccaatggcagccatctgcaggcgctgctcgtggtcacggacagaagccgagaacaagcagctgatcgacaagctgctgcactggagaagcaacctcatggctcaatgggttgaatgtgttcatggaatggccgacgtggtggacgacatcatttatttgtctgtcaaagcccacgatggttgttttggactgggaagtgtcagcgtacgcgagctgaagcaacttaccaattacttcctccgcttcacaata

SEQ ID NO: 20246 - DNA, 270 bp, Oryza sativa
  Clone ID: PAT_MRT4530_25630C.1
atggcggagcgggatgtcgggatcgacaacgactacggtctggtggccttcttggcctgcctagctgtcacgacaatcggcgtcggcgtcctcatggtgaagtactaccgctcccaccatggagcccttgccgtcttcctcctcgccctcgccatcttcctcttcctcatggcatccggctgcggcacaaaagccatgctgtataccctccacggcaaccctcctgctcctgatgaacaacgacttctcgtagatgatccattggactga

SEQ ID NO: 20247 - DNA, 586 bp, Oryza sativa
  unsure (1)..(586): unsure at all n locations
  Clone ID: PAT_MRT4530_25631C.1
gacccacgcgnnncggnaaattttaacaaacnagcnagancggacaagcgccaggngncctncntccggcnctctgtggcagtggnggaattgttggtcgtaggatcgtgcgccactgaggtcaccttgaaggtcggtgagggatctagcggaaaaagtatagaggtngtaaccaacgtcgtcatatatgaggtggagatgaaggagaagggcgttttgattgggtggnactcaaggagtgatggattaacatctggtcgntcaagagtgaggccccgctcaagggccccttgtacgttaggttgcttgtgaagaacggcggataccgtgtggtcgacgatgtgatgtntgaaagatttacgggcggntntgaatacaagagtggtatgaacgggtaattaatagacatgagtattcttggattgggttgnatgataattattaacctgtaaataattgtgtgttgaaagagataatgctatgcgtgagcaaggagacaattaatgagttgaggatatagtgtggaaataagggaagggggaaataggggatagatgaggggttagaaagcattgggggggaggtg

SEQ ID NO: 20248 - DNA, 282 bp, Oryza sativa
  Clone ID: PAT_MRT4530_25632C.1
atggcaccgggagaaggtgacaataaggtgttgcgcgtcttcgtcaacgtccggtaccgtgggttcttcttgctgtgcagccgaacgtccagaaccctcgagatgacacatcagggtcactttgtggttgacggctatgaaatagttctgattagtaatggcaaacctgaaggagttcttgctactaaaaagcataaagaatttgaggagtttcatgacttcagaatggctgacaaccgttatgtagttgaacaagctcatgaaatacagaccattgcttaa

SEQ ID NO: 20249 - DNA, 1232 bp, Oryza sativa
  Clone ID: PAT_MRT4530_25633C.1
atcaccaacaccaatttgaattttttaaggagttttgatgtgtggttgtacgtactggatgatatatatatatatatagcgttgatttaggatctgcttacccttgtggcctgacatcgtgtttcccattgttggatcgtgaaatttcttatgcacgtgacaaatttatacaggtgcattgcccatgtacacaggaaaacacgacaaaagacctaaaattccagtgcgtcgttgaacccggcgtcgtaggcggcgtcagcctccatgtcgccgaccatttccccgagcatcatcccgccgaccgcgccgccgaggagcccgagtccgaggcccatgcccattcgtccacctttcctcgccgccggctgttgtgccgccgcgtagctgtacgtcgccggcggcggtgggccggcgttgtacgcgtacggcggctgacccgcgtaaccgtactgctgctgatgcggtgggtaccctcctccgtacggcgcgccgtacggcacgaccggcgggtgcgctaccacggcgttcgacggcggcgggtaggcggtgaccggcgacgacacgctcttctccgtcgccttctcatcagagtcctgcgcgtacatgggcacgtactgcccttgtttggtggcgctgctcgtcgcggtcgcggtcgcggcctcgatggcttcgagggcgggatgcttgacgtcggtgaacctgtagcagaagtagagcgtgccgtgcgcgcgggcggacatggggcggcgcacctggtagctagccggcctcggctcgccgccgtcgtgcgcgccggcgaggaggtcgtcgaggggcacgaacacgtccccgacgtcgcggtggccgccgaaggagcgccgggcgcggagctggacgtggagggcgaggccgcgggtgtcgaagcgggcggggacggggaagtggagcacggtgttccacgcggggttgctgccgccgttgcggtcggcgtgggtgccgtgcatgggcatggggacgttgctcccggagatggaggcgacggcgtagacatgcatgcgcgagaagagagtgaccttcttgaggtcgctcgcggagaccagcgtgagctccagcaaccggtacgccatcgccggccggcacaggatcaggaggaggatcgtcggagtggaggtggtggaggaggaagggagagaattttgcgtagcctgtggtggcaacgtgcgtgcacacgtgtggttggagaggagcgccat

SEQ ID NO: 20250 - DNA, 256 bp, Oryza sativa
  unsure (1)..(256): unsure at all n locations
  Clone ID: PAT_MRT4530_25634C.1
ccgncatcgaaaccgtanaactaggtantgtnactgtctgctgctgaactnacggtggatatnggaacggtcgccgcctcctcggccggtcgccgccgtcgtacggacnccncgtcgttgttcatcancatgagtacatctttcactgtnnncgttggttggggttgattancttccatttttctcttttttttgnggttgtttggtcagattgaattcaaaggctctgtggattctttnaaaaaaaaaaaaaaaa

SEQ ID NO: 20251 - DNA, 535 bp, Oryza sativa
  Clone ID: PAT_MRT4530_25635C.1
gtttctgcataatagctcactaatcgaggccatggacagtagactccaagctgattttaatatcgatgaggtttgtcttgtctaaagctaggtcttctatgctcacacccatttactaatgcaagacctagcatgcagcaagtcatggagtaccttgaaggtgatacaccataccacgagatttcatcaaggcacttttagctttactatgcaggctttgatgcagagcaaaggatttgaatcaccagacatgttatgcccacagtttacgagtattggcacattctctgaactgtcagggggaagatgatatactagaagctatgcagaactaagaacatcagaaaatcatattaggatatacatgtacatttttctcaaccagaaatctgtaaaccggagaacagtttgtagtgacataaaaatagcaacaaatgctatgtaaaatgttttcacgtttctttttctagaacttcttatgaaaaaacgaagtgtatttactgtttttttttgtcaaaaaaaaaaaaaaaaaaaa

SEQ ID NO: 20252 - DNA, 2124 bp, Oryza sativa
  Clone ID: PAT_MRT4530_25636C.1
gttctccgccatatacaactctctctctctctctccaaccactgcgtcgtctcgcatcggtcggtgtcgcgaccacccggtcgccgccggtggaggtttcgggtcggccacctgactaagccgcggccacgcaggtcgccggcgccggtgcgcgcggcagggatggcgccgacggtggggatcaagcggtcggcggcggcggtggcgacgcagaccatcagcgtgccgccgcccgacgcgcggttcgcggtgcgggaggccgtgcgggccaccatcgcgtcgccgccggtcgaggcgccccccgccgccgccgggaaggcggcggcgccggcgcccgcggtggaggggttcctgtgcctggaggaggtggacgggaggcggtggagctacgtggtggatgggggacaggggaaagggaaggggagggggagggggagggggggcgcggccgttcccatgggggcctccgttagggccgtgccgctgcagtcgccgctgccgcccgccgaggaagttatggcattcataagatcatatgttgtgcctgaaggctttccggatagtgttactccgtcatacgtcccatacatgacctggagagccctgaagcatttctttggtggagctatgggtgtttttacaacaagaaccttgctgagctctgttggagtctctcaaagcaaagtaacaccaggagccattgctatcaactggatcctcaaggatggtgcaggtcgtgtcggaaaaatgctttttgcacgtcaaggaaagaagtttgactatgacctaaagcagctccgcttttctagtgatctattgctggagattggagctggaattgagttagcaactgcagcctttcctcaatttttcttgcccatggcttgcgtagcaaatgttgtaaagaatgtcgcggctgttacatcaacatcaactcgaactccaatttataaggcctatgcaagaggagaaaacattggagatgtcactgctaaaggcgaatctgttgggaacattgcagatctggtgagatcggtcgtgctaaatactttaaacagagcaaggtttactgttgcggtggattccttcattaaaactgggcatatcccctcattgaaggaagggaactcacaggagacgatatttaatccaccttggcggcatgagccagttgcaataggatcacgatttggagaagcgtttcaagaacctgcttcatttgttgccatacggccattgtttgaggatgagagatacatggtaacatataaccccgcaaaggataaggtatatgctttgctcaaggatcaagcaaagtcagatgacattatcaaagcggctttccatgctcatgtattactgcatttcatcaatgcgtcacatgcacggaagcagatgaactccaggagatcagatccttatggaaacccatgtaacatggatttcatggcacacatagctgagtcctgcaaaacgggatgctcggttgtttgtagtagctgaactgacaaatgttgggcccgagcaccaagtatgaaccagtcatcctgtcatgccatgaaaacccgttttggttggcaccaaagcttaccaaaaccatgagagagcaatgcacctggcaatctcatcagcaggtggaataccacaagtgcagaataaaattatgcaccagagcaggtacgcagattaagaaatctggacaggacccaaagggcagcaaggggattccagatttccagccgttagcttgcacatatcagaggcacaaatgtttatgtttgctgctgtgttgttcgcttggcttagccgccctactgtaaccggttttatgcgttagggtgcagagtttgtcagtctttgaagctgtttatttatgcggatctggcggtctttgagatgtttccctttctttcgacctttcttagggcaactgtagattgaggttttccttcaatggagagttatgtccatatggaacggaacccatcctgtacaatgtacatagaggtgctcggtaataattgtgatgtgtttttttcccggatttaagaatgtaataaaagaacatcgcattgctgaaaaaaaaaaaaaaaaaaaaaaaaaaaaaaactcgagggggggccc

SEQ ID NO: 20253 - DNA, 978 bp, Oryza sativa
  Clone ID: PAT_MRT4530_25637C.1
ccggccgggtcaagaacctgcttcatttgttgccatacggccattgtttgaggatgagagatacatggtaacatataaccccgcaaaggataaggtatatgctttgctcaaggatcaagcaaagtcagatgacattatcaaagcggctttccatgctcacgtattactgcatttcatcaatgcgtcacatgcacggaagcagatgaactccaggagatcagatccttatggaaacccatgtaacatggatttcatggcacacatagctgagtcctgcaaaattgtttcttcctcttatggaactttcaagaagaaagctagagaacagggttggataatgtcagaatcactgctcaaccctgggaaagctcggttgtgtcctgcaaggccataatgattttactgttactgggatggcaacatctttcagactaacttctcagctagacgggatgctcggttgtttgtagtagctgaactgacaaatgttgggcccgagcaccaagtatgaaccagtcatcctgtcatgccatgaaaacccgttttggttggcaccaaagcttaccaaaaccatgagagagcaatgcacctggcaatctcatcagcaggtggaataccacaagtgcagaataaaattatgcaccagagcaggtacgcagattaagaaatctggacaggacccaaagggcagcaaggggattccagatttccagccgttagcttgcacatatcagaggcacaaatgtttatgtttgctgctgtgttgttcgcttggcttagccgccctactgtaaccggttttatgcgttagggtgcagagtttgtcagtctttgaagctgtttatttatgcggatctggcggtctttgagatgtttccctttctttcgacctttcttagggcaactgtagattggaggttttccttcattggagagttatgtccatatggaacggaacccatcctgtacatgggacat

SEQ ID NO: 20254 - DNA, 297 bp, Oryza sativa
  Clone ID: PAT_MRT4530_25638C.1
tgctacccttccttcctgctgcaagatgcagacaaatgaagatgatgacgatcacgatgatcaattagtaataatctaatcggctccattagttttatcttatcttaataatagggtatgtcctcctaatccatccagctaggatggtcttatccactccatccgatgctctgctctgtattatccattccatccggcccctgcttttccgatgccttgattattgttcctccgtataaaaatgcactaaaaatgagtatatgctgaacctgtttattattatctgccaaaaaaaaa

SEQ ID NO: 20255 - DNA, 555 bp, Oryza sativa
  Clone ID: PAT_MRT4530_25639C.1
atgggagctatgtttataggggtggacaaaaagctcgggctcatgagcttggctcgggtttggctcgagctcgcgaagctcggcttggctcgaagactaaacgagccgagcccaagctgcctcctgagctcgtttgtaaatcgagccgagcccaagctagcttgcaagctgctcggcactgaggcacagaaacccttcccttcccagttcccacacgtccacgccgccatcatgagtcagcgatggtcgagggcgaggggcatctggactgggcgacagggcgtgaggaatcgagggcttgagggcctcaccggcgccgccggccgccggccgccacctccctcccctgcactgtcggccgccatctccctaccctgcgccaccggccaccgccgccgaaggccgccacctccctcccctgcgccgccggccgtcgcctccctaccctgcgccaccggccaccgccgccgaaggccgccacctccctctcctacgccgccggccgccgccttccttcactgcgccgtcggccgccgcctccctccctattcctag

SEQ ID NO: 20256 - DNA, 906 bp, Oryza sativa
  Clone ID: PAT_MRT4530_2563C.1
tgtcactgcagcggtagcggcagcggtagtgccctaggtggccatgagctcgttgtgcaacaagtgaaggaggttgggttgacgctatgttaccccatgctcgaggagaacaactacggcgtttgggcagtgaaaatgaaaattttcatgcgcgcacaaggcgtgtgggctgctgtggagggcaacacggccgatgagaagatggaccaaatggctctcaccgccattgtacaagctatgccggaggccgtggtgatgaccatatttgagaaggagacggcgaaggcagcgtgagacgccctcaagttgatgaacatgggtgaagagagtatcaagaaggcctgagtacaaacccttaagagcgagcttgatggtatgaaaatgggtaattctgagaaaattaatgattttgctttaaaggttaccacgatcatgaacgagattcactctcttggcgtgaaagtggaggagaccaccgtcgtggagaagctcctacattctgttcccgagaagtcctaatccctcataagcaccattgagcaatggggggatgtgtcagagatgatggtgacaaagacaattgggcacctgcgggcattcgaggactcttcacaggggctgcgtcgtgacaaagagggggagcagcagctgttcgccgcatatgccgagccacgactgatgcgtgctgagtgggaggccaaggttgctaaagagaggaggagtggaggtggttccggcagcagcagtggtggtgacaagaggaagtaccacggcaaattcgacaaggcaaaagttcattgctacaattgtcaagagtatgggcatttcgctgatgagtgtcctaagccgaagaaggacatggcttttcttgccacagttgacgcggatgatgagccaacattggtg

SEQ ID NO: 20257 - DNA, 385 bp, Oryza sativa
  Clone ID: PAT_MRT4530_25640C.1
atagttctaaatcattggacaagggaaatataagcgacaatgtagccgaatgggtagatagtaaatctgaaccatttgtttgcttagctttaaaaccgtctccacaaaagtgtcggttaaaggaaaagaagtatacttttgattggagtatgtgtgatcatatttttgatgatttgctaaagaatgattatattaaattgccggatcatcatgtcatgccatcgcttcaagatttagaagaacaaatttattgtaagtggcataattcatttgatcattgcactagtgattgtaatatttttcgtcagaaaatacaatcagctattaatgaaggtcgattgcattcgattcctggttcttctctcatctgtttccaaaatacgga

SEQ ID NO: 20258 - DNA, 409 bp, Oryza sativa
  Clone ID: PAT_MRT4530_25641C.1
attgatgaggatacaactagctcggatataaccatgactaccttatgtattaatcaacaaaggcatcaacttcaaacggacccagtcacaaatctagaaggaatttcggggcccatgagtacttgttggaaagcttatggagtctaccttcagatggttttggttccacgtcaaactttctaccgagctactaggaatcagcaaaacaaaccgcggattagctttctcggcgaggtcaaccgggtttcggcgctattgataaccagaggatacgtggtgctgcgattgcgtggctcagtagcgtgttcgtttagaagccggatcgagttgtgtcatgactccgtccaaatcgactgtttatcaatacctatcagaagatcgggacctaacatcccttatcagtgatctc

SEQ ID NO: 20259 - DNA, 202 bp, Oryza sativa
  Clone ID: PAT_MRT4530_25642C.1
gtggatccccgggctgaggaatcggcacgaggggaagatatcacagatgcaacattcaccattaacgacaatattcgccattacaagcagtctatagattcatccattattcacaaagtaacaaaacggtttgacaaatgatgacaaagtatgactggagtttctggacacaacacagaccagaaaatgatgaacgtgatct

SEQ ID NO: 20260 - DNA, 430 bp, Oryza sativa
  unsure (1)..(430): unsure at all n locations
  Clone ID: PAT_MRT4530_25643C.1
acgacgtnnacgtaaacttggaatcctctagaagcggccgccctttttttttttttttttttttttttttttttttttttttttttttttttttttttttttttaaaaccaacaggaatactaatattccattttgaaaaatggacgtaaaaaaattagcagccgccaattaaaaaccaaaaacaatcacataaataaaacagggcataataaaatattaatcacctgtagccaaaaataaccccatttatcaccggtcatgcatagagaattaggcctaaaattaggggaacaaacatattggcgggaaagcaaaaacagaaaaattattgatttggatattttttgcacaaatgcaaaaaaaaaatattatacccttgtttaaaaaataagaaaaaaaaggggttgttcaaaagaaggctttccccca

SEQ ID NO: 20261 - DNA, 209 bp, Oryza sativa
  unsure (1)..(209): unsure at all n locations
  Clone ID: PAT_MRT4530_25644C.1
tcccggcgtcgaacccacgacgaaccgctgntggtcgtggatctaatctaactcgctcatcagaatcatctcttcatcgttaatcctcttccttctcactcaccatgtatcgtttcgcttctaacctcgcctccaaggcaaggattgctcagaacgctcgccaggtttccagcggaatgagctggagcaggaactatgcggcgaaagag

SEQ ID NO: 20262 - DNA, 147 bp, Oryza sativa
  Clone ID: PAT_MRT4530_25645C.1
ccacgcgtacgaccacgcgtccgaacgctcctcctcaccagcggcgccgagatgtccatgttactcttgaccctggccacgtgcctgctcatgacggaccggagggcgtaggtcgatgcgaaggcgctaggcgccctacgcactgcc

SEQ ID NO: 20263 - DNA, 231 bp, Oryza sativa
  unsure (1)..(231): unsure at all n locations
  Clone ID: PAT_MRT4530_25646C.1
ccacttccaagagcattccgtttcattcatgtaaatgaaggagcttttgctcaagactcgtccactaactcccacgaatatcacatacagacatacacangccttcgtattcatgggttcaacaggaaggcaacctcaacttgcacttgttatttacccctttattcnaatacgacacaatncnnatcaatttctttgattnccttcctaatacaaacatatagttacagg

SEQ ID NO: 20264 - DNA, 768 bp, Oryza sativa
  Clone ID: PAT_MRT4530_25647C.1
atggccagattggaactcagcagactcgctgatgactgtcatgatgaagctgggatggtcttcgccagaggaaatggcacagcttgccgtgtctctcggggctacttgtattcttgctccctggatgggctgctcgccggaaaacccaacatgatcgctggggcaggaggccacaaggatgaggacgggaggaaagtcaagcttccagctaatgtagccgtgggcaagagcgttttccggcgaagacgagcagccggagagatgaggaatgatgtgaagcgccagcgggagcttcctctgcgccatccttgccgtgaacccggtccatcgcatcaggtgtttcttggtcaagttcttggcttcttgaattcaccggccggggaatcgtcacaaggttcgccggcgggagacgagcagcaacaatacctcaacgccggtggcgcccgcctcaccctcgtgccctttcttggttccggaggtgggatcctggccctgggaggcgacgaggcggaggttgacgggaagatgcaggcgggggcaagaactcaacgccggtggcgcgatgggctggaacggaggtgcctgcttcaccgtcgtgttctttctcgattgccgaggtggggatcctccgatcctgggaggtgttggaacttggagttggaggctccgatcgagatgggaatccgccgcatggcttcccgcgaccaccagcacagcctcaaggaaacgacggcgaagcgtggccgccgacgaggatcagctagctag

SEQ ID NO: 20265 - DNA, 987 bp, Oryza sativa
  Clone ID: PAT_MRT4530_25648C.1
atggaccgggttcacggcaaggatggcgcagaggaagctcccgctggcgcttcacatcattcctcctgctactgctccttctcctcctcgtctccgacttctagcgacgatcgtccaggcgtgagagccatcccctgctccagccatcatgacgagagagaaattgcagaagcagactgctgcgctggggccggcgccggtgtacatctctccggctgctcgtcttcgccggaaaacgctcttgcccacggctacattagctggaagcttgactttcctcccgtcctcatccttgtggcctcctgccccagcgatcatgttgggttttccggcgagcagcccatccagggagcaagaatacaagtagccccgagagacacggcaagctgtgccatttcctctggcgaagaccatcccagcttcatcatgacagtcatcagcgagtctgctgagttccaatctggccatcccagacgagaggtaaaagcaaaacaaggaacgccacagctcaagcttggttttaatgattgtgatgaaaatttagctgccccaaacttattacacttgctcatggacaacatcctaagggatgtattggaattctccatcagttgggtcacactacgacggtatcaaccaaaacttccgagtgaatggagttggtggatggcaatgggttcactgttcattcagatagatggaatatgctctatagctgccagtgttatgtgtgtggaagcacaacataggctagcctttgagatcctacatggaattggtaggttccccttaaaagcaaagagactcaagggtgtaaagaagaaatgcataaacaaaaaaggtgtggagccctgcagacggagcatttgtagaggatgtgctgaaggtggtggcgaagggaaggggagtggagacaatacagggtatcttcttaccaataaatggatatcatatgtacaaaaatgtccagaaagacgtcagtcatga

SEQ ID NO: 20266 - DNA, 1228 bp, Oryza sativa
  Clone ID: PAT_MRT4530_25649C.1
gctgcaggagtgcacgagcggagcagccgcctcccttccaagaacacacaacgcaagaggagcagagcagttcagatcagagcagggaaggagcaagcacaatggggagggctccgtgctgcgagaagatggggctcaagaagggtccatggacgccggaggaggacaaggtcctcgtcgcccacatccagcgccacggccacggcaactggcgcgccctgcccaagcaagccgggctgctgcgttgcggcaagagctgccggctccggtggatcaactacctgcggccggacatcaagcggggcaacttctccaaggaggaggaggacaccatcatccatctccacgagctgcttggcaacaggtggtccgcaattgccgccaggttgcccgggaggacggacaacgagatcaagaacgtgtggcacacccacctcaagaagcgcctcgatgcgccggctcagggcggtcatgtcgcggcgagcggcggcaagaagcacaagaagccgaagagcgcgaagaagccagccgccgccgccgccgcgccgccggcgtcgcccgagcggtccgcctcgtcgtcggtgacggagtcctcgatggcctcgtcggtggcggaggagcacggcaacgccgggatcagctcggcgtccgcgtccgtgtgcgccaaggaggagagctccttcacctcggcttccgaggagttccagatcgacgacagcttctggtcggagacgctgtcgatgccgctggacgggtacgacgtgtccatggagcccggcgacgcgttcgtcgcgccgccatccgccgacgacatggactactggctcggagtgttcatggagtccggcgaagcgcaagacttgccgcagatctagagaaagagagagaattttaccgtttcttcggttaattgatttgttttttctctctctgccgccatcttgcaccggagggacatagctaacagacaagagtgtccatgagcgaatcatcaagcaggaagaacgcgaatcatgcgatgcgatgcgatgagatgcacccagtagctttgatagttaattttctttttttacctccttcctgtatgtatagaaacagaagagatcagtgatcgaaacctgagatcctttctcacaatgtgcaaactggatcatcagaaaacgggctctgcgtttctcatttgattaattaaattcaacttgcacgctaaaaaaaaaaaaaaaaaaaa

SEQ ID NO: 20267 - DNA, 795 bp, Oryza sativa
  Clone ID: PAT_MRT4530_2564C.1
atgcagcccaatgggcacttcgatatcagctttgataccaaattgcttttattttgcgaagttacaaacctagccaaacattttgatgagtatgcactgttgatgggagatgatgtacggtatcacactacacggatcacaccagatatttccgcaacattgcttgagaaatatattaggtcctatgtcttgcttgagttggacaaattgcttaaacatgctgggtatacattggctcactttcacttgccaccaccagatcatcattctactcccaattttgacaataggttagtatatgatgctatagagcattcagttctcaacaattatggtcgtatcttctttatctatggttatggtggaaccggtaaaacattcctatggaattctttgttgaatggcattagaagtcaaggcaagatagccttagcagttgcatcttctggaatagctactcttttgctaccaggaggccgcacaccacattcacgctttaggatccctatagatactcaagagcattttatgtgtgcaattaaaaagagtacaaacttggctgaactaattcaacaagcagctcttattatatgggatgaagcgccagtgaatcacaaacattgcttcgaagcacttgatcatacgcttcgagatatcatgtcatcaaatgaccaagttttggcaaacaacaagtttggtggtataacaattgtattaggtggagatttcaggcaaactcttccggtcattccaaatgcaaagaaacaacagatcctagctgcttccatcatctga

SEQ ID NO: 20268 - DNA, 1346 bp, Oryza sativa
  Clone ID: PAT_MRT4530_25650C.1
ctatttttgctggttcaccgggaggtagactccttcagctgcaagccagacattgacaggacgtttgttgccaataccttatacctttagatctaacccgagagataatccttctttgtacaccgggagaccgggaataagtggcaatcttcagctaaaccattcttacacaacaaaagttgctctaatagctcaaaatgaactgaactggtattctaatggttacaacgttttaatacttttgaatcgtacaagcaccatactaatgggttcatcatgtcacctctcatccctgctgccctgcaatacagctatttttgctggttcaccgggaggtagactccttcagctgcaagccagacattgtcaggacgtttgtcgccaacaccacatacctcttgctgtccaccagcaatggcgggtgtacttcctatcatggctatgcagataaccaccagtatcaacatggcgcaaccggattttctggttttgccgccaagacttcccactgccctcaatctcgagcctccagtagtctccagtgtctgattcattttcaccgccaaagcaactaacctctaaatttcccgtaatgggagaagcatgcatgtggcttgtgtgagccactttcgagtcctcatatgttccggagccttaccaactcgcccatgctgttatgggatgaccgccacggcgaggctggccgcctcccccggctgctgccgctccccggggccggccaaggcaacgcctgacaagaagaggggtggcgcctgtgacgtgggtggtggagcttcacgggacgatgatggcgatatggtgccttctacaactttggtgatgaggaagagtagtgggaggtcggggaagacgacgaaggttatcgagacatcgatgtcggttaagaacacggcagagggaatgaggaggacgtcaaggccgtgcagccgtgcgagcagcaggaggagctccagcgatgggcccaaggcaacacaccctaagtagtgacatcccggagcgtctagatgaaatggcctatgttgggacatgagcaagtcgactcggatgatggtggctgcaacaacacccccacaagcatggggagcatagtgtaggaacgtgcgacagtaggtgaaacaaagcagtatgggctttgtcatctcatcctgatttcccggttttctgcttttccagtccatcggctggtccgcaccaccagccaccaccattgcctcaccttctctctcccgccacctcgattgcgacagagacaatggcgtcaccgcccactcgagcttgatgccacagcctcctgactggctctttcgtggactgccacccgccat

SEQ ID NO: 20269 - DNA, 366 bp, Oryza sativa
  Clone ID: PAT_MRT4530_25651C.1
gatcttttttttttataaagcttattttaattatatctttttgtattgtcttctgacaagctggtgaactccacccttgttatttatttcttcacattattattatcatcacattcactgaaaaagctgcttccaaacatgatagatctttctagcaaatatcgctgattaattatccactcacccggatagctaattcaatatttaactaagccgcggcctcattaattacttactaaggaagttaatgcatgccacccccaaacatggggcacccaaataaaccaaggtgctgcaagttgcaccggccgtagtccctaagcgcgctccccattccggcgatcgttggggactgacacccgggcc

SEQ ID NO: 20270 - DNA, 334 bp, Oryza sativa
  Clone ID: PAT_MRT4530_25652C.1
gtaccgtccgatcccggccgacccacgcgtcacccacgcgtcgccacgcgttcgccaccgttcgcagcgttccggactcttgcggaccgggggtacaccttattgctcaccaactcactaaattgatgccttgaacagcttgtttgaatatagattgattccatatgctggtcatgtcatataagatttttaggtgctccaactattctttataggtttatgttggtaaatgatgaatgcaaatttaaagactgtggcactgtttagagtatactatattatcttttaacttgaacaccattttgtaagttgtaacgttttatgctgccagaca

SEQ ID NO: 20271 - DNA, 165 bp, Oryza sativa
  Clone ID: PAT_MRT4530_25653C.1
cccacgcgtccgcccacgcgtcgcccacgcgtccggccacgcgtaggtccacacgtacgtctacgcgtagaaggccgatctgatggagtctataaaagcaaccctggcacgacatggcatagggtgcatctggggggacggttgagtgtgcccattgggaaccat

SEQ ID NO: 20272 - DNA, 2280 bp, Oryza sativa
  Clone ID: PAT_MRT4530_25654C.1
gcacgagggagagaactagtctcgagtttttttttttttttttttttttttttgggcttcaaaaccgcaagctgctcgggcgttggacctgtcgatggcttcggattttaggtggaaggagagccccgggcccgccgcccgcagcattccccttcgccgccccgcgccgcgccgcccgttgccgccggggaggtgctcgcccgcccccgtgccgcccccccaccccgctccggtcctgccgcctcctccgcccgctcccgccggtaacacagctgttgaggacagcgaagcaggtccttgcattcccagagtccaagcagcgactggagattatacaccatggttagggcaagagtttgcgtctgaacatgaagcatatgaattttatcggtattatgcatggaagttgggcttcagtgtccgaagagaatatgcaaacaaaagtaggaaaactggtgaaataacctcaagaaagtttgtttgttcaagggaaggattcaaagccccagataaacgaaccaaccatacgaggactccacagcctgatacaagaacaggatgccacgctaatttagtcatcaggcgcaaaaatgatacttcaaagtatgaggtatatgctttcgaggcacagcataatcatcccttgttcattccatcctgtgcaaatccactgcaaaaaaagttaagtgatgttcagtcttctgatgctgataactctgctagtgtaacacatgctagcgaatggtaattgattttggtcaatttggtgatgttgtttcctttgatattgtccccagaaacaacatgaatctccgaccttttgcttcttttgttggatttaacaattatggggagactgttttgcttggaatggcacttatgtatgatgatagccttgaatcattccagtggttgtttgagaccttcttgcatgcgatgtctggacaagcaccgcggactgtcttttcacgccaagacgcaattgtatcaaaggccatctcactggtgatgcctgacacatgccatgccatatgtacatggaacctgaagcagtctgcaaaaagtaacctcaatcaccttattagaggggattgtggtttcataaaggaattcaaggcatgcatcaatgattatgaggaggaggtggagttttttactgcttgggaagctatgatcagtaaatataaccttcacaacaacgtgtggttgcagaaggtatttgaagaaaaagagaagtgggctaggccatacacaaagtggatattttcagctgggatgaagaacacacaattaaatgaacgtctacattctgacgttcgggattatttgaaatctgatgtagatattatttcgttcttgaagcatcttaagaaattggtcaatgatagacggtacatagaattggaggttgaatttagttcgaggctcaagttgccagacttcaagattagagctcctattctgagacaagcttctgaggcctatactggtatgatatttcagcttttccaagaagaatacgaagagtttcagtcagcttacattgtgactcgtgatgaaagtggtcccagccgtgaatatattgttgccattcttgagaaagaaagacggtataaagttcatggaaacccttgtgagcagacagttacatgctcatgtaggaagtttgagacacttggtttcctgtgtagccatgctttgaaagttttagatacaatggacataaagtatatgcctgataggtacatcctgaagcgatggaccaaatatggaaggtgtttgactgcaccgcaggttgaaggtcgaaaggttcaggcagataccacattagaattttctagccgctatgaatacttgtgcccagtatatgttaggcttgttgctcgagcatcagaatgcgaggagtcgtacagagtattagatcaatgttcagtagaactgggtaagaaaattgaagaaatcctgcagaaacaaacaagcattgatgcgtcagctcctcagtctgatattgaggatgtaacaatatccttgtctgcgaatggtactgacaatgaatcagaaagagcactggattattcaagcagcacaagaccgaagcgacgaaaaaagaaaggtcgtaatgctaaaagccaacgaaaaagttgtattgagaaaggtttacaaaaaaccaagaaagtgcaaccagaacaatccccaatacaatataccatgttggatgctgctcaacctggaaatgttctatttcaggtaatttcagcattgttgttcattatatggtga

SEQ ID NO: 20273 - DNA, 412 bp, Oryza sativa
  Clone ID: PAT_MRT4530_25655C.1
ggtgacacttaattgcttttgcgagggagcgaaaaattaaccgcggagaacatcccccccacaaatttaagctgccttacataggtccatcccaaacactggagaatcgtaaaaaggaacatttttgcatggaccatgtttgcaaaactgggtttaaacaccataagcttcctgcatgtcaaatacacccgggccccgtacgatgggaaacttaccaccgtaggataacggaaagattaatggatcttttactgcccctggaaatcaatgtagaagccgggatgggatactcccaattttctttgtggcaaaagaatggcacccaaaaaaagggtttttactgggatgccggcatgtcccaaaaacctggggaaacctacttcccaaaatccatttgttcttggggctaaaa

SEQ ID NO: 20274 - DNA, 645 bp, Oryza sativa
  Clone ID: PAT_MRT4530_25656C.1
atggccgccacgcgggatgagaggccggcaccgacccaaaagtggaagccgaagaagaaggcgtgggcgagagtggaggcacgcgccagcgaggccgccactctgcccgtcgcctcttctctctcagttttctcctcgtctaggtggacaggccgaccggcgggttggggaggaagccaacgaggcgaggcaggagaggaagaggttcagtggccggtggccggcgaccggcgatgtggcagccgcaccggcctaccggaggaccgggcaagcggtggccggtgggcgaagcgggtgacggcgagggccggagcggccggccgacggtgggcaagcgcgctgcgggagaggaaggggctacggcggcaggggcgcgggaagtcaggccgcaccggcaagcggcggtcgacgtcgaccatctggagggcggagagaggagaagagcggggagaggggagagctgaggcggatggcgccgatgtggaacgggatggggagagtgaggccgccatcaccgtcgtcgtccatggcgtgggggaggccgccgccgacccgcctgcccaccggtcgccaaacctcctcctctcccgtttcaccctgtcggcttcctccccaacccgccggccgccctgcccacctagatga

SEQ ID NO: 20275 - DNA, 463 bp, Oryza sativa
  Clone ID: PAT_MRT4530_25657C.1
catgcaacaaacaggtggtcctatgatcctatctgaatttctgacaggtggagtccaagcatttgagaccagaggaaaggctgcagctgctttcaccatgataaagaaaagacagccacaaacaaccaaaccaagcaggaaagcaaagcagatatatctttgatgatgccacagcacaaagcttatgaaaaacgcatgtgcagattaggctatgaaaaaggtggaaacaaacaccttttttgtactgaaatattggggggaaaaagtagagggaaatcagaaaaataccaaccttgggtgcttggctccaagaatctctttctgcccatactttctccagctatggccatcatctaccggtggattctccacccctcccgtcgagctcaccctaatctgatgcctcttcttctccgtcgacgtcttcctgcaaaaatcaatcaaaaaaattcggacgcgtggg

SEQ ID NO: 20276 - DNA, 1137 bp, Oryza sativa
  Clone ID: PAT_MRT4530_25658C.1
atgggggagtattgcagcaacgccccatgcaagtggttgccagatttgggcaagggtggtgctcatggcaccaatgcccacaacatgttcgatggaatgcctagccaacctgagatgtccaaggaagatcagaggatatctgaccctattcccattaattccaccatgaacaaagaggaaaaatggctagacgatgctctagattggatattggagaagagcaaggctttcgaggaaatgattgtagctatcagggcaaccaccgctatcatcaaggctacctgggagctaggagacagaaaggacatggaccaagctccctacattgtcaccaaggacctccccaaggtcacgcccaccaagtgttcaacgctatgttctagctccgacatcaagcctgatcttatcgtggatgtgggagactctaaccaagttgtgctcgcgttccagaccatgatgggtatatctaaggttgttccatcatctgttcagccagtggagaatttctcatcaagaacagtcaccgacataaagctggatacaccaatgctcaacacgtggcgaaagaacaaggttagcttcaataacaaggttgaaatgagggggcctccagtggcactcaatggtgacgaagtattgaagcagtacgagagttttgagcaaatgaacattcttcatgcagatggaaaaacagatgaagatgtatattctctatctcgtggtccagatcatcgagttcatgtagctaacaggtgctccatcaatggatttctcttccgcacaaccaatgtagagaaaaacctaaccacacagaacagtggtgttgttgttcagggcgaaggcatggactggtacggagtgattaaaaaaatcatcgcccttgatttccccaacgacaaagaagtcttgttgtttgagtgcgactggtttgatgttccgggagcaaccacgaacaaatccagagggtacagtaaagatcaatatgggattattgatattgacaccactcggtttcgctttaaagacgagccttacatactggcgtcacaagctcaacaggttggacgagcgcaccacgccgcattcaatgcggcgcagcgcacgcttatccggtccgtgaccagtcgcggtgtgtga

SEQ ID NO: 20277 - DNA, 522 bp, Oryza sativa
  Clone ID: PAT_MRT4530_25659C.1
ttttttttttttttttttttatcattatctaaaaaaatataaattatttttttccttaatatgctgtacggcatattatcagagtatattcaaaagatgggggcctgatatcattcctagaacctcccaaaagcacattcagccatagtattttctcaccagtcaccacatcattacattacattacactacacactcgggtacattgtgtagcgtacaatgtttccttttcagttctctcgagtggtcagagaacaccatctaaacacccctaccctttttccctctttgggtgaaaagaatttaaatcaaatgaatttccactagagtccgtgtcatacaccggagttagaatattagatagctgtacaccattgttaccagcaacacagccaaatgcttctgccaatgaaacctccatcctgaggagatgttgtgagcgtcaacagtggatgccgcccctgtctgttcatccttaattttaatgctagaggaacagttgtactcagtccagccaatgac

SEQ ID NO: 20278 - DNA, 309 bp, Oryza sativa
  Clone ID: PAT_MRT4530_2565C.1
atgggaggtaagctgcagcatctcatggagaggcttcacctggctgggaagggcggcggcggcggcgcggcgagggacgtgccgaggggacacttcgcggtgtacgtcggcgaggctcgggcgaggttcgtggtgccgacggcgtacctgaggcagccggcgttcgtggcgctgctgaagagcgtggaggaggagtacggcttcgaccactgcggcggcggcggcctcaccatcccctgctccgagcgcgacttctccgccctcctcggccgcctcgcctcctcgccgccgccgccgtcgtggcgttga

SEQ ID NO: 20279 - DNA, 2128 bp, Oryza sativa
  Clone ID: PAT_MRT4530_25660C.1
tcaggcaggtcacaaagcatggggaccgcgtcctaaacttgttgttcagtctaattgggctttttttttttttttgttttttttttttacatgacacaagcacaagcacacagtgtattattattgattaagatatggtgattcttctccgatacaagcattacttagtctagtagttgacatatattaaagattaattctttgagcaagcatgcatattcccatacaagctagtatcagcatacttaggtagattgctggcatttgtaacagggaggagcagagccagagtacaatacttaagtcttcttcatccagctgttatacatgatgatataatccatcatcatccatgtgtgttttacttgaggatgtacttgagcacaccgggtatatggatcctgtagaagtagtcctcccaatcgatggtctttgggtcgaagttgaacatttcatcgtcttgagggttcctgctcttccccatcctctgcctcagcctctccaagtttatgtcgtcgaagcatcctttgaagaaggcgaaggggccgtagacgtcgacgaggtgcatgacgtagcggtactggcgggcgaggttagagtagaggcgggagaagaggccacaaaggaggaggttcaccaggtggaggatctccaatggcagcctgtacttcaccagcatgtacacctggaagctggcgatggtcttgaagaagtgcatctccttggtggggatgacctcgccgcgcttcccaaccctcggcttctccgtgaagtgccgccgcccggcctcgtacagcaccgagtacgccgccgggttccgcagcgacgagctcacgtggtacaccgccggccgctcctgcccggcctcgccggagtgcgccaccgccgccgccatcatcgcgttcaccaccatgtcccccgggatgacgtccatcaccaggtccaggtcgcccaggaagcacgacaggttctgcttcgcgtacccgatgatgagcgtgtcgatcgtccgcgtcccctgcatccaccccggcaccgggtcccgctggatgctcgtgatgatgctcggccgcaccaccaccacgccgccggcgccggtgatcgccggcgccggcgacgagctttgcagcagcatcctggacagcaccatctcgcccatggccttggtgaagacgtaggtgttggaccacccgaagtggcgcgccctggcgagccccagctccttcatcgccttcctccgcgccttgtcgtcgtcgtcttcaacctcccgacgcacgtcggccaccagccgaagctccgcgtccacgtccaggtgcatcccctctcgcagcgcccacccctcctcgaacgccctctcctggattagcccctcctgctcgccgcccgcgtaagcagtggagacatggaggaagaccttgaggcccctgcatttcttggccaattggcacagatgcttcactcccagcacattcacatccagcgacacatcatacctgccgtagaagttggtggtggcagcgccattgacgatgacgtcgaggttgtcggcgaggtgttgaagcaacgggggatcgaggcccaggtcgtcgtagatgatgtcgccggcgagggcgaccaccttctcctcgatgaatcgcgagaatcccttgccgtgcttctccttcaccacgctgaacagctccgtctccgtcacctcagattggacgcgttggtttgcagatgcttggtcgatggcgcgaacgagcaggtagatcttcttgacatcaggctgcaccctcagtatcttctccacaagaatcttgccaagaaagccagttgctccagtgatgaggatgctcttgcccttgaagtactctatgatcctttctgcatccaacctatcagaagccatcattttaactaatcactgcagatagctagatcagctagcctctccttcctccactcctcctgtgtttagctagctatatggagtatatagcttaattagggatagagagatggcctgtgatatatgtgtgtgctgcttgctagctagctgctggcttatgaatgagaaggagcagcagcaaagctaagctaagctaagcaagcacctgtgacccgtaccctccgcccgattcctcagccc

SEQ ID NO: 20280 - DNA, 270 bp, Oryza sativa
  Clone ID: PAT_MRT4530_25661C.1
atggcgacctgcgcgccctcctgtgagttctggacaccagcgccgcgtacgcgcatcggcgcgtttcgccccagcgtcagcaacaaaggccggcacgttcgcccgagcctgtcccgagatctgaggcaacgatctgacgaggtgaccatctcctgggctgattttcaccgagaggccagggccttccctgccgatcccggcaccgtcacaccgggcagcgtcttcgcgtacgtggtttggctcggccgcagcacaacgatcgcgtactag

SEQ ID NO: 20281 - DNA, 345 bp, Oryza sativa
  Clone ID: PAT_MRT4530_25662C.1
atggaccgacgtaacatggctcctgccaatccaacctgcggtggaggggaagggatcccgatcgagtcgggtgagccggcggctgtcgccgggggaggtagtgagggggacacggcgccggcgaggcgaggcgaggcgaggcttggaagacacaagctgcgccggccgcggcgtcgccgtcagttcgccgtggaaaaatcaccgataccgatgtcatctttcataaaaagacaactgaagcggcagaaggaagtcggtggcatcaaatgcaaccaaaaacagaacagattcaaaggggtcatccaggcccaggagacagagtttgcagaagaccactactactaa

SEQ ID NO: 20282 - DNA, 298 bp, Oryza sativa
  Clone ID: PAT_MRT4530_25663C.1
cttaacggggcagcaaatccccccaagtatagaaaacccgaaaaaaaaaaacagggccagacactgttctgggtccccacccctttcagggggaggtggaccaaaaagagcgaagggggcaaaggcgactcggagggggggcgacgggcgaccaacccaaaaaaaagcgggggcagccaaaaagaacaccggggggggggggggaaccaagggaaaaacccccacgggcacaaagccaaatagggggcgaacggccaaaagcgaagaaaaccggaggaacgaaaccagagccagaccc

SEQ ID NO: 20283 - DNA, 336 bp, Oryza sativa
  Clone ID: PAT_MRT4530_25664C.1
atccttaacgccaccaaacctccgcgctgtcagatccaacaatgacgagttcattcatgaagtgcttgaacatgatggtgttgaaaagtcaatgttgactgcatacttcgaagcgaataggttacacaaggaaacacgagaaatattgtaccgtgattttccagagcattatacttggcagtcaggaaagaatggaaagttttggcaaaagagggaaagaactgctatctttcaagttggcaaaatcgttacagcccatctagctgaaggcgaacgatactatctttgggttctcttaaaccacgtgaaaggatggagcttgcctgaggatatcgc

SEQ ID NO: 20284 - DNA, 247 bp, Oryza sativa
  unsure (1)..(247): unsure at all n locations
  Clone ID: PAT_MRT4530_25665C.1
ctctacccgcgccgccgccctaagctatctctaggaagggaggagaaggggccgggtgcgcgcgcgctcgctcgctcgctcgtctcgccggcgggctgttcgtgtcgggcgtcaagaagctggtgccggccgtgctcgtngcgcggtggtggcccgcggcgatgctcgccacggcgccgtcgcccgtcctgttcctagcttctcaacgtcatcatcgcctccatcgtcgtcgtgtccgtgcagccga

SEQ ID NO: 20285 - DNA, 266 bp, Oryza sativa
  Clone ID: PAT_MRT4530_25666C.1
atgtcttacaatgggagcagtgtgatgatcagcccagtggtgcaaggcaaggagcagacggacatcatgaacaacatgcagaaccacaacataggcaacagtaccagtgtccctgtgagtggctcatgcttcaatgggacctcatttctcagtggcaactctgttaatgcgccaacgccgccgcagatgccaacttattccattactggcataagaggaaacgcaaccttttaacccagcgagggcaagagaataccgacaagagc

SEQ ID NO: 20286 - DNA, 270 bp, Oryza sativa
  unsure (1)..(270): unsure at all n locations
  Clone ID: PAT_MRT4530_25667C.1
ggggtggggagagggtacaccgtgaagagggcagtcctatggggatggcacattgctggcgcgagcagaggtcagcagtggttacggatcgacaacgcgggggcggagnggatacctggcgccgcccacacgcgcccgctaccccgggggcgccacagcgacggcgggcggctaatggtccgcgataaaagatacaactacgcgccgctccggaagtctcccgccaacatctggcgggggacaaataacgcccccccctcgacaccctaa

SEQ ID NO: 20287 - DNA, 435 bp, Oryza sativa
  Clone ID: PAT_MRT4530_25668C.1
atggcgtccttgctgagcgtcgccgtcgtcctcgtcgtggtcagcgctcaggccctcgccgccgttgccgttgccgacgccgcgcgcgtcaacgccggcgccgcggccttctcgcctgcagtacccctcggcggccggcttgacggcggcggcggagggctggtggagtgctggagcgcggtggcggagctccggtcgtgcacggacgagatcgtgctcttcttcctcaacggcgagacgacgcagctcggcgccgggtgctgccgcgccgctttcgtcatgaacttgcgggaaacgaatatgtcgagtttatacgtcctacatggaagattatcgtggatgttatattcttcattcactgtgaatggaatattggacttgagatttactttttttttgtggaaaccgaaaagctttcgtagctcagttggttag

SEQ ID NO: 20288 - DNA, 325 bp, Oryza sativa
  Clone ID: PAT_MRT4530_25669C.1
ccttcctccgcggttggtggtggctgcgccgctgcccgcatcatcaccacctcacctcacctcagctcgcgagctccgctctcaccaaccgcagcgcgcgacgaaggggattggattgggttgggttggattggagagagagaatggcggcgccgtcctccctcgcgttcttccacctcttccgcctcgccgacctccgccgagcaggcgtcggtcccgccgccccagagcatccccaacacgttccgcctcgggtgctcccgccgccgcgcccagcgcgtcctcttcatggacggatccggctagctcttcattggaggcaact

SEQ ID NO: 20289 - DNA, 294 bp, Oryza sativa
  Clone ID: PAT_MRT4530_2566C.1
gggctcggggccgccccttttttttttttttttgggggaagagaatgcaaacacccaaagctccaagaccaacaaccgatctccagtccataaccagtaaaacaattccctaaggatgccacagcgagcatgaggagagaagcccacgaagaaccttaacgaccagagcgtccgccagagcctgaggaggagattaaactcaggtagagtttgacgtaccagagattctgaaagacccctaaccaacaccagacgccaagggaccccccgtaacagagctgacgactgacaagg

SEQ ID NO: 20290 - DNA, 2799 bp, Oryza sativa
  Clone ID: PAT_MRT4530_25670C.1
atggcgacgtcgtccttggtggctccctctctccatggtcaggcggtgactgagaagctgaccaaggccaaccatgttctttggaaggcgcaagttctcgccaccctgcgaggagcgcagatggcggggttcctggatcgctcgatccaaccaccaccagcaataatcatccttgccacgaaggacaaggacgggaaggagaccaccgagaaggtggcaaatccggtggcaaccttcaccaacgcagcagacgtttgggatgccatcgaggagatcttcaactcgcagtcccgtgcgcgtatcatcaacacgcacatggctttgtcatctactgtgaaaggtaaccgtagtattgctgagtatgttggaaagatgaaagggcttgcagacgagatggcatctgctggaaaagcccttgatgatgatgatctgatctcccatatccttgctggagggcgcggcggcggcggcagaggcggcggacgcaatggagatgccaaccgcggtggtcacggtggtttcggccgcggcggtggcagaggtgacgatggctccttcaacaacaacaatcgtccgacatgccaactctgcggcaagatcggccacaccgtgcacaagtgctggaagaggtttgatgcctctttcactggggaagacaagagtgccaatgtcgcagcctcgtcctacgaggttgacacaaactggtacatcgactcaggcgccaccgaccacattaccagtgaacttgacaagctgacggtgaaggacaaatatgccggcaacgatcaagtgcacacggcaagcggctcaggagttgctcagattggtggttcagctactggaagcagcgcagcagaaaccaggtcgccgggtagcgccagcagagaagaaagcgtttcaccggaggaaacacatgattttatgcatggtcctgtgcagtctcagttttctattggtgcagctggcgcaggaaatgatgatggttcaccagtgctacgtgacgtgtcagcagagctgcagtcagacagtgatgctgcaccaatctcttcatcacctagtactagtgcaccgagtggtggagcagtgcatagcacacatgctgaccaagtcacgtcgccatcgccagcagcgtcagagcagtctgaacaggagcagcagacaacacaggcaagtgatcagacgagaccagtcacgagactacagaaaggtatttctaaacccaagcgatatacagatgggactgttaggtatggatgtcttactactactggtgagccagaaaatctccgagaggctatggcaaatagtaattggaggcttgccatggaacaagaatactctgcttttatgagtaataaaacttggcatctagttccaccaacccaaggtaaaaatataatagattgcaagtggatgtataagattaaaagaaaagctgatgggtcaatagacaggtataaggctagattagttgcaaaagggttcaagcagaggtatggtattgattatgaggacacttttagtctagttgttaaagctgcaacgattcgcctaattctgtctattgcagtctcaaaaggttggagtttgagacaacttgatgttcaaaatgcctttctgcatggatatttagaagaggaagtatatatgagacaacccccaggttttgagaacaaaggccagcctaattatttgtgtaagttagacaaagccttgtatggattgaaacaggcaccaagggcatggtactctcgcttaagtacgaaattgcaagaacttggatttatttcttcaaaggctgacacctccttgttcttttataacaagggtggttgcactatatttattcttgtgtatgttgatgatatcattgttgccagttcttctgcagaagttgttgcagccttacttaaggacttggagaaggattttgcattgaaagatcttggagatctgcactactttcttggaattgaggtcaagaaagtgagtcagggacttgtgctatcacaagcctggtacgcttctgatattctcaagagagctggaatgtctatttgcaaaccagctagtacacctttatctactactgaaaaattgtctattgaagatggagatttcttgggacaaaatgatgctagtcattatagaagcattgtaggggctttgcagtatctcactctgactagatcagacttatcattcttggtaaacaaggtctgtcaatttctacatagtcctactacagtgcattggtcagcagtaaaacgaattttaaggtatataaaagggactgtggaatttggacttagatttggtaagtctgattctatgcttattagtgctttttctgatgctgactgggctggttgttctgatgatagaagatctacaggaggttttgcagttttcttgggtcctaacttaatttcttggagtgctagaaaacaggctacggtttctagatctagtactgaagcagagtataaggccttagctaatgctacgacagaagttacgtgggtaaggaaaattttggatgaattgagaattgcaagaccttcggtagcacaattgtggtgtgataatttgggagctacttatttatcagctaatccagtctttcatgcaaggacaaagcacattgagattgattatcattttgtgagagagcaagttgcgaagaagctacttgatatacaatttatatctacaacagatcagctagctgatggtttcactaaatccctgccggcgccgagtttagcacagtatagacacaatctcaacttgggctaa

SEQ ID NO: 20291 - DNA, 3573 bp, Oryza sativa
  Clone ID: PAT_MRT4530_25671C.1
atggcgacgtcgtccttggcggctccctctctccatggtcaggcggtgactgagaagctgaccaaggccaaccatgttctttggaaggcgcaagttctcgccaccctgcgaggagcgcagatggcggggttcctggatcgctcgatccaaccaccaccagcaataatcatccttgccacgaaggacaaggcgggaaggagaccaccgagaaggtggcaaatccggcgcttctccaatggcaggcgcaagaacaacaaggatatcctcgctcaggtggcaaccttcaccaacgcagcagacgtttgggatgccatcgaggagatcttcaactcgcagtcccgtgcacgtatcatcaacacgcgcatggctctgtcatctactatgaaaggtaaccatagtattgccgagtatgttggaaagatgaaagggcttgcagacgagatggcatctgctggaaaagcccttgatgatgatgatctgatctcccatatccttgctgatttggattttgattataatcctgttgtgtcctcgattacgggacgcactgagtctgtttcctttggtgaagtctatgcgcaactgctgagtttcgagcagcgtcttggtctccttcaaggaggctctcagtcctccgccaatgctgtgtcgcgaggagggtgcggcggcggcggcagaggcggcgaacgcaatggagatgccaaccgcggtggtcgcggtggtttcggccgtggcggtggtggccgcggcagtggcagaggtgacggtggctccttcaacaacaacaatcgtccgacatgccaactctgcagcaagatcggccacaccgtgcacaaaagctggaagaggtttgatgcctctttcactggggaagacaagagtgccaatgtcgcagccttgtcctacggggttgacacaaactggtacatcaactcaggtgccactgaccacattaccagtgaactttacaagctgacggtgaaggacaaatatgccggcaacgatcaagtgcacacgacaagcggctcaggtatggacattaaccatgttagtcgcaccattattcacactcccactcgcaagctttatttgaataatgttcttcatgttcctaatacaaaggaaaatctaatttctgcctatcgcttgatgcttgacaaccatgccttcattgaacttcatcctaccttctttttgatcaaggatcaggcaacaaagatgtcgctgctccgcggcagatgtagagccggcctatgcccacttccgtcatctacgcttcacaataaacaagctcagcaagtccttggcgctttcaagggtaaaagtcatcaattaccttttcctaagtctgttagtgtgtctaaagctcctttagagctagtttttttggatgtttggggaccagctccctcctctgtgggcaataagaactattatacccttgttgaacattcatttaatactaaaatcaaagctatgcaaaccgattggggtggtgaatatcaaagactcaatagcttcttttctcagattggcatagcacatcttgtctcttgcccacacacacaccaacagaacggctcagctgaacggaaacaccggcatatcattgaaataggcctaactctcctatcccatgcctcaatgcccctcaagttttgggatgaagcctttgttacagctgcctatctcattaaccgagttcctagccggtctcagttttctattggtgcagctggcgcaggaaatgatgatggttcaccagtgctacgtgacgtgtcagtagagctgcagtcagacagtgatgctgcaccaatctcttcatcacctagtactagtgcaccgagtggtggagcagtgcatggcacacatgctgaccaagtcacattgctatcatcagcagcgtcagagctgtctgaaccggagcagcagacaacacaggcaagtgatcagacgagaccagtcacgagactacagaaaggtatttctaaacccaagcggtatacagatgggactgttaggtatggatgtcttacaactactggtgagccagaaaatctccgagaggctatggcaaatagtaattggaggcttgccatggaacaagaatactatgctcttatgagtaataaaacttggcatctagttccaccaacccaaggtaaaaatataatagattgcaagtgggtgtataagattaaaagaaaagctgatgggtcaatagacatgtataaggctagattagttgcaaaagggttcaagcagaggtatggtattgattatgaggacacttttagtccagttgttaaagctgcaacggttcgcctaattctgtctattgcagtctcaaaaggttggagtttgagacaacttgatgttcaaaatggctttctgcatggatatttagaagaggaagtatatatgagacaacctccaggttttgagaacaaaggccagcctaattatttgtgtaagttagacaaagccttgtatggcttgaaacaggcaccaagggcatggtactctcgcttaagtacgaaattgcaagaacttggatttatttcttcaaaggctgacacctccttgttcttttataacaagggtggttgcactatatttattcttgtgtatgttgatgatatcattgttgccagttcttcttcagaagctgttgcagccttacttaaggacttggagaaggattttgcattgaaagatcttggagatctacactactttcttggaattgaggtcaagaaagtgagtcagggacttgtgctatcacaagccaggtacgcttctgatattctcaagagagctggaatgtctatttgcaaaccagctagtacacctttatctactactgaaaaattgtctattgaagatggagatttcttgggacaaaatgatgctagtcattatagaagcattgtaggggctttgcagtatctcactctgactagaccagacttatcattctcagtaaacaaggtctgtcaatttctacatagtcctactacagtgcattggtcagcagtaaaacgaattttaaggtatataaaagggactgtggaatttggacttagatttggtaagtctgattctatgcttattagtgctttttctgatgctgactgggctggttgttctgatgatagaagatctacaggaggttttgcagttttcttgggtcctaacttaatttcttggagtgctagaaaacaggctacggtttctagatctagtactgaagcagagtataaagccttagctaatgctacggcagaagttatgtggttaaggaaaattttggatgaattgagaattgcaagaccttcggtagcacaattgtggtgtgataatttgggagctacttatttatcagctaatccagtctttcatgcaaggacaaagcacattgagatttattatcattttgtgagagagcaagttgcgaagaagctacttgatatacgatttatatctacaacagataagctagctgatggtttcactaaatccctgccggcgccgagtttagcacagtttagacacaatctcaacttgggctaa

SEQ ID NO: 20292 - DNA, 345 bp, Oryza sativa
  Clone ID: PAT_MRT4530_25672C.1
tgggccttaacccaccctgggtccaagttcatctgagttgttcaaaagttctaatgcgtgcctcattgggaaattcgccttgatagggcgagtaaagaatcatggatttgttgtaaaggttacttccatttccaacccgcttttcccagtggatgagattgaatctcccacactgaccaactttgaggtccacacgcactgggaacccagtggagatattgatgaccccctgatattttcggatttagtgcgacagatttgaaggctttcttgaatttggtaagtagggtaatcacctggaacacattttatggttgatgaacgttcccgttttttcatttcatc

SEQ ID NO: 20293 - DNA, 142 bp, Oryza sativa
  Clone ID: PAT_MRT4530_25673C.1
gttgatttttgttgagaacggcacaaagggcagggaagaaaatttatcggagtgctatgatgctcaccagtcgagctcaccagcgagagaaagatcaacgtcgttgaagcatgcatagagaggtcactaaggcagaggtgaa

SEQ ID NO: 20294 - DNA, 328 bp, Oryza sativa
  Clone ID: PAT_MRT4530_25674C.1
gggggcaatgttctctccattatttcagctgtgaagaatgtgtaatgtgtacatatgtttctgcagttgtaacgggagctaaccatctcccttgcagttagaaatcttctctacttctatgtgggctctaataaaccatgtactgctaatctataaaaaagaagctatcttttcaatgaggtgcttattgtatccatcttgcacctcaaggatcaatggaagatgatgtttctttctgatgaaagacgaaaaaacatcaaacgagtgatgcggcacaagcaccactcttactatacagcacaaaaccgcctatagtttttagcttcag

SEQ ID NO: 20295 - DNA, 613 bp, Oryza sativa
  Clone ID: PAT_MRT4530_25675C.1
ggcttctagaggagtcatgctgagccctcctccatgaacatgcctgctttcagcatcgaagagaagccggccgtcatgtcagcaggcaacaaaaccatattcagaatgtctcatttgttcctgcaatgaacgcgattgaggatactttcgtgaacctgtcctctgatcaagggagcaactcggcatgtgtctctcacgcgcttctagagaagcttatcaagaatgttagtatgttagtatgtgctgtgtctagcttgactgctgtagtctcaagtactatttggcagtgaaactatctatctgtaactgctatatgaggctggaacaagttacttagcttctaccttatctgtacttgctatagtggctgtgaaccttgtggatctgaactctgaagccaatgtttactatataatgtggttggttttataaactctagttgatttggacccctgtcaatggtcatgctatggctggggataagaaccattgatgatcatatttgactagaaacgctgcttccaaaatatcccataaagtaaagctgaacttgtactaatgttcttgcacaagttgcaataatgttgccttatggaaaaacagtttccggacc

SEQ ID NO: 20296 - DNA, 3308 bp, Oryza sativa
  Clone ID: PAT_MRT4530_25676C.1
atggcgctcgcgggcgcctcctcgtcggcctgcctccgccgcctcaacccgctcctcttctccgcccaccgccgccccgcgtggaccccgcgccgcgccgcccgcaggttctgcgcagctgcagttgcctcggagagagatgtgttcacctccccggaggtcgccaagtcgttcgacttcaccaatgaggagcggatttataagtggtgggagtctcaaggattctttaagcctaactttgatcgtggaggagatccatttgtcatcccaatgccaccaccgaatgttaccggatcgctgcatatgggccatgctatgtttgtcacccttgaggatataatggtaaggtatttccgtatgaaaggaaggcctgcactttggttgcctggtactgaccatgcagggattgccactcagttggttgtggaaaagatgttagctgctgaaggaatcaaaagaacagatctgacccgagaggagttcactaaaagagtttgggagtggaaagaaaagtacgggagcactatcactaatcagattaagcgattgggtgcatcttgtgattggagtcgtgagcgtttcactcttgatgaacaattaagtcgtgcagttattgaagcatttgttaggcttcatgaaaaagggcttatatatcaaggatcttacttggtcaactggtctccaaacctacagactgcagtatctgatttagaagtggaatactctgaagaacctggtaatttgtacttcatcaagtaccgtgtggcaggtggatcaagggatgattttatgactattgcaacaacacggcctgagactctctttggcgatgttgcaattgctgtaaacccagaggatgaacgttatgcaaaatatgtgggcaaattggctattgttcccttgacatttgggagacatgttcctattattgctgaccggtatgttgatccagaatttggaacaggggtgctgaagattagccctggacatgatcataacgattatcatattgcacgaaaacttgggttgccaattctcaatgttatgaacaaagatggtacactaaatgatgttgctggattatacagtggcatggatcgttttgaggcacgggagaagttgtggtctgaccttgttgagactaacttggcagtaaagaaggaaccctatacacttcgagttcctagatctcaacggggtggtgaagtaatagagccattgattagtaaacagtggtttgtcactatggatccattagctgaaaaggcccttcatgctgttgaaaaagggcaactaactattcttccagagagatttgaaaagatatataatcattggttgacaaacataaaggattggtgtattagtaggcaactgtggtggggtcatcggatccctgtttggtacatcgttggaaagaaatgtgaggaagactatattgttgctagaagtgcagaggaggcacttgcaaaggctcaggaaaaatatggaaaatcagttgaaatatatcaagatcctgatgttcttgacacttggttctcaagaagtataaacactttcagacacaaatcgctacagttgtcctgcagtgctctgtggcctttcagtacacttggttggccagacctatccagtgaggattttaagcacttttatcctgcaactgttcttgagactggccatgacattttgttcttctgggttgcacgaatggtcatgatgggaattgagtttacaggaactgtgccattttcttatgtttatcttcatggtctcatccgggactctgagcaagttaattttcagggacgaaaaatgtctaagacactggggaatgtcattgaccctctagataccatcaaagagtacgggacagatgcattgagatttacactttccatgggtaccgcaggccaggaccttaatctctctacagaaagattgacatcaaacaaggctttcaccaacaaactctggaatgcaggcaaatttttgttgcagaatttgcctgatagaagtgatgccactgcatgggatgtcttgttagcaaataagtttgatacagaagcgtcacttcagaaactaccactgccagaatcctgggtggtgacaggattacacgaactcatcgatagggtcagcacaagctacgacaaatttttctttggcgatgcagctagagaaatctacgatttcttttggggggactttgctgattggtcctcaagaaccgtgcgcctgttggttgtttttgtaggaaccagagcaaacagtttaggggcaaggtatattgaagccagcaagacacgtctttaccactctggtgatgattcagcttcttctatggcacaaagtgttctgttgtatgtgtttgaaaacatactgaagctattgcaccccttcatgccctttgtcactgaagagttatggcaggcattgccatacagaaaacaagcaattattgttgcccactggcctgcgactgatctccctaagaattctctctcgatcaagagatttcagaatttgcaatcgttgataagaggtatcagaaatgttcgagcagagtattctgttgagccagccaagcgaatatcttcatcagttgttgctgccgcagatgtcctagattacatatcgaaggagaagcaggtcctggctttactttcaaagcttgacatgcagagtatacattttagcgagttgccgccaggtgatgcaaatcagtcggtccacattgttgctgatgagggtctggaggcctatctacccctggctgacatggtggatgtttctgaggaagttaagcggctgtcaaagcgcctctctaagatgcagtcggaatatgattctttgctggcccgtctcaattcaggaagttttgtagagaaggccccagaagaaattgttcgtggagttcgtgagaaagcatcagaagcagaagagaagatctccctcaccaagaatcggctcgctttcctgcagtcaacagtatcaagttagattcacagtcaccattgacggtgtcaacctgccatctaaataacaattttgattagtcctgatttggacgagagatgccacttccggatataaattggcgtgtcagagtagtgagtgccattccattttcgcgtgtgccaggacattgcaactggtgcacgcatcttaccgataagttctactatatacactcatttatacgttactaggtatgcctgtacgcctgtgcgttgtaacgggacatagttgtacatacataaacatgaatggaataaacagttgcacaaaaaaaaaaaaaaaaaaaa

SEQ ID NO: 20297 - DNA, 150 bp, Oryza sativa
  Clone ID: PAT_MRT4530_25677C.1
caaagggcaacattattgcaacttgtgcaagaacattagtccaggttcagttttactttatgggatatttgggaagcagcgtttttagtcaaatatgatcatcaatggttcttatccccagccatagcatgaccattgacaggggtccaa

SEQ ID NO: 20298 - DNA, 301 bp, Oryza sativa
  Clone ID: PAT_MRT4530_25678C.1
aatcggcacgaggcaccttcacgccaaagcctccctctcccatctctccctctctctccctcccctgcgtccatagctcgcagctttgcagcagccaagccaagaagccaactcaacccatcagaactgcagaaaccccagccgcggcgttggttaaaccacagcaaagcgtcgttgatgcccccgcgcggacgcctcgcctcggcgccatgacgacgaccaccaccactcgcctcctcctcgctgccattctcctcgcggtggccgccgccgacgatgacggacaaacgctactggagat

SEQ ID NO: 20299 - DNA, 1757 bp, Oryza sativa
  unsure (1)..(1757): unsure at all n locations
  Clone ID: PAT_MRT4530_25679C.1
ccggccgggctctgtaaaaacaagcaaacaaagaaagaaaagcatcacaaatctcacgcactgtctctcgttcgcgcaaagcacgctgcttttctccgctttgcgagcaccatagcctagcccaccatgtgcggcggcgccatcctctccgacctcatcccgccgccgcggcgggtcaccgccggcgacctctggctggagaagaccaagaagcagcagcagcagaagaagaagaacaagggcgcgaggaggctgccactgcgccaagaggaggaggatgatttcgaggccgacttcgaggagttcgaggtggattccggcgagtgggaggtggagtccgacgccgacgaggccaagccgctcgccgcgccccggagcggcttcgctaaaggtggattgaaaaacactactgttgctggtgctgatgggcctgcagcaaggtctgctaaaaggaagagaaagaaccaattcaggggtatccgccagcggccatggggcaaatgggctgcggaaatcagagatcctcgcaaaggtgtccgcgtctggcttggcaccttcaactctcctgaggaagctgccagagcttatgatgctgaagcacgaaggattcgaggcaagaaggccaaggtcaatttcccagatggggctccagtggcttctcagaggagtcatgctgagccctcctccatgaacatgcctgctttcagcatcgaagagaagccggccgtcatgtcagcaggcaacaaaaccatgtacaacacaaatgcttatgcctaccctgctgttgagtacaccttacaggagccatttgtgcagattcagaatgtctcatttgttcctgcaatgaacgcgattgaggatactttcgtgaacctgtcctctgatcaagggagcaactcctttggttgctcggactttagccaggagaatgatatcaagacccctgacataacttccatgcttgcaccgaccatgacaggtgttgatgactccgcattcctccagaacaatgccagtgatgcaatggtacctcctgtgatggggaatgctagcattgatcttgctgacctggagccgtacatgaaatttctgatcgatggtggttcggatgagtcgattgacacccttctgagctctgatggatctcaggatgtggccagtagcatggacctttggagcttcgatgacatgcccgtgtcggccgagttctactgaggggtttggggtgtagcaactggtgcctgtatatataaggacaaatggaataaacattctggacatccaagaagcggcatgtgtctgtcgggcgcttctagttgcgctatatagctatgttagtatgttagtatgtgctgtgtctagcttagatgctgaagtctcaagtactatttggcagtgaaactatctatctgtaactgctatatgaggctggaacaagttacttagcttctaccttatctgtacttgctatagtggctgtgaaccttgtggatctgaactctgaagccaatgtttactatataatgtggttggttttataaaaaaaaaaaaaaatggacccctgtcaatggtcatgctatggctggggataagaacaattaatgatcatatttgactagaaaaaaaaaatccaaaatatcccataaagtaaaaaaaaaaaaaaaaaaaaaaaaaaaaaaaaaaaaaaaaatacctcgaggcccagctacgcgaccacttctgtacangtccnatgatgtctataagtagctcgcccc

SEQ ID NO: 20300 - DNA, 539 bp, Oryza sativa
  unsure (1)..(539): unsure at all n locations
  Clone ID: PAT_MRT4530_2567C.1
cggcttgggcttcctcggcgcgtcgggcggcaggcggcggggtcccnccagcttccnccgacggcgggcgacaatgacgccctgtttcagcggcgtgcgacgggctcgacggggccatccattgcctggatccggcggcggcggccgtccctcgcccggccccgcacagatccacnagcggttgcnggaggagagcccaggggtagactcggcgatngctggcggacaacggtcgtgcaccgcgtggagtccggcggcggcgggcggcgtacttcaacttctttctgcccacngccgtcatcgtggttgtccttcaccanctcgccgtganccgccgccctctncccacaccgccgccgatggacgtcgacnctgactcggccgccgggggcaancccacccagatggacctcgaggacnangtattccccaatctgattatcctttcttcctcctccctattcatttcttttccctttttgatttgtgcacaagaaccctagttcatcccaatctcattttacantgtcgatgccgaa

SEQ ID NO: 20301 - DNA, 3057 bp, Oryza sativa
  Clone ID: PAT_MRT4530_25680C.1
atgaaagggcgcgcggtgaagctccgagaggcgcacaaggccggctcgccagtcttctgctccgttgcgtggggccaaggcgggcagcatgtcgtcaccgcatccgccgccgacgtggccatcctcatccatgacgccgctgcggtcgccgccgccggtggccggagctcgggctccgcggctgcggcggcgctttccacgatccggcttcacaaggatggcgtcacggcgctcgccgtcgcgccgggctccggcgcgtcgctggcgtccggctccatcgatcactccgtcaagttctgttctttcccagagggggtgttccagagcaatatcgcccggttcaccctgccgatccggtcactggccttcaacaagaaggggactctgctggcggcggccggagacgacgacggcatcaagttgattgccaccatcgacaacaccatctccaaagtgctcaagggccacaagggatcggtaaccgggttgtctttcgatcccagaaacgattatttggcatcaattgacaccttcggcacagtcatcttctgggatctctgcacggggactgaagcccgtagtctgaagcggattgcgccgacatttggttcagaccactcaatcaacaatgccctgtgctggagccctgatgggcagttccttgctgttccgggattgaggaataatgtggtcatgtatgatagggacaccggtgaggaggtgttcactctgaaaggggagcatgagcaaccagtgtgtagtctctgctggtctccaaatgggaggtacctagtcactgctggattggataagcaggttctgatctgggatgtgaagtcaaagcaggatgttgagaggcagaagttcgatgaaaggatatgtagcttggcttggaaacctgaaagtaatgctgtagcagtgatcgacgtaactggcagatttggcatttgggaatcggtcatcccgtcgactttgaaatcgcccacagagggtgcacctgacctgaactctactaaggttcctttgtttgatgacgaggatgatgaggagaggccgagtacctctggtggactggatgatgatgatgatgatgaaagtcttggtgaattaggtccattcaaccacaagagattgaggaggaagtcaacctatcatgatcactcaaatggagatagtgaagatgaggatctgatacttcagatggagtcacgcaagagaatgaaagatacacatagagataacaaggaggttgctgataaggcaataggtgattcagcaacttcagtaagactggttacagcaagaatgcaaactgcatttcagcctgggtccacaccacctcaacctggcaagcgaaatttccttgcctacaatatgcttggaagtatcactactatcgaaaatgaggggcattcacatgtagaggtagacttccatgacaccggaagaggtcctagagttccttcgatgactgattattttggtttcacaatggctgcactgaatgaatcaggaagtgtctttgcaaatccatgcaagggtgacaagaatatgagcactcttatgtaccgccctttcagtagttgggcaggcaacagtgagtggtcaatgaggtttgagggagaagaagtgaaggctgtggctgttggtgttggatgggtcgctgcagttacaactttaaattttctgcgcattttcacagagggagggttgcagatgcatatcctctcagtcggtggcccagtggttactgcggcaggccatggagatcagctagcgattgtgtctcatgcttcagattgtctttcatcaggagaccaggtgctggatgttaaagtactgaagatatctgaatgtgctcaatcattgtccagccgacttgttttaactcctgcctctaaattatcttggtttggtttcagtgagaatggtgaacttagttcctttgattccaagggaatactgagggtcttttctggtcaattcggtggaagctggattccaatatttagttcaatcaaggcaagaaaatccgaagatgaaagccactgggtggtgggcttagatgctaataatatattctgcattctatgcaagtccccggagtcctatccacaggtgatgcccaaacctgttttgacaatacttgagctgtcatttcctcttgcatcatctgaccttggtgccaatagtttggaaactgaattcatgatgaggaaactgcatctctcacagattcaaaagaaaatagaagaaatggctgctttgggtctggacacgattgcattagatgatgaagcattcaacatggaggctgcacttgaccggtgcatcttgaggctcatctccagctgctgcaatggtgataagcttgtacgagctaccgagcttgcaaaattactaacactggagaagtcaatgaagggagcattgatgcttgttacacgcttaaaacttcccatattgcaagaaaggttcagtgccatactcgaggagatgatgctaaacaatgcaaaaattgccaatacatctggtgttttctccaatagtaatacaaactactcaccatcaccagcgttgagcactcaagcagtcccaccagctaaggttgtgcaaaatggaaacagcttgaagttacctacattgcctaaactgaatcctgccgcccaacgaagcaatccaactgaatcaaacaaggcagaggtagaacaagcagacaatttgaaagaaatcagtacaaaggtttcacctgcacaaactccgttagttaaaattccaaaaaacagtgaaatgggtgtaaaaacgaagaaagataatgatggagcatcacatgcaactacagttgatcagaacccaaagggaggcagtggtcaggttggccttaaaaacaagagcgtcgatagctgcaatggtgtacagcctcagcggccagttaaccccttcgcgaaatcctcatcaagcaaagaacagccatcatccctttttgattccatcaagaagatgaaggtcgaaaatgagaaggttgacaaagctaacagcaagaaggtgaaagtgtaa

SEQ ID NO: 20302 - DNA, 219 bp, Oryza sativa
  Clone ID: PAT_MRT4530_25681C.1
atggcggcggcgcaggtgggtgcctctcgtctctgggcttcgtcgggagaggaagcaatgcgaggcccacttcatagcaccacgtcgtgggctatccgaaggcccatgacgagacttgacttgcggggcgggccaatcttcttccagaacaggttgagcaacatcaagaatgtagaagaggacggcaacctgtggccgaccgccaggtaccgggaatga

SEQ ID NO: 20303 - DNA, 822 bp, Oryza sativa
  Clone ID: PAT_MRT4530_25682C.1
atgtcgctcgtgagctcgttcatggcgtcgctgctggttggcggctacgcctacatcgacaagaccgacggcgcttggatgaacttgaagacggacagggcgctgcgacaacgacgagcgccgattggaggggtggccggtggggttgccggcggccctgggcgagtcggaggcggcgccggagtcgaatccggcgacggaggcgggggcgaccgcggagggaggcgcggtggcggcgtcttggacggggacggcgacgacccgtgcccgcgggccacctccgccgacgcgtcggagccctcggaggccgatcccgccgctaccgacgcgtcggagccctcggaggccgatcccgccgctaccgacgcgtcggagccctcggaggccgatcccgccccgcgggccacctccgccgacgcgtcggagccctcggaggccgatcccgccgctaccgacgcgtcggagccctcggaggccgatcccgccgctaccgacgcgtcggagccctcggaggccgatcccgccccgcgggccacctccgccgacgcgtcggagccctcggaggccgatcccgccgctaccgccgcgtcggcctcctcggcggggcgcttcgatgccatgcggtgcagggaggggagggggagcaggtcgccgccgtcgtcgaacctgcacccagccgccgcgcagcaccagtcgccggccacgccgcgccaccgcctgtctgccacgcgccgcgccgctaagcgccgccttggctgtccgccgacgccgcttagcccactcgccgtcggcgccgcctggctacctctctctctctggtga

SEQ ID NO: 20304 - DNA, 798 bp, Oryza sativa
  Clone ID: PAT_MRT4530_25683C.1
ggctgcaggaattcggcacgaggatacttgtgagcaagaaaaattgttgttgctgactgttgggccactgggatgcataccgggtgttcgtgctttagagttcattcctgcaggggagtgttcagcatttgctaaccaactcactcaaggttacaacaagaaactgaagaggatgatctacaagctgaaccaggagatggggcctgagagtagatttgtttacgccgacccggtcgagccccgggcggcaggcattcacgcagtaccgtcaatacggtgagctttcttccttgctgcagctacctcttgcgaaaaccacccggggagtgctgtgctgcacgctgcagcgcacgagatcgtgctggatatctttcagcagtaccggccttccggttttgagaatgcgctggacccatgctgcggaggcagctaccctccatttctctgcatcggcatcgctaactcaacctccaccttatgcaatgaccggtccaagtacgtcttctgggacgcgttccacccgaccgaagccgtcaacttcatcgtcgccggcaagcttctcgacggcaactccgccgttgcttctcccatcaacgtccgagagctgttccaataccaatacaaatgagagatgtgcttttgcccagttgctatggcattcattcctgtttggctgtatcaattcccatcctctttcagtcttttcctctgcaatcttctcgggcataattggactggacagcacgcctttaacgagtagaatgtgactgaaagtgcgctttacgacaccagtttggg

SEQ ID NO: 20305 - DNA, 450 bp, Oryza sativa
  Clone ID: PAT_MRT4530_25686C.1
tctctcgcgacctctctctcccgtgttcaccacgccgtccccgaagtttacagtctccaccatggaggaggtcctgctgcgccacgcccgcctcccgaggcccaccgcgcccaccgcgcgccgcagccgccgccttcgcgtcgtcgccgtcgcgctgcggaccaggcccaccagcctcgccgtcccgggcttccctcccgcgcccgcgccggcgcccgagcacgtgctgctgccgtcgccgtccgtggccgtgggcgccgccgaggtgctgctcgccgcgggggtgccgcccgccgaccttatgcgggccgcggtgatgtgccccgagctgctgtccgtgcccgtggggaccatcacggcggcgctgcggttttttgaccgacgaggcgggggtcccggcggaggacctgccgtgtgtgctgtcttggcggcccaggctgttggtgtccc

SEQ ID NO: 20306 - DNA, 3102 bp, Oryza sativa
  Clone ID: PAT_MRT4530_25687C.1
atggctactgcttacactagatggatacatcatggagaaccattggaggttgtaccacatgaaattgatgaccatgttgatgaggatactagtctcaatgaggattttgacatgaatgtggatgaggaagatgacactgatgatggaattcatggtatggtagaggagttgtacacagctgaagaagaaggtcaagggaaaaagtctatgtttgcaattctattggaagagatgaaacaagaactgtaccctggtggtccttgcacaaggttttcttttgtggtgaagttacttcatatcaagtcattttaccgaatttctaatgttgcattcacagtgttgctgaagttgttgtcatcatcattcccaaattgctctattcctgcatcaaacgaggaagcaaagcgacttatctgtgcattggggcttggatataattcaatccatgtgtgcccaaataattgtgttctatttaggaagaatttagaaaaaaatgatgtttgtccggtttgtggtgcatcaagatggaaagacaatggtggaaggaagaagattcctgagaaggttttgcgacattttccattgattcctaggctgaagagaattttttcttccaaaagaacggcagaggaggtgcaatggcataagttgaagaggaagccagtggagaatgagctcaggcatccagctgatggcgagtcatggaaaaactttgacagaaagtatgggtggtttgcagaagatgcaaggaacatcagacttggccttgctattgatggtttcaatccatttggtaaaatgagctcctcgtatagcatgtggccagtgtttcttatcccgtacaattttcctccatgggaatgtgtagagcaatcaaactttatcatgggcctgcttatccctggtcgagaatgcccaggaaaggacattgatgttttcttggagccacttattgaggagctgctagagctttggaaaggtgtccctactgttgatgcacttactaagaagaagtttgatctacatgctgctataatatggtgcattcatgattatcctggtttgagcacattgtcaggtagagtcacaagaggttattatgcatgtgtgcattgtgataaaaacccttgctccaaaaggataaggaatatgatatgttacattggccatcggcgtttccttgctagggaccatccatggaggagaagcaaggtgtttgatggtaatgttgaaaaccgtgagaagccagagaaatttaccacggatgagctgatggagcaactggagagggtcaaggatgttagaccaggaaagcatcctgaaagcaaaaaaagaaagtgggacgaagagggccaatgttggaagcgaaggtcatgtttgtgggatttgccgtattggtcgagtttgaagctgcggcataatcttgatgtgatgcacattgagaaaaatatatgtgagtacatccttggtacatttctaggcatggctgggaagtcaaagtacagtacaaattctaggcttgatttggaagatatgggtattaggaagcatttacacttgatccgtgatggagattcatatagttctcctcatgccccttacacaatgactaaaacacagaaggctgatttttatgattttttgaagagtgtaacatttccagatggatatgcttccaacttagcaacatgtgttactgcagatggatgcaacctccaaggattgaaaactcatgattgtcatattcttcttcaaaggattatacctgctgctgtacgaggaatcatgcccaaggacataaacgaagcacttgctgaattaggtaatttttttcagcaactatgtgcaaaaactttgaacttagatgtgctggaaagattgaaagctaacatcccaatcattctgtgcaagcttgagaaaatatttcctccttctttctttgatgtgatgctacacctggctgtccatttacctgaagaggcaatttttagaggtccagtacaatatggatggatgtacccaatagaaagaaggttattaacattgaaacggtttgtgaggaacatggcaaggcctgaagggtccattgcagaagcatatgttgctgctgagtgtttgactatttgctcgaagtactttggtgatgatgttgagacacgacacaatcgggagggcagaaatagagagcgtgttgctattgtgaaaaaagacctatctgttttccagcatggagttgatcttcttggagcaccaagtcttacatatcttgaacatgattgtgaaaaaatggtttggatatataagaaagagttggagaatgaaggatgtcctaatgttcaaaaaacccttgagaagcaattttctcgctggtttaagaagcacattacaaaacttcgttacgtggatagacaagacataaatgatgagctatttgcgctgtcataccgtgagaaaaatagaagaacacaaaatagcggaattatggttgagggtacacatgataaccaggaaattgacttctatggttccttgaaagaaataattgagcttagatacaatgcagattcaagtggcgataggacggtggttctatttcgatgtgattggtttgacactcatggaaagaagttccgaatgaaggaagatgggttcttcaaaagcataaaccatggcagcttgtggtacaaagatgatccatttattctagcaacacaagcaacaaaggtattttatttgttagacaccaagtatcatgagaaatggcgagttgttcaaaaattttcacatagacacttgtggagtgtggctgaaaatgacaatgaggatatacccaatgctgtggtattgtcctaccaagacgatgattgtgaaggtgtgcatgttcaacttactgaaggatgtctagaaaatgaccagccagttagtgaaggtggttttcgtgttgatgctagtgtagttgatgacctccgtatacaaagagaagcggaagggcaacaagatgagtcgggcgacagtgaagatgaaactggatggcaatatgtgagtgataatgaaggtccaacattccctctagaagatgacgatgatagcaattatgagtag

SEQ ID NO: 20307 - DNA, 567 bp, Oryza sativa
  Clone ID: PAT_MRT4530_25688C.1
acgggcccaaccaaaaggcaaaaaaaacaaacccctggggggaaacatttttggcaaaaaaaaaataaaaaggctaaaaataaaaaacaaacttggagggtaaaaactggaaaaaaaactttaaactttgcagggaaaggggaaaaggcttaaaaaaaaaggctcaggcccaggccaccatgggaccccccccggggcctttccttttttttttccccctggggagccgagggaacaacacccccccgggggggggaaacgggggcaaaaaaaaaaaactgggggggggcttaaaaaaacccctggatcttaaaaaaaggggggaacaaaaattggggccccaaaaaaaaaaaaagcaaatttttggccccatggaggaacagggggggggcaaaaaaaaaagtggggcacaaaattgccagggaaactggggcccccataaaaaccccaaaagcaaccttttccataagggcatccccagggggggcaacccccccaggggtgaaaaccgaccccctggcaaaaacatgggaaaaaacccccccaaataaaaagggggggaaacca

SEQ ID NO: 20308 - DNA, 307 bp, Oryza sativa
  unsure (1)..(307): unsure at all n locations
  Clone ID: PAT_MRT4530_25689C.1
cgcctcagttttacntgnggcaccagtgcgcgagattgtnncagaacatagcaacaagttatttgtgctgggacttcgggcagcagcatgatgaatgaagaatggcgatgccagatgccatttacatgtgcaacatgtcccctgtcaactntccatactctcttccnntgtggttgntgtttgatctataacgttgggggaggatgtgactctantaataangtgtgttgcattactataaaaatnnncaaacacctannaaataantaaccattnnnaataaaatattcaatnncattttcattaa

SEQ ID NO: 20309 - DNA, 363 bp, Oryza sativa
  Clone ID: PAT_MRT4530_2568C.1
atgcccgctggagatttctgggtccgttacgcgcggcagttttttggacttcagtttaaattcactcgtgaccgttgggcttcacacggtgttctcgactacgtcctgactctatggtcctcacaccgggagcgacaacagtctcaacacaagaagtcgcgaatgggtatacccacgcgcatacggatacttcctgcgtacactaaggaaatacttcacggagtctacagatggaaagagtcctactcggacaagactggggaccccccgaggaggacctggggcatcgaatctcggagccaacataaccctcacagcctacgaagtcggagcctgcaaggagccaaatcgccgaggatctag

SEQ ID NO: 20310 - DNA, 547 bp, Oryza sativa
  Clone ID: PAT_MRT4530_25690C.1
accgggcccaaccaaaaggcaaaaaaaacaaacccctggggggaaacattttgggcaaaaaaaaaataaaagggcaaaaaaaaaaaaacaaacttggagggtaaaaaatgaaaaaaaaactttaaactttgcagggaaagggaaagagggttaaaaaaaaagggtcaggcccaggacaccaagggaccccccccggggctcttcctttttttctcccccctggggagccgagggaacaaaaaccccccgggggggggaaacgggggcaaaaaaaaaaaactgggggggggtttaaaaaaacccctggaactaaaaaaaaggggggaacaaaaattggggccccaaaaaaaaagaaaacaaatttttgaccccaaggaaaaaaagggggggggcaaaaaaaaaagtggggaccaaaattgcccgggaaactggggcccccataaaaaccccaaaagcaaccttccccaaaagggcatccccagggggggcaacccccccaggggtaaaaaccgcccccctggaaaaaacatgggaaaaaaccccccca

SEQ ID NO: 20311 - DNA, 6408 bp, Oryza sativa
  Clone ID: PAT_MRT4530_25691C.1
atggcgccgccgcgggagctggacctctccgacgaggtcgagggcgaggaggacggcaccaccgacttcgtcttccgcctcgccggcgaccccatccccctcctccctaccacctcctcgccgctcccgctcttcgacctccagtcgcctccctcgcgcccgctcgccgtctccaaccgccgggccgcggtcttccttgcccaccccaacgggtttatggctgcgacgaccaaggcgttgatcgaggccagcaaggaggcgcgcgagaagggcaagtcgaccacccgctgcgcacgggactgctgcgtcgcggacatccctctccccggggtctctctcctcgaactctcccgtgatgaatcggtgcttgctgcctgcgcaggcagtgtgatccacttcttctcggcttcttccctgctcacagacaaggatgtggaaccactgtcatcatgtaccttggaaggatccagcactgtgaaagatttcaagtggctaaatcatgcttccaaagcctttattgtactctcgaaagacgggttgctgtctcaaggaagtctgggggaaggtctgaaggacataatggaaaatgttgatgctgttgactgctgcaaggaagggactcacattgttctttcaaaaaagaatacacttaacatattatcatcagattttaaggaaatatgttgcatgcccctcttgttccagctatggtctgatgatagtgattcagatgatgctagcatcaaagtggattcgattgggtgggtgcgcgatgacagtattgttgttggttctgtaagattgaatgaagaaggcaatgaagagggttatcttgtccaagtaataagaagcggcggaaatacattttttgagaattcaagcaagtcagttgttttcacctatgtggattttttccgaggcatcatggatgatgttttaccatctggagttggacctaatctgctgctgggctatttgcatcgctgggatctaatggtgacttccaacaaaaagagcattgatgaacacatttctctcttgaagtggtcatctgcaactgatgacaaaaaaactgtagtatatcttgagatgttggaggataaatatagtcctaggattgacctacaagagaatggtgatgacaatgtcatattggggtttggtgtcgagaatgtgtcattatttcagaagatcacagtaacagttggtcctgaacaaaaggaggttgctcctcaacatattctactttatctgactggtgaagggaaactgaatatatattatcttgccaggatttctgatccttctgaattacctcaaacaaagctatctgctattgaagatagcgatgtgatgaaagaaatttcacctgtaactgtatctggaaaagagtttactccaagtgctaccagctcattggacaagagtattcgcccagatggggctgagctttctagtgtacaaccagatagagacctgcatggatcaacagatatgaaaaacagttctccagtttcaaaagccaaggaaatagtggcttcctcacctgcacctgcctctttcttagcaccagcaagcaacttgaaacctggaatatctttcagcttttctactgctaatagcgtcagtttgagtccagctggaagcaacacatctagtgaattaggttcttcctggcaacaaagcagcagtagcaatttcgtaaataaccaacttggtaaaggaagcataccttccactcagccggtgggagcatttggaggatctcagaactcaaagaaagatggtaaccttagctttaataaatcatcagtgttcacttctgatggatctaccctggttaagcctggagaaaggaatgaacctggttttggaagtcacccgctgcaaagcagctacactaccgataagaaagttcctagttcagttggcttaagttccaagtcatcaccatcaatttctccaataaaaccttcctcagctggaccttcatccactggctttcgcacaggaaatcttgaggcatttcctacctcccgtggatcacctctaccacaggaaagcattgacaaaccacatgacagaacacatgcagtagtggaccattctaaaaatttcaagttaggcgcaatgttcgatactgaacaggacctgtctaaaaaattttacagtattaatgatatgaccaaggagttagatacactcctatcatacatagagaaggatggtggtttcagagatgcttgcataaccttccaggaacggcctctttctatgtttgagggtgatttgcaaaattttctggaactgttgcagatcttcaagaacaagatagcagaacagtgttcaagagttgaagacctgcggaataagatgtttcaaggcacgtctactactcgtgtctctgctaggcaagcttacatgaaaggaatcgtcgaccaatcttcagatacccaatactgggatatatggaaccgtcagaaattgagtccagaattcgaagcgaagaggcagaatattctcaaggctaaccagaatttgacaaaccagctggtagagctggagaggcatttcaataatctggagatgaacaaatttggagaaacaggaagagttgcttctagtcgcagagctatttattctagtaaggcacgatccagtcagacacaaatatccagtgtttacaatgcgcttaattcacaattagcagcagctgaacaactgtcagactgcctctcaaaacaaatatctgcactaaatataagttctccttctacaaagcgagggtcagtggccaaagagttgtttgaatcgattggtctagatcacacgatggatgcagccaaattttcaggtggtactccttccaagtcagttaagagatatccatcaacgagagaacacataactagcatatcagggccttccaagactgctgagcctgagactgcaaggaggaggagagagtcactggataggagcctggctagtttggagcctcagaaaactactgttaaaagaatagcgcaacaacagcgcctcaagatcagcagtgacctgccattcaggtcaaataagaaaatatttgattctcagatggcagctatgtcccaggagaagtccagcagtagccccacttcctccatagtagaatcatatgcaaacaagctgcattatccaagtgaagtgctgcacgagaaaacaaagccgtcaggaccccagcacaacacactgttcaaatgggtaaaggaatcggctggaccatctcaaggccctcagcataagtatcctgaattaccagggcagctgaaaagttctgaccagacaccaaagttgggctcatcttcaccgttgtcattcagttattcacataaggatgtctgggataatatcagctcatccaatgttccatcctctggaacaactcataccatgccaaagtcaagtactttgacatttaaaaccactgtcattccaaaaactaataccagtacactcccagatttgtcgcctttgatgacgggctcaaaattctctctgagtccattgaccgtgaaaactttatctggggattctggaggtgcgtcatccattattacaaagaacaaacaaggtggacaggcaatgccatatttgggaaccacaaaaggactggatgtttctccacagaatatgggtggtgcatttagagatcttaacaaaccgtctttgtctcctgaacctcccaagtctgctctgttacaagggaagactgtgcaacttggtaagattactgaaacagtgcagagcccagtgaaagctaaacctgaggtggcattccaacctcctgcatttccaccaacacctgttgcacaatcttctccatgctctattaagccaactgttccctcttcagctacatcatcctcgtcaactatgcaagaatcagctgcaaaaacatcagatgttttgtctccaacaggtccttccattcttccatcaaaggaatcaatgacaaaaccttcatcaccattacctgatggtaccatatctagttccctactatctattccaatgcctgttaaggagtcatcaactggcttgaataaaattgtatctaagcctgaagtggttacatcagaggtaactggaacaaccgtttctgcaagtactagctcaagcgtaccaatcactgaaggcaaaccttcatcgattccagcaaccagtggaagcttaccttcaattcctgtctctgcacctaaagtggtgccagtgtctgcagaatctgttgttgtcacttccaccggaaaagatgtaggaccgagcaatccctcatcagatgaagatgatatggaagaggaagttccttctgcaagttcggatctcaacttgggagcccttggtgggtttggtcttgggtctgtgccttcttcaagtcccccaaaatccaatccctttgggaactcatttactacctctgacaataagagttcaggttcgtcatttaccctgacaaccagtccaggacagcttttccgtccggcgtcactgagtattccctcatctcagccagcacagtcatctcaatcaactagctcaagtacattttctagtgcattctcaagtgggcttagtggattcggacagtctgcacagattggatcagcgcagcagtcagggtttgggcagccttcacaaattggagctgggcagcaggcaggatttggtcagccagcacaaattcagtcaggatttggccaaccagcacaagttggagttgcgcaacagtcaggatttgggcagcctgcacaaattgggacagcacagcagtcaggatttgggcagcctgcacaatttggtgctcagcaagcacttggatctgtcctgggttcttttggacaatcacgccaattgggaagtttcggtgctgggggatttggtggattcgctagtgcctctgcttccgggggcttttctagcaattctggatttgctggtggtgcaacaggcggtggcttttctgcagctgctgctcctgctggcggaggatttgctgctgctgctactggtggagggtttgctgctcttgcctccaaaggtgggggttttgcggctgcggcttcatctggtggcggctttggaggtgcagcccagggaagtggcttcagcagtgtggcccttatgcatgcaccaaaaattgttcttcgtgcattagctgtagctattgtggaactcccagcacctggtatagataccatatcacaggagcactttgcttatcttagtacaagtgatatccgtacctgggttagccaccaagattcccttaccaacttagatgaaattgtatcgaaccaccctactacaagcagacagacatttcagtgctggcctcgttctgggcagatgatgtatcatcagcaacaggttcagagtgatagccagcacctgtcttcaaggccgggtttgcctccggagaagcaatttctcctgcaaggcggagcagattcatcatcagggcttgtcctctcgaccgacgctaaacctcggttaaaatggacatcagagttgcatgagcgttttgtggaagcagtaaatcagctgggagggccggacaaggcgacgccgaaaacaatcatgaggctcatgggaattcctggattaaccctttaccatcttaagagtcatcttcagaaataccgacttagcaagaatcttcaatctcaagccaatgcttcccgtgcacaaggtgtcttaggttgtagtacgacagagatagataaaccatgtgaaggaaatggatcaccggctagtcacttggacctagagactcagacaaacagcagttctatgcacataaatgaagccctccagatgcaaattgaggtgcagagacggctgcatgaacaactagaggtacaaagacacctgcagcttcggattgaagcccaaggaaagtacctgcagtcagtgctggagaaggcgcaggaggcactcggcaccatcgccgtagcagaaactgctgcaactgcaaacgcctcctcatcgaaacgcctccaaaacgagcacacccagcttcaccatcaccagcagcagcagcaggtcggcgatggatcggtggacagctgcctgaccgcctgcgactgcgagggctcgcatcactcgcgctctcatggccacagaggagagcaggacatcctgtccatcggcttgccgccatttgagccggcagcagcaagatcaggcaaggagcaccactacctgctgttccccaacgagccgagcaggcgacgatcgtgttcggatgaacggcgccgcgagatgagcacgctgcaggcgtcggagctggacctcagcatcaatggcaggtcgtcgtcccactctcacaggcgcgaaaacatcgatctgaatggtgcaggctggagctga

SEQ ID NO: 20312 - DNA, 1493 bp, Oryza sativa
  Clone ID: PAT_MRT4530_25692C.1
caaccatctgctatagccaagctaattaattaacctaagctagtaattaatctgaagcttgggtaagctaggccatggctgtggcggtggagatcacacggagcgaggtgctcaggccgtcggagacgttggcggccggcggcggcggcaagaggagccagctcaccgtgttcgaccgtgcagccatggactggtacatcccggccgtcttcgcgtgggacggcgccgcggcgccgtccaacgacgaggttaagggcggcctcgccgccgtgctggcccggtacccgcacctcgccgggaggttcgacgtcgacgagcgtggccggaggtgcttcaacctcaacaacgccggtgtgagggtcctcgaggccaccgtcgccgccgacctcgccgacgccctcgcgcacgacgtcgccgctcacgtcaacgagctctaccccaaggccgacatggagaacgccgacgagccggtgttccaggtgcagctgacgcggtacgcgtgcggcgggctggtgattggcacggcgtgcaaccaccaggtctccgatggccagtccatgagcttcttctacgtcgcgtgggccgccgccgtgcgcagcgccggcgccaccctcccgacgccgttcgtcgaccgcgcggcgatcgcggttccccgcggcccgccggcgccggcgttcgaccaccggaacatcgagttcaagggcgagcacagctggacccactcctacggctccctccccctggagcggatcaggaacctcgccgtccacttcccggacgagttcgtcgccggcctcaagtcccacgtcggcgcccggtgcagcacgttccagtgcctcctggcgcacgcgtggaagaagatcacggcggcgcgcgacctctcgccggaggagtacacgcaggtgagggtcgccgtcaactgccgcggccgcgccagcccggcggtgcccatggactacttcggcaacatggtgctctgggcgttcccgaggatgagagtccgggacctcctctcctccagctacgccgccgtggtcggcgtcatccgcaacgccgtggcgcgcgtcgacgagcagtacatccagtcgttcgtcgacttcggggaggtggccgccggcgacgagctgacgccgacggcggcgccgccgggcacggtgttctgcccggacctggaggtggacagctggctagggttcaggttccacgacctcgacttcggccgtggcccgccgtgcgcgttcctgccgccggacgtgcccgtcgaggggttgctcatcttcgtgccgtcgtgtgcggcgaagggtggcgtcgagatgttcatggcgctcgacgacgttcatgtcgaggctttcaggcaaatctgctactccatggactgatcaagcgaatatatttcacaaaagtattgtatctataatatattgttatagtttgttacaagtacaagaattgtgtgcatatttgcaagattagccagtcaattacgacctgtc

SEQ ID NO: 20313 - DNA, 545 bp, Oryza sativa
  unsure (1)..(545): unsure at all n locations
  Clone ID: PAT_MRT4530_25693C.1
ctaaacagccacacaggaggagggaggatttttttttaaacatacaaactattatatggttccatttaagccccagaccccaccaaaaggggaaatgctccggggagcactatagaagttggggtatttcccacatagggagggaaggtggaaggcaaaaaaagttggggctggagctggggccggatcaaagtaaaccccactaattggctgaagtggaagctgtggcacattcgttggaacaatactaagggccgggtagggaaatggtggggctaccagccggagcggggggaaacacggggggggcaggactggggggtttataaatggaaacgtagcgggtggccaaaagggggtggccactatgctatacgggggccttacaaactcactgnatgggctgaccacttgttgctgttttaggaaatgcaacggaagtggatttggcctataacttggcctaagaggatcaaaccgggcagaggcttggcttgcatcattggcagggggagcaaacccgaaaaggatcctcatgggggggg

SEQ ID NO: 20314 - DNA, 1728 bp, Oryza sativa
  Clone ID: PAT_MRT4530_25694C.1
atggcttctcccgccgcccccctcgccctcctcatcctgctcgtctcgctcgccatcgccgccgctcagtccggccagccgtcgtcgccgccgagaaacagcaccaacatctctgatgcggccgccctgcacacggtgttcgagaagtggggactggaggatggcaccatgccgcaggggtaccacccgtgcgggaagctcgtctggtctaattcgtcggaaatggaagcgtccatcaactgctcttgcagcagcaacgagtgccgcattacgcacctgaacgtcaccggctacaggaacatcacctttatcccagcggagctcttcagtttgacggagctggtctctctggatttaagtaataacaacctgattggtcaaatacctccccaagtcagcaatctatccaagctggaaacatggcacttcaacaataaccggctcaatgagtcctttcctaatgcatctgcacttttaagtatacaatccctaaaaaggtggatgtttgataatgacatcgaaggaatggttccaggatttattgcgaactttgccaatcttacagatttgagaatgtatgggatgaaacttcaaggacctattccagaaaatttctctaaattgatcaatatagaaaatctcatgattggtgaccttgataccgagggctatccttttaatttcacaggagattgggtaaatctttcaacgttagatttgagatcaaacaacttgtcaggatcaattgaccttcagcagtacgatagtagcctaaagtacctttatgtaggtgaaaacaatttcaatggatctctgcctgatcaaatgcctcaatcactagttgctcttggccttactcattattttgtgaacatgtcttttatgcatagaaattatattggaacttcgattggtgcaggaagctcagttggcagtgaaaaccttcgtctcctcaattgtgtcgacatgaaaggatgcaacacaacaggtttaactaatcctgtatcctttgctgtgaactgtgggggcaagcaatatactcctccttcagatccgtcgaatatgttcaatgacgactccgctaaccttggagcagcagactttcatgtggacactaataataattgggtagtcagtcatgtgggcactgatccttttagtaactcttctggtattgtaactaccggcaatggaacaaacatacctgagctctacagaacggcaagaacatcaactggttccttatggtactatgtggttggcttgcctagtgggaaatatacagttcaactcttctttgcagagatagttatagaaagtggatcaggaaggcgtttatttaacatcgacattcaggatcggaatatcatgacagattttgacatttccaaggaagcagggggttccaacagacccattaacagaaattatacagcggatgtcaccacctcagtgttgaaaatacatctctactggaatgggcgaggcacttgctgtattccacgcaatggaacttatggtcctctggtgtcagcaataagagtattcccttccgcggagacgcaagccagcccccctcctgtggcgcttacatcaaggcacgatgaaaagcgaagaggagtggttgcaggaattgctgctctttccatagctgctacagtgatatcttcatcagctgtctacctctggtggaaatgggtttcacttgtgaagcatcgaaaggcatga

SEQ ID NO: 20315 - DNA, 376 bp, Oryza sativa
  Clone ID: PAT_MRT4530_25695C.1
aagccactgagaagcaacactttaaccccaaaagacagattaacgacaatatctgagagaagtcacttgctgtgccaccatggctggacagccgagcagagcatgtaacacacagagcacgagatcactatacaccaaacgggaacgaacgaagacaactcagggtatcatctgactgaagatacacgacgcggaccgttcaatataatattaagtcttcactactcctatatgatgggagaatggcaaaggcaatggcgacgggatcttggcttagttgcagggaagggggtggcccgtccactcaatgaggcagaggaccctgaggtcgatgagcttggcctgggtgatgccgaggaacaccttggtggactcc

SEQ ID NO: 20316 - DNA, 444 bp, Oryza sativa
  Clone ID: PAT_MRT4530_25696C.1
atggtcactggcactggctccgttgtcgcggtagagcttgccctagaagaggagatccatgctggcggccgcctcatcgagcgcaagctttgcaacttccctgcattgaaggccatggaggtcccggggacggagagaagcggctgcgggcgtcccctccgttgcctcgacgagccgcacgctgccggctgtgggtgcccctcctcccgccccgagctccgctgcccactcggccctaagttccgctcactgttgtcccctccaccgccccgagctccgctgccccatcaagaaggctgtggtggtcacgatggctcggtggctcggtctggtgtggttcacagtggccagaacggcgacgaaatcatggcggcagtgctcggtgcgtgctccagagccgacaatggcatggcgacattcccatcgctgcagtggatgaaatga

SEQ ID NO: 20317 - DNA, 151 bp, Oryza sativa
  Clone ID: PAT_MRT4530_25697C.1
atgtggaggcccttctaacatcctaaccaccttattattgttcagaacggcgaccccaacaagaccatccaggtgccccagggcttcgactactagctctacaaccgcgacgacatcaacctgatcctctgacacagggcctcctgcatgt

SEQ ID NO: 20318 - DNA, 531 bp, Oryza sativa
  Clone ID: PAT_MRT4530_25698C.1
tgatatttggctgacatgctcattggaccttgtttccctgaagctatacttctgtgtgcttgttaacctgaaggttgcgtttctgtttcgtaagatcaccccctccagcacagtggaggtaagtccacgtaggagtcctccatttctctatatatctctttgattgctttagaaaccgagaccgaaaaggtttaaagaaagccaaagaacccaatgtgtccagtttatctttcgaaacaatatacttctttcttggtgcatggagggccagacaacccagatagagaaatggagactctatcagagttgtatgttcacgcaaagatgaggtggctgacttaagacgttgtctaattacaaccagtgcattgttaacaatcttgatgtttttttaatccttttgtgcatctggggcaaagttatcttggtaaatttgaatatgattttagaatttggtgaagatacctgatttttaactgatttcggatgctacatgcatgcattgtgcttctgtaaaaaaaaaaaaaaaaa

SEQ ID NO: 20319 - DNA, 1131 bp, Oryza sativa
  Clone ID: PAT_MRT4530_25699C.1
atggcctctcttgtccccgtcgaagtcaccccgctcgacgaggtcggcggcggcgagcacagtgtcccgtcgcggcgtgccccgttgaagtcaccccggtcgacgaggtcggcgcacgcgagcggggaggagcgtcggtggcgagaccacaggggcagagcgaagggggagcttgaggggaatggcagtggagaggtggaggaggaggatgccgctccgacgaaactcccatccggggcgagggaggagcggaagacggagacggcgacagcgggagggaagttcctaaaggagcacgagatccccaaggccaaagatctggctctcaatggaagggcggcgagattgagaacctcactttacgccgacgatgccgctaacttcatttcaccaaccaccagagatatgacaaatctttcaaaattcctttcaatgtttggaaaggtcaccaggctgaaggctctcagagtccgctggctatggtacgaatggacagcccccgataagccatggataggaacaccggtaccctgtgacaatcaggatagagatctgttcgctgtggcaacaaccagcactattggtgacagaaagaaggcgagcttctggcactctcacttgagtgatggtcgaacgccgaagtctttagcgccactaatcttccaagcttcaagacgaaaaaataggtctgtgagggaagccgtggacgcaggagtatggatctccgttatccgcacagaggaactctccacgtcggaacatcttcgccaatacgtagacctttgggttagactacttcagccaccggccttcaatgagcatgaagacaccatcatatggaaactgacagccaacggagtatacacgacaaaattggcatatcggctgcaattcatcggcgccacaagatctaccttcaatgaaaccatatggaagtgttgggcccctccaaaatgtaaattttttgcatggctggtcatccaaatctgtatatggacggtggatagattgcagaagagaggatggcagaatcagcaactatgtcccctatgtcgagtcacccaggaatctgccgtgcacctattgacttcttgtagagtaacctgcagaatctgggaagaaatccaatga

SEQ ID NO: 20320 - DNA, 618 bp, Oryza sativa
  unsure (1)..(618): unsure at all n locations
  Clone ID: PAT_MRT4530_2569C.1
acacacacacacacacacacacacacacacacacacacacacacacacacacacacacacacacacacacaccacacacacacacacacacacactcnccgccccaccatatccccactcacatacatcatcccccgccatcccaccccaccactcgcccgaatcactccaactcatcatcatcatccgccacatcacatatcccccgatcacacacacccacctcatccatccatccccccaccaaagctgccatcctccccactcatccgcaactccaacgtccgatccaaacgctcacccccgcgtaatccgcgtccaactatgtcnacccgcgcaatactacccaatccgtcccaacccaatatcctcactacgggctcgtatacccaaatatatcccataagtccgtgtacctggtaatatccgccccccccacatccatcttgccccagctatacctccccaaaccgtcaaacctatcacttccggcaaattattgttatcgttggttcaaatactattcatgatgtttccacctcccacccaaaacccgtccattaattaaataacccgttcccaaattacccctcgccccaaataatggttaattaaccc

SEQ ID NO: 20321 - DNA, 1389 bp, Oryza sativa
  Clone ID: PAT_MRT4530_256C.1
ggtggttgccgccttcaattccattcgaacgaaacgaggagaagagagaggagagaggagagagaggggtttgtgtggctgcgagtgggccccatgtcgacgtcggcggcggcggcggcggcggcggagcagcagcaggaggagggggagcacgggccgttccccatcgagcagctgcaggcatctggaattgctgctctggatgtgaaaaagctcaaggattctggtctgtacacagtggagtctgtggcctatactccaaggaaagaccttttgcaaatcaaaggaattagtgaagccaaagttgacaagatagttgaagcagcatcgaagctagtcccattgggatttacaagtgcgagccaacttcatgcacaaaggctggagattattcaagttacaactggatctagagagcttgataagattttggatggggggatagaaactggctctatcacagagatttatggtgaattccgatcagggaagactcagctgtgccacacgctgtgtgtcacatgtcagcttccattggaccaaggtggtggtgaagggaaggctttgtacattgatgcagagggaacattcagaccacaaaggctgctccagatagctgacaggttcgggttgaatggtgctgatgtattagagaacgtggcttatgccagagcttataatactgatcatcaatccagacttctgctggaggcagcttccatgatgatagagactaggtttgctctcatgattgtagacagcgcgacagctttgtacagaactgatttctcaggtcgaggggagctctcagcgaggcaaatgcacatggctaagtttctgaggagccttcagaaattagcagatgagtttggagtggctgtggttatcactaatcaagtagtggcacaagtggatggttctgccatgtttgctgggccgcagatcaaacccatcggtggaaacatcatggctcatgcttccacaacaaggcttgctcttcgcaagggaagaggggaagagcgaatatgtaaagtgataagctctccatgcttggctgaagccgaagcaaggtttcagatagcatctgaaggcgttgcagatgtcaaggattgagacaatctctgctcagtgctaagcgctaactggcaacagcttcccagttcccacatgtgttgctctcctgctgattgcgctaccacccctgaagggttcaactgatgtgatgctcctgttctgaatccgacaaccacttattgtcgagtggaggtgcacatctgtgtcactgttgtagtgttgtagtataaaacgttgtctgccctgcaaggctgcaatgcatgtaatgtgacattggtttacagatattgaatgaattgaagtaagttttctgcc

SEQ ID NO: 20322 - DNA, 293 bp, Oryza sativa
  Clone ID: PAT_MRT4530_25700C.1
tttttgccctgatcatgctgtttaataaatgcaagcactgacaggagcacaacactaaacaatgatagagggacagataagggtagggctgaacatggataattgggtccacatgaaaattggtctggtgtgatcaatgacaaaaagactgagctctactttgtctaaaaaactaaaatacactatataacaaaagatatagctcggtatgacacaatttattttgcttgttaggacaaacaaaaacgaaaaaacaataatggggcggacgatttaaaggatccaaggtttcg

SEQ ID NO: 20323 - DNA, 2310 bp, Oryza sativa
  Clone ID: PAT_MRT4530_25701C.1
ggattagatggtgaagctactgaacctatgattaaagagttagaagatgaaagggaggaatcacaagatcctgaagttgagtttgctatagcaggtgctgtaagggaatgtggaggccttgaaattatattaagcatgattcagagcctacgcgaagatgagttaagatcaaaccaggaagaattgggttcagtccttaaccttctgaagtattgttgcaaaattcgtgaaaatagatgtgctttattacgcctgggtgcattgggtttgctacttgagacagccagacgtgcattctcagtagatgcgatggagccagctgagggtattctattaattgtagaaagtcttacaatggaagctaatgagagtgacataagtattgcccaaagtgtttttacaactactactgaggagactggtgctggtgaggaggcaaagaaaattgttctcatgtttcttgagaggctgtgccctcctgatggtgccaaaaaatcaaacaagcaacaaagaaacgaggagatggtggcaaggatcttacctaacttgacgtatggggagccagcagccatggaggcccttgttttgcattttgagccctaccttatgaactggagtgagtttgaccagttgcagaaacaacacgaggaaaatccaaaagatgaaactttaagcaaaaacgcatcaatgcagaggtctgctgttgaaaactttgttcgagtctcagagtcactcaagacaagttcttgcggtgaaaggctgaaggagattattctagagaagggcattacaaaagcagctgtaggtcatctgagggaaagctttgcttctgcagggcaggctagctttaggactagtgcagaatggacagttgggttaaaactgccttccattccactcatcctctcaatgttgaaggggctcgccaagggtgatctgcctacacaaaagtgtgtcgatgaagaagatattctgccattgctgcatgctttagaaggagtgcctggtgaaaatgaaattggtgcaagagcagaaaatcttttggatacccttgccaacaaagaaaataatggtgatggcttcttggcagagaagattcaagagctccgacatgctacaagggatgaaatgcgacgccgtgctctcaagaaaagagaaatgctactccaggggctaggaatgcgacaagaatttgcttctgatggaggtagacgtattgttgtgtctcagcctataattgaaggcttggatgatgtggaagaagaagaggatgggttagcatgcatggtttgtagagaagggtatactttgaggccgactgacatgttaggagtctatgcatttagtaaacgggtgaacttgggtgccactagttcaggcagtggccgtggggactgtgtttacactactgttagccacttcaacatcatacactaccaatgtcatcaggaggctaaaagagctgatgctgcactgaagaatcctaaaaaggaatgggatggtgctaccctgagaaataatgagacactgtgtaattgtatctttcccttgagggggccatctgttcctcctgggcagtacacacgatgtctcgaccagtattgggaccaattgaattctctgggacgagcagatggaagtcgccttcgcttgttaacatatgacattgttctgatgttggccaggtttgcaacaggcgcttctttcagcactgactgcaaaggtgggggtagggagagcaactcgcggtttcttcctttcatgatccaaatggcttctcatcttgtagatggaagtgccaaccagcagcgtcatgtcatggccaaggctgttacctcgtacttgtcctcttcgccttcaactccagaatctcctgttcgactttcagctctatctggagctcgtgggggttcagtccgatcagatgaaggttcatccgccgattcaaacgacagcaagaggctctttgccattgtccagccgatgctggtgtacactggtttgattgagcagctgcagcaatttttcaagaaaggcaaatcgtctggcacgcaaaaggtcggtgagaaggacggatcaagtggtggtaacctcgaagcttgggagattatgatgaaagaaaagctggggaacatgaaggagatgctaggattctccaaagacgtgctctcatggctcgaagacatgacctcatctgaggacttgcaggaggccttcgatgtcatgggtgcgttgccagatgtgttctccggtggccacactacatgtgaagactttgtccgggcgatcatacacggtgcaaagagctga

SEQ ID NO: 20324 - DNA, 15590 bp, Oryza sativa
  Clone ID: PAT_MRT4530_25702C.1
ttttttttttttttttttttttgacttttttttggctcttgtcgtcaataacttcatttacggtcgttgtttcaccttcatgttcttcaattgcaggtggagcaaggaatgtgaatggaggctggtaaatgccaggacaaaagctagcatacaaaccttgcccagtttcattttacaaggaagaattataatgtttacagctgccacacaaaagctgactatccttacaaacatacaggcgcgtggcaaagtttcaacacaaattgtagatcctcggaaaacttcgttcagctctttgcaccgtgtatgatcgcccggacaaagtcttcacatgtagtgtggccaccggagaacacatctggcaacgcacccatgacatcgaaggcctcctgcaagtcctcagatgaggtcatgtcttcgagccatgagagcacgtctttggagaatcctagcatctccttcatgttccccagcttttctttcatcataatctcccaagcttcgaggttaccaccacttgatccgtccttctcaccgaccttttgcgtgccagacgatttgcctttcttgaaaaattgctgcagctgctcaatcaaaccagtgtacaccagcatcggctggacaatggcaaagagcctcttgctgtcgtttgaatcggcggatgaaccttcatctgatcggactgcagaggaagacgtgtcggcagaaagcttgagggtggatcgtccatgcttgtgttgcatgtaagcatggtagatgcccctctgcaggaaagcggggcggtgctgcagccaactctcataggactcagacagcagagaattgaccatcatgaactgtacagtctcctccgaggaacctgaaccaccacgagctccagatagagctgaaagtcgaacaggagattctggagttgaaggcgaagaggacaagtacgaggtaacagccttggccatgacatgacgctgctggttggcacttccatctacaagatgagaagccatttggatcatgaaaggaagaaaccgcgagttgctctccctacccccacctttgcagtcagtgctgaaagaagcgcctgttgcaaacctggccaacatcagaacaatgtcatatgttaacaagcgaaggcgacttccatctgctcgtcctagagaattcaattggtcccaatactggtcgagacatcgtgtgtactgcccaggaggaacagatggccccctcaagggaaagatacaattacacagtgtctcattatttctcagggtagcaccatcccattcctttttaggattcttcagtgcagcatcagctcttttagcctcctgatgacattggtagtgtatgatgttgaagtggctaacagtagtgtaaacacagtccccacggccactgcctgaactagtggcacccaagttcacccgtttactaaatgcatagactcctaacatgtcagtcggcctcaaagtatacccttctctacaaaccatgcatgctaacccatcctcttcttcttccacatcatccaagccttcaattataggctgagacacaacaatacgtctacctccatcagaagcaaattcttgtcgcattcctagcccctggagtagcatttctcttttcttgagagcacggcgtcgcatttcatcccttgtagcatgtcggagctcttgaatcttctctgccaagaagccatcaccattattttctttgttggcaagggtatccaaaagattttctgctcttgcaccaatttcattttcaccaggcactccttctaaagcatgcagcaatggcagaatatcttcttcatcgacacacttttgtgtaggcagatcacccttggcgagccccttcaacattgagaggatgagtggaatggaaggcagttttaacccaactgtccattctgcactagtcctaaagctagcctgccctgcagaagcaaagctttccctcagatgacctacagctgcttttgtaatgcccttctctagaataatctccttcagcctttcaccgcaagaacttgtcttgagtgactctgagactcgaacaaagttttcaacagcagacctctgcattgatgcgtttttgcttaaagtttcatcttttggattttcctcgtgttgtttctgcaactggtcaaactcactccagttcataaggtagggctcaaaatgcaaaacaagggcctccatggctgctggctccccatacgtcaagttaggtaagatccttgccaccatctcctcgtttctttgttgcttgtttgattttttggcaccatcaggagggcacagcctctcaagaaacatgagaacaattttctttgcctcctcaccagcaccagtctcctcagtagtagttgtaaaaacactttgggcaatacttatgtcactctcattagcttccattgtaagactttctacaattaatagaataccctcagctggctccatcgcatctactgagaatgcacgtctggctgtctcaagtagcaaacccaatgcacccaggcgtaataaagcacatctattttcacgaattttgcaacaatacttcagaaggttaaggactgaacccaattcttcctggtttgatcttaactcatcttcgcgtaggctctgaatcatgcttaatataatttcaaggcctccacattcccttacagcacctgctatagcaaactcaacttcaggatcttgtgattcctccctttcatcttctaactctttaatcataggttcagtagcttcaccatctaatccctgcaatctgtaagtgactgtcattggcggacaatctctgacagatgaagcagcagcagacagttggctagcattggacaaagaatgttgagtttgaccatggtgctttctccatacttgctcatagacttgggagatgctaaggtcaagtgaaattatattcccagcgaccagtaactccataccatagtcatcttctaaaagaccaatcaaatcaagttgatggcatattttatttttcacatctctcatcagtgggccaatctcagcactggagtatggattccttgtcatagagcccctaatgaactcttcttgagtatgtgctttgtttagaattaagagataaacaggttctggctttactgggcaaattaaattgcagagttgctccaaaatgaacagagatgtccgtctcttcttttccttcacatgcttttgcaatccagagatgcaagcacgaataaattgacgtttgtttgcagtactctctacaagcaagctatcaagaaggtccttcaaaagcctattgcagtcattaattaactttgtcttttgcacaactagcccacggataaccagaaaagcctccagcacatcagataataaattatcactcataaatcttgctctaatattgggaatttcaagaaatttgttgagaagctcaacaagcttgtgaagaatgaatccttgtgaaatgtcaatgctaaggcttctctcctgtgattcaacattggacacttcttttgttatcaaagaacataatgtggtcaaacaaccacgaacagttaagaaaagacgtgaagcttctgtatcaatcattgtcccaagtaactcaaagtactctgcggcactttcaccagctgacagtgttctagggagtaacgacataagcaagttcaatagttgaaactgtctggatgagtttgatgggcataacaagcttatgagagtgcatatttcagatcttattgactgagaacaagaacttaagatcaagtctgagacccaggagcccaaggcaaattttgagaagtcacctttagatgactttcgacatgcacgacgcttccacctcagtccatattttagaaccaggtagtcagatttttgtgaatcatgccgtgttttttgcagtcctttcacagcttgtgatactttatactgcctcctcacaaaatcaagatatgatgcaccgctctcccattctgaatagctgagaagtgaaatatcctgtcgtcttcgacttccatctggaatctttcctgataactcagactgagtcttggaagtggaaagattagttactgaatggccaactgtatcatcattctttgcctgcatcaagctagattttcccataccaggctctttttccccagaatcagattttggaggagtacaagcctgagaaatgattctcaaacaagggagaataatatgctctgaaattgcaggatgctttgctccaactttaatagaagaaaacaacaactgaaaagcaacacgaagccttgcctcccaaaactcatccacaagggcacatgtctctgaaagtagaagtaactcttctcgtgtagattgtgaaatatccatggagcgatggtgctcaagacaatacatcaccttcttctgaatcaggttattcagttcctgcactgcatctgcatcaccttcagagaaggaagaaagcacagctcttgcaagagtgcgtgcagttctagggccctgatgaatgttgttttcaaataattctgacagaatgccagcactaacaagttgcttcctgctggttgcatgcttggacagaacttgtaataactccaagcattgagttacaaacgtggtactacagccatagcaactacttggagaccttggtattgaacaagccggtaatgcatctgtatcattagaattcttctggtgcagatatgtcattagaacacggcgcagtccttgtaatgtctgaacactcttgctcactgaatcaaaagctgctttgcacttttcaccatacaaaacaccaagaagtgcaattttgcgatttactttgcctgtaggcccagggagagacaccatcatctgctggacagcatctttctgttgtgaatcaatctcctgctcacctatgcttgatacaagtttaatgagaggcttcttaaatcccatcagctgctgatatcgcctgtgagcattttctgattctgactcaattgctgtcaatcctttcctcatatcatcatcgttttccatgttatcgaatgagaaacttggttttgccatgaaatggaattcaaaacgaccatatttactgtatccacactcattgcagaggaaagaatcaaggttttcatagttaatatttctgcattgtctacattggtatgcattttcatgacaattgctacagatgccatgcttatcagttacagacctgctacaccgaggacactgcaatgactcaagggaagatgcttgaagattttcataaaatgaatcaagctcaatcatgaaattgcatgctgtgattggaatggggaactcaaccttcaattctgtctgattaaatgtaagatggcagcttttagcacgcttccagagagaccaattattcttcagttctgacaaatctgttaccggcctgttgttgtaatataggttaagtactttcactgactttgacttgcgagcatcataaacattcattgtcaccgactgtatagtaaagcttccagtacatttcactattatcctattgtcagtgaatttggtctcagacttcaaactttcaagcttcattctcgaatatggaacatctgggcagctgcaggtaacacaaggctcactttccaagtaatagccatcaaactccactaagcaactcagtgtattgtatatacgggaattcggatgatttgccaatagctcattttgagaatgaagtgtgtcgaaaatgcagcttactacatcagatgttaaacatttattcagaagttcagtgtcactttgctttgcagtagaatcattagcttttcctagtaaacatgtcatgagatcagtgtactcaatgatgttctgtccatacatgggtagatacttgaccttctgcagtagagttgttaacatgttctccttaaatgagctctttgcatggtaccacagtccaaatagaacacttttggcctcatggcgcacactcgttgagttccattccaacaagaatgtatcaacaaaacgtttcaagacatcaccatccttaccagtaaacactaccacagcctgctccatgtccatgcaggatttttctgaggagccttcagagctatcgtcacctttccgcttcttttttgaatctgatgactgtgaaccagtccttgtggaacttccaatatctccactctctgttttctgtgcattatggttagcatcttttcctgaatagaatgctagatttaaaagcttgagagtctgaacgatacattcttcactgaaatagtagaagttatccattaaaaaaggaagaagatctgtgtgcttcaagcaaaatttttgccaatttcttggccttgatgcagccacatcacaaagagtagacaaacattttataagcttaacacttctctcatagggcacaggatttcgaaaacctccagacttattaatgattttatgaagtttcttgacttcatgtgaatattgccatgaatccctgacactgtaataatgagtcttgctgccacacagatgaagaaatagcctccttgcatacctccgaacaaacgttgtatgagcattgctgatataactacaaagaacatcttggtatccatctaactttagatccttggtgttgggaaccttgcaacttttatccttatcagctgatttttccttttctggtcgaaccatgctatatacaagcctgaatgtattctccaacaacaatttgtagtagtccatgaaaagatcagtgggatgggacttggcatatgaatctgagaaaaagggagagaagtttcccgctggtaactctctccgtactgtcaatagggatccacagcctgaactagaagagccaccttcaccatttatggatgatgacttgaaaacatgaacaagttgttgcagtatatccatcaaatagttcagaaaggattgctgcctgagggcagaacaagcacgaattaactgggaagcaaactcatttttatcatggtcatcattggaggattgaagagtcgtggttgatacttggacatgaacaggacctttttctgtcaaatcagagctcccacctgacttcgaatgagagccatcagtcccaggctgatgccagttacggaacataagtgtgaaaaacatgaaaacaaggatagatacttctccgaaagaacaacgtgttttcgcaggaaatggtttacttatattgatttcatctataagccacttcacaaacttttctaaatccaaattttcaggttttgtgctatccatgaaaggtccgccaactgcagatgaaagtctgtaaaacagctgcattataggtatagctcgagtgccagcagtggtctccatccagccactaagctcttcaattaaacgactaagtagcaaagagttaatggcccgttttgatgcagaaattgatactgtcctttgttcggtcatggaaccatggaaatctacagactcacttgcatccagtacatgaattgacgatggtgaggtctggatagttctatcagcaggagcttgaaggacactggaatctgttagttcatcaacagagaaatgaatttcatttccttctcccccaaatgtatcaagctcaattggtattgctgacatgggatgatctcttgaatgtggtgcaggtagacgatctgcatcaagtatctcatagcatgtttcacacaagtcaaagtctggacatatgttgcagtgccaccttcgcctaagtattggaacagtggaacaaccatcacaacaatattgcactgaggatgtggcaggatcttcttcaatcatgacctgagcatttccagtggttgaatttgaagcagcacttgcttttgcatgattgtcaggagcatcatcattagcaatcattgtctgctttgggaaagggacttggagaaatcgtgatgaaatagccaaactgcttgaagtctggactgcttcatatggcgcaaatagtaacttcttcaataaagcaactgcaggtgctactgagactccagatttttcatttgaatgtaaggccaagcattcagcatagcctagctttcttgtgacattaaggatagcaacagcgtgggtctcaagaaaagaagccaagtttgatttcctgtgcacagcaacttttgacactgtgtggatctgggctatgaattcttttgtaacccaactggatgcagcacctccaactcctattcttgaagtaattgatggaagtgattttattacccctagaaggcgcatagtatccttaacatgatagtatatttccttcttcgggaacacagcctgaaggacacggcatgcagcagaatgtaacagaggctccctgtcactctgaaagattgtttccagcaaagatctgcattttagattgttaagttccatgtctgcatcgattgtgtccgtacagaaacctggttggcaaagcaggtatatccgtgagaggatcctgagagcatctgccagaacctgctcctggataggagcagcttgcatcgtttgagccttttttccagactttccactagcagaactaccacctaggacatgcgcttccatatcaagtgcagcatccattttttctttccatccaaattcatctttggcacgaccatacacttcaatagaatctatccgaggaatagatgaaccatcgaatgtccgaccaacaacaattgtgaattcttcgtcagccagaagtgattcagcagtagtgaacggaatatcataccaagatctcatgccttcatccagcttaatgactctatgaaaaattgtgatttctgaagggatattgctcgcagatgtgttacccacatggattcggcaaccaaccatgacaatatcagggtttgggtttgaaatagtcaccttgaaaccagcggatgtcaaactttctaaataaccatcatctgagcttaatctttgcttgatgctttcagaatcactacttttggttgtgtcactattgaatttcacatcacatgtgatacatgtcgtcttctcaaaaaaatcaagtggaaattctggtttggtgccagcataagctctactactaaggatactgctgcccaacttctttgtctgttctgcagtaagggttgttgaactatcacttccattaggtgtatgtgaataaatgttaaggcttccatcatcatacaaaagaagacaatgagctttatctttggataaaggcttatatgcagcaataccaacaactggagcatttgaaccacttgcatgtctcatgttatgtgcaaacaactcgtgaggacccaaagatacagcaagaggagagtttgatttaaattttgataggcaagcaagggccccactgccagctattagctctctccaacggtacaggcctgctggtttcgatttaccgtcttgatcattctcacatatgtaggacaattcagtaattgacgaggaatcgccatccaagcgccccatgtaagttgtgccatcttgatgagacacaaatagaagcctgtaagttgatgagaagtacaatgagagacctttgtgcatagatactgcatctttcaccaagactgtatcagtcaatgttttcgcaccaacatcacccgccaaggcaacattcaacctatacaaaaggcctccttcagaaagaacaagaagcaccaactttcccattgaggagggaacaagcgtggcatcaacaattatatcatcagccacagtaaaataatgcaacgggctaatgttgtcctgcgagagatcatatatcttcacaaacttgtttgttactaccatgagttgtacctgagaacctggaacccactccacgcaacgaatatatgctccttgcagagcaagttcaattgcaagccgatcagttacctcaccacggctatttaatgttagtacttgacaatcctcatacccggcaacagataggtaatgttccaccaatggattgaaaatcaaatgaacaatttcaaagcgaactatgttcctggagagaggcttcacatttgttttgtctgctgtaataggagctgcagtaggctgtccaataatttgtcccacatcaaatatagctactttatccccttctccaacagcaagcttacctcgaatgctgatacttagcaaggatttagtaagagacccatttgcaagatgcgacttaagttcccttgaatttggatagtctgcttttatcttcaggtccagcgatccacttttgaaagctttcttcagttgaaaaatatcagaagcttgtgacatgggcatttcacctcctaaaaatactttcctgtccttcaaaagattcagctctctttggctaagtatcattggaagcaacttcttgcagagttcaagcattcgaacttcaacatcaagatttttaagaaatacaggaagctcatcactgaagcctttcggcacagatagcttgatacaattctcagcttcagttgagatgtcatcttcaaaatcagaaccactgtctgcaacaggctccacatcctcatgataaggcaatattggctggaaactgctcgtgacaggaggagatacactagaggtaccagtaaatttccgaggtttcaagcactgacagctgcttcccctcacaccaccagctccacaatcacagaagaaacggcttgaccgagaataaacaacacgatgcccttgatggcacaccttggcacagacagaacagcaacccttggaaacagtcaaatcacatgtatagcagaagtaccaatgctgttccatgaaattgctaccactggatgtaaatgtgcacactttggttgcaagagctctttcactgtttccatcctcttcctcatctctatcaatactgaccaattccccatcagatgttccatcatcttcatcttcctcgccggagctagcatcacaatcaacagtggaattactttcttgattggtgcgaagaacaagactgtctgaattcttcagttgctttgggataagagatcctgaaccaaaactgttcccagaacttttagaagaaagcctcttaagtgcacttctgtttgatccagcatcaccaaacactgactccacgcaagtaaacagaaacttcaaagtatgaagcaaaccctcattaccaaccatgttctccatcagtttcagcgttttttcaaagagctctttgaaatgtgattcatcagttgagagttgagcaataaaatggaaatgtgctttaacaatctgaaggtcacatgacatgaatgctttatcaagtaataaaagcattgagtcaaagaggtgatgctgaagctctttggcaagtgtctcagatgaagggcaggtaaggcgcataagaaaatccattgtcaattctcttagggctgtaggacctgatgtagtactattggtgctttcaatcttcatagaatgacccaatgttcgaaattctagccaagaagaaaagcaggacacgtccattccaataaatttgtgttgcaatttctgcttaagatcgggacaaagaccatcacctagaatatcagtaaacaagttaagaatcttcaaattaacctgctcagactggcatttgtccagtacatcaataaaaacggacatatcagcctgctcaagagcaaaaagactgtttgctctttcaggtgctccttctgcttcaccaagaaagaatttgaacacatttgttttagatcggaggtcttccactagatcaacaatggtaaaaactataatttctttcacctcattatccatgatttctttcgagttgatgtctgccaggtacccttctaactgcttaagaacaaacaagtcgctatatccagccagatcatccttctggtcaattagagacataaatatagaatcacacagcttgtgaatggatgtgaacattccatctgactttatagtcattatcatactaagtagtttagaaataacacccacatcaactagatctctgtcattgggctgcatgatctttatacatccattgagcatgtaaatgatctcatttatcaccagaacacaagaaaggatagcactgttattggaggcagagttcactggaaatccatgtaacaaacacttcaagagaaagtattctttccgcccatcacccaatttcgtagcaactcgatctatccttgatgaaaggtcacatataggctccagcattccaatgtttgaaccaactttctcaaagagaagaggatgcttggatttgtcaaatgcagaatgtttaagcagccaggaaggataacaatgatcctcacaaaccctccctttctcaacaacaaatgagataaatgcttccttaaaagcatgaagataagtctccaacagtgatgacaaaacatgtaaacaatgtccactattttcacttatgaatgtaagcaaactcttcccaaatatctctgcatcttggaccacctgctttccctgcaaatcaacatcaggtttcccacttgtttggtgcccccaaaaaccagtattaattagagacagaataagagaaagccatgctcctttcctgaggaaatcccaactttctagaacacttggaccacagagaatctcagactgcaacaacttcaggaatccaaaaattacagaaggcagattggcgtccaaaagtgatgaagcatcatcacttacactgagagcaaacgaaatgaaaaagtttacatcagcgaagtcaggattcaacagaccttcatatccaccgctgtaacctataccagagagagtgctccagcaaatcaaaaataaatatctctccgcaatgagatcctcagccacttcagctttcctgcccttccaaacaccaagaatttcagaaatgtttgagcccaaattagcgaagttcaaacccaaagcttctagagcagacttgtcaaagtagatttcagcatgagctggagtcacgtcaatcaattgagggaacaaactactagttgaagcatactccttgacagtatcagcaaaaatgccctccacaacttcagctgtgaaggatggcaagtaatcattcatggagcgtgactgaccttctttcaacaaaatatccctcattctggatcttaacctcataagcaaccatgacggatgtgttaccggatacaacaacatatgccgcaagacaagcaggagtcttgacaggagtaaagcccatcttgtgagtccagatgcatttactccaagtggaggctgtctcattttctctagggaggaaagtacaatattgatcaaatcagccttttctggcccagtggttgaatggaatgccaccaaaagaatttctagatggaaggcacaaggaagaattctgcagaaattattcaaatctaatgagctggatgatttatcatttgctttctccaaaagataaccaacatactgaacaaaaacttttcttccaagattatatattgagcttgccccagagatgatagcacgtgccactagagcaagcgtataattgttgtaagtatacatcccattctcagcattaaacactttatccacaagatcctctcttaaagatgccgggcattcatgggaaataaggaacatctgtagaagttcaaaacaggctgtgttgatatgcaatgagttaacctcagaaagagatgttgtagcaatgctttcatcagagcaaaaggctggacattgaagtattgacagaaactgttccaaatgattgctgtggaacttcctgcaagcatccacatatatagcagtgcaccattcaggggagaagatggacatcttcataaagcatatcaaatcagcagctaattgaatagggccatgctggctgctcgaagggccactccctagagaaattggctgttcaacactgtcagctactcctgtagagcgggcttcagcaaatagattaccaaaaagtgcttcttcctcatgactagccacagactccaactctgaaagagtaacttgctttgtgcaactcatctgcggcttctcaagtagaggcattgattttactccctcttcatggaggaaaaagatgagatgtaccaaatcatccaaccattgctcttctgaagggaagattaattgcagatactcctcagatgtgtatttcttcagcaatggcactttctttgaacgagcatggcaagacaaaccatctgtctcggaattgcatgaataacctagaacatctttgccaggtctgtccctgtcaacacgacttgtccaacgtttggtatcattgagaagtttaagcacatattgaacaatgtggggtgagtaaactaaagggggcatcaagcaagcagcagatctgtcatatttccatttttctgggctgaaaatttccaacagggaagcaagtatgcatacttgtactgtacaacaaatatcactgttgcagaagataatatgaattagctgcagaaattcgtcaagtatttgcagcaacacagttccaacaccatctccagaaaacactctgtcatggttagcgaacttgaacttaagtttaaacaagactggcagactatcagtacatcttgctactgaacaaagcatcatcgcatcagaagcatcacaaggaaattccatagccaaaccatgtactaacttcaaaattctttggccaaaagacaacctcatattaaagttggtatcttctatcacatccaaagctggagactggcaaagcttctgaaccaatgtaagaaggactggtatgcaatgtaggtgaacaactgcaaaatgctgtgctattgacaccatgccgtttggggatgctgtgtgtgatgattcagtattctctgcaataacataatcttgctgtaaacattcaggtgataacgtcaaacgaaaccgttgcagatcatctccactatttgagcaattgaagcctggttgtgccatcaaaaaacaatcagcaaataaagcaccaacattccataaaccttttaaatagcagaaatacttctcttgtgggctgatacgctcagaatcaacttggacagacgaccactgctcaataacatcatttacgacactgggttccaacgagtaaaccttgctgggagtccctctaagcagcacgcattccatgaaataggcaacctcgttcagtaacccatagtcttcacatgcatatgatgatttttcgagatacaatagacagaattccaaagacctctccacaatctccacaaccgttgactccacttgctccactaaaacaaaagtgtaacgcccctcaataaaggatggtggtacactcaactcaactacagtgctgacttcacatttcatattattttcgaaaccaaatggaatggatggatcagaagtggaaactggtaattgattgtttttgcgcattacggcgcgcgcggcggcgaggacggcgcgcgcgcgggccgggtcggccggcgggcccgcggcgagcgcccccgcgagggcctcgagccccgcccgcgccgcgggcccgcggaggcggcgcgcgggcgggtcccggtcccccgccgcggcggcgggcggatggaggaggaggtcgagcagcgccgagatctccgccgccat

SEQ ID NO: 20325 - DNA, 288 bp, Oryza sativa
  Clone ID: PAT_MRT4530_25703C.1
atgggtcgttatatcgatcggagcttcaagtcgttcatcgctccccctccgccaccgcccgccgccgtcctcggctccccctccatcgccacacagctacctccgtcccctcctaccgccgtcctcagtgccacggcaggaggacgtaggttcacgaagacgcaattcaagacccaagtagctgctgcctctgatgcaggcaacgatgatggtagcaggcagcagcagtgtactgctagtattagcttagaccttaaaagaaaaattgtgtccgatcggacagctgca

SEQ ID NO: 20326 - DNA, 972 bp, Oryza sativa
  Clone ID: PAT_MRT4530_25704C.1
atggccgagctcgatctcaagctcgccggcggcaaacggaggctcggatggtgtcggaataaaaataaaaacagcagctcgcggaacggcttgaaggcggaggatgatgtcggcttcacggtgacagcacggtccggtagatggagagctaagagaagggtcttggtgacaatcatggcgcagtggcttagtctgagatggcctgggtcgacgggaacggcgacgcgaacccgcggctgcgcactggacaccgggagcgacgacgagctcgacgcaggactccgtcaagcactgctcgggaaggcatcctcgtggccctgccgatcccgaacgccgttgccgattcaccaccgccacgtcgccgtcgcgctgctcgagccaaccatcatgcctccttgtgcacttggaggatttgatcttgatatcttcttgttcatccatgatgtgagcaatggttgcatctgtggtagccatggtcacatcatcctccccttcttcacggaaaaccgtcctcggtcttttggaatcatcgtctttttcgctttggaagttcgtggattcgagtcgtcgccgtcgctccagccgtgcttcgccgtcgctccagtcgtcgccgtcgctcgggaaggttgccatcgtggtcgccatcgcgtcgccgtcctcgtccgccccttcgccgtcgctgaagaccgctggagcaccgtcgccgtcgtcaagccgaagagtgccgccgccttttcctcgacgccgtcgccgtccgttgctcctccgccgcttctttggtcaccggctgattatgtgctgggcatcaacgtgataaagatgagctacctcgtcaggtacggtgacttgtacccgcagctggtgcaccatcgcggcgcgtccatcccggtggatgtggacactggttgcaacagacacgagtgctctccgctctcctctccacctcctttccttgcacagtccttgtcataa

SEQ ID NO: 20327 - DNA, 616 bp, Oryza sativa
  Clone ID: PAT_MRT4530_25705C.1
ggataatcacaattcacaatttcacaagtcataataatcaatcataatggtacagatacataatgcagtttcagcttttgaaacactcggtacatactacatacacttcagttgtttgttcaagacggtcagagggagaaagacagagagaaaatgagatgagtcactcaattatggcggaggcaatggcgatggtgttgctggagagctcggcgaggatcttgtcgaggtcgcccatgatcggcttgagcccctcgcgctcgctgaagccgtcctcgcaggtgtcgacgtcggtgcgcgcggagtcgagcatggtgtgcgccgtgtccttgtcccccttcttgagcgccgcgtccgccgagtccaggttggatttcatgtcgtcgtacatctggaggcagtcgcccatggcgtccttggacacctcgtccccggaggccgcccccatcctgttcgtcgccacgctgatcgcctcctgcaccttggcgcgcagcgcgttcatggagagcctgaggacgccgatgtcgtccagctgcgccggcggctgctgcggcagctgcccgatggaggactcgcacaggtcggcgtggtccgtcttgccgcacagcgcctacaa

SEQ ID NO: 20328 - DNA, 114 bp, Oryza sativa
  Clone ID: PAT_MRT4530_25706C.1
tactgatatagaaaaggagatgaacttcgagtgtatttatgggtaattacgtagaacaaatgatggaaagtaaagggctagctagttaatcatattgctttcattgttaatata

SEQ ID NO: 20329 - DNA, 960 bp, Oryza sativa
  Clone ID: PAT_MRT4530_25707C.1
atgagtagcacaaagctcatcttgtgcttcctacttctgttcctaaccctcaatctttcagcttccagcaccggtggtgaccatgaaagattcatgtacgccggcttcactggtgccaatctcaccatggacggctcagcaaaaatcataccaaccggcctgcttgcactgacaaaggacacgttcagggctcaaggccacgcgttgcacccggctccactccgcttcggtcagtctaatggaatggtgacatctttctctgtttcatttgtgtttggtattctctcttcatttggtgacataaggggccatggtttcgccttcttcatagctcccaccaataatttctcctccgccttcccaatccagttcctgggccttctcaatgataaaaacaacggtagtttgagcaaccatctctttgccatcgaatttgataccatccgaaacaatgagtttggggacatcgacaacaaccatgttggcattgacataaatagtctgaattctatgcaatcctatcatgctggcttctacgatgacaagggtggcacattcacaaacttgagcctcatcggaggagggccaattcaagtttggatagagtacgacgggttcaaaattatcaaagacattgcctcgggcctgctctacttacatgaggagtgggacaaagttgtaattcatcgagatgtcaaggcaagcaacgtgcttattgataaggagatgaatgcaagattaggagatttcggcaaagcaactacacttagtgatgtctttggttttggcatcttccttcttgaggtttcttgcgggcaaaagcctatcaggcaaaactcggaaggacgtcaaaggcagaggttccggagacctgctctcccgatcgctggtgcacgccggcgagcgggatggagtagtctacgagcgacggcgcagtacagagtaggaggcaaaccctag

SEQ ID NO: 20330 - DNA, 279 bp, Oryza sativa
  Clone ID: PAT_MRT4530_25708C.1
tcgatcgagcaaagaatgagagagcttggtgagctgcacagatggccctctccgtgatggcctcaagtgccacgaccgtatgtccgttgcacgggcttaagtccaccgccggtatgcccgcgtcccgactgtccggcggctccagctcatgcaacgtcagcactggcaggaggttcaggtgcatgcaaccgtgtcctactgaggacatctaaaagtgggagaccctctgctacatgtcaccgttcagcgtggaggaacgtctgaagcatatctagtacc

SEQ ID NO: 20331 - DNA, 272 bp, Oryza sativa
  unsure (1)..(272): unsure at all n locations
  Clone ID: PAT_MRT4530_25709C.1
agaagttcatggaggtcaaggtgctgaactgctgatgttttccncgagtcagcagaagtnaattaagagcagaagtaaattaagtttacagtgtgtgtaaaatggtaatttatactacttacaatttttatttcataactgaagtgtcgttagcttatgtcctcgtcgagggcaacaagctaccttagagatatcaggncaacaaatgaattatgtaagctttatatactttgagagnaccggnaaaaaaaaaaaaaaaaaaaaaaaaaaaa

SEQ ID NO: 20332 - DNA, 283 bp, Oryza sativa
  Clone ID: PAT_MRT4530_2570C.1
gaggtgctgcaagcccaaggagaagacggcgcgcccgaacggcgctccgccgagtaggaaaagccggctgagccggccggcgcggagaaaaaataaggccgatgccggaaacgcgcctccgccggtcaccgcgcaaaacgaaggcaagcccggggtgaagaagttgacgacgacgctgaagaagccgacggcgcgaccgcccggcgcacgttcaagcggcacaagtcgtctgaagcggcccgccggcgtggaatatagagaaggccgcggggaaaaggcctag

SEQ ID NO: 20333 - DNA, 1911 bp, Oryza sativa
  Clone ID: PAT_MRT4530_25710C.1
atgagtagcacaaagctcatcttgtgcttcctacttctgttcctaaccctcaatctttcagcttccagcaccggtggtgaccatgaaagattcatgtacgccggcttcactggtgccaatctcaccatggacggctcagcaaaaatcataccaaccggcctgcttgcactgacaaaggacacgttcagggctcaaggccacgcgttgcacccggctccactccgcttcggtcagtctaatggaatggtgacatctttctctgtttcatttgtgtttggtattctctcttcatttggtgacataaggggccatggtttcgccttcttcatagctcccaccaataatttctcctccgccttcccaatccagttcctgggccttctcaatgataaaaacaacggtagtttgagcaaccatctctttgccatcgaatttgataccatccgaaacaatgagtttggggacatcgacaacaaccatgttggcattgacataaatagtctgaattctatgcaatcctatcatgctggcttctacgatgacaagggtggcacattcacaaacttgagcctcatcggaggagggccaattcaagtttggatagagtacgacgggtacaccacattaactaatgtgaccatagctcctcttggcatggctagacctataaggccactactctcagttacccgtgacctttctacagtgtttacaaatcaatcatatcttggtttctcatcctcaacaggcttaagcacagctcatcactacgttcttggttggagctttggtatgaacagtcccgctccaaccattgactctaccaagctacccaagctacccgaaccacctaattatagtggtccaagaactcaatccattctattaatccttccactaatagggtcaattctattggtattaattattggcattgtggttctacttgtgaggagacaacttgtgtacaaggaggtacgcgaagattgggaagttgaatatggtccacgccggtttgcttaccaggatctatttcgcgcaactagaggatttaagaacaataacttggtaggaataggtgggtttggaaaggtgtacagaggggttcttccaatatcgaaattacaggttgctgttaagagggtatcatatggctcaaagcagggtattaaagaatttatagctgaagtagttagtatagggaatctccaacaccgcaacattgtacaattatttggatattgccggcgcaagaatgaactccttttggtatatgactatatggaaaatgaaagtctcgacaagcacttatacaattttcatggccaaccaactttgaattggtcacaaaggttcaaaattatcaaagacattgcctcgggcctgctctacttacatgaggagtgggacaaagttgtaattcatcgagatgtcaaggcaagcaacgtgcttattgataaggagatgaatgcaagattaggagatttcggtctctcacgactatgtgaccacggcagtaacctacatacaacaaatgttatcggcacaataggatacttagctccagagctagttcacacaggcaaagcaactacacttagtgatgtctttggttttggcatcttccttcttgaggtttcttgcgggcaaaagcctatcaggcaaaactcggaaggtaaacatctcatcttggttgattgggtggttgagaattggcataagggatcacttcttgatacaatggatagaaggctccaaggtaactacaatatcgatgaagcctaccttgcactgaagctaggattattatgctcacacccattttcaaacgcaaggcccaatatgcggcaagttctgcaatacctcgatggcgatgcgcagttgccagaactaaatgtgtccgtgatgtag

SEQ ID NO: 20334 - DNA, 300 bp, Oryza sativa
  Clone ID: PAT_MRT4530_25711C.1
gttagggaaataacacttcaaatcagctgagcgaacccttgaagatgatgctgatacagatagatgcacattgaattttgttcatatacatgatgaccatacaaccttctagccttatttagaaataagaatcccgcgttagctcaaacactaactagtacacgcacagtgctctgtttatttacctctttaactacgcgaaacagacacctacacatggagggatggcagtggaagaagatggacagggcgcactgacacacaaagacccatggtactctcttgggactgcacaccatg

SEQ ID NO: 20335 - DNA, 368 bp, Oryza sativa
  Clone ID: PAT_MRT4530_25712C.1
gatcataggatagaggaacgcttgactactaacggacatactcaatcacatgcaaacactagcacatgccaatatgaaaagcaaaaatgttgctacaaatacatccacatacacaagcgtaaaaaagcttatgcatgcccattctaccccttgaactgtagcgtaaataccaccgatgcaccggacctcatgttggctttacagcaacacatagatgcagcccagtagctcataatcaattgcggagagattagcagacatctaatggcacgaatcagtcgtcggaggtgcggcactcgtcggcctacggggtgtccttgcagaaggccttgagcgggtcggagggttacttgagcctggtcggcgcg

SEQ ID NO: 20336 - DNA, 816 bp, Oryza sativa
  Clone ID: PAT_MRT4530_25713C.1
cccgaagcacgcgctgtcgcttctcctgtcctcagccgccctccccgggcctacctcatgcctcccgccgcgacctcctcgtccgcgcgctctgggagctccgccgcgacccggacgcggcggccctcgcgctccggtggggggaggaggggtgcgccacctccggggagcgcgcggacctgaccatatggtccgcggggaaggcgcggcggttcgacctcgcgtgggcggtcgtgcgccgcatgctgcgccgcggggtgctcaccagccgcgccatggtcatcgtgatggagaggtatgcagctgccaatgaagtgaacaaagcaatcaagacatttgatgcaatggagaagtttaaaacggaagcagatcaaactgtattttactcccttcttcgtgctctttgcaaaaataaaaacatagaggatgctgaggaattgcttctcgtgagaaagaaattcttcccacttactgcagaaggtttcaatattattctagatggttggtgcaatgtaatcactgatatagctgaagcaaagagaatttggagagaaatgtcaaattactgcattactcctgatggcacatcttataccctcatggtcagttgttttgcaaaagttggaaacctttttgataccctgagggtttacgatgagatgaaaaagaggggttggactcctagtattgcttgttataattctcttatctatgtcctgacaaaagagaattgcatgaaggatgtacagaatatattcactagaattatcgatgaaggcctccaaccaaacgtcaaaacttacaacagtatgatag

SEQ ID NO: 20337 - DNA, 219 bp, Oryza sativa
  Clone ID: PAT_MRT4530_25714C.1
acacaatcatgaacatcgtgcttttttaatgagggggccacataacataggtgtacacaatctaaactaacaaaacaaatcttcggttacacggaaagaggagaactactctcgtctcaccgcatttctgcatgaaagcaatggaccttacctcctttgatcaccagaaatccacactcacttgccggggaccaagttggcatcgtaggcccatgcata

SEQ ID NO: 20338 - DNA, 1587 bp, Oryza sativa
  Clone ID: PAT_MRT4530_25715C.1
tcactgaattcttgaccgccttgcaaaatgtttgccacgctgtggaataatattatattttccagctcctctccaatggtctctgttggccaacaaaaaggttctgaactccttttcaagttttggatcagaagcaaagccattttccttcatttcatcataatactctaaagctctttgcatgcatccgtgtttgatcaaaccttgcacaactgacatatagtgtgaataagaaggtctgatgtcatatcttttcatttcattccagagcttcaaagcatgtccaggttcattcaattgaaaaaatctatcaataagcatgagaaatgtatcactcttaggaccacagccatcatccttcatttttttcaagaacttcagggtttcatcaatgttttcttgtctcagaaatgtatggtatgtcaaaatggttggaacaattcccttcagcatcatgtcctccaacaccatccgtgcttcatcaagcttgcgactttcgcaaagcggaactatcatactgttgtaagttttgacgtttggttggaggccttcatcgataattctagtgaatatattctgtacatccttcatgcaattctcttttgtcaggacatagataagagaattataaacagcaatactaggagtccaacccctctttttcatctcatcgtaaaccctcagggtatcaaaaaggtttccaacttttgcaaaacaactgaccatgagggtataagatgtgccatcaggagtaatgcagtaatttgacatttctctccaaattctctttgcttcagctatatcagtgattacattgcaccaaccatctagaataatattgaaaccttctgcagtaagtgggaagaatttctttctcacgagaagcaattcctcagcatcctctatgtttttatttttgcaaagagcacgaagaagggagtaaaatacagtttgatctgcttccgttttaaacttctccattgcatcaaatgtcttgattgctttgttcacttcattggcagctgcatacctctccatcacgatgaccatggcgcggctggtgagcaccccgcggcgcagcatgcggcgcacgaccgcccacgcgaggtcgaaccgccgcgccttccccgcggcccatatggtcaggtgccacgcctcggcaggcggcgggggagggggcggtggccccgcgcgctccccggcggcggcgcacccctcctccccccaccggagcgcgagggccgccgcgtccgggtcgcggcggagctcccagagcgcgcggacgaggaggtcgcggcgggaggcaggaggtaggcccggggagggcggcgaggacaggagaagcgacagcgcgtgcttcggggaggacgcggcggtggaggcgtcggagaggcggtggaggaaggcggcgagctcgccgtcgccgtcgggggcccgggggagggggtggtcgggaggctcgaagtcgctgtcgtcggagggggagggggagtgggcggcgaggaggcagaggtgccgagattgggggaggagggcgcgtaggacgtggcggcggagggcggcggcggcgagcggcggcggcgccat

SEQ ID NO: 20339 - DNA, 914 bp, Oryza sativa
  unsure (1)..(914): unsure at all n locations
  Clone ID: PAT_MRT4530_25716C.1
cacgcgtacgtaagcttggcctcctagagcgccgcccgggggtgggttttttgaactcaataatcataatatgcgagaagtgtttctgcgccattactgggaattatatttctagtaatggcgttaagaaataccaacataggcgttgtgaagcatgcggcgctcaccattcttgcaggcgaataggatggtggggggcggtccnatnttttctttttatccatccccnattcgnacattgccggtgacgttggtgttgagccggtcatgtggttcgacgcgtcggtgtcgaggatctagcgcttgttgtcgtggtcggtggcgtcgtccagcgcggcgatcaccttctgctccacaaactcgatgacgtctgccgcgcgtgctacagcggccgcgcgacggtgtacatcacggggcgcccctcccaggaccacggcgtcgcaggtgcctacggtggtggtggccgcgggctcatcctcggtggtggtcacgtgcgcttgctcctggtgctacaacctcggcgagaccggccacatcgcgcgcgagtgccccagcaagacctactaggcgctgctcgcggcgtcagatccagctccctcccatgatgcgttttgctcccccctccctccactgaatcaccgagcagcgggtgatcagttctatcttattagtagtcgtagatctcgttaggaaagctatggatctatcggttcgtcgtcgtcgtcgttctatgtaatgggatgggagtcttggagtggtttaatctttttgtttcgttgggtcggtttgagagacaagccatggatttgcactgtctgatctatctatgaatctatctattatgaaccgagaagaaaatattcatcagcatttggatgagtactttgtgtgaaaaaaaaaaaaaaaaggacggc

SEQ ID NO: 20340 - DNA, 4208 bp, Oryza sativa
  Clone ID: PAT_MRT4530_25717C.1
atggcgtcggagagggtgaaggggacggtgaagtggttcgacgccaccaaggggttcggcttcatcacccccgacgacggcggcgaggatctcttcgtccaccaatcctcgctcatgccccgcggcttcccccgcctcaacgacggcgacgtcgtcgagttctccgtcggatccggcaacgacggccgcaccaaggccgtggacgtcaccgcgccggggggcggggcgctcaccggcggatcccgtcccagcggcggcggggaccgcggctacggcgggggcggaggcggcggccgctacggcggtgaccgcggctacggcggcggtggcggcggctacggcgggggcgaccgcggctacggaggcggcggcgggtacggcggcggcggcggcggaggcagccgcgcgtgctacaagtgcggcgaggagggccacatggccagggactgctcccaggggaggaggcggcggtggtggctacggtggtggtggcggcggctaccgcggcggtggtggtggcggcggcggcggcgggtgctacaactgcggcgagaccggccacatcgctcgcgagtgccccagcaagacctactaggcgctgctcgcggcgtcagatccagctccctcccatgatgcgttttgctccccctccctcactgaatcaccgagcagcgggtgatcagttctatcttattagtagtcgtagatctcgttaggaaagctatggatctatcggttcgtcgtcgtcgtcgttctatgtaatgggatgggagtcttggagtggtttaatctttttgtttcgttgggtcggtttgagagacaagccatggatttgcactgtctgatctatctatgaatctatctattatgaaccgagaagaaaatattcatcagctcgctcaagaccgacggctaccgcagcctcaacgacggcgacgtcgtcgagttctccgtcggatccggcaacgacggccgcaccaaggccgtggacgtcaccgcgccggggggcggtgcgctcagcggcggatcccgtcccagcggcggcggggaccgcggctacggcgggggcggaggcggcggccgctacggcggtgaccgcggctacggcggcggcggcggcggctacggcgggggcgaccgcggctacggaggcggcggcgggtacggcggcggcggcggaggcagccgcgcgtgctacaagtgcggcgaggagggccacatggccagggactgctcccagggaggaggcggcggcggtggctacggtggtggtggcgccggctaccgcggcggtggcggtcgcggcggcggcggccggcgccacaaccgcggcgagaccggccaccgcgctcgcgagcgccccagcaagacctactaggcgctgctcgcgccggcgcgactccaggtccctctcatggccccttgcgccccccccgtcgttgcactgccatcggccgagctactcgcgaccagtttctatcttctaaggagcgccagatcctcgtcacggaatgtatggagctggcgtgtcgccgtagtacacctaccgacgcaggcgcctgggctcttgcggcgatcaggtcgtcgagcagctcgcgaacggcctggccgggccgcttggggggccgaagcccgtcgtcaatgcgagggtgccgaagtggcgcggcatggtggtccgcgtcgagatcatcctccacgtcaggcggaggagagacgaactccaccggcggctcttcggccagaggcggagttggcggagtcgagcctgatgcaggcgagcgcggcgaggccggagctcccccgtgctccgtgccgatttgcgtcggggccgccgtcgctaggtggtacaccgtggtgtactcgatggtgaagccggagtcgacgttggcggccgcctcgccatcccaattccactgcgcctccttgtcgaacaccacgtctcgggagacgtggacgcgccgcgtcgccgggtcgtagacacggtacgccttggagccaggctcatagccgacgaaaatcatcggccggctgcggtcgtccagcttcttcatgttcggcgccgtgaccttcacatgtgccacacaccggaacgcgcaggtggtgcacggccagtgggactccattccaaagctcgtatggggtcttgccaccaatgctcttggacgagctcctaggagtcctttggccttaagcatgcttcgcgccgtgcccacaacggactggttccggcgttcgacgacgccgttttgttgcggcgagtagggagccgtcagctcgcgttgcaccccgagctccgcacaatactcggtgaagtggccgacggtgaactcgcccccgcgatcggtgcggagtgcccaaagcttgcggccgctcttgcgttcggccgccgcctgaacgcgcttgatggcagccggtgcaccgtctttggtggcgaggagcgtcagccacatgtagcggctgtagtcgtcgacgagcaggaggaagtagcggttgccgctgggtgtcgccggtgtgatcggaccacaaagatcgccatggatcagcgcgagcagctcagtggcgttgtggagtgcctcttgcgcgaagggggcacgccggtgcttgccggcgaggcacgcctcgcatacccgttcgacctgcgacaagacaggcaaaccacgtaccagggactcacggcccatcttgcgcaatgcagcgaagttgatgtggccgaaacgagcatgccaacgccacgcgtcctcccccgcgcgcgccatcaggcagaccggccgtgcaaggttgatgtcgagcaagtaaagccggcccgggctgcgagctatgcaagcgagcagacgacgccgctcatcccacacgcgcatgacgccatcctcgaccaccaccttgaagcccgtctcatccagctgccccacacttatgatgttggcggcgagacgcggaaggtagtatgtgttgtgcagcatgcggtgttcgctgttcttgcaggcaaacagtaccgtcccgcgtcctccgatgcggacgagtaagctgtccccgagccagacattgccagcgacattggtgtcgatgtcagagaacgccgccctcgagccggtcatgtggttcgacgcgccggtgtcgaggatccagcacttgttgtcgtggtcggtggcgtcgtccagcgcggtgaacaccttttgctcaaccagctcgatgacgtctgggcgaggctgcggcgcgagcggcgatggcgtcgcgcactgcgcgcccgtctcctccacctcatcaatgcagctgcctgtcatgagcatgagcgtgggctcatcctcgtcctggaccacgtgggcctgctcctgcttgggcttgctcctgcaatccttggcacagtggccaagtttgccacagttgcggcacttgtcggtcttgcgagctgggccaacgccagtgctgtccgcgttcccgacgccaccgccgccgccgctagtgtgcccttgtccgccgcggcgcttgccacggccgttccctccgccattcctcttcttggcctcctgctgcttcttcttgtgacgttcaagccactcctcctcagtgaggtagagcttggccccggcacctggtgaagacgaggacgacgactggccggagtcctcaaccgccttgaggcgtccagtgacttcctccagcgtcaaagtggagatgtcaagtagggtttcaatggagagaactagctgggagaacctgggacgcgcgacgcagagatatttctcgacgactttgtcatctggctcgggatcccccaatgtggacagctgcgtcacgacggtgttgaggcgcatggcgaaatcctcgaccgactccccgtcgcgaaacgcgagagcctcgtattccgagcgcagcttctgtgcactcgccttgcgaatgcggtcgttgacgacgcgcatggtcttgatgcagtcccacgccgccttcgccgtctccttggtcgccagcgtggagatcatctccgcggggaccacgctgcagatggcatcgagtgtcatccgatcttcatggagctcaacctctcctgggtcgattgctccccacaagcagcgagcttgcaacttgatcttcatcaacagtgaccatacgttgtaattcgtcttcatgagcaccgggttgtttgccggacctcccgcctccttgaccacgcggtgaatcaacagcccgcgatcattcccgccactgcccat

SEQ ID NO: 20341 - DNA, 432 bp, Oryza sativa
  Clone ID: PAT_MRT4530_25718C.1
cccacgcatccgctcactgctagtgagtgtctgagggcacagcaatgggtagcaaggtctgctgcttcctggcctggctcatggcaggcacggtaggccatctacggagcgcagctgagcgagtcggagatataggcgcaaggacaggcattgccagcgctaggtgcaagacaacccgcagggcgcgtgcccaacagttctcgatcgggacctcacagtccgactgaggtgacatccacagtgccgacgccctagcgcactaggtccgacgatccaatgctggcagacatctactggacatcagcctctagctgccgctgcaccctcatccggctgataacgagccatttcgatgagagcatgaccctacccactaagcaacgctcagcgccattaccacccgagtactactgtggcaatgagtcgtaacag

SEQ ID NO: 20342 - DNA, 225 bp, Oryza sativa
  Clone ID: PAT_MRT4530_25719C.1
atggcttcgcgcgacggcaacggaggcggcctcggcggcttcatgtggagttatcacggcggggatgaggggattatggtgctaatgtgcagcgcgctgctgcgcctggagcccaggcgaccgattttggtcgcctggctcaggctaattatgcgcctgagttacatcaggccaggtgaggctgtgttcgaagttacaagtcgagaactcatcctcttagcatga

SEQ ID NO: 20343 - DNA, 375 bp, Oryza sativa
  Clone ID: PAT_MRT4530_2571C.1
tataaaatgggatcccctcactccggtctatcgttttaaccccatcccgagccttcccgtggtccctaggccttttccccgcggccttctctatattccacgccggcgggccgcttcagacgacttgtgccgcttgaacgtgcgccgggcggtcgcgccgtcggcttcttcagcgtcgtcgtcaacttcttcaccccgggcttgccttcgttttgcgcgccggcttttcctactcggcggagcgccgttcgggcgcgccgtcttctccttgggcttgcagcacctcctattcctcagtcagccctcgtttcgcgggaagcaccggagacgcgtcctcgccggccaaacagtggcgtttgcggcactgttccacct

SEQ ID NO: 20344 - DNA, 1333 bp, Oryza sativa
  Clone ID: PAT_MRT4530_25720C.1
ctccatttccatcaagcccaagaacgaactcaccacgctagtgttgagaagtggagagagttgagaggaatcaatggagatgatggttcatgggaggagagacgagcagtatggcgggctcaggctcgggcttgggcttgggctcagcctcggcgtcgccggtggtgcagccgacgacgagcagccgccgccgcgccgtggtgccgccccgccgccgcagcagcagctgtgcggctggaacggcggcggtctcttctcctcgtcttcctccgatcatcgggggaggtcggcgatgatggcgtgccacgacgtcatcgagatgcgcgttcctgcgggggatcgacgtgaaccgtgcgccggcggcagagacgaccacgacgacggcgagggggcccagctgcagcgaggaagacgaggagcccggcgcgtcctcccccaacagcacgctctccagcctcagcggcaagcgcggcgcaccatctgccgccaccgccgccgccgccgccgccagcgacgacgaggactccggcggcggatcccgcaagaagctccgcctctccaaggaccaagccgccgtcctcgaggacaccttcaaagagcacaacaccctcaatcccaagcagaaggcggcgctggcgaggcagctgaatctgaagccgcggcaggtggaggtgtggttccagaacaggagggcgaggacgaagctgaagcagacggaggtggactgcgagctgctcaagcgctgctgcgagacgctcaccgacgagaaccgccgcctccaccgcgagctccaggagctccgcgccctcaagctcgccaccgccgccgccgcgccgcaccacctctacggcgcccgcgtcccgccgcccaccaccctcaccatgtgcccctcctgcgagcgcgtcgcctccgcagccaccaccacccgcaacaactccggcgccgcccccgcgcggccggtgcccacccgcccgtggccgccggcggcggcgcagaggtcgtcggcgtagagaccccactactgattaattagttaattagagatgagtagtggctttttcttaattagcagggtattaattaattacttaattagggttggacccctgtagttttcttgtttatactacgtgtataatttagctctggttttgaactttttaattagtttcataatctttttttttcctatctctcacttcaccctgtttgttgtttactcagcaaagaatatggtgtctttgtataaagtgatgcatgaaatggatcataaaagttttcaaaaaaaaaaaaaaaaaaaaaaaaaaaaaaaaaaaaaaaaaaaaaaaaaaaa

SEQ ID NO: 20345 - DNA, 183 bp, Oryza sativa
  Clone ID: PAT_MRT4530_25721C.1
atgaagggcaaggctgacgtggaaaacaatatgaggccgaaggctgggggtgagcagcggcggctggcggggcggtccatccgacgacagtgtcgggcggcccgagcggtgacggcgtggggcggcccgagcgatgccggtgccgactccgaatcgatgttggtctcaactgtaacatcccag

SEQ ID NO: 20346 - DNA, 1830 bp, Oryza sativa
  Clone ID: PAT_MRT4530_25722C.1
tttttacatcaaaatgacttataatatgaaacaaatggagtagctgacaatggaactagtaaaaaaaaagagcttgaactataaacgctggtgatacatgagtttctgtgctacagggctatgtcagggaaggaaaagaataatctgaaggatgcattgcattgcattcctgcatgcatcagcagccaaaacttttgatcagttccatgtcagtcctaggcctaccactcgtttcagctaatgaagctaatagagccagtaagtccacctactccatcccaaacaaatagttgtagaagtggggagccgtgctcgtgttactcgccacccatgtcccgttgctaccggtggagcccccgtagagtgctgatccagaagtcatagctgctgcagcagcataaggaatgttgttaccggagtagctgttgctctgcttgttgctgctgccgccgttttgctgcctccccatcgctgcgccggcggctgtgccccatatggcgctgctgctgctgctgttgctgttgctgccgctgtggctgctagtccccattgtgaagtccacgttcacgccggaggagcagccgtaggtgtcaaatgcagaagcaggaaactgctgctgctgctgctgctgctggtggtggtggtagtgcagggcaaggagggaccagtagtccttctccgacggtggcatggcaggcgacggcagcggcagcgatgggtcagaggggaacttagaggcgcgcgtggcggctccgccgccgaccggcaggtcgctgttgaggatgctgtcgacgtcgtagcggctcatgtcgaagttggtgacggcgttgagccccctgaacttgatagcggcaatgtcgtacgcctcggcagcctcctcctgcgtgctgaaagtgcccaagtacaggtccttgtttccggccaccctgccgatcctcgcttgccaccggccgtgctgatgatgtcttgttactcctctgtagatggaagcccctcttgagaagccgctgctcttcctgcgcagcgacgcgatgaactcctgccgcgtcatggacttcatctcctccagctccgtctcgtagttggcaacagggaagttcgtcgtggtggttggaccccagtactttagggcggcgaggtcgtaagctcttgcggccttctcctccttatcataacctccttggcggcctttgcggctttggccttcccggcggcagctattgtcccacaggtgcgcctcgtacctccccgtccaccggtgcctagtgacaccacggtagatggacgtccgttgcccgaacgtctcggcggtcctcctcgccggatcggccagctccgccgccgcgtcggtcgccattgcgatggtcaccccgccggcgttctcaggcgctgggtaccggcgcaagaacccggcggcgatgctaccaagctcgccgcagctgagctgatcctccggggcagctgccggagcggcggcgacggcgccgccgcctccgcctaggccgccgaggaaatcctccatcttcggagcgccctccgctggcccctcctctccaagtggaggtgcagatgtggtagagagggcctcaaggaggccatggtggtagttgttagcgagggagaaggagagccaatggtgaggataagccgagctcatgtccatgtccatggcgatagatatgatcgatgcgccgatcttgaagagcacttgaccagcgtttgtttgagcttatgagagggaaggataactataaagctattgctcgatgtagaccagtgttgtgctaaggagagaatgagagaatacccaagtgtgtgttatcctcgtgc

SEQ ID NO: 20347 - DNA, 819 bp, Oryza sativa
  Clone ID: PAT_MRT4530_25723C.1
atgaaggttattgtggcagcggcggagggaggcgtgaggaggaggaggaggtacgcgctgctgctggcggcgagggactcggactacgtgcgcaaggtgtacggcggctacctggaggtgttcatccgggcgttcggcgacgatggcgatgtcggcgacggcggcggcgaggagtgggacatgttccgggcggtggacggcgagctccccggcgcggacgaggtcgacgggtacgacggcttcgtcatcagcggcagcccgcacgacgcgtacgccgacgacctgtggatcctccggctgtgcctcctcgtccgcgacctcgtcgccatgcgcaagcgtctcctcggcatctgcttcggccaccaggtgatatgccgcgcgctgggcgggcgcgtggggaaggcgaggggcgggtgggacatcggcatcagggaggtggccatggcggagtcgctgccgccgtacaggttcctcgacgacgcgctgcaggggatcacggcggcggcggcgccgtacgccaagatcacggaggtgcaccaggatgaggtgtgggagctgccggcgggcgccgaggtgctcgcctcctcgtccaagaccggcgtcgagatgttctgcgccggcgaccgcgtgctcggcatccagggccacccggagtacaccgccgacatcctcctcaacctcgtcgaccgcctctcctccgctggatccatcaccatggcggtcgcagagggagtgaggaggcagctggaggatactgggcctgacagggagttctggatcaagctgtgcaaaagcttcctcaagactgaagaagaataa

SEQ ID NO: 20348 - DNA, 516 bp, Oryza sativa
  Clone ID: PAT_MRT4530_25724C.1
tcaaccatctggaggcggaggcgcgccgtgccactcctggatctcgggcaccacgccgagcacctcatcgcggctatctggatcatgtgctgcaggagtcgtggagttcttgcggaggctgttgacacatatgtagtactccctcttggcggcctttgcggctttggccttcccggcggcagctattgtcccacaggtgcgcctcgtacctccccgtccaccggtgcctgatgcattttcccaatacccaacatccctagtgacaccacggtagatggacgtccgttgcccgaacgtctcggcggtcctcctcgccggatcggccagctccgccgccgcgtcggtcgccattgcgatggtcaccccgccggcgttctcaggcgctgggtaccggcgcaagaacccggcggcgatgctaccaagctcgccgcagctgagctgatcctccggggcagctgccggagcggcggcgacggcgccgccgcctccgcctaggccgccgaggaaatcctccat

SEQ ID NO: 20349 - DNA, 237 bp, Oryza sativa
  Clone ID: PAT_MRT4530_25725C.1
atgagaaggagctcaaatgcacaattagctgatgctgaagacatgaaaggtgccagccagctcaaggatacaaattttttgaacgacgaaaaaggatacaaattgtctgctgaactggaaagttctcacagaaatctgatacgtagcatatggttttggacacatcaaggaggaccatacaaagctgaacttggtgcactggatagtacaattatagtgatactggttgaaaattga

SEQ ID NO: 20350 - DNA, 2116 bp, Oryza sativa
  unsure (1)..(2116): unsure at all n locations
  Clone ID: PAT_MRT4530_25726C.1
aaacaaacaaacaagtatctttcgttaattcgttacgcccacattgttttcacgcgaacgactcatatcaatcgagatactgcggagtactgtatatgtgataagtaacgtttgatggtcagactctaccgtgtctgcgttacacaagacagaactagtcgacttgttcgatcatccatgtccatcgccccggtttgcccagttgcccgtgtggctaaccccaacaacggcgatgctgatggatatcgagtccacactccacaccaccgnaccatgcatgcagtgcccgacatcacgagcccatcagcattagctaacacaacgtacgtacgtgtcaatgcccagccccccaccaccacgtctctcatgccggagccccgtccgcctgcttggtctccgccgccgtcgatggcggcggcggcggcggcttgacgaagcgcttccagtaccagtgctgcgcccacaccgcgccgagcgactcgatgggcacccccttggtctccggcaggaggagcgccacgaacgccgtcatgaccaccacccacgcggcgttgtacgcgaaggcgccgaacttgaagctgcacagcatccggaggaacgactgtgtctgcgcgaaggtgagcgccagcgagatggcctcgctcatgctctgccccgccgacctcacctccagcgggaagatctcgctggggatgatccacttgaggggcccccacgagatgccgaacccggcgtcgtacaggcacaccagcgccaccaccgccaccgcgtacccgcgcggcatcgccttcccgccgtcgctccccagccgcgccccgtacgtccacgccatgcccgtcaggcacaccagcagcacgccgccgcccaccatgaacagcgtccgccgcccgtacctgtccacggtcagcgccgccgccgcgatggacgccaggctcaccacgtcggtgatgatggaccccaggatggccttctggctcgagaaccccaccgtgtagaacagcagcggcgtgaacagcgtcaccacgatcatccccgtcagctcgaagaacaccgggatggcgatcgccatcaccaggtgcgggcggtactcccgccgcacgatgcgccggaacgcgccggtgtggtgctgccggtcctcctccgcggcgcgggcgatgtccttgagctcggcgtcgatgttggcggcggctccgcggatgcggcgcagcgaggcgcgggcctcgtcgagcttcccgcgcaggacgaggctgttgggcgtgtccgggatgaacgcggcgcccaccaggatgacggcggccgggacgacggcgacgccgagcgacagccgccagccccagaccgggatggtgttggcgcggtagttcaccaggtcggccacgaacatccccacgttgaggaagaagtggaagatgctcgtgaacgccccgcgccaccgcgccggagctatctccgccaggtacaccggcgcagactggttggtgaagccgacggcgaagccgaggaggatgcggccgatgacgagcatggcgatgttgacggcggcgcagttgaggatggcgccgacgaagaagagagaggcgccgatgagcatggagttcctccggcccaccctccgggtgacgtggccggcgatgaggcaggcgaaaacgccggcgaggtagagcgaggagacgaaggtggtgagcacctggctgtcgaagatgcagtacgcgtcctgctcggcgttgttcatcttcgcccagatgtctgggaagaacgcctcgaggaacgactgcatctgcgtcagtccacctgtgatgctgatgtcgtagccgaaaatgagcccgccggaggccgccatgaggcagctcatcaccacggtgaacgtgatctcgctgctgtacccgggcgccacgccggcgccggcgccggcatccgccgccgcgaccatcgctccccctctggccatctccaccgcacagctcaacgcgagtgtgtatgtaccaccatgtggtacggtacttatagcggcagagtcaacaagcagcctcaatctgtccaattggagatcgaaggcgatgaagtttctttttcttttttccttcttaatttgatccagcttgtagccgactaaaca

SEQ ID NO: 20351 - DNA, 2597 bp, Oryza sativa
  Clone ID: PAT_MRT4530_25727C.1
atggcaaagggggagaaggcgccgcgggctttctcgatggaggagctccccggccacctcatcggggaggtcctgacctccggccgcttcgccgccggggtcctggggcctcgagtccccgattgcctggcgttatcactacgcttcacgaattcggactggcctctaccagccgcttggggggactaagagagcatgtgcatctgggttcgcgggcaactcgcgcagacaagtgggggaggagtacattcgttggtgcttaaaacctacagaaacaatgttccagaagagtatggaagaaatagtaattgccgcgcacccagcgggtaaattcaacttcaagcaccaattttagtcccaataatatgcatattgtttccatcccaggtttcttctctggcaagtgtatttttatactagctttcagtgatttgtgagtatatggtaaacgggagaagatcaaagttggaggacagtgttgtagctaaaggagcatatagtgaggtaatttggtggtgtattaaataatttaactcggccattttcccattgtataaaaattattggtgtgattataattactaatgacattcttacaacggatgggcaagtatatacatgtggaagtaacacacatggccagcttggtcatggtgacacaatagacagggctactccaaagatcgttgaattatttgaaggccttgctccggtagtgcaggttgctgctggtgccagctatacatttgctgtaacggatgatggaacagtttattcctttggctcttgtaccaacttctgccttggacatggagatcagcatgatgaacttcgtccacgtgcaatccagtcattcaagaggaggaatattcatgtggttcgcgtgtctgctggtgatgagcatgctgtagctcttgatgcactgggttataagttaagaggttactgtggagcattaggccatggtgatgagaatgacaaaactagcccagaattgatcagcagtttgaagagtcaagttgctgtgcaggtctgtgcaaggaaaagaaagacatttgttcttactgatgagggctcagtttttgcattcggatggatgggctttgggagtttagggtttcctgaccgaggatcatccgacaaagtaatgaggcctcgagtcctcgatagtctgcgtgatcactatgtttcacaaattagcactggcctgtaccacactgttgcagtgacaaacagaggcattgtatttgggtttggggacaacgagcgcgcacaacttgggcaggagtacattcgtgggtgcttaaaacctacagaaataatgttccagaagagtatggaagaaatagtaattgcggcacccagcggtcaattgacagtcaactcacggaatgggtatatcagggataaaaatgaaaactcaaggggcattttcaaagtaatgggtagctcaaagaaggccaaggtgaagtctagacgtgccgcgaagtcagacagattgagcagtctacctctagagataaaagccgatatcctctctcgtctgaatgttcaagatgctgtcagaactaacatcctgtcaagcgtttggaggagcacatggactactattccagagatgttgctgtgtgattgcacctacacttcctgtcaaggttcagtaacaagtgcaccacccaagtttattacattggtcgatatggcgttatcactccacaggggacctctgcatgggattacaattttagggagcaaaaattaccacgacgtatttggtaggtggatgcacaagctgtcaatgaagtcaccaaattcagttacaatcaaattgacctctgcgtcaaggtataggataccatcatgcttcttctccatcagtgatttggagcatctggacataaagaactgcatcatcagtttgccccaaatgttcaaaggttttgagtggttaactactttggacctggaaaatttctcctccacagacagtgacattgataatctgatttcctgctgccctgagttgtctgtgctggttttgaaatcctttgaaggcatcagctgtctgaacattcgagctcctgaacttgaaattctagaggttgatgggaagtatgaagacttccatttggatgcccctaatctggagactgcaaatgtcactctgcacaaagctcaagaataccaatctgttccagttgtgcatggtgggaaaagttacctcaagcaggcattgggaagcctaagtgacatcgaaaaacttgtcatcaacggctatttcttgacgtatctatcaaaagggtgcataatgacgaagatccctgctgtgtttgatcacctcgagatgatgttattagagatatgcttctgggaccaaagggaaatcctgaccggccgtgtcattgtttcagaatgctcctatcctcaaaaagcttgcatgcctgcaggtcgactctagacgggagaatagttctaaagttggagggacaattgttgtagctaaagggagcttttagtgaggtaatttggtggtgtattaaataatttaactcggccattttctcatgtataaaaatttttggtgtgattagagtgaa

SEQ ID NO: 20352 - DNA, 117 bp, Oryza sativa
  Clone ID: PAT_MRT4530_25728C.1
atggcgacggtgtggcagtgtgagggcatcggtgacgacgacggtgttggtgtgggcgatggctgtagcgggcttcccctcacttcagcgcctatcccggatcggttgatggtctaa

SEQ ID NO: 20353 - DNA, 2601 bp, Oryza sativa
  Clone ID: PAT_MRT4530_25729C.1
atggcgacgggggagaaggcgccgcgggctttctcgatggaggagctccccggccacctcatcggggaggtcctgacctccggccgcctcgccgccggggacctcgcgcggctcgaggccacgtgccgcgcgctccgcccgctcgccgagcacgccgcctccaggctctgcgccgcgcgggcggcgttcgcggccatgggccccgccgcgcgcggggagctcctggagcggtgcggcggcagctggaagaaggtgctcaggttcctgcagtccgtcgagcagtcctccggcaccgtccacacctcctccggcaacatgcaagtagcgacaggaagatatcacacacttttggtccatgactcttctgtctattcttgtggatccagtttgtgtggggtgctaggtcatggcccagatacaacccagtgtgcggcattcagcagggttcccttcccatcactttctcgtgttgtcaacatctctgcctctcacaaccatgcagcttttgtcacagagttaggggaggtcttcacttgtggagataattcatcattatgctgtggtcacggtgaggttgccactggtttaagttttactgtcattcttacaacggatgggcaagtatatacatgtggaagtaacacacatggccagcttggtcatggtgacacaatagacagggctactccaaagatcgttgaattatttgaaggccttgctccggtagtgcaggttgctgctggtgccagctatacatttgctgtaacggatgatggaacagtttattcctttggctcttgtaccaacttctgccttggacatggagatcagcatgatgaacttcgtccacgtgcaatccagtcattcaagaggaggaatattcatgtggttcgcgtgtctgctggtgatgagcatgctgtagctcttgatgcactgggttatgtgtatacatggggcagaggttactgtggagcattaggccatggtgatgagaatgacaaaactagcccagaattgatcagcagtttgaagagtcaagttgctgtgcaggtctgtgcaaggaaaagaaagacatttgttcttactgatgagggctcagtttttgcattcggatggatgggctttgggagtttagggtttcctgaccgaggatcatccgacaaagtaatgaggcctcgagtcctcgatagtctgcgtgatcactatgtttcacaaattagcactggcctgtaccacactgttgcagtgacaaacagaggcattgtatttgggtttggggacaacgagcgcgcacaacttgggcaggagtacattcgtgggtgcttaaaacctacagaaataatgttccagaagagtatggaagaaatagtaattgcggcacccagcggtcaattgacagtcaactcacggaatgggtatatcagggataaaaatgaaaactcaaggggcattttcaaagtaatgggtagctcaaagaaggccaaggtgaagtctagacgtgccgcgaagtcagacagattgagcagtctacctctagagataaaagccgatatcctctctcgtctgaatgttcaagatgctgtcagaactaacatcctgtcaagcgtttggaggagcacatggactactattccagagatgttgctgtgtgattgcacctacacttcctgtcaaggttcagtaacaagtgcaccacccaagtttattacattggtcgatatggcgttatcactccacaggggacctctgcatgggattacaattttagggagcaaaaattaccacgacgtatttggtaggtggatgcacaagctgtcaatgaagtcaccaaattcagttacaatcaaattgacctctgcgtcaaggtataggataccatcatgcttcttctccatcagtgatttggagcatctggacataaagaactgcatcatcagtttgccccaaatgttcaaaggttttgagtggttaactactttggacctggaaaatttctcctccacagacagtgacattgataatctgatttcctgctgccctgagttgtctgtgctggttttgaaatcctttgaaggcatcagctgtctgaacattcgagctcctgaacttgaaattctagaggttgatgggaagtatgaagacttccatttggatgcccctaatctggagactgcaaatgtcactctgcacaaagctcaagaataccaatctgttccagttgtgcatggtgggaaaagttacctcaagcaggcattgggaagcctaagtgacatcgaaaaacttgtcatcaacggctatttcttgacgagtttcccatgggataatgattttgggccaatgagcttgtgggatcaagatcagacgagcattgcagatctaacccttcaaatggaccacctcgtaactgtaagcgtgaatgacttcctgggtttggactacgaagttgattttgtaggaaagctactgagctgggcaccggttttagaggaagtgaagataaatgtggattgcactagggctttttcattgggcagtaaagttcttaagaagctattggctctgccgagggtgtctgacaaggccaagatcattgttacctga

SEQ ID NO: 20354 - DNA, 273 bp, Oryza sativa
  Clone ID: PAT_MRT4530_2572C.1
atggccccccaggatctagatcaacaacaacacaagatcaagaactacacaagcaagatgaactcactctccccggtcccactgtcgttgccaatttgtgtcaccgtcggaggagcgatgtggagggtgggctctaacccgggccgtaatcttctgcccagtggatacagttcagtcagtgtgatcattatgcttgtatggactacaaggcacgctgagaactgggctgctggtatcgcaatggttacagtatggttcagccaccaggcataa

SEQ ID NO: 20355 - DNA, 1285 bp, Oryza sativa
  Clone ID: PAT_MRT4530_25730C.1
ctgcagggccacaaggaagagaaaaaaaaggccgaggcgaccgggccgcggcccgactccggcgaggtcgtcgaccaaggccgccgagattcgtcgggatttctcgccaaaaatagcaaaggcggcggcggcggcggcggcggggatggggatggcgcgggcgcgggcgcggcggttgctgccgctgctcaccttcgtcacgctcggcatgatcctaggctctttacttcagttagcgtttttccgccggatagatgatcactcaaatgtaacacatttggagaatgatcaagaagcagcttttctccgtctaggattggtgaagcctgaagtcatcagctggtcacctcggataattgtcttccataactttcttagttctgaggagtgtgattatctaagatcaattgctagaccaagactacagatttccactgtagtggatgtcgcaacaggaaagggtgttaaaagtaatgtccgtacaagttctggtatgtttgtgagttctgaagaaagaaagttaccagtcattcagtctatagagaagaggatttctgtgtactctcagatacctgaagaaaatggagaactcatccaagtattacggtatgaaccaagccaatattacaggccacatcatgattacttttctgacactttcaacatcaaacgtgggggccagcgagttgcaacaatgttgatgtatttgactgatggtgttgaagggggtgaaacccattttcctcaggcaggagatggtgaatgtagctgtggcgggaagatggtcaaaggattatgtgtcaagccaaacaaaggagatgctgtgctattttggagcatgggactcgatggtgaaacagactcaaacagcattcatggtgggtgccctgttctggaaggggagaaatggtcagctacgaaatggatgaggcaaaaagaatttgtttgagcgaaagatgaggcgaagaatgatgccttctaatttctggctatgcagatatggagctatattctttctattatatgtaatgaaacgtttcaggaatcttgcaagcatatgaaagttcaataaccccacgttcatatttcgttttacgtaggcaattttagcaccgcacaccactgttattatccttccggcttcagcaaggtggtaactgggacaggcgctggatgggaaaaaaacgaattaatttattttttccatataatgtacaattatataacaatgaaaactagcacggtttttggaaatggattttcaaatcataatcaaggttcagtg

SEQ ID NO: 20356 - DNA, 665 bp, Oryza sativa
  Clone ID: PAT_MRT4530_25731C.1
gcggattttaggcacgacgaagggagcgggaggttcgaggcggcgctcggggagtcgtgcacggcgcagttcgaggtcgggctgcggtacaacgcgacggtggccggggtcatcagctacggccggatcgcgtcgctgtcgggcgtctccgcgcaggacctcttcctctggttccccgtccgcggcatccgcgtcgacgtcccttcctccggcgtcatctacttcgacgtcggcgtcgtgttcaagcacttccccctcgccgtcttcgaggccccgccgccctgcacccccgaccccctcctcctcctcacgcaggtgtgtgaggacggatcggtcgccggcggcggcgcggcgtcgcaatgaaggggacggactcgatggttgaaatcggcgaggcggaaaccaaaagaatgcgcagttttgaggcatgggagtggtcggccggtccgtcgccggcgggccggcatctgtgcagatagatagaatgaacattcctttcgttttctactactagttagtaacctttcattcctcatcactctgttcttcttgccgttcttgttgtccagtgcgatcaaagccggccgacggtggccggtagaggaggctgcccgcctccggtcgccgccacggcgataatttttcgtggttatgatgggttcggg

SEQ ID NO: 20357 - DNA, 569 bp, Oryza sativa
  Clone ID: PAT_MRT4530_25732C.1
aagggttttctgaccgaagaatcatcggccaaagtaatgagccttcgagtcctcaaaagtctggcgtgatcactatgtttcccaaataagcactggcctgtaccccactgttcaagtgacaaacaaaggcattgtatttgggtttggggacaacgagcgcgcacaacttgggcaggagtacattcgtgggtgcttaaaacctacagaaataatgttccagaagagtatggaagaaatagtaattgcggcacccagcgggtaaattcaactccaagatgcaattttagtcccaataatatgcatattgtttccatcccaggtttcttctctgcaagtgtatttttatactagctttcagtgatttgtgagtatatggtaaacgggagaagatcaaagttggaggacagtgttgtagctaaaggagcatatagtgaggtaatttggtggtgtattaaataatttaactcggccattttctcatgtataaaaattattggtgtgattagagtgacaaactatttctttcccttggctcagttagttcaatcaagtgttgaactgttgaatct

SEQ ID NO: 20358 - DNA, 981 bp, Oryza sativa
  Clone ID: PAT_MRT4530_25733C.1
atggctttcacgacgatgaaggcgtcgccgatgtcggcttcctcctcctcggctccggtgttgcgccggtgcgtcgcgcagccggcgagggttgccgccgcccggaggctcgccgccgcggcagcctcggtcgctctggaggcttcgcccgtgcccgccgccgccgccgccgccgttgagcggcgcatgtcggtgtcgcagaccatgtccaagctcaaggagaagggcaagacggcgttcatcccgtacatcaccgccggcgacccggacatggggacgacagcggaggcgctgcggctgctcgacgcctgcggcgccgacgtcatcgagctcggcgtgcccttctccgacccctatgccgacggccccgtcatccaggcctccgcgtcgcgggcgctcgccgccggcgccacgccggaggccgtcttgtcgatgctcaaggaggtgacgccggagctgtcctgcccggtggtgctcctctcctacctcggccccatcctccggcgaggtgccgccaacttcaccgccgcagccaaagaagctggtgtgcaaggccttatagttcctgatcttccttatgtggacacatgtactttcaggagtgaagccattaagagcaacctagagctggtgctgctaacaacaccagctacaccgggagagaggatgaagatcatcacagaagcttcaggaggatttgtttaccttgttagtgtcaatggagttacgggtccccgtccaaaagtaaacacacgcgttgagcatctccttcaggacatcaagctggtcactgacaaagctgtgtgtgttggctttggcatatcaacccctgaccatgttaggcagatagcagggtggggtgcagatggagtgatcattgggagtgcaatggtgaggcagctaggtgaagcagcttctcccaaacaagggctcaaaaggctggaggagtatgctaggagaatgaaggatgcactgccataa

SEQ ID NO: 20359 - DNA, 3836 bp, Oryza sativa
  Clone ID: PAT_MRT4530_25734C.1
agggggaggtaaagcccgaaatgtttaatttcagatctgttatttctcagctcttatctgaacactgagctattctcgtaacaccactttacatcatagatataaacataacaacaccaaagttctgatcttaaacaaaactggatgatactagttaggtactgattaactacatccggctgatgggaacgggtcatcaccgtccgccggagaggacggaggacgcgccgtcgatgctcgtcgccgtcgacgggtacgacacggcgcatgagtcgaagccgtcggcgttctgcatcatggccagcgtggtgaagctccggtacgtgggctccggctccggcagcggcgcgtcgccgtcgaggaagtgcaccacctgccgcatcgtcggcctcgcggcggccaccgggtgggagcagaggagtcccagcttgagcaccagcgccgcctccttggcgtcgtagtcgccgcacagccgcgcgtccgccgcggcggcgatgtcgcccttgtgccaccggtcgagcacccagtcggcgagcacgagctggccgtcctcgtcggcggcggcggtcatggcgccgccgcgctcgatcggccgccgcccgcacgccacctccaggacgaacgacccgaacgcgaacacgtcggtcgccggcgtgacccgccgcgtgtgcgcgagctccggcgcgaggtagcccatggtgcccaccacccgcgtcgtctgtgggtcggcgccgcggtcgtacagcctcgccagcccgaagtcgccgagccgcgcgttcatctcgccgtcgaggagcacgttgctcgccttgacgtcgcggtggacgaccacctgctcccagtcctcgtggaggtagagcaagccggcggcgacgccgcggacggcgtgcagccgctgcgcccagccgagcggcggcgcgccgtggtcgtgcagccaccggtccaggctgccgttgggcatgtagtcgtacaccagcaggagctcgcctcgccggcggcagtagccgagcagcggcacgacgttgcggtggcggagccggccgatgctgacgacctcggcgacgaactgcctcatcccttgcttcgcgtcgtgcgacacgatcttcacggcgacctccgtcccggacgccgggagcacgccccggtacacgcggccgaacccgccgacgccgagcagccgcttgccgtcgaagccggcggtggcgacgaacaggtccttgtacgcgaaccggtgcgggccgaactccacctcccagtcctcccggagctcggcgtaccggagccgccgccacacgaggaaggagacgccggcgaccacggcgagcgcgaggagcggcgcggccaccggaatgacgacgtcgagcgccttggaccgccgcttggcgctcacgaccggcatcttgggaagcttcgcgtagtcgagcggcggcgcgggcccgtccatggcgaagctccagccgagcacgtaatggcgcgtgtggaacggccccgtcgacgacgagagcccgacgtacgccgtgccgttcaccaccggcgagaggtcgacggcgacggagatgaggggcctcctcggcttggccacctcgacgggcgccagcgtcacgttcaccaccgcggcgcggccgtcgtagtccacccagacctgcatggcggcgccgctgaagagcgtcaggttcttgaacgcgccgccggtggcgtcgtcgtagtagccggcgggctcggcggcgacggacaccaggccgttcacgtcgacgccgacgtggttgctgttgatgtcccggaactccgggttgaggatggtgtcgagctcgacggcgaagacgcggttgctggcgttgccgttgttctcgctgttgaagaggcccaagaactggctcggcgacgccgtggacatgttcttgctcggcgcgacgaagaaggcgagaccgttgccgctcaccgtgacgtagtcggcggcgatggcgaacacgaaggcggtcgagaacgacctcgccgcggcggcggtgccgttcgccggcggcgggtggtggaaccggagcggcgccgggtggaacgcgtggcccttcatctgggacgtgacgttcgtcagcatgagcttgccgtccggctccaccacggccatgccgtcgaggtcgagcgccgcgccggcgaagccgtcgtacctgaactgatcgccatcaccaccggccgccgccgcgtggaagagtagcaacagcacaaggaaggagacgatggagtgaggcttgagatgcatggatggatcatcaatcatcaatggcaaaccgtaggtttcagaatttttcagatgtaaaagaaccaatttggcactggaaataaaggctcttagagaacagctcaagaattgaacgcaagaaaagttaatcatggtttctactgtcatgctccagtttctgttcaagccaactgactcggagatactcctgatgcatacctcgaatagttggtttatgttatcagccgttttcgctgatgtctcgatgaaaaacatagtgttcctctctgcatactcttgtgcatcctgagaggatacactacgattgtcatgtagatcagccttatttccaaccaaagccatgatcatatctggactaccgtgtttctgaagttcatgatttatcgaagtcaaatgtagaccatggtcaacatacatcttcacccagtattgtgccttgttaaatgattctgaacttgttatgtcatacacaacaattgcggcaccagctccccggtagtaaagaggtgccaatgcagcatacctgaaaattaaccagttctcgtgacttctttggtaacgaatagcaacacatatgctctcctgaccagcagtatcccatatttcaaactttactgttgtggaatcctccaacgccaatgtttgtgacaaaaatgatgcaccaacagtcacctttgaagtggggtcaaactgaccacggacaaagcgaagaacaatgcaacttttcccaacacctgaatctccaagcaataccaacttcactcgcaagttcttcagatcagtaccagaattctcgttgctgatagtacctacccctccagcattattagatgtggctgacatgtgaaagaaatatagcaaagcatccttgttcacactattcttcttccccataatcctgttatagcctgtagttttgtgataaacgaagacattaaatctgtagctttgtgaaactagttctaaaatctccatgatcacaaattcacagcccctctggtgcgctggacaatgccacggccaagattttacacccaaaaccaaaccagcgttgacccaacctctccatccactaattctaacagtcaacacagtcaatcctactgcctcttcagagctttcagagctcttccaccggaacgcgtcggtgaaggacacgctcttcgatgacctcggcgggtggctgacgtggcggccggaccgccggagtggcacgccatgggaggccgcgaccatttcttcgtcgtcggccgcaccacttgggacttccggcgacaccgcaacgaaggctgggagtggggcagcaactcagcaagctgctcacctaccccgccgtccaaaacataacagcgatcctcgtcgaggcgagcccatggaatcggaacaaccctgccgtcccttacccgacctacttccacctggagaccgccgccgccgtggccgcgtggcagcgccgggtgcgcgcagcggcgcggccctggctcttctccttcgccggcgggccgcgcaagggcaacgactccatccacgccgacatcataaagacgtaaaaaaaatctataacactaaatttatttttcta

SEQ ID NO: 20360 - DNA, 389 bp, Oryza sativa
  unsure (1)..(389): unsure at all n locations
  Clone ID: PAT_MRT4530_25735C.1
gccctcgtattcttggtgcgttggactccaccgcggtggcggccgctctacaactggtgggtcccccgggctgcacggattcggcacgggcggggcgccatcagccgtccggtcgggtggtccggtggctctcgctctctccgcctctgctgctgctgccgctgccgccgcggcgcgggcgctcgcggcgggggtggctgccgccgtgggttacgccgcgtcggcggcgtcgtcgcggtgggcgggcggcggcggcggtggaaggaacggcgctgcgggatgacccacgcgggggacgggtctcttcttcggcggagggggggttttctttgggtcccccacccccgtgggggggccaattgcgccccntnctnttttcgggggggggg

SEQ ID NO: 20361 - DNA, 165 bp, Oryza sativa
  Clone ID: PAT_MRT4530_25736C.1
atggaggttgaggtccacgtcgatgggcttcagaaatttgcggaccaaccgcccccgcgccatgctcaatgcctcaataccagcaactctttggaacctcagcaagaggcgaaggtggctagggagctggttgctgatggcgagctcagggagtgccgtagctag

SEQ ID NO: 20362 - DNA, 223 bp, Oryza sativa
  Clone ID: PAT_MRT4530_25737C.1
tttctaaagaacccgataactgtggctccgggagactttcttcgagatttggcgcggtggccgccatcaggggtcggagcaacaagcggaggcgatctggagcaggaggggataggaaggagatcatgcggcctgaacaaacatacaccaactactacataaaccaccatgggatttagcgagccacccgcaccctcgaggtggagaggaccagaacgcggcg

SEQ ID NO: 20363 - DNA, 371 bp, Oryza sativa
  Clone ID: PAT_MRT4530_25738C.1
ttctactgtgccgccggcgctcccctctctctcccacccaccgccgacgcccctcttcgcccctggatctggcggctggccagcggcgatgcggcgccgaggcggtctcggcggtgtgcctgcgacggacgacgcggcggagatcggcggcggcgcgggagctcggtcggtggcgcggtcgtcctcgcggagctcggtggtggcgcgggaggagtggcgaggtgcgacggcgactgcgcctcgagaagcggcgaggtcggcggcggcaggcacccggcggggctttcttcttttggcatcaccatggtcgctgggcgggggcttacttcgggccgaccggtccttggcaactttattgttttccctcccat

SEQ ID NO: 20364 - DNA, 465 bp, Oryza sativa
  Clone ID: PAT_MRT4530_25739C.1
atgacgtcagcggtgacgtcaccaccggcgacggctcgggcggcgcatgctcgccggcgaacgacggtgcgaggacgcgaacggagggcaccaaaacgatgcgggcgacgaggcgaactcaccggtgaccaaaacggcggcggaagagcaacggacggcgccggcgatgaggaagaagcggcggcggtcttcgggtcaacggtgacggcggtgctccggcggtcttcggcggcggcgaagcggtggacggggatggcgacgcaacggcgaccacgacggggcaaggaggcggcggcgaaggcccacggcaaccggcggcgagaaggaaagatttcaccggatcgagaaaggatcgaccggattggaaagcggcggcggcgaagcggctcggctagggtttcgagcggcggccggcgcgaggagaacgacgaccccgacaagtgggtcccgcctgtcagcggctga

SEQ ID NO: 20365 - DNA, 2246 bp, Oryza sativa
  Clone ID: PAT_MRT4530_2573C.1
atggccgccatagaagaggagaggcctctgcttcctctccaatctcaggatgtaggttcagaatacacaagggatggttcagttgacatcaacaaggagccagccctgaagcacagcacagggaactggagggcgtgcttcttgattttaggtgttgaattttgtgaaaacatgacctactttgtaatctcgaggaatctagtcacattcctcaccactgtgctccacgaaagcaaggtcgatgctgccagaaatgtctctgcctgggttggagcttgcttcctcacaccggttgttggtgcctttctggcagacacttattggggcagatactggacaattgttgttttcctcccggtgtacatcactggaatgctcatcgtgacagtttcagcatcacttccaatgttcttgacatcttctgaacatggcaatgttcatcgttccgtagtgtatctagggctctatcttgctgcccttgggagtggtgcaatgaaaccatgcacttcatcctttggggccgaccagtttgatagcactgatctggaggagttaccgaagaaggcctccttcttcagttggtccttctacatgactactgtcagcaccttgctgtcaagcacagtgcttgtttggttgcaagacaatgttggatggggggtgggttgcgcaatcccgactgtgttcatgatcatcagtttccctgtattcattgccggctcaagagtttacaggtttaggaacctgggatttagccccctcaagagcctctgtcaggtgattgttgcagctgttaggaagtgccatctgcaattgccagaaaataagtcacttttatatgagccatccaattcatcttcaacaactgaagcaagtcataaaattcagcccaccaatcaattcaggttccttgacaaggcagccattgtactgcccccatcagacgaaacgtgcatcaagcccatgagctcatggtcgctctgcacagtgacacaagttgaggagctgaagatgctgctgcggatgttccccacctgggcatctttcgtgatctttttcgcggtcaatgggcagatgtcctcaacgttcattgagcagggaatggccatggacaaccatgttggttcatttgcaatcccacctgcatccctcaccatcatcgccgtgctcagcgtccttgtcttggttcctgtgtatgagatcatatcagtgccactggtgaagcatttcaccggacaggacaaaggcttctcacatgcgcagcgcatcggaatcggcctttcactgtccatgatcatgatggtgtacgcagcattgctcgagatgaagcggctggcaatcgtgcaatcaagtggcttagcagaccacaatgtagctgctccaatgagtatcctgtggcagacaccagcatactttctgcaaggggtttcagagattttcagctgcatcggtatgtcacagttcttctatgaccaggcgccagacagcatgaagagcgtttgcgcagcgcttgggcagctcgcaatcgcttcaggagcttacttcaacacgttcgtgcttggcgctgtcgcagtgatcacgacgagcagtggagcacctgggtggattccggataatctgaatgagggccatctggactatttcttctggatgatggccacccttagcttacttaatcttgccatgtttgtgtattcttccacgaggcacagagagaacacagcttcatgaccagatttatacataagacatgaagcaccgaacgaaatctagagggctgtcataacatgaatgagttataccaaagacatacctttatcatttatatctagtaatgaattggaccgccaaggcctcgcggcaaaaaaaaagaaacacatgaccatctacatccctaagggcttgtttggttaatcgggagggattggaggggtggaataaatcccctccaaatcccccttaatccccttgtggtagggattaaccgaacaaggtctaaattcttttaacatttcttcgaaatctacaacttccacatatataagttttcactaaaaaaagagaaatatataagttcaattgaggcagaatacacaataagagtgttactatatatggtcactagttttctttccaccgagcaaacagaaaatcgcgtgtgttagttacttaaccagaccccgccagattctactactggtttgcagaagaaagagaaaaagaagaagaagagagaagcctcgtgc

SEQ ID NO: 20366 - DNA, 219 bp, Oryza sativa
  Clone ID: PAT_MRT4530_25740C.1
tcctgcagcccgtcttcttgagggcgcagcagctcgagcaaaccccgtgtgattacgatgtatgggatatatgctcgaacaacgccatctctggaacagtgcaactctggaatccgatcatggcatacaagttggctagcttcacgcagacttctgcgggcattaccaattcgttctccaagacaaacatgcgaagggatttttccaggtcgctcaccg

SEQ ID NO: 20367 - DNA, 565 bp, Oryza sativa
  Clone ID: PAT_MRT4530_25741C.1
aaacaagcaaaaggtcagttctttagcttattatggccccccttgggaaaggggggaatttttcggccggtcataccgccttgcttttctttgggggggaagaaaaacccaggggcaaagcagctgccttttttggggggacccctcccccctcccgggggttccaccgaccggggtgggttggtgaaattaaagataaaatatttggaccatgcccttggggggggggggctccctcccccccctgggggaaagcgggatggtaaaattcccccccatggggggggccaggggggggccccccccaagctggtagtcaatgtcccaatcccggcccacgttctttaccagggggatggggaagtcgggggggatcttggccggtatctccagcttggggggggggctcgccgggaccccccccgggtggggcattgggccggaccccccaacgggggcggggcacttgggggggggggggagcccccaaaggggggggggggggccccagggggtggaaacctttacctttgttggcccggggaagcccccgggggttatcccc

SEQ ID NO: 20368 - DNA, 529 bp, Oryza sativa
  Clone ID: PAT_MRT4530_25742C.1
gtacaaaactgctcatgttttataagacgaacaacagtatatacaccaaatgaattcgatggtagcaaccatcgctagtgtaagacgacgagaactgcgaaaaggcgtcccctgtccccaaaagtgccttgaacaaaaaagtagttctgtatggtcaaccagattagagttatatcttcttctgtgttagcataattcatcggtacaccctgaggacgccatttcgggatgccaatggtgcaaatgcccccggaggttggtcaccgaagaactaatgttactgcaagtatgctcctggaccaccaatcaagcttcggtaatgacatcagcatattgaggattgttggagttatattgtgcttccatcagacaatcctgctctaactgcggaaaatataatcttgaacactcaaaggagggcccatttgaccatcattctcaaatggtggaagtattgggtctaggttatcatcaaacagaagctgcatgtcgttatcatcccattcatgtagagtagagttatcaggga

SEQ ID NO: 20369 - DNA, 696 bp, Oryza sativa
  Clone ID: PAT_MRT4530_25743C.1
atgctaattcagcaatcgttgctgctgctggttctacttcggtttcaggctctgaactgggtgcagacaaggctccacgggacgaggaaacaagatcacactgcagtgtcatctcgacgcgctcatacctccggtgatctccaccggaacggcgacgagctcgacgacggctgggcggcggcgatgctgtccataggcacgttagggggaccgaagggccgtcatggttctggcacgccgtggacgacggcggcggcgggcgccgacgagctcgacaggctgcaggaggagctcaggctgctggttcgagctcaggcggtggtgaccggaggcgaggacgacgacggcggcggcggcggcggcaggcaacgcaggtcactgagccgcacgtcgagctccacgaatggcagagaggtggtggccaagctgaagcagagatcgatcaggaagatcatggccgctgctctcggtggcctcctgcaccggccgagctgcagggagacgatgcctgaagcgactgtcagtgagattatatggtcattgttgcacaagaacacgcatcctgaaaaaccggcgttgccacatactgtgatgaaaggtgatccaacggttccgacgccacagaaggataaacaagagggcaccaaatggatcagaacagattcagagtacattgtgttggatctggagatatag

SEQ ID NO: 20370 - DNA, 600 bp, Oryza sativa
  Clone ID: PAT_MRT4530_25744C.1
atggctttcggtcaattcacaatgaaggtgcagagacgagttgctttgagtagcaactctagcattgctggtgattccatccagccgtccacacggtcatcgctccatccctccatcccctccgtcctcgctatatttagtccacgcaatcaccacaccagccaccgcctagacatcctcgctgcctccctgccaaaaatccccaaatcctcctcttctcgccgccgccgccgcgctgtcttcctcccgccacgccgcagcgccgccttcctcccgcgacgcccggccggcgccgtcttcgtcccgcggcacccggtcggcgccgcggcgcccggacggcgccgcggcgcccggacggcgccgtcttcgtcccgcgggtcccggccgtcgccgccgcgccgtcttcctcacgcggcgcccggccgtcgccgccacgccgtctccctccgcgacgcccgaccgtcgccgccggcaccgccttttgcggattcattcctttggcccgtcgctgccggagctcgcaaggccttgtcactcttcattgagctttcacacgatgtcatgctcttctgggccatcgacaactacatcacagcataa

SEQ ID NO: 20371 - DNA, 1197 bp, Oryza sativa
  Clone ID: PAT_MRT4530_25745C.1
cacgccgcagcgccgccttcctcccgcgacgcccggccggcgccgtcttcgtcccgcggcgcccggacggcgccgtcttcgtcccgcgggtcccggccgtcgccgccgcgccgtcttcctcacgcggcgcccggcagtcgccgccacgccgtctccctccgcgacgcccgaccgtcgccgccggcaccgccttttgcggattcattcctttggcccgtcgctgccggagctcggtgactgtggcggctacgaagcacggcgccaccaccactatcccgatctgcctctctgtccccttacccaagttctcaagttaattcgtgaaatgataacaaagaatatagctcttgattcaaaaatcatttcgactattgccacttctttggttgcaagcaatgaaggcaaagcattgttgcaggtcttgcctgatttcagtgcagaaatatcgaaaagcgacatcaattcacccccggagttattgaaaatgttgcataataccagaggtcttaaaagccagcaatggcagaggttacagctgctgtacattggggggacatcaagcaaggccttgtcactcttcattgagctttcacacgatgtcatgctcttctgggccatcgacaactacatcacagcataaacgaaaggagcctttgccggactctccagcttcaggttagtgtgctagctataagctgcagacaatatattcctatatgttttccacaggtcccattctgtttgtgtttacatgttcagtcctatctccactaaggtttgtcaaattcactttcttcctgctgtattgtatcgcctacaaactatttttcatataatcttgccatacgcttaattacatgcatattctacgtccttgcctcacataagcaactttgttttggtacatatggccccgtgcctctatgagcagctcagtttattactagagcaaatatgtgcagtgtgattttcctttttcttaaatacctagattcatatgcccatcatgctatatcaacatttctagcgtacacaacaacacactgcatatttcatttcatttatttttctcacaaaaatgctcttgcttcacatgggaggcttcatttgctaattcttctccttttattcatacttcaggttcaaggcttgtaggttccagctgcatggcaattggctctttgggttcctctacct

SEQ ID NO: 20372 - DNA, 716 bp, Oryza sativa
  unsure (1)..(716): unsure at all n locations
  Clone ID: PAT_MRT4530_25746C.1
cacgcgtccgcacaccctacccaatctgtctccaggatcccgacgagggcgaacctcgccctcgccgccctcctcatcctcctcaccatcgccgccaccaccctcgcatcggcgaagtgcatcgcgaagaacaaacccgaaggcgaggagggggaacccggtggtgcgggcgcggctgcggcccacgcttcaccggagaagaaacccggctccaacggcggcttaaccaccatgtccgtcggtgagagcgtaccggagatcaagaaggactcctccgatgatggcgccgccgtgaatgagagcaagaaacctaaatccagtggcggcttgactaccctctccgtcgatgatagtcaagcagaacccgcggacagtatagcagaacccgtggaagatggcaccgacgacggcgaggatgagtcggagaaaaagaagaagaagaagaagaagaaatccaaaagcaagagctccgatgatgatgatgatgatgccgagaagaaatccaagaagaaatcgaagaactcggacgacgatgaagatgacaagaagaaatccaagaagaaacccaagaacccggacgacgatgnaagatgacaangaagaaatcgaaaaagaagagctccggtgaagacaacgacggtgccaggagaagaagaagaagaattcccagggcaagagctccgatgagggagatgatgaaaagcccaagaagaaat

SEQ ID NO: 20373 - DNA, 189 bp, Oryza sativa
  Clone ID: PAT_MRT4530_25747C.1
atggaaccaggtttttccactaaattcccgaatagaattccaaacagaatgtgcattaaaatccccgtccaggaccggccggggtacacaagcgacaaacgggaacaccactccacaggcatcctcgacagcacggacgaagcctactcctcggagaaaccatcatctgacgcatactcaaattctggg

SEQ ID NO: 20374 - DNA, 363 bp, Oryza sativa
  Clone ID: PAT_MRT4530_25748C.1
atgttcctccacttccctgagcccgccgccgtccgcatagaggcactagtggagcacgacgggtggcagatctcgccgtggtgggctcgctgcaaggccttcagaatcgtctacttcatcgtcggcacgatcgcgaggctcccgtcttcgtggacgccggccctcgcccgtgatgccggctgtccgggcgggtggccctgggagagtgtcccctcggacccatcccgccgctgttcgccgatcgatggcctccaccccatgttcgtcaccgcatacaccgtgcacctggacggccgcaccatcttcatgccggaggcaggcgcggcggtcgacgaggagaggggcggctgccgcccgcgatag

SEQ ID NO: 20375 - DNA, 513 bp, Oryza sativa
  Clone ID: PAT_MRT4530_25749C.1
atggcggcacttcccaaggccggcaagccgctcgtcgagaatgacgccggctcatacctcgcgtggtccggcaagaaccagccggccctcgccggcgagaagctcggctgcggcctgctcgtcctgaagcccctcggcttcgcgctgccgcactacgccgactccggcaagttcggctacgttcttggcggcagcgcggtggtcggggttcttccggtggggttggacgccagggagagggtgccccggctgggcagcctgctcgtcgtaccccggtacccggtgccgctcgtgggcgtgcacgccgccggccatgcagctggtgttcctgatcaaaagccccaggccggcgatgaagcagttcaccgggaagggatcggtgatcggcggcctgacgccggagattgtgcaggcggcgctcaacgtgtcgccggagttggtcgagcagctcaggatgaccaagtgagcgaagccaactccggatttgatctctccggcgatggggtgtggtga

SEQ ID NO: 20376 - DNA, 1029 bp, Oryza sativa
  Clone ID: PAT_MRT4530_2574C.1
atgggcgtccaggaggaggccgcgctcgccgccgccgtcgtcaagggcaagcggagcaagcgccagcgggcgcacgcggcggtggtcccgatcgccgcgtcggcgacggcggaggaggaggagtccatggagtcgtcgctgtcgctgtcgggcggcgccgcggcggaggggtcgtcgacgacgtcgccgttgttgacgacgacggccgcacggggcgacgaggccgtgtccgggtgcgtcaccgaggaggaggaggacatggcgctctgcctcatgctgctcgccagcggcggccacggcgagcgcgcgccggacgccgaggcggtggcggcgaaggaggccaagttccggagccggcggccggcggacggcgccggcgccggggagttcgtgtacgagtgcaagacgtgcagcaagtgcttcccgtcgttccaggcgctcggcggccaccgcaccagccacaagaagcctcgcctggtcgcgccgccggcggccatggaaccggcagccgatgacaagatcaagccgaccatcccggagacagccgccgccgccgccgaggagaagccgcccaagccatcgccgccacgaccaccggcctcgaggccgatcgccaccgatccaacagtgctcgcgatcccggtgatcccgaagcaagaagtgctcgacgccaccaactccgccgccattgccagcgtctccaagcagccacgtgtccacgagtgctccatctgcggcgccgagttcgcctccggccaggcgctcggcggccacatgcggcggcaccgcccgctcataccggcgtcggcgtcgtccgcggtggtgtccgtgctcgacgccgtcgacgcgccgaggcagaaggagaagagcctcctcgagctggatctcaacatgccggcgccctgcgacgacgcgaccgccgagacgacgacgacgtcgtccgccgccacctcgccggcgttcgccttcgccgtcagcgacaggtcgccgctgctggtgccggcggcgctggtcggctgccattactag

SEQ ID NO: 20377 - DNA, 284 bp, Oryza sativa
  Clone ID: PAT_MRT4530_25750C.1
gagatattagcagttgttggctatggtcgaactcataggccacgtgaacacctacgctgctgaagagaaaatctctgtctgagacactgaggccagctgtctgcagcactagcaatgtcccggatgaccagtacagtgcaggatgtgaaaactgcctgcaggaggacagccgtgaggacacactcgggaggctgaagtgcaagaccagatttcactgcaatagcatcaagaagaggatgcacgagaggaacacctgcccatgctgcagagctgcttgagcaaag

SEQ ID NO: 20378 - DNA, 187 bp, Oryza sativa
  Clone ID: PAT_MRT4530_25751C.1
gacataattgagttagatagacaattgatattctagatatcaatacagatacaaacattcacaatgtcaataatccgttgcatattagatttgttcatcaaatgggaagcgattgcaacacatttcaacttgatctattcctgtatttaacgtacattgaaattccttccttcattttcccgcccaa

SEQ ID NO: 20379 - DNA, 1031 bp, Oryza sativa
  Clone ID: PAT_MRT4530_25752C.1
ccggccacggcccaaccgcccaacgcgaggtcgaggcgtgagccagccaagccggagccggagccggagccggagccgcgcgagagcagaacgagcctcctatttaatacggccctgcactgcagtcccccgcgtatctcactcgactcggcttgacccaacccaacctacctcgcgatccccccctcctccgccgccgtctcgtcgagagagagagagagagaaggactatcgagatggcaactgcaactgctccgagattgtgctttcctaaacccggcgcggccattgctccggcgaccaagagcccttccttcattggttacgcaaagcaaacattgaacatgtcaggcctaaggatctccaacaagttcagggtgtccgcgacagcggtgcacaaggtaaagcttataggcccggacggtgtcgagcacgagtttgaagcccctgaagatacctacattctcgaggccgctgaaactgccggggtggagctgccattctcatgccgtgctggatcatgctccacatgtgcgggtaagatgtcatcgggagaagttgatcagtcggaaggatccttcctcgacgagaaccagatgggcgagggatacgttctgacatgcatttcgtaccctaaggcggattgcgtcattcacacccacaaggaggaagaactctactaggtcgctctttttatgcttctgtgggcacatttgctgatttcaaagtggactcgctgttcagttagttttcgctatccaaaaaatggccatatctttgtattagtcttttgatgggaccgtgtcatatgagttgtgacaataattgtcgtagtcctgttcagcatttcaaattgcgtttgttcaattcacagcaggtccaacttccaacgatgacatgttatcagaagttgtgtgtaatggtattattgtggatcacttccagtaggaaaaaattgacttgtcctttctccacatgctattttgcaagatgaatcagaagttcagacattgtagaactttctatttgcc

SEQ ID NO: 20380 - DNA, 612 bp, Oryza sativa
  Clone ID: PAT_MRT4530_25753C.1
atggccggggaggcattgaaggaggcgggggcgacgcccgccgcagcgaacgcgggggaggagaaggccgtcatcccggcggcttcgacatcgccggtgatctccaagaccgatgatgacacggagccgccggccgatgactccaaggctctcgtcgtcttcgtcgagaaggttgctgataaacctcatgctgagaaggcaacagcaacagcaacaccaacaaggacctcaaatgacagagatattgcccttgcaaaggtggagacagacaagcgagaatcgttgatcaaagcatgggaggagaacgaaaaggcaaaagcggagaacagggcctctaagaagttattggatattatttcatgggagaacacaaagaaggcagtaataaaaactcaactgaaaaagaaggaagaagagttggaaaggaagaaggcagagtacgctgagaaggcgaagaacaaggaagcaatcgtccataaggaagctgaagaaaagagagcaatggtgatggcccggcgcggtgaagaagtgatcaaggccgaggagatagcagctaagtaccgtgcaaccggagtgacaccgaagaaacatatcgggtgttttggggcataa

SEQ ID NO: 20381 - DNA, 453 bp, Oryza sativa
  Clone ID: PAT_MRT4530_25754C.1
gccacgcgtccagcaaatgtacgagcttagcagcaccaggtgtagatccagctataacgggtgttggcactgctgctgccatccatgctgcagtgaaagatgctgatcttcaaatccatgatgagaaccatgacgagattaaagaggacttcgcataacactacgtgtactggtgcctgaagccggcactagatcctgcaaacggtaacgctaacggaggtgcactggctttggggcatacattggctgctacaggtgcaccgcctgtcaacaccctgatcaaccaaatgaaacaacggcgcaaagactggagattcatggtcataggcatgtgcataggttctggcatgggggctgatcctgtctatgcacgtgatgatgcaactgatgatctcactaatgctacgcacatcccgacccataaccacgttttgtaggtcgccatgtatctag

SEQ ID NO: 20382 - DNA, 2313 bp, Oryza sativa
  Clone ID: PAT_MRT4530_25755C.1
gcatatccattacctgtgtctcacagccaaaaaaaacacttgttctccgatacatagcgttggcgataagcaacgccggcctcgtctttcttttcttgctgcttcttctttctcttttttggctgtttgctgacgagacaattagctatatatctattgaaaagattttatcattacagccatcctgaacaaaacagaatgctacaaacatattcacgagagacactactttggagcctctaatcagctggttttcttttgccagtttcaccgcatgggtcccataaaccagctgagtgcagcccagaacagcactttctaatattcgaagaagcttcgatatctaattgttataccactgtaagactatacaggtctattgatcgatatctcttgtcccagtaacatcacgagcggaaatttgttacaaaacttctgtcatttctttgcaaccttgggaggtggcgaagatgacgatgaagatgacaagatagaaaacatgctattatcagctctgtctttgctgaatgccttgcgcacatcctcctttaactcacagaaccgcatccttttaacattttgctcatcagaagtgccattttggaggtcgagtgcatcaggactatcgggcaaatcatcctccagaaatttgtcgagcacctgcgagcagttagggaagtagcgacgtcccagctcaactgttttcatgagtgcatccacccttgaacggagccttttgttttgtgttactggtgtctcgttcagatcgacttccttcaattttccagaagtgctagctgcaggaacaatgccaaattctggtgtggtgtctgcttgtgcaatttgcattgcaacctttgcttctgcaggaaaaaataatcttgcaaatgcaactctgttttcaaggtagagaagcttcatgtgaagatcgtcagccaacaaaggcgaggtgacagaatcttccactgccataggtttccttatcatctccctatctaatatatcaatacataatctgtctttgtttgactcttggccttgctccatctttgtattgtagtctttcatccttgttaacctccggcagatactcattgcactctggccatcagcagtcaattgtgatacagctgctcctttgtttaggagacacatgataatagctggctctctcctcatagcagccagatggagtgccgtgtatccacgcgaattcttcaaattcaagttggcaagtctcaagtctaacaactccgaaacaactttcgaatcacagtaagcagcagcatagtgcaatgcattggcatcatccaaggtgatctcagattcgttaagaagcaacttcacaagctcaacatcatcagaatccagtgccctgtggattcttctgacccttttctcatgtacagggtctgaaatgacggtgtcaccctcatttggctgagatttttggcgaatctcttttatctgaacagcaacttctggaggaagttccttatccaacgatacattatcaagatttgatcttgcaattctccgaatacatttttcaagcactggagtcagctctgaatgaaaagcaacttgcagaattggaagaacatcttctactagagtcttatcgacgaagttaagaagccgtcgctggaacagcgagatgagctcggtgatcttgaacgcccacgccgcgtacatttgctcgacgttgaacctgatcgccggcgggcacgagtcgtgcgggcacatggggtcggcgcaggacaccacgtcatccggcgccggccggagcttgcccgtgtacaggtaacccagcagcgacaggaaggcatcgcgccccacgcggcctcccggcacgagctcctccatcttgtaccgcggcctccccccagtcctctcccctcccccaccaccgccgccgccgccgccgccggcagccccatcgccgccgcggccgcgcgccgcgaagaggttgtagaagaaggtgctgcgggcggcgaggatgcagcggtggactggcacgggcgggccaccgtcggccacgtcgacgtcggcgtcgctgcagtcgaggtcggaatcgaggaggagccgctcgaggttagcgctaagccgattcaggctcaccacctccacgctactactccctcctcctcctcctcctcctccgccgccgccgccctccccggcggcaaccggcgccgcctgcgccgccaccgcccctgcccccggcggcgcaagagagaccgagcacgggctagacccgttcgagaggtacgaggacgacgacgcgatggtgatggacgacgagggctccat

SEQ ID NO: 20383 - DNA, 190 bp, Oryza sativa
  Clone ID: PAT_MRT4530_25756C.1
tgatccttctctctctctctctctctctatagggggggttttataaataatcctcggttcacccttctactctccaaaccctagccgagctagatatccaccctcgtcggctgatgtcccgtctctggtgtggactctccgcctcagatccccacaccgacggtgtatatcccgtctcttaatcatcaca

SEQ ID NO: 20384 - DNA, 226 bp, Oryza sativa
  Clone ID: PAT_MRT4530_25757C.1
ggagagagagaactagtctcgagttttttttttttttttttttttttttttttttttttttttttttttttttttttttttgggagccctcgcacactttttagtaaattacataattcaacatacaataacttcagagtgcactagcgcattttaaatgacaaaagatgagtcataatggtttgcaaggaaaaagatgctaaaatcgctattttatccgggctta

SEQ ID NO: 20385 - DNA, 957 bp, Oryza sativa
  Clone ID: PAT_MRT4530_25758C.1
atgggcagcctggagctcctcgtcacgcgtccacgcatgcaccggctcctccggtgctcggcggcggacggcgacggcgagagaggggcgagcagcaataatggcgcggcggtgatggaagttcggcggcaatggcgcggagcgggagatggtggtcgcgctagcttggctggcggtcacgggcgacgcaagagcggcagacgacgaggatgcaaggggcggcaaaggcggtcgatcgggcggtggaaatcgaaccgcgggagtgagaggagcagcgcgggctggcgcgggggcgagctggcgctcggtgtccatggcgctaggtgccacgcggtggagacagggcgccagtccgggaaggggagaaaggaaaaaggggaggaaggaaagggggctctgcccatgccattttgggagaaaggaggagggagagagaggctctgcctccgggatttggacgcacgtggcttggagcgaccgagcatgggcggctgcggggcgcaggcgcggcggggccgacgcggcggcgaccggtggttgatggcatacctcaaccgcgtggttcaagacgacgacggcggcttcaggtcgaagaagctgcgccttgcaagccaactggacaggaacatcacttatcactctgcaatcgctgcgtacatagcggatctgtggtggagcggggcggcggagcgcggcagaggggagcactcgaggaagaggggagcacttgtgtcggtggctgatgggcttcccggtgccgacgcaaatcgatgcgtcggtggccgacggagcttaaaggcgagaacggaggtgaagaagaagaaggaaaagggctggatggggatccatcacaaggagacaacctcgccaacacacttccccaagcgtgccttcgctgttctcgagaccgggcgagtagaggttgtcacgccccgaactagtcccgaccggaactag

SEQ ID NO: 20386 - DNA, 404 bp, Oryza sativa
  Clone ID: PAT_MRT4530_25759C.1
gggggttaattttttttgtttttttggacccttgggcggtcgattggttctgccgacggagccggggccggggcccgcgggccaacccgggaacccgggcccggaaccaggcacggggcttgccttcaaccagggaggggggggaacacgggggaaaataggaaaagggacacaacggcgcccagaggacaaccgccacaccaaaacaaaaaagccgggcaccccaaaggagggagtaaacccacaagactgggaggggaacaaaggcccccaccccaattgggaaaccggggacccccgcgacctaaaaaaagcgggaaacccgcggggcaagaggaataaagaaaccccccaccggggggggaagggcataacccctgaaaggggcaaaagttgttttccct

SEQ ID NO: 20387 - DNA, 213 bp, Oryza sativa
  Clone ID: PAT_MRT4530_2575C.1
atggagactgaactcgacacgagcctgtccgcgtcaggcatgacgctgctcacagcatgggtcagctacagggccaacttggcttcgtcgaggccgttgacgccggggatcttctccgatcgactccttgaacggccaatgaccaatggcggtgagaactttggagccttttggagcactcgtacctgggttggtgatctgttaagactttga

SEQ ID NO: 20388 - DNA, 297 bp, Oryza sativa
  Clone ID: PAT_MRT4530_25760C.1
atggtgatgtacatggagcggacgttcattgtgacgtaccggaaggtgtcggtccaggagctcggcgtgaagctctggcgcgacggcgtggtctgctccggcgacgtcatgccgaggctggtcgaggcggtgcggcgcgagcgggcggccgccgccgagcctggcgagctgatggccggtgtggccgagatgctgacgaagcttcgcgacaaagtgttaagccaggtcatggacgcgtcgtctgtcgacgactatagtagcgccagtttggagaagtctgtatcagagtatcagtag

SEQ ID NO: 20389 - DNA, 525 bp, Oryza sativa
  Clone ID: PAT_MRT4530_25761C.1
atggctctagcagttttcctttcctcttttaaataccaacaagaggcgtcctccttagcatggcttcatcaccggtggacttctcgccggttcattgacatggagctgcagcatcgccgtatcttcctcgactacacttcgctcttcttcggcaactgcgtgctgctccggcaattctccctctacgccgttctcgtgccgcgaccgtctcggaggcctactctgctagtctcttccgacattggcctcttcggcaccatcttcctcaacgactgccgcaattgtgtcactatcttcatctccagcgcgtcctcgcgcacattggtccacaacgcactcccgtgtgtccatgaccactctacgactccccatgcgtgctctgcggctctgctacctcgacatcaacttcccgactttggctatatcgaccacagctactctacgcacgacttcatcgaccacggctctctcgcacccttcgctttggctacatcgactatggcacaaagggctatcccgtgttga

SEQ ID NO: 20390 - DNA, 1893 bp, Oryza sativa
  Clone ID: PAT_MRT4530_25762C.1
atggatggatcaatccctccaaaaccaccgagttgccgccagcctcaaagggaaactcacaataactctgagaacacgggtgccactggtaacgatcaggctcaggatgagggttttctactccatgtcgtagcagccaatggggatggtgaaaactacaggaaatgcgcgacattgctctctgggatggataaaacacgtctcttcgcacgcaacagcgagaataagaccgctctagagtgtgcagcaaatgctgggtacaccaatatggtttttcatctccttgacatggagcgaaaacacaatttttgtggactgaacactaaaccaaatgagatcttgaagaagacaagtggacgctcagagacaccgttgcacgaggcagtgaggcagcgttgtgaacgtaagattgaagagttgaagggcaaggacagtggtttagcgcgtgtcccggacataaacggcatgtctccgctctacctcgccatccccttgggatacagagacatcgttgataagctaaccttaacctttggtgatgcgaatctgtcctacgatggaccaaatggacaaaatgtgctacatgctgcggctcttcagagtgcaggaaggagaggagatctcatgaataaagctgattggtctggaagtacacctcttcactttgcagcatcagtaggagttcagggcgtaacaactgcgctgcttgatggcatagaccaagatcgcagaacggactacacccaacggcccgacaacaatgggatgttccccatacacatagctgcttctgttggttcaatggacacaatcacctcattggtcaatgccgatcaagactgtgccactcttcgtgataatgttaaaggtagaacattgcttcatatcgccattgagaatcggaagtacaaagtagtcaaattggtgtgcaaagatccgaggttcaaggaaactctgaatttggaggacaacgacggtaatactgcattacatcttgctgtaaagaaaagagacgagtacatcttcacgtatctcctacagaataaggccgtggagctcaaccatgtcaacctagaaggctatacaccactcgatcttgcaaaagtgataaggatggaagactactttgcctctccccagaacccaacagaatggatggtgagggtattggctcattctggagccgtcttcagtcctcgtaggcgtgatgaactgatccgtggtggtagctctcaagaacaagaaaagcacgggaaaaccctttcagagtcgactgaaagcgtgttggtcgcatcggcgcttatcgcgacactgactttcgctgcagcattcaccatgccagggtcctacagaacgacaggcccaaaggaaggcacgccagcactgggtgccctctacggtttcaaggttttcctcgtcgccgacatcttggctttcttctgttccgttgcggccaccttcagccttgccgagtacgggaaccgcgggacggtggatccccttgtccgctgtcggtactcacagcgtgccgtgtggctcttccatgtcgccctcaggagcatcatagtagccttcgcgttcggggtctcggtggtgatgtggaacatttctctcagtgccatcagcatcggtggtgtagccactatcgctgtcgtgttctacgggaacgttcctcttggtcaagatttcaggcttatgttgctgatgcaccgcaggtttggcttctcacgttcttggaacctgtatccttctacggcctctcatctcaactggacatcctggcagctcaaaagcttttccgcgacgctggtttggaatctgatgaatcttttttggacttatgtcctcatatttgcacttgctggcttcgctcaactgaagcagaaacattaa

SEQ ID NO: 20391 - DNA, 346 bp, Oryza sativa
  Clone ID: PAT_MRT4530_25763C.1
ccaacctcccacccatcacaacattcccctctcctcaagaaaaaccctatcgatgggtacgccacatcatcctacgctttggatgttcatcgacagcgtcatgcagcggcgtggctcgccgtcgccaccacctgccgctgcagctgacgcgggggcgtgcgccgcggagggagctcaccgccgtcggcgacggcctccggatgcaaggggtcgggatcccgatccggggcgaggccttcccggctgtcccgtgaggaggtcgccgtcctctcgtcgccgaggccgaggcgatcccgcccgacagctggggatgacgcggacggctccttcgtcgggtcgaagcacc

SEQ ID NO: 20392 - DNA, 768 bp, Oryza sativa
  Clone ID: PAT_MRT4530_25764C.1
atggagcccgaggaggcggaggccgtgctggagaccatctgggacctccacgacaaggtcagcgacgccatccacgccctctcccgcgcgcacttcctgcgcgcggtccgccgccacagcaagcccgcggagggcctcgtgcgggtcaagggcggcgacggcgtcgacgatgaggcggccgcgctggacgcggtggccgaggaggcgaggagcctccacgccatccgcgccgcgctcgaggacctcgaggaccagttcgagtgcttccttgctgtccagtcacagcaacaagcagaacgagatatttcactagcaaggttggagcaaagtcgtattatgcttgcaataagattaaatggacaccgtggggtgaataagaaaattatagatgaagctttggatttcgtgcgcaatgtctgccacggtgtatggccttctctgtcaataaacaagcctgcgaaactaggaagccattctggtgctgacagcaaaaatgccaatttcctggggcagatggtagcttctagcgttgctttggctaggaacagtttcagtatcaaaacccttggtggattattgggccatactggagtgttagctattggcatgataacactgctgcagttacattggttatcctccggacaacagagcccatcaacttgtagatacagctacaagatgatcagccaagagagttcatcacagtttgaaacagctatggataccagaataagtgatctcgatgtgttcttagcaagaggttga

SEQ ID NO: 20393 - DNA, 377 bp, Oryza sativa
  Clone ID: PAT_MRT4530_25765C.1
ttttgggtttttatttttttttttttttctttttttttttttgagacggtccaacaggacacccaagcgctgcataacttgcataattcgataacattgcacaggcggtgttagcaataggcaggaaactttttggttatacacaacaatcgagggcctgtgaaaggaatttagatcccggacctgacaaggtaacgattcaatgagaaaacgctatccgcggctagcgaaaatgatcccagtcggcgtttatttgagaggaagaaacccttggggggggtgcatagaagccgcccatgccattgtcgaaggtgtcccactgggttgccactgaaccagcattgttttgatcgctgccgggactggcattttttgcc

SEQ ID NO: 20394 - DNA, 502 bp, Oryza sativa
  Clone ID: PAT_MRT4530_25766C.1
tgtgaatcccccctcggacggcggcggaagcggatgcagcataggagagcatctggttcccctgcgctgcccgatttttggtggtggcggctgcggtcggcgggagatcgatgcctcgacgtgccggtaagcattctcatgatgtaccatgcaaagaagttctgtgtaccctttggaccgtagagttcacagagtaacgagcatatgagcaatatcggagcttttggcgggtcaaacatgggcagccctgctcattctgcagggagtgggaaacaacggctacgttggacctcagatcttcataaccgttttgtggatgctcttgctcagcttggtggacctgatagagcaacacctaaaggggttctcactgtaatgggtgttcctgggatcacaatttataatgtgaagagccatgtgcagaaatataggcctgcaaagtacataccacaatcttccggctgaggctcaaaagaccaaaagacggattctagcgattccc

SEQ ID NO: 20395 - DNA, 658 bp, Oryza sativa
  Clone ID: PAT_MRT4530_25767C.1
aagcaagccgatcggcagccacaccgcatatcatttactcttacacatttcgctcgaccgaggcgcgcgcgcacggagaagatgtgggtgacgtcgatgccgcaggtgtgggacgaggagggggtggcgaagggcagcgtggtgacgccggcgccggcgacggcgctgctggggtcgctcgcgggatggatgtcccgcgccgtcgagccgccggcgccgaggccgtgcggcacggagggtggcccgccggtgaccgcgacgaggctgaggctgcgcgacggccgccacctcgcctactgcgagagcggcgtccccaaggaggaggcccgcttcaaggtcgtcttctcccacggcttcaccggctcccgcgaggacagcgtccgcgcctcccagcttagctagctctctggcacgaaagagactgtcggtgaccgcaaaggtgtactggaggaaaaggtcgggtatgagctggtgggtgttcggtggcttctaagaatcaatttgcccggtggaacagagctttctttgagcataaaaaatttgctgtgcaagtctctcttggaaaaagtctttcatgaatgttaggtcgcggttgctgtgtatcggtttgtctagatcagcccaactgtaccaacagctgtatctaaaactcccaata

SEQ ID NO: 20396 - DNA, 1500 bp, Oryza sativa
  Clone ID: PAT_MRT4530_25768C.1
ccccgggctgcaggagaaaaaaaaaaatccccccgcaccccgaggcctccctctcctctctctctcgctctcccctccccgcgcgtcgctttcgccggacaccaccgccccccgccgctttcccctcctctcctctcctcgcgtcgcctccttccttccctttttgacccccccaattcccaactgggaatcccccctcggacggcggcggaagcggaagcagcagaggagagcatctggttcccctgcgctgcccgctttttggtggtggtggcggcggccggcggcggatcgctgcctcgccgtgccggtaaggaatcgaggctcctgttgagaaactctactactccaccatacaattatgctagttatagaacaaccacattctcatgatgtaccatgcaaagaagttctctgtaccctttggaccgcagagtacacagagtaacgatcatatgagtaatattggagcttttggcgggtcaaacatgggcagccctgctaatcctgcagggagtgggaaacaacggctacgttggacctcagatctccataaccgctttgtggatgctattgctcagcttggtggacctgatagagcaacacctaaaggggttctcactgtaatgggtgttcctgggatcacaatttatcatgtgaagagccatttgcagaaatatcgccttgcaaagtacataccagaatctcctgctgaaggctcaaaagacgaaaagaaggattctagcgattccctctctaacacagattctgcaccaggaatgcaaatcaatgaagctttgaagatgcaaatggaggtccagaagcgactccatgaacaacttgaggtgcaaaggcagctgcagctgagaattgaagcacaagggaagtacttgcagatgatcatagaggagcagcaaaagctcggtggatcactcaaagcttgtgaggagcagaagctaccgcattcaccaccaagcttagatgactacccagatagcatgcagccatctccaaagaaacccaagatggacaacctgtcacctgattcggtacgggatgtgacacagtcagattttgaatcccatttgattggtccttgggatcaagaggctgcattccgagtggatgaatttaaagctgaccctggtctgaacaaatcataaagcaaaacctcactcatcggaaattcttgatccaagatgttaacctccactgcgggccgatcgcatgtgaatatatatcctcttaacaacagagcgagccttgtaaggatctttggatccacatctgattccttcaccacggccaggtgttgttgtcactgtagtattcatcatcatcatacagctcttgtaattatcaggatgtcctaaaagccctagcaagcaattttccttcttttgaagggaaattgccctgagttgaatcatgtagccagaaagagtacacatttacacgcaatacatttgctgtgaaaaaaaaaaaaaaaaaaaaaaaaaa

SEQ ID NO: 20397 - DNA, 115 bp, Oryza sativa
  Clone ID: PAT_MRT4530_25769C.1
ccgcggcgcggaaaaaaatatggagccatcatccaatataccagccataaatattcagttgaatgtcagaagcgacagaattccacggggattattatacgtggcagggaggggg

SEQ ID NO: 20398 - DNA, 483 bp, Oryza sativa
  Clone ID: PAT_MRT4530_2576C.1
atggccgaacgggcagtggcgcacagcctctctccgaacgctagcggtgacgacggggagcagaacccgcgccgtcgggctcgcacccctccgtccccctctcgccgaaatcttgggcggggggaggcgctcggggaggtcggaggatccgcgacttcgccgcccgcgggcgacgggggaggacggcgagacggggcgcgtcgccgcctcgtctacggcgatggcggcacgccccagggcgcgctcctgcgtcacccgcccgtcgtccccgatccagagactccaacccgacgttggctggatgacgtggccgacttggtcatgacggcgcagcagcgcctaggcgccgttgggcggtcctccgccaccgaggcctctggcgcagccgccgccggctccatatcgtcgaggcggagggcgcggcgagcggcggccgttacccgccgttcgtccgccattccctcgtcaacgcctccgacctaa

SEQ ID NO: 20399 - DNA, 3443 bp, Oryza sativa
  Clone ID: PAT_MRT4530_25770C.1
atgtccgctggcgtgcttgacaggaacaaaggctactacactacacccctggggaggtccgacggctcaggtccctattcttattcttctcatggcgggagctcagggggaaggtgggaaacacgctcctctggttcaagtgaccgcgacggagatttgcctgaccgtgactcatcaatgcaggataggcgtaatgggaacgccaatacaggcgcaattggcagaatcaagagcatgatggcctgctgggaagtggcgttctccctagaccacctggatatggagggcaagtggcatccaaggatcgtgggaatacgtatcagccaaacaggacatctgaacgctaccaaccacctcgtcccaaggctgcgccttttccacggaaagatattgacgcaatgaacgatgaaacatttgggtcttctgaattttcaaatgaggatagagcagaggaagaaaggaaacgaagggcatcgtttgaaatgatgaggaaagagcaacataaagcccttcaagaaaagaagaatggtcctgagattgagaaagaaaactccggtcatgatatcatttcactgttacagactccctccgaaaggacagcaaccacagctaaaagtgagaagccagatggatctgcaatttcctcagcttatcaagaagataccactaaaacctcttcagttctatcagcttccactgccagaccacttgtgccgcctggtttttcaaatgcctttgtggagaaaaagcttcagccacaatcgtccaacatctctcttgaaccaaaggttattgatgcaactagtgagggtaacatattggctacagcacaatttggtggccttgtagagggtaaccagtcagcatcagagatcacagcaagcaaaaataaagagaagggcattcctgataacattgctagtgtaggtaaacaacacacacttccatctggaggtgttacatattcagctgaatttgcatcgagcattctgaaaggaagtggagactgggaaggtgatgcaatggataagtattctattgaaaacgaaggaaagtctaaaaatattggttctgttaggaaggaccattcaatctcaatcttggaacaattctttggcagtgcattgtcaaaaggtggaactgatttgccaccatatgttgagaatcagcagatgaaaaatgatgacgatgtgattgtttcctctttaccagaatcatccaaatttgctcactggtttcatgacgaagactcgaaacctgcagaagacttatcatcaaatggtctgctatccatgattgtcaaaaatgaaaaaccaggtcaagaaagtatagctcatggacctcctttatctgatggtgccgttcagaatttattaccaatatcaccgactcataaacttgatgttgcatcaacgcaccccttgttcacaccagctgcacctgccgtgggaatgctggaacagcacaaccatgctgatattgatcctgctccaattatgatgacgtgtgaggatcttgagcaggcaatgctggcgcaggttgctaccagtagcaactccaatcagaagaatgttgtacaggagcatcagcttgttgtagatgagccgattgctacacagaaagtggctgtagacaatcatgcatcacagcaccttctttcattattaacaaagagcacagataacaagggatcatcttcttttggcttacacataggatcatctgatagatcacataattctgatgttacatccaatggtggagtatctggaatagctccagttaataaagctgaaactgctcccacttcagagaaaaacctaacattggaagcattgtttggggctgcatttatgaatgagctccaatccaaggatgcacctgtttctatccgaggatctgcaactagcggtcctaactatgagttcgcagagacaggcaaaacttcaattgcatcaagccatgaaggatattaccctggtgaacaggtcctacccttcggcaccattaaagatggagttgcccctaaagaatcaggaactggcaacaggaatttagcattatctggcccaagtcagggcagtgctagcttagataagaaaagcttggagattcagttgcctgaagaagataatttgtttacagtgaacgactctttggatggtcaaaagcctgatatttttccatcggtgagatccagtagggttgaggggctactaccagaaaaggcagttgatgatcttaattataggcttcaaagtctagtgcctggtgattcagaacatgttcaagtacttggtcctgatgcgctgggatcccattctcatgaacggcgttatcaggctgaatctcaaaatctttatcatcttctacaaggtagaccacctgcactggctcctcgtcctatgatggatcacattggtaataggaatcagcaaaccccgtttgacatgacacaagcgatacagcatgatcctcaccgttccttttcatcgaacatgaatcctatgcaacaatctcttcatgctcctcgggctcctcatgtagacccagctgctcatcatcttatgatgcagcacatctccacacctggaaattttccaccagaaggcctgcaaagaggtgttccgccatctcagcctgtgcatcacatgcctggttataggcctgagatgagcaatgtaaataacttccatatgcaccctcgccagcccaactatggagaatttggattgatgatggcaggtccatcaggtccagaactgagaggcaatcacccagatgcctttgaaaggtttctccagatggagcttacagccagatccaagcagatgcacccagcaatggctggtcatgtacctggcggcatgtacgggcccgagcttgacatgaacttgagatacagatagatggatgcgtgtgattgcttatgcagtatgaaggacccagaaacggtttgctgtacttgcgtcaaatagtactctttacccatgccataccgctatgtacctgtgtcaatgagcttgggttagcgtttaccatcaatacaatcgtttggctgcgataaggtacctgatgattcactggtggtgggggttggttgcatttgcatataaatatggagaagttatgaatgggttggtgatctggagtgatctgttgtgaaagtggggaacccaacgaatattgggtgaggtccatcaccgtagcagccacctctgcattgtgtctgtgtctgcctgcctatctgttgttttcagtttctgtataaatactattctgcaaaagaaagtaccagattgacagacacatttggaagtgtttccaaggcctcaccttttcttttagctacagtagcattttatgtttaatttagtttttaggataaaatgctatccatgtaacgattctctggtatttaagcatttaccccctccgttttc

SEQ ID NO: 20400 - DNA, 1002 bp, Oryza sativa
  Clone ID: PAT_MRT4530_25771C.1
atggaggccgggcgcgggctgggggtggccgggcgcaggccagcgggatggaggccggccggcgtcatgtgtggcattactgatttggcagctcatggttctccccttggagcacagttgttcctctataaagttgcatcaagggaagatggcaacccaaggaaaagctatgtcaactttgtgtcgatggttgaaacacttcaagctacagttgatgaaatagttcatcgtaccttgttcgatcaatctggagttttgacggatatattgcaaaattcgatcaaaaggatagttgatgagttaattgtccaaagacgccagctcgggtggcagattgaagaacaacaacaatatcggctcggggggaaaacatatcagtatcagcatgatgaggcatatcaacaatatcggccagaaggaattcaaagacatcaggttccatttccacaccgatacaaggttctagacttgtccaagttttcaaggcaagacgatatatctacaatggaacatgtcagccgattcttagcacaatgtgaggaggcatcggctgaagaaactctgaaagttagatttttccgattatccttgactagatcggccttcacatggttttcttctttaccatcaaattctatcaaaggttgggccgatctagaaaagcaatttcatacatacttcttcgctcgcatcgatgagatgaaactttcagatttgatatcagttcagcagcaggaaggagaatcggttatggaatatattcacagatttcgtaatgtccgcaaccgatgttatagtttaagtctaagcgatgagcagctagcagatcttgcgttccaagggctatcaacacctatcagagaaagattcttttgccatgagtttgacagcttagcttatctaatgcagacagtatcggctcatgaaagccgattggaagaagcaaaggaagatcaattttggaggtaccaagatcggacagaagataattttgaagcatga

SEQ ID NO: 20401 - DNA, 3279 bp, Oryza sativa
  Clone ID: PAT_MRT4530_25772C.1
tcgccgacttcgttttcgctttgggagttttcacttccttcccgtcgaccacttcttcaagctcctcttctctgacttgcgattgatgctggtcatggactcgaggcgtctcagctttccggtcgatcggccgcgagtccactctgccggcttgtcttcgccaccgccattgctgataacaacaacgacttcaccgccggcctgcctccgtcgccgccgattggtgcctccgtctacacggctggcctattatgccgccgctgttgggcgtctacgacttcaccgccggcctgcctccgtcgccgccgactggtgtcttcgcctgtatggttggttggtcacaccaccgttgttgggcgtctacgtcttcaccgccggcctgcctccgtcgccgccgattggtgcctccgtctacacggctggcctattatgccgccgctgttgggcgtctacgacttcaccgccggcctgcctccgccgccgccgactggtgtcttcgcctatatggttggttggtcacaccaccgttgttgggcgtctacgtcttcaccgaccggcctgcctccgtcgccaccgactggtgtcttcgcctatatggttggttggtcacaccaccgttgttgggcgtctacgtcttcaccgccggcctgcctccgtcgccgccgattggtgcctccgtctacacggctggcctattatgccgccgctgttgggcgtctacgacttcaccgccggcttgcctccgtcgccgccgactggtgtcttcgcctatatggttggttggtcacaccaccgttgttggggcgtctacgacttcaccgccggcctgcctccgtcgccgccgattggtgcctccgtctacatggctggcctattatgccgccgctgttgggcgtctacgacttcaccgccggcttgcctccgtcgccgccgagtggtgcctccgcctacacggctggcctattatgccgccgctgttgggcgtctacgacttcaccgccggcttgcctccgtcgccgccgactggtgtcttcgcctatatggttggttggtcacaccaccgttgttgggcgtctacgtcttcaccgccggcctgcctccgtcgccgccgattggtgcctccgcctacacggctggcctattatgccgccgctgttgggcgtctacgacttcaccgccggcctgcctccgttgccgccgactggtgtcctcgcctacacggctggcctattatgccgccgctgttgggcgtctaccacttcaccgccggcctgcctccgtcgccgccgattggtgcctccgcctacacggctggcctattatgccgccgctgttgggcgtctacgacttcaccgtcggcctgcctccgtcgccgccgagtggtgtttctgcctacacgggtggcctattatgccgccgctgttgggcgtctacgacttcaccgccggcctgcctccgtcgccgccgagtggtgcctcccgcctacacggctggcctattatgccgccgctgttgggcgtctacgacttcaccgccggcctgcctccgtcgccgccgactggtgtcctcgcctatacggttggttggtcacaccaccgttcatgggcgtccacgtcttcgccgaccggctggccttcgccgccgccgactggtgtttctgcctacacggctagcctattatgccgccgctgttgggcgtctacgacttcaccgccggcctgcctccgtcgccgccgagtggtgcctccgcctacacggctggcctattatgccgccgttgttggatgtctacgtcctcaccgttggctcaccttcgttgccgtcgactggtgtttccgcttacacggctgacctattatgccgccattagtgggcatcttcgctttcaccgtcgaccgccttcgtcgccgccgactggtgtcttcattgttattgatggacgactttgttcccacattggccacttctgccatcaccaaggggaatattacaaagctaagatccagatccagatatgcataaaagggattcatggctttaagcttatctcttacgctccaggaatggatcagtcagaacatcaccgaccggcttgcctcatccgccgccgactggtgttttcgcctgcacggctggcctttatgccgctgttgttgggcatctacgtcttcaccgaccggccgcctcgtccgccaccgactggtgcttccgcctgcacggctggcctttatgccgccgttattgggcgtctacgtcttcaccgaccggcttgccttcgccgccgccgactggtgtttccgcctgcacggctggcctttatgccgctgttgttgggcgtctacgtcttcaccgaccggcttgccttcgccgccgccgactggtgtttccgcctgcacggctggcctttatgccgccgttgttgggcgtctacgtcttcaccgaccggccgcctcgtccgccgccgactggtgttttcgcctgcacggctggcctttatgccgctgttgttgggcatctacgtcttcaccgaccggccgcctcgtccgccgccgactggtgcttccgcctgcacggctggcctttatgccgccgttgttgggcgtctacgtcttcaccgaccggcttgccttcgccgccgccgactggtgtttccgcctgcacggctggcctttatgccgccgttgttgggcgtctacgtcttcaccgaccggcttgccttcgccgctgccgactggtgtttccgcctgcacggctggcctttatgccgccgttgttgggcgtctacgtcttcaccgaccggccgcctcgtccgccgccgactggtgcttccgcctgcacggctggcctattatgccaccgttgatgggcgtctgcgtcttcaccgaccggccgcctcatccgccgccgactggtgtcaccgcctacacggctggcctattatgccgctgttgttgggcacctacatcttcatcgccggtcgtctcgtctgctgctgactagtgcccttacctctacgtctggttatacagctaccactactgatggacatcatcgtcttccgtcgccgactggttatgccgccgccgactggtgcttttatcttcacaactgcgcgtcttcaccaccggatttctacttggacatcttcaacacatatcttcaatcaagcaatgactattcgacgacaagaagctacagttctcgactctatgttcagttgtttcccaactaatcaaagagtcgggggctacacaaatacaaggctcaaaatttgacaaa

SEQ ID NO: 20402 - DNA, 298 bp, Oryza sativa
  Clone ID: PAT_MRT4530_25773C.1
gtgtatatcatccgcacggctcaacctcaatccaaccaatatatgcaaacacagaaacaccaggaagagttgattagcgatcaaaaatataaatgctcattgaaattgatctcagtgcttctctttgaaattgattccatcgcgctcgtcgacgaggtactcggcgctgcccctacctggcgcgctaactgtcgaaacatgatttcggcaataataaaacggggtagcgcacgagacctagaagtggatggatgtggagacaaaggatttagacaggttcaggccctctcaatgagag

SEQ ID NO: 20403 - DNA, 4280 bp, Oryza sativa
  Clone ID: PAT_MRT4530_25774C.1
atgtttcgacagttggcgcgccaggtagggggtgcgtcgagtttcctatcaacgagcgcgatggaatcaccactccgccggcttgtcctcgccaccgccattgctgatagcaacaacgacttcaccgccggcctgcctccgtcgccgccgagtggtgcctccgcctacacggctggcctattatgccgccgctgttgggcgtctacgacttcaccgccggcctgcctccgtcgccgccgagtggtgcctccgcctacacggctggcctattatgccgctgctgttgggcgtctacgtcttcaccaccggcctgcctccgtcgccgccgactggtgtcctcgcctatacggttggttggtcacaccaccgttcatgggcgtccacgtcttcaccaccggcctgcctccgtcgccgccgattggtgtctccgcctacacggctggcctattatgccgccgctgttgggcgtctacgacttcaccgccggcctgcctccgtcgccgccgagtggtgcctccgcctacacggctggcctattatgccgctgctgttgggcgtctacgtcttcaccgccggcctgcctccgtcgccgccgagtggatcctccgcctacacggctggcctattatgccgccgctgttgggcgtctacgacttcaccgccggcctgcctccgtcgccgccgagtggtgcctccgcctacacggctggcctattatgccgctgctgttgggcgtctacgtcttcaccgccggcctgcctccgtcgccgccgattggtgcctccgtctacacggctggcctattatgccgccgctgttgggcgtctacgacttcaccgccggcttgcctccgtcgccgccgagtggtgcctccgcctacacggctggcctattatgccgctgctgttgggcgtctacgtcttcaccgccggcctgcctccgtcgccgccgattggtgcctccgtctacacggctggcctattatgccgccgctgttgggcgtctacgtcttcaccaaccggcttgccttcgccgccgccgaccggtgtttccgcctgcacggctggcctttatgccgccgttgttgggcgtctacgtcttcaccgaccggcctgccttcgccgccgccgagtggtgcctccgcctacacggctggcctattatgccgccgctgttgggcatctacgacttcaccgccggcctgcctccgtggccgccgagtggtgcctccgcctacacggctggcctattatgccgccgctgttgggcgtctacgacttcaccgccggcctgcctccgtcgccgccgagtggtgcctccgcctgcacggctggcctattatgccgccgctgttgggcgtctacgacttcaccgccggcttgcttccgtcgccgccgagtggtgcctccgcctacacggctggcctattatgccgccgctgttgggcgtctacgacttcaccgccggcgtgcctccgtcgccgccgagtggtgcctccgcctacacggctggcctattatgccgccgctgttgggcgtctacgacttcaccgccggcctgcctccgtcgccgccgattggtgcctccgtctacacggctggcctattatgccgccgctgttgggcgtctacgacttcaccgccggcctgcctccgtcgccgccgactggtgtcctcgcctacacggctggcctattatgccgccgctgttgggcgtctacgacttcaccgccggcctgcctccgtcgccgccgattggtgcctccgcctacacggctggcctattatgccgccgctgttgggcgtctacgacttcaccgccggcctgcctccgtcgccgccgactggtgcctccgcctacacggctggcctattatgccgccgctgttgggcgtctacgacttcaccgccggcctgcctccgtcgccgccgattggtgcctccgcctacacggctggcctattatgccgccgctgttgggcgtctacgacttcaccgccggcctgcctccgtcgccgccgattggtgcctccgcctacacggctggcctattatgccgccgctgttgggcgtctacgacttcaccgccggcttgcctccgtcgccgccgagtggtgcctccgcctacacggctggcctattatgccgccgttgttggatgtctacatcctcaccgttggctcaccttcgctgccgtcgactggtgtttccgcttacacggctgacctattatgccgccattagtgggcatcttcgctttcaccgtcgaccgccttcgtcgccgccgactggtgtcttcattgttattgatggacgactttgttcccacattggccacttccgccatcaccaaggggaatattacaaagctaagatccagatccagatatgcataaaagggattcatggctttaagcttatctcttacgctccaggaatggatcagtcagaacatcaccaccggctcgcctcgaccgccgccgactggtgtttccgcctgcacggctggcctttatgccgccgttgttgggcctctacgtcttcaccgaccggcttgccttcgccgccgccgactggtgtttccgcctgcacggctggcctttatgccgccgttgttgggcgtctacgtcttcaccgaccggtttgccttcgccgccgccgactggtgtttccgcctgcacggctggcctttatgccgccgttgttgggcgtctacgtcttcaccgaccggccgcctcgtccgccgccgactggtgtttccgcctgcacggctggcctttatgccgccgttgttgggcgtctacgtcttcaccgaccggcttgccttcgccgccgccgactggtgtcctcgcctgcacggctggcctattatgaccgccattgttgggcgtctacatcttcaccgaccggccgcctcgaccgccgccgactggtatttccgcctgtacggctggcctattatgccaccgttgttgggcgtctacgtcttcaccgaccggccgcctcgtccgccgccgactggtgtttcctcctgcacggctggcctttatgccgccgttgttgggcgtctacgtcttcaccgaccggcttgccttcgccgccgccgactggtgtttccgcctgcacggctggcctttatgccgccgttgttgggcgtctacgtcttcaccgaccggcttgccttcgccgccgccgactggtgtcctcgcctgcacggctggcctattatgaccgccgttgttgggcatctacgtcttcaccgactggcttgccttcgccgccgccgactggtgtttccgcctgcacggctggcctattatgccaccgttgttgggcgtctacgtcttcaccgaccggcttgccttcgccgccgccgactggtgtttccgcctgcacggctggcctttatgccgccgttgttgggcatctacgtcttcaccgaccggcttgccttcgccgccgccgactggtgtttccgcctgcacggctggcctttatgccgccgttgttgggcgtctacgtcttcaccgactggcttgccttcgccgccgccgactggtgtttccgcctgcacggctagcctttatgccgccgttgttgggcgtctacgtcttcaccgaccggcttgccttcgccgctgccgactggtgtttccgcctgcacggctggcctttatgccgccgttgttgggcatctacgtcttcaccgatcggccgcctcgaccgccgccgactgatgtttccacctgcacggctggcctattatgctgccgttgttgggcgtctacgtcttcaccgaccggccgccgcatccgccgctgactggtgtcaccgcctgcacggctggcctgttataacgcccctctacgtctggtttataccgctaccactactgatggacatcatcatcttccgtcgccgactggttatgccgccgtcgactggtgtttttatcttcacaactgcgcgtcttcactaccagttcacttcatcacggcaatgcaactttgtcatcatggtagagcgacttcatctttattatcttcggcactggcaaactctattgctgctacttcgcaagttttgctacatcaccaaccatgacgttgttgtgaatctcgatatctcggcatgcgatgccgtgttattttactacaacaagtggctctccaatattcaggatttctacttggacatcttcaacacatatcttcaatcaagcaatgactactcgacgacaagaagctataattctcgactctatgttcagttgtttcccaac

SEQ ID NO: 20404 - DNA, 383 bp, Oryza sativa
  Clone ID: PAT_MRT4530_25775C.1
gtactttggtggtggtccaatcaccagagggcggatacgtcatctggttgagctcatgaagaaattgaactggatgctgacgatgatcctgacggcgttgcgatacttggacacaaatcatcaattgatgcgattaactgagctgcctgatatcctctagactggctaaagcgatgcaaagagtaccacggatggtgaaattaattgccctagttactacccataaaaacaccctgatatattacttggcggcctagaaatatttcacgagaacccattttgcaacaacatagatgactatgcttatgaggcatcagaagaccattataggaatgatgaacaggagcatgatgattacgattatgacagtacgctttatgaaa

SEQ ID NO: 20405 - DNA, 1893 bp, Oryza sativa
  Clone ID: PAT_MRT4530_25776C.1
atggcgccggcggtgctcgtccccatcgacgaaggcagcgacggggagggcggtagcgccacggacgtcgcagccccctcccccgctcccatggacatcgacggcgacgacgacgggcgcgaccgcagaggagaaggcgacggaggcggcgtggaccgcctcagcgacctctccaacgacaccctcgccaaaattctgggccatctcagggacatccgcaacgtcgccaccaccgccgtcctctccaggcgctggctcgatctctggacccatgtcgacatcatcgtcttgcagtatgacgagccccccgactccagaatcgtgcaggaagtcctcgccgcccacgcgaggaagggttccacggccactcacatccgcctgctcgaggtcacctccctcaacagcgccacggcgggcgccacggcctcctggctccgcgtcgccgagccccgcctcaccggcgagctcttattccgcaacgcgtcctcggttccgttcgaacttctcaacgacgagatggtcgtcgtggagcagctggtcgaggagcttggggtggtggtggacgaaatgggcgccggcttcgagctgccctgcttcatgagggtcaccaagataacgctgagcctggggtttctcggcctatcgctgccaccatcgggtgtcttcgccaagctcagggagctgcacctggtgtacgtccggttcaatggcgagctcaccctggacgatgccatgctcccctccttggaatggctagacattggcaagtcccgtggcttggcctccctgacgctcaggctggcgcctctgacactgatggctctgcacgatatgcggtggttgcgtcggctcaacgccgtgttgccggggctcaaggagttgtctgtgtccgaatgcttccttgagcatcttgatggcgtgagcattgtggcagatgagatggagcagctcaggtggccaggtttctactggcctggattggtctacttcagcaggatgccgcgcctgcggacgttatgcgtctctgtctctgattttgctcatggatcgcgcgaggctttcaatcagggctctcagatgcttctcaatcgctatccaagcattcaccatctcgagctgcgcgttgtgatcaaaacaggtgttacgcctttgatggtaggcataaccggactcccttacactaagatcttgaccctacatttagttacagagggccattcttatggagctagtgtattgcatattctgacaatgtgtactcgtatagccaagctgaccctgatgatcccaaaatatttcgaggtcgaagatgcttgtgcagagatttgcatctgtgattggctaccaaactggagaaacgagaacattttgttggagtgtctcgaagaagtaacgatcctctactacagaggggaggacgatgagcttgaccttctgaagctcttagtcaggggagcaacaggccttaggaggataagaatagcccgctactgttcggttgctgattgggagatagagatgctacgtgctgatctacgtgcgtatgcagaagagctcactttagttttcactggcaatccagcagggatgctctgtgtgtacatagcatttctgatttgctacggcgttctgcagttgcatatgccgccactatcttggcagcgcgcccgtcttgcggcgccgcgggtgaccagggacgacggcttccgcctccgatacgccgcgggaaaatccgtcgccttgaccagcttcttctgcctcggattcggcacgtttcgtggcaatggctttggttttgggggctattgccgcgccggcgcccgggcggccgtgcgcgtgatcgatcgagagatgtcgatccactccacgcgcgtgccgcggtgcacggcgtga

SEQ ID NO: 20406 - DNA, 909 bp, Oryza sativa
  Clone ID: PAT_MRT4530_25777C.1
catgagacaatagatcgtcagatcaatacacactcggcggattcaaatccccaaacaggagtctcgtgcgctatccccttttattattgccgaattcatgtttcgacagttggcgcgccaggtaggggcagcgccgagtacctcgtcgacgagcgcgatggaatcaatttcaaagagaagcactgagatcaatttcaatgactcaaatctctgacctggtttgtcttcatctaatcatgccatgcatatgagatattaagcatttatatttttgatcgctaatcaactcttcctggtgtttctgtgtttgcatatattggttggattgaggttgagccgtgcggatgatatacacggccacggcaatgacctgcacctaccatagttcaacgcagaggacccgttttatttgtcgtcgggtacgtcacctccaccgttgatgggcatcttcatcatcactgctggcttgccttcaccatcgccgactggtacctccgcctacacggctggcctattatgccgccgctgttgggcgtctacgacttcaccgccggcttgcctccgtcgccgccgagtggtgcctccgcctacacggctggcctattatgccgccgctgttgggcgtctacgacttcaccgccggcctgcctccgtcgccgccgagtggtgcctccgcctacacggctggcctattatgccgccgctgttgggcgtctacgacttcaccgccggcctgcctccgtcgccgccgagtggtgcctccgcctacacggctggcctattatgccgccgctgttgggcgtctacgacttcaccgccggcctgcctccgtcgccgccgactggtgcctccgcctacacggctggcctattatgccgccgctgttgggcgtctacgacttcaccgccg

SEQ ID NO: 20407 - DNA, 1191 bp, Oryza sativa
  Clone ID: PAT_MRT4530_25778C.1
atggggggaaatggggaatcttggatgctctacacttttgttttgaatggagaattcactgatgtttttgcaatggatgaagacctgccacctctctggcatcaaatccaggatcttaacatggaaattcaggacttacagcagggaaggtggtcaaggctttaccttttagcctgggttcttcagggcagcttgaaccctcgcaggactctggtttggaggcaactggaaaatcaaaacgaaaaaggcctcgtgctaaagcccccatttcaactgaaaaatctgagaagaagcccacaattcctgggccatggttaccggactgcactgaacattggtactccaaaaaagaagtctaaagcccaacctatctctgcttctttgaagattgctgttgaaggcattgtgaaggaaagctttgggaaggaaattccacctccactttctgttgaacatatccagacggttgcagtgcaaaggtgtgatgacaagtggcgctctattcatgatacaatctctagcatcaattgcgatattgtttgtctgcaagaaacaaagagggaactttttgatcactcgtacctcagaaaattctgtccaaggagactggataaatttgtgtatcaaccatcggttggggcttctggaggtctcattgttatttggaatagttcttcttaccaaggaaatgttgttttcactatgccttatggaattagggttgactttatctctcaaagttcccctgacgattcatggaaattgattaatatttatggcccttgtcaaggagagttgagaactgaatttgttaactggttacatgacctagacattggggatgatgaaaattggattgttatgggtgattttaactttatcagatcaactgaaaatagaaatctgccaggtggagatatgaatgacattttgatttttaatgaagccattagctcagctggactggttgaattacctctaaaaggcagggcattcacttggagtaacatgcaaaatcatccccttttgcaacagcctgacttggtttttatctcaccctcatggatcctgaaatatcctcatacggagttaacggcccttccaaagagtatctccgaccatgcaccttgtgttgtcagtattgctacatcaactcccaaatcaccccttttcagatttgaaaatttctag

SEQ ID NO: 20408 - DNA, 2593 bp, Oryza sativa
  Clone ID: PAT_MRT4530_25779C.1
ttgcgttttggcgcattccccggaattccctggtcgacggcgcgtccggtttctcaccatagtaaggaaggaaagaaggaaggaagaggaaaaaaaaggatcatcaaccatgtcgaattcggcgtcgggaatggccgtgtgtgacgaatgcaaactcaagttcctggaacttaaggcgaaaaggagcttccgcttcatcgtgttcaagatcaatgagaaggtccagcaggtggtggtggacaggttgggtagggcttctcgatctttggtcgaaaacacgcgcatttctttccttccaaatctgccagcaaatcagcatacaagcgctgtcgaagtttgtcctgtagcacttccgaaaacatgttctggccaacaatgaactctgctgcagattgaaacagagtatccacctcctttcctagttggtaatcaaccattgtccacggcctgtttttctgttcaagtttaatagcatgccacttcagccgaagggcatcctcctgccctttccagagaaaacctctacacttgcgctcaatatctttgatcgcccatttaggtagctgtgcttcctgttgaattggacggaagaagaggacagcatcatctgcatatacagatatgttgggcaatctttttctagcattcagctcagataacagatttcttgcccttgctttcgccatcattgcctgaagcgtgtccataactaagacgaagagaagaggcgatagcgggtctccttgcctcaaacctcttgcaggctttattgggtcagattcactcccattgattagaattcttgtctcagctgtcaggaaaagcgcagcgagccaagatctccaaagggggccaaatcctctgaatttcaacatgtcgagaagaaagcaccaggagacagtatcaaatgcttttgaaatatccaacttgaacaaaatcatctctttgcgctggcggtggaattgttgcgatagaccatccacaatatctgcgagcctggctggaaatgcttcagaaacccacttcctaaggctcatgtcaccaacaaacatggcatccgtaggcctcttcccggtgaagacttcgagcaacatgatcccatagctgaacacatcgctctttcgtgatgcttttcccataaatgcatattctggagccatgtatcctattgtcccgggcatgctggctgaaactgcagagttgtcatcacctaacagtaattttgcaatgccaaagtccgccacatgtgccgtgatttcctcatcaaacagcacattgctaggcttgaggtcacagtgcaaaacaacttcagaatgatgatagtgaaggtgctccattgccattgatacgtccagcataatgtcaagtctctttaggaatcctagtggagggtgcccttgcttgtgcaggtatgtctccaagctgccattgggcatgtactgaagcagcagtgctctgaagtctgtgttggagcatatgtttagtatccttatcaagttgcgatgctgaaccatgcgtagaacctggcactcaacatcaaagcttctcatagcttgttctacctgcatgtttagaactttaaccgcaaccaccattccatcatccaaatgacccttgtaaaccttgccaaaacttccagctcccaacatattatcctcattgaaactttccgtggcacgaacaatctcaatctcttcagtgataggaccagatattccattcgaggtaagatcaagtccaggccctgtcagctggttatatcccaatcccaagaatgtcaattcagagaagtttccaacaaaagctggaaaggcgccgttgagctggttaaatgaaagatcgagatacgtaagttttgtcagtgttcccagctccaccggaatgtggccgcttaggttggagtctgagaggtcaagctcactgagcatgggaagatttcccaacagactcgggattgtaccaacgagctcattgccatccaaaaagagtaaagtgagacgtgacatcttagccagccatggcggcacgacacctgaaaaaagattttctgacagagaaattgtctcaagattctggcatgaagcaagccctgacgggattagtcctgtgaatttattcgtgtctagttctatgtcttgcaacatagggagattaaagctccggttagtaggtatagggccagtcagattgttcttccatataagtatggcttcaaggctagacatgttgaaaatggcaggaggcactggaccagagagctgattgtctggcaacgcaagaacacgaagcatgggcaaggagccaacacagtctggtatggaacctgacaaactattcagcccgaggtgtatctcggttacccaaggtgtgtggcgttgaatagatactctggtaccggaccactcaggtaattgctcgtgagaaccatttgcctaaggctatgtagattttgcagctcggctggtatgtgccctgagatgtggttgccatagagatttagaatctcaagctttgtaaggttccctagtgcagagggaatagtatctgacatagtattgtgggcaagacggagaatcctaagcccacgcgtccg

SEQ ID NO: 20409 - DNA, 615 bp, Oryza sativa
  Clone ID: PAT_MRT4530_2577C.1
atggagactgggatttttatacaggttcggacccctgaattgtcagtcgacaacagggtagtcttcctcctcgagttcgtgcccgacgagatcagagacagcgctttcatctctcctgacagtatccggagacatcgtaggggactagccgtgcttatccctgaagtcgatatccgatcttggaggaactgttatcgagctctcatgaccattctcgatgagttcagagataacgttagacttcctttatcagcctcgtgcgggcacctaaagggtttgtctgagtcaatctccgactcgtggtacgaggaccgctgcgttattgctgtagtcgtacctcgaccatctgaggttgcggtgcgagagattgctacgtactgcttcgaggaccaacgaacgtgtagaatcatctctcgaacaccaatggaggttgcggtgcgggagattgctacgtaccggttcgagaaccaacgagcgagtagaatcatctctcgaacaccaatggaagttgcggtgcgggagattgctacgtactggttcgagaaccaacgagcgagtagaatcatctctcgaacaccaatgagggtggcggtgcaggagattgctacgtactag

SEQ ID NO: 20410 - DNA, 711 bp, Oryza sativa
  Clone ID: PAT_MRT4530_25780C.1
atgacgcgcggggcggcggcggcgacggcggcaacggcggggctcccctcccctcccctcccagatccggccggagggaggcccggggagggcagcgtcaacgaggcgcggggcgaagacgatgccgcgtggggcggcgacggtggctccgatcccagcctcctccccttcccagccctctccgaggtgacatccccccctctcctcagatccttcctccctttaccagctctctccgtcagcgggcgtcgggcggaggcgcgtcggcgggaggaggctggccacgggcatcagcggtggctagaggagggcggagccgcgtcggcagcggtgggtggaggcgcggctggcgggaggaggcaggccacgggcggcggcgggcggaggctggccgccagcgtcgtcggcggcaggtggaggtgcggcggcaagtggaggtgtggcggcatgaggaggcaggtcggcagcgtcggcgggaggaggcgcgtcgcgggcgtcagcgggaggaggcgcgtcgtgggcgttaattttatatcggtttgcccgtaccagctttgtgctacagtggagtggaaaaataagtctgttgagagtgactgcgatgtagccagccgtgaagaagatagcatcagtcggcgttataacaggccagccgtgcaggcggtgacaccagtcagcggcggatgcggcggccggtcggtgaagacgtag

SEQ ID NO: 20411 - DNA, 613 bp, Oryza sativa
  unsure (1)..(613): unsure at all n locations
  Clone ID: PAT_MRT4530_25781C.1
ggtccggaattaccgcgtcgaccacgcgtccgcctctcccgcgctcgccgcgtgcccctgcccggccgctccgcgcctctggtcccctccctctctacccgcgtgaatttttagcatgtgacgcggcggggggcgcgcgcgcgggcggcgggaggaggcgccgccgggggaaatcgggcgcgagggcggcggcggcggcggttgcgggattgaggcagagatttttttttttttttggttatttgtttggattggttcggaaaatttttttgagggcgacgcgtcctcttcgaaattcgttttttccaggtgagacgcttgtcacacggaagcaaattgctcgtggttttattactggtgcttagtcagttttggttgcaatgtgatctgtggtagaatggcgtggaatctgccgcaaatacattgctgatttgcgggatttttgtaatagttttagaattatgaatgatctatagttgaaagaccgcggatgtgcatatggccagattatcgtattatattggatgaactattggttagttatgtgtgcattggcagnntggaccttgaaacgtggtttgatctgagtttaggtgaggacctgaggctgtag

SEQ ID NO: 20412 - DNA, 793 bp, Oryza sativa
  Clone ID: PAT_MRT4530_25782C.1
ctatgagatcaaggcgaagcggtcggcgacctcgcacgtcgggccgccaatccgaacaccgtcatgttgtccaacagccgtcccaccgttcatgggcgtccacatcttcaccgaccggcttgccttcaccgccgccgactggtgtttaccatcgttgatgggcgtcttcgctttcaccgaccggcttgcttccgccgccgactggtgttttcgcctatacggttggcggactccgccgccgttgatgggcctcgtcatctataccaccggcttgcttttgccgccgccgacaggtgttttcatcgctattgagatggactgcttcgttcccacatcggctacttctgctgtcaccaagggaatacgataaagctaagtcatcatttattttattctttatatgatatttttccttttcctctgcctcactacaccaattggccttccattgagtagtgagtcgggggcggccgcctcgtccgccgccgactggtgtttccgcctgcacggttggcctattatgccgccgttgttgggcgtctatgtcttcaccgaccggcttgccctcgtccgccgccgactggtgtttccgcctgcacggctggcctgttatgacaccaactgatgctatcttcttcacggccggcttcacggttgacctactatgcaaacgctgatgagcgtctttgtcattatcattggttgctacactgctattgactggatcatcgacatcgtcatcttcatcatgtcggttgcgtttgtcatcgtcaactattttcttcatcttcat

SEQ ID NO: 20413 - DNA, 153 bp, Oryza sativa
  Clone ID: PAT_MRT4530_25783C.1
atggggggtgcctatgtatggccaccgtgggaggaggcgggagctgacggtggcgggagagaggaggaatggagggaaatggaaatggttggtgggaaggtgacgggtggtgacaatgagtccgtgtcgagcgctgattttttcggcctttag

SEQ ID NO: 20414 - DNA, 241 bp, Oryza sativa
  Clone ID: PAT_MRT4530_25784C.1
tcctcacacacccaaaagcgccgcaaaaaaggggccccaagagcggagaagggaacccaacggcggggaagggcgaaggcacaagcgaagaaacggaaggccagggagcgagaacagcccgcgcaagcaggaaaggggcaccaagtacagaaaggcgaaggggcaggactacaggaggagaccaacagaagacaagaagaaggaaacggaaagagggccgcacagaccaagccagaaccgc

SEQ ID NO: 20415 - DNA, 3699 bp, Oryza sativa
  Clone ID: PAT_MRT4530_25785C.1
atgaccagagtctgggccatatatgtcgccgacgactttgtcaagtttctcttcaactcggactggaacacgacagacaaccttcaatctaggatacaaaacgggctggactaccatctggcctattatgccaccgttgttggacgtctacgacttcaccctgggcctgcctccgtcgccgccgactggtgccctcgcctatacggttggttggtcacaccaccgttcatgggcgtccacgtcttcactgatcggccggacttcgccaccgccgactgttgtccacgcctaagcggttggttggtcacaccaccgttcatgggcgtccacgtcttcaccgaccggctggactccgccgccgcctactggatccaaatccagatatgcataaaagggattcatggctttgagcttatctcttacgctccaggaatggatcagtcagaacatcaccaccggctcgccgtcgtcgccgccgactggtgtcttcgcctatacggttggttggtcacaacaccgttgtcaggcgtctacattttcaccgccggtttgctttcgccgccgccgactggtgtcaccgcctacacggctggcctattatgccgctgttgttgggcgtctacctcttcaccgactggccgcctcgtccgccgccgactagtgtttccgcctgcacgctggcctattatgccaccgctgatgggcgtctacgtcttcaccgaccggcttgccttcgccgccgccgactggtgtctccgtctgcacggctggcctattatgccgtcgttgttgggcgtatacgactccaccatcggcctgcctccatcgccgccgactggtgtttccgcctgcacgctggcctattatgccaccgttgatgggcgtctacgtcttcaccgaccggcttgccttcgccgccgccgactggtgtctccgtctgcacggctggcctattatgccgtcgttgttgggcgtctacgactccaccaccggcctgcctccatcgccgccgactggtgtttccgtctgcacggctggcctattatgccgccgttgttgggcgtctacgtcttcaccgaccggccgcctcgtccgtcgccgactgctaccactactgatggacatcatcatcttctgtcgccgactgattatgccgccgccgactggtgcttttatcttcacaactgcgcgtcttcactaccggtcattctcctcctcctggctggtactcgccggcgtaaagtactcgtgccaaagatcatcctgtggatagcttaccagctggccgactcgacggcgatatacgcccttgggaacctctccttcggcagcgtggcaattgaagagcaccgtctggcagcattttgggcaccattcttgttgctgcacctcggtggcccagacaacatcacggcctatgcactagaggacaacaaactctggttgcgccacgcactgaatcttattttccaggtaatcggagcttgctatgtggtctacaagcatattatcgttcgcagggaggccacaatccttagagtggccaccggattgatctccgccgtgggcgttgtcaagtattgtgagagaacatgggcgctctatcgcagcaattttagcagcatcgggagctctctcgaggagttacagggtaaccaactccattggtaccaagggtacctacacaatgaggatcataacaacactaacaatgaattccttctgcaacgtgctcactccctgtttcacatatgtaagcgtgggatagtagactccgtgatcaatgaggatactgagaatgctgaggcggaaaccaccaaggaaataatcaacaatcttagtgaagagccccagcggatgtataaggtaatggagatggaactgtccctgatgtacgatattctctataccaaggcagccgtagtccacacttggattggctactgcatccgagccttgtcaccctttgctattgccacctcctttctgctgttctatttctgcggcagcgaggtcaaggatggccagaatggagtcgacaccgctgttacctatgtcctgttaggcggtgccctcttgatggaaacaacgtccctcctcagcgctctggggtcaagctggacgctttccttcttgtgcgccaggaggtggagttggcttcaacatgtcgctctatgtgtcggaagatggtaccagctccgacgggcagtcctggctgttcgcaagcgcgtcgcagccttgacgggaggccttctcggtggatcaagaaactggtcgggcaccataggacagttcaatttgctctacttccgtgccacgcaggtcaacccaaccaacaagcaattcggtaggctcattaagaagctagggtatggtgacgagtgggacaccggttgttatttgtgggacatcacaattcccgagctggtgaagcagaaagcattgagaatggtctccaagtatgatctcaacaccatgggcttgctcaggcataattggggtgaactggcactgaaaaagcatactgaaccctcaaaaaaaaataaaaattgtactgaactgctggaagagctagagaaattgtggggtgacgacttccacgggagcatcatcatctgccacattgccacagaccttatcctcgctgagatagaaaagaacaaggccggcgaagacgacgcagcacaactccagtgtgtcggctcgatcagggcactatccaactacttgatgttcctccttgtggctcacccggatatgcttcgaggccttccccaaaaatggttgtaccagcggacctgtgagaacgttgatcaaaactgcaaagagcatcgtgaagaactcatttcttctggtggaaaggctaataatgtgatctttatggtgctcatgaagctgttcggtggccatagtaatagctcaacatctattgggctcaggcagacgaatgcactcgctaaaatcctatacaagagcctgcccagccaatttgaccccgcaattcctcgccttacttatgcaaggttggttgccaaggaaataataaattggaaagatgaagatggtcaattgaagaagccagatgcaatattgaaggtgctgcttaacctgtggacagattttctcctctatgctgccaacaggtgtaacagggagtctcatgccaagaagctcaacactggtgatccctttcttctccaactcaggcaaaaatctggcggcgctcaggctcgtcgacgacggggtagagagggcttctccggtgagggtggagggaagcgccgagcccgagccccgcgctggaggagaggggcggtgacggatcccgcgccaccgatggaagctggacgggagcagctcaacccccgcgctggaggaagacggcgtgcagaggatacgcgggtcgccggcgacggcggtggtgatgtcagcggcggagaggccgaggtcggcgaggaagacgacgacggcgtctggcctagacggcgatttgagcgcaggttgtcgatggtgtggaggaagcgctcgtctttgtcgctgtcaatctccgaggtcgagccgcagcagcagcgccgcctcgtccgcctctccgtcgagctcagcatgccggatatgagaaaggtgggaggggatgaggatggaaacagagacggcatgagagaggagatgaaaaaatggtttggagtggcatggttctaa

SEQ ID NO: 20416 - DNA, 724 bp, Oryza sativa
  Clone ID: PAT_MRT4530_25786C.1
aagcaacaaacataatccagaggtttgatccattttgaagtcatgaaatggccacaaagtgtgtgagaataatacaagcatataagtttgtgataaattacaaggcccttgtttctctgcaatgaaattccaaacaagaaactagccgacttatgagcttctaatacaaagaattggttatgttaatatgagttcttctccctttctctcgatctcacagacacacacgcgcacacaaacaataaatgaataattaggcctcacaatttacaaatcgctgaagaactgcacaagttcaaaaaattatgtttcatacaaacatatgcattttctttgcctcctattatggtcaccgtatgtggcttctcgagaatgaccagagcccaatatcacgaacaggagcctgtgtcttcattgaaggaaaaatattccaaaatctgagggtttcatccccggctcctgttactattgtctgtccatcaggtgacattgcaaggtaaagcactcgcagcgtgtgtccagttagagtagcaacctttgacatagatgggtacttccacaccatgatttggttttgggaatacccatgagtgctcacaagctcatttacatttttacaccaggcaagattacaagcctggctgcctgtgtccactgaattcagcatgtttccattaaccgtgttccagaacctgatacacctatcagcggttccaccacctga

SEQ ID NO: 20417 - DNA, 225 bp, Oryza sativa
  Clone ID: PAT_MRT4530_25787C.1
atgggtgtgacgatgtgggaacggtggagagctcgggagcggtcggcaaaaagtggaaaaaggtggaggagggtgagccatctcaagtgtgggcgcaagcgggggagtgtggcggcggttacgggggagtgcgggccgcgcacgggaggcgggcgatgtgcgcgggagacgcaggagaggcgggaggtggcggtcgcgagcgcggacagcgccggccggaggtag

SEQ ID NO: 20418 - DNA, 707 bp, Oryza sativa
  Clone ID: PAT_MRT4530_25788C.1
cccacgcgtccgtccacgcgtccggaagaacaaacgacgacaaaaccaggaagtcccaaagcaattgccagtgagtgataataagaaagccaaacaggaattgatctcaaaggctagagaagaggttgatgctgaacttagatctgtttcctttactcttgatccaaaggaaaggagaaggatacagaaagaagcactctctgctctttttgagacttactttcggattttgaagcatagcatgagtatttcaaattccaggggcaaggtcattaatgtctccccagatggctcacacccactacttgctccatgtttggagggtttaggaaaattctcacacttaattgatttggatttcatgggtgaacttgtcgcgtgcctcaagaagctttctgggtataccgaccatcactctggcacagtacatgacaatacactgtctgtatcagaacgtctgcagtgctgcatagttgcatttaaagtctggaggagcaaccttgaagctctgaatgtagacctgcaagacttctttgtgcagctttttaacctcattctggagtatcggcctgacagagatcgtggtgaggtattagctgatgctctgaagacacttctctggaaggcaaacagcaggatatgataagagcagctgctttcattaaacgcctagcaacctttgctttgtcctttggttctgcagaagc

SEQ ID NO: 20419 - DNA, 347 bp, Oryza sativa
  Clone ID: PAT_MRT4530_25789C.1
atggaaagctctcggagttctctttccaacggatccagcctcatccccgaattccgaataaggttgatctacaccggcaagatcaacaacacacggagaggtgtgtcgatcgcgaaggcgcaacacgtctagatttatcagccggcctccccttccccctcctccacaggaagctgtcgccgccgctgccgcatgcggtggagaagagcgtcgcttccgctgctcgtggtgggggaggtcgctgacgccgcatgcaagcttgatcgggaaacctgtcgtgccaactgcattaatgaatcggacaacgcgaaccccttgcggcccgccgggccgtcgaccaattctat

SEQ ID NO: 20420 - DNA, 467 bp, Oryza sativa
  Clone ID: PAT_MRT4530_2578C.1
taaacatgtgcccaaatatatccaacagcataaaacaacagtacaatggatagtgacggagcgtggggctcctcaccgggagaccgcgcaggcccccctttgccggcctaggcctcctttttatttgatcaggggtcaccacatgggcctctagctgcctaagaaaggaaacatgctttttacaatgagggctagtctacagccggaaatgacttctgacaagcagagcgcacgcctcctgccccgctcgcccgcttttcccggtggacgcccatttcaaccttcatttaatggctagcgacttccttgccatgcttgcgctgaaatctggaatgaatctgaccggaactgacataccaacttcaggagtcagcacgccggctccggctagggacgagagccaggaagctctcgtcattccgacgggacggggcgaggcgtgtgacaggccgcctgttgccacctaa

SEQ ID NO: 20421 - DNA, 3168 bp, Oryza sativa
  Clone ID: PAT_MRT4530_25790C.1
ccgcgggcggaaggaaaaatccaaaagcaaaaaaggagatggtaaattgcaaaatgtgcaagctcaaactgaagcttcaaatggaaaattacactcaaaagtgccgagccgcgcggcctcgccaaggaccggcagcgatggggaagagcagcagcaagaagaagaaggacaaggtgatcctgcccccgcagctgccgccggaggtggacgacgacgacgtggtggtctctgacgaggacgtcgagttcttcaggggcaacgagggccacgcccgcgcgctcgccacgctcgacaggaagtccatcgacagctacgtcaccagggtcgcccaccacgacgaggacgaggtcgagcgcctctacgaggagcgcgagcgcaggaggaaggcggtcgaggccctcaggcccaagaaccacgacgacgacgacttcgaggtcgaccgcgtcgacgccctccccgtcaagaccctgcaaggggagctggtctacaacaacgccaagaaagcgagatttgatgacagttctaataatgttgaatctaaatctgaagacaaagtaggaaattccaaacaaactattcaaaagggagaacggaaggaaaaatccaaaagcaaaaagggggatgaggaaagcaaaaatgtgcaagctcaaactgaagcttcaaatggaaaattacaatcaaaagtgctggaggaggtgaaggaggaactttcagctgaggaattatttgagaaaaagaaggcccagctggctgaaatagggatgtctatgcttgaagatcctgaatcacatattagatctctaaatgatatgttaaacatatgcaatgacaaagaccagaaggttgttaaacttagtctgatgtccttgcttgctgtgttcagggacattattcctagttaccgcattaggcagttgacagaaaaagagcttacggtagaggtttcaaaagatgtaaaaaagatgagatattatgaatacacacttcttcgctcctacaaggcatacctgcaaaagttaatctccttggagaagcaaccaaatttttccgctctggctgttcgttgcatgtgtactttactagatactgctccacatttcaacttccgtgaaagtatacttgccagcgtggcaagaaatttaagttctccagatgatgcagtgaggaaaatgtgttgtgaaacgataaggtctctatttgtagatgaaggaaagcatcgtggtgaggcaactgttgaagctgtgagattgattgctgatcatgtgaagctaaacgattgccagcttcatcctgatagcattgaggtcttcctatctttgagatttgatgatgatcttggaaaagatgacacagaggaagaaaagggaaaaccaaagaagaacaaacgacgacaaaaccaggaagtcccaaagcaattgccagtgagtgataataagaaagccaaacaggaattgatctcaaaggctagagaagaggttgatgctgaacttagatctgtttcctttactcttgatccaaaggaaaggagaaggatacagaaagaagcactctctgctctttttgagacttactttcggattttgaagcatagcatgagtatttcaaattccaggggcaaggtcattaatgtctccccagatggctcacacccactacttgctccatgtttggagggtttaggaaaattctcacacttaattgatttggatttcatgggtgaacttgtcgcgtgcctcaagaagctttctgggtataccgaccatcactctggcacagtacatgacaatacactgtctgtatcagaacgtctgcagtgctgcatagttgcatttaaagtctggaggagcaaccttgaagctctgaatgtagacctgcaagacttctttgtgcagctttttaacctcattctggagtatcggcctgacagtgtttcaccattgaaatgcttattattactcataaataactactccctccgtttcacaatagatcgtggtgaggtattagctgatgctctgaagacacttctctgggaaggcaaacagcaggatatgataagagcagctgctttcattaaacgcctagcaacctttgctttgtcctttggttctgcagaagccatggcagcattaatcacactgaagcatcttcttcaaaagaatagcaagtgcagaaacatgttggaaaatgattctggtggtggctccctgtcttgcttagttgcgaaatatgacccagaagctaaagatccttatctgagtggggcacttgcctcagtcctatgggagcttagccttctgcagaagcattacgattcctctgtttcctcaatggcctcaaatatcttgagcatggccaatttgaatcctacacagaatcctgttccaatttcaaatgcaagccctctagaagcatatagagacttgtcaatggaacggaaattgtctaaaccagcgaataaattgttgccactaaactgcagaaagaagaggcgtggtaaggagtttgttgccctaagccctgcagcgctcgagggatcagattgcgttgcgggtggagatgaactcaaagagaagttaaaaaatcattttgcggtactaagaggtatctcagagaatgagagattgagagctgagctgaaccacacgttgtcatccatcaacttgtacaaggaatacaagaagcagaagaaaagcaggaaatcaaaggctgttaagaaaaaggtttcaagggcttaagttgtgctgcgtttgggggaaatttttgcacaccagggaccaaaggtgtgcagaatgaacaattttgccatacccactttgtagcttatcgtagcttttgggtgtaacacatttgcagttccaagcatttctttttaagctcgttctatttcctgacatgtccttttattcttgttgcctggacctaaccaggctaacaagtttgctgccgctgtacaagatataacagtggcatgcttgtgttatctatatatattgttatgcatgaacaatgccatcccctatgcaaaactacagattggtagtcgcaaggtgtagggtgctcgcgcagaaagggggaaaaatagtaggttttactgtccactagcaaaatatccatgttttgctatgttaaagtacacatttatttgaatatatgtttttcatattt

SEQ ID NO: 20422 - DNA, 463 bp, Oryza sativa
  unsure (1)..(463): unsure at all n locations
  Clone ID: PAT_MRT4530_25791C.1
ccctcgaggagggagaagctgggaagcggcatcggcagaggcgacaccagcntgcctccacatcggcttcgtctccggcgccgncccccncccctccnactcccccacctngtcctcccccagtnagcgccgccggccccatccgcctccggcaccggccccatccgccgccacccccacccctatccgcngcccccatccaccgctgcccctcggtcagctcctcccgccctccactccctcctcccctccctcaatgtgtggttagggtttggctccatggatgactccacctggctacagattgttgggaggtgacaaagtttactaatcatcacacgtgtacatctagcggtagaaggaagactaccacaacaaccaagcggctggnttgcttccaaggncatccatatccttgggacaagattcaggtattgggccntaaagaacttcaaaaaaggtt

SEQ ID NO: 20423 - DNA, 1504 bp, Oryza sativa
  Clone ID: PAT_MRT4530_25792C.1
ttttttttttttttttttttcttgggaattaacccccttttcttcattacttggggaatttcacagaattttgggggcaatgcataactcaagccacatggcatggaatgtctgccccccttgtcaacaattactggcttaaacaatccaggttgaataaagccaattaactaatgcttctaatcattggcacaaaatggcctcttagctagatgactggcatgtgtgggatttcaaagaagaaaaaaaaaagaaggaaatcccacactgcctcacagcacaagaaatttattctgtagcaatgcctgccatgttgaacaattccaggcatgctagactgctagtgctaggtgtgcagctctggagccaaaagaatgtccttccatgcctcatagaacatccaggtaatgccggaggtcggcatcaccttcagggagcttgcggcccatccgcggtaaagtcccttgatgccctcctcttggaacacctcagctaaggccgcgatcatgtggggcgggcatttcccttgcagggttccaaccataagccgcttcctcgccacttccagagggaagcttattgtacttgcagttagacctgaaagagctccaataatgagtagctcaggacggctcaaggacttctttttatgtgcacggcaataagaagtcttgatcgtctcatacatgaaatagtagcaggtgctataaggaagcatgccaactagtgttgggcagaggccagcatagagaccaccaataccatcagtttggtatatcttgttgaaggcaaggccgatacttggataagcctcacggttgacagtcaggcggtccttaagaacctcaagaggatggcacactaaggtgctaactattccagcagccgcaccaccaacagcaattggagagagcaagtgaagtggtagctcaattttcaaattgccaatttgtatatttgggcacccatcttccttccatttctcttgtgcttctgtcatgctccttttgacacactcaaatgtgccaagctcaagtgcttgagttggaataatccgaagcatatttattgtattacctgcccagagtccttgccagccattttgttcgacgatctccacaaaactaccaaaaatgtgttttgatcctaccccaacaaccattcttgtcctgatagtttctagaggagcaagaacagctttagtcatagcaccagctaatgccccactcacgaattctccaacttctctattcctcaggaaattcctgacggcggcgccgacgtccgggagcccgacggccacgtccccgacgaccttggcgacatcgaagtcgtcgtccttgggcaggcccacgactaacaagtcctccttgtacccgccgccggcgccggcgccgccgccgccagccacggcgccgacacggacgtccgcgaagccgatgctggcgagcgcgagcttcttgccgccgccgccgcgcgccaccccctcctcctccatgcccat

SEQ ID NO: 20424 - DNA, 520 bp, Oryza sativa
  Clone ID: PAT_MRT4530_25793C.1
cacgcgtccggaccggaaccctcacccttaccagtgcagcgagtaccgcaacctcgctgaacggttcactaaccgcgtacgacaaggaccatgtgctgctagcgtggctcgcacggcatctacgacagaaaaccaacatgccatcgacgctgccatggctggtctgcttgctgatcccacggaggcattagccttcttcgggtaagtgcactccttgcccttcaacccatctgacaagaggactgctctaacatacatcgatgccgatggtaactgccaccgcgccagcaagggagctcctgatcatatcctgaccctgtccatctgccaagaggatgtaaagaggaaagagcatgctgcgactgacaagtatgctgagcgtgggcttcgttctcttgctgttgcaagacaggaagatcctgataagtcgaaggaggctgctagcgagaccatgcctacaccgtggactgctgcccctgtgtgatcccccgatgcacgacagcgctcaaactatccggaa

SEQ ID NO: 20425 - DNA, 402 bp, Oryza sativa
  Clone ID: PAT_MRT4530_25794C.1
atgcggcggggaaacaacgcgatgctgtcccgatgtgtacacaagctcgagcttggctcgacaaagctcgcgagctttgtgagaggctcaggctcggctcgtctaatgctcgagccgagcttgaatccagcctatgacaagtcgagctcgagcagctcatggcttgggaggcgacagaccggcagtggacggcagcacggcaagagcctcgggttggccgcaagtggtggacccgtgttggtggtgacaggaaaagtgaggcgtgtgggacgagaggaggtgacctgtgtttggattttgctggaggaggagcagcaaaaagagttcgccggagggagctcgccggccattgaggccatgactagggctattaacgagccgagctcgagcgagctcatctga

SEQ ID NO: 20426 - DNA, 246 bp, Oryza sativa
  Clone ID: PAT_MRT4530_25795C.1
atggtggactgcggcaccacacatcgagcatggtcatcgtctgatcctcaagcgggccgaggcaatgcagtccgggaacgggttcctaccttattcggaggcggtgggaccggcaaggtccaggatagcatgaatcataggccggtggatccagcgagccgagctccatgccaagggtatggtgatgggggagggaggaagcaccagggatatggcctttctggctccggcaatgatctcggatag

SEQ ID NO: 20427 - DNA, 811 bp, Oryza sativa
  Clone ID: PAT_MRT4530_25796C.1
gatgtcggtgtcaagcgcgtcgactaaccgcgccgttaaggtaggctggcgggtgcgaaactgtggaacgcagatggagaattcattggccacgaagcagcggttgtttcggcgaaacgtcgaatatcattggccacgaagcagcggttgtttcggcgaaacgtcgaatatgttagggtgtataggatcgacgatgtcggtgtcaagcgcgtcgactaaccgcgccgttaagttaagctggcgggcgcgacactttggaatgcagatggagaattcataggccacgaagccgcggttgtttcggcgaaacgtcgaatatcataggccacgaagcagcggttgtttcggcgaaacgtcgaatatctgaaggtccacaagttagggtggatagctaagacgatgtcggtgtcaagcgcgtcgactaaccgcgccgttaagttaggctggcgggcgcgacactgtggaatgcagatggagaattcataggccatgaagcagcggttgtttcggtgaaacgtcaaaaatctgagggtccacaagatgtcggtgtcaagcgcgtcgactaaccgcgccgttaagttaggctggcgggcgcgacacggtggaatgcatatggagaattcataggccacgaagcagcggttgtttcgaggaaacgtcgaatatcataggccaggaagcagccgtttattcggcaaaacgtcgattatgatgtcggtgtcaagcgcgtcgactaaccgcgccgttaaggtaggctggcgggcgcgacaccattgccacgaaacagcggttgtttccgcgaaacgtctaa

SEQ ID NO: 20428 - DNA, 311 bp, Oryza sativa
  Clone ID: PAT_MRT4530_25797C.1
atatttgacgttttgccgaaacaaccgctgcttcgtggcctatgaattctccatctgcattccgcagtgtcgcgcccgccagcctaacataacggcgcggttactcgacgcgctggacacgacatcatattcgacgtttcgccgaaacaaccgctgcatggtggcctatgaattctccatctgcattccaaagtgtcgcgcccgccagcctaacttaacggcgcggttagtcgacgcgcttgacaccgacatcttgcggaccctcagatattcgacgtttcgccgaaacaaccgcggcttcgtggcctatg

SEQ ID NO: 20429 - DNA, 1234 bp, Oryza sativa
  Clone ID: PAT_MRT4530_25798C.1
atggactaccggccccttaaggaggcgctggcgggcgcgacattaatcacgggcctcacccttgagagactgtatttggagaggtggaacaccagagatttttctagaaccgacttaccataggccacgaagtagcggttggttcggcgaaacatcgaatatctgatggtccacaacgcgccgttaaggtaggctggcgggcccgacacataggccatgaagcagcggttgtttcggcgaaacgtcgaatatctgagggtccacaactggttttcaacgaggtggttagtatagggatggcacataggacattagggtggatagcatagacgatgtcggtgtcaagcgcgtcgactaaccgcgtcgttaaggtagcctggcgggcacgacacataggccacgaagcagcggttgtttcggcgaaacgtcgaatatctgagggtccacaactggttttcaacgaggtggttagtatagggatggcacataggacgttagggtggatagcatagacgatgtcggtgtcaagcgcgtcgactaaccgcgccgttaaggtaggctggcgggcgcgacacataggccacgaagcagcggttgtttcggcgaaacgtcgaatatctgagggtccacaacataggccaggaagcagcgacttattcggcgaaacgtcgaatatcataggccacgaagcagcggtcggtacgacgaaacattgaatatctgacggtccacaacataggccaggaagcagctgtttattcggcgaaacgtcgaatatctgagggtccacgacataggccaggaagcagcggtttattcggcgaaacgtcgaatatctgagggtccacaacataggccacgaagcagcggttgtttcggcgaaacgtcgaatatctgagggtccacaagatgtcggtgtcaagcgcgtcgactaaccgcgccgttaaggtaggctggcgggcgcgacactgtggaatgcagatggagaattcataggccacgaagcagcggttgtttcggcgaaacatcgaatatctgagggtccacaagatgtcggtgtcaagcgcgtcgactaaccgcgccgttaaggtaggctggcgggcgcgacactgtggaatgcagatggagaattcatatgccacgaaacaacggttgtttcggcgaaacgtcgaatatctgagggtcacaaagatgttggtgtcaagcgcgtcgactaacccggccgtaaggtagg

SEQ ID NO: 20430 - DNA, 341 bp, Oryza sativa
  Clone ID: PAT_MRT4530_25799C.1
gtgatgaaggagagctctgctcctccgccggctgctgttgtggcggcggcggcccagggatgacgagagggaggggcggacaggtggcacgctggtgcaaaagaggagcccggacggcgacccccggccgggcccgtgcacaccatacgcgtcaaggtcaagttcaacggtgtctaccacgagatctacatcaactcgcaggcgtccttcggtgagctgaaaaaacatctgccggcgccgacagggctgcacccggaggaccataagaacgttcacaaggacaaggagagggactccaaggcgttccttgacatggccggggtcaaggaccgatccaagat

SEQ ID NO: 20431 - DNA, 189 bp, Oryza sativa
  Clone ID: PAT_MRT4530_2579C.1
atggcgttgggagaacgtgtgaggaagatcaaacgaggagctggtaagtgtttcaaagtaaccggagattcccaagtggttcgatcagaggtccagccccaacaacaacagatggacaacgaaggtgatagggatgagctccgcaagaaaccatttgattcatgggatcaccgcttcatcgacaattag

SEQ ID NO: 20432 - DNA, 597 bp, Oryza sativa
  Clone ID: PAT_MRT4530_257C.1
atgaggatcgagggacgcgaggaggaaaaaaaaaagtctcggaaaagcatgatcctgtcgtcccgaatggtcgtcgtcgcggatggtcgtagatacgccccctgcatgcttgtagtacaaaagcgaggccgaattctgtacggttggtggaacgggcaaaacgtatcgatagccatcgccgtcgccggcgacggggagttgccgaagttcagagtttcagagccgaagtggagtacagtacatgagatctttttatccacgggagagaaacgcgaggacaagaggacccgtccaatcggccatcgcacgcaaaaaactgtgtcctttgcaatttgcagaattgggaatttgtatgtactccacttaccggaggtgaaggcacgaactgggttcattcattcattcatgcatgcactgatgcacagtgaccagaatgccaaagcagagaaaagaaattggtatatgcggatcaagattagctccagttggtatggaaagagattggacaggaagtgcacaatttgcactctcaaatttgccttcgaggcaccaaccgtagttagcccatgcactttacttgaaaccgcagccatgcag

SEQ ID NO: 20433 - DNA, 5519 bp, Oryza sativa
  Clone ID: PAT_MRT4530_25800C.1
atgtcggtgtcaagcgcgtcgactaaccgcgccgttatggaagcagcgacttattcggcgaaacgtcgaatatctgagggtccacaacgggttttcaacgaggtggttagtatagagatggcacataggacgttagggtggatagcatagacgatgtcggtgtcaagcgcgtcgactaaccgcgccgttaaggtaggctggcgggcgcgacacataggccacgaagcagcggttgtttcgacgaaacgtcgaatatctgagggtccacaacataggccacgaagcagcggttgtttcggcgaaacgtcgaatatcataggccacgaagcagcggttgtttcggcgaaacgtcgaatatctgagggtccacaacataggccaggaagcagcgacttattcggcgaaacgtcgaatatcataggccacgaagcagcggttgtttcgacgaaacgtcgaatatctgagggtccacaacataggccacgaagcagcggttgtttcggcgaaacgtcgaatatctgagggtccacaacataggccacgaagcagcggttgtttcgatgaaacgtcgaatatctgagggtccacaacataggccacgcagcagcggttggttcggcgaaacgttgaatatctgacggtccacaacataggccaggaagcagctgtttattcggcgaaacgtcgaatatctgagggtccacgacataggccaggaagcagcggtttattcggcgaaacgtcgaatatcttaggccaggaagcagccgtttattcggcgaaacgtcgaatatcataggccacgaagcagcggttgtttcggcgaaacgtcgaatatctgagggtccacaacataggccaggaagcagcgacttattcggcgaaacgtcgaatatcataggccacgaagcagcggttgtttcgacgaaacgtcgaatatctgagggtccacaacataggccacgaagcagcggttgtttcggcgaaacgtcgaatatcataggccacgaagcagcggttgtttcggcgaaacgtcgaatatctgagggtccacaacataggccaggaagcagcgacttattcggcgaaacgtcgaatatcataggccacgaagcagcggttgtttcgacgaaacgtcgaatatctgagggtccacaacataggccacgaagcagcggtcggtacgacgaaacattgaatatctgacggtccacaacataggccaggaagcagttgtttattcggcgaaacgtcgaatatctgagggtccacgacataggccacgaagcagcggttgtttcggcgaaacgtcgaatatctgagggtccacaacataggccaggaagcagcgacttattcggcgaaacgtcgaatatcataggccacgaagcagcggttgtttcgacgaaacgtcgaatatctgagggtccacaacataggccaggaagcagcgacttattcggcgaaacgtcgaatatcataggccacgaagcagcggtcggtacgacgaaacattgaatatctgacggtccacaacataggccacgaagcagcggttgtttgggcgaaacgtcgaatatctgagggtccacaacattggccacgaagcagcggttgtttcggcgaaacgtcgaatatctgaaggtccacaacataggccacgaagcagcggttgtttcggcgaaacgtcgaatatctgagggtccacaactggttctcaacgaggtggttagtatagggatggcacataggacgttagggtgtataggatcgacgatgtcggtgtcaagcgcgtcgactaaccgcgccgttaagttaagctggcgggcgcgacactgtggaatgcagatggagaattctccatctgagggtccacaacgggttttcaacgaggtggttagtatagagatggcacataggacgttagggtggatagcatagacgatgtcgttgtcaagcgcgtcgactaaccgcgccgttaaggtaggctggcgggcgtgactcataggccacgaagcagcggttgtttcgacgaaacgtcgaatatctgagggtccacaacataggccacgaagcagcggtcggtacgacgaaacattgaatatctgacggtccacaacataggccacgaagcagcggttgtttgggcgaaacgtcgaatatctgagggtccacaacataggccacgaagcagcggttgtttcggcgaaacgtcgaatatctgagggtccacaacattggccacgaagcagcggttgtttcggcgaaacgtcgaatatcataggccacgaagcagcggttgtttcggcgaaacgtcgaatatctgagggtccacaactggttctcaacgaggtggttagtatagggatggcacataggacgttagggtgtataggatcgacgatgtcggtgtcaagcgcgtcgactaaccgcgccgttaagttaagctggcgggcgcgacactgtggaatgcagatggagaattctccatctgagggtccacaacgggttttcaacgaggtggttagtatagagatggcacataggacgttagggtggatagcatagacgatgtcgttgtcaagcgcgtcgactaaccgcgccgttaaggtaggctggcgggcgtgactcataggccacgaagcagcggttgtttcggcgaaacgtcgaatatcattggccacgaagcagcggttgtttcggcgaaacgtcgaatatctgaaggtccacaacataggccacgaagcagcggttgtttcggcgaaacgtcgaatatctgagggtccacaactggttctcaacgaggtggttagtatagggatggcacataggacgttagggtgtataggatcgacgatgtcggtgtcaagcgcgtcaactaaccgcgccgttaagttaagctggcgggcgcgacacataggccacaaagcagcggttgtttcagcgaaacgtcgaatatctgagggtccacaacataggccaggaagcagctgtttattcggcgaaacgtcgaatatctgaggctccacaacattggccacgaagcagcggttgtttcggcgaaacgtcgaatatctgaaggtccacaacataggccacgaagcagcggttgtttcggcgaaacgtcgaatatctgagggtccacaacataggccacgaagcagcggttgcttcggcgaaacgtcgaatatctgagggtccacaacattggccacgaagcagcggttgtttcggcgaaacgtcgaatatctgaaggtccacaacataggccacgaagcagcggttgtttcggcgaaacgtcgaatatctgagggtccacaactggttctcaacgaggtggttagtatagggatggcacataggacgttagggtgtataggatcgacgatgtcggtgtcaagcgcgtcgactaaccgcgccgttaagttaagctggcgggcgcgacacataggccacgaagcagcggttgcttcggcgaaacgtcgaatatctgagggtccacaacattggccacgaagcagcggttgtttcggcgaaacgtcgaatatcattggccacgaagcagcggttgtttcggcgaaacgtcgaatatctgagggtccacaactggttctcaacgaggtggttagtatagggatggcacataggacgttagggtgtataggatcgacgatgtcggtgtcaagcgcgtcgactaaccgcgccgttaagttaagctggcgggcgcgacacataggccacgaagcagcggttgcttcggcgaaacgtcgaatatctgagggtccacaacattggccacgaagcagcggttgtttcggcgaaacgtcgaatatctgaaggtccacaacataggccacgaagcagcggttgtttcggcgaaacgtcgaatatctgagggtccacaacataggccacgaagcagcggttgtttcggcgaaacatcgaatatctgagggtccacaacattggccacgaagcagcggttgtttcggcgaaacgtcgaatatcattggccacgaagcagcggttgtttcggcgaaacgtcgaatatctgagggtccacaactggttctcaacgaggtggttagtatagggatggcacataggacgttagggtgtataggatcgacgatgtcggtgtcaagcgcgtcgactaaccgcgccgttaagttaagctggcgggcgcgacacataggccacgaagcagcggttgcttcggcgaaacgtcgaatatctgagggtccacaacattggccacgaagcagcggttgtttcggcgaaacgtcgaatatctgaaggtccacaacataggccacgaagcagcggttgtttcggcgaaacgtcgaatatctgagggtccacaacataggccacgaagcagcggttgtttcggcgaaacatcgaatatctgagggtccacaacataggccacgaagcagcggttgtttcggcgaaacgtcgaatatctgagggtccacaacataggccaggaagcagctgtttattcggcgaaacgtcgaatatctgagggtccacaacataggccacgaagcagcggttgtttcggcgaaacgtcgaatatctgagggtccacaactggttttcaacgaggtggttacataggccacgaagcagcggtagtttcggcgaaacgtcgaatatctgagggtccacaacataggccacgaagcagcggttgtttcggcgaaacgtcgaatatctgagggtccacaactggttttcaacgaggtggttagtatagggatggcacataggacgttaaggtggatagctaagacgatgtcggtgtcaagcgcgtcgactaaccgcgccgttaaggtaggctggcgggcgcgacacataggccacgaagcagaggtagtttcggcgaaacgtcgaatatctgagggtccacaacataggccacgaagcagcggttgtttcggcgaaacgtcgaatatctgagggtccacaacataggccacgaagcagcggtagtttcggcgaaacgtcgaatatctgagggtccacaacataggccacgaagcagcggttgtttcggcgaaacgtcgaatatctgagggtccacaacataggccaggaagcaacggtttattcggcgaaacgtcgaatatcataggccacgaagcagcggttgttttggcgaaatgtcgaatatctgagggtccacaacataggccacgaagcagcggttgtttcggcgaaacgtcgaatatctgagggtccacaacataggccaggaagcagctgtttattcggcgaaacgtcgaatatctgagggtccacaacaccacggtatacggacggaagacgtgacatagtttccaacccatcctagccatagacaagagtaccgacccaaccccacctacggccagaacccccgggacaggtaggcaggactgagcctctagtagcaggacaccagccctgtgccatgacatctcggctaccgggccgcagctcgtgtagccttcatttgtcctagagatgtccat

SEQ ID NO: 20434 - DNA, 466 bp, Oryza sativa
  Clone ID: PAT_MRT4530_25801C.1
ccttcttatcctactcttgtcttctcccgacttcgggtgcgtgttagataccttggtgagtcaaccatgggcacggagaagacgcacatcaacatcgggggcattgtccacgcccactccggcaagtacaccaccacggaccatgtgatttacaagctaggaggtatcgacaagcgagtgatctaaaggttgacgaaggacgccgatcagatgaacaagacgtcgttcacgtacgcgtgggagcaagacaagctcaaggcctagcgagacataggaatgaccatcgatattgccctgtggaagttagcgaccaccaagtactactgcacggccatcgatgcccctgggaaccgagacttcgttatgatcatgatcacgggtacctgacaggctgactgagacgtgctaaatattgactacaccactggtggtaatgaggctggtatgtccaatgaaggccagaccc

SEQ ID NO: 20435 - DNA, 1378 bp, Oryza sativa
  Clone ID: PAT_MRT4530_25802C.1
aaatacgggaaaggagatcgggcggtcaacttggtagtggctccccggcccgccggccgggtctcttctacctcttctcccacctgcgccgccgccactcactcccaaaccctaaccccggaggagagggaggagcagccatggccgtgggcaagaacaagaggatctccaagggcaggaagggcagcaagaagaagaccgtcgatcccttttccaagaaggattggtacgacatcaaggcgccgaccgtgttctccgtccgcaacatcggcaagaccctcgtctccaggacccaggggaccaagattgcatctgagggtctcaagcatcgtgtctttgaagtctccttggcggatcttcagaatgacgaggatcaggcttacaggaaggttagacttcgtgctgaggatgttcaggggaggaatgtcctcacgaatttctggggcatgagttttaccacggacaaacttaggtccttggtcaagaaatggcaaacattgattgaagcccatgtggatgttaagaccacagataactacatgctccgcctgttttgcattggtttcaccaagcgccgcccaaatcaggtgaagcgtacctgttacgctcaggctagccagatccggcagatccgccggaagatggttgagatcatggccaaccaggcatcaacatgtgacttgaaagaactggtttcaaaattcatccctgaagtcattggaaaggagatcgagaagtcaacttcaagtatattccctctccaaaatgtgttcatccgcaaggtgaagatcttgaaggcaccgaagtttgatcttgggaagttgatggaggtacacggtgactacaaggaagatgtcggtatgaagctggacaggcctgctgagactgacgaggcggtggcaggggaggttgcagcagctgagtagagatggtgttgctagttgctttaccttttaggagatttgggctgttactaaattatggatgatcaaaacttaatgtcagttccgatacccttttttgtctgccgagttggtttctctgattaaaaccatggaaaattgtgagactgatttcatggccagctcattttgaatgcagttgaatgattagtactaaaaaaaaaaaaaaaaaaaccggattttattcagccaatatatatatgtatcgcctatcaaggttttgatcacgagcagcaggctcggtttttgtggctaatttcctgaatactttcttgagattactagccagcatcgtttttgttttctggatggaagtttatttgtctaaagtttgtgctttcttttttttgcaacctgacaagtcaagactgataaagaagaaagttctttacctgatctctaatgctttggacctt

SEQ ID NO: 20436 - DNA, 1081 bp, Oryza sativa
  Clone ID: PAT_MRT4530_25803C.1
tcaagttgaaagccattcaagatccagaaagtttgaatcaccagaatgaaggcaactttctttcaacggctggaacatgatgtatctgaggtaccatgggtgtacctcactttcacagctcaatgaaatttcattgccatgtactgaattagattccaatactggaaattgtgacccacttttaacatgaaggcaaccacgatcatgcaccttgacaaatatcttcagctggagaaacctattgatggagatcctgtgcttggtggcgtactcatcaagcacacactccttcatggccgcagcggccaccggcggcggcgtagacacacacaactccagtgtgtacttcgcgagcggcctacagaacaagcacaatcatcgcaacgcgcgtgctgttgcggatcccggaagcacagcggtcacggtactacgaactgtgcagcaaaccgacgttgctccggctggatacatgagcagattacagcacccagagcagacgagctggctttgggcccctgaaattgcacaatcatggctcttcagagttcagagactgactgaatttgtggaccctcagatattcgacgtttcgccgaaacaaccgctgcttcgtggcctacgatattcgacgtttcgccgaataaaccgctgcttcgtggcctatgaattctccatctgcattccaaagtgtcgcgcccgccagcctaacttaacggcgcggttagtcgacgcgcttgacaccgacatcttgcggaccctcagatattcgacgtttcgccgaaacaaccgcggcttcgtggcctatgaattctccatctgtattccagtgtcgtgcccgccagccttccttaacggcgcgttgtggaccctcagatatttgacgttttgccgaaacaaccgctgcttcgtggcctatgttgtggaccctcagatattcgacgtttcgccgaaacaaccgctgcatggtggcctatgtgtcgcgcccgccagcctacctcaacggctgtcccaccgtagcgcacctgcctcgctcaggggtgaaccatctatgcagggatactgcctccgctcggctatctaa

SEQ ID NO: 20437 - DNA, 612 bp, Oryza sativa
  Clone ID: PAT_MRT4530_25804C.1
atcggaactgacattaagttttgatcatcgataatttagtaacagcccaaatctcctaaaaggtaaagcaactagcaacaccatctctactcagctgctgcaacctcccctgccaccgcctcgtcagtctcagcaggcctgtccagcttcataccgacatcttccttgtagtcaccgtgtacctccatcaacttcccaagatcaaacttcggtgccttcaagatcttcaccttgcggatgaacacattttggagagggaatatacttgaagttgacttctcgatctcctttccaatgacttcagggatgaattttgaaaccagttctttcaagtcacatgttgatgcctggttggccatgatctcaaccatcttccggcggatcttcaaacagtggacaaaaataaagtaaacaacaagaacatacctcatctcaaaaaacaagaacttacctagtacagaacatgcaaaaaagtatgacaaaacttttacctgccggatctggctagcctgagcgtaacaggtacgcttcacctgatttgggcggcgcttggtgaaaccaatgcaaaacaggcggagcatgtagttatctgtggtcttaacatccacatgg

SEQ ID NO: 20438 - DNA, 207 bp, Oryza sativa
  Clone ID: PAT_MRT4530_25805C.1
ctacaaaaaattcatttttactttgggaacctatctacaacgggaccttacacacaaaaaaaacacaaagatcatctctcttctttcgtttcaccagccattgaacccaaacacaataaaccatgaccttttcaacgcctcccctttttgaggtaaaacaacattaaaattcgttctcccagccacggagtgatcaagcacaacact

SEQ ID NO: 20439 - DNA, 209 bp, Oryza sativa
  Clone ID: PAT_MRT4530_25806C.1
atgagtcttgacttgtcagggtgcaaaaaaaagaaagcacaaactttagacaaataaacttccatccagaaaacaaaaacgatgctggctagtaatctcaagaaagtattcaggaaattagccacaaaaaccgagcctgctgctcgtgatcaaaaccttgataggcgatacatatatatattgtctgaataaaatagcagtaaaataag

SEQ ID NO: 20440 - DNA, 825 bp, Oryza sativa
  Clone ID: PAT_MRT4530_25807C.1
ggcaaaccgctcaactctctccgctccaaacgactagctcgatcacttgctagctgcctagctcccaccatgatggcttcgcgagtctcctccctcctccgcgccgccgccgcggcggtgtccgtccccggccgctcccgctcactctccgccgcagcggcgacggcggcgaagaagccggcgggggactacgtgccggtgtacgtggcgatggggatgatcgcggtgtcggtgtcgctgggcctggcgacggcgaggcagcagctggcgcacgcgcccaacgtgcggctcgacaagaagaagcgggagacggtgcccgaggtggcggcgccggacatggcgctcgacgaggcggagcggttcgtcggcgggtcgctgttccgcaaggtggcgcacgtgcaggacgacgcctcgctccgcgccggcgtcgccgccgaccccgtcgccgagtacccggccaggaaggccgtcaccctcaaggacgccggcgtcgagccccccggcatcgagcagggcagggaggggatcctcgaggtgttggggaagaagaccaagcccgccgccgctgcttgaagctgaagcgtgtgatataattgcagttaattagtagtgggttaatctgggttctccttgctttaattagttttatttgcttaattactggttgctttgttttagtctttcaaaccggctgtacttttatgaagtcgatgtgtgtgttggggaactgcttgtacatatgtcaatccagctttgatgaaaaaaaaaattatcaaattttagcattttaaaattttggtatagttacttaaaaaaaaaaaaaaa

SEQ ID NO: 20441 - DNA, 298 bp, Oryza sativa
  Clone ID: PAT_MRT4530_25808C.1
ttttggttacagtaagtagcttataaggtggctaaaaaaaacctgacttttacaaactgcgggaccaaacaaccaagttacaatatataaaaactctgagatccccgcctcgcactatctatttttttagacaaaaggatcatccaacaaaactgcctatcaagactgtcctgattgaaacgctcattagacaagcaacgatggctttgctttacctttggggacaggaatttatttttttgtacgctaagccgcattttttaccttccagcatcacataagccggtgcactctgagc

SEQ ID NO: 20442 - DNA, 246 bp, Oryza sativa
  Clone ID: PAT_MRT4530_25809C.1
atgggcatcctctccggcttcgcccgtggaccccagctagacctagccctagccctagccctaagtccagatctacgagctaagcttgtggcgtacctgcgccgggccgtacgtcgccggcgatgccagccctccggcggaccggcctccgcgccggcgacaaccgggcgttccatcttctggccttggtgcacgccatggagggagcgcttctcatccattaccggcggtggtggctttttatag

SEQ ID NO: 20443 - DNA, 327 bp, Oryza sativa
  Clone ID: PAT_MRT4530_2580C.1
atgggtcatacctacctccactccgccggaagcagatgcaatgtgggagcacggttgtctgccgatgacgtgaccggcgtcagaccagtcacaaaccggtcattcttgtctaccacgtgtcagtttagcatgccacacgtctgcccttcttcatacaattacttccttgtaatggttgcgatgaagcctggtatgaatctggccgggactgacatacccactccaggagctagcacgccagctccggctagagacgagtgcctggaggctctcatcatttcgacgggacggggcgaggcgtgtgacaggccgcctgttgccacctaa

SEQ ID NO: 20444 - DNA, 729 bp, Oryza sativa
  Clone ID: PAT_MRT4530_25810C.1
atggcgggcgtggtgcagaccgtgcagtgcgaccagccgagcaagcagcagctgacggaggcggcggaggcagcggctgcggctgcggcggcggcgtcgctgaggatatttgggtacgaggtggggggtggtggtggaggaggaggcgtggcggcggcggcgggtgcaaggcgggaggcggcggacgtggtcgtcggggcggggaggaggttcgagtgccagtactgttgccgcgagttcgccaactcgcaggcgctgggcgggcaccagaacgcgcacaagaaggagcggcagcagctgaagcgggcgcgtctgcagctcgccgtcgccgccgcggggacgccggcgggcatgggcttcgcggcggcacaggcgccggcgccgccgccggggcacgtgatcgccgtagggcatcacgcggggtcggttgcctcctacgcgctgcccaggtgggtctacctcgcggcgcaccacctgcagcccccggcggtgggcctgccgttccacgccaccgttcaggcagcagccggcgcgtgccacggcggcggcgacgtcgagacgcggttgctcagcgtcgccgccgctgggcggggcagcagcactgcaggcagcagcgctcactcgtacgaggtgtgtgctcctgcggctccggcggatgacagcgacgaggaagcctcggcgatggggttggacctccatctcagcctagctccggcgagctcggcatga

SEQ ID NO: 20445 - DNA, 223 bp, Oryza sativa
  Clone ID: PAT_MRT4530_25811C.1
ccgccgcctttgcgccgccgtcatccgccgtcggttcccgcgcctccggttgccgtcgccggcgaccgtgcgtgcgcggcaccgccctcgccataaccggtcggccggtttgaagccgagccggaccgaccgggcgcctcgccgctttccccccccccttgtgacgctgcccggtgggtcccgcttgccagccgccccctctccctctctcctgtgcctctga

SEQ ID NO: 20446 - DNA, 589 bp, Oryza sativa
  Clone ID: PAT_MRT4530_25812C.1
gtaggaattgggcacgagtcgacgccgagagcggcggcgagcctcgccaagaaggcggcggttgtggcgctggccgtcctggccgcggcgctcgcgacggcggcgcgcgccgagcagtgcggcgcgcaggccggtggcgccaggtgcccgaactgcctctgctgcatccgctggggctggtgcgggaccaccttcgccttttgtggcgactgcttccagtagccagcgcatctgctgttagtcctacccccactcctttatcctcccattttcctttactctcttgtcttttcttcctttcctacgttcctcgtttcactgctacttctccatctcactctctccttttcctcctattcgctcttttattaattctcttccttcctacttctccattttcctattcttctcctctttttctccttctatttttcctcttcttaacctgtccctctctttactttttctctccctttagtatcttatctctttttctttaattttctttactccttcttcttctcttttcttttctcctcttcttctttccttcccatcttactcctattctctctatctctctatccca

SEQ ID NO: 20447 - DNA, 495 bp, Oryza sativa
  Clone ID: PAT_MRT4530_25813C.1
atgggggaaacgatagagggagctcgggggagtgatttaaaggtgcgggagggggcggacggggccgggaaggtggccgatttggccggcgacatgggggagtggggaggaagagagagagggggattcaaattgaaccctgcccactctcgggcgcgcgtgggggcgggagaagcgggggagggccggcgacgtgagcgcgaggtgtgggcgcggagtggaggcgcgacgtggagcggagaaggcgggaaacggcggcggcgtggcggtttcggcggcagcggcggttggagctccggctccaacggccggaggaactctcaaacatttcttcaactgagagacgtggaacacattgtggatgccaagcatgttggagggaagctcaagctgactagcttggtaactgttattgtaagagaattcagcatacggcaagcttttgtcccatgctccaccaaagtcaagcgtacaggctctcaacatatcctctag

SEQ ID NO: 20448 - DNA, 1173 bp, Oryza sativa
  Clone ID: PAT_MRT4530_25814C.1
atgtcttcgtcttcgtcggagcagtgcgacgtcatcagcctgccggaggaccaggtgttcgagatgctcacacgcgtctcgctcgacgacctcgccgcctgccgccaggtctccacccgctggcgccgcctcacctacgagcccgccttcgcgccgctccactgccgccgcgccgacgccgtctccggctacctcgtccagaccgtcgcgcgcaaccgctaccacgccaccttcgtctcctccatgcacccctcgccgccgccggccgacctcgtgtccctcgacttcctcccctccccgcacgtccgcgtcgaggccgtctcgccgcaccgggggctcgtctgctgcgtcgacgccgacgccgacgccgccacgccgcgcaagccggcgtcgtcctactacgtctgcaagccggcgactaggcagtggcgcgcgctgcctaacccgaggttgcgctaccgcacggccgccaccgcgatgctggcgcgccccggcggcggcggcggtggcgcggcggacttcaagatcgtccgcttctccgtccccacgctcaggaactgcctccgctgcgaggtgttcgactcgcgggggatggcgtggcggcggtcggcggacgtcgcggtgtggccggagtcgctcgtggaggccgccccggcggtgagggcgcacggcgccatgcactggctccggtggcccgacaggctgagcggcggcgccgaggacatcttcgcgttcgacgtgaagaccgagacgtggcgcctcatcggcctgccgccggaggccaccaccgagaagaggtgggcgcggaagaaggtggcggcggtggaggggaagctgtgcctggtggtggtggtcgacgaggaggtcgaggtctgggtgctggccggctacaggcaggagaggtgggagaagaagatgacggcgagcttgacgaggctggcaatggaggaaggcaactcattcatactcagagatctctacgcatctgacgttgcattcttcaacagcgtctacagagtgctgtggtatgattttttgagggggaagatagcggaagctccactacgccacaagtgcatccaacaagttttcaagtttgagtcagatttggtcccttttgaggagatagatgaaaggcccaattcagattttaaatgggtttgcaagccctga

SEQ ID NO: 20449 - DNA, 378 bp, Oryza sativa
  Clone ID: PAT_MRT4530_25815C.1
caacgcgaggggatctatacatcgccccatacgactgtgctgtacagcgcgctggctacctcttgtgcactggctctgtagcccagctgatattaggccagagcactagtcaataggcagacgtctcgtcggggaagctcatgagaatgcaggttcgataggctgcaagcatttgagccaatttggagtgtgaggtctaatgctggcacaactgagttcttcgatgactataatgagcaaatcaatgaccggagatctgctgtccgtcgagttattgaacctagaggccttctactacgccattacactaatggtgcatctgtagtatatatcatccaagggagaggtataacagggccaactttgccaggctgtgct

SEQ ID NO: 20450 - DNA, 327 bp, Oryza sativa
  Clone ID: PAT_MRT4530_25816C.1
atggctcgaccgacgcaccgggctgtgccgtgccagcccacgggcggcatacacggcccaggcacggcccaatactactcgggccgtgccgggctggcccgaagtgggccgaaagactatgaggcctaccaatctaccgcggctggtcgctgctgtcgtcgacgacgacggcggtcatctggggcgccgccgccgggatctccggcctccgtcctctccggcggtaagggtttctggataagcaatgggatgcatctccatcagccgtggacttgggctcaggtcttggagatgctgccgtggagccatggagctcgtgctgtctga

SEQ ID NO: 20451 - DNA, 548 bp, Oryza sativa
  unsure (1)..(548): unsure at all n locations
  Clone ID: PAT_MRT4530_25817C.1
gagcncactacttgagagagcctcccttngnnnnnnnttttaaacnaaaaaggatattgggttattggggacaaaaacccgaaaaaacacccatggcaccaaaacgggaacattgcataaccaaaaaaaaaaacgggagaaaaaggagaaaaggaaaaaaaaaaaacaggtgaagaatggataaaacgacattaaacctatgaacgaagtaatagaaaacagggaacacacaaataactaaaccacacctagcaagacatccattgaagggagggaacaaccccacaacaatcttaaactcgaggcttaccaaacacgaggggcaccacaacctcccaggggaagacaggggcatcccttccaaaggggccaaaagcagctgtctcgaggaacccaaggccccccctcttaaggaccaagacaaaggggaccaccccagggcggaaggcaaaatgctccgccacaatttgaaaaaactcctggagagaaatctgcccagaaccataagtggacacaaacacggacaagggctcagggacaccaatggc

SEQ ID NO: 20452 - DNA, 1781 bp, Oryza sativa
  Clone ID: PAT_MRT4530_25818C.1
gagacaccaatctcgtacgtagcatatctacatcgcaggaacacccaaatcactcgtgcgtaggtatggttctgacgcacgtcgaggcggtggaggagggcagcgaggcggcggccgccgtgttcgcgtcgaggtacgtgcaggacccggtgccgaggtacgagctcggcgagaggtcgatatccaaggacgccgcgtaccagatcgtccacgacgagctcctcctggacagcagcccgcgcctgaacctggcgtccttcgtcaccacctggatggagcccgagtgcgacaggctcatcctcgaggccatcaacaagaactacgccgacatggacgagtaccccgtcaccaccgagctccagaaccggtgcgtgaacatcatagcgaggctgttcaatgcgccggtgggcgacggcgagaaggcggtcggggtgggcacggtggggtcgtcggaggccataatgctggccgggctggcgttcaagcggcggtggcagaaccggcggaaggcggcggggaagccccacgacaagcccaacatcgtgacgggggccaacgtgcaggtgtgctgggagaagttcgcgcgctacttcgaggtggagctcaaggaggtgaagctgaccgaaggctgctacgtgatggaccccgtcaaggccgtggacatggtcgacgagaacaccatctgcgtcgccgccatcctcggctccaccctcaccggcgagttcgaggacgtcaggcgcctcaacgacctcctcgccgccaagaacaagcggacgggttgggacacgccgatccacgtcgacgcggcgagcggcgggttcatcgcgccgttcatctacccggagctggagtgggacttccggctgccgctggtgaagagcatcaacgtcagcggccacaagtacgggctcgtctacgccggcgtcgggtgggtcatctggcgcaacaaggaggacctccccgaggagctcatcttccacatcaactacctcggcgccgaccagccaaccttcacgctcaacttctccaaagggtccagtcagattattgcgcaatattaccagtttcttcgactcggatttgaggggtacaagagcgtgatgaagaactgcatggagagcgcgaggacgctccgggagggcctggagaagacggggcggttcaccatcatctccaaggaggagggcgtgccgctggtggccttcacgttcaaggacggcgccggcgcgcaggccttcaggctgtcgtcgggcctgcgccggtacgggtggatcgtgccggcgtacacgatgccggcggcgctggagcacatgacggtcgtccgcgtcgtcgtccgggaagacttcggccggccgctcgccgagcggttcctgtcccacgtcaggatggccctggacgagatggacctcgccgccagggcccccgtgcccagggtgcagctcaccatcgagctcggccccgcccggaccgccggcgaggaggcctcgatcagggtggtcaagagcgaggccgtgcccgtgcgcaagagcgtcccgctcgtcgccggcaaaaccaagggcgtttgctagaccgggttaaatttttttttaaaatactggtgggaacacgaccaaaataaaatttcaaaatgggagcgtactaaaccttctttatgctacagtaactatgtagtacaagcatgccgaaagttaatcatcgtgtgtaatcgtattagagtttgcaacagcatattataatgtggagaagaacacgcaagcgacatcaaaaaaaaaaaaaaaaaa

SEQ ID NO: 20453 - DNA, 237 bp, Oryza sativa
  unsure (1)..(237): unsure at all n locations
  Clone ID: PAT_MRT4530_25819C.1
ntgactgggtccttctcatccnctgtgtcaatagctcaaactntggcattggcatataatattttgcttncagttnttagaacggtttntctatcatatttttttcagtgtgccgactcatactttggatccattaatgttaatntgaagcccttttgatttccntttnaaaaaaaaaaaaaaaaaaaaaaaaaaaaaaaaaaaaaaaaaaaaaaaaaaaaaaaaaaaaaaaaaaaa

SEQ ID NO: 20454 - DNA, 1469 bp, Oryza sativa
  Clone ID: PAT_MRT4530_2581C.1
atgggttcaaaagatggattctccaacaacaagctactcgacgactttggacccgggagctccaaccccgccagagtacgtcctccgacgagattggaatcatcgtcatcaataattcgatctctcgagatcgaccaagcttcgagaccctcggacgtcctcaccctcgtcgtcctcggcaacttgagactagtcggcaaaaagaacaattgagcactcgagtaggttgtggtcgagtacaccgcattatcgagaatgatctcgacaaatgcagagtcgtcacgcccaacctaccaacgaagaccgacgacctatctcatagcaccggccatggctggactactcgagaaaagtacgtagccatctctcgcaccgcaaacttccattggtgttccagagataattctactcgctcgctggttctcgaaccagtacgtagccatctctcacaccgcaaacttccattggtgttcaagagataattctactcgctcgctggttctcgaaccatggtcgaggtacgactacagcaatatcgcagtggtcctcgcaccatgactttagatcattgaggaacagctactactggtcttcgaccggcagcatagcggtcctcacaccatgacttcagatggttgaggaacagctacgactggtcttcgaccggcagcgtagtggtcctcgtaccacgactccaaatggtcgaagacacctactcactggttctcttctagtttggtcgagttacgactactacctggttctcgaccagcggtgtagcgattctcccattatctctactccaacaaagttggtatcaggtacacaatattactaagtgttttacccagagatcccttaccacgacgacacgtagcgttgaaaccaatcctactgtccctttatgccgtcttgacaaggcctccgaggaacctaagggaacttcggttgggacgcccagagccgataaggccttgtcggatcctgtagagacaaaagaccatgaaaattctattcgacattatggaagactccatgtctctatggttctacaccaagatcgactaaggcgagtacgaccaatgttgacaaggcttcgtcgcagactctacgccttctcgatcgctcgagaacgattgctggatctcgacaaggaatacagaatgaagaaatggaggagaggggacacgatcaacacggtcaccacgatcaagacccaccacaatcaacaaccaccacaatatacggaacaacagaagccaatacaagcctacatacgccaagacaagacgccggatatcgactttagggataggcatggctattcccctatggtatctccggataccgtcaggagagacgaaagcgctatctctgatctcgccggacacggattcgaggaggaaggctaccctgttgtcgactacgagtcagcctttctgaccgtcatgtcaacaacagttagatag

SEQ ID NO: 20455 - DNA, 1419 bp, Oryza sativa
  Clone ID: PAT_MRT4530_25820C.1
atggttctgacgcacgtcgaggcggtggaggagggcagcgaggcggcggccgccgtgttcgcgtcgaggtacgtgcaggacccggtgccgaggtacgagctcggcgagaggtcgatatccaaggacgccgcgtaccagatcgtccacgacgagctcctcctggacagcagcccgcgcctgaacctggcgtccttcgtcaccacctggatggagcccgagtgcgacaggctcatcctcgaggccatcaacaagaactacgccgacatggacgagtaccccgtcaccaccgagctccaggcaagcaatcaaacaaaccaaaccatataccctcgtctcctccatatcctttcgttgcattgcgttgtgaaccggtgcgtgaacatcatagcgaggctgttcaatgcgccggtgggcgacggcgagaaggcggtcggggtgggcacggtggggtcgtcggaggccataatgctggccgggctggcgttcaagcggcggtggcagaaccggcggaaggcggcggggaagccccacgacaagcccaacatcgtgacgggggccaacgtgcaggtgtgctgggagaagttcgcgcgctacttcgaggtggagctcaaggaggtgaagctgaccgaaggctgctacgtgatggaccccgtcaaggccgtggacatggtcgacgagaacaccatctgcgtcgccgccatcctcggctccaccctcaccggcgagttcgaggacgtcaggcgcctcaacgacctcctcgccgccaagaacaagcggacgggttgggacacgccgatccacgtcgacgcggcgagcggcgggttcatcgcgccgttcatctacccggagctggagtgggacttccggctgccgctggtgaagagcatcaacgtcagcggccacaagtacgggctcgtctacgccggcgtcgggtgggggtacaagagcgtgatgaagaactgcatggagagcgcgaggacgctccgggagggcctggagaagacggggcggttcaccatcatctccaaggaggagggcgtgccgctggtggccttcacgttcaaggacggcgccggcgcgcaggccttcaggctgtcgtcgggcctgcgccggtacgggtggatcgtgccggcgtacacgatgccggcggcgctggagcacatgacggtgctccgcgtcgtcgtccgggaagacttcggccggccgctcgccgagcggttcctgtcccacgtcaggatggccctggacgagatggacctcgccgccagggcccccgtgcccagggtgcagctcaccatcgagctcggccccgcccggaccgccggcgaggaggcctcgatcagggtggtcaagagcgaggccgtgcccgtgcgcaagagcgtcccgctcgtcgccggcaaaaccaagggcgtttgctag

SEQ ID NO: 20456 - DNA, 353 bp, Oryza sativa
  Clone ID: PAT_MRT4530_25821C.1
aattcgttgaattcgggttttctgcaacaataacgtgctcaagcatgatgtgcatgcctcgcacaaattttttatgtacatacatatttcagggtctgctcatgtttatctgaatccttatgggtttcagaacttcatcagaagtgcagagtcctggttgatgtcgcttgcgtgttcttctccacattataatatgctgtggcaaactctaatacgattacacacgatgattaactttcggcatgcttgtactacatagttactggagcataaagaaggtttagtccgctcccattttgaaattttattttggtcgtgttcccaccagttttttaaaaaaaaatttaacccgg

SEQ ID NO: 20457 - DNA, 401 bp, Oryza sativa
  Clone ID: PAT_MRT4530_25822C.1
gggggaaggaacaggttttaaaattaatttcccaactgggcgatattttacccgtacatttaacacatttttccacccttttaaaactcctcctttttttttccggggaaagataaaaattaacttggggccagccagggtcgccggggggaagatgttaacagggtgggcgtccttttgggggccccggaaataacggggagcaggttgttgccaaaggggtccttggggggcttgggggggttttcgacgggccccttcccggggacctaggcctggatgaaaaaccccaggtgggagaacatggcccgccgcccgtttttgatcttcttaaccttaagcagccccccctggtccgggttgttcgccagccccagcgggtcaaatgggccacctggggg

SEQ ID NO: 20458 - DNA, 399 bp, Oryza sativa
  Clone ID: PAT_MRT4530_25823C.1
atgttcagggaggaacagatgtctagtgtggtcgggataccatgtgagaaggtgactaaagtcaggattcttgaaggtcaacttcggtcaacggtggggatcgggactagactcagggaggagttaaggtccagacggttaaggataccgggtgacgaagttggatatgagatggtacatgatggatggacatcgtgtggaagagatcttcgcagcgggcttcacgaggtgtgcgtgcaagcgtcggtgttcgcggaggaaaattgtggagttggctcggggctatggcaagccgagtcggctcaggagaacaggaggacgtgtcgctgctgtgacggcgaggagagtccgacttgtctgtggccggtgtggctgcagagcatggagttgatagtttag

SEQ ID NO: 20459 - DNA, 270 bp, Oryza sativa
  Clone ID: PAT_MRT4530_25824C.1
atgacgacgacccaaggaacggaagccgaccaaatcatccaagaatcatatgcctacgcggatggagcctaccccctacgcgacgcggctgctgctacccggtggcgcccgcgcggctgcgttgcgtttgcgtgcgcccgcccgccgggaaagccgcggattcgtggcggggccgttgttaagcaagcgcgggccaccgtgccggcgatggtggcggtgcgatggttgggtagctgcaggcctgcggttctgcacgcccgtggactgtga

SEQ ID NO: 20460 - DNA, 166 bp, Oryza sativa
  Clone ID: PAT_MRT4530_25825C.1
cggcacgagggttccatgcagagggctcccattgtgccatctgatggaggaatctcacgcacgagagaggtatatgttaaaactttcatctgaaaattaatgatgtttgaagtatagctacaaacagcacaattacttgtttcttttttagtttccacataattct

SEQ ID NO: 20461 - DNA, 1380 bp, Oryza sativa
  Clone ID: PAT_MRT4530_25826C.1
atggcgggcgcgggcaagggcaagggcgaggtcgagggcatggagcagaagctggagaagctgatgtcggcgtttcacgaccatcaggaaggcaacaaggcggtgaggcatcagaaggagctggaggagctcttcagcttcctcagggagcacgaggccgccttctcgcagcttccaggggacaagaaggacgacctcgacgccctcctccgcaacatcgagggcgtccttgagctgtgcaagaatcaggaggagaagaagaagaagacgacgaacaagatgggcgactgcatccccttcaagtcgtcgtccaggccgcctgctgaccacacgtcgtcgacgtcggtggtggcgccgttgctgatgcaggccagggacattctcggcgactcatcatcatctgctcctgcagctgcagggcctaataagaaggaggtgctgtacgagtggacgacgagctacgtcgacgagaagaggctatacgggtgggacgacgaggccacggaggtggcggacgccctcgccggccccgaggaagacgacgacgagctgttcagggcggcgggcatcttcggcatccacggaagcggcaagacggcgctggcccagaaggtgttcgtccacgaccgcatcaaggacaccttcctgctccgcctctgggtgtgcgtcggcccgacgccgccggacgatgacaagcaacagcagtacgaggtgaagtttagcctcctctaccgcatgctcgacaacctcggcctcgacacctataaggtggaggaagtcgtcaacggctcggaagccgtcaagaagcacagcggcgacagcgacgccgccaaggagtccaagatcggcgtgctgctcttcatcctgcacgtggcgctggccaagacctcctacctcatcgtgttggacgacatccgggcgtacgacccctggtacaccaacctggcgctgccgccgccgccccacggcgagtggagcgaccgcctcgcctacggcctgcccaagctgaacaagagcgccgtgctcgtcacctgccgcaaggaggagcacgccagggccatggtgcgcaccggccgcgtcttccacccgccgctcctcgccgtcgccgacgcctggaagctcttcgaacgcgagtacctgcaggaggccgagaagaaacaagtcgggtacaacgtcaaggacgacgtgctgtacaatgatctcaaggtggtgcaggaggagatggtcggcaagtgcctcggcctgccggtggccatcctcgaggccgccaagggcttcgcccagtactgcacctacgttgatgacgacgatgccaaaactactcaacccactactgctaaaggtgccgacgccggcgaccctgctcatgctgccgcctag

SEQ ID NO: 20462 - DNA, 329 bp, Oryza sativa
  Clone ID: PAT_MRT4530_25827C.1
gaggggaagggacccgggaaaattgatctgaaacttacatgataataacccacgccaaaaggggccaaacatttttgggttgggagtatgttcaagggggggcattattagcattgctcaagccccagggtgctttagggaagggaagggggggaaaaaggggggcttgtcccggccaaaacctcttgcatttcctaagccccaaaaagggggtggtcctttttaaacatttttccacccccaaagggaaaggggggaaaaacttaggggggctttaccgggggggggtttataaattccaataaattaggctttaaagaaaccccccc

SEQ ID NO: 20463 - DNA, 2718 bp, Oryza sativa
  Clone ID: PAT_MRT4530_25828C.1
tcaatgattatttgcacctaacttcctctttaagacggcacttctaatttttacactaacataaatcttcttctgctgtctatcaacaaacatgaaataggattttctccaactagttttgaacagcagcaaacaaagaaccacccagaggctgaggacaaatccaatagccatgccaagataaagggatatatgttccaaatcaacatgatttctaggtaagtctttgcttgtcgcatttccagaacagtttctagttaaaggaggaccacatagaccaatgtttccaatgtaggaagacgcgtcatatgatcccatagtgtttcctcttggaattcttccagatagattgttgtatgagaggttcatggtgcccaaagcgttaagatcctgcatgctcgaagggatttcaccagaaagctcattgtgagataggtcaagagattccagttgtttgagctgaccaatagtctccgggatttccccatttatgaggttccaagaaaagttcaaaattgcaccttgaccagttgcgatgacttcatctagaagaacactgtatccagatgtgcgagccattgcactcaagttaaccaaagagtcaggtatgcttccagagaagtagttttcagcgaggtctaagaactgtaattgatcaatccttgtaagttctgtgggaatgtgtcccgaaaacatatttgaccgtagacgcaacaatgataaaattggcagaaacttctttcccatccacagtggtaaatttccagaaaactgattataggatagatcaagaaaaactaggcgcgggcaacttctgaaaatcaatgggaattctccagagaggttgttactatttaagtttacgacaatgagttgtcgtgtgcgtggatttgaatcttcttgataagttggaacttcgccactaagtttatttccagatagatctaatatttccaagtgttccagtgagaacagtgaagatggaatggtgcctgatattaaattgccatagagagtaagtgactgtaacaacggggctccgaaatctgatggcagtggtcctgataatgagttccgttgcaagtacatgtatgttacatttattggaaattttggaaccataccagtaaatctgttgttggacagatccatggtttttgctgccataaactccaacgttgctggtagcgttcccgttatctgattatatgccacatccaaaaaatctgctcttgaaaacacaatccaaaaccaatctgggattgtagtaatgcttgtgtttgcaatttgaaggtgttgaatgcttgtttgtgatctaagccatggtgggacttctgaccctagctgcaaagaatagaagagaactacctgcagtttgaatggaggaatccaatctgagctggctttaatctgtagatgtgtattgcccaaccctaagtacactagatttgtaaggtttcctaattgatcttccctgactgtgccattgagcttattggaacaaagatccaaaatgttcagttttgtgagagcccatatcgacgatggcatagctcctgagatgttagtattggagagaagcaagacagttaagttggccagaggttctgaccaatttggcagggttccaccaatattattataagataaacccaactgttgcagcttgttccagtgacagtttggcaacttttctatcaattctctgatatcccctgtagtattggtacttcgtagatccagcaccttcaggttgcatagatttttgaaacttgagggtatcatggttgacatgagattgttcccttggaaatagacttcttcaagagaggccatcctgcctatttcgtctggaattgagccaaagaaaccacacgatcggatatcaagagcagagagactagttatattccaaaaccagttaggagcaatcttggtgtgaaatctatttcccgagatgtcaagcacttcgagccccgtgatattggaccgacgaaggaaaggaactgttttcctcagcccacactgtttcaggtagagtactttcagagcaggaagcatgttgatttcatcaacccaatctactgcagtggtaaggttcacatggttcatgaccagatgcttcagtgaggataggtgtgacagccatgaaagggcaaccgagtatagctggttgtatgaataagaggtcagatcaaggtaggcaagtttggagaggttgccaagctgggggggtacacttccatagaagaaaccatatgaaaggttgagatatctaaggcttggaagagaaccaagaaataccggtatctgtgaccaattgaagttgttgcaactcaagtctagatacctcaatttctgcaaactgaccaaagagtagctcatctcacctctgagtttgtctccatagaagctgagacagtcgtctgtgttcccacggagtctcagcttgatgacatggccggttctgttgctgcacctgacaccccaccagctgcaacaatcctcgccctgccatgatgcgaggcggctgttcgggtcgaagaaggttgcctttatggcgagaagtgcggccctctcatcggcgatgcagctccggtccgacgacgtcgatgcagcagaagggatggatgctgtggctggtgagaacaaggggaggagaaggcacagcaatgctatcttcagagtttcaggaggaggaaacctgggctcagccat

SEQ ID NO: 20464 - DNA, 120 bp, Oryza sativa
  Clone ID: PAT_MRT4530_25829C.1
atggcgtttgctgaatcggttgcagaggctgctgtcttgatggtgtttgctgagctggttgtacgacctgttgttggatcggctagggaatcacttggacagatggttgaacatcagtga

SEQ ID NO: 20465 - DNA, 1152 bp, Oryza sativa
  Clone ID: PAT_MRT4530_2582C.1
atgagggagaaatccgccttggcatccgtcgttgcttttgagattatggaggccgacgacgacattaatatttttgtgaaggatatgaatgcgaatgacggtgagcggcacccgaggggggagaagcgcaggagggttgggaacgatcagaaggtgaaggtggatgaccgtgagcagcactggtgcgaggagaggggggagaagcgtaggagggttgggcatggccagcagaggagccaccagcgtgaccaggagaggagccaccagcatgaccaggagaggagtgtggagcgtgaccaggagaggagccaccagcgtgaccaggaggggagtgtggagcgtgaccaggagaggagccaccagcgtgaccggcataggagtgtgaagcgtgaccagcataggagtgtggagtgtgaccagcagaggagccgtcagcgtgaccagcagcagggacaagaaaaggtggtggggagtgaccacccgagtaaggagcagcgggggcgggaagaattcatcactatatccgacattgagacatcgtttgaatttgatggaagattagttggcaagagacttgtggatgctaatgttgcaacagaaattcagactatcgtacaggatgccaagggcaagtttgagaaagaaaggcaaaattatctgaaagttctatcaaagacttcaaaggagtgtgaaggtttactgaagaacgagtacaccaagtttcaagcaacacatgataaattctgcaaagaaaaagctgcacacatgcaaactctcaaaggcctaggctcattaataggtttctcgaggtggcgacccgaaggacactgtcggaggcttggatggacgagagctgatggaggtcggggcggatgcagaagctaccgaccgtggtggatgggagcaatgatatattcaacagacacaagcgacgccgactgtgggggtggacggggaggtcgtctggcatacataggagacgcgacgactgggctgggtgagggagatgaccgcgatggacgaaagcgtcggtccggcgaacactggcaaaagaagcggccatggcggaaaccggaggagcggggtgctcctccatctatggacgacgggcccatagtctcggatagcgcgagcagcccagcgacaaattag

SEQ ID NO: 20466 - DNA, 1428 bp, Oryza sativa
  Clone ID: PAT_MRT4530_25830C.1
atggcaggattgcgcaagggaatacgagaacatcggcttcttcaccgtctacaagatatgacaacttctccacgtgatgcatacgaggtacatgactataattttgtgcgagttgaatctaagttaccattctatgatggtaagcatgattctgttgcatatattgattgggaactagcagtagacaatgaatttgacaattatgatttttctgatgctcaaatgattaaggctactagtaataagtttacctcttctacattattttggtggacttatgttagtaacaaacctgaaacttgggatgaatacaaaaacatgatgagaaagcattttgtgagttcttattacaaatctactactcgtgagaaattcgaacatctgaatcaaggtgacagaactgttagggagtacatccatgaatttaaagtttgtgtcatctgcagtgatctaaaagagtgcaatgaaaacacaatgcgcaaatttttcaaggggcttaatttttatattcagattgtgcttgctaatgtgacatataatcatattggacacctattcatgcttgctcgtagcattgagagtgaaatcatatcaaatgtgagaaagcatgaacaatgtgatttatctcatgtttttgaatctcctatatctttgtgcaatgatgatatgcaaacattggaggagcaatgtcttgtgcctcctattactaacattttgcaggaagttcagaacattaaacaaaaggaggagaacgatgaatttgtgaaaaaagaggagaagcatgaagcacctgtaaaatctgaagaaagtttgcaaggtaaattcaatgaggctgagataattgaaggtgagcatactcaagaacctcctgttgatgtagataaaacatacaagttagagagacctattattgctaatcatattatctcgagtttgtcttgttttgattggaagaaacatgttctaaatggaccatgcgacgagcaccatatggaaaaaccgaggacggttttccgtgaagaaggggaggatgatgtgaccatggctactatggatacaacagttgctcacatcatggatgaacaagatgctagcaagatcaagtcctccaagtgttggaatccgattcggccatttgctacactgctgacttcaaacggccgccaaatattcatacgacatccgtttttgaaacatgagtacctgatggaaatctctcggagtcctctttcaaacagatccagcctcatcgccaaattccttcacagtcatgcgcaattgatgaaacaatgtgctgcgtcacctgtaataggcctatgggcttgtaactttgtttgggacccaggcccaagtggggcccatgtggggaataaggttgatctgcaccggcaagatcaacaacccacggagaggtgtatcgatagctaa

SEQ ID NO: 20467 - DNA, 1519 bp, Oryza sativa
  Clone ID: PAT_MRT4530_25831C.1
gcgcatgccgccgcagcagggggagtgctgccgccacggctggctcggcgtgggggaggccgcggtgggcggcggcggggaggaccgttctacgtgccgtgccaagcggctgtcggtggacggcaaggcatccacggcgccgcggatatgcatctgggagtgcgacggcgaggccggggacatcacctgcgacatcgtcgccgcgccgctccgccgcagctgcagcgccaaggcaatgccgccgccggccccgctcttccggatgatgacgccgccgccgccgaggccgcagagaggggacggggaggaggccaggaggcccggggaggccatccgcaaggggcaccggagctacagcctcatgctcaacctgcagcttggcataagctattcggtggggaagtcgtcggcgctgccgttccagaagctcgccgcgtcggacttcgacccgcgggagaaggtatggacacggttcccgccggaggggtccaagttcacgccgccgcatcactcggtggatttccggtggaaggactactgccctgccgtcttcaggcacctgaggaagctgttcggggtggaccctgcggagtacatgctcgccatctgcggcaacgacacgctccgggagctggcgtccccgggcaagagcgggagctgcttcttcatcacgcaggacgatcggttcatgattaaaaccgtgaaaaagtccgaagtgaaggttcttatccggatgttgcggagttactacgaacatgttcgtcagtataagtccactttactaacaaggttttatggcacacattgcattaagcaagctggctgccccaagatccataggcgttttgatctgaaaggttcctcacatggtcggactatcgacaaaacagagcgcaagattgatgaaaccactactctcaaggacctcgaccttcagtatgcatttcggttgcagagattttggtacgaggagcttatgaagcaaattcagatggactgcacattcttggagacacagggcattatggactatagcctattgttaggagttcactttcgtaatgattactcagtgtctaaaataggcatatctcagcacatagctttcccaaaatctactggcaaaagaaaatcatttgaaggtggaagcagtttttgtgagctctgctttgtggaatcaggttgcaaagacagagatttgatagactctcggaagccattcatccagttgggaattaacatgcctgcccaggcagagcgcagctcaaaaaaaatattagataattttctcctaaatgaaagacacttgttcataaccccaccaagtggaggatcatgtgatgtctacctcttctttgggataatcgacattcttcaggactatgatataacgaagaaattggaacatgcctacaagtccttccaggtcaaccctgactacatttctgctgtagacccaaagctatactcgagaaggtttcaggatttcatccgcagggtgttcataaaagagcagtaa

SEQ ID NO: 20468 - DNA, 778 bp, Oryza sativa
  Clone ID: PAT_MRT4530_25832C.1
gtaccaaccaaaaggcgcgcgaacacacgagtcggcggcggcgcggcgatggggagcaacacggaggtggagaagaagaaggccccaacggcgctcgcgcccatcgcgaagcctctcgccggcaagaagctctgcaagcgaaccctcaagctcgtccggcgagcatcggaggccaagtgcctgaagcggggagtcaaggaggtggtcaagagcatccgtcgtgggaacaaagggttgtgtgtaattgctgggaatatttctcctatcgatgtgattacacatgttccaatactttgtgaggaagctaatattccttacatatatgtgccatcaaaagaggatcttgctactgccgggactactaagaggcctacctgttgcgtcctggttatgaccaagcctgccaagggggagatcaatgaagaggtgaaggagaaactgaagtcagactacgaccatgttgtagctgaagttgcagaggttacatcttcaatgttctgagtacaacgcccagccccagggccatagtaaattagtgatagaaacccaggcaccatggctgctcacatctttctatatgtattatgtgaacatgaaggttgctctactagtttacccctgtcggatcatgctgtttctctgttgattagcataagctagtcaattgtaatgaaacctggtgagctgatcatttactctccagtaagaagtcccctgtcccaggcccagatatgcatacctgggcaccccagatcagaaaactcaccaagtcaaaaaa

SEQ ID NO: 20469 - DNA, 414 bp, Oryza sativa
  Clone ID: PAT_MRT4530_25833C.1
tcaagccggagctagcgtgttatctcttagagatggcacgttagccctggttagatttataccaggcttcatcgcgtggtggacaagaatgaccggtctgacactggtcgcgtcagcaacgggcagccacgatcccacgttgcgcccgtctccgccgggagtggagtggcggcagctgccgcagcagatggtgacgatgacggtagatggcaactgcagccccacgcgaaggtgacaaaaatcgcgcggaagcagcagaggcgcaacggctggcgacgctgcaacgacttcagccggcggtgggcacgggcggagatggggacgacgacggcgagctctgcgcagatccagcgtgatggcgctgcagaggggaggcggcatgtcccggcggcatcggacaaggagggaggttga

SEQ ID NO: 20470 - DNA, 753 bp, Oryza sativa
  Clone ID: PAT_MRT4530_25834C.1
atgccgctcgatattgaccccgtcgcatatgcacgacgtggcgttgtcgccgtccgccgcgcgctcgcgcgactcgcgacgcgcccccggctctggcccccccgcgccactgcacgcacactggccggaatcaatgccatcatcactgccgcaccgcggcgcacctccgcccgcacgacgagctacccgccgttcgtcgcggtgtgcgggcgcccgcgcggctatggaaaccaccggctgccgcgggccggaggcggcctcgccctccgggaacacgcgtctcgcatgtgcgacgccacggagaacgcgcgtcggtcatgtgggcggttgcgccgggagcgtctggttactggcggacgtgcctccgcgcggacgacgcaggcagcatcggcgacgggtgggacagcatcggtggctgctcccacggtggcggcggcgtccgcctcaccttccctcggcgtcgcccttctcacctccccactgaggtggccccctcgcctccacacggcagcggattccctcacctcccttggccctcaccttcccacgacgacgatgtcgagcgtggccggatctgaccgccaccgcgtcttcggcgagccctcgcctactaagcacaccggcggctacgctttaacctgtgggcgcacaaaagtgagaagggggtatcaggaatacccactgaccgtcgccgacggatacatccggcacaaggatcagccacaacagttgacattactagaacaattttga

SEQ ID NO: 20471 - DNA, 2232 bp, Oryza sativa
  Clone ID: PAT_MRT4530_25835C.1
atgagaaggttctttccgttccgctcattcacaagtaatgctgggaatggcaaagcatcagcgggacatgataagaagaatgagaacaaactggatggagggactagctgtgcctcccattctcctgacacacgggcattcaggtcaagaagccggcatggaaaaccaagcagtgaggaatcatccactcctcagctcaggaggtgcatgtcattgacgtcgtcagcaattgatcgttccttgaatgaacggacaatgaacttttcaggcgatattccatgctctttctccaatagttctgatgtgcctcgacacattggggatgcggagccttctaaattgaccaatctttcaagcaagaatgaagttctagatctatatattgatggagagcaagagtcaaacagtctaaatgagaaacataagctaaaattacctgtcagatcctcatcatcttatttgggacggggacggccacctagaccccattctacagctccatcttcaccaaagtcttgcaaagaaatcgttgagagctatagctactcaaacatcgacatgattgatgcctgccaattagctcaggaggaaacaaagggcatatggaaggttgcatctgtgtgtgcagagcctggagatgatgcacaaatgcttgaagcatcttctgaaaaattttcacatatagaggagtgcaaatcacaaagtattgctacattggaagatatttatgatcgtttggaagatgcacaacctccatgcttttgtgacacttcaatggattatatttcaggcactacctcaagatgctttgatgcagatgtctgttgtcgtgatgactctcatggttttcatggtaataaccttgaacaagacactgatgagaagttgcttagaagagctaaagaacttgatgagtgcttcatggttcctcttgaagaaaataatgagcttaacatgctgagggataatagtttaagctcaactgacatgttgcagctgatacagactttgattgaagatagaaggcaattggcactccaattgtcttcacaaattaaggcacgtcttacagagagatttgcagccaaagagcaacataagcggtccaaggtagaattgaacaccagaactagaaggctggagaaggagaagagtgatgtgcaaagtaccttggaaatggagcttgatagaaggtcaaatgattggtcagtcaaactggcagaattccaatcagaagaacagcgattacgggaaagagtaagagagcttgcagagcagaatgtatcttttcaaagagaagttactttacttgaatcgaacagaattgatgtttctaataagataacaagtttagaactgcaaaacaaacagctcaatgacgagctacagaaagtaaagaaagagcatgatactcttttgaagtcatcggttgagttgaatgataatttaacgaaaactgcagaggaaaggaaccaaatcctggaatgcttaaaagagaagggaggtgacaataaagcattacacaaagtgattgcaaggttgcagaggatatctaatgaacaggagaaaacaataactggcctgagacagggattcaatgctgaactggaaaacaaatcccttggtactagtgaaagcatcagcaggatgcaaatggaacttatcagacttactggagtggaacaaaagctgagaagagaaattcagtcctgtaaccgtgaagttgagtctctaagggaagagaatatagctgttttaaatcgtctacaaagcagtgataacaaattaagtatttcttcagttcgtcttgaacaggagctcaacaccagagtggacaacttgcaactacagggcttatcgttgcttgatgatactagtcagctttgtgccaagttgttggactcaatgaaatctaagaggagtgagagtttcggaagtgttgatgcattagcatccattgaatacactttgagttaccagagcatacaagaaagaatcaagaatttaaaacaatgtcttcgggcaatcagatctatgttgactgaaaagcataatgaagaagaaaagattggagagagaactgaaagctgtatcttgaaacaggaccacttatccaaggatgacattgaatttaagttaaaagaagagtctatgctctgtagagtactaaaggagaagttattgtcaagagaacgagacattgaacaattgcagtcagatctagcatcttca

SEQ ID NO: 20472 - DNA, 476 bp, Oryza sativa
  Clone ID: PAT_MRT4530_25836C.1
aagaaggagaacaccaacatcacactatcagtatcgacatctacaaagttcacagaagtttaaacctttttatctgcaacatttgaataactttatattttgacagaagtttaaacctttttatctgcgacatttgaataactttatattttgaagtgctcgatgagagctttgctcgcaagatctcttttaaagaaggcccccagaaactcagacatagtaaaattcctgtactttggtgggtttcccgaagaaatcagatctggcaatggtccataaaaaacagagtcgcctctcttgccaggattgtaaaagatggcgcttgaaactctggcttcttcatgcgacttcattactacccggtgttccacactcttgtacttatcattagacatgatctgcaataggtccccgacattgatcacaagagcgccaggcacaggcttggcatccacccagtagctctccccatcctc

SEQ ID NO: 20473 - DNA, 521 bp, Oryza sativa
  Clone ID: PAT_MRT4530_25837C.1
gcacgagggtggcgccgctccatcttccgccattgacgagcagatctgagttattgattgggtctcgatttggttttttttttactctctttttcctttttgttctccgttgcgatgagtttgccatcgagaaagaaagctgagttcgtttcttctgccttttcacttgttattattatgccttggtgtctggctggcggattggacgacggtgatgacaacaccgcaagaaaaacacaccatctttcggggctgatttggcgccgccgcgcgtgcaatgatgctaattctgcaattctgatgtccattgctgatccgttgctaccaagactgttctttcgtttcttcctcaagttcttggttttttttcttcttttaaacttttcttttgttgctgcatactagtaagagttaagaacgagtcccactgttgtctgcgttggccggtgaagaaaacctcgattaaaaacaccatctttcggggctgatcggccgccgctcggcggccatgctgccattct

SEQ ID NO: 20474 - DNA, 207 bp, Oryza sativa
  unsure (1)..(207): unsure at all n locations
  Clone ID: PAT_MRT4530_25838C.1
agagaagcatttcctcgaacacatcgccgtcgccgccctccatggccgctcccaccgcagcagctctntccaccctctccaccgncagcntcacctccggcaagcgcttcatcacctnctncttctccctctccttctcctacngccccctcgcaacagnngnncgcgnngcgggnggcgagagcggcgcgtagntcgtnggcgtcg

SEQ ID NO: 20475 - DNA, 319 bp, Oryza sativa
  unsure (1)..(319): unsure at all n locations
  Clone ID: PAT_MRT4530_25839C.1
ccttatagngaagtcaaccncgaaatcgtggtccnncnnancgtaatcnagaatgtcggcttgagtaacgaaancnttggnganaatccaatgccccnnaancccaaggtgtccgccgcaaggttcgtccacgtagggtgagtcagggccanagatcaggccganaggcgaagtcgatggacaanaggtcaatattcctgtactacccctagntggaacggagggacggaggaggctaggntagccgaaagacggtnaaaggcttaaggacacaaggtgaccccgcnttnttcagggtaagaaggggtagagaaaatgc

SEQ ID NO: 20476 - DNA, 1364 bp, Oryza sativa
  Clone ID: PAT_MRT4530_2583C.1
tctcggcggatacaccatctcttcattccgtattccttgtcgagatccaccaactgttctcgagcgatcgagaaggcgtagaatatggtcttttgtctctacaggatccgacaaggccttatcggctctgggcgtcactagccgaagttcctcgaaggccttgtcaagacggcgtaaagggacagtaggataggtttcaacgctaggtgtcgtcgtggtaagggatctctgggtaaaacacttggcgatattgtgtacctgatatcaactttgttgaggtagaggtagtgggagaatcgctacacttttggtcgaggaccaggtagtagtcccaactcgaccacactggtcgaggaccaggtagtagtcgtaattcgaccacttgaagtggaaatagtgggagaatcgctacaccgctggtcgaggaccaggtagtagtcgtaactcgaccactagaagtaaatgtacgagagatcactacaattaactggttaagaaccagtgagtaggtgtctctcgatcattttgagtcgtggtacgaggaccgctacgctgccggtcgaagaccagtcgtagctgttcctcaaccatggttcgagaaccagcgagcgggcggaattatctcttgaacaccaatggaagtttgcggtgcgagagattgctacgtactggttcgggaaccagtgagcgagtagaattatctctcgaacaccaatggaagtctgcggtgcgagagattgctacgtacttttctcgagtagtccagccatggccggtgctatgagataagtcgtcaatcttcgttggtaggttggacgcgacgactctgtatttgtcgagatcgttctcgataatgcggtgtagtcgaccacaacctactcgagtgctcaattattcatcagatttagaacggttaacctgttaacgatggatttcaagatttcggcggtggacgtcggctcggatgtggttggaacggagcaagatctcgtggctgacgacgctgaaccgatgtcctccgcggtatctcccaaatgtcgacgtttcatatcgcgactacggtatttgcatagtatgggaatcgttggtaccagggtatatgcgatattgaagtaaaagagacggagacaaggatttttatataggttcgggccccttatctgataggtaatagccctacgtcctgttggccgaagccggtgttgctctttattcatcaacttgtagtcgatgacatgatagtcttcctcctcgaatccgcactcggcgtgatcagagatagtgctagatccctcttgccggcctccgtaggaaccggatggggtatgtctatgctaatctctgatgttgatatccggcggcat

SEQ ID NO: 20477 - DNA, 1617 bp, Oryza sativa
  Clone ID: PAT_MRT4530_25840C.1
aaaaaaccctaactcttctccccatcgatctcctctctgagctctctccgacagccgccgccaggcgaggacgcgccggcgcccgtcgcccatcgcgccgtagccgacctcatcacctctccggcgccccgcggcctgcgccgtcgccccgtctcgccgtcgcacccgcaccgccccggcgccccgcgagcccgcgacgccgcccgggcctggcgagtggcgtcggcgcgctgccgtcctgttcgtccaccgaccattcaccaccgcacttttcctgtcccgagagccgagaggccgaagcttaggtggtgcaatggctttaagttcatccattagcatgtctcggcgtcttttcaagggacttactatcaacccggcattggcatctgggatgacgtgccagcatcaccagcttcagcagcatgcgccagtgagtggaacagccaagggtaaggctaagctcaagtctggccaacaattgaagcgtaacaccattggagcaaagaagggcggcgcgcctcccactggtgggggtggtggcggtgggcgtggtcgtcgtgaggctattgagcgtattactcagattgcagagtcttgtctgaatgcctcaactcctctgcgccatctatcccccaaggagcgtcttcgtgaggccaaacgtgaggagcttggactcatttctaaggaacgtcaacgtgaacttgatttagccaaggctaaagccaagtccaaaggtacccgtgagggtgatggtggccgtgtgctgatgggtccaccaggtcttgactacatcagtcttggattggttgatgaggacgcaatccctaaatacgagctgacagtcgaagatggccggcgacttgccaaacaatacagtcaggtgctaatgcgacggcaccgcgcacggcaaactgcagaatcgtctcttctaagtctcaagaaggaggccattgcagcactccctgagaagctgcgagctgctgctatgattcctgacatgacaccattccctgcaaaccgatacatggcaacactcacgccaccaattgaagggtatattgaaaaggtgcgggatgctgccaagaagtattctgtgaaggagaaacttcgctgatttttacctcaagggaggaaagggtatctagaggtacatgaacatgtcaggctgtcagctatgacaacagagcatactttgttgattggcatatcaatgcaaggagaaattgggaagcttgttcaattttcagtgagtttttggtcattttcttctggctgggatgctgcatgaatggcaatttctgaagctcgatgggcattcgctttgtttcattgtttgtttgttacgaatgttgtatgcagccacttctgtaataagttcccggcagttagatttgcttctgccatttagattttgcgaactttttttttactgctaaaatggctgtagcaaagcaatgcctcacttaggatcttgataatggctcccgtgtttctctcggcaaaataccactactgtctgcctcctgaatttaatctggatagtgctgctccttagtttaaaaaagatatgtgttttttgggcctgtcagcaagcacggaaagggacatatttcagcg

SEQ ID NO: 20478 - DNA, 210 bp, Oryza sativa
  unsure (1)..(210): unsure at all n locations
  Clone ID: PAT_MRT4530_25841C.1
ggtatatcaagncccaaantannctttttccccctttcnccatttgtcgnggancannctatggccttgttttggtcagaacttgaggcctgtanaaaccttggatttgtaanaatgtaanantgtcantgnacttacantgctantgttttgcaancgcaaanntcgctcatcaaaaaaaaaaaaaaaaaaaaaaaaaaaaaaaaaaaa

SEQ ID NO: 20479 - DNA, 406 bp, Oryza sativa
  Clone ID: PAT_MRT4530_25842C.1
ttggttttttttttttttttttttttttttttttttttttttttttggtttttttttttttttttttttttttttgacccgggggaccaaaaaagattgcctaggatgtttagcacccccaaaagagagaggtgtccctcccatacaccagagagggggggatcagttgttcagccattacagacgcaaagccggcacaacaatgggttggaattccgcccgggcatgcatttttaacgacaaccaagggcaaagcctacttgaaaattaccgggggcccaggggggggtacaaggaaaccatttttccctccagatttgccagctattgaactggctggcatatacacaaacaagggcgaggaaaccgtccagcaaaggggggaggctttgggaatttggctttc

SEQ ID NO: 20480 - DNA, 478 bp, Oryza sativa
  Clone ID: PAT_MRT4530_25843C.1
ccggccgggaccacttactgacaaatatacgaatcactacacatactgggtattaagtagtttatactacgtcaatacatgcacgatatgcacatagataggaagttatgacaactcactatgtattctttcggccctgtgtagcctatgaattggtctttctgcaggtggcagtactgacctaagcactatgccagaattaccaccaacattaaccatgcataccacggatccgtgagggcaggacgtgacacagacgcccgacgaggctagcttcacagccatgacgctggctaaaactgaggagctgctacaggatgcatgatgcatgctgctaccaggtgaggtggctgagtgcccatgaggaatcacatgccatatgaagcatggcgcgcaacatgatatttgaggtggactttgacgctggcttatgatgaaaagggcgatgtcaatgccatacctaggcgacatggaacct

SEQ ID NO: 20481 - DNA, 228 bp, Oryza sativa
  Clone ID: PAT_MRT4530_25844C.1
atggggcaacttatgcgtgattgccgtgctccatgcaagcctagttatgggagaggaagatgtggtaataggggtggagcaagaggtggaagatgttatgtgggtagtggtaacagaggtagaggctatgagtatagaggtgatcacaaaactaatgtggtcactcataaagagggttcttctgaagctacaaatgttgatgttgccaaccttgttaatttcacctaa

SEQ ID NO: 20482 - DNA, 765 bp, Oryza sativa
  Clone ID: PAT_MRT4530_25845C.1
gcatgcctgcaggtcgactctagaggatccccagatgaaaaaaaaaaaaaggtcagctcgatctttagtcccgacgaaccgggactacaaagggtttctccaccagtgatggcatgtcatggaaaatctaccatgggagatgaggttgatacatgattggtacttgaaggcatctaaaaagggactcgacatgattactatgaaggtcccggataacgcttccattagtggacctaatgggatgctcgttatctattttaacgaccttcacacatttctcaagctcggtaaaatggacatcaatctagttgccgcgttttgcctgatgcaattccttgatgggcgcaagggctagcagaccggtaggatacgtaaacccaacaagggtttgctggacggaacacatggttgaacttcgtaaagattgtctggagttgaaagataaaacagagggaaaaaaagctttcatcaaacaattgcacaagaaaaagaggatcaatgtagcaatgtacttggggaaagtgatgcacatgcaccaagactaaaatgtccactttgccgtacatatttctcgaccactatatattatttctggtatatccatgggactacttggtcgtagtgcgtgatctggcacactacacctagaagacattcacggaatttctagttttgttgaatttagcacataggtattacgtagaccacatcggactagtcgagaatgccaacagaactaagcttctcgtgaagacacaatggctg

SEQ ID NO: 20483 - DNA, 201 bp, Oryza sativa
  Clone ID: PAT_MRT4530_25846C.1
ctgcgacgctcgtttgacgttactaattcagtgcctgggtggcacyyaacgagccaagtgcayatagacacgaaracgatatgtattcctattggactcccatgawctacctgatgatgagtaggcaagtbgtgtgttatccagcaatgaagtagaatccgaggtcgtcgcctgcccccatggttgaacctggctgatggg

SEQ ID NO: 20484 - DNA, 294 bp, Oryza sativa
  Clone ID: PAT_MRT4530_25847C.1
aatgggggcagaggccaagtcaggtttcacacccatgggtgagcgccggtgggggaggttatattcaccttcgggtaacccagcggggccctgggctattagcgcgtgatgatgcaaccaccctccgtctctccttctccttcgagagctgcggggcccaatcaactgtcgggtcctctacaggatcgggggtggctcaggttattcacccggtggccaatgtttataccatggtcgctaacgtgatcaactgcaaggcgctgcatactagccagcagattccaagagcgttcg

SEQ ID NO: 20485 - DNA, 933 bp, Oryza sativa
  Clone ID: PAT_MRT4530_25848C.1
atgcgcatgctggcatatggcactcctgcagatgcccttgatgagtacttgaagattgggaagtgtacttcattagagtgcttggataggtttacacggggggtgattgaggtgttcggtggggagtacttgcgacgccccacatcctcggatgttgagcgtctacttcaggtcaacgagtctcgtggtttttctggaatgttaggaagtatagattgcatgcactggcgttgggagaagtgtcctttagcatggagggggcaattcacccgtggtgattatggagtaccaacaatagtcctagaagctgttgcttcccaggacttgcatatttggcatgctttctttggagttgctgggtcaaacaatgaccttaatgtgctgaaccagtccccattgttttttgatgcattgaaaggagaagccccgcaagttcagttttcagtcaatgggaatgagtatggaacaggttattaccttgctgatggtatatatccagaatgggctgccttcatgaagaccatacctcttccccaaactgagaagcataagttgtttgccaagcaccaagaaggggcaaggaaagatgtggagcgtgcttttggggtgttgcagtcccgatttaccattgtccgtcggcctgcacgattgtggaggcggaagagtgttgggaggatcatgctagcttgtgtgattctccacaacatgatagtcgaagatgagagagaggaagctaccattcatattgacttgaatgagaatccaggggcatcgtttgcgctgcctcctgaagtgaatataggtggtaatctgtgttttgctgatgtgatgcgcaaaaaagctactgtccgttctcgtccacaacacacccaacttaaaaatgatttggtcgagcacatttggcataagtttggagataaccatcataattag

SEQ ID NO: 20486 - DNA, 3935 bp, Oryza sativa
  Clone ID: PAT_MRT4530_25849C.1
cgggccgctggctgtgtgctcctcccgcccgaggcccccgccccccgccggcggcgctcgcgcggtgcccccctcagccctcggtctcgccaggctgtccccctccccccctctctcgcgccctcgcctccccggtccgccgtgtcccttgcctcccggcgcccccccgcgcgccggccgcccccgcggccgcggggggtccgctcggccggcggcgccttccagcaggaccgcccggtcgggggcgccggggcggagccgcgcgcctgcccccggtcgtagcgctcgcgcgcggccagccccgcggccgcggccgcgcggcccggccctatgacccataatattattaaacataatggcaggcttatcagccatgctgtcaaaaaattggtcgaggattatgaatcagatccaaaatctgtgatgtttcagatattagcgatgctatttgaggcttgtggagctaggcataacttttatgcagactacctgtatgaggcagatgtggatggtgttgtgttttcccttgtcgagctagcaaaaaagggaatggttgaagataattacaacaccaaacagaaggatctcaagaacttcaaagaaaatcttgtttccttttgggataccttggtccatgagtgtcagaatggccctttatttgatggtagcttattccaaaaaatcaaagactatgtggttgctttgtcatgtactcctccaagggtttatcgccaagtagcttcattggttgggctccagcttgtgacgtccttaatatctgttgctaagactctcagtggacagcgtgagaccactcaaagacagttgaatgcagagaagaagaagcagactgatggaccgattgttgaatctctaaacaaaaagctagctcatactcacaaaagcattacttacttggaggaactaatgcggaaaatattcagtgggttattcatgcaccgctatcgtgatgttgaccctgagatccggatgtcgtgcataaaatcacttggtatttgggttgtctcgtacccatcacttttcttacaagatatatacctgaagtatctaggatggacacttaatgacaagaatgctggggttagaagaacttctattcttgccttgcaaagcctgtatgaagtggatgaaaacataccttctcttggtctctttactgagagattttacagcaggatgatccagcttgcagatgatgttgatatttcagtagctgtgtcagctatcggactcatcaagcagttactgaggcatcaacttttgagcgatgatgatttaggtccactatatgatttgcttattgatgagcctccgctgatcaggcgtgcaattggggaattggtttatgatcatctgatagcacaaaacatcaaaacctcccagtctggagcaagagatggaaacaatgattcatcagaggttcatattggtcgaatgctgcaaatcctgagggaattttcagatgacccagtcctgagctcttatgtcattgatgatatttgggatgacatgaaggctatgaaagattggaagtgtataatctccatgcttctggatgaaaatccattaaccgagcttactgacatggatggaaccaatctagttcggatgctgcgagcctctgcaaagaaggctgttggggaaaggatagttcctgcaacagacaatagaaagatgtactacaataaaggccagaagtgttgctgccttagtggttatttaggacttgaaatattggaaaacagcaagcatgaaataactactgctttgctgaagaaatatccacagcttttaagaaaatacatatctgacaaagctaagatatcacctctaattgatatgatgatgcttatgaaacttgagctgtactcactaaaaaggcaagatcagcatttcaaggctgccatagatctcattgcggatgccttctttaaacatggtgacaaggagaccttgaggtcttgcatcaaggcaattactttctgttgcactaactgtcaggcagatcttcaaaattatgctgaaaacaaactgaaggatcttgaagacgagttggttttgaaagtcaaaactgcaatcaaggaagtagaggtatgcatgtcttattcacagtctctttgttttaaagccatgaagcgattttatgagcttcagttgtcaaaacctgtcaaaaatgatggtttatttgaggacatgtacagaatcctgagtcatctaaaagatatggataatgaggtgaagagctttctcctccttaacatgtaccttcaattagcatggtgcctgaatgctattgatggtgaaaacccatctgaagcttccattgacgaacttttatccaggcaaagctctctttttgaaaaactctattattacttggtggttctgcctacttatcagaaagagggaaggagcaccactatactttcctgcagagtctgtgtcattactgctgagatgtggtgcctgtttaagaagccaaaatattcttcaacaaggctcgagagtttgggatatctcccgcaactagatgttgtccagaatttctggaaactatgtgaacaacagctcaacataccagatgaaatagaagatgaagatgcaaatgaagaatatattgaagacacaaacaaggatgttgtcatgattgcagctgcaaagctagtgctagctgatacagtttcaaaggattacctgggcccagagcttgtttctcactatgcatcccatggaacaagtactacagagataatcaaacatctaatcacctcgcttcggaaaaatgctgacaacaacatgggtgccttatttttcgaggcactgaaaaggggatatgagcggtatatggcccatgtaagtgatggggaaaatcaaaccctcattggcaagtcttattcagaatgccaagatcttgctggtcggctcgcggggtcctatgttggtgcctcgcgcaataaaaacaagtctgagatcttgaagataatccaagacggtgtttcttttgcatttgtggaccttccaaagcaattgtctttcctcgaggctgctctactgccatttgtttctaaacttccatcgtcagatataccagacatcctgatagatgtacagaagaggactcaagatactaatactaatgaagatccaagtgcttggcgcccgtactttacgtttgtagagcatctacgcgataagcatgcaaagaatgaggttttgcaggaggaaaaggaggaaaaacctgtaaagcgcaggggtcggccaaggaaggttagagatgtacctgcaaggaatctttttgatggacacaagtctagcgatgaagagtctgttagtgactctgatcagcaagggcatggtgaagacaatgacgacgatgacgcagatcagcctctgatcaacacgtttaggtcttccgcatccaagctaagatcactgaaggtttctcagcaaggaacaagcggtcagaaaggaccttcgagggcatcaggaagcaatagctgagggcacgcactgacgtcgttacgcatgactgaacttggctcaaatgaatgcagcagatttgtggcgttgtagatgatttgtacctaggtgctcacccttttggtaaacaacgtgacatagacatttgttaggtttttaccccttcgccatgtatattatgttcagtaataatatatgtagaaaatcgcatgttgcattgtaccaatttgatcgatgtatttctcctgggttccgagactaaagaacacttgcatgcgagagatagggagagcagcaaccattttttatttattcaatggagaatccgaaccttggattggtttgcatgggaaccaatgagcccggcaatccttgcataccaaaccctccattctaaattgatctacatatatatattttttatggttattccc

SEQ ID NO: 20487 - DNA, 603 bp, Oryza sativa
  Clone ID: PAT_MRT4530_2584C.1
atgggccatacctacccccactctgccggaagcagatgtaacgtgggagcacagttgtctgccgatgacgtgaccggcgtcagactagtcacagaccggtcactcttgtccaccacgcgtcagtttagcataccgcacgtctgcccttcttcatgcaatgacttccccgccatggttgcgatgaagcctgtaatgtatctggccgggactgacgtgttaactccaggagttaacacgccggctccggctagggacgagtgcctggaggctctcatcattccgacgggacgggtcgaggcggggtcggggcgccccagccctcggggccgaaacgggagcggcccgacccctcggggagacggagaaaggggtggccacgtcaccttcgggcccgacccccccgagggggtcaggccacctgccgccgccgcgtcctcccggcgccgctcagcgccacccgccgccgccgcgtcctcccctgctgccgcgtcctcttcctcgacaccgctcggcgccgcccgccgccgccgcgtcctccccgcgcttcgccaccgcccgcaggccgccgccgcgtcctccctgctgccgccgctgtcccgctga

SEQ ID NO: 20488 - DNA, 297 bp, Oryza sativa
  unsure (1)..(297): unsure at all n locations
  Clone ID: PAT_MRT4530_25850C.1
ggaaacaaaacacaaccggaactttgttggggggcttgggggaaatttgattaccaacagcaaaatcctccttggaataacgaaaaacaaaggggccaacttgtctgtaatataaaacgtttgagaggggccatttgcccaaattaacttacacttgagggccttgcgcatttgggtttagaaaaaatgtcctctttgggttagnaaaaaaacccttgttacccttggatggtgctttacagcgaccctggtttaaaaaactctgcaaaagggggggggcccgaggggcccgttttt

SEQ ID NO: 20489 - DNA, 396 bp, Oryza sativa
  Clone ID: PAT_MRT4530_25851C.1
gaaaaaaaaatttttaattgggaaaaaccttttggaatttaaaaaaagggggaaatttggaaaggaacacccaagccttttatccgatttaagcttttatttacattttcgctaatttaccccccaacttttaatccccccaaatgggttttcttgtttaggttttcaaagtttgtttgggttaaacaaggggccccatttggttggggatttgaacaaccttttcccggggagggaagccattggagcctaattttggttttacatcgcccttgggaaaattttgtttttttgacttatccaaaaatgaccggggggtttttgggaggaacccctcccaaaacaaattgtggggggggccatgggaaactttagtttttgacgggccattttggg

SEQ ID NO: 20490 - DNA, 162 bp, Oryza sativa
  Clone ID: PAT_MRT4530_25852C.1
atggcgatggtgacagctaaatctggggcgccgccacgagctataacggagcccacactgcagaggcgaggcaacactaacgacgcggcctctacaagcaaactcgagttccaccactggctcacctccgctcttgatgtcaagctgcagccatggatctag

SEQ ID NO: 20491 - DNA, 963 bp, Oryza sativa
  Clone ID: PAT_MRT4530_25853C.1
atggtgaacttactggcggtggtgacttccttagcgagtctcagcgccgacgatgcccaaactctaacagaattccttccaattagggttttaaggtgggaaataatgggagtagggcgtgacaatcaagcggggcggagcctgagccatcctggctcgcggatgatggccggcacgctggtcggcgacaggcgcaagcacccggctccggtggcgaggcgggcaggcgctcgtccccccggtctcccgagaaacggcatccggcgtggcgaacgaaggtggcatggcatccggggggcggagaagggagtgaaggaggatggaggcggtgaagcggtggagggcagcggcggccctccccctggtggcggtggagaccgggaaccctggagcggcgctagcataggagggcgccgaggggcagccgacagtagccgtcgtcagcttcttcgttggcacgccgctgtacaggcaccagcgctcggtggcagcccactgacgaggatcgcgcggatgcttgtcgtgtcggcgaggaagtggggtgtggaggtccccgttgacagatcgcggctgcatgagtccggcatcgagggcagccacaagctggagcacaccgagcagttcgcgtgccttgacagggcggcggtggagacgccggagaacagtcagcttggaggccgtgcgtgtcccttcgttgcggcgttgccatgcccgcgtcgccgtcgttgtcgccgccgccatgctttcgctcgccacctcctccatttcggccacgcggaccacctcgccgcgctcgtcctcttccttccatgaagtgccgtcctcctccacgggcctcccggcctcctcgccgcacacgtagcccgcacttgggttgggccgtgccgccgcgcccgcggggtttccgcccccgcgaacggatcgcaagtcaagagtccagcaagcctcgctggcaagcagcat

SEQ ID NO: 20492 - DNA, 714 bp, Oryza sativa
  Clone ID: PAT_MRT4530_25854C.1
gtggatccccgggctgaggaatcggcacgagggtcgagtcggcaataattgggaagcacgcacggaagcgtccgtccggcgcggcgcggcgatggcagagcaggcggcgacaacggcggcatatactaccttcataatagtgcaactatgagtttctgtatctaactttaaacctagctttcgccatgacaaagcttgaagccatccgtagcttttttcgccgcgcgggcgccacctgctcccgcgtgctttgctccttcgttcacacccgcacccgctccctccgctgctcccgcctcctcagtctttacaggattattttcttattacaaaacggagttacggaggcgtgtccatcaggaacacctgccgcgcgagtgtgtgtatgtgggctccggggacgacacagaaagaaaacacgagccaagccaagccaggccaggccagcgccggccagccaacaagcgttgtggcgtctcacacgacatgtcacaacgcgcctgccttcctgccggctcggccggcggcggacgacgcgtcccgtcggcagctagcgccgacgctgacgttacagacagccctgacgtacgaatccatgatgcgacggacgcatatgcagcagagatcgatcatcgccgcccccgacacaatgaatataatttcgtcaatcatcacctacggtggcggctgtcgtcgccgtcgtcgtcggcggcg

SEQ ID NO: 20493 - DNA, 591 bp, Oryza sativa
  Clone ID: PAT_MRT4530_25855C.1
atggagccatgggtggagcagcacttgctgccattgctcaagccggcggaggaggacgaggcggcgtcggtcgcggcggagatggcgaggacggcggcgaggagcatctcgacgacgcgggggctcaccggcgcgtgcatggccatgccggagctgatcagccggtgcaccgtgcgctccacctggcgcatgtcaaggcggccggagagatacatgtatcggttgagcacgtcgccgtggcggttctccttggcagaccacctgcaaatccaccgcgcccacgccatcctgtcggcgccggtgacatcgcgcgccgactcgaaccggttcgccatgctctggtacgtgggcagtgcctcctccatcaccatgttccctacctggcacactaggtgcgcgtcgggcacgccgcgcggcgcgctcccggagctcaaggcacgccgcgtggaacccgtccgcgccgagcgccgccgcgttgggcaccatgtcctccggctgccatgcctcctccgccggcttgagcagcagcagcacatgctgctccacccacggctccatctgctcaagcaccaccagcctcgccggcgctga

SEQ ID NO: 20494 - DNA, 743 bp, Oryza sativa
  Clone ID: PAT_MRT4530_25856C.1
tatgaacaaaattgaaaagatgtattaacatataatatatcgccggcgaggctggtggtgcttgagcagatggagccgggggtggagcagcatgtgctgctgctgctcaagccggcggaggaggcatggcagccggaggacatggtgcccaacgcgggggcgctcggcgcggaccgtttccacgcggcgtgccttgagctccgggagcgcgccgcgcggcgtgcccgacgcgcacctagtgtgcccgggtagggaacatggtgatggaggaggcactgcccacgtaccagagcatggcgaaccggttcgagtcggcgcgcgatgtcaccggcgccgacaggatggcgtgggcgcggtggatttgcaggtggtctgccaaggagaaccgccacggcgacgtgctcaaccgatacatgtatctctccggccgccttgacatgcgccaggtggagcgcacggtgcaccggctgatcagctccggcatggccatgcacgcgccggtgagcccctaccatggcttcagctatgtcgtcttccaggagcgcgccaccgcggcaacacggcacgcaacatccgcgcccatggtgacgacacgctcgcccacatctgtggctccatcgccgccgacaagagcgccacgaggccgcctacacccgcgtcgtcgagatgctcctcgccgcccaacccagtgacagcgtaaaacccctttctgatctccttcgtgctgccgtcgccgtacccgc

SEQ ID NO: 20495 - DNA, 165 bp, Oryza sativa
  unsure (1)..(165): unsure at all n locations
  Clone ID: PAT_MRT4530_25857C.1
acagaccactnagccactgcncggcagaaattgaagcanatgggaagtgtntggcaatggcaatggcatgggtgtgctgtgntgggttgagtgacagtgttgggtggttggttggcaatgatggatgtgtgcctggtgcaatggtgcaagtgttggtgctggcaa

SEQ ID NO: 20496 - DNA, 789 bp, Oryza sativa
  Clone ID: PAT_MRT4530_25858C.1
ctaccagaggcgcacggggcggcgtcggcgccggcgaggctggaggtgcttgagcagatggagccatgggtggagcagcacttgctgccattgctcaagccggcggaggaggacgaggcggcgtcggtcgcggcggagatggcgaggacagcggcggcgaggagcatctcgacgacgcgggtgtaggcggcctcgtggcgctcttgtcggcggcgatggcgccgcagatgcgggcgagcgcgtcgtcgccatgggcgcggacgttgcgtgccgtgttgccgcggtggcgcgctcctggaaggcgacatagctgaagccgtggtcggggctcaccggcgcgtgcatggccatgccggagctgatcagccggtgcaccgtgcgctccacctggcgcatgtcaaggcggccggagaggtacatgtaccggttgagcacgtcgccgtggcggttctcctcggcggaccacctgcagatccaccgcgcccacgccgtcccgtcggcgccggtgacgtcgcgcgccgactcgaaccggttcgccatgctctggtacgtgggcagcgcctcctccgtcaccatgttccctaccaggcacactaggtgcgcgtcgggcacgccgcgcagcgcactcccggagctcaaggcacgccgcgcagcgcactcccggagctcaaggcacgccgcgtggaacccgtccgcgccgagcgccgccgcgtcgggcaccatgtcctccggctgccatgcctccttcgccggcttgagcagcaacagcacatgctgctccacccacgg

SEQ ID NO: 20497 - DNA, 111 bp, Oryza sativa
  Clone ID: PAT_MRT4530_25859C.1
atggccgtggcgagggcgcacgttgtctcggcaatggggacgacaaccacgttttgcatgcatgattttcaaggccaggtttcagggttggatgaggaatttagcggttga

SEQ ID NO: 20498 - DNA, 177 bp, Oryza sativa
  Clone ID: PAT_MRT4530_2585C.1
atggcgacggaggctggtcccctcagggagccggcggtggagttcaatcggtgcctgtggccgaggaggagatccgcgccggtggccgaggaggagatccacgcatggggacggggagaagcggcgaaggttggcgacaagacgtccgtgcagcttccagggatgaggccgacctag

SEQ ID NO: 20499 - DNA, 3495 bp, Oryza sativa
  Clone ID: PAT_MRT4530_25860C.1
atgatgatgccggacaagaagaggaagaaaattgcggcagcggcgccggcgccagcaccggcaccggtagctcggcttgtccgcgttcgctcggggaacaagaagaggaaggggaaggggaaggaggccccagccgagggttctgccgcaaaggagccagcggtgtacatggtgttggcgcacggagtggaggaggagcccacccactcggtaatcgaggtcgccgccggcgccaccgtccgccttttgctccactccaccagcggccgcggcatgtcgttcgcggcggtggggacgcggatcgtgggcatcgggctggatcagaccaccgtgtacgaccccaagacctccacggtgcgcgccggctgccggctcgtgttccctaaggtgaaccccgtcctcgtctcgcacggcggcaagctctacgccgtctcctgctgcccctccgtcgtgaacgggcgggacttcgagccatggttcctcgtcctcgacagcctcggctacttcggatggcgcgagctgccgccgccgcccatcttcccgtgccgtctcaacccgctggagtaccgcgatccgccggcggtgcgcgtcgcggcctacgccatcgtcggctcccacatcctgctctcggtgtcggtgcagcagcagggccaggacaagggcacctgcgccttcgacatggacgccgagcagtgggagatggtgctcgacacgaacctgcctttcaccggtcaggccgtgcctcttggcgaccaccgcttcgtttcctgctccatggcaaagggcggcgcggcttcagtgtactacatggaggtcatggtcttccctccaggaattgcaggttcaggcacaggcaagaaggagctgtccatcgttgagttgcaggtggaatccaagcgcattgttccggggcaccttctctgcaccatggggaagggcagcttctcctccttcgactttcgatccactgcttccccggccaagcaggacatagtagcacgtattgttcatcgcacttactctcaggcggaggcggaggtggaggcggatgattctgctgacaccgatttggtcatcacggaagatgaggtggagaagcgtccagttacaggaattctaaccatcgaaagtgggctgacttcgatctcgaagattgttatggagatgaaatacctgtatgagaaacataagcagtgggattggaaggttaaacaggtggagcagaagaaatatttggtggaatttccatccaaagatgctaggagggagttaacaagactcaagggctttgactttgaattatccaatgctagagctaatgttagggagactgagagaaccattgaggcctttgccgagcttcaggaggtttgggtcagagctacaggagtcccaccattggctagatctgaaaaagttattgaaaaaattgcccacttgattggagatcccatggaggtagactcaattagcttgaacagagaagctgtgagagtaaaagtcctttgcagggatcctttgaagataggggggacgtctgagatctttctaaacagagttgggtataggattacttggaatcctgaaggagtaagacaacatcaccaagatgatcctgatgatcccaaacctgcatacagatcaagagggaggagaggagatgatgaggaagactctcaggacagccatgaggctgacaaaggggaatcaaaaaaagaagaagaagagaagaaggacacccaaaaaagggaaggagatcatgggcacaagagacacaagaacaatgagatggtggaagaagaggaagactctttgggggaaggggagaaagtggatatacctgagtatatcccagatatttcagatgaggcagaagaagtggttttatgctcacaagggaaggaggtccagggaattaatgaagttctagagatgatcactggagaagtgaaggggcaagagctgactagtgatggctttatctcatcggggaagaagaagaaaaggaagcagaaagagaaagtggtggctacaagacaaagctcaagaattgcaagagacggagtacctgttgctctgaaggctcaacaaaggacttcggtgaggaacgacatttcagctagagatgaaggtgtagatttaggaacttcagaggggttgcagaatcagaacattgaaacaattaaagccagagagttagctcagtcaatgattcacactgctaaagagaggttgatcaatgaagacccaattgagaggctgcctttgacaacagagatagagggatgtgtatttcccactacggaggctgcaggcatagagccggccaaaggggaaaagaaggatgattttctgagggaaattttaggcaaaagtaacagtatgcagatcccctttatgatgggtggggatttcaacatgattaggttcccagatgagaagtctaacggtaatatacataagaggtgggctgacaagttcaatagtttcattgccttggcagaactaagggagcttcatagatcgggaggcaaatatacgtggacaaataaacaagcagaccctgtcatggaggttttagatagggtgttggtgtcctcttcgtgggaagagatgtatcctctaacgatggttaaaagtctgttaagagtgggatctgaccataatccgttgttggtagaattagaaaaacagctggtgtggtcgagagatgctttcagatttgatccatcttggcttacccaggaaggattcaaagagtggctgatagctaagtggccggaaaggaggaagaaacatatcttagatcattggaattgtcaagggacagttctcaggaggctaatgagaggaattaagaaaatagacgaggaggctgaaagaggggtgctgtcaacagcagaatgggccgaaagatatcaagtagaggaggatttagtccagatctatccagctgaggagatttattggcaaattaggagtggcaccaagtggaccttggaaggcgacgcaaacacattgttttttcatggggtggtgaatgggagaaaaaggaaaacaatgataacctccctcgaggatggggggagggaaatcaatgatcaaacaaagttaaaagaacatgtttacggctattataagaagctgttcggggttgagcaagcaccaaaagtgtttctgagtcaagatatatggaataatagggggaagctgaatcaagaagacaatgataaattgaccaggccattcaccatggaagagatagaggaggctctaagagggatgaaatctaacacggctcccggacccgatggcttctcagcgacttttatcaaagaattttggccacaacttaaagaccaaattaaagagatgttagatatgatgtttgagggggatttagacctttggagactggattatggtgtaataactttgatcctgaaagtgaaggatgctaacacaattaagcattcagaccgatctgcctgctga

SEQ ID NO: 20500 - DNA, 1218 bp, Oryza sativa
  Clone ID: PAT_MRT4530_25861C.1
tgcctactgctgctgctgtgtttctgcagccctgcgcctgcgtatcaatgtactcccttggttcctaaattgagaaaaatcacgtctaacaatgctgctaccaacagtagcggatccaggaataaaaaaaattgagggggctcatttacaccggaggcggaggaggcggacgaggtgaggaggtgcctggcgccggcgaggcttgaggtgctggagcagatggagccgtgggtggaggcgcacgtgctgccgctgctgaagccggcggaggaggcgtggcagccggcggacctggtgcccgacgcggcggcgctcggcgccgacgggttccacgcggcgtgcgtcgagctccgggggcgcgccgccggcgtgcccgacgcgcacctggtgtgcctggtggggaacatggtgacggaggaggcgctccccacgtaccagagcatggcgaaccggttcgagtcggcgcgcgacgtcaccggcgccgacgcgacggcgtgggcgcggtggatccgcgggtggtccgccgaggagaaccgccacggcgacgtgctcaaccgctacatgtacctctccggccgcctcgacatgcgccaggtggagcgcacggtgcaccggctgatcggctccggcatggcgatgcacgcgccggcgagcccctaccacggcttcatctacgtcgcgttccaggagcgcgccaccgccatctcccacggcaacacggcgcgcaacgtccgcgcccacggcgacgacgcgctcgcccgcatctgcggcgccatcgcctccgacgagaagcgtcatgaggccgcctacacccgcgtcgtcgagaggctcctcgaggccgacccggacaccaccgtgcgcgcgctggcgtacatgatgcgccgccggatcaccatgcccgccgcgctcatggacgacggccgcgacgccgacctgttcgcccactacgccgcggcggcgcagcaggccgggacgtacaccgcgtcggactaccggggaatcctcgagcacctgatacggcggtggcgcgtggcggagctggaggcggggctctccggcgaggggcggcgcgcgcgggactacgtgtgcgcgctgccgcagaagatccggaggatggaggagaaggcccatgacagagcggcccagatgaggaaaaggcccacggccattccatttagctggatctttgataagcccgtggatctcatgctgccctaa

SEQ ID NO: 20501 - DNA, 1567 bp, Oryza sativa
  Clone ID: PAT_MRT4530_25862C.1
atggcgaaccctcgcggcggcggcggaggaggagcgcgccaccacctcccactccggccgcggcggctgctccggtcgccgatctcgcgctgcgcggtcctcctcgccgcctccgccgcgctcctcctcgtcctctccctccgccaggaaccaaatgagcagctgtggggttctgatggttacggttctcatgcttgtgtcacaccaacatctagatatatggctccaaaagggtcagagcgctacatgacagttaggagtaatggaggactcaaccaaatgcgtactggaatctgtgatatggttgcagtggcccgtttggtgaatgcaacacttgttattcctcaattagataagcgatccttttggcaagataccagtacatttaaggacatcttcaatgagcctcgttttattaaagctctggaaggggatgtcagcattgtgaatgacttgcctcaaagcctgcagtctgttccaagagctcggaagcactttacttcatggtctggtgctagttattatgaggaggtgaaacaactttggaaggatcacaagaagcttttggagcgtctaagatcacgtggaaaatttattgctcttcatctccgatatgaaaaagatatgctagcattcacgggatgcacttatggtctgagtgaatcggaagcagatgagttaagaattatgagggagaaaacaagccactggaaattgaaggacataaactcaactgaacagagatctggaggtaactgtccactaacgcctgaggaggtggggatttttctgcgagccatgggatatcctgaatccacatggatctaccttgcagctggtgaaatttatggcggtgataagtatatatcaaaattgagatcatacttcccgaacttggttagcaaggaagtgttagcaacaaaagaagagcttggtaaatttaacgaccatgcttctcaagttgcagcccttgattacatagtttcagttgaaagtgacgtgtttattccatcacattctggcaatatggcaagagctgttgagggacatcgtcgatttctaggtcatcgtaagactgtcactcctgacaggagaggattggtggaactctttgatttactacaaaaaggggaacttatggaaggtccaaagttttcctcacttgttactgagatgcataaaaacaggcaaggagctccaaggaagagatatggctccttgccagggagcaagggcagagcacgtctaaggaccgaggaatccttttatgaaaacccatttcccgagtgcatctgcctgaatggaaagcactgatgtgatgatgtaggtttgccacttttattttgctgtatgatattattttttagttaggaggtagaatactgttgattaaacaagtatgaagtaattcctgtaaatcaatcattgctgcatacactacatttatctcattaattctactggcaagctactaaaaggaacatgtgattataaagaaatggccagggtgcaaacgcattatcaataaaattgtgcgtcacaatcacaaaaaaaaaaaaaaaaaaaa

SEQ ID NO: 20502 - DNA, 984 bp, Oryza sativa
  Clone ID: PAT_MRT4530_25863C.1
atggagggcaagtccagcagccgccatgccgatccactggaagaggtcgagatgaattcggcttctgcgaccgaggacgacgacggctgccggtatgtgttccaatcccgccgcgacagcgacaacgacaatgacgacgaggagggcgtgctgccggcgacggcctgcaagcggcgccgccgcctcgacgacatcctcgcgctgcttccttcgccgcccacgccgtctacctcttccggttcggaggggacgatcagcgaccgcgaccacggcggcgacgtgatcggcgccggcgacgacgacgctgcccccgtggcggcgcgacgagaggcgtcgttcccgtgccacttgtgcaacaaggagttcggcagcaggaaggcggtgcacgggcacatgagggtccatcacgccgagaacgagaaggagccgatgtcgctgccgccgcaggtggcggcgcccgttcatccccaggctcggctacccacacgcggagcatcacgatcaggtggaccgtacaagtgcaagtacgagggttgcatcatggagtacgagtcgcaccaggggctaggtggccatgtcgctggccacatcaacagggacaagatggccaccgccagcggcagtggcggcgccggcaagccaaagggcaagcacccgtgcaacgtatgcggcaaagagtacccgacaggagtggcgctcggtggccacaagaggaagcactacaggaaggaccttgatcttaccctctccctcgcaccgcccggacaactcgccgcgccgcctacacctacacctgctcctgctccagcggccatcgccgcggtggaggcagaagcggaggtggctgaagatggagatggaggagagctagtgccgacaactccgccaaccggagctaggagaaatgtggtcgtgcggatttggggcgttgatttggagaagccggtagatgatgtagaggagcaagatagtggcagcaactaa

SEQ ID NO: 20503 - DNA, 1116 bp, Oryza sativa
  Clone ID: PAT_MRT4530_25864C.1
gataaagacggcccaatttcacggtccaagccggacctgcccttttaagcattcttagcccaaccaatggaaggcttgacccaaaaccaaatctagcccaaatgctaattatttaacctaaaattcttattcaataatccaaacgagtagaaattacatgcacctaaaaaccaatcacttctcatacattcattatttttactagctcgagatcaaagttattattaaggcctaattaacttagaagtcgccgtcattcctaggaagcggctcatggccgggcgggcccatgaagaggccctcataaaccagcccagccaaaggcccacctataagaggcccaacccaatagatccagtggtcggcccattcgccggcggcgagggccgggccgaaggagcgggccgggttcatggaggcgccggagtagggcccgccggcgaggatgttggcgccgacgacgaggccgacgaggagcgggccgagcgcgccgacggcgcggcgccggtcgacgacggtggcgtagacggcgaagaggagggagaaggtgagcacggcctccatggccacggcgcgcgccgcgccgacgccgggcgccggcgcgtgcaccgggacggcctcctcgccgccggtgagggcggcgaggaggaggcaggcgagggaggagccgagcagctgggcggcggcgtagagcgcggagcggaagagggtgatgtggccgccggcggcgaggccgagcgtgacggccgggttgatgtggccgccggagacgtgcagccccgcggagaccatgacggcgaccaccagcgcgtgcgccgccgccaccgccgtcagccccattatcgtgtcgccgccgccgcccagcttggcggcggccatggcggagccgacgccggagaagacgaagaggaaggtgaggaggagctcggcgacgacggcgcggaggcagccggggtcggtggcctcgcggtggtggccgagcgcgagcttcgccatgtccgcgccgtacgtgcgtgcgtgcgtgtgggtgacgtgtcactcgcaagctagctaggtgaggtgattcccgcgagggaggacaggaggagatggtgacctcgtgccgaattcctgcag

SEQ ID NO: 20504 - DNA, 377 bp, Oryza sativa
  Clone ID: PAT_MRT4530_25865C.1
gtacatttaaggacatcttcaatgagcctcgttttattaaagctctggaaggggatgtcagcattgtgaatgacttgcctcaaagcctgcagtctgttccaagagctcggaagcactttacttcatggtctggtgctagttattatgaggaggtgaaacaactttggaaggatcacaaggtagttcacatcccgaaatcagattcacgacttgctaacaatggtcttccgattgatatccagagattaagatgccgctgtctttaccaagcactgcgtttttcagatccaattgagaaccttggaaagaagcttttggagcgtctaagatcacgtggaaaatttattgctcttcatctccgatatgaaaaagatatg

SEQ ID NO: 20505 - DNA, 648 bp, Oryza sativa
  Clone ID: PAT_MRT4530_25866C.1
atggccatggtggctctcgagtgtggagacgacagggcgaagggtggagtgatgtcgaggctagcggaatcaagcagatctagaggccacgtcgccggccggcctgtccgtcgccacctaggcgctcgcctctcagccctcccgcctttagctgctgccgcgtcgactgccaccttaggatttgaaggtggtgctctacaacagggacggcgccactgtgccaccatggtcatgatggccctggtccctggaggtcaggagggcagggaggagacctcgctccgtgaccccgacgccgccgccgccgccgccggttcctgcaccatcgtgggctcgcggcaatgtcgcccccttacatcttctgtgccgcgccatccatcaccattcaccacggtcactctgtttccatatctatgtccacggttcatttgggttctgttcatggtatatctcattaatcgagaagaaattgatatggtaccaaacgagataagacaaacaagttcttggactgttaatggtgtagatcctctggtcaaccatttccaccatcaccctctggatcaagcagttgtcatcctcaagattgccccacaactattgaggttgagttcgcatgtcgccactaccctcgagttcccccgctag

SEQ ID NO: 20506 - DNA, 523 bp, Oryza sativa
  unsure (1)..(523): unsure at all n locations
  Clone ID: PAT_MRT4530_25867C.1
cttgtacctgcaatggtcttaatccaccgcggcggcggacgctctagaactagtggatcccccgggctgcaggaattcggcacgagctcgtgccgaattcggcacgagtcaggcttcgttccaaacaactagcgtgtataccacagcactctacggttggtggcagcaaaagatggaaggaaaaaacgtcttaacggatggtgtgatggtgccgtacttgttcatcagaaaaaactaacaagtccacggcgaaactggggaatttaactggcattccgttaatttctttggaatttgggaattgggttttgccagccctgattccaaaccttttatggccctttggaagggttgaaaacctttgggggttgctttttggaaaggcaaatacggtcccttccatccccacccccaaaggttaaattcccgaacccttttttccattttttgtttggccggctgccccaaaaggccaacaatggcccccctgggcccttttaacccccgaaaaanccccccaacc

SEQ ID NO: 20507 - DNA, 960 bp, Oryza sativa
  Clone ID: PAT_MRT4530_25868C.1
ctaattttttatacaaacttaatcaaaccgaaataattttaactaaaaaatcaaaagaactacaatgaagtaaaacggaatgattactagctagctaggcccatatcgctccgtaataaatgcagcatctcactctcgtcgtcctctcattctctggtcctcgtcaaccatggatacaagctagctgtgcttcttcttcttcgtcttcttgtaccaaatcattcaaagttttctttcttcaagccttcaatcttctatatatatctccctccatgatcaaccagctatagctacctcactccaacaatcgccgaccacgatggccaccacgaggagcggcgtcggcggcgccatcagcgacccatttgcgacgccggggttccgcttctacccgacggaggaggagcttctcggcttctacctccgccaccgcctcgccggcacgaggcccgacgtcgagcgcgtcatccccgtcgtcgacgtctacggctaccacccgtcccagctcgccgccctggccggggaggcgagcgcgcgcgacacggagcagtggttcttcttctgcccgcgcgccgagcgggagctccacggcggccggccggcgcgcaccacgccgtcggggtactggaaggccacgggatccccgtcctgcgtcatctcctccgccacaaacagggtcatcggcgtcaagcgcaccatggtgttctaccagggccgcgcccccaccggcaccaagacccgctggaagatgaacgagtacaaggccgtcgccgacgacgccgacgccgccgccgccgccatgctccaccagctgaggaacgagctgggagtgtgccgggtgtacatcagcacgggcacgctgagatcgttcgaccgccggccgctcgataatcaacgctgggacacgaacaaggccaagaaccagatcatcagcagcggccgcctcacgccggcgtcgtc

SEQ ID NO: 20508 - DNA, 151 bp, Oryza sativa
  Clone ID: PAT_MRT4530_25869C.1
tataagggaatagcttgcggcgggtcgtcgcgctgtcggcgatcggtgccggcgccggcggcgccagcgccgcgttcgccgagtcggacgtgacggcgggacgccgaggcgaagaaagaagtacggcagatcttggtcaccatgcccaccg

SEQ ID NO: 20509 - DNA, 886 bp, Oryza sativa
  Clone ID: PAT_MRT4530_2586C.1
aatttcctccaaaatccacatgcaattgacggagcgtggggctcctcaccgggagaccgcgcaggcccccctttgccggttcggccgggggcgctaagcgagtttcttcgtcctcgatctgtggaatgttcgcgagagagcaaatgcacgagacacgggcgatgtagacaggttcgggccgctgagaagcgtaataccctactcctgtgttatggtggatctatgcaacgtgggagtacggtttgtctgccgatgacatgaccggcgtcagaccagttacagaccggtcattcttgtccaccatgcgtcagtttagcatgccgcacatctgcccttcttcatacaatgacttccttgtaatggttgcgatgaagcctggcatgaatctggccgggacagacggggtcggggcgccccagccctcggggccgaaacgggagcggcccgacccctcggggagacagagggaggggtggccacgtcaccctcgggcccgacccccccgagggggtcaggccacacgccggcaagagcttcggccgcccgcacggggtggtcatcaacggcaagtccggcaaggccgccgccgacccgcccatgttcaccgtcgaggccggcaagacgtaccggctccgcgtctgcaacgtcggcatcaaggcgtcgctcaacttccgcatccagggccacgacatgaagctggtggagatggagggctcccacacggtgcaggacatgtacgactccctcgacgtccacgtcggccactgcctctccgtcctcgtcgacgccgccgtgccggagccgccggcgggatgggcgtggtcgatcaaccagtggaggtcgttccggtggaacctgacgaatctggcgaaataatcaacttaat

SEQ ID NO: 20510 - DNA, 485 bp, Oryza sativa
  Clone ID: PAT_MRT4530_25870C.1
ctttcgcgtactcgtgtttcttgttcacagttgtgtgtttgagtctgttcaacgaagatgaaaagtgcaggtatgtaaaaccagaaagtcgttctacactgattaattgggttataattattacaaacttggaaaacatatttatttgatatttctaaaaacaacttccatataaaaattttttcataaaatgtaaaatttatcagtttaaaaaacgtgctaacaaaaaccaagataaattacctatcttaatcaagttagaacgtatacccataaatgtttgatccgtcaatttcatattaaatttttgtttaggtttggtataatttactattctacatatacttaagagtatgtataccagtaaagatgtatatgcattgggatatgaagatgtcaggacgtaaattcgggattaggctataattgtaaatttcagtcaattagcagggttaagctggtttcctcctgtttggatccaagag

SEQ ID NO: 20511 - DNA, 309 bp, Oryza sativa
  Clone ID: PAT_MRT4530_25871C.1
gtgttttgtacctaatgtgtgtgtaggggagcccctcatctcagtggctagcttttgaggtgggaaagacccttgatgatgatctacacggtgttcattaactcagacatgcagagcatataggcagatagccttttgtgattaaaagtgctaattcttcgcggcaaattgatctcccagatttcattattcagaaaacgtggaagattgattggacaacaaaaataaatatacaggtgaagaacaagaccaagtacatactttttacgccgcccatttggagatgaaagtaagtgaccatgcacttgg

SEQ ID NO: 20512 - DNA, 483 bp, Oryza sativa
  Clone ID: PAT_MRT4530_25872C.1
atgcggtggaggaggcgcgaagaaggcggcggaggcatgaagaaggcggcggcggcggcgcgaagaaaagcatctagagcgccttgccctgtagacgccgtcttcttcggggccacggccgccggggagttggacgccgcggcggccgcgtgcatggctacggtggcggcagcacgcagtagcggagcgaaggaggcggccaggaggggcgggcggagggcggcgagcggggagggggagagggacagcaacgcggcgtcggccactactcgccttccggccaccggtgctctcgcccgtcgccaccctcttcttcggggtcgcggtcgccagggagttggacgcagtggcggccgcgtgcacggctacggtggcggcgacgcaccgcggcggcgcggcgccgtcaggagatcggcgatgccccaggcggcggcattaggaggtccagccaggctctcgacagtggtgcttatatcagggtga

SEQ ID NO: 20513 - DNA, 432 bp, Oryza sativa
  Clone ID: PAT_MRT4530_25873C.1
atggcagaaatcaaggatgtgtcctcctcctgcgctgcggaccacgcatgcacctacccgccgctcgccggacgtgcactgtacgcgcagctcatcgcgctacggccacggcatgcgtgcatgcaagcaagcaacggacgcgcccacgcagcagcaagccccatgtacacgtacgcgaagatatcgaacgcgacgcgcgtccgttcgcgcgcccgcgaccgcgcgcggagccaaagccaagccgcgaaccggctcgatcggtgcctggcgccttgtggcccttgtgtctccgccgcccgctcgcgcgcgcgtcgtgacgatctcacgcgcccccgcgacgccgcgcatgcgcatctcgtggcgttcgtgcgggtggggtgggggatcggttttggatgcgtgcgcctcggcttcggcacggggacgagctag

SEQ ID NO: 20514 - DNA, 480 bp, Oryza sativa
  Clone ID: PAT_MRT4530_25874C.1
agcatcaaacatccaatacaacacaaaatttacgacctagttaacagccaaatccagtcatgttccaaatacaatcacaggttcactgagttactaagtacatgtaactatcctagcaaaataaacaagttacagtcacattcactaacaaaacaagtcgcatgtctgaatcacaccaatcaaaagatattgccctctcatcatgaatcagcaagtcgacatgaaaagggcagacaaaccttatcaaggacgccttgttcaatgtcatcattacctcttcatctaaatcaagatagagctcatcaccatcttcagtcttcagcatccacctaccatctagcgccctagctgtgccatactgcatcaagtgcccaggaatgcttatatcactgaagaaatcaagtgaaactgccaaacagatgtagccatatcagctcaaccaattgtttgtgaatgcagcttttcctactaactagtacc

SEQ ID NO: 20515 - DNA, 412 bp, Oryza sativa
  Clone ID: PAT_MRT4530_25875C.1
cttttcttgaggatgtgagcatatgtagagtgatgatatcattgcctaagaaataaatcttgtcatcgggatggatcccttttgttaaaaaaaaaaaaaaaaaaaaaaaaaaaaaaaaaaaaaaaaaaaaaaaaaaaaaaaaaaaaaaaaaaaaaaaaaaaaaaaaaaaaaaaaaaaaaaaaattaaaaaaaaaaaaaaaggggggcccctttaaaaggaccaaagtttacttacccgtgcttcaaacggaaaagcttttttatggggcccccaaaattaaatacattggccgatgtttaaaaacgtgggaacgggaaaacccggggggtaaccaaatttaatggctttgcagcaaatccccttttcgcaagttggattaataaaaaaaaggcccgaaccgatcccctttcc

SEQ ID NO: 20516 - DNA, 731 bp, Oryza sativa
  Clone ID: PAT_MRT4530_25876C.1
ggcgctctaaactagtggatccccgggctgcacgccccgccccttcttccctccgccgctgccatcgccgccttcccccctccgaatcgatcgccggccggccggctgcccgccaccgatcctcctccggtgtcccgtgccccggccagatggagagtagggacgaagaacccatgatttggggaaacggtagccttcctcccgggtcggatgccgcgcgacctgtcgcggtcgccgccgccgcgccggcggcggcggcgctcgccgtcaccgccgcggtaccaccggggagtacgcagggcgtgcagggaccgcagccccagccgcggcagcaggacgcaaagacactacagaagaaagagaagtcggagtgtcactagctctccgattaccaaatctcaaagtcctcctgttgcgcatgggccagcagagaataagaatattgttgataagcaaaggctagaagaagaaaagaaaaggcggggaggagctacgagaaaaagctcgaggaagagcggaagaaagccgaggaggctcagatgaaggaagcaatggagcagcagcagaaagagctggagcggtaccaggagctggagaggctccagaaagagagggaggaagccatgaagcggaagcagatggaggaagagcagcagaagcagagccagatgaagctgctgggcaagaacaagtcgcgcccgaagctgtcgttcgcgcttgggatgaagtag

SEQ ID NO: 20517 - DNA, 439 bp, Oryza sativa
  Clone ID: PAT_MRT4530_25877C.1
ttaaacaaaagaactaagtcaatccaagacatcattgaaaagatttttaattcaagattgatttcagagtaaaccaaggcaaggatgacctattttgggtgtgatttcgtaatctgcaaataaatccctgtctgatttctccaccccacaataaaacaatgataaaaaaaaccccattatcctcacaaaagactatcttttttttatttgcaaagatagaaacttaaaaccgagattaaaatgctcccccccccccccactacttgtaaagatatgtccagtatgatttactaatctccaaatcattgctaaaaaaccctttatcccctaaaaagctccttaatattacttgagagactcagaaataagagaaattgaaaaactttttcctacttgtaaagagtatattcccagtgttcaccaagcaattttcccaagt

SEQ ID NO: 20518 - DNA, 455 bp, Oryza sativa
  Clone ID: PAT_MRT4530_25878C.1
cggggggggggtggtttttttttttttttttttttgggggttttttttttttttttttttttttttttttttttttttttttttttttttggggggaaaacccagggttttactacgggcccccctaaaaaaggttttaaaacgggccccctttggggggcggcgggtttctttttttttttaccccctttggggggggccccctgaaaaaagtttcccattctcaaaaaaaaacccttttttattttcccggggtaccccccctttggcccccaccccgggggaaaaaaaaaaacgggaataccgtctcatacaaaatgcaacacatttgcttccaaaaaaaaaatgaccaaaaaatggttgccccccccccacgggaaggaattgttggccaaggacccttaacaaattaaccccttttcccccccggggattgcggaacccccccttttttt

SEQ ID NO: 20519 - DNA, 179 bp, Oryza sativa
  Clone ID: PAT_MRT4530_25879C.1
cgtcgcgctcgtcgccacatcgcttgcttccccgtcactcccactatttcccactcgtcgccggcggcgagcgagcgagcgatgatctccgcgtcccggacgcaaaccccgctcccatctccatgactcccgcgaaccccaccccgctcctctcctccccacgccccaacccgttccct

SEQ ID NO: 20520 - DNA, 452 bp, Oryza sativa
  unsure (1)..(452): unsure at all n locations
  Clone ID: PAT_MRT4530_2587C.1
ccctttggttgcangattcngcacnantcgngccgnatnctgctcgagagatgnactccccgtgangggactggtctcngagggaggccactcactgagcgatntggactncctcnnctccaacactgtctttgncngcaccgatcctcacctggccacttgggntnccgcctatnaaggcgacgaaganctanacggtnangtgcaactactccnnngaagcngcgacnccggcggcggccgtcaagggaaccggcgcgtccctnctggcgatggcggcnacggcggcgcccgcnatngcgctcgtcnaccaaangatgtctacngagggcaccgggctcacctccggctgancaacaacctgctggggtggatcctgctccgggtgttcggcctcatctggtcctctacaccatctacacctccaacctccaaggggggcccggtaccca

SEQ ID NO: 20521 - DNA, 561 bp, Oryza sativa
  unsure (1)..(561): unsure at all n locations
  Clone ID: PAT_MRT4530_25880C.1
taccggtccggaatcggacgcgtgaccggacgcgtgggcaaagctcaagagcagacagagctgcagcagcagcagcacaaagtgtcagtgagctcaactaaactctgattaagggtgaaagcatgggtttgttatgctgcatgtcgtcgcacgccgaggtggtcgtccccaagaagcccggcgactgtgacgacgacgacgattgcagcaagcaggagtagcagaagaaggtgaagcagcaggggagcagcaaggaggaggaggggaagacgacgacgaaggcgaaggagaaggagaagaagaagatgagcaaccttgatggcgccggcctcgtgacgcctcacttccccttccatttccggcccggcctactgtaattctgtaaagatttcatcatgcagattatgtttttgtagcttctgtggcagattaggtgatggttaatcatatggttatgcttccgtagtgtgtaaaaaaaaaaaaaaaagaaatttacttccgcatatattaactctgaaaaaaaaaaaaaaaaaaaaaaaaaaaaaaaaaaaannnnaaaaa

SEQ ID NO: 20522 - DNA, 784 bp, Oryza sativa
  Clone ID: PAT_MRT4530_25881C.1
tgagatcgttttagttaaaaaaataataaaagggtgagaaaagacagaaaggtgcataaaaagaaaaagaaaagccgcataaaaaaaagaaaaacaacaacaacaaacgtagatccgaacggaaaagaaaaatctgattcctataaaaggaaaaaaaagtggtggaaaaaaaagctagatccgattcctttaaaaagggaaaaaaagttttattcctataaaggcgaaaataaataaaaacatctaaaaaattcgtccgattccctaagaaagtggcgaaaaaatgcttcgtaaaaaataaaaagctggttcgtataaaataaaaaatgcacgcgagaaaaaaaaagaaaaaggcgaaacaaaaaaaagtcagaaaaaagcgcaagaaaaaacacgctaataagaaaaaacatgcgaggaaaaagctgtcagaaaaaccgcgccatttttaaaaaaatggtttgaaaaaaccgtgcaagaaaaaaaaacaggaaaaaagtaaaaaagaacattcgaaaaaaagcaaaaaatacgcgcgagaaaataattgtcagaaaaaacaggcaaaaaaacacacgagaaaagaaaagcaaaaaagggagaaaaatatggttttcatcgtcagtgaaaaaagaaaaaaaaacatgctagaaaaaaactgttagaaagaaatgcgccatttctggaaaatgattagagaaaatcgcgcaagaaaaaaaaaccatttataaagaaacaagtcgctcattaaaatacaaacattgtcattgacatgattatgcat

SEQ ID NO: 20523 - DNA, 866 bp, Oryza sativa
  Clone ID: PAT_MRT4530_25882C.1
cgcaggttcgagctagacgtacgccccacgcgtccgaacgaacacacacacaatcggaatcgattaagagagcaaattgtgtagtagtgttgcatatggagacaccaaagatatcgggagtagcacttgcggcagccattgccgtcgttctggccatggcgaccacgccggcggtggcgcagaactcgccgcaggacttcgtggacctccacaacgcggcgcgacgcgtggagggcgtcggcgaggtggtctgggacgacgccgtggcggcgtacgcggagaactacgcggcggagcgcgccggcgactgcgcgctcatccactccggcagctgggagaaggccggctacggcgagaacctcttcggaggctccggcagcgagtggacggcagcggacgccgtcaacagctgggtgggggagaaggatctgtacgactacgacagcaacagctgcctggggtcgtgggactcgtgcctccactacacgcaggtgatgtggagccgcacgacggcgatcggctgcgcccgcgtggactgcgacaacggcggcgtcttcatcacctgcaactacaaccccgccggcaacttccagggagagcgccccttcgagcgtggcctcactctctctgcttaataagttattaatacagtatttactttaactatgtatggagtatgatataaatgtgcgaaataataattacggggatcttattatatatatatgtacgttgtcgttcgaataaaagaagaaaataaatgagaaaattaattccattgtctgccaaaaaaaaagggacagtgaggctctgtatttccagtttggcataaaattgcataatgtgatggatacacagatcgctta

SEQ ID NO: 20524 - DNA, 290 bp, Oryza sativa
  Clone ID: PAT_MRT4530_25883C.1
tggcacgaggagagagagaactagtcttgagttttttttttttttttttttttaaatattaataatgttttatcatctaacaacaatgaaaatacgaattataaaaaaaattcatataagacggacagtcaaagttggacacggaaatccagggtttgtcttttttttgggacggagggaggagaccgataataatctgaccaattctggcacctagatctttaccaatcacaccatgacatcacagaaagtcctccacttcttcccgtcttcctgtatgaacttgtgat

SEQ ID NO: 20525 - DNA, 585 bp, Oryza sativa
  Clone ID: PAT_MRT4530_25884C.1
atggcgatggcgatgcgaagagaagacatccgctcctctactccggcgagccgccttcccacaccggcggggcgggaggccgctgctgtcattcctcgtgaaggtggctgcttgacatccccagtcatacaggttgattcttccggtcatgggagttggttcccaagtaaattgctcattacatttttacatacaccatctttgcaggataagaacctgcaagagaatgagcattgttttcattggtggaatcatctacatgagcagcaaatgctttgcactgaacatgaccttgccgccactgccgtcacctacaacgcccgtggtcaggacgagaacacaggggatgaggcagcggcggcatacggagaggtggccgcatcgatagataacggaggagatagtgaaagagcgagccggcgacgtcgaggagaggcaattacgatccgatggagtcgagatagggagggagatcgcggcggcagcgggaaggggaaagcggagttgcggccggaggaaaggcgagccgtccagctcgttgactccgcttcgttctggttgttggagccgatacgagcgagctga

SEQ ID NO: 20526 - DNA, 102 bp, Oryza sativa
  Clone ID: PAT_MRT4530_25885C.1
atggtacacgcctacacgttctcgacgagtggcgggtgcggcgggttgatcagatatactaatgatgatcatgctgatgatcttggtggtaatcgtggttga

SEQ ID NO: 20527 - DNA, 723 bp, Oryza sativa
  Clone ID: PAT_MRT4530_25886C.1
atgccactgaaaatttctaaaattgaaaccataccattcctgtcactttttccgtcctcctctcacgccgtcctcatcctcctccgttccatcgtcaatccatccatacccgccgcagagctcttccaccgccgccaagctccctcgctaccgccgagctccccaccgccaagctccctcgcggccaccgagctccttcgccgccgccaagctccctccctcgccgtcgccgagccccctaccgccgagctaccggcgccgccgccgcggcttgagctgctcgacctccgctacttcaccgttgatctcagcccggaccacatcaccaaggtcaagtccactggccactgctgctccgccttcgacgtttgcgtcgccaagacatggcgaggctcgccgccgagctcccacgccgccaccaagctcactgccgctgagctccttcaccgccgccaagctccctccctcgccgccgccaagctcaccaccaacgagctccctcaccaccgccgagctccctccctcgccgccgccaagctcaccgccaacaagctccctcaccgccgccgagctccttcgccgccgctgagctccccgccgtcgagctcgtggtggtggagcagcagatggtcagtggcggcggctgacgaggccgcgtcgtggccggtgctcggagtagacgggtcgcagccggcgtgcacgagccctcgggacggccagtga

SEQ ID NO: 20528 - DNA, 819 bp, Oryza sativa
  Clone ID: PAT_MRT4530_25887C.1
atggaggtggaaaaggaggctcccccctctctcctggtggccctcctctctgttcacctcctcccttctcctcctccagatctggcgacgacggtggcggtggagaaggccggctcggagggcaaggtggaggccgttggctgggtaggaggtggaggcttcggaagggcagatccaccaccagcgggctcgagagcgatggatccaccctcgcgcgtggtggagaggaggcgaaagggcggccctgcaccgggagcagcgaccaagatcaccgtagctacgtgcgggctcgagagtggcggatccaccaccggcgggcttaggaacggtggatccattgccagcaacctcgggagcggcggatacgtcctcgcgtccggtggagaggaggcggaagggcagcgccgcactggaagcggagaccaggaccacagcggctgcgtgtgggctcaggagcggcggatccaccctcacacgtggcggagaggaggtggaagggtggtgtggcaccaggaacggcaaccacgaacttgcgggtacgtgcgggctaaatcgagagcggacaacccaccgtcgacaagcttaggaatggtggattcgctgccggagtgctcgagagtggtggatccgcccttgcacatgtggagaggaggcggaagggtggcgcaacaccaggagtggcgaccacgaccacgacggcgatgtgagtgcttggaagagggcggatccgtcctcgcgtgctgcacggaggaggcggaagggcggcacgacatcgcgagcggcaaccacaaccgcaggcagcgggggcaagggctgtag

SEQ ID NO: 20529 - DNA, 211 bp, Oryza sativa
  unsure (1)..(211): unsure at all n locations
  Clone ID: PAT_MRT4530_25888C.1
cccactctttcnnaccttgagtcgccaccgccgccatcgctgatgctgcttacctactccgtgccgtgcactctttgcactagcccatggcgacagatatgatggctgcgaccgacacctcgagctcccctcgccgcgcgccggtcgtcgcgtcgttgtatcgtgcagcctcccatgctgcagcagtagcatcatccgcggaggggattga

SEQ ID NO: 20530 - DNA, 292 bp, Oryza sativa
  unsure (1)..(292): unsure at all n locations
  Clone ID: PAT_MRT4530_25889C.1
cttgaaaaaannnnnnnnnnnnnnnnnnnnnnaaaaagacaagtggaatggatttaaaacaaataaaatggcacattatcaaggatgtgcgtggtccacgatttaaagggacataagtttgggggcccttctttgaaaaccatgtttctttctttggggatcccaaagtgaaattgttttgacggtggttttaaaattcatttgattggaaaacccttgacatttccaaactttataaattcgtggcatttccccttttaaccacttggcttaaaatcaaataggccccaac

SEQ ID NO: 20531 - DNA, 557 bp, Oryza sativa
  Clone ID: PAT_MRT4530_2588C.1
gggggtcgggcccgagggtgacatggccaccccttcctctgtctccccgaggggtcgggccgctcccgtttcggccccgagggctggggcgccccgaccccctgtggttttggcgccacgtgtatgggcgggttggacgagcgcgccacgccgcatttaatgcaacgcagcgcgctcgtttatccggtccgtgaccggtcgcagtgtgtgaccggtcacagaccgccggagacggcgtgctaactcctggagttagcacgccagtcccgatccaccagaacacaggagtagggtattacgcttctcagcggcccgaacctgtctacatcgcccgtgtctcgtgcatttgctctctcgcgaatattccacagatcgagggtgaagaacctcacttagcgcccccggccgaaccggcaaaggggggcctgcgcggtctcccggtaaggagccccaagctccgtcaactccgccgcaggaagcttccagaaggttccgggaggccgcggcggagaggcttcaggtgagctctcccctttgccttcctctccagtctccat

SEQ ID NO: 20532 - DNA, 291 bp, Oryza sativa
  Clone ID: PAT_MRT4530_25890C.1
caagggccaaaaacacacggctttagcaaataatgcaagaaaacaatttcagaccaaaaaaccccccttattttacgtttcatatatgagggttccaaagcacaaggggcatgatacatacggcccttgagggggcccccaagagggaaataagtagtgggtctttcaaaactgagctggggccaaatctatggcctttttatcggcccgaaacgccttaataaaaatatcatgtggaatgggggggttagatccaaaaacccctttgggaaaaggaataacccggggttt

SEQ ID NO: 20533 - DNA, 1217 bp, Oryza sativa
  Clone ID: PAT_MRT4530_25891C.1
ccctgtcctatctctctcttcattggtttgacgccaaaaggcgaggggatggaggatctcattagtagaggagctagctggagagtagatggaataagcgagttgctcgtgaggtcttcacagccgcctaccgcacccaaggcatccggtattcctgtgggtgccctgcccataaaggtttttgccccgcgccgacccatctcaataacatttgtgatgcctcagtcgttctagcttcctacgatgcttgatccacatctaccctcgccgactcccagggcgttaggtatgccacctctgccacctccaccttctctagcaccacattcgacgttcccacctcctccaacacccgcacctcctccctctagcgagcccctcctcactccgtccccgcctcctccctctggtaataggtaagttctttccataccgccacccgcaacacccgcttcccctccactccatcgtgccactgccccaacctcgccagcatagaaaggtgtcaacttgtcagcgcagccccgccaggcgacctcctccctctcccatttgcatcgctttgtctccgtgataaggacatcctccactattacccgttgggaaagacgcaacaagggccaagcctcggccaactccacctggaccggattgttatcactccgccaccatcacgagacccaccgcctgctaccgacaccacggcactgatgacacctccgccgcctcgtcgcttgcccttgtatgccacccaccgttagtccaccacctctcaggctatccctttaaacccgatcccccattccccctcctggtgccaccctcccccgaccctgcccaaaaaccattaaccctaacttatcaccgcgcggccgggaaccgcacacgacttctctccctaacacgagcacgccccgcacgcaaaaataaaaaaggaaaaaaataaatccaaaaaataaaaaaccctaacccaagaagccgccgctgccgccctagtggtcgctgtcatcctcgtcttcgctgtcgccgggtctacccgctcctgtcaccgtcgccgggtctaccctctcccgtcaccgtcgccggatccgccgccgccacgcctccccaccgcccaccggccaccgcgccagcccgcctgcccgatcggaggagaggagaggaaaggagagaaagagagagaggggagcgaaaataaaaggaaaggaagagagatg

SEQ ID NO: 20534 - DNA, 2325 bp, Oryza sativa
  Clone ID: PAT_MRT4530_25892C.1
atgaagagacaacttcccataaaaggtgcatcgggggcctcgggatctgggcatggaaagaaagctcctcaggagctggagaacgtcttgaagcaacatttcggatattcaggctttcgaggaaagcaactagaggctatagaagctgttctttcagcactaatggagaatcaggttgccagcttgaaaagcaaaggtattccagctgagtttctctcgtcaacacaaacatcgcacaataaacaaaagatacatgaagaccttgattctggtaatccttctctaaaattgctatatgttactcctgagttggttgcaacatctgggttcaaggcaaagctaacaaagctctacaatagaggtctccttggtcttgttgctattgatgaggctcattgcatttcaacttggggccatgatttcagacctagttaccgcaagctttcatcactgaggaaccagttcccagacatacctatattagctttaactgcaaccgcagttccaaaagtccagaaagatgtgatatcgtcactgtgcttgagaaatccattaattcttagggcatcatttaatcggcctaatatattctatgaagttcgctacaaggatctccttgatgacgtttattctgacatatcaaatttactgaagtccagtggaaatgtttgctcaattgtgtactgtcttgaacgtgcggtttgtgatgatctaactatgcatttgtcacagcagggtatctcctctgctgcttatcatgctggcctaaatagcaagggtattgatagacaagatgtccgtattgtgtgtcactataacttgcctaagtccatggaagccttctaccaggagtcaggacgagctggccgtgaccaacagccttccaaaagtgttctatattatggattagatgaccgaaagaaaatggaatttattttgagaaacaccaagaacaaaaagtcagagttatcgtcctcttcaactgaactttcagagaaggccttagccgactttagtcagataattgattactgcgaaaattctacctgccgacgaaaaatgatcattgagagctttggggagaaggtacaaccaactttatgccaacgctcatgtgatgcttgcaaacacccaaatctagtgtcctcacgtttggaggaacttcgtcgtgtgcccacctgtcgctataacaagatatccccagtcttcaaaagctcgttggctaatccaaaacacatggagacagaattttggaatcgtgaagatgatgcaagcatatcagttgaagatatatctgattccgatgatgggaaggaggtggtgagcaatactgccatttcaaagctcccatcaaaagcagggctagatgcaaaatttgaagcattggagcgtgctgaaaatgcttattatcaagctaaaggtcagaccaagcagcagggtgggaagcttgttgacaagaagagcatatctcagacactaagagatgcaagccaaaagcgattgttgaatggccttggacaagcaaagttgcgacttgggaatctaccgtttgatgaagagccttctgcagcacaccttgaggtagagtgcttcaagaagtacgagaaagtgggcaagacgttctacaactcgcagatagccgccacagttcggtggctttcgtcttcgagcctcgaccagatacaggaccgcctccacgcccttgctgaccaaatcacagatcatggtgctgcggcaagctccccttccatcgtcccagagtctcctccagcatctcctgatgtaatctgtaaaatccctggagaagctactagcaacgaagctaaggacatacctctgaagaacaacacggaggagtttgtaacgacggagcattctgacgagattgcaaaggtggcggttttatctgaaaatatggagctccccaagataccatcattcagagaattcatgagccaaaaaggaagggatcgtgcaacgagttcttccaaagtagagagcctgccttccggtgttcgtagaaaggttggcattgagaagcaagggacgacgggaccatccaagaagatgaaatcatgagtgatgacatcactgttgtacgtactgcatacaacatcctaccggatgaatttttcagtagccactactcccaatggtttatattataagactttctagtattgttcatattttttttatagatgttaatgaatctacacacacatatatatatcaacaatttgggcgtggaagaagaataaacgaagatttcagaagactaaaaaaaaaaaaaaaaaaaaaaaaaaaaaaaaaaaaagggggggg

SEQ ID NO: 20535 - DNA, 487 bp, Oryza sativa
  Clone ID: PAT_MRT4530_25893C.1
ccaccacccccccgcgccccgtgtcctcgccgttgcctttctgtcccatcccgtgcgtccttgttaacaatgaaatttggtaagcccaaagttatcatcggcttagagttaatattggcttcaaagttctagaatcagccgataagagttaagtcgccacgatgtcatattcttggtggagtcggatcaatcaaacaaagcttatctacaagagtccgaggattttatgacattggacctccagccgatgtatgctttaaccttcggatcaatatttgttctactatatcatattgttaatcgattggtttttactgggttatattgctatattatattatcatcagccgattgtctttatatcattatctacattggacatatagccgattgcttaaaccctatcgctatcggctggtaccggcatcggctattatcggctatcgactggaactactccatcggcttgtcagctgatcggctgttt

SEQ ID NO: 20536 - DNA, 1799 bp, Oryza sativa
  Clone ID: PAT_MRT4530_25894C.1
atgccgagctataatgtttggacctcgcatggggagcaaggggttcaaatggaagaagatgaagtagaagacgagaacattccgcactaggctcagtacggtggatttgaaggaaatacaatgtgcgaggtggaaggggctgacgttgaagatgatcttggtcagatgttgcaggacatcaaggaggactgcgaaagtgaaaaggaggcttagaaattagagcgtatgttagcggatcacaagacgcctttgtacccaggctgtgaacaggggcacaaaaaattgggtacaactctggaattgttgcaatgtaaggccaaaaatggtgtcagtgacaaggcatttggcgagctattgaaactagtgaagaacattcttccagaggaaaacaagttgcccgaaacaacatacgaagcaaagaagatagtctaccctctaggacttgaagttcaaaagattcacgcatgtccgaacaattgtatcctctatcgcggtgaggagtatgagaacctagaagcatgcccagtctataatgcactatgatacaagattagaagagatgatccaggtgatgttgacggactgccttcgaggaagagaattcctgctaaggtgatgtggtatttccctataataccacggctcagacgtttgttcaggaacaaagagcatgcaagattgatgcgatggcacgcagaagaacgtcaacaagatgggatgctgagacaccccgccgatgggtcgcagtgcactacagaatccggagcattcaggacgaatgcgaggaaaaggcctcgtcccttggaaactaggattcaaggaggacagccacacgtacagtagtcggatcaggagcaagagagacacggaggcgaagatcgtagacctggaatacagggttttgttgcacgaggccaggatagaagaggtggtaaggaaggtggacgaacgactggccgcacatcggagccaggaggagcctgtaatggtcagtccctcaggaaatcgcagcagttgcgcctctacgggataggttggatcatagagcatggaagcagcgctaactcaggaagaaaccacctatcccgttgacggaatcaagcattggacatcgtgcgagctgcatattcccttcaggaacttgaccatcaaggtttgctcttgtacttgtatacattccatatgtcgttgcacagtggcgtcgggcatggccatcccaacggatccgacagggacataccattgcaggccgattccacctgggtactccaaggtcgaaatcgagcaagtggaagccacctaggaggatctcgagttggagatacctggagaggatggggagatgaaactaggagacacaagccatgccatcatactatggtgcaagcgctacatcgtgtttcccgattctcgatcccctcctcctgcaccatcgcctccggctcctccacctcctgcatctcctccggctcctctgactcctccatctcctccgcctcctccgtctccgcctgcaccgtcttcgcgtgctcctccgccacctcctccgcctgcaccctccaagactcgccaagctgcaccacctcctccgcagacgtcaaggccgatgtagaaggccaaagttgaaccacggctgactccctatacgaagccatacttgtgcacagacgaggaggttgacgccgcggtgaaagaggacgtgaggaagcacttcaagcctcggagtcctgaaaagaagattcctatagacccgaagaccaagaagttcttccaaggcagttgtttgcccagatctttcg

SEQ ID NO: 20537 - DNA, 348 bp, Oryza sativa
  Clone ID: PAT_MRT4530_25895C.1
ggaacaagcaacgaccttgcacacatttccaggactaaaagtttgagctcagcatgagaacccaaccgctgtgcattcttggagattgacctgtgatctttactgacagacagtgcagtgagagggtgacactgaacagcgttgtagtgctcattgggcaagcttttcattctggcttgtccggtgcaggtgaacatcctttttcagatgctggcaagattgcaagttactactagtagtattttatcaacctttttttagcaatacctgaccgtgatagatgaaaaaaaaatcagtaacataatttcattatcatcccaaaatgctttcgccaaaaaaaaaaaaaaa

SEQ ID NO: 20538 - DNA, 2514 bp, Oryza sativa
  Clone ID: PAT_MRT4530_25896C.1
atgccgagctataatgtttggacctcgcacggggagcaaggggttcgaatggaagaagatgaagtagaagacgagaacattccggactgggcccagtacgttggatttgaaggaaatacaacgtgcgaggtggaaggggctgacgttgaagatgatcttggtcagatgttacaggacatcaaggaggattgtgaaagtgaaaaggaggctcagaaattagagcgtatgttagcggatcacaagacgccattgtaccccggctatgaacaggggcacaaaaaattgggtacaactctggaattgttgcaatggaaggccaaaaatggtgtcagtgacaaggcatttggcgagctattgaaactagtgaagaacattctttcggaggaaaacaagttgcccaaaacaacatacgaagcaaagaatatagtctgccctctaggacttgaggataccaaacgattgtatcctctatcgcgaagagacgatccaggtgatgttgacggacagccttcgaggaagagaattcctgctaaggacaaacaggtggaatttaacctacgagcgctgctgctcgtaaccatcaacgattggcctgcccttagcaacctatccggacagtcaaacaaggggtacaaggcttgcatccactgtttggatgaaactgaaagtacgtatctgaaacattgtaaaaaagttgtgtacatggggcatcgtcgatttcttgttacgaaccacactgtccggaagaaaggcaagcaccgtaagaagcctatatttcgaaacggtaaaaccttgttcgaaatggtgaaagatctgaaagtagtgtttggaaagggacctggaagccaacccatagccagcgaagatggtcacgcagcaatgtggaagaaaaagtctattttttgggagttaccctattgggaagtcttggacgtccggcatgcaatagacgtgatgcacctcactaagaacctctgcgtcaacttgctgggcttcctaggtgtatacgggaagtcgaaagatacacttgaagcacgcaatgatctaaaagatacgaaccaacgtgaggacctccacccggaaccaaaggagaaaggaagccaatgcttgagcccatccagctacactcttagcaaggtaaagaaggaaagtatgtttgaatgcttggagagcatcaaggtaccgtctgggtactcctttaatataaagagaataataaggacgaaggataagaagttcacaaacctaaagtctcatgactgtcacgtgttgatgacacagctgcttcctgttataattagtggtattctccctgacaatgttcgagcaacaataacaaagctatgtgctttcatgaacgcaatttcacagaagatcatcgatccagaaagattagaagcccttcaaaatgatgtggtgcaatgccttgtcagctttgagttgatctttccaccttccttcttcaacataataacgcatcttctaagtcaccttgtgaaagatatcagtattctcgggcctgtgtacctgcacaatatgtttcctttcgagaggtacatgggcgttctaaagaagtacgttcgtaaccgtgctcgtccagaagtaagcatagccaaggggtatggaacagaggaggtcatagaattttgcttagaatttattgaagaccttcgtccaatcggggtggccgaatcacggcatgaagggatgctacggggaaaggggactcttggaaggaaagcaattatgactgtagacatcgatttataccgtaaagcacatttcacggttttgcaacaatcttttttggttgctccttacatcgaggagcacatggcgattgtaaggagcgaaaacatcggcgaccaaataggggaacagcagggggagaataacccacaaaatagaggcaattcgggaatcagtgctggtccaaaccagaatctggcaatgtctgttctagaaaatgaaacttctcctgtgttctttgtgccggattctgttcagggcaaaatccaggaagtgcttctcaagaatcagttgttaagacagttagcagaaagagttcaggggcctccagcagtccctttggcgcttgctcccttcactgctttgctgctcccaagaaggaatgcaatttatgattctttgccgccagtcttccactcttcacagctgcccgtggtagtggttcaacatgaggatcatgaggatgatatggaccatgacatgggccctctgggccaagatgagatccttgatgttcagcttttggcaatttcagagccactggaccaggctcagcccaagagcccgccaagaacaggaccagtgcctctcctgttagaaccaccaagagctccaatcaagaagaaagatggcaagactgtcttgtttgatcctaacagaaggcagagtgctcggatgcgttcttctagtcaggagctcacccagcctgaccccagaatgggcataggaaagccgagaggaaaatctgccaaaaaattgaaatag

SEQ ID NO: 20539 - DNA, 6309 bp, Oryza sativa
  Clone ID: PAT_MRT4530_25897C.1
atggattggcaatggatgcgcgcggaccgacggtcaaaagggtttattgatggcttgcataattttctgaaagtggcagaagctaacaagcagaataatggttttatccgttgtccatgcactattcatattcacttgtttgagacgggcttcatgccaagcaataatgtttggacctcgcacggggagcaaggggttcaaatggaagaacatgaagtagaagatgagaacattccggactgggctcagtacggtggatttgaaggaaatacaacgtgcgaggtggaaggggctgacgttgaagatgatcttggtcagatgttgcagcatatcaaggaggactgcgaaagtgaaaaggaggctcagaaattagagcgtatgttagcggatcacaagacaccgttgtacccaagctatgaacaggggcacaaaaaattgggtacaactctagaattgttgcaacggaaggccaaaaatggtgtcagtgacaaggcatttggcgagctattgaaactagtgaagaacattcttccagaggaaaacaagttgcccgaaacaacatacgaagcaaagaagatagtctgccctctaggacttgagattcaaaagattcatgcatgtccgaacgattgtatcctctatcgcggtgaggagtacgagaacctggaagcatgcccggtctgtaatgcactacgatacaagattagaagagatgatccaggtgatgttgatggacagccttcgaggaagagaattcctgctaaggtcatgtggtatttccctataataccacggctcagacgtttgttcaggaataaagagcatgcaagattgatgcgatggcacgcagaagaacgtcaacaagacgggatgctgagacaccccgccgatgggtcgcagtggcgaaacattgatagaaagtttaaagactttggaaaggatccacgaaatgtaaggttcggtttatgtacggatggcatgaatccattaggagagatgagcagcggccatagtacttggcctgttacgatgtgtatctacaacctcccccctggctatgcatgaagaggaagtatgtttcaaggcccaaagcaacatggtaacgacattgatgtgtacctaagaccactggtcaaagatctcaaaccgttgtggaagaaagaaggcgtccctgtgtgggatgaggacaaacaggtggaatttaacctacgagcgctgctacttgtaaccatcaactattggcctgctcttaaaaacctatccggacagtcccaaggggtacaaggcttgcacccactgtttggatgaaactgaaagtacgtatctgaaacattgtaaaaaagttgtgtacatggggcatcgtcaatttcttgttgcgatccaccccgtccggaagaaaggcaagcatttcgaatagaaggcggaccaccataagaagcctatatttcgaaacggtaaaaccgtgttcgaaatggtgaaagatctcaaagtagtgtttggaaagggacttggcagccaacccatagccagcgaagatggtcacgcggcgatgtggaaaaaaaggtctattttttgggagttaccctattgggaagtcttggacgtccggcacgcaatcgacgtgatgcacctcaataagaacctctgcgtcaacttgctgggcttcctaggtgtatacgggaagtcgaaagatacacttgaagcacgcaatgatctaaaagatacgaaccaacgcgaggacctccacccagaaccaaaggagaaaggaagccagtacttgagtccagccagctacactcttagcaaggcagagaaggaaagtatgtttgaatgcttggagagcatcaaggtaccgtctgggtactcctctaatataaagagaataataaacacgaaggataagaagttcacaaacctaaagtctcatgactgtcacatgttgatgacacagctacttcttgttataattagaggtattctccctgacaatgttagggcaacaataacaaaattatgtgctttcatgaacgcaatatcatagaagatcatcgatccagaaagattagaagcccttcaaaatgatgtggtgcaatgccttgtcagctttgagttgatctttccaccttccttcaacataatgacgcatcttctaagtcaccttgtggaagagatcagtattctcgggcctgtgtacctgcacaacatgtttcctttcgagaggtacatgggcattctagagaagtacgttcgtaaccgttctcgtccggaagcaagcatagccaaggggtatggaacagaggaggtcatcgagttttgcttagaatttattgaagaccttcgtccgatcggggtggccgaatcacggcatgaagggaggctacggggaaaggggactcttggaaggaaagcaattatgactgtagacaatgatttattccgtaaagcacatttcacgattttgcaacaatcttctttggttgctccttacatcgaggagcacatggcgattgtaaggagcgaaaacatcgataagtcagagggctggatgacatgatgtcacattgatactttccccgcttggctacggcaacatctcatgcgtaacgcgacgattaaccaacagctagccttcttggcgaggggaccatctgggtcgatcatgacatggcaaggatatgagatgaatggatacacattttacataagagccccagacagcaagagcacgaaccagaatagtgttgttcgtatcgatgccattaggcacgatggcccaaccagcacgtattacggtgccatcgacgacatatgggaacttgattatggacctctgaaagtctctcttttcctttgccaatgggttaggctgagtggtggaggtgttacgatcgatgaaagtgggatgacagcagttgaccttgccaaggttggatactcggacgaaccatttgtcctagccaatgatgtaacgtaagttttctacgtgaaggacatggctagcaaagcaaagaaagggaaagggcccgacaagcctaagcgccacatggttctccctggcagaaggaaaattctctctcctgtgatggatgtatgtcgtcgacgccccacagcggccgcccgtcgccgccgccggttcgcccaagggcaccgccgtcattgtcgccgtcgtcattgtcgtcgtcgtctccgctggccgtcgtcgtctccgctgggcaccgctgacgcctccgctgcggccgctcgctgtatgacatacgaacagatggctgatcgcgatgatgacgaaatcatctacgagacgatacgcgagggcagcagccaatactggcatgatgatgaggggatcgaggatccctaccggtatttaaatgcggagggcaacgaggaggtcaacgaggaggtcaacgtggagggcaacaaggaggaggcctttggtagccaaagccaaccttccagtgtggagaagagggcacgcggtcagcgcggtcccacgaggaagattgagggtcggcatgtcattactggggtaggacaagacgaccgacctattgcaccggccgatgcagcccgcaactatgtgcatcacagcggctgggttgttagggataacgtccccatcaacatagtcaactggcatagaagaagggaacacggggacgacgaactcccgttcctcccagatgcgcagaaggatatgctctggaagacaatgctagagactttcacgataccagaggaacatcaggcaaaagtgcgggaatggacactcaagagaatggccgaacagttccaggacttcaagggagacctttacaagaaatacatcctgaagggcctgactcctaactttgacaatttccccaagctcacggatcattggaatgaatttgtagcttacaagacaggggtggtagggcaggcaaagatgacgaagaacaaagctaacgccgctaagaagaagtaccatcaccacctaggatcaggcggatatagcacggctatgccgaagtgggaggagatggaagcgggcttgatggagagaggtatcgttccggccacggtgaactggccgaatcgatcaaagaactggtactatgctcacggtggaacgctgaaccccgttgatggatcgtttatattcggcgatgagatacatgaagcagccagtcgactacttgacgcagtggaagcatcttcagagggcacgttctggccggacagagaaaaggacgagcttacgcttgcactacagaatctgtagcatccaggacgaatgcgaggaaaaggcctcctcccttggaaactaggattcaaggaggacagccacacgtacaagagtcggatcaggagcaagagagacacggaggcgaagatcgtagacctggaatacagggtttcgtttcacgaggtcaggatggaagaggaggtggcaaggaaggtggacgaacgactggcagcacatcggagccagtaggcgcctgtaatggtcagtccctcaggaaatcgcagctgttgcgcctctactggacaggtttgatcgcagagcatggaagcagcaccagctcatgaagaaaccacctatcccgttgacggaatcaagcatcggacatcgtgcgagctgcatattcccttcaggaacttgaccatcaaggtggcgtcgggcatggccttcccaacggatccgacagggacataccattgcaggccgattccacctgggtaatccaagatcgaaatcaagcaagtggaagccacctacgaggatctcgagttggagatacctggaggggacggggagacgaaactaggagacacaagccatgccatcatactatggtgcaagcgctacatcgtgtttcccgatgctcgatcccctcctcctgcaccatcgtctccggctcctccacctcctgcaactcctccggctcctccgcctcctctgtctccgcctgcaccgtcttcgcgtgctcctctgcctgcaccctccaagactcgccaagctgcaccacctcctccgcaggcaccttccaagagtcggcaagcagcaccacctactcctgcaaagtcaaggtcccgccaaccttctcctgcaaagacgaaaaggccgacgaagaaggccaaagttgaaccacggccgactccctatacgaagccatacttgtgcaccgacgaggaggttgacgccacagtgaaagaggacgtgaggaagcacttcaagccttggagttctgaaaagaagattcctatagacccgaagaccaagaagttcttccaaggcatgagcgcacctgcagaggagaaaataggactaacagactatgagcgaaccgttaagaaggctcacgacaagtccaaaagacaggccaaagcagtcccgcagcttggagatcaaccacaacacgagcttgatcccggtgacacgtttcttacacctgaacaatggcaaataaaagtatttttgaaagaaaccggactatcctttaagcaattgacggcgagaaacgacgcagacatcccagtggccgaagttaaataccagttcaagctgggtgaactgcttgtcaagcctgatcaactgcagactctctccacacagttgcacaagttccatgagtggtacatgcaagaatcagctaaaggtagaacgatgttcggagcaaaggttaaaaacgctgatttcttcctcggagatgatgttgtatggatccgcttcaagaaaatcttcgacgtttacaatcttgacgccctcgacgtttctattctcagcacatggtttttaatggagattcaaaaggcctgtagggagggtactttcaatacttggtgcatagaccccagcaagattaacacgaggatgctaacagacttcgagcgagacacagtgaaaaatcttgtccacctcctggtgcagtagagtacaaagacgttcatacttcttccgtacaatacttcattccactgggtccttgttcttttcgacctttcaacatgcatggttcacgtgtacgactcaatggataaagacgaagaagtttttgaccagctgattcgagcgatagatagggcatgggcaaggttccgtagaatggttcccgggacttggaacgaaaaacttggccggaggttcaaatttccagttattagaatgaaggaagatctcccccacgaggtttttatcagggctgttcaagaacaactgatgggatttatcaacgaccaggttcttgatccggcaggtgaattctactacaacggaggcacaattcataccgtggaaccgccacgtctctcgcccacagtcgcccgtca

SEQ ID NO: 20540 - DNA, 879 bp, Oryza sativa
  unsure (1)..(879): unsure at all n locations
  Clone ID: PAT_MRT4530_25898C.1
gttttggggccggaattcccgggtcgacccacgcgtccggaaatcctgaagcttcttcttcttcttccttcctcctcttgctctcttgctcttcctatgctagcactctccatgctcttcttgcccttgtagcattggctccttggtttccatccatggatccacgctaaatgcattgcgaggctgcaaattggtagcattcccttccccgttgcatctgctgcaactatgtaagcaggagtgtctgatttgacacgcctgaatacagcttctcagatcttcagttttgttgtttgtctgagaaaaggagagagagagaggcctcttttgggtccaagaagagaaaaatggaggagagcttcgtgcccctccgtggcatcaagaacgacctccatgggaggctccagtgctacaagcaggattggaccggaggattccgcgccggtatcaggatccttgcgccgaccacctacatattcttcgcttcggccataccggtgatatcgttcggagagcaattggagaggaacactgatggtgttctgacagcagttcagacattggcatccactgcactttgtggcataatccactcctttcttggagggcagcctctgctgatcctcggtgtggccgagccgacggtgctcatgtacacattcatgttcaactttgccaaggacaggcctgatcttggaaggaggctgttcctcgcatggaccggttggngtttgtgtctggacagcaattttgctgttcttgctggcgatactaggcgcgtgctcgatcatcaaccggttcacccgcatcgcgggtgagctgtttgggctcctgattgcaatgctcttcatgcagcaggctatcaagggggcttgttga

SEQ ID NO: 20541 - DNA, 1847 bp, Oryza sativa
  Clone ID: PAT_MRT4530_25899C.1
atggatcggcaatggatgcgcgcggactgacggtcaaaagagttttttgatggcttgcataattttctgaaagtggcagaagctaacaagcagaataatggttttatccgttgtccaagcactaagtgcaaaaaccagagagagtattctacagttagaactattcatattcacttgtttgagacgggcttcatgccgagctataatgtttggacctcgcacggggagcaaggggttcgaatggaagaagatgaagtagaagacgagaacattccggactgggcccagtacgttggatttgaaggaaatacaacgtgcgaggtggaaggggctgacgttgaagatgatcttggtcagatgttacaggacatcaaggaggattgtgaaagtgaaaaggaggctcagaaattagagcgtatgttagcggatcacaagacgccattgtaccccggctatgaacaggggcacaaaaaattgggtacaactctggaattgttgcaatggaaggccaaaaatggtgtcagtgacaaggcatttggcgagctattgaaactagtgaagaacattctttcggaggaaaacaagttgcccaaaacaacatacgaagcaaagaatatagtctgccctctaggacttgaggataccaaacgattgtatcctctatcgcggtgaggagtacgagaacctagaagcatgcccggtctgtaatgcactatgatacaacattagaagagacgatccaggtgatgttgacggacagccttcgaggaagagaattcctgctaaggtgatgtggtatttccctataataccacggctcagacgtttgttcaggaacaaagagcatgcaagattgatgcgatggcacgcagaagaacgtcaacaagacgggatgctaagacaccccgccgatgggttgcagtggtgaaacatcgatagaaagtttaaagactttggaaaggatccacgaaacgtaaggttcagtttaagtacggatggcatggatccatttggagagatgagcagcggccatagcacttggcttgttacgatgtgtatctacgacccccctggctatgcatgaagaggaagtacatcatgatgttgattgttattcaaggcccaaagcaacctggtaacgatattgatgtgtatctaagaccactggttgaagatctcaaactgctgtggaagaaataaggcgtccctgtgtgggatgaggacaaacaggtggaatttaacctacgagcgctgctgctcgtaaccatcaacgattggcctgcccttagcaacctatccggacagtcaaacaaggggtacaaggcttgcatccactgtttggatgaaactgaaagtacgtatctgaaacattgtaaaaaagttgtgtacatggggcatcgtcgatttcttgttacgaaccacactgtccggaagaaaggcaagcaccgtaagaagcctatatttcgaaacggtaaaaccttgttcgaaatggtgaaagatctgaaagtagtgtttggaaagggacctggaagccaacccatagccagcgaagatggtcacgcagcaatgtggaagaaaaagtctattttttgggagttaccctattgggaagtcttggacgtccggcatgcaatagacgtgatgcacctcactaagaacctctgcgtcaacttgctgggcttcctaggtgtatacgggaagtcgaaagatacacttgaagcacgcaatgatctaaaagatacgaaccaacgtgaggacctccacccggaaccaaaggagaaaggaagccaatgcttgagcccatccagctacactcttagcaaggtaaagaaggaaagtatgtttga

SEQ ID NO: 20542 - DNA, 589 bp, Oryza sativa
  unsure (1)..(589): unsure at all n locations
  Clone ID: PAT_MRT4530_2589C.1
aggngggggggccgcatttttnatcccttnnggatgggnggggaggccccngggaangctgggcttgcgcacaanggggttggtnttggcacncnnaatccagtgttttgaattgggagagnttngacggcgtggagtttaanatnantgaaagtggggggtcacnatccccaaagtngtcccgttggagcccangtgcaggccgcgggaccccatgggtggtgttttttgcgagntnntttgaatattttttggcggngtttgcattttcaggncgaaatnatgtattgnaagcncccaaagtaagtagcaaataagctttttgtgngcanananataananangtgngcttgtaatgtggnataaattanangtagnggatttggaagngngngantgcgctancnatngctttttgagagttgtgttttacagttttagngnggnaccnanttgtatgnangtgcnataatcangtataaagnataattgtacantccaggtatttcnaaaaaaaaaaaaaaaaaaaaaaaaaaaaaaaaaaaaaaaaaaaaaaaaaaaaaaaaaaaaaaaaaaaaaaaaaaaaaa

SEQ ID NO: 20543 - DNA, 2188 bp, Oryza sativa
  Clone ID: PAT_MRT4530_258C.1
ctctaccggcatccacacatgcattgattatcgacagttaaatgcttccactgtcaaaaacaagtatcctatcccggtgattcaagatttgctcgacaagttgcagggagcacaatacttctcaaaaaattgacctgcgctctggctaccatcaaattaggatgcacccaactaatatttataagacggccatcagcactcacatgggtcattttgaataccttgtcatgctctttggtcttacaaacgcccctgccacatttcaagctcttatgaacactatattagccccacacttgcgcaaatttgtcttagtcttctttgatgatattctcatatatagcaattctctctctgatcatgtgactcatgtggatatagtgctccaaattctgagacatcacctctctgctaaacctagtaaatgtgtttttggacagcagcaagtggagtacttaggatacattatcagtaatctgggagtggcaactgacagtaataaaggtgcatgctgttgcagcttcgcctgtgcccatttctgtcacagaacttagaggattccttggattagctggttattaccggaaatccattaaggactttggcattatttgtaaacccctgttcactgcattgaaaaagaatggatttgtctagaaagaggagcaacagcaagcctttgagactatcaaacttaaactggctaatgccccagtgctagccatgcctgatttctctgagccattcattttggagacagatgcaagtggaactaggattggggctgtcttgatgcaggggggtcagcctctagcttatattagcaaagctactgggcctacagcagcagcactctctacttatgataaggaagctcttgcaatacttgaagctctcaagaaatggaaacactatttttgtggaacattactcatcatcagaacagaccaagctagcctgaaatacatcaatgaacaacgcattacagaaggggtccaacataaactactcatcaagctttcgagctatgattataaaattgaatacaaaaaaagcaaggaaaataaagctgctgatgctttatctcaggtccctcctaatggccagttgtttgcaaccactctgattattcctactttgataactaatgtggtggacagttatgccacagatactaaatgccaagaattggaatcacagctcaggatcaattcccaagcccaccctccctatacactaactagaggtattttgaggtataaaaatcaaattcttgttgagagggcaacttaccagagagctaaacaactcttctattggccgggaatgaaaaaaaaatcatctattttgttaaacactgcccagttagaagaacaaagctgtgcacaatttggcacttgggctgttgcagccacttcctctccctgatatggcttggacccatattactatggattttgttgaaggtcttactaagtctgagggcaaagatgttatttgggttattgtggacagacgcactaagtatgcacactttgttgccttgagccaccctttcactgcagaacaagtcttaacttagtttatggaaaactattacaagctccatggaatgacatcggtcattgtgggtgacagggaccgaatctttactagcaacacatggaaggatatttttgaggaagctggagttaaattacattttagcagtgcgtatcacccacaaaccgatggttaaaccgaaagagttaaccaatgtttggagaattatctttgttgcatgacgttcactaaaccaaagaaatggaaatctatgttagcacatgctgagtgatggtacaatacaacatttcatactgccttggggatgactccctaccaagctctttatggagtacctccacctctattggctgaatccctgcttccaagttctccttttgctgatgcccggaacaaagaagaagaaagagctgttgttactgttgctgttaaatctagcctcctcaaagctcaagctcgcatgaaacactttgcagatatgcatcgtagtgaaagagtacggtaagtgggtgatatggtttatttaaagatgcaaccgtatcgccacacttccctaggtttacattcttccctgaagctgcattgtaagtactatggtccatttcgagttctggaacgaattgga

SEQ ID NO: 20544 - DNA, 276 bp, Oryza sativa
  Clone ID: PAT_MRT4530_25900C.1
atggccgcgacgcttctcggtgaacaccatccggcgggcatggtaggagcttgcgtcgccatcgccgtcgccatgggtgtgcccaatatgggccccactgtgagcatgtcctcctcgtctcgctctggcggtggcgcgtcgtcgcgatcacagatgcggcagcgggcgagcctgggaggagtggcggtggcgatggcgagcaagtgcaggaggagtgcggcagcgggcgagcgccgtgacgacgggcggagcggcggcagcaactggcgaggttga

SEQ ID NO: 20545 - DNA, 2040 bp, Oryza sativa
  Clone ID: PAT_MRT4530_25901C.1
gtggatcggcaatggatgcgcgcggactgacggtcgaaagagtttattgacggcgtgcattattttctaagagtggccgaggctaaaaagcagaataatggttttatccgttgtccatgcactaagtacaaaaaccagagagagtattctgcagttagaactattcatattcacttgtttgagacgggctttatgccgagctataatgtttggacctcgcacggggagcaaggggttcaaatggaagaagatgaagtagaagacgagaacattccggactgggctcagtacgatggatttgaaggagatacaacgtgcgaggtggaaggggctgttgaagatattgacgttgacgatgatcttggtcagatgctgcaagacatcaaggaggactgcgaaagtgaaaaggaggctcagaaattagagtgtatgttagcggatcacaagacgccgttgtacccaggttgcgaacaggggcacaaaaagttaggtacaactctggaattcttgcaatggaatgccaaaaatggtgtcagtgacaaggcatttggcgagttattgaaactagtgaagaacattcttccggaggaaaacaagttgccagaaacaacatacgaagctaagaagatagtctgccctctaggactggcggttcagaagatacacgcatgtccgaatgattgtatcctctatcgcggtgaggagtacgagaacctagaagcatgcccggtctataatgcactacggtacaagattagaagagacgatccaagtgaagttgacggacagccctcgaagaaaagagttcctgcgaaggtgatgtggtattttcccctaataccacaacttatacgtttgttcaggaacaaagagcatgcaagaatgatgcgatggcacgcaaaagaacgtcaacaggacgggatgctaagacacctcgccgatgggtcgtagtgacaaaacatcgatagaaaagtttaaagactttagaaaggatgcacggaatgtaaggttcggtttaagtacggatggataaatccattcggagagatgagcagcggccatagcacttggcctcttatgatgtgtatctacaacctccctcctggctatgcatgaagaggaagtacatcataatgccgattattattcaaggcccaaagtaatctggtaacgatattgatgtgtacctaagaccactggttgaagatctataactgttgtggaagaaagaaggcgtccatgtgtgggatgaggacaaacaggaggaatttaacctataagcgccgctgttcgtaaccatcaacgattggcctgcccttagcaacctatccagacagtcaaacaaggggtacaaggcttgcacccactgtttgcaagaaactgaaagtatgtatttgaagcattgtaaaaaggttgtctacatgggccatcgtcaatttcttgctgcgacccatcttgtccagaagaaaggcaagcattttgatcagaaggcggaccaccgtaagaagcatatatttcgcaacggtaaaaccgtgttcgatatggtgaaagatctgaaagtagtgtttggaaagtgacctggcagccaacccgtagccagcgaagatggtcacgcggcgatgtggaagaagaagtctattttttgggagttaccctattggaaaatcttggacgtccgccacgcaatcgacgtgatgcacctcaccaagaacctctgcgtcaacttgctgggcttcctaggtgtgtacgggaagtcgaaagatacacttgaagcacgcaatgatctcaaagatatgaaacaacgtgaggacctccacccggaaccaaaggagaaagaaagccagtacttaagcccagccagctacactcttagcaaggcagagaaggaaagtatatttgaatgcttggagagcatcaaggtaccgtctgggtactcctctaatataaagagaataataagcaggaatgataagaagttcacgaatctagagtctcatgactgtcacgtgttgatgacttcgggtttatcgagagtaattc

SEQ ID NO: 20546 - DNA, 423 bp, Oryza sativa
  Clone ID: PAT_MRT4530_25902C.1
gcacgagggcagcctgcaaaatttacatttcttgaacctttcacgatgtggtgttctccaagcagtgcccaaaaatattggtaacctttcaaatttgttgcacctgaatttatcacaatgcactgatcttgaatcaatcccaacctcaataggtcgcattaagagcttgcatattctggatctgtctcactgtagtagtctgtcagagtgaccaggatccattggtggtcttcatgaacttcagatactcattttatcacaccatgcaagcagtttggcattgcctgtatcaactagtcatctcccaaacttgcagactttagatctctcatggaatcttagtctagaggaattgcctgaatcaattggcaatcttcatagtttgaagaccctgatcttgttccagtgctggagtctacgtaa

SEQ ID NO: 20547 - DNA, 370 bp, Oryza sativa
  Clone ID: PAT_MRT4530_25903C.1
aaatattattggtggtttttatcttatattttttatattttatttttttttttatatataaaaattttatttttttcattttaggctaaggggaaaaatatcatttatgtttcattggcaaacgaactaggggaaaaaaagaaaagaaaaaggggggaaactaaaaattaaaaaaccccaaaacacaattttcacccgaaaaaaaaaaggggtggccctacgaccagtcaccccaatttagggatacacgacgtgaaaaggccctaaacatgtgacccatgcaccataaaaaggaccagggcacgcaggtttttttccctagcaaaaaaaaaacaaaaaatgctttataaactacaaaaatggggtgaaa

SEQ ID NO: 20548 - DNA, 285 bp, Oryza sativa
  Clone ID: PAT_MRT4530_25904C.1
atgcgactcctagacgacctcaccaccatattcggatcaaggacatcctctccccgcaggtctcgatctaatctgactttggctcatattgaatctggctccagggaggtcggtgttatcttccagccactcggatcttgctcatctaccgagatcgccagctatctcagcccttcaagcaatggctcttgtgcgaacaccgagaccatcaactacagcgacgtcgacgatgagtacgacttcgacaacttcgcttgctacgacgattactatggtctactatga

SEQ ID NO: 20549 - DNA, 945 bp, Oryza sativa
  Clone ID: PAT_MRT4530_25905C.1
atggcggcgggaacgtcgtcgtcgtcgggaggcggatctgggccgttggtggtgagcaacggcgtgctgctcgccgcggtcatcttcctgttcatggtcgtcgtcttcgtcttcctcctctacctctacgccaagagatacctcggcgcgaacccgctgctcgcccccgtctcgccctcctcccgcttcctcttcctcgacgcctccccgttcccgcgccgcgggttgccggcggccgcgctgcgggcgctgcccgtcacggtctacgcgaagcccgcggcggcgcgcggcgaggaggcgctcgagtgcgcggtgtgcttgtccgaggtggccgacggcgagaaggtgcggatgctgcccaagtgcgaccatggattccacgtcgagtgcatcgacatgtggttccattcccacgacacctgcccgctctgccgcgcgcccgtggggcccgacgccggcggcgaggggctgccgcgcgtgccccggggaggaacccggcttgccatggactttcccccatgttccccccccaacgtcctcttctggggcaccgcccacgacgacgtcgccaacgccggtgaccgccacccgttccaccccccgccgccgccgccgcctctcatggccgcgccctccacgagctcctcggcgtccgcgcgcaggaaggagagcctcgtcatcgacatcccgtcgcgctctgccgccgccgccgcggcggactccgtcacgtcgtcctccgcctcgacgccgctgccggcgagcaggatggcggacgacatgaggtcgccggtgtcggcgcggctgcggtcgctgcgccgcctcctcagcaggggcaagcaggccgtggtcggaccgtccttcagcccgcgcggcggcggcgacatcgagcaggggctcgccggcgctccgccgaagacgcccaagacgccgccgccggcgaactga

SEQ ID NO: 20550 - DNA, 516 bp, Oryza sativa
  Clone ID: PAT_MRT4530_25906C.1
gggggcccaactaatcttgaaattgaccaacgttggaggacggaagctggcaaaacaaaacaaaaaaaggggggggggggaaaacatagccgggggcgggggcctcggtatctggtgaattcccccccaggagcgccgctaaaggaaaatagcaccaaaaaaaataagcccgaacaaatatgggacggaaagttggtcaggggccccatcgggttcatgccccggcaaatttttcacttcatcgagcttcacttatcgttcacgagggggctggaaaaaggggaccccattttccgagccacaaaggcgacggggccccccccagccatgctcttgggggccctaggggttacataacaacccccctgggccagatttttatcaacaggggcacggacaactggggcccccacccgggcggggaggggcccgatccttgaaattgagggaaaaaggatgccttttcgcggccccgggggtccccccgggaattccggaccgggccctgggggcgga

SEQ ID NO: 20551 - DNA, 630 bp, Oryza sativa
  Clone ID: PAT_MRT4530_25907C.1
aaagggaaacatattacctttcttcattgctagactactaggtccaacatgacaagtcagtacaaaataatttgaaaggtctagcagcaagcggtctacaaaagttcatctcgttttagaaatgggaacatattgcatttcgtgaataaaaaaggaacaaactcagcctgaagaatgacaagccacatatgttgctggtccaaattgctcaggcttaaccagggaagctaatatgtcccaccgaataattgaacccaaacaggagccacatatttgatatgaactccattccgtcttgtatgtcaatggaggaaagatttgatgtccttacaaaacctccacattcgaagccgccgcttgcactgttgcacatgctcctaaatgtccaagagatgccagccgaataatgcatttccgataggaatattatcttccaataatttgcgggactagcaattcctgggcacctttcctgcacccataagcccacaagttgctcctcagatatgcttttctctagccactatacactgttatatgcatataaaaaaatttcccaataacttgtggatatgcctatacttcccaccgtgagatgcctgattcttgcagccaagctagttgctgctc

SEQ ID NO: 20552 - DNA, 488 bp, Oryza sativa
  Clone ID: PAT_MRT4530_25908C.1
ttttagggccccttttgaagatttttggcggcgcctggccgccgtccgtaggctgggttcttttaagggggcggcctttttttttttttttttttttgggaaaacttggttgtttaagtggttggattattgggccttgcacccaaaaaaggacggggtattccaaaattaaacccaaccgaccttccacaccagtaaggagggcccggtttaatgatgaaagggcaccgaccgtttttttttccgccaaaacttttccggcccaaaaagggttttttttttgggaattggtttcttattttgggggaattggccccttggcatggcctttattatgcttttccaagcagccaccaggtttgacttaaacaaacaaaatttttttattccgaatggaccaattgtccaaccttgattattaacgaaccctaggtccgtgatcaattgagcacccttttcaaatgggttatccaggatggcacccagcc

SEQ ID NO: 20553 - DNA, 310 bp, Oryza sativa
  Clone ID: PAT_MRT4530_25909C.1
tttttttttttggcaatattgctgtgtatgaaatctgtgttcaattttgctgtggtccattttggcaataatacacatactcaaggcactataacctcaaggaattcatggagcaactgccatctgaactgcacatgtatcagttttaatcaacaagaatgaatttctcaggcaaaaagaaaacattcagttcactgttgtgtgagttctggcatgcaaagcatgtttggacagcatgtcctgatagaaaaaagaacactgaattctgcacgattcttcactggctcttgttccatatatgccgaagctt

SEQ ID NO: 20554 - DNA, 1599 bp, Oryza sativa
  Clone ID: PAT_MRT4530_2590C.1
atggcggccacgtcgccactgccacggtgggcgccgacgccaagtccgtcgcggccgctctggcgctggggctggggcggcggcgccacgccggacgcccgggcggacggaggtgtcaccggttggacctcgtcgttcttcgccgccgtcttcccgtggacgaggagacgacgtgtcgatgacagatgggcgccgtcggccggcggcggagtggggacgttcgacggcgtcgaggtgccgctgccggcggcgcaggcagtttcgcttccacgggcggcagcggacgtcgtcgacgaccccgcggtgttcctgacgtgggaggacgtgcgcgtgacggtgcccggccgcactcgcggctcgccgccggcgaggatcctcgacgggatcaccgggcacgcgcggccgggggaggttctggcgatcatggggccgtcggggtgcgggaagacgacgcttcttgacactctcgcaggacggttaggacaagaaatgaatcaaaccggtgtgattttaataaatggccggcaggaaaagcttgccttcggaacctcggcatatgtaacccaagacaacgtgctcatgtcgactctatcggtgagagaagccgtctactactcggctcacctgcagctacctgacacgatgctggcgtcagagaagcgcgcccacgcggagcgtgtaatccgggagatggggcttagcgacaccatggacacgcgcatcggcggccgtatcaccaagggcatcagcggcgggcagcggaagcggatgagcatctgcattgagatgctgacacggccgcggctgcttttcctcgacgagcccaccagcgggctggatagcgccgcctcctaccacgtcatgagccacatcacccgggtcgctgccagggaagggatgactgtcattgccgctgtgcaccagcccagtggcgacgtctttgacctcttccatggtctcttattgctagcctatgggaggatggtattctttgggacagtttctaatgctactgagttttttacccaaagtggttttccatgcccacacctgaggaacccatccgaccacttcctgagaacaatcaacaaggactttgatgagggaactatggaaagctccaaggctaacagaaaaacagcagctgaagcaacaaatattctaacaaatgcataccactccacttattcagagaaaacagccaatgagatagttgagatgaaagggatggagttacagagagccggagagcaagagagttcaggctctagaacccctcttcctctttctcttctctacgagctcagatgcaacgtgggagcacggttgtctgccgatgacgtgaccggcgtcagaccagtcacagaccggtcattcttgtccaccgcgcgtcagtttagcatgccgcacgtctgcccttcttcatacaatgacttccttgccatggttgcgatgaagcctggaatgaatctggccgggactgacataccaactccaggagttagcacgccggctccggccagggacgagtgcctggaggctctcatcattccgacgggacggggcgaggcgtgtgacaggccggggcgaggcgtgtga

SEQ ID NO: 20555 - DNA, 1098 bp, Oryza sativa
  Clone ID: PAT_MRT4530_25910C.1
tcagccaccgattccttcgtgaggagggcaaagatggtggaggacgacgccgccgctgccgacaaggccgagaggcgcggaggcgtcgacggccgcctctccccatctgctgccggtggccagaagagaagtggatagaagaaagaaaagaagcgccgctgaccccagcaacatcctctccctttctctctcgccggattggatcgaatcattggccgccggggaagcacctgggcacggcaggtcggtgcggcgggcgtgggcggcgggggaagagctgggcgacggtgacggggaggagctggcgtcgctgtccgggcgccagccggagacgaaggagacgtgggttcctgcttggcatcgttgctctatttgctcccaggctatagagggaaagggagagggtatggcggctgctcccatggagcagtgatggagcatgaggcgcgccagctcgtcgggtgcgaggaagaaataaaggttgcaatagcttacaaattagaaacaataattcatgttattgttttctacttatatgataagtacaatgcctacttagaaatcacatcttcttcaaaatctaatctccagttcattgagcatcgacgaatgcgccatcgtcgagaatgtcgatgccatatggttgtggtcaaggttttgctggcagttgcattcatcgatatcgtggtgtttgtggtgggcggccttggaggattgtcaccaccggcggatgggcaggcagcagcaccggcgaaggcgccgccacggggattcatctacattgacagcaacggtgatgacgacggcgacggccacagcgacggcgacggcggaagggcggcgaactacacgcgcggcgatggccggaacggaagggcgaatagctggattacggctccgaggaacgaggaacgctaacgacgtgattagggtagagaatacaatacaagttcgtagggcaccagcactgaggattggggctctgccccagagaatttttttcccgcttccgtgccgtgtgcagccaatggcgcgccgccgccgccggcgcgggcgtggtcttcgtcccccgtccctggctcgccgtgtacgcgcccg

SEQ ID NO: 20556 - DNA, 364 bp, Oryza sativa
  Clone ID: PAT_MRT4530_25911C.1
agcggttttcttctcgaaaacaataatgcctgctttttgattgccaatgagggtttcatcggggttttagccgatgagttatctagacattgcatcggcttataaggattatatccaattggtttctattggattatattattgttttgttacattatcattagtcgattgtctttatttacattaagtgtcagattctacatcaaccatatagccgatagctgaaaatcctatcggctggaattagatcaaacggattggcacgcctgcatctcatcaaactttggacctacactggagctaaacagatctcccagaccgttgtattcgtcgacttagttcgcgcaacacaattccggcacca

SEQ ID NO: 20557 - DNA, 837 bp, Oryza sativa
  Clone ID: PAT_MRT4530_25912C.1
atggacgccgccgccgctgccgagatcgcagccaagctgcgcgtactcggcgtctgcgcagcctcgacggcgatcaccttggccgccgcagccgccgccgccgccacatgcgagccgccgcgctgtgccctcggcaacagcatgtggtactactactacctcgtgctctcggggacattcctcgcagggatgatcctgatcggcgcttccgtctgggtgtccgacgacgacccacgacggcggcggggttgcgccggcagcaagttgctgtacgccgccgccccgccgctcatcgtcgccgtcgtcggcctatccttgtggcagctctacactgccgctgctgccggccgggtgataggttttcattattttgtttctatgagagagaagcaaattaaagggaggttaccttaccatttcatggcggcagaagcagaagtattggtcgttgcagcacgcccggaagcgtgggccggcgctccggcggccaatcggcgacggcggctgcggaaagtcgcgtcccacgggacaacacctccgaagaatgtgttttccggggcagaagatggtggacatgactggaacgtggctgctagtgtttcggccttggagaagagagaagactgggcggcgagctccggtggcgaacgtgataagagaaatagagaaggtgatttatttaggctcctctgctcattcactttgaaggggaggaggactagaggtggggaaacaaatggcactgtttggtggagcttgtcccagctacagcttttcccaaaagctgcttctactagaagctgccccaaacagtccacagcttctgagaatctgtag

SEQ ID NO: 20558 - DNA, 1549 bp, Oryza sativa
  Clone ID: PAT_MRT4530_25913C.1
ggggtagaacttttaaaagatgccgtatatatatatttgcaccatgccataccgtgaagaacagggtgaacgaagaaaaaaaagagagaaggactattctatgtgttgatatacctacagtttttctttccagttgtgagaaaatttcagcgggcggtgagcgtcaacgccccaaccacctcgaccgatatatagaataataacgcaactccactgtggttggctagcccccacgtttgccacggccacatgacgattgatcgatcgaagcgattgcgccaacttgcacccaacgaaccgcgcgctggctccgtatactcccccttgcctagtcaacgtacgcgccgcacaccttcctgatctcgccgttgtcgccggtgagcacctcgatcctccccatgttggtcatggcctccgcgtagtccctgaagtactcgtccgtcgaatccgcggacgccatcctctccacgtactgcttggtccacttgtcattgaggagggcctggtcggagacgaagaggcccctgtttctgtacacgtcccggtagtagctcaggtcgaacgtgtacgggctccccgggtccatgtccacgtacgtcttgtcgaaagggtcgccggccacgcacgccttcctcagctccggcgcgtacgccgtgttcagcgacgggtcctgcctcccttccccgctgtagttgtacagcctgtcgcgcgcgaacgagccgcactgcgccctccctatcgtgtggctccctgataggacgacgaggtccttccatcccaggttcttgacactaaagtagatcttgaggtcgacaatgttggagccgggcggtgggagatcgttgtcggcgtcaatggtacaggacaccttgccgtcccggcgtccggtctccacctggtaccgtgggccgttgctcaggaacacggcgtcccgcgcggccatgacgatgatgtccgcacacgacacggtcatcgggcactcatcttccagcttggccttgatcctttcgatctgttcgtagccgcggaggctgtagctcgagttggcgtccctctccccgattttttcccgcgatttcagcatgatggacgcgtcacaccccctgacgaagcagtcgtggagcatgaaccgcaggagcgccggcgcgagggtcctgtcctcctggacgatctccctcatctcggcgagcaccaggtcctccgcctgtgggcacgtctcgtggtagaacccgatggcgagcccgtcgtatccaggcaccggcagcccgctgcccgaaacggcggccgcggtggcgacgacgatgatcaccgccccgacgaggacgcccaacaatgccatccggccggccgaactgggccggacaacgaacccttcctccggatcgaattcgtcgtcgacgacgacgttgctcaccacgaattaaacaaagccgccgctagctcaagagcgttgaaaagatctcgagccggcagaaatccaggaggagaagaaagaaagacggagctggaatgggaactggacttaaaaattggctgcattccagaccga

SEQ ID NO: 20559 - DNA, 144 bp, Oryza sativa
  Clone ID: PAT_MRT4530_25914C.1
atggtcatgcaagcgtttgaggatacctttcgctcacttgctatggtcagcgacaacgagaaggtcccgatagctgtggtcgagaatgtgctgaaagaggtgaaggtttctgccgatggatcgctgtggtcgagaatgtgctga

SEQ ID NO: 20560 - DNA, 282 bp, Oryza sativa
  Clone ID: PAT_MRT4530_25915C.1
atggagtgccatcaaatatacgcaacatgtcgaacatgtatcgaggttgcggaaagaccagttgctcagcaggaattactcgcggttgcaggcgtcgatgaaggcgcgcatcacgcaagcggagaggaagacgagccatcatggacgaacaaggagcagtcgcgcaaagcgcttcccaaaaaccttattgccgccttctcccagtgcaggacgtcgaaggtagaggttccggagacctactctcccgatcgccggtgcacgccggcgagcgggatggagtag

SEQ ID NO: 20561 - DNA, 269 bp, Oryza sativa
  Clone ID: PAT_MRT4530_25916C.1
aggcgcacggactgcacggggagggagcattgttacgcgactgcccgccatgatgtctcctgagtgcgccgccgtcgccctgctccatcccgccggagtcgccgccagcaacagagctcgccggcgtgtactgatgctcgaccaagaccggccgttgtgggggactgaggtgcgacgccgccggcgccgacgatgatggagcctcgagactccggcgaggtgcagcaagatgtacaaacccggctaaagagagggatcttctgaaaata

SEQ ID NO: 20562 - DNA, 318 bp, Oryza sativa
  unsure (1)..(318): unsure at all n locations
  Clone ID: PAT_MRT4530_25917C.1
gacctttntccaagaatcaaatgatgatggtnacctgcagaatgttgatgaggaagaggaatatcgtaagttnnttgcagctgtcctatctggtggagatgatggcacacaggcatgtcagggagatgaaaaccaagatgaagatgagaatgatgctgattttangctcgaaattnaggaggccctagaaagcnatggtgatgaaaatnccgagaactatgaagacacaaatnttatgaaagagaaagacggccgtagggtcaagaccaggaaaaatagacccgtgcacagagttngtcagggngcagccaatgaacc

SEQ ID NO: 20563 - DNA, 180 bp, Oryza sativa
  Clone ID: PAT_MRT4530_25918C.1
ctacacgaggcctgggtacgcaaagaaggcccaccagtcagtgcccaaggactggtggacggaggacgtgtcggagctgcctgacccgctcaaccacgccgccgccgccgccaccgccaacggccagagctctgagctggagacggcggcggcgaagcagcgtcgcgtgctggagaccat

SEQ ID NO: 20564 - DNA, 159 bp, Oryza sativa
  Clone ID: PAT_MRT4530_25919C.1
atggagcggggcgggccctgcgacggcctctgtcgcttccggattcacctaggcacaagaagggactgcccgctgccttgcgaggagtggggtcttgctctattttccccaactccagagtatgagtatgtgtcggatggtggtttctccgaggagtag

SEQ ID NO: 20565 - DNA, 222 bp, Oryza sativa
  Clone ID: PAT_MRT4530_2591C.1
aaaaaaaatatgtgggcccaccttccatatatttgattcacatattcctcacccaacaacatataatcctagcaaatacctcttttactttaaatcaaaaaaaaatcattttaaacaaaaacaaaagccaaccacccccttttaaattaaaaaacttttaacaaactttgaacacaccaaacaaggttggagacttcttcttattaaagattaacaattaaa

SEQ ID NO: 20566 - DNA, 2408 bp, Oryza sativa
  Clone ID: PAT_MRT4530_25920C.1
tatcttgacaaaggaagagtttgtgaggattttttttcgatcatctgcagaaagatcgctaaactctcagatagctgcatgtatgagagcttccttatcaaggtgctgatcatggcaagcctgcatttgaacactgaggccagcctacataaatggacagagggatgaggccaagttggcaacatcttgtgcagaaaaaggagaacagcaaaaggagaggaagagcaagtaacaaagtcatgcctatatgatggggccttgagctgctgctgctgcttgaggatatcaagaagttcttcaccatgaagtacatgaagcttgggacaaagcctgacacattctacaccgaagaagctgtcaggtctgtactgtcagacgtacctgctgatctcatcatacatgtcaacaacacaaagtatcagctacataagctaaaattctgttcccactctgaaaatgctgatacagaaggcactggttgccatccgtattatcaattccccctcctcctcaagtgcggcctcctgcagcgcctctgctccgatgacgacggcgtcgacggcgtcgatgcggcgccggtgccggtggcgctgcacgacatccccggcggcgaggaggcgttcgagctgtgcgccaagttctgctacggcatctccatcaacatcggcgcgggaaacttcgtggcggcggcgctggcggcgagattcctccggatgacggaggcggtggccaaggggaacctcgtcgccaagctcgactccttcttcgactcgtgcatcctccagggctggaaggaccccatcgccgccctcacggccgcgtggcggatctccggctggtccgagagccgcatcgtccagccctgcgtcgacgccatcgtcgagaagatcctcacgcccccctccaaggttacgtggtcgtacacctacacgaggcctgggtacgcaaagaaggcccaccagtcagtgcccaaggactggtggacggaggacgtgtcggagctggacatcgacgtcttccgctccctcctctccaccgtctgcgccgcccgcctcctcccgccgccgttcatcggcgaggccctccacgtctacgcctgcaagcacctgcctgacccgctcaaccacgccgccgccgccgccaccgccaacggccagagctctgagctggagacggcggcggcgaagcagcgtcgcgtgctggagaccatcgtcaccatgatccccggcgacgccggcgcggtcaccggccgcttcctgctccggctgctccgcgtggcgagctacgtcggcgcgtcgccgtcgacgcgcgcgcagctggtccggcaggccggggcgcagctcgacgaggcgagggcggtggacctgctcgtcccgatgccgtcgtcgtcggacccgccggcgtacgacgtcggcgccgcggaggccgtgctcgagcacttcctggcgctgttccagcggccggcgccgcccgacgagcggcggcggatgagcgccgccatggagaaggtggccaggacgttcgacgagtacctccgcgccgtcgcgctccacgccgacttccccgtcggcaagttcgtcgacctcgccgagtgcttgccggacatcgcccgcaacgaccacgacggcctctaccacgccattgacacctatctcaaggagcacccggagctgagcaaggcggacaagaagcggctatgccggatgatcgactgccggaagctgtcgccggacgtgcgggcgcaggcgatctccaacgaccggatgccgctgcgcaccatcgtgcagctgctcttcgtcgagcaggagagggccatgggcggcggcggcgcaagcggcagcaacagcgccgtcgcgcccgacgccatcgcaatgctcgccgcaagaaaggagaaggaggacgagccgccggcgccggccgctgaccacaagtcggacgtgcaccggccacgcggcgaccacggcgaacgcgcccgggcggacggcgcggcgatgacgaggtcgctctcggcgtccaccaccaagacggccggcgctgccgcgccgaggacggcggagagtagggggagcaggatgaggaacaagtaaatcaatggtggtcgcccatgaatggatgacattcttgtttcttctgatcccttgcttgaaatttgttgatacttgtgattcttgatttttttttcttttggtattctttttctattttcttcttcattttgatttcagtgcatcccatttttggtgggagatgtgagggccatattgttgaaagagggaagagaatgaggggtagattttgtaattaaatggatgggggataataagaggctataatcatacgacctagcatagctcacaaatcaaaaaaaaaaaactcgagactagttctctctctctctctccctcgtg

SEQ ID NO: 20567 - DNA, 419 bp, Oryza sativa
  Clone ID: PAT_MRT4530_25921C.1
ttgtttttttttttttttttgttttttttttttttttttttttttttttttttttttttttttaaaaggggcgggaagccccacaaaaataaaatttctcaccccatttaaagggggcaaagaggtcccaacgcagttttttaattaaaaaagactgcccaaacaaaccagggggtttataatagcagcaaagttttttaacccgcaacattaaagagaccctaatgcaataagaaaacttgaagggggggtcactagcaaatttcgggcttaggcgaccccctcgatcttggggccagcacccttgccccctggcggggggggatggtccttggccatgccgccggccatgtccccgccagggccctgggacattttggcaaaaaagggggggaaaatgccctccagctccttaattt

SEQ ID NO: 20568 - DNA, 363 bp, Oryza sativa
  Clone ID: PAT_MRT4530_25922C.1
atggtgttaggcccttcgcagtgcaccatgctggtgagttacttcttgcctccacctaggctgcgtgatgccgtggagaagagagggtataggccctcatcccttgacataggcagatgccgttcctcctcaaaccgccttgtcatctcctactcccgcgtcgccgacctcgccgctgcttcggggaaggagagaaaaggtggtggtgcgctagtggatctaaccgccgcttcgcccggtgtcattgtcgcttgggtcgccgcccctccgcccaacactgtctctactcgacgccttggcttcctctgcccggtgccatcgccgcttgggtcactgccgttccacccgacacaaggattttga

SEQ ID NO: 20569 - DNA, 501 bp, Oryza sativa
  Clone ID: PAT_MRT4530_25923C.1
atgcacgcgcgcggccgtttcggtcagaatgcgggtggggccacgactaccctaattgcgcacggttaccgcgaagaactacccttttcgtttcgtgcacccatcattatcttcacggcccccgcgtgggggccacactcgttgaatccgtccacgtgggacgaagaccgggcccacaagccattgaccgagaggagtggcgtcaaccctagccatctgcaaagagcgccggtagcacgcctgcacgagccacgccaagcagcagaagtgccgcgccgtcgtcgccggatcaaaggcaacattacacaagcgtctgcgtcgctctcgctccgccgttaccacatccaagcttccaaccatcggatgctagctgcactgcagcagcgagaattcatcgtcgggtgtgggcacctgtcgggtgcttcctacctggacgggggcggggacgggggaaaaccctcccccgtgtgcggggatggggatgggaacgggaaaattatt

SEQ ID NO: 20570 - DNA, 209 bp, Oryza sativa
  unsure (1)..(209): unsure at all n locations
  Clone ID: PAT_MRT4530_25924C.1
gaacttggaactcccctgaagaagccccggtcgcggganaggagtccagtcgagactcgagacagnnccgcggcatcccacccccacctacctccgacgccgccgtttttgtggtgattnatcccgccgccgaccgccgccgatgtcgtcgtggctncggangcggtgagcaaggccgtcgaggcggacggccggagcggcgtcgcccg

SEQ ID NO: 20571 - DNA, 297 bp, Oryza sativa
  Clone ID: PAT_MRT4530_25925C.1
aaaggaagcaaaccttggggggattttgttaaaataaaatttgcatccaacccaaaccctttcctttaccaaaatcctcataaaatcctttaaaggaaaaccctcttagcaaaaaaacatttttgagtatttaaacaacaagggtccaaaaaaactaatttgggttccccataaaacgctaaaaaatccatccccgttgccaaatggttacgggccattttttggtttggggccaatttttggggattcggcaggtttcccctattcggcctttttggtgggccctatattccccat

SEQ ID NO: 20572 - DNA, 213 bp, Oryza sativa
  Clone ID: PAT_MRT4530_25926C.1
atggcggtggatgagcagtgccgccgtggagcttgcctcccgccgccgccgctgagctcgcatccggcgccgctgctgggattcgccgactgcggccgcccggaatcgccgcccgagccgccgggagtcgccgcccgcgaccgcccaaactcgccgcccgtctcccactccgccctcgagtccgcctggtgcgccgccggaagaaatcagtga

SEQ ID NO: 20573 - DNA, 2268 bp, Oryza sativa
  Clone ID: PAT_MRT4530_25927C.1
atggtgcggaccaccccctgcgtcgcgctgctcttgctcctcggcgttgcttttgctgctcgatcggcgtcggccatcaccgacggcctgctgccgaatggcaacttcgaggaggcgccggacaagtcgcagctgaacggcacgagggtgaccgggcgctacgcgataccgcagtgggagatctccgggttcgtggagtacatcgggtcgggccagatgcagggtgacatgctcctgccggtgccggagggcgcgtacgccgtgcggctgggcaacgaggcctccatccagcagcggctcaccctgacgcggggaatgcactactccgtcaccttcagcgcggcgcgcacctgcgcccagtccgagctcctcaacatcacggtcacccccgagtccggcgaggtccccatccagaccgtgtacaccagcagcggctgggactcctactcctgggccttcaaggccaggcgcagcgtcgtgtcgctcatcgtccacaaccccggcgtctccgatgacgcggcctgcggccccctcatcgactcgttcgccatcaagaccctgcaccctcctccaagcaccaaaggtaacttgctgaagaatgggggcttcgaggagggcccgtacatcttccccaacacgtcctggggcgtgcttgtgccgcccatggacgaggacgactactcgccgctgtccccgtggacgatcctggcgtccaccaagtccgtcaagtacgtcgacgcggcgcactacgccgtgccgggcggcgcccgcgcggtggagctggtggccggcatggaggcggcgctgctgcaggaggtgtgcaccgtgcccgggcggtcgtaccggctggagttctccgtcggggacgccggcgacgggtgcgccgggtccctgtccgtgcaggcgtacgcgtcgcgcggcagcgtgaaggtgccgtaccagtcgcagggcacgggcggctacaagcgcgggctgctcgagttcacggccacggacaagcggacgcgggtggtgttcgtcagcatggcctacaccacgaagcccgacggcacgctctgtgggcccgtcgtcgacgacgcgtcgctcgtcggcgtccacagccaccgccggctccttctagaacagctagtggttgagagattgagccccgaggaccgccacatgaccacaccggccatgggccatggccctgtggaaactggagccgaatcttccattcgtggcggaatgccacgcctgttgccaaatggcaacttcgaggacgggccggacaagtcccagctgaacggcacggtggtgacgggtcgatacgccatactgaactgggagatctcggggttcgtggagtacatcgagtccgggcacagggagcaggacatgatcctggcggtgccggagggcgcgcgcgccgtgcgattgggcaacgacgccaccatccggcagaggcttagcgtgacgcggcgcgcttactactccatcactttcagcgcggcgcgcacctgcgcccagaaggagaagctgaacatgtccgtcacaccggagttcggcgtgctcccgatccagacggtttacaccagcagcggctgggactcctactcctgggccttcagggccaaacacagcgtcgtgtggctctccatccacaaccccggcgaggaggaggacccggcgtgcggcccgctcattgactccattgccatcaagaacctctaccctcctccccgcaccaaaggaaacatgttgagaaacggagacctggaggaggggccgtacatcttcccggacgcgacgtggggcgtgctggtgccaccgatcttcgaggacgagcactcgccgctgccggggtggatgatcatgtcggacacgaaggtcatcaagtacgtggactcgccgcaccacagggtgccgcagggcgcgcgcgccgtggagcttgtggccggcagggagaccgcgctggtgcaggaggtggcgaccgtgcccgggcggtcgtacaggctgtcgttctccgtcggggacgcgggcaacgggtgcaaggattcgctggccgtggaggcgtacgcggcgcgggccacggccaaggtgccgtacgagtcgcagggcacgggcgggcacaagcgcgcccagctcgagttcgcggcggtcgcgaacctgacgcgcgtggtgttccagagcttcaactaccacacgaagccggacgggacgctgtgcgggcctctcgtcgatgacatctccctcgtcagcgtacgcaagcgcgctgctcgcctgtaa

SEQ ID NO: 20574 - DNA, 433 bp, Oryza sativa
  Clone ID: PAT_MRT4530_25928C.1
gctcacaggatgctgcaggtggtcgtggccgccgccaggaagtcaagggtggcgcgtgcccgccgacgccgccgcgctactctacgagggcgacaagctggcctgcgggacgcggcggctggctcacacggagcagttcaggtggctggaccgggctgcggtggtgacaccgacgacggacaaggacgacgacaccggcagcaggtggcggctgtgcccggtgacgcaggtggaggagctcaaggcggtggtgcggctgctgccggtgtgggcgagcgggatcgtgatgtcggcggtgtacgggcagatgagcaccatgttcgtgctgcaggggaacacgctggaccctcgcatgggcgccaccttcaagatcccctcggcgtcgctctccatcttcgacaccctcgccgtcctcgcctgggtccccgtctac

SEQ ID NO: 20575 - DNA, 1573 bp, Oryza sativa
  Clone ID: PAT_MRT4530_25929C.1
cgtttatacgtttcggaacggcgtgcggcacaatcgcatgctagagaagatcgcctccaaggagcccaagaccaccgccgagctcttcaagctggcggacaaggtggctcggaaggaggaggcgtgggcctggaactcccctagcaccggcgcggcagctgcggctgcccccgaatccgttacccgctctaagcggcgagatacgaggggcaaaaggaagccagcccgctccgacgacgagggccacgtccttgcggccgatgggccctcacgggccccgcgcaaggaaaaagccaccggcgataagccgagctccaccgctccctccggagagggtcggtcggcagacaagtggtgctcggtgcacaacacttatcagcacagcctcgccgactgccgctcggtcaagaacttggtcgagcggtttcggaaagccgatgagaagcggcagaatcgacgggagggcaaagcccccgcgacccccgccaatgactggcgaggggaggccaagaagaaggcccccgccgatgacggcgatgatagcgaggatctggaattccagatacctcagggaaccgtcgccactctcgacagggaggcttgcgctcacacctcccgccgcggtttcaaggtcacgaggtgtgagcttctggccgccgtcccaactcacaaggcggcacggaaggcgcgctggtcggaggtgaagctcaccttcgaccagagcgaccatccaacaatgctcgctcggggagggaagttggccctcgtggtctccccaaccatccacaacgtcaagatgaagcgtgtcctggttgacggggaggctagcctgagcatcatctccccggctgcttttgacgcgctcaaagccccggggatgaagctccagccgtcactgccgatcatcggcgtgacctcgggacacgtggcctctgggcccgcgttggtgaagttcatggccgccacccactacgcctacctccagatgaagatgccgggccccagcggccccatcaccgtctttggcgatgtcaaggaaagcgcgctcgtctccttcctgcgggcgaactccgacgtctttgcgtggaagccgtcggatatgcccggggtccctagggaggtgatcgagcaccgcctcgccgtgcggccggatgcgcgacccatccggcagaaagtacggcgccaagccccggagcggcaagccttcatccgagaggaggtgacgtggctcctggaggccggcttcatccgagaagtcatccacccagagtggttggcaaatccagtggtcgtcccgaaggccaacggcaagctccggatgtgcatcgactgcacggacctcaacaaggcatgccctaaggatcccttccctttaccgcgcatagatcagatagtcgactccactgcggggtgcgaccttttgtcgttcttagatgcctactccgggtatcaccagatccgcatggctagggaagatgaggaaaaaactgctttcaatactcctgtagaaacctttattatacaactatgccttttggtctcaagaacgcaggtcctacttttcagcgcatga

SEQ ID NO: 20576 - DNA, 1101 bp, Oryza sativa
  Clone ID: PAT_MRT4530_2592C.1
atggcggaagaagatgacaagaagcagaagggccccgacgtgacggtgccctcgggatacttcttcgtgccgaagccggagcagctcatccgcgactacctcaaccactggatcaccggccggccgatcgaggagctccgggacatcgtccgggaagccgacgtctacggctccgacccggcgacgctgacggaggcgcatagggcgtacggccacgacggcaagtcgtggtacttcctcaccgtcgccaagtggaagggcggcaggggcggcgccggcaccgccggccggctcaaccgcggcggcttcgagggcggcggcacgtggcacaactcgcagcgccgccgcgtcatcgagggctacggcgaccgccaggcgttcgagtaccgcgcccccgggaacaagaagacggactggctcatggaggagatcgccagcaacctgccggcggcgatcaccgacgagggcatcatggtcatctgcaaggtctacctctcgccgagggccaaggaggcgacggccgacgaggaggaacgccaagaaaccaacgtggttcccgggcccaagaggctccgagaggcggaagccaccggctacgacgcgccggcgccggagacgccacagcccgacgtcggatgctcgtactccggcggcggcgagacgtctcaagcgaccgcctcgatggactactgctgctcgacgacgacacacacggcggacgacacggccaatgccgccgcctactaccacggcgacgctgatgccatcaagccagatgcttacgacggcggcgactacggcatcggcttcaacgcagacggggagctggttctctgcggcaacggccacggtggcatcgggacgcagggacagacgccattggcaatgcagaacaccaacggggagatgaccttgttctcaccgatgaacggctatggtgttggcttcaatgaggaggtgagacaagaaccacaagtaggaggtgaggtggagatggatgatttcttcaacgatttgttcgtcgacttcgacggcgccggtgatcccaatcccaatcccaacgggggtggagacagccacggccacatactatgtgaatga

SEQ ID NO: 20577 - DNA, 356 bp, Oryza sativa
  Clone ID: PAT_MRT4530_25930C.1
ggatccccgggctgcagatcggcacgagggagagagagagaactagtctcgagtttttttttttttttttttttttttcgaggtcgtataaaaatactgtgatgaactccataaagaaacactaaaaaactggatcttggtggcacgcacgcacgcacggacggacgatgcagcgagaatattgggctgcggaagcatcgaaacatttcaaaatcgagagctcatctaccgaggcgtatgcctagctctctcgcagtacaaggtcaagcaagcagcagttgctggctgctgctgcgagtgacgacgagtcgctgattcgtcgccggcgaacccggccgttgttgttacgcgcgcct

SEQ ID NO: 20578 - DNA, 4789 bp, Oryza sativa
  Clone ID: PAT_MRT4530_25931C.1
aggggaagttaccttcccatccagccacgtgactctacagtctagccctccccccacgcctcgggagacgcaggcgggagccgcggcccccgtcaccgtcgccgcaactctcagactccgccccgccgcgacccctcgcggagggaggattccacccggtcgggtggctcggcccactccccgcctccgggcggggggaagccacgtcgcgtcggggtgcgacaccgcctcacttatggcgacggcggctcgccccgaggcgcgcttcaggcggcgggtgcccttctacggcatccccccgtgaactcagggccagagacccccgtccagcgatggttagacgacgtggccaacctagtcaccactgcccagcggcagttggccgcggccggccggcccaccgctgctggtacatcgcgtacccccaccaccctctcctcgtcagcaaggaggagggcccatcggtcggccacggcctcgaggcgatccacggccccaacgtcgtcgggggcctcgggaagtcgaagacatcacgacggcctctacggggaacaggacgctcgaatcaacatcgagcgacgccgggatgagcgccgcgctgcccgcatgggagaaggcgcctcctcgtctagagtgccacgttcctcctcgcgaggcggcccgccccccacgttcaccttggagggactggttgtagggccttcgttgcgagtctccggaatgtccggtggcccccgaagtttcgccccaacctcacggagaagtatgatggcaacatcaatcactccgagttcctccagatctataccatgatcatcgtggcggcggggggatggggggggcacgaccaggtcatggcgaattatttccccatggctctcaagggtcaggcgcgcggctggctcatgacccagccccccgactccatccactcctggaaggacctgtgccagcagttcattatgaagttccaaggcacgtacccctgcctaggagaggaggcggacctgcatgctgtgcagcggaaggctgatgagtccctccgctcgtatatacatcgtttttgccaggtccgcaacactatttcgtgcattccggcccacgcagtcgtttatgcgtttcggaacggcgtgcggcacaaccgcatgctagagaagatcgcctccaaggagcccaagaccaccgccgagctcttcgagctggcggacaaggtggttcggaaggaggaggcgtgggtctggaactcccccagcaccggcgcggcggctgcggctgcccccgaatctgttccccactctaagcggcgagataggaggggcaaaaggaagccggcccgctccgacgacgagggccacgtccttgcggccgatgggccctcacgggccccgcgcaaggagaaagccaccggcgacaagccaagctccaccgctccctctggcgagggtcggtcggcagacaagtggtgctcggtgcacaacacttatcggcacagcctcgccgactgccgctcggtcaagaacttggctgagcggttccggaaaaccgatgaggagaagcggcagagtcgacgggagggcaaagcccccgcgacccctgccaatgaccggcgaggggaggccaagaagaaggccccccagatgacagcgacaacaggaaccgtcaccactcttgataggggggcttgcgctcacacctcccgccgcggtttcaaggccatgaggtgtgagcttctggctgccgtcccaactcacgaggcggcacggaaggcgcgctggtcagagatgaaactcaccttcgaccagagcgaccatctgacatccccggggatgaagctccagccgtcattgccgatcatcggcatgaccccgggtcacacgtggcccctgggtcatgttgagctcacggtgacctttggcgactccaccaacttccgcaccgagcggatcgacttcgatgtggcggacctcaacctgccctacaacgcggtccagggcaggcccgcgttggtgaagttcatggccaccacccactacacctaccaccagatgaagatgccaggtcccaacggccccatcaccgtctgtggcgatgtcaaggtcgccctcgcctgcgcggagcagcgcactgataacctggcggcggccacgaagccgcaggccccggaggcctctgcgtcccgcgcttccaagaagcgcctcgcctcggccgatgaggaaagcacgttcatctccttcctgcgggcgaactccgacgtcttcgcgtggaagccgtcggatatgcccgggatccccagggaggtgatcgagcaccgcctcaccgtgcggccgggtgcgtgacccatccggcagaaggtacggcgccaagccccggagcggcaagccttcatccgcgaggaggtgacgcggctcctggaggccggcttcatccgagaagtcatccacccggagtggctggcgaacccggtggtcgtcccgaaggccaacagcaagctccagatgtgcattgactacagagacctcaacaaggcatgccctaaggatcccttccctttaccgcgcatagatcagatagtcgactccactgcggggtgcgaccttttgtctttcttagatgcctactccgggtatcaccagatccgcatggctagggaagataaggaaaaaactactttcattactcctgtaggcaccttctgttatacaactatgccttttggcctcaagaacataggtcctacttttcagcgcatgactcgcattactttgagtaatcaaatagggcgcaatatagaggcgtatgtcgatgacttggtggtaaagacacgccaccaggacacattgttgcaggatttggccaagactttcgacagtcttaggtccacgtgcatgaaactgaaccccgaaaagtgcgtgttcgtagttgagcgcgacgagggcgacccgcgggcccccttgactggcgatggcccctcgtcgcccgacagcctggtgcccgaagcccccaacccccgggagggccccgaggcccccgtggaaggaagagagactctggcgggtggccccgaggcctatactcccgacatggcccgagatcccccgaggcccctgagcacgggcgccccgggccagctgcccctaacaacaaggaccggccccactagaaggtgcagcggcccatctacattgtcagcgaggcactccgagacgcgaaaacccgatacccacaggctcagaagatgctttacgcagtcttaatggcctcaaggaaattgcgccactacttccaagcgcatcggatttccgtcgtgacatcttaccctctcggccaaatctttcacaaccgggaggggaccggtcgggtcgtaaagtgggccattgagctcgctgagttcgacctgcactccaaaccgcggcacgcgatcaaaaaccaggttctagctgacttcatcgcggagtggaccccggtggacgaccctgttccgtctaatgttcccttcctccccggagacggaggagacccaaacgccgacattcgcgccgggtactgggttatgcacttcgacggctccctccaccttcagggcgcgggggtcggagtcacgctgacttcgccaagcggggatgtcctaaagtacgtcgttcaactcgatttccgagccatgaacaatatggcggaatacgaaggactcctagcaggattgagggcggtggccggaatgggcatccgacaataatactcttcctgagggtcgcgcaaaacctgagaagctcacgcgtatctctaagcaatacgtgctcgtagaagggaccctctaccggcgtgccgccaacgggatactcttgaagtgtatttctcgggagcaaggtgttgagctcatcgccgacgctcatcaggacatcctaggacccttcaaagcggcccaaggcgggtattagcacctgtacgtcgccatcgacaagttcaccaaatggcccgaggcttacccggtcgtcaagatcgacaagcattccgccctgaagttcatcaggggcatttcatcccggttcggggtgcccaaccgtatcattacggataacggcacctagttcaccaatgagcttttcggtgaccccaagagcaacggccaagtcgagcgagccaacaccaaaatcctcaaaggcctcaagaccaagacgtacaacgtcctaaagaagcacagggattcatggctggaggaactgcctgccgtgctgtgggcgaatcggaccactccaagtcgccccaccggggaaacgccctttttcctggtctatggtgccgaagcagtcctaccttccgagctctccctaggttcgcctcgcgtcgtgctgtacgatgaggccaaccaggatgatcttcgccgtgacgatctcgactatttagaagaatgcagaaggcgtgcaaccctgcgagcggcgctaccaccagcgccacgtcctggcccgatcactacaagtcggcgacctcgtcctatgtcgcgtgcagtcgcgcttgggactgagcaagctctcaccaatgtgggaagggccataaaaagtgttggcgttccccggccgggctccgttcgactaaccacgaggacggcacggggttgcctaacccctagaatatcgaaaacctccgccgtttctatccatagggtcgcgcgtctttcgctttcatggtgctcgggccaacccccgcacatccttcggcttgtgcgggcttggcctggggctaccactgttaaatatgttgtatcttgttccttccccagcaataaatttttctg

SEQ ID NO: 20579 - DNA, 3438 bp, Oryza sativa
  Clone ID: PAT_MRT4530_25932C.1
atggcctctacggggagcaggacgctcgaatcaacatcgagcgacgccgggacgagcgctgtgttgctcgcatgggagaaggcgcctcctcatctggagtgtcgcgttcctcctcgcgaggcagcccgtcccccacgttcacccctgaaaggactggttgtagggccttcgttgcgagtctccggaatgtccggtggcccccgaagtttcgccccaacctcacgaagaagtatgatggcagcatcaatccctccgagttcctccagatctataccacgatcatcgtggcggaaggggggggacaactgggtcatggcgaattatttccgcatggctcttacgggagaagaggcggacctgcatgctgtgcagtggaaggacgatgagtccttccgcttgtatatacagcgcttctgccaggtccgcaacactattccgtgcattccgacccacgcggtcgtttatgcgttccggaatggcgtgcggcacaaccgcatgctagagaagatcacctccaaggagcccaagaccaccgccgagctcttcgagctggcggacaaggtggctcggaaggaggaggcgtgggcctggaactccctcagcactggcgcggtggctgcggctgcccccgagtccgttccccgctctaagcggcgagataggaggggcaaaaggaagccggcccgctccgatgacgagggccacgtccttgtggccgatgggccctcccgtgtgagggccccgtgcaaggaaaaagccaccggcgataagccgagctccactgctccctccggcgacacggaaggcgcgctagtcagaggtgaagctcaccttcgaccagagcgaccatccgacagtgctcgctcgggaagggaagttggccctcatggtctccccgaccatccacaacgtcaagatgaagcgtgtcctggtcgacgggggggggggggggccagcctgagcatcatatccccggtcgcttttgacgcgctcaaagccctggggatgaagctccagccgtcactgccgatcatcggcgtgaccccgggacacacgtggcctctgggtcacgttgagctcccggtgacctttggcgactccaccaacttacgcaccgagcggatcgacttcgatgtggtggacctcaatctgccctacaacgcggtcctggacaggcccgcgttggtgaagttcatggccaccacccactacgccaaccttcagatgaagatgccgggccctagcggccccatcaccgtctttggcaatgtcatggtcgccctcgcctgtgcggagcagcgtgccgacaacctggcggtagccacggagccgcatgccccggaggcctccgtgtcccgcgtctccaagaagcgcctcgccttggccgacgaggtgcccgtcaaggagattccccttggcgatgatccgtccaagaccgccaagaccgccaagtttggcgatgcctactctgggtatcaccagatccgcatggctagagaagatgaggaaaaaactgctttcattactcctgtaggcaccttttgttatacaactatgccttttggtctcaagaacgcagctcctacttttcagcgcatgactcgcattaatttgagtaatcaaatagggcgcaatgtagaggcgtatgtcaatgacctggtggtaaagacgcgccaccaggacacgttgttgcaggacttggccgagactttcgacagtcttagttccacgcgcatgaaattgaaccccgaaaagaaattgcaccactacttccaagcgcatcgggtttccgtcgtgacgtcttaccctctcggccaaatcttgcacaaccaagaggataccggtcgggtcgtaaagtgggccatcgagctcgctgagttcgacctgcacttcgaaccatggcacgcgatcaaaagcaaagtcttggctgtcttcatcgcggagtggaccccggtggacgaccctgtttcgtccaatgctccctccctccctagggatggaggagacccaaacgttgacattcgcgccgggcactgggttatgcatttcgatggctccctcaacattcaaagtgcaaggaccggagtcacgctgacttcgccaagtggggatgtcctcaagtacgtcgttcggctcgatttccgagccacaaacaacatggcggaatacgaaggactcctagcgggattaagggcggcggccgaaatgggcatccgccacctcctagtcctaggcgattaccagctattcgtaaatcaggtctccaaggagtaccaaagcaccgatccgcaaatggacgcatacgtccgcgaggtgcgacgcatggaacgccacttcgacggacttgagctccggcacgtgccccgacgcgacaacgcggtcgctgacgagttgtcgcgcatcgcatcagcacgagccccactccctccgaggaccttcgaggaaaggcttgtgcagtcgtcggcgcggtttgaccccccgagggaccccggcgccacagcctccgccccgacccctgacgacccgcgggcctcgaggcccgatggggtcaaccccgacccccctcgtcaggtcgtttggatgactgacatccgagcgtatctcgacaataatactcttcctgaggatcgcgcagaagctgagaagcttgcgcgtgtctctaagcggtacgtgcttgtagaagggaccctctatcggcgtgccgccaacgggatactcttgaagtgtatttctcgggaacaaggcgtcgagctcattgccgacgctcatcagggcgggtatcagcacctgtacgtcgccattgacaagttcaccaagtggcccgaggcttacccggtcatcaagatcgacaagcattctgccctcaagttcatcaggggcatcacgtcccggttcggggtgcccaaccgtatcattacggataatggcacccagttcaccagtgagctgttcggtgactattgcgatgacatgagcatcaagctgtgcttcgcctcacccgcccaccccaagagcaacggccaagtcaagcgagccaacgccgaaatcctcaaagacctcaagaccaagacgtacaacgtcctgaagaagcacggagattcgtggctcgagcaactgcccgccgtgctgtgggcaaatcagaccactccaagtcacaccacaggggagactccctttttcctggtgtatggcgccgaggcggacctacctttggagctttccctgggttcgcctcgcgtcgcgctgtacgatgaggccaaccaggatgatctccgccgtgacgatctcgactatttggaagagcggagaaggcgcccggccctacgagcggcgcgctaccagcaaagactgaggcgctaccatcagcgccacgtccgggcccggtcactacaagtcggcgacctcgtcctacgccgcgtgcagtcgcgcttgggctga

SEQ ID NO: 20580 - DNA, 987 bp, Oryza sativa
  Clone ID: PAT_MRT4530_25933C.1
cccacgcgtccgctctctccccgcaatctcctcgccgccgccaccgcagtcaacgacgccggccgtcgctgtctttctcgcgcgcgcgtggaggattcgaggttttatgtaggcgaagatggcgctagaaatctccatggaaggcatcgaagcgcgggcgcgggagcttggggtcgacctctccaccgtcgatctcgactccgtcaccctccccgccggcgaggacttcggcatcctcagtgacgatgaggatttacttcggattgatgaccctatggagcttgaaatggggtttgctaacgttgttgtcgtggacaacctgcccgttgttccaccagagaagtttgagaagttggagaacgtcatacgcaagatctacagtcaaattggtgcgatcaaagaaggtggtctttggatgcctgtaaacccagagacaaagaagacatacggttactgcttcatcgagtataataccccacaggaagctgagcttgctagggaaaagacaaatgggtacaagctcgacaagtctcacatctttgcagttaacatgtttgatgactttgacaagtacatgaaagttccagacgaatggatgcctgctgaaattaagccatacactcctggagagaacttgcaaaaatggctggctgatgagaaggcccgggaccaatttgttatccgtgctggtactttcactgaagtttactggaatgatgcaaggcagaagatgcctgaacttgtgttccaaaagcagtactggacagacagttttattcagtggtcccctcttggaacatacttggcaacagtgcataggcagggctcccaggtgtggggtggcgacgataagtttgagcgtctaatgcgatttgctcatgcacaggtgaaactgattgacttctcccctggtgagaaatatttggtcacatatagtagccacgagcccagcaaccctagagacactcataggggtgttcttaatat

SEQ ID NO: 20581 - DNA, 1701 bp, Oryza sativa
  Clone ID: PAT_MRT4530_25934C.1
ctaatgacatcggggtgcctcggggtgccacatcgtgcccctcgggccctcgcgctgccttgccccgaggacctcgcccaactgccatgtggcggggcaagcgagcagggaggagacccaggctgaaccgctatcaatgcgcgcggcgccccaacagtctatgaccggcctgtcgtcggtcacgtctgattggacgggcggccgcgcccccacgtcgcctctatctctggcggagtggaggtaggtgtgtccgcggcttagcttccgggcgaaggcacagatcgtggtcccccactccctccgggagtgaggatggtggcgggagacgcggcccccgtaaccgtcgccgcaactctcggactccgccccgtcgcgaccccccgcggaggtaggatcccacctgctcgggtggctcggccctctcctcgcctctcggcgggggaaagccacggcgcgtcggagcacgccgccgcctgacatacggcgacggcgacttgccccgaggcgcacttcaggtggcggggcccttctacggcatcctccgatgaacgcggagccggaggcccccgtccaacgatggttggacgacgtcgccaacctggtcaccaccgcccagcagtagctggctgcgggtggccgttccaccaccactggtacatcacgcacccccaccgccctctcctcatcagcaaggaggagggcccgtctgtcggccacagcatcgagcgacgccgggacgagcgccgtgctgcccgcatgggagaaggcacctcctcctctggagtgccacgttcctcctcgcgaggcggcccgccccccgcgttcacccctagagggactggttgtagggccttcattacgagtctccggaatgtccggtggcccctgaagtttcgccccaatctcacggagaagtatgatggtagcatcaatccctctaagttcctccagatctacaccacgatcatcgtggcggtggggggcgacgaccgggtcatggcgaattatttccccatggctcttaagggtcaggcgcgcggctggctcatgacccagccccccgactccatccactcctgggaggacctgtgccagtagttcattacgaacttctagggcatgtacccccgaccaggagaggaggcggacctgcatgctgtgcaacggaaggacgatgagtccctccgctcgtatatacagcacttctccaaggagcccaagaccaccgctgagctctttgagctggttgacaaggtggctcggaaggaggaggcgtgggcctagaactcccctagcaccggagcggtggctgcgggggccccgcgcaaggaaaaagccaccggcgataagctgagctccaccgctccctccggtgagggtcagtcggcagacaagtggtgctcggtgtacaacacttatcgacacagcctcgccgactgccactcggtcaagaacttggccgagcggtttcggaaagccgttgagaagaagcggcagagtcgacgggagggcaaagcccccgcgaccccctccaatgaccggccatgacagaaggcccccaccgatgacggcgatgatagcgaggatctggacttccagatacctcagggaaccgtcgccactctcgacttgggggcttgcgctcacacctcccgccgcggtttcaaggccatgaggcgtgtcatgtcctgataaattcat

SEQ ID NO: 20582 - DNA, 969 bp, Oryza sativa
  Clone ID: PAT_MRT4530_25935C.1
atacctcaggggaccatcgccaccctcgacgggggagcttgtgctcacacctcccgccgtggcttcaaggccatgaggcgtgagcttctggccgccgtcccgactcataaggcggcacggaaggcgcgctggtcagaggtaaagctcaccttcgaccagagcgaccatccgacggtgctcactcggggagggaagttggtcctcgtggtctccccgaccatccacaacgtcaagatgaagcgtgtcctggtcgatggggggaccagcctcagcatcatctccttggctgcctttgacgcgctcaaggccccgagaatgaagctccagccgtcactgccgatcatcggcgtaaccccgggtcacacgtggcctctaggtcacgttgagctcccggtgaccttcggcgactccaccaacttccgcaccgagcggatcgacttcgacgtggcagacctcaatctgccctacaacgcgatgcccggccccagcggccccatcatcgtctttggcgatgtcaaggtcgctctcgcctgcgcggagcatcgcgccgacaacctggcggcagccatggagccgcaggtcccggaggcctctgcgtccaacgcctccaagaagcaccttgcctcggccaacgaggaaagcgcgctcgtctccttcatgcgggcaaactccgatgtcttcgtgtggaagccgtcggatatgcccggggtccctagggaggtgattgagcaccgcctcgccgtgcggccggatgcgcgacccatccggcagaatgtacgacgccaagccccggagcggcaagccttcatccgagaggaggtgacgcggctcctggaggccggcttcatccgagaggtcatccacccagagtggctggcaaacccggtggtcgtcccgaaggccaacggcaagctccggatgtgcatcgactacatggacctcaacaaggtcctacttttcagcgcatga

SEQ ID NO: 20583 - DNA, 163 bp, Oryza sativa
  Clone ID: PAT_MRT4530_25936C.1
ttttgaccttagcccactccaccagcccctgccggccgattgtgcagtggacatatgagacggcaccgacgaatgggcagaactaactcatcatctagcacactcactgggccgatcgagagagtttgatgcaggacgcattcaacacctgcggctagattct

SEQ ID NO: 20584 - DNA, 3246 bp, Oryza sativa
  Clone ID: PAT_MRT4530_25937C.1
atggccccaacgtcgtcgggggcctcgggaagtcggaggcatcacgacggcctctatggggagcaggacactcgaatcaacatcgagcgacgccgggacgagcaccgcgctgcccgcatgggagaaggcgcctcctcgtctgcagtgccgtgttcctcctcgcgaggcggtccgcccaccacgttcacccctggagggactggttgtagggccttcgttgcgagtctccggaatgtccggtggcccccgaagtttcgccctaacctcatggagaagtatgatggcagcataaatccctccgagttcccccagatctataccacgatcattgtggcagcggggggggggggggacgaccgggtcatggtgaattatttccccatggctcttaagggagaggaggcggacctgcatgctgtgcagtggaaggacgatgagtccctccgctcgtatatacagcgcttctgccaggtccgcaacactattccgtgcattccggcccacgcggtcatttatgcgtttcggaacggcgtgcggcacaaccgcatgctagagaagatcacctccaaggagcccaagaccaccgccgagctcttagagctggcggacaaggtggctcgaaaggaggaggcgtgggcctggaactcccccagcaccggcgcggcggctgcggctgccctcgagtccgttccccactctaagcagcgagataggaggggcaaatggaagccggcctgctccgacgacgagggccacgtccttgcggctgatgggccctcacgggccccgtgcaaggaaaaagccaccggcgacaagccgagctccactgctccctccggtgagggtcggtcggcagacaagtggtgctcggtgaacaacacttatcggcacaacctcgccgattgccgctcggtcaagaacttggccgagcggttccggaaagccgatgaggagaagcggcagagccgacgggagggcaaagcccccgcgacccccgccaatgaccggcgaggggaggccaagaagaaggcccccgccgatatcgcatggaagccgtcggatatgcccggggtccccagagaggtgatcgagtaccgcctcgccatgtggtcgggtgcgcgacccatccggcagaaagtacggcgccaaggcccggagtggcaagccttcatccgcgaggagaacgcaggtcctacttttcagcgcatgactcgcattactttgagtaatcaaatagagcacaatgtagaggcgtatgtcgatgacctagtggtaaagacgcgccacctagacacattgttgcaagatttggccgagactttcgacagtcttaggtccacgcgcatgaaactgatccccgaaaagtgcttgttcgccccggggccagaggaaccgttgctactctacttggccgcgaccccccacacaatgagtgccgcccttgtagttgagcgtgacgagggcgacccacattgcgagcccggctatgaggagggaccaggggcccccttgactagtgatggcccctcgtcccccgatggcccggtgcctgaagcccccaaccccggggagggccccaaggcccccgtgggaggaagagaggctctggcgggtggcctcgaggcctataatcccgatatggcccaagatcctcccgaggcccctgacaacgggagcccccggccagctgcccctgacaacaaggaccggccccgccgaaaggtgcagcggcccgtctactttgttagcgaggcactccgagacgcgaagactcgatacccacaggcccagaacatgctttacgcagtcttaatggcctcaaggaaattgcgccactacttccaagcgcatcgggtttccgtcgtgacatcttaccctctcggccaaatcttgcacaaccgagaggggaccggtcgggtcgtaaagtgggccatcgagctcgctgagttcgacctgcacttcgaaccacggcacgcgatcaaaagccaggttctggctgacttcatcgcggagtggaccccggtggactaccctgtttcgtccaatgttacctcccctccggagatggaggagacccaaacgccgacattcgtgccgggcactgggttatgcacttcgacggctccctcaaccttcaagtctccaaagagtaccagtgcaccgacccgcaaatggacgcatacgtccgcgaagtacgacgcatggaacgccacttcgacggactcgagctccggcacgtgccccggcgcgacagtgcagttgctgacgagttgtcgcgcattgcccccggggaatttcgagaaaaggctcgcgcagtcgtcggcgcggatggaccccccaagggaccccgacgccacggcctccggcctgtcccctgatgacccgcgggcctcggggcccgagggggtcgaccccgaccccccttgtcaggtcgtttggatgactgacatccgggcgtatctcgataataatactcttcctgaggatcgcgcaaaagctgagaagctcgctcgtatctctaagcggcacgtgctcgtagaatggaccctctaccggagtgccgccaatgggatactcttgaagtgtattttttgggagcaaggcgtcaagctcatcgccgacgctcatcagggtttttactggccgaccttgttgcaagatacccaagaatgggtccggcgatgcaagttcaccaaatggcccgaggcttacccagtcgtcaagatcgacaagcattccgccctcaagttcatcaggggcattacgtcccggttcagggtgcccaaccgtatcattacggataacgacacccagttcaccagtgagctgttcggcgactattgcgacgacatgggcatcaagctgtgcttcgcctcacccgcccaccccaagagcaatggccaagtcaagcgagccaacgccgaaatcctcaaaggcctcaagaccaaagcgtacaacgtcctaaagaagcatggggattcgtggctcgaggaactgcccgcggtgctgtgggcgaatcggaccactccaagtcgcgccactagggaaacgccctttttcctggtgtatggcgccgaggcggtcctaccttccgagctttccctgggtttgcctcgcgtcacgctgtatgatgaggccaaccatgatgatcttcgtcgcgacgatctcgactatttagaagagcggagaatgcgcgcagccctacgagcggcgcgctaccagcaaagcctgtggcgctaccactag

SEQ ID NO: 20585 - DNA, 519 bp, Oryza sativa
  Clone ID: PAT_MRT4530_25938C.1
atgccgtcgccccgagaaagctgcccagcgggtctggccaaaccggggctacggcgaccgggggtcggggatggccgtgtgaaggcccttccgagcccccagggttcgccgcagcccggggcgcggcccgcgtttaggctccctttcggcggttttcaggccgcccaatgccacttagggtccggagacgtggcgctggtggtagcgccgctcgcagggttgcacgccttctgcattcttctaaatagtcgagatcgtcacggcgaagatcatcctggttggcctcatcgtacagcacgacgcgaggcgaacctagggagagctcggaaggacgttgtacgtcttggtcttgaggcctttgaggattttggtgttggctcgctcgacttggccgttgctcttgggggcggaatgcttgtcgatcttgacgaccgggtaagcctcgggccatttggtgaacttgtcgatggcgacgtacaggtgctaatacccgccttgggccgctttgaagggtcctag

SEQ ID NO: 20586 - DNA, 587 bp, Oryza sativa
  Clone ID: PAT_MRT4530_25939C.1
aggacgcgtgggtcatcatgcgtgacagagcacacttgatgtcatataaatctaaacaaaatcacctatttaaataaaaaaaaaaaaaaaccaaataaaaacacaccaaaccaactggctgccggcatgaaagctgccaatgcctggcctgatggatgtcgactccacagagtcaaagctggcttgcctaccagcaagcgactgttgcatgtttcacactatggatagctgcaaaaactgcggttgaccatatcctgtcgccgtgtgctacagctcgcggtgtgaggaatgaactgtacctacgtacctgtccattttactagctaataacacatgtgcagtgctacaataaaatcgggacctgcgttgcatccctacattgatgctcatgatcaacaagctcactctcatcaagtctcgagtatgttacagtgctgtaaggcacgtacgtgtcgttcatgagctcactagttgtgtgacgccgtgcaattagaccccctggagtcacattaccgagtctagctagcggccctgtatacggtcttcacgtcctgcgtcctgaagggtgtgagaaggatcgagctccc

SEQ ID NO: 20587 - DNA, 413 bp, Oryza sativa
  Clone ID: PAT_MRT4530_2593C.1
ctgcgaacactaaaactattctcatgttactactatacgttaggggcaccacaatcggcctgaatgaactctacttaaacggctctggtgcgaatggatggctcaaaacagaaatactaatgcaaaaagcatagaagcatgatacctccagacctggatccctaacagacatagagctcatggagatgatacaaagcaacagcaacactgatgattgcagacgatgagcatctagctccacaggtgtgaaaagtgttgaactatgacagcgcggacattgaggactaacctcacactgagacctatacatcagaacgataagggcaccctatatgcacacatggatcatgataagcagactgataagaggcggcgctaagcccatgctgagagcacggataaactagcgttgt

SEQ ID NO: 20588 - DNA, 3391 bp, Oryza sativa
  Clone ID: PAT_MRT4530_25940C.1
atgatcatggtcgaggtcttggaggaagaggtggtggtgcacacccccactccctccgggagtgaggatggtggcgggagacgcggcccccgtaaccgtcgccgcaactctcggactccgccccgtcgcgaccccccgcggaggtaggatcccacctgctcgggtggctcggccctctcctcgcctctcggcgggggaaagccacggcgcgtcggagcacgccgccgcctgacatacggcgacggcgacttgccccgaggcgcacttcaggtggcggggcccttctacggcatcctccgatgaacgcggagccggaggcccccgtccaacgatggttggacgacgtcgccaacctggtcaccaccgcccagcagtagctggctgcgggtggccgttccaccaccactggtacatcacgcacccccaccgccctctcctcatcagcaaggaggagggcccgtctgtcggccacagcctagaggcggtccacggccccaacatcgtcgagggtctcgggaagtcggaggcatcacggtggcctctatggggagcaggacactcgaattaacatcgagcgacgccgggacgagcgccgtgctgcccgcatgggagaaggcacctcctcctctggagtgccacgttcctcctcgcgaggcggcccgccccccgcgttcacccctagagggactggttgtagggccttcattacgagtctccggaatgtccggtggcccctgaagtttcgccccaatctcacggagaagtatgatggtagcatcaatccctctaagttcctccagatctacaccacgatcatcgtggcggtggggggcgacgaccgggtcatggcgaattatttccccatggctcttaagggtcaggcgcgcggctggctcatgacccagccccccgactccatccactcctgggaggacctgtgccagtagttcattacgaacttctagggcatgtacccccgaccaggagaggaggcggacctgcatgctgtgcaacggaaggacgatgagtccctccgctcgtatatacagcacttctgccaggtccgcaacactattccgtgcattccggcccacgcggtcgtttatgcgttctagaatggcgtgcaacacaaccgcatgctagaaaagatcacctccaaggagcccaagaccaccgctgagctctttgagctggttgacaaggtggctcggaaggaggaggcgtgggcctagaactcccctagcaccggagcggtggctgcggctgcccccaaatccgttccccgctctaagcggcgagataagaggggcaaaaggaagccggcccgctccgatgacgagggccacatccttgcggtcgatgggccctcacgggccccgcgcaaggaaaaagccaccggcgataagctgagctccaccgctccctccggtgagggtcagtcggcagacaagtggtgctcggtgtacaacacttatcgacacagcctcgccgactgccactcggtcaagaacttggccgagcggtttcggaaagccgttgagaagaagcggcagagtcgacgggagggcaaagcccccgcgaccccctccaatgaccggccatgacagaaggcccccaccgatgacggcgatgatggaaccgtcgccactctcgacttgggggcttgcgctcacacctcccgccgcggtttcaaggccatgaggcgtgagcttctggccgccgtcctaactcacgagacggcacggaaggcacgctggtcggaggtgaagctcaccttcgactagagcgaccatccgacagccccgaggttgaagctccagccgtcactgccgatcatcggcgtgaccccgggacacacgtggcctctgggtcacgttgagctcccggtgaccttcagcgactccaccaacttccgcaccaagcggatcgacttcgatgtggcggacttcaatttgccctacaacgcggtcctgggcaagcccgcgttggtgaagttcatggccgccacccactacgcctacctccagatgaagatgccgggccccagcggccccatcaccgtctttggcgatgtcaaggtcgccctcacctatgtggagcagcgtgccgacaacctggcggcagccacggagccgcaggccccggaggcctccgcgttccgcgcctccaagaagcgcctcgcctcgacccacgaggaaagcgcgctcatctccttcctgcgggcgaactcggacgtcttcgcgtggaagccatcggacatgcccggggtccctagggaggtgatcgagcacctcctcgccatgcggccggatgcgtgacccatccggcagaaggtacggcgccaggccccggagcggcaagccttcatccgagaggaggtgacgcagctcctggaggccggcttcatccgagaagtcatccacccagagtggctggcaaatccggtggtcgtcctgaaggccaacggcaagctccggatgtgcatcgactacacggacctcaacaaggcatgccctaaagatcctttccctttaccgcgcgtagatcagatagtcgactccactgcggggtgcgaccttttgtctttcttagaagcctactccgggtatcaccagatccgcatggctagggaagatgaggaaaaaattgctttcattactcctgtaggcacttttgttatacaactatgccttttggtctcaagaacgcgggtcctacttttcagtgcatgactcgtattactttgagtaatcaaatagggcgcaatgtagaggtgtatgtcgatgacctggtggtaaagacgcgccaccaggatacattattgtaggatttggccgagactttcgacagtcttaggtccatgcacatgaaactgaaccctgaaaagtgtgtgttcggtgtgccggcggatgagaagggaccaggggccctcgtgactggcgatggcccctcgtcccccgactgcccggagcccgaagcccccaacccctgagagggcccggaggcccccttgggaggaagagaggctctaacgggtggccccgagacctataatcccgacgtggcccgagatccccccgaggcccctgagcacgggcgcctggggccagccgcccctgacaacaaggaccggccccaccgaaaggtgcagcgggtctactttgtcagcgaggcactccgagacgcgaaaacccgatacccacaggtccagaagatgctttacgcaattttaatggccttaaggaaattgcgccactacttccaagcgcatcgggtttccgtcgtaacatcttaccctctgtggcacctggtcggccggccactttgcacagggtcctgagtgaaatggatcagagccttgagcgaatacgatccgctcctcgcgccccac

SEQ ID NO: 20589 - DNA, 1191 bp, Oryza sativa
  Clone ID: PAT_MRT4530_25941C.1
cccccctcatctcccccatccttcctttctttttttttttgccaatagtaccacatatctgaagctttcattgagctttatttatcagaacacgagagatagacctcaaccacaacgtggtatcatcagattacataagtatcagtattcagtactatgacgtagaaagatagcaatgctctgaatgtttgcagaagagttttacggacgcctgaaagtaaaacctagcgcgtcgtctcaggagtggttcttgagtacttcagcatcagacatacagggcagagtccacaactggaaatgccgaaatggtaaaatggaagccatctcaatggtatctttgcctcagaaatggttggaccagtctgcggcgctgccgacccgagggatcccggagtccttcttggcctcgctgtcgaccttgtagttggagccgcacatctggccctggctgtcgacccgcggcacaggcttcagctcgttcagcgggtgctcgaagctctgcagccctccagaggtggtgtagaagcagcctttggggaatggcgcaaacgagttcccgcaggatgccttgagaaggtcaacattgtcagagaacacaaggtggttctcggagtcaacgccccagaagaaaggaatgctaccatcagcatctgcagcaacgaaggtggattttgacagagtgtcatacaggatgaacgtgaacttcccgctgagatctctcacgacctgactagctgggagagggcccctgtccctgagggtcctgtaggcctcaatcaggatggtaacctcagttgctgtcttgctcagaccatagtgttgcttcagactggcaatgttctcaatgtgtccttggaacaggcagaatatgtcattcacagcaccaaacaacctggggacgagggggctctggttggccgccgagtaggcgagggcgccggcggggcccaggctgacggtgaccgcgtcggcgtgcgctccggcgaagcccttcatcagcgcgcccgcgccgccggccgccacggcgccgccggccaccggcgggctccggaggccctccgggcacttggccaccgtcggatcaaacaccgccaacatcctcgccgccgccgccgcgatgtgacctctcctctctttccgtgtgcgtggtgcgctttgcttcgccgatgtctgtgccgggcccgaattcct

SEQ ID NO: 20590 - DNA, 1434 bp, Oryza sativa
  Clone ID: PAT_MRT4530_25942C.1
taggtggcctctgggtcacgttgagctcccgttgacctttggtgactccaccaacttccgcaccgagcggatcgacttcgacgtggcggacctcaatctgccatacaatgcggtcctgggcaggccctcgttggtgaagttcatggccgcctacctccagatgaagatgccgggccccagtgaccccatcactgtctttgacgatgtgaaggtcgccctggcctgcgcggagcagcgcgccgacaacttggtggcagccaccgagccgcagccctcggagtcctcagcgtcccgcgcctcgaagaagcgcctcgcttcggccgacgaggtccccgtcaaggataaaagcacgctcgtctccttcctgcgggtgaactccgacgtcttcgcatggaagccgtcagatatgcccggggtcctagggaggtgatcgagcaccgcctcgctgtgcggccgggtgcgcgacccatttggcagaaagtacggcgccaagccccggagcggcaagccttcatccgagaggaggtgacgcagctcctggaggccggcttcatccgagaagtcatccacccagagtggttggcaaacccggtggtcgtcccgaaggccaacggcaagctccgaatgtgcatcgactacacggacctcaacaaggcatgcccaaaggatccctgccctttaccacgcatagattagatagtcgactccactgcggggtgcgaccttttgtctttcttagatgcctactctgggtatcaccagatccgcatgaggaaaaaactgctttcattactcctgtaggcaccttttgttatacaactatgccttttggactcaagaatgtaggtcctacttttcagcgcatgactcgcattactttgagtaatcaaatagggcgcaatgtagaagcgtatgtcgatgacctggtggtaaagacgcaccaccaggacacattgttgcagtacttggccgagactttcgacagtcttaggtccacgcgcatgaaactgaaccccgaaaagtgtgtgttcggtgtgccggtgggcaaactcctcggttttctggtctcctcccaaggcatagaagctaatcccgagaaaatacgcgcgatagagagatgcgcccccccagcaagcttagggatgtgcagtgcgtcacgggatgcatggccgctctaagtcgattcatatcgaggctgggagagagggcgctgcccctaatcaagctcctcaaacgccctgggccgtttgtatggacggaggaagcggagcaagctctcaattagctgaaagcttacctcacttcccccccatcctggtagccctggggccagaggaaccgttgctgctctacttggctgcgacaccccacgcggtgagtgccgcccttgtagttgagcgcgacgaaggcaacacgcgtcgcgagcccggccat

SEQ ID NO: 20591 - DNA, 735 bp, Oryza sativa
  Clone ID: PAT_MRT4530_25943C.1
ttgtagttggagccgcacatctgggcctggctgtcgacccgcggcacaggcttcagctcgttcagcgggtgctcaaagctctgcagccctccagaggtggtgtagaagcagcctttggggaatggcgcaaacgagttcccgcaggatgccttgagaaggtcaacattgtcagagaactcaaggtggttgtcggagtcaacgccccagaagaaaggaatgctaccatcagcatctgcagcaacgaaggtggattttgacagagtgtcatacaggatgaacgtgaacttcctcgctgagatctctcacgacctgactagctgggagagggcccctgtccctgagggtcctgtaggcatcaatcaggatggtaacctcagttgctgtcttgctcagaacatagtgttgcttcagcctggcaatgttctcaatgtgtccttggaacaggcagaatatgtcattcgcagctccaaacaaccccagctaatcagcgagaggagccaagaacagagcaaacatctggggacgagggggctctggttggccgccgagtaggcgagggcgccggcggggcccaggctgccagtgaccgcgtcggcgtgcgctccgagcgaagcccttcatcagcgcggccgcgccgccgcccgccacggcgccgccgtgccaccggcgggctccgaaggccctccgggcacttggcctccgtcggcggacgcggggtcgagccggaatccggac

SEQ ID NO: 20592 - DNA, 208 bp, Oryza sativa
  Clone ID: PAT_MRT4530_25944C.1
gtctgcgcggacgacacacgcacggcgagcgccacgtcggaggagtgcaagtggcgtaccgatgcctactcggacgttccagcactagctggtccgctccaccccgcaagccagggggcgctggatctgcaccctcgacgtcagacgctatatacagcccatcagcgagagaccatcgcccagggcctaactacataggtacactcta

SEQ ID NO: 20593 - DNA, 432 bp, Oryza sativa
  Clone ID: PAT_MRT4530_25945C.1
atggcgtcggcgggcggcggatccggcggcgccgccctcgggagggccggatccgccgccatagggagcggctacggcggcgacgggcggcggctcggcgacctcggctcggcggcccgccatcccctcctcaccgctgctgacaacgacgatgataaggcgaccctcccccctcctcaacaccgcggcggcggggcggctcggccgccccgcgcggatccggtgccgccgacgataagggttttagtaactgggtggtacttactagtactatatgttcaatttgcaatgcctatgcctatgcctgtgcctcaatttgcaatgcaggggttcaaagctttgtatggccacatgcgggggttcaaagttttgtatggttgtggttacaaatactgtgctactaatgtttgcttttctataggacaagtgtga

SEQ ID NO: 20594 - DNA, 632 bp, Oryza sativa
  Clone ID: PAT_MRT4530_25946C.1
gcattgccacgccgtaccgtaagccttggaatctttcttatagtccggcccgcccctctttcttctttctttctttctttcaaatttaaagcctgctttaaattttttgcaagaagtactttttctaacactttttttttctccacagactaccacactaactagaaaataaccactacaaacacaaaaatataaaacaaaatagagcaaaaataaaatacaaataaaaacttaattgttcatcatcttcttccccggcttcaaccttcttcacctcacctcactaagcttacttggacacgaacccaacccaacacttcgctggtagaatttttgggacttttgtttttctgcctcgttttgtgagaggaggggatataaggaggacgactctgcttttataatagtagagagactaagcttccttaggcgcgacgtggccgaggcggatggcattgacatagtcacgagggctatgggaggcgaggccggggaagaggaggccggcggcgcggtagacgatggacacggggccctcccggtagtccttcccctctttcgcccacaagaacatggccttgaacaggtcaccccacgcgttgccgtacatggacacgatgtacttggggttg

SEQ ID NO: 20595 - DNA, 171 bp, Oryza sativa
  Clone ID: PAT_MRT4530_25947C.1
atggctagtagcagcatcacaagctacaagcgtgttgagatgacgaaccatcttgatctggagcagtgttgggccaaacgacctagcaacgggtggcagatattgttggtgccactgggcctgaccgaggaggattcacgtagggtgcctacactagttggtgcatgttga

SEQ ID NO: 20596 - DNA, 293 bp, Oryza sativa
  Clone ID: PAT_MRT4530_25948C.1
gcgggaggcgctcgaggggaggcagcggtgagctaggcagcggcagcaccctccgctccaccggattcggcgagaggggaggcttccggcgacgacgcacgagggcagaggtggcaggcggcttccagctgtgtggcggcggtggcagcggcatcaaacgccgcctgtgcggagcggatgaaagcatgatggacgcagcctccctggccagggcgaagtggaggatgcgttggatgaggtcgttggagagcgctgagatgcggtcgatgccgccgacgaggaagaaattgtag

SEQ ID NO: 20597 - DNA, 184 bp, Oryza sativa
  unsure (1)..(184): unsure at all n locations
  Clone ID: PAT_MRT4530_25949C.1
aatagttatttattataagttttaggaggcccacacagcaagtcctgcaaaagtaatcagtgtcaatacccgcgcgacctcttcccctgcaaaaattgccgtcagggtttgagtcccacaccccancgctctcaccccaacctttgttttcccagtagtcggcctaatctcgttagtcggttct

SEQ ID NO: 20598 - DNA, 303 bp, Oryza sativa
  Clone ID: PAT_MRT4530_2594C.1
atggagggaggtagcggctgcggcggagggaccggacccgcggcaacgcgtgtgcggaggaggctgcgggtgcagagaaaggagcggcgacgacggcggtggtggcctctctcccacgtgctggtgacctccggcgcggcacagggcaccattccctccctccatgggcgcgtcgtcaccgctcgtcctttggcgctgcttcctcccttcccgcgccccggcctccgtcttcctctgtttgagccccgccgccgggtcggccgcgacgacgacgacgccgtggcaaagaggatgggtggttga

SEQ ID NO: 20599 - DNA, 1752 bp, Oryza sativa
  Clone ID: PAT_MRT4530_25950C.1
atggcgacggcgagggcgagggccgcgctggtgtttgtggctctgctgcagatggcggcagtggtggtggtgcgcgcgtcgcacgtcgtctacccggagctccagtcgctggaggcgaagcacgtcgacgggaagctccggaccgggtaccacttccaaccacccaagcactggatcaacggtccgatgtactataagggcttgtaccatctgttctaccagtacaaccccaagggcgccgtgtgggggaacatcgagtgggcgcactcggtttcgacggacctgatcgactggacggcgctggagccggggatctacccgtccaagacgttcgacgagaagggctgctggtcgggctccgccaccgtgctccccagcggcgtgccggtgatcatgtacaccggcatcgaccccgacgagcggcaggtccagaacgtcgcctacccggtgaacctctccgacccgtacctccgcgagtggtacaagcccgactacaaccccatcatcaacccggacggcggcatcaacgccagcgcgttccgcgacccgaccaccgcctggtacgggcccgacggccactggcggctcctcgtcggcagcaaggtgaacatgaaggggctcgccgtgctgtaccggagccgggacttcaagaagtgggtcaaggcgcaccacccgctgcactcggcgcacaccgggatgtgggagtgcccggacttcttccccgtcgctgtggcgggcgggagccgccactaccgccgcggcgtcgacaccgccgagctgcacgacgccgccgtggcggaggaggtcaagtacgtgctcaaggtgagcctcgacctgacgcggtacgagtactacaccgtcggctggtacgaccacgccaccgaccggtacgtccccgacgccgccttccccgacaacgactacggcctccgctacgactacggcgacttctacgcatccaagtcgttctacgacccggccaagcgccgccgcatcgtctggggctgggccaacgagtccgacaccgtacccgacgaccgccgaaagggctgggccggcatccaggcgataccgaggaagctctggctgtcggcggacgggaagcagctggtgcagtggccggtggaggagctcaaggcgctgcgagccaagcacgtcaatgtcactgacaaggtcatcaagaagggcaactacttcgaggtcaccggcttcaagtccgtgcagtcggatgtggatatggcgttcgcgatcaaggacctgagcaaggcggaggagttcgacccggcgtggcggacggacgcggaggcgctgtgcaagaagctcggctcggacgtcgacggcggcgtggggccgttcgggctgtgggcgctggcctccggcgacctcaaggagaggacggccgtcttcttcagggtgttcaaggccaacgactcctcgcacgtcgtcctcatgtgcaacgaccctaccaggtcatcgtacgagtcgaagatctacaggccgaccttcgccggcttcgtcgacgtcgacatcgccaagaacaaacaaatcgccctccggacattgatcgatcactccgtggtggagagcttcggggcgcgcggcaagacgtgcatcctgacgagggtgtacccgaggaaagccgtcggcgacgacgcgcacctcttcgtcttcaacaacggcgagtcggacgtcaaggtcaccaacctggacgcctgggagatgaagaccccgaagatgaacgcggaggagtag

SEQ ID NO: 20600 - DNA, 232 bp, Oryza sativa
  Clone ID: PAT_MRT4530_25951C.1
ggcggacacatctgggctcttgttgaacactaggattgtagaatgaggagcggggccatacaccagcaggatctttgccctgcttgccttagtagctatttgtagcaagcgccactactagcaaaccactatgcaagattacccaccaacattagccatgggcaccatgcatccctgaaggcaggacatgactgcaggcgttgtacttccataggtccacagccctgttcat

SEQ ID NO: 20601 - DNA, 491 bp, Oryza sativa
  Clone ID: PAT_MRT4530_25952C.1
gttttgagagctgttgcacttgcacaccactctctcgttctctctctctctccccgtcttcctgtgtctcttgccccatcctcatctgaggaatacactctcctgctctccactaacctttgctctagtagttgttgccaaccagatccaccatgccaccacctgctgctccaagccgtcgttgctgctgctgttgatgccttctcttccccctagctgctgctggatttagcttcttagatgacgcatttccggattgggacggcttcactcctcctcgcctggatcctgtcgtctctccgccccactgttgcgcggatccgccgtcgccggcgacgggaggggcggatccaacgacctcttcctctccacggatcctgtggccggcttcactcctcctcatttggatcccatcgtttctccgcccctctgtcgtgcggatccgtcggcggcggcgacgggagggccggatccggtgacctcttcccctc

SEQ ID NO: 20602 - DNA, 4788 bp, Oryza sativa
  Clone ID: PAT_MRT4530_25953C.1
atgggaacccctggagatcaaggcatcctcgatgagttctccacaaaccctttccatgcaaagaaaaacaagaactggatactcatagcggacaatgaagtaatagccaacgttgctgcctcctacatgagcttcatgtccgccttgaacttgggactatggctacaatcaggagtaggcacaagagcggcggtagatgactcaataaagaaagccacacccgacaggtggctggtcatgggggctatagctttgagagctgagcccgagttttgggcgcgtcttgtacagaggctcgacgtgtgcacgttcacgcgggagtctggtagtcctcccggcgttgtcttcctcaactccggcgagcgctccgactccggcgagggtcggaacacttggtatcagagccgaagatcatcgggaggcgggatgtcgcggcactccgagccgcacggcgggcgttcgcacacgccgccgcgtcgtcgacgcctatcgatctcgccggagcccactcgtgggcgcggcgggccgaagatcatcgtcaggcgcacgatcaaggaggccaacgcgacgatccagtacccgacgctcacccgcaccaactacgacgaatgggcaatgttgatgcaggtgaacatggaggcagcaggcatctggtacgcggtcgagccgtaccccgacgaggaggtagagtaccgcgacgaccgtctcgctctggcggccattctccgctccgtcccatcggagatgctccccacgctccgtggcaagcgctcggcgcgagctgcgtgggacgcgatcaagacgatccgcgtcggcgtcgagcgcgtgcgcgagagcaaggcgcagcagctccggcgtgagttcgcggcgctgacctggaaggagggggagaccgccgaggacttctccgtgcgcatcaccggcctcgccaacaacctccgcacgcttggcgacaacatctccgacgccgacgtcgtccgcaagatgcttgacgtcgtccccgagcacctggaacagatcgccgtcgcggtcgagacactccttgacctgaacaccgtttcggtcgaggaggtgaccgggcggcttcgcgccgttgagcaacggcgtcacaggtcggcgcccgtcgtcaacaaccaggggcggctcctcctaacgcaggaggagtggatggcgaagctcaagaaccccggagcgtccggagagaaggggacccccagcgggtccggcggaggcggcaacaagcgtaccgggggatcgcgcaggcacgaccgcggcaaaggcggctctcgccaggctgccgggcctggagacggctcgaaccagcccaagaagacggacaagtgccgctactgcggcaagaagggccattgggctaaggaatgccggtcacggttgcgggacgaggcccatctggcccaaggcgaagaagaggaggagcccatgctgatggttgccacggcgcaagtcaacgccatctcgtcttcttccccgccgcgcttcacatcactgccggcgcttgaacagatccacctcgacgagagtaagctcttcgttcagctgggcggcgagcacggaggagaagccaccagatggatcctcgacacgggcgccaccaaccacatgacggggacgcgatctgccttctccgagctgaacaccggcatccgcggcacggtcaagttcggggacggctccgtcgtcggcattgaagggcgtggcaccgtcctcttcaagtgcaaggacggggaacatcaggcgctggagggagtgtaccatattccgcgcctcaccaccaacatcgtcagcctggggcagctcgacgaggagaagttcaagtggagctgtgaagatggagtcctcaagatctggaacaagcagcgtcgactactcgccaaggtggtgcgctcgccgaaccgcctctacgtcgtcaagctcaacatcgggaggccggtctgcctcgcggcacaagggggcgacatcgcctggcgttggcacgcaagattcggccacctcaacttccgcgcgctcgagaagcttggtcgcgccgtcatggtgcgcgggcttcccctgatcaaccatgttgatcaagtctgcgacagctgcctggtcgggaagcagcggcgcctgcccttcccgtctaaggccaagtaccgcgcgaaagaaaaactcgagctggtgcatggggacatctgtgggccggtgacgccggcgacgccaagcgggaacaagctgttccttctcctcgtcgacgatctgagccgctatatgtggctcatcctcctcagcagcaaggaccaagcatcggtggcaatcaagcgcttcctggcgtgcgcggaggcggaagccgggcggaagctgcgcactctgcgcactgaccgcggcggcgagttcacggcgcacgcgttcgcggagtactgcgccgagcacgggatccagaggcacctcaccgcgccgtacacaccccagcagaatggcgtggtcgagaggaggaaccagacggtgatggggatggccagaagcatgatgaaggcgaagtcactgccgggctggttttggggggaggcggtgaacaccgccgtgttcctcctgaaccgggctccaacgcagtgcgtcgacggcaagactccttttgaggtatggcatggtgtcaagcccccagtccattttctccgcacgttcggttgtgttgcacatgtgaagaacggcggccagcgactcgccaagctcgacgacaggagcatgcccatggtgtttgtgggctacgaagctggaaccaaggcataccgcttctataacccggtgtcgcggcgcgttcacgtgtcgcgcgacgccgtgttcgaggaggagcgaagctgggagtggggagccgagaagggagctggacctgacgacgacatcgagccgttcgtggtggagcacctcgccacgggaccaacggggcagggaggccctgtcgccgcgactccgaccgcgacacagcgctctacatcagcaccagctcccatggcgccgcctgcgacaccaagtcaagccggaacgcccacacacggggcggggcctcgtacaccggcttcagcctcttcaccggcaatcgagttcgcctctccgccgcagggggacctcgatctggacaacgaccacgacgacgatgtacctctccgcttccgcaccgttgacaaccttctcggggcatcctcgcctccgggtcttgcagaacgggaagtgacagaggggctcatggtggcgatcgaggacgaaccagcaacggctgaggaagccaagcaagtcaaggagtggcgtgaagcgatgatcgaggagatggcatcgatcgagcacaacaagacctggtctctggtggagctgccggcggggcaacgtgccatcggcctcaagtgggtcttcaagatcaagaaggacgagcacgggaacatcaccaagcacaaggcccgactcgtcgcaaaaggctatgtacaacgccaaggcatcgactatgaagaagttttcgcgccggtcgcaaggattgagtccgtgcgcgtgctcctggccgtggccgctcacaggtcatggtcagtgcaccacatggatgtgaaatcggcgtttctcaacggcgatctggcggaagaagtctacgtgcagcagccgcccggctttgtcgccgccgggcacgagcgcaaggtgctgaagctgcacaaggcgctttacggcctcaagcaggcgccacgcgcctggaactcgaagctcgacagcagcctgctcatgctcggtttcgcccggagcgagtgcgaacacgggctgtacacgcgcagcgacggcgagaagcggctggtggtgggaatctacgtcgacgatctcatcatcacaggaggctccaccgaggtgatcaacacattcaagacggagatgaagactctgttccgcatgagtgatctcggtgtactgtcctactacctcggaatcgaggtccgacaggggcggcgcggcatcgagcttctgcaggccgcctacgccaagaagatactggaaaaggcgggcatgggaacctgcaatccgtgcgcgacgccgatggaggcaaggttgaagctgtccaagcagagcacctcgccggcagtcgacgcgacggagtaccgcagtctgatcgggagtctgcggtacttgatgaacacacggccggacatggcgttcgccgtaggttacctgagcaggttcatggagaaccccaggcaggagcacttggcagccatgaagcacctgctccggtatgtggccggaacgatcgactacggcttggtgtacaccagcggcgacaccgagttcaacctcgtcggctacagcgacagcgacatggccggcgacatcgacgaccggaagagcaccagcggcatcatctacttcctcggcggcaaccctgtggcgtggcagtcgcagaaacagcgcgtggtggcgctgtcgtcgtgtgaagcagagtacatcgctggcgcagcagcagcgtgccagggcgtctggctcagacggctgctgcaggatgtggtgggcgtcagcgggcctccaccacaactcaagatggacaaccagtctgcaatcgccctcagcaagaatccggtacttcacgatcgatctaagcatattgatacaaagtttcattttcttcgtgagtgcgtggatagtggggcggtgcgcctggcgttcgtgagcacccaagcgcagctcgcggacatcatgacgaaggcgctcgggaggtccaagtttcaggagcttcgcgagctgatcggcgtcaccaagctcaagtga

SEQ ID NO: 20603 - DNA, 1080 bp, Oryza sativa
  unsure (1)..(1080): unsure at all n locations
  Clone ID: PAT_MRT4530_25954C.1
gacaggctagaatgtttttcaacattaccaaacagctggtgcaaagattaatacaacaggatgtaagtcatagctctcggctcgtggataagtgctatattctttgcaaatttttcatgcttccattaccttagttgatgggattttggaaaggtcagaatgagagagatatcatttagttaacctgttatgtttatttattgaactctccagcgtgagaaacttcacgcgaaagctggattttagcaatgcttgtggagttaacaagatataccacatgctctagtctttttttattattatggtctgtttgacatctcgttattttattgcactgttgacccggcctcctccgccgcgccgccgccgaatcgctcctcctctccggccggacggcgagcatctcgccggttcagtttcctggtgctagatggcatcttctgttcttcagcctggggtgcctgttaccttgcaagaactagagccttcctcagagtccttcagacaaggagcatcgcttagagtaactggagttctgcagtcgtatgatttgaactctgcaattgctgttattcaagacggcggtgcaagcctcaaggtagacactcagaacttgagagagatcagcttccgcacaaattcaacctaccagttcatcggtgaactcctgatcaaaccagataacgatgccgttttgcaagcacgcgtaggtaggaatgtcgacggtattgacctgaacctctaccagcaatctttgctcatccgacgacaatatgaagctcaactacggtccaggagagcatgatccaaagccctgtgaatcaggaaaatgttcaatgatctgtctgcttgactgcaatggttcccagttgcaaaggggagcagagtatcataactaaatctctgaaggcagatcatgtcagtaggactaggaccaccataaacattggtggtgagaattgagatgagagcaattttgtctggttgtttcatgcctgnnagatttttctggtgcatgactttgttaggaaacatgtacttttcaaattcatcaaagtgatgcagagaacagggattaaa

SEQ ID NO: 20604 - DNA, 1693 bp, Oryza sativa
  Clone ID: PAT_MRT4530_25955C.1
tgcaggagaggatgtaaaaaatcttctcgaatgccatcgtggtcagctattcacacacgttgccagtcataccatacaacgccttcaatcctcccccaccggaatttgctttgatgaaatctgaccctccgattgctcaacgccgctcaccccgttggaagacaagccaagccagtggagggccgaaaatccggtctattgatcaacctgacacttcaaagtcgactaaccagtctgactctcgtaagagaaaattggttgtgagtgacgacgagggcgatgacgctgaaaaagctggcaacaaagggatgactggaaaacaaccaagataagctaacccaaagaagaaaacatccagttgccctatgccgaaaatcaggaagtcctccaggaagccatctgacatagatccttctggaaaagaccccgagccaactgacacggagacgggtccttcaaaggaaaccgggccgactgccgaagatcgcccgagtgataatcaaccagcaaccgacaatgtagagactagcaatgagcccccgactggaaatcattctgccgaagctggagtcggcgctaatcaggagcccccgactagtaaccgactagaaaccagttgggtacagaacaaaataatgacatcccggaagtagaagctcaaactaacagccctcccaagacggacactggtgctgactctggaactagttctcctgttagggtgcaaggacctgctcgtcccagaccggaaattatcacagggccaatgattggtgatgaagaagaggtcctccgggtacaatcggctgaagattcccgcccaccaatattagtcaagtggagggatgatgaaatgcggccacaaggaattgtaataaataagcagagggaagatgaggaagtatgtctactgaaaaagacactgggccaagctactcgtcttgtaaatagaatccatcttaggaatgaagcgaagacagcaaccctcgagaagttagttccacaccttggaacccttgaagccaccagagaccagctgcacgaagccaaggagcttgccaggaagactgagcatgatctgagagaccgtatcaccaagcttcaagactccaatttctcgataagcggctcatcaaaagtgcaagccgcaaagatatccgatctggaaaagcggatcaaggctctggaaaaggataaggatgaattgacaaagcagagggactcggccttgaaagatgtcgaagatcgtaaaatcaaatcctaggctcaattcgacgtcttggtcaacaaaatcaagaggcttgaaggagctagagatgaagtcgccaacgccgctacaccactcgtccaagccatgttcttcaataacaatggtccgagttcatttgacattgccgagatcttcgacaagctgagaattgctccggatacatattttaagaatatcaaggaagctggaagcatgggagcaagcctggcgttggcgatgaccaagtccttgtacccgaagattgatattaatgccattgatggctttgcagacgggacaagcaaagaggctgctcttgacctcatcaatgatgcacaaatagctgctgataaaatagctgctgacgtcgttgagagattctaggacaacgacctccagccgactagatctaacaattctgatgatgaaaagactgatactgat

SEQ ID NO: 20605 - DNA, 328 bp, Oryza sativa
  Clone ID: PAT_MRT4530_25956C.1
ggggcagaaaaacaaaaaggctaccgcctaataaaaccctacaaagggggggcccatggggaaaaggagaccggcaaaagggttaaccgaacccaaactgggttaaccaatcccacaaaaaaattggggccattaattagcccccagcaggtaggcttaaacattcgttgggggcaaaggactttatatgtttccccccagggggcaagaacagcaaactacttaacccgtcttctggggacctgcgcagggagccttaaggttaaggggtggggccaaaaaaagtgggacaactggggggaggaaccaaagaggggcccaaaggggg

SEQ ID NO: 20606 - DNA, 147 bp, Oryza sativa
  Clone ID: PAT_MRT4530_25957C.1
atggcgggagggtcaagaagaagatcacttgcaattgaagaagagtgggttccggcgacggggagcgatgaccgaacggtggccgaggggcagacaggctcgacggtggtggcgacgcagctaggtggtgaccctagcgctgtctag

SEQ ID NO: 20607 - DNA, 222 bp, Oryza sativa
  Clone ID: PAT_MRT4530_25958C.1
atggagtactccaagggtatcgaatccaagggaacatgtgtgattatctcttcctccggttcatccaaggacacaaagctaatgcactggcaacccgctgttcccagatattgctctactatgtacccggacagggaggacttaagtgctcttgagggctgtcaccacctctacacccacctcaaacgtattgtgggatacgcagtaacccctggagattaa

SEQ ID NO: 20608 - DNA, 1158 bp, Oryza sativa
  Clone ID: PAT_MRT4530_25959C.1
atggcggcgcagcgcgacgacgaggccgggtggtcggcggaggcggcgcggcgggtctggggcggcgccgtgccgctccaggtccacctccacgacgccgacgtcaccaccctccccccacctccgcccttcctgactttggggccaagaatcgggtatcttccactgttggtaccaattataaaggctcattttagcagcacactcccgcctggtattgacactgtttggtttgaatacaaagggctgcccttaaaatggtatatacccattggagttctttacgaccttctatgtgcagatccagaaagaccatggaatctaacagttcattttaggggatatccttctgaaattttaactctctgtgatggcgaagatagtgtaaagtggagctacatgaattccctgaaagaggctgccttcatcatcactggcaacagtaagaatgtgatgaatatgtctcaggctgatcaaggtgctttgtggcaatcagtaatgaaaggtaacttagatgggtatatgaatatctccaccaggcttaagcttggaccattcgaagaggattgcttagtacgaacttcctcagtagagggtcaacaaggttctgatgagcctgaatctcctggatctggcaaaccatttattctctggttaggcagggttcctgttcgattatatgtgcgcagtgttcaagaagacctttatgatttagaagatgcactacctgttggtgattgggaaagcatatcctatattaaccgaccattcgaagtacggagggaggaaggtagaagctacatcaccctggaacatgcgttgaaaactttgctacctgagttcttcagctcgaaggcatcacgtatacccgacgattccgaaactgctcctcaggcaccagattcagcccctaatgatgattctgatgtcaccccaagaagttgtgagaagttagagtcgtctgcttcgtcgagcccgcaagaggcgaatgtggccaacaagggtaaaatagtgaagctagtaagggtgcaaggcattgaggtcgacatggacatacctttcctttgggttgccaacaacctgaagaaccctgaatgttacctccatatttgtgtgtatgtcggtacaagaaaacgagagcctaaggatggtagatga

SEQ ID NO: 20609 - DNA, 199 bp, Oryza sativa
  unsure (1)..(199): unsure at all n locations
  Clone ID: PAT_MRT4530_2595C.1
gaatgggttcgggccatcaaagtgtgtctgcaggaacctcgagagttcgacctcggagaantgctggtcgcaccaattctccatgatagtgtctttgcctctggccaattgtgagtgtgagtgatgaantgcttgccctgggagatgccataatctgcttagtgttggcctgccctcgggtgtgttggctcgaggatta

SEQ ID NO: 20610 - DNA, 380 bp, Oryza sativa
  Clone ID: PAT_MRT4530_25960C.1
ctgctactcctgggggggccacccctccattcccccctcgacccacccctccgccggtctctttacttctcgtctaacagatcgtaggggaggctttctaaaactattgggctgacaacaatccttgcaggatatcattagcgaacatgaacttctatgtgcacttcttccaaaaacagccacctgatgctgctccttctattggagcctcactttctgccatacattacccgtctacacccctgctcgtgtcgctgaacacctcctgccaagaacggtcaagattgccccacaatttgatctacccaatccatctcaaaagatgacagctcatctgatgacactgcctgtatgacttcgacacaatctaaaggctttgt

SEQ ID NO: 20611 - DNA, 524 bp, Oryza sativa
  Clone ID: PAT_MRT4530_25961C.1
gcggagcgacgagatggctgcgccgccggcgagggctcgggcggactacgactacctcatcaagctcctcctcatcggggacagcggtgttggcaagagttgccttctcctgcggttttctgatggttccttcactacaagctttattaccacaattggtattgacttcaaaattagaacaatagagctggacgggaagcgtattaagctacaaatttgggacacagctggccaagaacgtttccggacaattaccactgcgtactaccgtggagccatgggtatcctgcttgtttatgatgtcaccgacgagtcatctttcaacaacattcggaactggattcggaatattgagcaacatgcctctgataatgtcaacaaaattttggttggcaacaaggctgatatggatgagagtaaaagggctgtccctactgcgaaaggccaagcactggctgatgagtatggcatcaaatttttcgaaactagtgcgaagacaaacctcaacgtggagcaggtttttt

SEQ ID NO: 20612 - DNA, 888 bp, Oryza sativa
  Clone ID: PAT_MRT4530_25962C.1
atggtggccttggtggcggaggcctccaagcggtggcggtggcggcggcctcgattgcagcggtggcgtcgtcctcgaagaagaagtggtggcggcggcgtccccaacgtcgacgagctcggcgtcgacctggccaaggcgccggccgggaggaggagcccctcacggcggcgggatgcatccccggcggctgtggctggcgcgccggcgggagacgtccccggctgctgcggcggcggcggccaccactgcccgcgccgccgctcctcctcccagtccgtcgcgcctcctcgcctcccacgccgcggggaggagggagcaagaaggcgccgcacccactgcacgcagcggcgaggaggaggaggaggaggagtagattcggcggttggccaccaccaccggcctcgccgtcgcgtcggctgccccgtgccgttactcctcgtcgcggtccacggcctgctgctgggacttctccggcgggacggcgatttcgcagattccatctcccacgcgtgcgctagggcatggcaactcggagacacgaccttcacagcgcaggcgtgggtcgattttcctccgccgcgcgtccttgaggtggttgaggaactcgtctcccaactaaggagcgagggactacgcagggacgcggtgctgcgcgacacgtcggcatttttcctagttggcaccagaaagcaacgctccacctcatcgcactgtaagaggcctaaatttattcctttcagcgtgactgacaaaactcacgcccaagtgcgcgtatcaccaaagggtgtcggagttttaaactccgacgttggtaacaagaacgcctttgcatgcgagaatgctaatgggcgatcaggcgcatcgtgcattcgtgcccgtgcctga

SEQ ID NO: 20613 - DNA, 1167 bp, Oryza sativa
  unsure (1)..(1167): unsure at all n locations
  Clone ID: PAT_MRT4530_25963C.1
ttgtaggagccaaaatgcaggaacagcatcactctattccatgcatccattgattaactgaaaacccaatagcaatacagcatggactacgttacacactgtagcttgcagttcaacggattgaaatccagcgtacagtagtagccccccaggcaattgcaacagctacgtcaaaagcatgagtagttgcttcaaagaatggaagcaaagataggtacaaccagatccgtatcatagtgtgtcttcttgacattcttcctataacagcaagacagggaacaaacaatgtcaaataataaacgatggaggccgagaaggcgaacgtctcctcaggagccgcagcatgcagatccagaagctgctggtttgtcggcaccctgatccgtcttgttgttaatcttgattgtcttgtcctcaggcttggagtcggtctcagcaagcctctgcttaatgtcacgtgcaatggagaaaaaaacttgctccacgttgaggtttgtcttcgcactagtttcgaaaaatttgatgccatactcatcagccagtgcttggcctttcgcagtagggacagcccttttactctcatccatatcagccttgttgccaaccaaaattttgttgacattatcagaggcatgttgctcaatattccgaatccagttccgaatgtcagtggtaattgtccggaaacgttcttggccagctgtgtcccaaatttgtagcttaatacgcttcccgtccagctctattgttctaattttgaagtcaataccaattgtggtaataaagcttgtagtgaaggaaccatcagaaaaccgcaggagaaggcaactcttgccaacacattggatactagaaagaaccaaaaacaatttgtaaaagacgctgtccccgatgaggaggagcttgatgaggtagtcgtagtccgcccgagccctcgccggcggcgcagccatctcgtcgcccgcttcacaccnntcctcctcctccctccccctactccacagcccacccggcgcgcctcctccaccaatccccgaccggtaggcgcggcggaggatcgcgcggcggcggcggtggcggtgcggatctggagaacggggaggagggagttggtttttttttttctctccttttttcccttcgcttttttagtttgctggttgattc

SEQ ID NO: 20614 - DNA, 309 bp, Oryza sativa
  Clone ID: PAT_MRT4530_25964C.1
atggtcggcaagccgcaagcacggcatgcgggcgacagaccaaggaaggcaatgatgagaggaggtggaccacgaactggcacaacgagcggcggtggtggagccggtcaaggctcagcgggtgattggcaatacaacatgcaaagaggtcgctcctccttgaagcagcggtcgtcgacattggagccccttcctcgccagtcgccaacagcagccaccgacggccaccaccagtccaccacagccgtgcgcgggggcgagagaggttggggacatgcgcatctagcgttcatccgctgcttgggttag

SEQ ID NO: 20615 - DNA, 3408 bp, Oryza sativa
  Clone ID: PAT_MRT4530_25965C.1
atgcccgccaccgccacgtgtccaaaggccctccacgcccacctcctccgttccggcgccctcttcgccgacccctccgcggcgggccccctcgctgccgccgcctccctcgcctccctcccctacgcactctccatcctccgcgcccaccccaccactttttcctacaactccgccattcgcgccctcgcccgcgggccccgcccccaccttgccattttgctctaccgcttcatgctctcccactcccgcttccaccccaacaactacacctacccaccacttcttgccggctgggcgcgccttgccgattccgattcctcctcagctgcagctgcagctgctgcgggggttgccctccacgcctccctcttccgccgcggcctcgagtctcccgaccgttcatcagggcatccctcctctccttgtacgccgccgcgggggacttgcccgctgcacgccaggtgttcgacctcagcccccctataccacagggacctccccctttggaactcgctccttcacgcctacctttcccgcgcccactacgtccaggtgctccgcctcttccgcacgatgcgcactgccgaccacgtcaccctgctcgccctcctatccgcatgcgcccacctcggggcgctccacaccgcccgctgggcgcacgcctacctcgcaaccacctgcagcttccccatcacaacaaatcttgccaccgcgctcctcaacatgtacatgaggtgcggcgacgtccaaaccgcatgctccctcttccactccactcccactcgccacaaggacgtccacacctggaccgtcatgatcgctggcctcgccctcaacggcttctccaccgatgcactccatttgttcacacacatgaaggaccacaacatacagccagattccgtaaccctcaccgccgttctcagcgcatgtacgcatgctggcatggtggacgagggcaagaggatcctgcgccgtatgcctctcgactatcatctgcaacccaccatagagcactatggttgcaccgtcgatctgcttggccgagcaggcctgctagaggaggcattggctcttattagggccgtcccgttcaaggctgacgttgccctatggggtgctctcttggtggcttgtagatgtcacaggaattttgagatggggcagatggttgcgatggaaattctcaggttggatccccagcatgccggggcctgggtgttcttatcaaatgtatatgcggctgctgggaaatgggaccttgtacaagaggtcaggagctcgatgaaacaacacaggatacacaagcctccaggatcgagtgttgtcgaacttgatggtgttgtttacgagttcttgtctggggatcattcacatcctcagtctgatcagatatatgcaatgcttgatgagataggcaaaaccttgagcctcaaagggcacaagcctgccactaaactagttacctttgacattgatgaggaggacaaagaagtttgtatctcgcagcacagtgagaagctggcagttgcctttggactgataaacacgaggagaggggctgttatccgaatagtgaaaaacttgagaatctgcgaggattgtcactctgtcatgaaggaatgcatatgcttacgtttgacagttttctacccaaccttatggaaaacagtaattgcaagtcacagtcaggaatgtgaaaacataattgttttaagaaaaatgttagagttaagaactggagatatatttggagctgtgttcattgcctgcctcatagcgttgcagatcatgggatcccaaagaggaaagcagtcggagaagtcattttggcctttaattgtgatgaagaaatggctaaacattaagccaaaattaaatgatttcagtgaagatgagtttgatacagatggaggagatgaggatttcagtgactgcgcagaggatgctagcgacaacttctttgagatacatgaaaacaaccacaccattaacagatcatcaggggataaaataatgcctctgcgaagactacagagaaggaaatcagaaagtttgcgtgttaactacataagtaacaaagatatgaggtttggtttatatgagttcatctttaatcctcagtgcattccatgtcatgcatctggcgattttataatagtggttaccaccagggtgatgataggaacatggaacgttgctggaagagcccctagtgaagatcttgacctagatcagtggatttgttcccaagagccagctgacatgtatattttaggtttccaggaagtggtcccattaagcgttgggaatgtcttgggagcagaagatagtagaacagtacctaaatgggagggtattatccgccgtgctctcaataagtctcaacaacccaaggcgaattgtaaaagctacagtgctccactatcaccattgcgagtacctattccttctgacgatggacatgatgatacaaaacgtgaatatgataaaatgacagaaaatttatctcctcagcaacagtgtagagataagcaaacaagtataagtaagtgcagctgtgactggttggatggaactagttcattggactggccagaatgcccactagacattccagcaaaaatatcggtatcaaatagagggttgaggagagtaatgagcatggggctatttaacaccgactatttggagaacgctcaaggatttgatctacatggtgtagcattgcaagatgggataagacgatcatatcgtagctctgggaatcttggcatgtcatggtcagaacagcaagagaaggtagatgttcttagttcggttgattatatgtctgattggacatcagatgacacaacttctgttgttggtcctgatgaaagggcaacttttgcaaaaggagaatccttaaagcctcctggaaattacgtgcgcgttgttagtaaacagatggttggtatatatgtttctgtatgggtttcccgtaagctgaggcaacacgttaacaacttggaggtagcttcagttggggttggacttctgggctacatgggaaacaaggtcatccttccctctgttgattgtcgatctctacatcaaatattttggtttggagatcttaattatcgtattgacatgccggatgctgaaattcgagatttagtatctatgaagagatgggatgatctcttgaagtctgatcagctaacaaaggagttgaccaatgggaatacttttgctggttggaaggaggggttgatcaactttccgcctacttacaagtatgaaacaaattcaagtgtgatcgcatactatggctgggaaagggtatcaagcaactatcatattggagctcagatttatcatgcaaggcaaatgtacatacagcgggatctgaatatctga

SEQ ID NO: 20616 - DNA, 294 bp, Oryza sativa
  Clone ID: PAT_MRT4530_25966C.1
atggaggcagaggtgagggcagcgcgtgccggtagcggcatggaagcggatgtgagggttgtgtggcaagcacacagaggacacggcgacagtcggagtgctgctaaatctatcgtctatctttcttccctttggtgcgcagtgagattggggagggcgcgttgcgacggggccagaggggtagcgccgtcagcgagggcgtcgggaaggagaggagattggagcggaggcggcggtgacagcgatggagcgggtggcggaggagcaaccgggcgcggggatgtaacaccctga

SEQ ID NO: 20617 - DNA, 662 bp, Oryza sativa
  Clone ID: PAT_MRT4530_25967C.1
gactctcatcagcattgtagacccagtaccaatgccaagaggatcgcgctgaactctatcataattcaacacattacgtctgttcttgctcctgtggtagcatcaaggtcatgtgcgtgtggaccatttggtgctgaagcgtgacaaggactagatcaaagttcatgattgttacatttcttgcatgacattcacaatgtaaggccatgtgctgagaacagcaggcatgaagggcactcagataagaatatttaacacacaggatggcactcgcatgtgagaagcgcgcaaaggattcgacaaagctgacatatacatgcaataggactatcacaccaatgtgcactggctggcagtgtccagggacaaaggaactgtgcatattctcagctacagaatgagagctgcagggtaagatgctcaggatgaacatcaacacccattgcatatgtccgacgccataggactcagcccagaacatattgctagtatctataccatagctactatacatgctaacatctggatcaatgctagctgatgattgtgatttatgaaagggactctgtcgaagtacttgagatcagagtggacatatgctcattgcatgtaccaagaagcaaagttacgtgatacagatcggagctcaaaagcactgcatg

SEQ ID NO: 20618 - DNA, 917 bp, Oryza sativa
  unsure (1)..(917): unsure at all n locations
  Clone ID: PAT_MRT4530_25968C.1
ntgggtctcggtcacggnggcncantngntaaagggaacaaaacaaaaacnaaaaaaannnnnnnnnnnntnnnnnntttttnnnnncnnnnggagacncggaggggnnctncgagcaaangacaccgaggcccaactagaagcctaaaaacgaaggagagacactacacacggtcnatnnnnggtccagccgtcgntgccccacgcgccgcggcgagcgcgaggccacacccaataaaaaaagaaaaaacaaacaatncgtgcaaaagaggacggacggaggggcgcggcaagcgcgaggcacccggagaggcgacaaaaaccaaaaaaaaaggagggggggacacgcgcataactagaggacaggaacacacgagcggaactacaacagaaggatgtcataaaatctcattggaccccctcgaaatacaagcaccaggtaaagaatagagcaccatacaagtgaaacccagccgccgggagaaacaaaaaaacgaacactcaggccgctaaaaacggcccgcccaaacgaccggcaacaaaacaaggaaaaagaagaaccaacgcgaccacaaacacgccgaagaatcaaaagccaccggacagcaacacaacagtaaacgagaaaacaaccccagcgaatggagcagaccaaaaaaaaacaaaagaaacacaacaaaacaaacagaacaccgccaaacccaaccaaaaacaaacagaaaaaccacaagggggaccacgcccacgcggccgtgggggaacaaacaacccgacccaaggggcgcgcacaaaaagggaccgccggaaaaaccgaaacagcaaacaaaaaacacccagaacagacaccagcgacaaaaaaccaaaatacccggaacaccaccacgacaccgaacgggaaaggaagagagacaacacaa

SEQ ID NO: 20619 - DNA, 1226 bp, Oryza sativa
  Clone ID: PAT_MRT4530_25969C.1
gaactagtggatccccgggctgcaggcttccatccacgtctcaccgccgtataaatataaccctccctcccccctaacccctcggcctcccccgcgccgccgcgttttccatttccactcctccccccacccaactcaccatcgccattccttccctccttccaccgctccctctctcttccatggccgtgcaggcgcagtacctctcccacgcctccttcccccacgacctctatggcctcagggctctggagggtgcgacggcggcgggttctttgttcttggacgaccacggcgggtgcgcgccggcgactccggcggcggccgcggctgggatagggcacacggtgctgagcgaccttccccggagcgagcttacctgcaacgacaataacggcgcgggatacggattcgtgccgaggaagagggcgcgcctggatgcggatgagtcggccggggcgttgatggcggcggcggcggcgcagcagcagcgcatggttcttccgccccatggccttgtctttcccggggatgtgcagagcagggcggtgggttgcggcgccgcgtccaccagcgggagggctggcaatgccgccggcctctcgcaggggctcctgtctcagctctatcatcagggtgtcgagatcgacgcgctcgtgcgactcgagagcgagcggatgcgtgcggggctcgaggaggctcgccggcgtcacgtacgggcggtggtgtccaccgtcgagcgcgccgcggccgggcgtctccgtgccgcggaggccgagctcgagcgcgcgcggtgccgcaacatggagctcgaggagaggctgcgccagatgaccgccgaggggcaggcgtggctcagcgtcgccaagagccacgaggccgtcgccgcggggctccgcgccaccctggatcagctcctccagtcaccctgcgccgcccttgccgttgccggcgcggccggcgccggtggcgccgagggcgacgccgaggacgcgcagtcctgctgctacgagaccccgtgcggtggcgacaacgccggcgcggatgacgcggcgtccaagacccccgccgccgcgctctgcaaggcgtgcggcgccggcgaggcgtccatgctgctgctcccgtgccggcacctctgcctgtgccgcggctgcgaggccgccgtcgacgcctgcccggtgtgcgcggccaccaagaacgcctcgctccatgtcctgctgtcctga

SEQ ID NO: 20620 - DNA, 348 bp, Oryza sativa
  Clone ID: PAT_MRT4530_2596C.1
cacactggagatcttcacttatctctgggtcggtgctgcgctcgggtaccaattcaattcatacgaattttgcctctagtttaattttcttcttcttttgctcttgaagaaaaaacaaattcatctcccggcgaaaaaacaaattcatggctttactaagttgttcttctctcttgttcttgcagggcagctctaaggcagtacatgatcttcgttgctttgagatacaccacggcgaccttcgtcactgccttctccaatatcgctcctgtcctcacattcttgcttgccatcctaacacggtaggttcttgattggaagacccaataaattctgaattattgcaca

SEQ ID NO: 20621 - DNA, 660 bp, Oryza sativa
  unsure (1)..(660): unsure at all n locations
  Clone ID: PAT_MRT4530_25970C.1
ctgcctctttttacatttcttcaccatccacaatcttcacctggccactcacagctgatactagacatcatcactccgcatgattgtaagataactgattctctaancactaacacagacttactctatgcacttatcagcatcgtacataactcgctttgccagcacatgcagacgtgcgcaagtactgcaactgagcatgatctcctatatcattgataggtactagaacatcacgtcttccctcctaccccgatctataaactaacgagtaactcgtgggaccacaaccattaatccactcggaataatactccaagtaactcacttttatgagcggagaacaccgttctcaacatgtttgaacagcacgatggaccgaactgtgtttcagtctgccttcccagccaatacaacatatggactaacccacgctggaacaaaaccacccaatcctgcaataaagcaagaagcggaaactactggctcctttaccgaaaaaatctagggctgatccatacctccaatagaggctggacttgcctacaactcctcgagccgatatttcttcctctagggccaaattctttatcttgagggccaattaacctataatgatgtgcataaaattccctgtgtgaaatagctgtcccctcgcga

SEQ ID NO: 20622 - DNA, 306 bp, Oryza sativa
  Clone ID: PAT_MRT4530_25971C.1
atggatacgcaggatttggataaactagaggttatatgcttaatgccatgtttcaaggtcaccaaatgccagtgttttcggtttgaatataagcttgaaaaacgattgaaaattttgtttgagtgtacaaaattagacggtcaactgacgggagggatatggaagagatcaaaatcaaatttggggatatacaaagaaatggtcctcagcctcccggcctcctttgtcccggagcaagcagcaattcgtaatgcagaggtctccaccctgaggtcttccggctatcttcgtaacccagaccaatag

SEQ ID NO: 20623 - DNA, 1167 bp, Oryza sativa
  Clone ID: PAT_MRT4530_25972C.1
tcactgtttaaggaaaacccacgacctgaattgtactatgtttgctgctaacagaatgataccaccatcttcagtacggtagctctctatcagaagagatgtggcactagattttgtgtatgcaccatcttttgaggactcctggacaagcacaatatgcattgctgcattgtttggtggcagctgcaagcggagaggagcgagtttgccagtgatagggctgcgtgtgcagatgattatgtcatggaggcccgtctcttcctgcaacttgtgtgtgagctcctccaagttggagccattgaatgtgaatgagcgtgtctcgtcgtcttcgtccacatcgcccttatcatctgcaatgtggtagtagattgcacggccctccaccttgtgcaatggcgcagagaaagaaagggaggactcgagtctagagggcgcgggcttcggcggtggaggctgcggcgacgcgtctttctccagcggctgcggcgggttcccggtgtacgatttggtgggccggtggtggacctcctgcggtcgcggcggctgcggcggcgcgtctttctccagcggcggcggcggcgggtgcccggtgtaggacttggtgggccggtggtgcgcctccggcggcggcggcggcttcttaagctcgggcgcgtgggccggcgacggcggcgcggcggaggtgggggcgcggtcgtggccgggggtgagcacctgcacgatctcgacgtcccagagcacccagtcctgcgtggcggtgcggtgcggcacgtcgtgcgtgaccgagttccgccacggcgggaggccgccgttggcgcggaggtagtggccgtaccgcgtcttgagcttcgcctggaagccgtccttgacgggctcccactccagcgacgagtcggtggcgcggccgccgggcggcggcgcctgcagcaccttgcggcccgtcatcccgagcaggaagggctcgttggaggcggagaggtagcggccgtatcggctgcggaggcgcacgacgccgggtgagtgcggcacccgctccaccgtccaccgcgcgttcgtggcggcgccgttcctgtcctgcgtgacgtgcacctcgtcctcgtcggcgtagaggaacttgtcgtggtggctcttcagcctcaccacctgcgccctcgcgaacagctccat

SEQ ID NO: 20624 - DNA, 2067 bp, Oryza sativa
  Clone ID: PAT_MRT4530_25973C.1
ccccgggctgcaggatcggcacgagggcagagggcgtgccacctaggctccagtgtttttcttttttttcgttggtacaaatgacattaagccatgaaattagcaagtagcagacacagttatggtcatgactcatcaaccactgattgaaaaggcaatacatgttcccttgcttggatcttcagaagaacagtcaatagcccagctgcccccaaacacaagcagcatatggaaacatcggctacaaaaggttctagtactagattcacaatcttgagcacaatagtggtactcgtttctacactagtttttctcctaaagtgcgtcatacctactgtcaacaaaacaaaaggggcccttccaccttccagtgcgctaggcaaacatcatcgtcgtctctgaacgacatagaagccctcagaatgctcggcacttcagcttgtccatgagaaggtgcgcaacagactcgtaaccttgctcccgcgcgtcgtatatggcaattccagttggtgataacttcctcttcttcaagcagatggagctgttacatatccagaatttcttggtacccttctcctcaatacagtgagggcacatccagttcttgttcttcctgacctcatccatgtcttccccatacctcactttcaggcaagcacggcacagtattccataagaagaatggcaagaggagcaatccgtcttccctatgcaaggctggttcaggtctccttccccgcagcgcttgcagccctcctcgccgcacaatttcttctgcctgcagaaatggcagcaaatcccaagaacagggtcgtacacggcgcccctccccttgctgtcacacctccgctcctgcaggatccgcaccctctccttgtcgatcaccaccatcgccttcttctcttcttgctcctcctcctcctcctcctcctctgcttcctccgcggcaaacttactcaaagatcctttcagaggcagcgccttgtgctccgtcgtctgcccgttaagccgggcggaacggcggggacccgacgcggatccggccggcgccgcggcggcgatggcgaccaatcggccggagcggcggagcggggtgaggacacgcggcggcttggggttcctcctcggggttgtgccgccgatcccggcgcggcggctggctgctgccgaggcggacgcggaggcggaggcgatggcactgaactccccggcgcagcggcgcaggccgagcatctccatccgtgccaggttctcggagatgcgggcgtcgcggacgctctcgtagtcggacttgccgccgagactccccatggcggtggcggcgctcttcggttcggtggcggggcggcttccggagattttgctgcggttgtcgtggtggcttcgcgtggcagaaaattgatccgaagatgtgttgcagaggcgctggagttcttggcaagaaatcgtctcgacggcgagaccgagcgacatgcaccgcggcggcgccatcgcgtagcacctcacgtcgccgcggcggaggccgagccgctccagccagcacctcaccgccacgacggccgcgagcgcggcgaccccggcgccgagcgagtggccgacgaacacgagcctgcaccccgccggcccggcctccgccaccatccgccggatcgcggggccctcccggtcgagcagccacacggcggcgcggaggagcccgcggtgcgcgtgcccgcccgcgaacggctcgggcccgccggcgtcgaggagcacgcggtagtcctcgagccgcgcgagtcccagcccgcgcacggcgagcacgacctccccgcgcgcgcggtcgtgggagaggcggtacggcgggcacagccgcgacggcgccggcgtcggcgcctgctccgcctcgtcgtgcccctgctgccaggccgcgagcgcggagcggcacgcgcgcgggacgggcgcgaaggaggagggcgaggccgcgggccaggacgcgctgtcgtcggcgccggacagggagaggcggcggagcgcccagcgcgcgcaggcgagggagagcgcgcactcggcggcgcaggagagggccat

SEQ ID NO: 20625 - DNA, 313 bp, Oryza sativa
  unsure (1)..(313): unsure at all n locations
  Clone ID: PAT_MRT4530_25974C.1
ccatccaaaactganttctgcaaatttatcttgttaagttnccatattcttgcgcaatcccggatgaaaaaagtactttatctgatcctaaaacatctctcanaattgaaccagttantatacaacacagtccatgtaccgttctcctcaaattacacctttcacagggaccatgggtacatatatatatgctctctatagcgagaggccaaaaaactaataatcctccttcaggtcggaggtgtagatggtgtacaacgaccatataaggcctaacacccctagcaggatccaccccagcatgttgttgctc

SEQ ID NO: 20626 - DNA, 480 bp, Oryza sativa
  Clone ID: PAT_MRT4530_25975C.1
gccgccgcccgccgctccggcaactccagcttcggcaacgtcagcaatggcggcaggatcaggtgcatgcaggtgtggccgattgagggcatcaagaagttccagaccctctcctacctgccaccgctcaccgcggaggacctcctgaagcagatcgagtacctgatccgctccaagcgggcgccctgcctcgctctcagcacggttggcttcgtgtaccgtgacaaccaccggtcctctggataccactaccgtcggtcctgtaccatgcggcagctgcccctagttcgggtgccccgccccccctcattgctcactgtctctcacgatgcccagatcgcttcccccatgcaccctcccctcttatccgttccttcctcttcatgcacgtccatcctatccctttcatcctttcccaaccccctcccctccttggcttctctccctcttctcttcccgttctctcctccaccccccgtc

SEQ ID NO: 20627 - DNA, 229 bp, Oryza sativa
  unsure (1)..(229): unsure at all n locations
  Clone ID: PAT_MRT4530_25976C.1
gcaagctccaaccacattttaactaatggagggntttacaaagacctaggcctatctacaccatgtccaaaccaatgatttaacaggtaccgaaaaaattactcggataatatccacaggttacacacctaaaattaatgtccgatatgagccgataatcaccctaaatcatgcaatctaccgtttaacgaatcctgaacacaccccttacctttccagcccttataat

SEQ ID NO: 20628 - DNA, 478 bp, Oryza sativa
  Clone ID: PAT_MRT4530_25977C.1
aaaagacaaaagtttgcgaagacaattaaatttgtcatggtaacttggtaccataaatcccaccattcagcgtgagagtcaaatccaccattctgcatacctagcaaagtctaattaagccaaagatccttcaaaattaccacactacatcattacatcaaaggagtttttatgcacacatgagaagctcaaaatgagctgcatttcaactttccaacaagaagcttccaaacagtgcagctagggtttcctgcagttgtcttgcattaagccctcaaccatacattgatccatgtacttcacaagccacccgctttaatagttgcgtcctgcatttgcacctttctttgcttttcctcctccttttgaccaagatgaaatctagcttaaataatccgaggtgtttgataattgatatgatggttggagatgcactgttaaatttgcaggttgatttcatccttcttggggggaattt

SEQ ID NO: 20629 - DNA, 287 bp, Oryza sativa
  Clone ID: PAT_MRT4530_25978C.1
ccctctgtcctcgcacgtatgccgtaactcctccatcgtggctgcgcgtccgtcaatgcgcgacgttcgacgcccaatcgcagcatgagtagtagcagagaggcacgcgcttctgctcgcgttcgtcgtcgtcgccgtcgagctgctgctggtgtctccgagactccacttgagccaacaggatcacgcgctgctccgagggaaggcttcctatgaggcgaagagcggcgcgctagactcgtggcgggcgtcagacgcgacgccgtgccggtggctcagcatttgtc

SEQ ID NO: 20630 - DNA, 768 bp, Oryza sativa
  unsure (1)..(768): unsure at all n locations
  Clone ID: PAT_MRT4530_25979C.1
ccacgcgtccgcttctctttatagttttatctccgcctcaccaccgcctcaccgcctcttccctcacgcatgccgccgtcgcaatctcacactcctccaaccctcaacgaagcgcttccgccacagccctcaattttcgtcgccgcatctgctagcaaagatccaggcgcctggagaagaggaacacgagctaccaccaccttcttcccttcatctgccagtgaggatggtcgcatcttggtgaggatggcggcaacgcgccggcgcgtgagtcccccacagcgtcctccaactttttttctctatagcgcaatactggttcgaagcaagctcaactatttaatggcaatatatttgtcggtactccactacataggttgcttcgattttatttctacaagatgcagaatgccctcttgatgttttgatatggaggagttttcagacggagaagaacaagctgcttggcagcccatacgcatgtgtggctgtgcaaatgcagcctgcgatggagtgccacaacgagctccgctaagttactttgctaggccatccttgcgatggcagcttggcgcggccagggattccagcagcccatgggtggtgttcaaaatgagcagatggttcatctctaccacttgcagtctgattctacagtatttcctaaccatggctatgaatgtttttttatgaagaaaaaatcccatgtcaaacatacctcaaatctcaagttacatatgaccagngnntgatgtcatactgactctc

SEQ ID NO: 20631 - DNA, 204 bp, Oryza sativa
  Clone ID: PAT_MRT4530_2597C.1
atggccgacggcacagcggcgctccgccccgcgccccggcttgggcctacccgccttcggccttcccaactcgcgccgttgcgccggccacagatgcagccacagatccaaggtgtccaccatgtaaatgctgcaaatgcggctgcagagtctgactaccctcgttccacttttttaattatgagtaatttatctgtgaattag

SEQ ID NO: 20632 - DNA, 288 bp, Oryza sativa
  Clone ID: PAT_MRT4530_25980C.1
ttagcggagctcgttgtggcactccatcgcaggctgcatttgcacagccacacatgcgtatgggctgccaagcagcttgttcttctccgtgcgccggcgcgttgccgccatcctcaccaagatgcgaccatcctcactggcagatgaagggaagaaggtggtggtagctcgtgttcctcttctccaggcgcctggatctttgctagcagatgcggcgacgaaaattgagggctgtggcggaagcgcttcgttgagggttggaggagtgtgagattgcgacggcggcat

SEQ ID NO: 20633 - DNA, 372 bp, Oryza sativa
  Clone ID: PAT_MRT4530_25981C.1
atggagacggatgtggcgaggcggtatcgacaacggcgaagtgggctgtgtctacaaaagtcaaaagatgtgtctaatgttatgtggggaatcggttacaaccagacgtgggaagaaaaaagagcagtgataaggctcggacgctttacgatggttgacggacaaggttacaaagaggaaaacatagccggatatggctccagtttccttttgctgatgaagataatgatgttggtgatccagtcggattttagcgttgacgaagtccagactcatgaagcaaataactttgttgacaatagttggccgaagatgaaagtaatgccgatagcaaatgtgccggtggtgatgttcatgataataaactgttga

SEQ ID NO: 20634 - DNA, 1334 bp, Oryza sativa
  Clone ID: PAT_MRT4530_25982C.1
tttttttttttttttttttataaaaactaaataaatttaaacttgcatctttcatgtacatacaattattacaattcagacatgctgcagatttctctcgctttgctgaagaacagagatatcactgtaatatctggactgaatatgtcgaccaaatcatgacaaagcagaaaggtaaaaataaatctatttgtttggattggttcaattcaagatgtgtcaaaatcgacttgagagtcagtatgacatcaacactggtcatatgtaacttgagatttgaggtatgtttgacatgggattttttcttcataaaaaaacattcatagccatggttaggaaatactgtagaatcagactgcaagtggtagagatgaaccatctgctcattttgaacaccaccatgggctgctggaatccctggccgcgccaagctgccatcgcaaggatggcctagcaaagtaacttagcggagctcgttgtggcactccatcgcaggctgcatttgcacagccacacatgcgtatgggctgccaagcagcttgttcttctccgtctgaaaactcctccatatcaaaacatcaagagggcattctgcatcttgtagaaataaaatcgaagcaacctatgtagtggagtaccgacaaatatattgccattaaatagttgagcttgcttcgaaccagtattgctgcaacaaaaatagggggatcgatccaaaaaaataaaatccagcaagatgagagaaaattagatggggaaagttacctgttgtaaatgtgatgagattttccatgcatacattgccatagaaaaagaaaattactgatgcgagggggagggagcgcaccgctatagagaaaaaaaagaaaattactgatgcgagggggagggagcgcaccgctatagagaaaaaaagttggaggacgctgtggggaagggaccatcctcactggcagatgaagggaagaaggtggtggtagctcgtgttcctcttctccaggcgcctggatctttgctagcagatgcggcgacgaaaattgagggctgtggcggaagcgcttcgttgagggttggaggagtgtgagattgcgacggcggcatgcgtgagggaagaggcggtgaggcggtggtgaggcggagataaaactatgaaagagaagaagaggcggcggtgactcgcttctctctccttcgagtcggcagatccgtcggggaggaggctagggccgccgctggcagatgcgacggcggcggcggcggcgccgacacgcgcgaggggaggtgagaagggggagggtcgcggaggaggggctgggtgaggccccggccggccg

SEQ ID NO: 20635 - DNA, 768 bp, Oryza sativa
  Clone ID: PAT_MRT4530_25983C.1
cctccgcgaccctccccctcctcacctcccctcgcgcgtgtcggcgccgccgccgccgccgtcgcatctgccggcggcggccctagcctcctccccgacggatctgccgactcgaaggagagagaagcgagtcaccgccgcctcttcttctctttcatagttttatctccgcctcaccaccgcctcaccgcctcttccctcacgcatgccgccgtcgcaatctcacactcctccaaccctcaacgaagcgcttccgccacagccctcaattttcgtcgccgcatctgctagcaaagatccaggcgcctggagaagaggaacacgagctaccaccaccttcttcccttcatctgccagtgaggatggtcgcatcttggtgaggatggcggcaacgcgccggcgcgtgagtcccccacagcgtcctccaactttttttctctatagcggtgcgctccctccccctcgcatcagtaattttctttttctatggcaatgtatgcatggaaaatctcatcacatttacaacaggtaactttccccatctaattttctctcatcttgctggattttatttttttggatcgatccccctatttttgttgcagcaatactggttcgaagcaagctcaactatttaatggcaatatatttgtcggtactccactacataggttgcttcgattttatttctacaagatgcagaatgccctcttgatgttttgatatggaggagttttcagacggagaaagaacagctgcttggcagcc

SEQ ID NO: 20636 - DNA, 3719 bp, Oryza sativa
  Clone ID: PAT_MRT4530_25984C.1
ctaaccttggtgacggggtttctacctttttgtcatgcctgtacaacttgagcataaatagtgtttcaacaaacaagtgaaggatcaaagcaagacgaattctttcagcactcaatgccctgaaatgatagtagtctgtcacaagccgcggagaacgaactataagacaagtcagtcagaagtactaattctagtgaaattacataaactcctgttgggtgaaagtacaaaataatataatagataatgattttccagtgcctagtttccatctccggttactgctaatgactgaatttacatgagattactcccaatttcgcatccaaacgctcagttcgcacacagtatcgatgttagcaaatgagggtcaaatgtcatgatctgccgatggtgtcgacgttgtcgagccagctaaccacttcctgtatcgccggccggctgaacggcgtcgagtcgacgcagaggcatgcgaggtcgagcacgtacagcatctgcgcctcgtcgcctttgcccctcagccgcgggtcgagcacctcgccctgtctcccctgcgaccgcatctgcagcacccaccggacgagctcccgctgctgcccgtgcggcggcgaggccgcctcgacgggccgtcttttaacaatcaaagcgagaatttttcaacggcctaggttccacctcagttttatgttatccactcatttatcttctgaaactacaaatctcgcatggaagtacaatctgtcccgtgagtagctccatcaacacgacggcgaagctgttgacacgtccgcgccgcgtcgccacccacgcctggccgtactccggcgggatgtaccccggcgtgccgaccagctccgtcgtgacgtgagaccggtcggggaggaagaggcgccccagtccgaagtcggcgacgcgggcctcgccggcctcgtcgaggatgatgttgctcgacttgatgtcgcggtgcacgatctgggggttgcactggtcgtggatgtagagcacgccgcggctggcgccgcgcgcgatcctcttcgcggcgcgccagtccagctacgagctgcggcgcgcccgcgccaccggcaagccgctcgtgcagccagtcgtggaggctgccgttcgccatgtacgggtagagcagcagccgcagccgcccgcggatgtagaagcccaggagagggacgaggttctcgtggcgcgtcgcggacagcgcctccacctccgcctggaactcccgctccaccaggcacatgtcgccgttgagcttcttcacggcgagccgggcgccatcctccaactcggccaggaacaccaggccatagccgcccgacccgatgattctctccgggctgaagttgttggtcgccttcaggatgtccacgaacgtcaagctcttcgccgcctcaccggcggcctccgacatgaacaggatcgtgtctttggagcagtcgccgtacagctccgacatggagtcgaacagggacacctccacgcctttgccgccgtcacggacagctccattggacatcacttttctgacggtgatcacaacgcatcccaggaagacgaccagagcaacgaggccaatgcagactccaagaacgatggcgatgaggaccctcttcccgacgtgcttgtccggatcatcgcctctcgtcgcgccgttcatgttgccacaaggcacagagatcgcccggccgcaaagcttcgcgttccccatgaagctcttcggcgggaacgcgtcgaactggccgcccgtggggatcggcccctcgaggtcgttgtgtgcgacgttgaagacggcgaggaagtttagcttgttgagcgcagaagggatcgtccctgtcaggcggttccagcgcaagtcgagcacctgcaacctggcgaggccggtcagctccggcgggatgccgccggagaggttgttgtaactgacgtcgagcacctgcagcgtcttcagcttgccgacctccggcgagatcgtgccggtgatgccgttctcgccgaagttgagcgtcgcggcgacgcccgacagctggtagtacccgcggccctgccggttcgccgctccgttgtccggattcagagcgaacgtcaggatgagatggcctggattgtactccgccatggcctgctccgacgtcagtagccgcatctccatcagcgacggcggtatcaccccggacagctggttcccggagaggtcgacgtagtacagcttcggcatggcgccgagccagctcgggatcgggccggtgagccggttgccggagagattcaagatgttgaggtcctgcagcttcgacagccatgacgggatcgcgcccgtcagcgcgctcttctccatcacaatcacccggacgctcctgacgtggtcgccgacccagccggcgtccggcagcgcctcgccgtagaagttgtacgacacgagcagcgcggtgaggctcgtgcagcccttcaggttccagaacatgccgctgatgttgacgaaggagttgattgtcaacgagaacaattcgagctctttcaggttgccgatctccggcgagacctgcccgcccatgacgttgcggctgacgcgcagcgccttcatcgccgtgcaggtgtagatgctcggcggcatcgtgccggtgaagttgttggacgccacgtcgaagacggtgaggttggcgaggccggagaagtcaacgtccgtgaggtccccgacgaagctgttcgaccggaggtcgatgaaccggaggctggtccagttgctcaacgctgacgggagcgttccggtgaggttgttattggcgagccggagctcctccagcttcggcatcttgctgatcgactccggcaatccgccggtgagcaaattatagcccagatcgagcgtgaccaggttcgtcagcttggcgaggctctcctgatcaagccggccttctatctggttcgccgggagctccaggtgctggagcgccttcacgtcgaagagctcgccggggagttcgccggtgaggttgttgcggccggcgctgagaacgcgcagctgcgagcagttgccgaacccgggggagatgaccccgctgagcacgttgacggagaggtcaagaacggcgagagccgggcagctcacgcacaaggaggggatcgagccatggaagctgttgttgctggcattcagcgacacgaggcgcggcgtgtgctcccagatcgcggacgggaactgccccgccaagaggttgctcgacacgtcgagcacctccagcgagaggccgccgcgggcagcggcgcccgtcgccacgctaggtagctcgccggagaggcagttgtagctgacgtcgacgacggtgacattgggcagggagaagagcacctctgggaactggccggcgaggctgttgccggacaggttgaggtgcgtgagcccggtgaggttgccaatcgacggcgagatcgtcccgttgaatccgcgtcccggcagcgacagacgcgtgaccgcgccatcgccgtcgcctgcgccgccgcaccccacgccatcccacctgcagcagtccggcgatcctcgccagtcggcgacgatggcatcccccgccggcggcgaggcctcggcgaggaaggacagcaaggccgccctctccgcctccgcgcacgcagctgcgcgcccgcagatggtggcggccaaaaccagcacaagaactcccgagacgaccacgtcgactcggccactcgtctcc

SEQ ID NO: 20637 - DNA, 957 bp, Oryza sativa
  Clone ID: PAT_MRT4530_25985C.1
atgacgcacctgcgcgaggacggcggcgaaggacatcccaagaggaagcgcgagatcacccggcagctagcgccggcggagtgggaggcgacgcccaaccaaacgctgcggcgactcatccaggcgtggacgacgatgcttggcggcggcggcggcggtggcaggcagcggcatcttgccgcgctcagggagatcaaggccattgccgtcgagagcgaccgcaacaagcgctgcatcgaggccacgcccggtgccgtcaagttcctcgtctccgtcgtcgtccagagccacgccgccgcctccacctccacgtcggctaggttggacgatgacctgctcgactcgatgatcgattcccccatgtcgacgagctcgccgaagaaggaggcactgggcgtgctctactccctcaagccgtccgagcccaccctgcgccgtatcctcggcaaggacaatggcggcttcctcgacaccctcgcctccgtgctccgacgcccgaactaccgttcgcgcgtgtacgccgtccttctcctaaaggtgatgacatcggcaatgctgccggagcggctaggctgccgcccccgccgtcgcagcatccggggccggacccccttacgcgagcgttccttgaagaagcatgcgagccggacgatgaggcgttcgcggctgcagccgccgctggcgaggagcagaaggatgacgctaccgcgtccatctcgcggcagcgaccggcgcgtgagatttggggtagaagaccccgtgatccggcatgctagttgcggccacgccgttcgggcggcccggcgtcctgccgctgcagacgctcggccaccggcatgccgtcatcgtcgccgccgaacccacggacgcttcgggaagccagctacttctcgggctccgtctcggcagctcatcgagacagctcgtctcgtccctccagcgaaccggcagcaatag

SEQ ID NO: 20638 - DNA, 216 bp, Oryza sativa
  Clone ID: PAT_MRT4530_25986C.1
atggaggctggcccttggaaccctagatggctcagcagcgcagccggcgggtgggactggagaggaggccggtgggggaggcgggagtccgacgcaactggaagcgatcatcacgcacacaaagtcaacatctccagcactatggagtcttctggcaaggatacaaacgataaggatcacctgtttgaacctcctgaagatgaagataaaaattaa

SEQ ID NO: 20639 - DNA, 513 bp, Oryza sativa
  Clone ID: PAT_MRT4530_25987C.1
atgtgcgggcggccgctggggctgcagttccaccacgcctccggcgacctgtacgtggccgacgagtacctgggcctcctgagggcgccggcgcgcggtgggctggccgaggtggtgacgacggagaccgccggcgtgccgttcaacttcctcaacggcctcgatgtcgaccagaggaccggcgacgtctacttcaccgatagcagcagcacgtaccgacagcagcagcacttaatcgtgtgccattgccacgctcgccctccgcccgctccgccgccgcgctcgccctccgcttctttgcccgtggccgcgctcgcgctccacttctcggcccgccgtcactccgctgccgcgctcgccctctgctatgccacccgcatccgcgcgcaccgctccgcctgccgccggcctctttcactgaagaagaggaatagagaagagaagagaaggagaagaaaagagaagaaaaaaaatgtgcagttgtcatgtgggtcccatgtactttttttttaa

SEQ ID NO: 20640 - DNA, 298 bp, Oryza sativa
  Clone ID: PAT_MRT4530_25988C.1
tggactcccggctagggcgggttacaacaactgcggacggacctggcagcacaagtttctactgggtgtcacgcggggggtaggcacgcaccagcgatacaggtgtgtgctggcccatcactccggtagccatgggctcgatcggacgggtggtgggcatgccttgatttattgcctccatccacgagggaggctcatctattcccgaattcgctgatccagatattctgcatagaagcttggcgccagccggcttcaattgcacaggccccactaatgagttgtattacgtatcttg

SEQ ID NO: 20641 - DNA, 426 bp, Oryza sativa
  Clone ID: PAT_MRT4530_25989C.1
atggaatcagcatgtccgagtttaaattttaaatttaacacgggtgcttttactaatgtcctcatcgacatcgacaacaatgcgctcgtgaaatacccgttagacttgtggaagacacggatcggaggaggtgagcagctgctacgtggacggtatggatggatcgatcaagcttatgtacgtgaatcacgcacacgacggccggccggcgacgagccgcgcggcgaagtaaatgtgtcacgtcggcgaccagccgaccgaccgatcggacggacgcccactgtacgttgcgtcgactcccacacgtacctaggagtagctactgttaaattgtgtcaaaattttagaaaatttcggtccaaaaaataccgaaatttctgttctactgaaatgtccgagattttagctgaaatccaaattggaaac

SEQ ID NO: 20642 - DNA, 546 bp, Oryza sativa
  Clone ID: PAT_MRT4530_2598C.1
caggaattcggcacgaggtatctttctcctcctcccactctcggccccccgcctcctcccttcctcatctctcctcttactaatcctctccttttttttctttcttgtagactaatcctcttttctttcttctttcttgttgtagctgcgagccgcgcgctgggggcagcggcggcggcgacccgcgcacacgcgcagacgggcggcggcgatggcgacccacgcgcacggggcggcggccggcgcgccgggcggcagcgaagggtgcggcgacgagccgtggcggaggggcccagtggcgagccgcggcggaggggcccggtggcgagccaccacagttgcggtgggacgtgaaattttggggcggctgccaccttgccgccgatctggatctggcgatttttcatgtgtatttttgttgtttttgatttgttggtctagatctagagttgttcatgatttttggatgatttgtcgttgagttgtggatgttgttgattttgtgaatgtatttgtgttgatgtgaatgaatttgtgatgacctga

SEQ ID NO: 20643 - DNA, 286 bp, Oryza sativa
  Clone ID: PAT_MRT4530_25990C.1
caataaggcatgtaaatctaaaacagacaacttattttaggcaagttcaaagccatcatttcttatctacaatatctgactacgactagttgactgttgttgccaaagaaggttaatattttccttacctacgtgcaatctggtgactgcttcacacggctatggtaaatatttggccaggcgacaataggctgcgtttgttttcactattcagaaccaccgatgccatgtcggaatccattatgcacaggttactcgaagatcatccccgttgcacggagatcca

SEQ ID NO: 20644 - DNA, 195 bp, Oryza sativa
  Clone ID: PAT_MRT4530_25991C.1
gtgacagccagcacaggtaaaagcttgccgaaacttgcaggtgtgcagacacaagcgagtatcctggcaagtgcacatgggaagcttgccttgcctgacgtacctgaggagcctggacatataggctatgcaaccccaggtcccttatgcttgatggtggtatagactatgtatagccaagggcgtgtcttctgt

SEQ ID NO: 20645 - DNA, 241 bp, Oryza sativa
  Clone ID: PAT_MRT4530_25992C.1
atgagcatgaggccctttctttgcggatgggggatcttggctccactggacgccacttggcaggcactcctcgtcttgcttggtcgatgaaaatcagcggccgaggccgcagcggcagaagctgccgtcttccttcaccccaaggcccaacagatcggggacgctgacactctgttgctgctacctttatcccccaaagagatggtggtggtcaccaggcaattcagccatggggcacgtg

SEQ ID NO: 20646 - DNA, 2772 bp, Oryza sativa
  Clone ID: PAT_MRT4530_25993C.1
atgagagggaggaaacaaaataaggagagtgagatgaaaaaggtgaaggaaaacctcatgagagagataaaaaatatcgaagatgaggctgatcacagaaatctttcttcagatgaatggcagaaaagatactttcttgaaggcaaattgaatcagatttattttgatgaggaaaaatattggcaaggaaggagtggagaaaaatggcttctagagggtgatgctaacacatctttcttccatggggtagctaatgggagaaagagaaaaagtttgataagagctttagaagaagatggtagaataattgaggaacctgcagaactgaaagctcacatatatcagttctataaaaatctgtttggtgctgaagttgccccaaaaattttcctaagtcaagatatgtggatgcatagagggaggctaagtcaagaagagagagagcatctaatcagaccctttacctttgaggaaatggatcaagctttaaaacaaatgaagactgatacagcccctggtcctgatggattcacagtgagcttttacagagccttttggccccagttgagggatcaatttaaagaaatgttggatctactatttgaggggagactggacttgtggagaataaactatggtgtgattagtttaattcccaaagttaaagatgcaaacactatcaaagctttcagaccgatttgccttttgaatgtctgctttaagctaatcaccaaaattctgaccaataggctgacgctagtagcacataatgtaattggggagagtcagactgcctttattcctggtagatttattttggatggggtgattattttgcatgaggttttgcacgaagtgaaaaaaactcaccaatctggcataattctaaaattggattttgaaaaggcatatgataaagttcagtggagtttcttgtttgatgtgcttcagaaaaaaggttttgatgataaatggatcaagtggattaagtcagcaactattgatggaagagtagcaattaatattaatggggagattgatcaatactttaaaactttcaggggagtcagacagggggaccctctatcacctttgctttttaacattgtggctgatgccctttctgagatacttttaaaggccaaagaggctggtcatctggaaggcttggtacctcacttagtgcagggggggctgacgcatttgcaatacgctgacgacactatcctgttcatgaccaataatgatcagaatgtgataactactaaatttatcctacactgttttgaggccatgtcaggattgaagatcaattaccagaagagtgaggttatagtccttggggagaacccagaagagactaagagagtggctgacctttttaactgcaaatgcggtaagttccccatgacttaccttggcattcctatcagtgaggggaggctgacagcagcagatctggctattccccctgataagattgagaaaagactttcaacctggaaatgtggtttactttcttatgggggaaaagcaatacttgtcaattcctcacctatgtatatgatgggcttttatatgctccctgaacaaacccatcagagaatggattctattagatcaagatttttttgggaaggaatagaaagaaaaaggaagtatcacatggttaaatgggaggctctttgcagacccaaagattttgggggcttaggttttcttgatactagagtgatgaataaggtacttttgtgcaaatggatttttaagcttgaatcagggcagaaggacccctgctgtgatttgctaagaaggaaatacatgatgaatgggggaggctttttccagtcaagtactgagggatgctctcaattctggagaggtttgcatgaggtaaaacactggttgaaattgggcagctgttatgatttaggggatggcagtgctactagattctgggacgatgtctggctaggagatacacctctgaaaatcaaatttccctacatttacagtatagtggctgatcctgggaaaacagtgagtcaattatggtcctctgatggctggaggattgatcttagaagatcgcttggtgccgaggagctagttgaatgggaacaactacttgcagatcttgcaaatgttcacttatctacggatagggacaggatgagatggaaattaacaaaatcaggacagtttagtacgaaatctctttatagagaaatgacctttggggggattagagacataaagatgcaagaactttggaagacacccatgcctctgaaaattaagatctttgtttggctgatgcttaaggggagaattcaagctgctcatcagcttaaaaagatgaagtggaatggagatcccctctgcaagctctgtggtgctgaagaggatgtggatcacctaatgtttaaatgtgcaccagctaggtttttatggtgttgttttagagatgtgtttcattgggatcacgtcccttcttccaggagggagtttatgaatatcttgatgactatgggggatgatagggcaataatctttttacacgtaatttctgcagggatttgggcgatttggcttgtgagaaatgactgggttttcaataacaagctgctttctaatatatgtcatctccctcacaaagctgtttcgtttttgatccagtggagagggctgctgccggagaagctgaaggtcgaagtggatggtctgaaggactcattgcttgccagtattcgggcgtcaggaccaaactag

SEQ ID NO: 20647 - DNA, 273 bp, Oryza sativa
  Clone ID: PAT_MRT4530_25994C.1
atgaggactgcaagccatgagtggtgtcgcgaccagcgggtggagtgcacggcgatgacaaaagcgtggcggtgcggccatgaggacggtcaggacggcggcggtgcggggacaccgcgtgacgtcgcccatgcccgaagcgatgacatcggcggtggcagttgtggcatagatcaagtgaagcgcgggtgcacatccaaggtggagcaggaggacatggtgcggcgcaatcgcagcaggagcagcagccaccacctcctcccatggcggtga

SEQ ID NO: 20648 - DNA, 176 bp, Oryza sativa
  Clone ID: PAT_MRT4530_25995C.1
ggcactcgaaccttgcaagttcacaaggatgtgaaaagggaacccacacagagttctttccgacaggtttggtcatgggtcatcatatggtcttggcagtcaagcttggtcttggataaggggtaagagtacatcggtagatcaacagatggcatggggtacttggaaacaagtgt

SEQ ID NO: 20649 - DNA, 384 bp, Oryza sativa
  Clone ID: PAT_MRT4530_25996C.1
atgcggtgcgtgtcggtgccgtccccccgccctagtcgagtagtgacgagagacgtggggccggccgcagctcgtcgccagcgtgagagtcgtcgccgcggcgcgttgtccccccagccacgtgcgagccgtcgggcgtcgcgttggcactcgaagccggcgtggtcgtcgtcgtcgggttggtcctcgcggcgtcgttgccgcgtccgacgtcactcggcgtcgccttggtacccgtacgtcgccgccgactcgcgtgtggtcgttcccggcgaggaggccacccggtgcgcggagtacagcgcagggcgaagcagaggagatgcggaggaggagcggaacaacgacgacgcgtcggcgcccggccgcccaatccatggctag

SEQ ID NO: 20650 - DNA, 1333 bp, Oryza sativa
  Clone ID: PAT_MRT4530_25997C.1
atggcaacgtcagagacctcaaacaccacggcatgtactcgggggaccttatcgcagacatggattgcgatgttcgaggcagctaagcctacgtggcagatccataggcccgcgaccactaggtacatgattcggctccgctctgttgggccgaagccaccgatgttggcccaacttaagtccaccgagaagtttggtgcgtggattaaattagctgaaagagaaatttgggagatgagtgagcttgcgaacaagttcttggttcttcatctagatggtgaaggtggtggagcagatgatacagaagaagcactgatccaaacatcttccagcatcaaagaggctgatgccggtgaaaatgcgctgagtgacacgttggtactaaattacgatgaaggatctcttgtatcatcatctggtgattaccagatgcctttggtgtggatagacttggaaatgactggtttggatgttgcaaaggatcggatattggagatagcttgcatcataacggacggtaaacttacaaaacaaatagagggccctgatttggttataaatcagaagaaagatctgttagataacatggatgaatggtgcaaaactcatcatgcagctagtggattgacacagagagtactacagagtacgatttcagagcatgacgcagagacacaagtgttagattttgttaagaagcatgttggttcatctcctccattaatagctgggaattctgtttatgtggatttactatttttgaagaattatatgccgcagcttgcagccatcttctctcacgttattgttgatgtgagcagtataatggctttgtgcatcagatggtaccccaaagaaaggaagcgaactcctcaaaaagggaaaaaacatagggcaatgaatgatatcaaagaaagcatcgctgaactgaaatactacgaggacaacattttcaaacctcaaaaatctaagcagtagctacatggatggagcatggtgggcatcttcatgatggacagcagagcgattcacatggctacccatggatgggaaaatggattgtttgcatgatcatatgttcccaagtgtcactgttggaccctgcgtatgttgaaataaccgtggtgttgggttttacatgtcccttggatccacgtggcctggatggtaagtatcgcctaatggttattgcacctgtgaatggtattggatctatgagcacgggagcccatcacggtcagagatagcagttatatccgtgtattgtcccattttgtcaggtgatatccctttatataactgtaatttcttgcacaaagaaaaaaaaaaaaaa

SEQ ID NO: 20651 - DNA, 120 bp, Oryza sativa
  Clone ID: PAT_MRT4530_25998C.1
agttagccccagttctgaatgaagaacgtagaggaactatttatacatgatgtggcatatgttatccaaacatgatttggagtgagcaagcagaagcagagttaatttaagggagaatgc

SEQ ID NO: 20652 - DNA, 182 bp, Oryza sativa
  Clone ID: PAT_MRT4530_25999C.1
ctccactgctgatcactgactcgttagtatgtttaattcattgtaatcatgtaatgtaatggaggttgctctttctttcctctatgtttagttggggaaaagaaaatttttaggtgtcatgtcgaacgtttgaccggatgtcggaaggggttttcgaacacgaatgaaaaaactaatttcag

SEQ ID NO: 20653 - DNA, 1214 bp, Oryza sativa
  unsure (1)..(1214): unsure at all n locations
  Clone ID: PAT_MRT4530_2599C.1
nnnnnnnnnnnnnggccgcaaattttttttttttttttttttttttttttttttttttttgcagacaaaacaaattcatcttgttcgtttcagagagaaccataatggagaaacttcagtttacactcgacttatttcaccgattgtattcacaaagatatgacgctactgataaactgcacaacatccacaaatttgacaactcaggccagacgcatcaatcttaactgggtacatgaggtgattgaaaaggttacgaatgggtccttgagagtcaccatggaggcacagcaatgtccaaaggtagttctgttaccgcatagccaacagtctcagccctcatggtccatcatgttctagcagcagcctgatgatctttgggcccggttgccacccaccacatccacggtgtccggcacatacagttcttcctctggttcattcttcagagcattctttacaatgcactggaaagcctcctccacgtttgtaccatccttggcagatgtctcaaagtatgggatattccctttagaggcacaccatgcctttgccttcttctcagagaccacacggctgttgccaccgtctacatcaactttgttgcccaaaagaacaaaagggaagttatcagggtctgatgggcttgcctgaattagaaattcttcacgccagttgttaagattatcaaatgacttcatagaattgacatcataaactagaacacagcaatctgctccacggtagaatgcaacaccaagactctgaaacctttcctggccagcagtatcccatatttgcaaagtgaagagcctatcctcgaactgaacctccttggtgaggaaatccgcgccaatcgtagccttgtactggttgctgaacttcttgttcacatattggttcatcagggacgtcttcccaaccccgctgtcgccgaggatgatgaccttgaggagggtgcggcggcgcgaagccatcgggatctagctgctgcccccggggggagcgatctcgccgcggcgcggggaaggggaagaggaggaggaggaggggttggggactcgggggggagagacgaggcgaagctgtcgcgttggctttgcttgcgggttctcttccccttccgatcatttcccggccgggccgcggcgcggggaaggggaagaggaggaggaggagggttctcgtgccgattcctgcagcccgggatccac

SEQ ID NO: 20654 - DNA, 660 bp, Oryza sativa
  Clone ID: PAT_MRT4530_259C.1
atgtcgtttctgctggattggttctacgacgtgctggcgtcgatcgggctgtggcagaaggaggccaagatcctcttcctcggcctcgacaacgccggcaaaaccaccctcttctacatgctctcacaagagaatctggcggtgcaccagccgacgcagcacccgacgtcggaggagctgagcatcgggcggatcaggttcaaggcgttcgacctcggcggccaccggatcgctcgccgcgtctggagggactactacgcccagttaaggaggttaccgcggtatttatattaccgtacccccgcggtaagcccggtaaccgcggtaacccgcggtaaggttgatgcagtagtttacgtggtggacgctgccgacaggtgccggttcgccgagtcgaagatggagctggacgccctcctgtctgacgacgcgctcgctggcgtgccgttcctcgtcctcgggaacaagatagacatcccgtacgcggtgcccgagcaggagctgtgctactacctcgggctcaccggcctcaccaccggcaagggcaatgtcaaccttgcaggaaccggagtgcggccggtcgaggtcttcatgtgcagcgtcgtccgccggatgggctacggcgatggcttcaggtggatgtcacagtacatcaagtag

SEQ ID NO: 20655 - DNA, 195 bp, Oryza sativa
  Clone ID: PAT_MRT4530_25C.1
aagcttccacgtaactagctattaaatacgtatatcttaccagtctctaaacacccatctcaggctaactactctcatgcttagccccaactaccttcttgttcccgagttcctctttcctctagttcccaatagactgatttagtcttaatagtattagtgttggaagagggcagtcccaaaaaaaaaaagctt

SEQ ID NO: 20656 - DNA, 108 bp, Oryza sativa
  Clone ID: PAT_MRT4530_26000C.1
ttgcactggaagggattcgtagtgctattcccggacagtgtaggtggcgaccggaaggccgctgccactccgcaggtgatcgccggtgacctcttcgggatcaagccg

SEQ ID NO: 20657 - DNA, 2448 bp, Oryza sativa
  Clone ID: PAT_MRT4530_26001C.1
atggacccgccgaaccacgccaagccggcgggccccgccaatgtcgacctcgtcctcctcatcccgcccgaccatccccagccgcagctccaccccaaccaccaccagccgcagcagccgccgatgacgccgacgacgccgttgccggaggccgcaaaacctccccaaaaccccgagaagacggccgcctcgagcccccacgcgccgtcctcgcgcccgccgctgcctcccgcctcggccgcgctcctccgccgccgctcgtcgctcaccaagcccaagtcccgcttcgtcgagcccgcggccccgccctcctccgccgccgccgccgcggcctcctccacttcgtcgcacgcctcccccgcgcaccccgccgccgccgcagggggcggctcgggggcggcttccacgccgcacacccccgcggaagccgacgacgaggaggaggtgttccccaaggaggtccggcgcaagtcgtcggcgcgctgccgccgcaggatgaagctgagcgtggagctcctcgtgctcgtcctcttcctcgcgctgctcgtcgtcagcctcgtggtgcggccgctcaagggggctggattctggggcctggagatctggaagtggtgcgtcatggtcatctgcgtcttctccggccacctcgtcagccattgggtcgtcacgctcgtcgtcttcctcgtcgagcgcaacttcctcctccgcaacaaggtgctctacttcgtcttcggcctcaagaagagcgtccaggtctgcctctggatcgggctcgtgctcatcgcctggtcgcagctcttcgaccgcgacgtcgggcgatcggccaagacggccagaattctcaattatgtgtccaggtttctcgcctccgtgctcattggatcagtcatttggttggtcaagacgttcctcatgaaggtggtggcatccacgttccaccggaaggcgttcttcgatcggattctggagaatgtgttcgatcagtacgtcctgcagacgttgtcggggccgcccgtgatggagctggcagaaaatgtgggccgggagggtagtggtcttgggcgggtgagcttcaccaaaccgaaggaggagaaaggctcgccgggtgtgattgacgtgatgaaactgaggaagatgagccaggagaaggtgtcggcgtggacgatgaaagggttgatggcggcaatcggaagctcaaggctgtcaacgatatctaatacgatcgagagctttgatgatgttgatggcatggagcagaaggataaggagataaataatgagtgggaggcaaaggcagctgcatctgccattttcaagaacgtcgcaagacccggctataagcacattgaggaggtggatctgctaagatttttcaacaaggaggaggtggatttggtgcttcaaaggtttgagggagcatttgagaccaggaagataaaaaagtctgcactgaagaactgggtggtaaaggcatatcttgaccgcaaatcactggcacattctttgaatgacacaaaaacagcggttatgcaacttcacaatctgatcagggttttagtgattattataatcattatcatcactttgttgttgatgggcattgcgacaacaaaaatcctccttgtcatctcgtcccaacttttagttgtggtattcatatttggaaatgcctgcaagactgtatttgaggctcttatatttgtattcatcatgcatccatttgatgttggcgaccgctgtgtcatcgatggaatacagatggttgtcgaagaaatgaatatattaaccactattttcttgaaaaatgacaatgagaaagtatattacccgaactctgtattatcaacaaaggcaatcagcaacttttatcgaagtcccaatatgtatgacaccattaattttacgattgatgtttcaacttcaattgagagaattggagctttgaagtccagaatcaaggggtacatagacagcaaaccgacgcactggtgccctattcacaccgtaaacttaaaggacatcttggacgtgaacaagatcaacatgtcgctgtgtgtccagcatacgatgaacttccagaatatccgagagaggaacctcaggagatctgagctcgtcatggaactaaagaaactgtttgaggagatgtccatcacctaccaccttttgccccaaaaggttgagcttagctttgtcggcccaaatccaatacccattgctcttccacaaagcagataaacaatgggaaagctaacaactgatgaccgtaccatggtggtcaaggaggctgacagctaatgactttacagtttgtactgatgttcttcaaaatatttttgtacatgcctaagcctcctgtgggaatactttagcgtatgcattgtatggaaacgataatttgtgcctgatatatacgttatatattccacgttgggtcactgaaaaaac

SEQ ID NO: 20658 - DNA, 238 bp, Oryza sativa
  unsure (1)..(238): unsure at all n locations
  Clone ID: PAT_MRT4530_26002C.1
ctcctctccctctccgcccatttctcctctgcacctgggatccatccgcgcccgcgaggaggagggagccggacgccgccgcggggagagcaggggagagaaggagaggagganaatcccctattccagacagaggacattacatctggcggggaagaaagggttcactctgtaagtgaggggcgggttctatccgaaatttcttttgacaaagggtaaggcaacgctgctcacccca

SEQ ID NO: 20659 - DNA, 416 bp, Oryza sativa
  Clone ID: PAT_MRT4530_26003C.1
caggtcgctactgtgctggagcatgtagcaactaaggatcaacatgcagcggccatgactgctgctcgcattgactcaatgatcgaagctgttctggaaatgggagttatttatggtaccatgggcgatcctaaacactctgatgagctcactactgtggtgatcgagcaagctagtcaggctgaatgtgccactgttagggtactcacaaaatcactcgactgtgatattcatgctctcagcatacataccgagacatgtattgctctgttaagaaaaatgttcaagtccagtattcctcttgactcgaaggactggcttgcagcatgtctcattaagctacaatcaacggctggcttatcaggacatgagagtggcagtagtatagatatggagataactatctacgagactat

SEQ ID NO: 20660 - DNA, 345 bp, Oryza sativa
  Clone ID: PAT_MRT4530_26004C.1
gatgggggtgacgacggcggcgatgcggcgcccccaggcgacggcggtcgcaggcggcgaggcggcgctcccgggcggcggcgcgggggtccccggcggtgtgggggcccccggcagcggcgcgcggccctcaggtggcggcgccgtggcccccggcgacggcgcacggccctcaggcggcggcgcggcggccctaggcgacggcgtggggctcccaggtgacggtgcggggattccaagcggcggtgcgacggacctcgactgcgatgtggtgctcccaggcggcgagtgcttgtcaatggcattttatggattttctctttaaaatacgtatggtcaacgcaa

SEQ ID NO: 20661 - DNA, 484 bp, Oryza sativa
  unsure (1)..(484): unsure at all n locations
  Clone ID: PAT_MRT4530_26005C.1
taggtggggctgttgactacacgaaatgatagggctgggatggatcgatgaggttgaatataaatgattagcacagaagctgactgactttagaaggctggttatccgattctttgtgcagccagtgcctccaatttggaggcaccatctaggcacggttagaagagacagacacaatgacgattccttgttgctggaggttctgggtcactgctttgctgctgtttgatgcctgcactgtcaagtgacgtacacacactnataggacctcgctctaccctttgattatatctctctatttttcttcttctttgtcagcaaccttagctgctgctactctatagctaactgtattctttcatacgcttgttccatcaagttaatctgctgcttaatgccattgattcaatagtgaatcatcgttctttctggatggaatgcaaatatgcaatggtatggaatgaaaaaaaaaaaaaaaaaaaaa

SEQ ID NO: 20662 - DNA, 229 bp, Oryza sativa
  unsure (1)..(229): unsure at all n locations
  Clone ID: PAT_MRT4530_26006C.1
cccngcctcgccggccgtcggctacgtcgccgtcggagagaacgtccgcgtaccggccggacggaagancctggcgctgcagcaccgttagttacacaccgcactcacactgccacgtgtgatcacgtccaggtttaagctcgggaattgactgggttgacgttgtagcccnagttgcgaaattcctcgtgcttttgacgagatcattatatataaaaaantttnaaaa

SEQ ID NO: 20663 - DNA, 302 bp, Oryza sativa
  Clone ID: PAT_MRT4530_26007C.1
gcccggctcacgctcaaggcgttgcgggccatccaggtcggaggacttggggctgtacaaccgactggtctccaacgaccaggttgatttggtcatagagggcgccaggctgctctacgagggtaagacagtcggatcccacagccgtacccaggaggagattgatgagctgctactaaacttagaagaggctggcgccaatgagccgcggatgaagggcggccaccctctgctcttgggaaggagtgcagaagagatggatctccttcaacaacagcgactaagagtcgactttatgccca

SEQ ID NO: 20664 - DNA, 384 bp, Oryza sativa
  Clone ID: PAT_MRT4530_26008C.1
atggatccggcggccggcggcccgcacgaccggcgaggcggcgtggaggcggagggcggagacgacgccggcgatgtggagacggagggcggaggtggcggtgcggcccgatggatccggcggccggcggcccacgcgaccggcgaggcgacgtggaggctgagggcggaggtggcggcgcggcacgatggacccggtggctggcggcccgcgcgaccggcaaggcggcgtagagacggagacggcgccggcgatgtagagggcggagggcggaggtggtggcgtggtacgatggatccagcggccggcggcccggcgcgaccagcgaggtgcagtggaggcggagggcggagacgggtggagcgatggaggcagcggcagtag

SEQ ID NO: 20665 - DNA, 1236 bp, Oryza sativa
  Clone ID: PAT_MRT4530_26009C.1
atgcgcgcggttcgcggaggacgcggtgcggcggggccacgcgcagcctcacggctcgcggtggaccgcacgcgcgagtggggcggagggaaagcggcggaccggggtcagcttgacccggtcgcggccgaggtggcgccgacgtggcgcttacgtggctgccacgcgggccggcgggaggtagacgacgacgtcggccggaacggacggcggacgacggtggcgggcggcggagcgaaccacggcgatacaggcgaaagcgagcacaccgggaagttgctcgggacgaggggagacgagccaacggctcggattcgctgggggatgctcgacggcggcggattgcggtggcggcaaccggcggcgggagaagggggaaacagcgatggcgcgacgggagaccgattcgggcgagctagagcatctacgcgactccgggagtccgttgctagcgtaggattgggcggagctacgtcgagcgaggccggcgacgagcgggtgctacggagcacgggcggcgacggcggcgagcacacagcgaccggcggcaacgttatctctccgggcctcgggccggggaagaggaagaagacgagcacccggagtccccttccgcgtcctagcgcgcaccggctcctccggcacacgcgacggcggcggtcggcgagagggacgacaatggcgtgggtgaaaaacgggggagattgggaggggaaaaaggaagggaggggggggaggatgacgccggcgggaggaaaaagggaaaaagagggagagaaagggggcttgcccccttgccactttggggaaaaggaggagggagagagggcgatgcggcagaggtggggggagctctgcctccgtcccttggaagcacgcgcgaggaggggcggggccaaggcgatgacgacggcgatgacggccgggcggtttggagcggagcgacgacacgggcggcaggcgctgacggcggcggcgactggccggtcggccaccatggcacgcgtgcgcgcgggaagcaacgggcggcgtagcgatttaggcggcgtcggcgggaaacggcagcgagggcggagggcgctcggctcggcgcggctcacgcgcacgcgtgcgcagcgcacgggcagagtgggggagagggagagagagagagatggggagggagggggagatgggccgagagggattcggcccatcgaacctgagggaggcgaaatagacttttgcggagggatt

SEQ ID NO: 20666 - DNA, 498 bp, Oryza sativa
  Clone ID: PAT_MRT4530_2600C.1
tcgcccggcgcgacagttcttggtgcggcagaagcggtgtcgttcccggcgaagctcctgggccccggcggcggaggtgtcagcccgcggggatggttggcgctggcgcgcacgcgcgcacccgcgatcgccggcgggttcttggccaggggagctcccggtggcagaggcggcgtcgtcttccccgacggttcttggctcaaccgagctccgggcgtcgcacgtgtcgcccgcgggaaaggttggcgcgcgtggacccgcggtcgccggcgcaggaaccagccgagccgcgagaggaacccacgggcgtttcttgcttcttgccgcgtcgaggcagaaacagcggaggcgccgcggcgggttcctgtgttggcggcggagttcttggcgagttcttggtggaggaagaagatggaagcgcgagtttttggtggcaagaagagagcggaattgcgggagttactggcgagatggtggtggagggagaaaatgatttga

SEQ ID NO: 20667 - DNA, 105 bp, Oryza sativa
  Clone ID: PAT_MRT4530_26010C.1
gtgtttaccgcggcaggcaagtactatctagtggactcgggctacgcaacccggattgggtacctggagctgtacaagggcacgaagtaccataacacagcctga

SEQ ID NO: 20668 - DNA, 1410 bp, Oryza sativa
  Clone ID: PAT_MRT4530_26011C.1
atgggccggctggcccaagaggcagcccaaggcgcgcgcgtgggcggggaggggagagagagagccggtgggccgggtccatcccacgtgggcccgggtgggacccacttgtcggcgacttggctcaccgtgagcgaggtgcacgcggggcgtgctagggtttggggagggaggcgcggcgcatgcgcgcggttcgcggaggacgcggtgcggcgggccacgcgcagcctcacggctcgcggtggaccgcgcgcgcgagggggcggagggaagcggcggaccggggtctacttgacccggtcgcggccgaggtggcgccgacgtggtgcctacgtggctgccacgcgggccggcgggaggtagatgacgacgccggccggaacggactgcggacgacggcggcgagcggcggagcgaatcatggcgatacaggcgaaggcgagcacaccgggatgttgcacaggacgaggggagacgagccaacggctcggattcgccggagggagctcgacggcggcggattgcggcggcggcaaccagcggggagggaagggggaaacggcgacgaggtcacgaggggccgattcccggcggtgagagcatctacgcggctacgggaatccgttgctagcgtcggattggcgagctacgccgagcgaggctggcgacgagcgggtgctacgaagctcgagcggcgacggcggcgagcacacagcgagcgatggcaacggtcgggagggcgcggccgaagtccccttccgcgtccttgctcgtgccggctcctccgacacgcgcaacgacgaacggcgacggcgaaacagaggggcggcaatggcgcggaggtgaatgggagaggaaaggaaaaagggggggagctcgggtttataggatggcaatgttggtttgggaaccgacttagggcggtcaaaggagagggctagcgctcggcggtcgcggccaagcggcgacagggagaagggaggaggatgacgccggcgggagggaaaaaggggaaaagagggagagaaaagggggcttgtccccttgcctcttcgggaaaagaaggagggagcgggggcgtcgcggcagagggaggagggaggctctgcctccgtcccttggaggctagcgcgggagtggcggggccgaggcgatgacgacggcaatgacggtggggcggtgtggagcggtgcgacgtcacgggcggcaggcgtgggcaggcgcggcagatgctgacggcggcagcgaccaggcggtcggccaccatggcgcgcgcgcgcgcgggaagcaacgggcggcgcggcgatttcggcggcgtcggcgggaagcggcagcgagggcggagggcgctcggctcggcgcggctcacgcgcacgctcacggtgaccttcccggctttccgcagctgcg

SEQ ID NO: 20669 - DNA, 1375 bp, Oryza sativa
  Clone ID: PAT_MRT4530_26012C.1
gcgcgcgcgggcggggaggggagagagccggggtttgggaagggaggcgcgacgcatgcgcgcggttcgcggaggacgcggtgcggcgggcccatgcgcagcctcacggctcgcggtggagtgcgcgcgcgagggggcggagggaagcggcggaccggggtctgcttgacccggtcgcggccgaggtggcgccgacgtggcgcctacgtggctgccacgcgggccggcgggaggtagacgacgacgccggccggaacggacggcggacgacagcgcgcgagcggcggagcgaaccatggcgatacaggcgaaggcgaacacaccgggatgttgcacaggacgaggggagacgagccaatggctcggattcgccgggggatgctcgacggcggcggattgcggcggcggcaaccgacggcgggagaagggggaaacggcgatgagttcacgaggggccgattcctggcggcgagagcatctacgcggctacgggaacccaccccttgcaccggattaggaggaatcgcatcgagggaggccggcgacgagaggcgcttccgagctcgggcggcgacggcaacgagcacacggcgagcgacggcagcagtcgaggcggcgccggctagctacgggggggggggggggctactcgtgctactacccgagtctaaggggaggagatggaacgaggagagagaacggagggaggcactaccgtgtggggcgcgcaccggctcctccggcacacgcgacggcggcggccggcgagagagacagcaatggcgcgggcgagaaacggggaagattgggaggggaaagaggaagggaggcgcttgggtttatagggcggcgatgtcggtttggaaaccgaccttgggcggtcaagggagcgagctggcgctcggcgctcgcggccaaaacggcgacaggagggggggggggaggatgacgccggcgggagggaaaagggaaaaagggggagagaaagagaggagggagagagggcgacgcggcagaggagggagctctgcctccgtcccttggaggcacgcgcggggagaggcggggccgagtcgatgacgacggcgatgacggcggggcggtttggagtggagcggcgacacgggcggcagacgcggggcaggcgcggcaggcgctgacggcggcggtgactggccggtcggccaccacggcgcgcgcgcgcgcgcgggcggcgcggcgatttgggcggcatcggcgggaacggccgcgagagtggagagggagagctcgacgcggctcacgggcagagcggggagagagagagagggagagagagagagagggggagatgggccgagagggattcggcccatcgaacccgagggaagcaaaa

SEQ ID NO: 20670 - DNA, 2430 bp, Oryza sativa
  Clone ID: PAT_MRT4530_26013C.1
atgaagaggaaaacgataacgattgattgcttctacaagccagttgttgctagggctgtctcagttgaaattgaaaatcctagcccaaccaatgtggaagttgctgatcagcaaaatttgcaagctgaacaagaagtaattgtaactacggcatttgagagggacccaggtaaacgtgttcaaatctctgcactccctgctgatcaacaagatgaagctcaaagattttatatatctgaaggcccatatcaatttatattggatgagtacccattgaatgatgcatctcatgctcgtcgattccaaagcaattggtttaaacaatttagttggctagagtattcaccttacacggaccgtgcttattgtctgccatgttttctcttttcaaagaaaccaattgggaggtttggatcagatacattcacagtgagggggttccaaaattggaagaaagttaatgaaggaaaagagtgtgcttttctaaaacatatgggaaactctggatctgctcataactattctgttggttgtttcaataatctcaaaaatagtatggctcacattgacagggcagtaattgcacaaaaagaaaaattgtttgcaggagcaagactaaggcttacaactaccattgagtccattaggtggttaacacttcaagggtgtccatttagaggccatgatgaatctataaattcgttaaatcgaggtaattttcttgaaatggtcaagcttttggcttcatttaacaaggaggtgaaagaagttgtgttggaaaatgctccaagaaatgcaaagtacatttcatctgatgtccaaaaggaaattctaagcataattgctagaaaagtgcaaaaatcagttagagaagaaattggcaatagcaagttttgcatcatggttgatgaagctcgagatgaatctaaaaaagagcaaatggcaatagtccttcgctttgttaacaaagaaggacttatcaaggagcgttttcttgaccttgttcatgttaaggacactgctgcattgactcttaaaaactcaatttgtgctgtcttatctgataatagcttgaatatacaagacattagaggtcaaggttatgacgggacaagcaacatgagaggggagtggaatggattgaaggcactagttctaaatgagtgcccttatgcatattacattcattgcatggctcaccagctccaattggctcttgtcgcggcatcaagagaagtacatgaggtacataacttctttcagcatgcaaatttcatcataaatgttgtgagtgtatctcctaagcgcaacaatgagttactagctacacaagctgaagaaatatctcgtgaaattgagttgggagagcttgacacaggaagaggggcaaatcagatgagctctctacaaaggccaggggataccagatggagttcccattacaagtcaattcagagcttaaagaaaatgtttggtgcaatagtttcagttctacgcaacattgcacatgatcattcagtttcaaagtattcacgtggagatgcttcatgtgccctgcgaatgattatcacatttgattttgtgtttattatgctcatgatggaaaagattatgaaaatcactgatgtgctgtgccaaactctccaaaagaagtcaattgatattttaaatgcagttgattctgtttctaacaccaaaatgttacttggtgacttaagaaatgatggttgggagcctcttctacaggaggtcaaatccttctgtgagaagcatgagattgatattccagatctgaataggaagtttgttgatgtgacaaaatctcgaaacaagaatgataacacctcaactttacaccattataaagttgatgtgtttaatgttgcaattgatcaacaactgattgaattagaagatcgatttggttctcaagctacagaccttttagcactttgtgtgtccttggatccaaggcttgactcatttgacatggaaaaggtatgcattctagtggagaagtactatcccacagatttctcaaatcaagaacgaatgcaattagagtgccaattgccacactttcaacttgatgtgtgcaaccatccggaactagaaattttatcatctttggctgatttaacaagtggacttgttaagcttggcaaagattcttcttatccaatggtggataggttgttgagattagtcttgactcttcctgtgtcaactgcaaccaccgagagagccttttcagctatgaaaattgtcaagactcgtcttcgaagtaaaatgggagatgcctatttgcgtgattatttggtagtctatattgaaaaggatttatcagcaatgattagttccaatgatattattaaggcatttgatctagctaattctcgtagatgcaaattcaagttagttgagatgtaa

SEQ ID NO: 20671 - DNA, 1349 bp, Oryza sativa
  Clone ID: PAT_MRT4530_26014C.1
cggctagggtgcggcccgagcgaaaggggcggctcggccgggcttaatgggccggccggcccaagaaggcggcccagggcgcgcgcgcgggcggggaggagagagagagccggtgggccgggtccatcccacgtggtcccgggtgggacccgcttgtcggtgactcggctcaccgtgagcgaggtgcacgcgggtcgtgctagggtttggggagggaggcgcagcgcatgcgcgcggttcgcggaggacgcggtgcgacgggcccacgcgcaacctcacggctcaccgcggaccatgcgcacggggggaaaatggagggagcggctggccgggtcagccgatccggtcgcggccgaggtggcgccgacgtggcgcctatgtggctgccacgcgggccggcgggaggtagacgacgacgccggccggaacggacggcggacgacggcggcgagcggcggagcgaaccatggcgatacaggcgaaggcgagcacaccgggatgttgcacaggacgaggggagacgagccaacggctcggattcgccggagggagctcgacggcggcggattgcagcggcggcaaccggcggcgagggaagggggaaacggcgatgaggtcacgaggggccgattcccggcggcgagagcatctacgcggctacgggaacccattgctagcgtcggattgggcggagctacgccgagcgaggccggcgacgagcgggcgctacggagcacgggcggcgacagcgacgagcacacggcgagcgacggcagcaaggaagaaggcgagcgcccggagtccccttccgcgtccacgaacgcaccggctctcccggtgcttggcgatgaacggcggaggcgagacagaggggcggcaatggcgcggtggcggcaagcgaaacgggaggaggaatcgatgggagggcgccttggtttataggacgacgatgtcggtttggaagagctctgcctccatcccttggaggctagcgcgtggagtggcgggggccgggtcgtgacgatggcgatgacggcgggggcggtgtggagcggaacggcgacacgggcggcaggcgcgggcaggcgcgggagatgctgacggcggcagcgaccaggcggtcagccaccaaggcgcgcgcgcgcgggaagcaacgggcggcgcggcgatttcggcggcgtcgacgggaagcggcagcgagggcggagggcgctcggctcggcgcggctcacgcgcacgcgtgagcagcgcacgggcagagcgggggagagggagagagagagagagagagaggggggggggagatgggccgagagggattcgacccatcgaactcgagggaggctaaa

SEQ ID NO: 20672 - DNA, 1305 bp, Oryza sativa
  Clone ID: PAT_MRT4530_26015C.1
ggctagggcgcggcccgagagaaagggacggctcggccgagcttaatgggccggccggcccaagaaggcggcccaaggcgcgcgcgggcagggaggggagagagagagccggtgggccgggtccatcccgcgtggtcccgggtgggacccgcttgtcggcgactcggctcaccatgagcgaggtgtacgcggggcgtgctagggtttggggagggaggcgcggcgcatgcgcgtggttcgcggaggacacggtgcggcgggcccacgtgcagcctcacggctcgcggtggaccacgcgcgcgagggaggggaaacggagggagcggctggccgggtcagccgatccggtcgtggccgaggtggcgccaacgtggtagccacgcgggccggcgggaggttgaagaagacgtcagccggaacggacggcggacggcggtggcgagcggcggagcgaatcacggcgatacaggcgaaagcgagcacaccgggaagttgcacgggacgaggggagtcgagccaacggctcggatttgccgggggatgctcgatggcggcggattgcggcggcggcaaccggcggagggagaagggggaaacggcgacgaggtcacgagaggccgattcccggcggcgagagcatctacgcggctacgggaatccgttgctagcgtcggattgggcggagctgcgccgagcgaggccggcgacgagcgggcgctacggagcacgggcggcgagcacacagcgggcggcggcaacgaggaagaagacgagcgcccggagtcttcttccgcgtcctagcgcgcatcggctcctccggcacacgcgacggcggcggttggcgagagggacggcaatggcgcggacgagaaacggggaggattgggagggaaaagaggaagggagggcgcctgggtttaaagggcggcaatgtcggtttggaagagctctgcctccgtcccttggaggctagcgcgcggaggtggcggggccgggtcgatgacgacggcgatgacggcggaccggtttggagtggagcggcgacacgggcggcagacgcggggcaggtgcggcaggcgctgacggcggcggcgactggtcggtcagccaccacggcgcgcgcgcgcgcgggcggcgcggcgatttgggcggcaggcgcgggaacggcagcgagaacggagagggaggacttggcgcggctcacggcagagcggagagagagagagagagagagagagagagccggggagggagggggagatgggccgagagggattcggcccatcgaacctgagggaggcaaaa

SEQ ID NO: 20673 - DNA, 396 bp, Oryza sativa
  Clone ID: PAT_MRT4530_26016C.1
atgtttgcggtgtcgccaacggtgatgaggttgcgtgaccacgacgtgtcgacggctccaagcttctcctcgccctctagctcacccagcaacgtcgcacgacatcactcttcaccccattgccaagaaactgatgcgaggtgttccatctcatcctcctcgccctcatcttctctgccggccgtggtgaagacaaaggccgtcatcgccatcgagtcgcgtgacggcgttggaacgcgacctcgccaccagagctcgggagcatgctccgagcaccgccgccatagcgacctcggcgttccgaccaccgtggagcattaccggtcaagctgcctcgccatcattatcacctcgagcacctcttcaaaacgccccaagaaccgccaagatcgatga

SEQ ID NO: 20674 - DNA, 1333 bp, Oryza sativa
  Clone ID: PAT_MRT4530_26017C.1
atgcgcgcggttcgcggaggacgtggtgcggcgggcccacgcgcagcctctcggctcgcggtggaccgcacgcgcgagggggcggagggaagcggcggaccggggtctgcttgacccggtcgcggccgaggtggtgccgacgtggcgcctacgtggctgccacgcgggccggcgggaggtagacgacgacgccggccggaacggatagcggacgacagcggcaagcggcggagcgaaccatggcgatacaggcgaaggcgagcacaccgggatgttgcacaggacgaggggagacgagccaatggctcggattcgccgggggatgctcgacggcggcggattgcggcggcggcaaccgacagcgggagaagggggaaacggcgatgaggtcacgaggggccgattcccggcggcgagagcatcaacgcggctacgggaacccaccccttgcgccggattaggaggaatcgcatcgagggaggccggcgacaagaggcgcttccgagctcgggcggcgactgcggcgagcacacggcgagcgacggcagcatgacgatgggccgacggcacgggagcgatctctccggcctcgggctgggggagaggaagaagacgagtgcctggagtccccttccgcgtcctaacgcgcaccaactcctccggcacacgcgacggcggtggccggcgagagagacagcaatggcgcgggcgagaaacggggaagattgggaggggaaagaggaagggaggcgcttgggaaaccgaccttgggcagtcaagggagcgagctggcgctcggcgctcgcagccaaaacggcgacaggagggggggaggatgacgccggcgggaggcaaaagggaaaaagggggagagaaagagggcttgcctccttgccgctttgaggaaaaggaggagggagagagggcgacgcggcagaggggggggagctctgcctccgtcccttggaggcacgcacggggagaggcggagccgagtcgatgacgacggcgatgacggcggggcggtttggagtggagcggcgacacgggcggcagacgcggggcaggcgcggcaggcgctgacggcggcggcgactggccggtcggccaccacggcgcgcgcacgcgcgggcggcgcggcgatttgggcggcatcggcgggaacggccgcgagagtggagagggagagctcaacgtggctcacgggcagagcggggagagagagagagagggatagagagagagagagagacggggagggagggggagatgggccgagagggattcggcccatcgaactcgagggaggctaaatagacttttgcggagggat

SEQ ID NO: 20675 - DNA, 345 bp, Oryza sativa
  Clone ID: PAT_MRT4530_26018C.1
gtggacgggaatcgtactaaagcaatagttgagggagtcaaagtatgtccaaaactcaccttcgggtatgctagcatgccagttgatttgatcctgcaatcagcaagaaataaaggcaaagaaaccgcggttaaatccataaatgacagccgatcggctaggactctatccatgcgtggcaatcatcttgaagcatatcaactcaacccgatgatgtacaccaagttgtattgttggatttagctaaatcggctaacctcgtccgactcgaaatccgccgatcttagccgtagccgattcggacttcagccgatcttactctgttccccgatcgatttccatctc

SEQ ID NO: 20676 - DNA, 1330 bp, Oryza sativa
  Clone ID: PAT_MRT4530_26019C.1
atgcgcgcggttcgcggaggacgtggtgcggcgggcccacgcgcagcctcacggctcgcggtggaccgcgcgcgcgagggggcggagggaagcggcggaccggggtctgcttgacccggtcgcagctgaggtggcgccgacgtggcgcttacgtggctgccacgcgggccggcgggaggtagacgacgacgccggccggaacggacggcggacgacagcggcgagcggcggagcgaaccatggcgatacaggcgaaggcgagcacaccgggatgttgcacaggacgaggggagacgagccaatggctcggatttgccggagggagctcgacggcggtggattgcggcggcggcaaccggcggcgggagaagggggaaacggcgatgaggtcacgaggggccgattcccggcggtgagagcatctacgcggctacgggaatccgttgctagcgtcggattgggcggagctacgccgagcgaggccggcgacgagcgggcgctacggagcacgggcggcgacggcggcgagcacacagcgagtggcggcaacgtgacgagaggccgacggcacgggagtgatctctccggcctcgggccggggaagaggaagaaggcgagcgcccggtgtccccttctgcgtcctaacgcgcaccggctcctccggcacacgcgacggcggcggccggcgagagagacagcaatggcgcgggcgagaaacggggaagattgggaggggaaagaggaagggaggcgcttgggaaaccgaccttgggcggtcaagggagcgagctggcgctcggcgctcgcggccaaaacggcgacaggagggggggaggatgacgctggcgggaggggaaaagggaaaaaggggggagagaaagagggcttgcctccttgctgctttgcggaaaaggaggagggagagagggcgacgcggcagagggggggagctctgcctccgtcccttggaggcacgcgcggggagaggcggggccaagtcgatgacgatggcgatgacggcggggcggtttggagtggagcggcgacacgggcagcagacgcggggcaggtgcgacaggcactgatggcagcggcgactggccggtcggccaccacggcgcgcgcgcgcgcgcgggcggcgcggcgatttgggcggcatcggcgggaacgacagcgagagcggagagggaggagggctcggcgcggctcacgggcagagcggggagagagagagagagagagagagagccggggagggagggggagatgggccgagagggattcggcccatcgaacccgagggaggcgaatcagacttttgcggagggat

SEQ ID NO: 20677 - DNA, 438 bp, Oryza sativa
  Clone ID: PAT_MRT4530_2601C.1
atggcgtgcgcgtcctccccggcaaacgtctccgacgtgttcgggcgtggcgggcttgtccttggccggcgccgtctgcgccgaccacccccgccccgcgtccgcactgcggcggcttcttgctccctcctcccgccacctgctgctgcttcgccgtccacggtcgcgtacgacgccgaggccgacgcatgggtgccgctcccggacatggcgacggagcgggacgaggccagggggctctgcgtcagtggcatgttcgtcgtcgtcgttgtcggcggagacggagctcgctcgggcagccacgacggcgccgcctctgccatgcacgccttgctcctcgccgccgcctccaccatgtacggcgtcggcgggcggcggcggcagcggcgtcaacacgccctccacggcatccgcccggcggcgcaaccacgaggatga

SEQ ID NO: 20678 - DNA, 1252 bp, Oryza sativa
  Clone ID: PAT_MRT4530_26020C.1
atggcacctcaaccaatctgtcagacttgtgccctcaactaccttggttctaacgaagacccagctttgtcagaaaatccaaatcaactagctgaacaagtcaccaaccaagttgccaagactgatgacactgttcctggaccaaacaaggaagttgcaaattctggccaatcagactcggataaagccacagaaattcaaggattgcaatcggtagaagacactgataccaataaagagaagaacaaataattcttaaatgtgatgattacagggatgaaaaccccacttcgagctcatgattaccccaactttcagaattcgatcgacaaatccttgttacaagaatatagcacagttaaagaaggaagtggtcacaaaagaaagacctcgccatcagaagttgacatgcaagatgttccacaatgtcagacaatgcaaccttgccaagacatacccaagtaccctaccctcaaatcaaagaagatcagacacgttcccggtctcatatgcttcatttgccacgaaattggccattacatgagacactgcccccaaaaaccctatatggatgcactactacaagctaatatgagaacctcaaggacgcccttctatccccaaggaagcccgaattcgcaaaatgttaatacagtacgtccaacctcccctgacgacaaaagagcaaaagcatcctgtgacatgtgccaggacatccaagaaaagaaagagatgcaggaatacaagaaacgcaaagtatcgtcggtagagattcaagaaagagaaagttcacgtcaaaagaaaaacccgccagtgcagcacaatcaaggagcatctcagtatcccaatagttctggttatatgcctcgttcgacagtgtcagaatctagtcagcacgccacaatgatcaacagtaatagccatgaaggaagcaactccgtatcatgccctccaccttcaaaaagacgtggctataaggcaggagtcgaatgtttcatctgccatgagatgggacactattcgtgggattgcttgcagaaagtcaagtcaaagaaagtacaaccaacaacaagccttcctaacgtatctggacaaaaaaaattcaaagccaccaaacaatggatctgtctcgttaacctcaccgcctgttgagcagaatcgtctgaaccaagtgcaagaggaaacaaatggagaagttatgaatctcaagcaagttggagaacagaatgcgcagaaagaaagagacccacag

SEQ ID NO: 20679 - DNA, 600 bp, Oryza sativa
  Clone ID: PAT_MRT4530_26021C.1
atgtcggtttggaaaccgaccttgggcgggcaagggagcgagccagcgctcggcggtcacggcccaaacggcgacaggcgggggaggatgacgccagcgggagggaaaagggaaaaagggaggagggaaagggggcttgcccccttgccactttggggaaaaggaggagggagagagggcgacgcggcagggggggagctctgcctccgtcccttggaggcacgcgcggggagaggcggggccgagtcgatgacgacggcgatgacggcggggcggtttggaacggagcgacgacacgggcggcaggcgctgacggcggcggcgactagccggtcggccaccacggcgcgcgcgcgcgggcggtgcggcaatttgggcggcatcggcgggaacggcagcgagagcggagagggagggctcggcgcggctcacgggcagagcgggagagagagagagagagagagatggggagggagggggagatgggccgagaggtcggcccatcaaacccgagggaggcaaaatagacttttgcgaagggatttgatttgggaaggatttggattcgggattgaacttgacgatagatcggggatttga

SEQ ID NO: 20680 - DNA, 3336 bp, Oryza sativa
  Clone ID: PAT_MRT4530_26022C.1
atggcgtcgtcggcggagccgccgccgaagaagcggaggctcgtcgaggtccatgtcccgtccccggccccgagcccctcctcctcctccgctcccgcgccggcctcgccacggtccccggtcccgccccctccgggcgtgccgccgccgccgccgcctcccccacaaaccctagccgccgccgcctccccgcggccggaggaggccgtacgcaagcgccgcaacagggaggagctgcggggcctcttcgagtgctaccgccgcatccgcctctgcgtggagcgcaaggacgcgcgcctcctgcccgagctcgagcaggtgtacctctcgctcatcgccagctctcgaggttgtacaagcgttcaacgtattttagctgacttgattcctcaatatgcctcatactgccctactgcacttgaggcagctaccaaagtttccatcaacatgtataaatggaacctggccattgtaacaagaggggaagatgtggatggtgtggcataccagactgctagggcttgtattcttggcttaactgacatatgctccacagcatcctgtgaagcacccaaatcatctgttttaacaggaatctgctctgcagtttatattactgtcctcacattcttcatttcaacatttgatgggaaggatatctatcacataggctcaagaaaacttctaaatcttcaggaccctgtggagctgttagacattctaaagcaggattcagggggtgacaaccaacaggcagacgactgtttagttgaactgagagcactttcattgctatgcatatttcttttatttccagagaacatactagatgcctgttttgcgctgattgcttctgcagaagatgtaaacggagaaggattgtactttctaaagcagctaacctgccatctgaacagtggtatcataactgatgctctcgatgttcagggggatggaatctcccagtgtacaggaatggacgtagatcatcctagcaccaaagaatctgttgattccaatctatcttctcatagtgttggtgtttcaggaagttctatgttgcagccaaatgagtgttacatgacaatggatggttgggttatggacagtcaaatgagtaccgatgttcatttccttatccatgataaggatctgcacacacttaggctaaaagccatctctaggcatccatctttgaaaggctggatattattgaggtacaaaaagctgtgtgattcctgtagaactgatgtggtttcagaggtatcatcgtgtttaaatgttttgggctctttaacacaacttgaagacaataaaagtcacatgggcagtgaatcatcagtgctggacaagattgatgaaaattcaggggggtatttgcaacccaataaattggcatgttcatatgaacagagaatgcttttgaaaactgatatcgctgatagatatggagggaaaactgtgcagaataagaatgcacagatggtgcatactgatgaggtgaaaactgagaagttagcagatgtcaaactcgatgtctgcaagcaaggaaatgtaatttctgatgcagggcatcaagctgcaagacttgatatgcacacaccaaaatcaacacatgattctgctgggggagctgcaactctcacttctccggggcagaattttggaaaggcgaagcattcatattcagaaccatctgatctttatggtgctcatttctcgagggatgtgatttcagtttcaaaggaactttggattggttcactgggaaatagtgctgcagagtcactagttagatcgaaatttgaggagtttggccccttagcaaacttcttattttatcccccaaagaattttgccttggttgagtacgggaacataatgcatgctgttcatgcatatggatgtatgcagggttcctctgtttggggtggtggtctccaaataaggtatttagatagacttataggcagcaagggatttgctagtggtatagctgttggtgaaagtcgtcatatttatgttgctaaagttaagaacaaaaaagataaagatgaggtgtttgatgaattaaaggccgcagggttgaagaggccatgtagctttacagatatttccagtgaaaatgctttgcttcttgaatttgagacagcaactgatgcagctgctgcgaaagcccatattaggcgccagcttcatccagatgtctgttcccaggacaagaatacttctggtcatgaactttttgtgcggaacatagacaattcagtccctgacatggagtttatcaatgcattttcacgatttggtgaggtcataaggtggcagttcaataagcttgatgggaactgcttgatagattatagatcacctaatgctgctgccactgcaaaatctcacctgcatggtgcaagatttgggctgaagtcaattagtgttgaatcgagatctgtgcatgataaaactttgtcgccttctgttccaatgctagccccgagtgtttctgacagcagtcaccatgagatcaggaatccaagggtttcagggtataatgcaggcttcacagtaccaacagagcgaccaatttatggtccatcggctcccagagctccacaaggcatccttccatgcccacctgtttctgcacaccgtggtcctgtaataccaccgccacctattcaaacttcttttgtccgtcctgtatatcctggtccaggaagtccgtgggaaaatactaccccaaatccatccttcagtcacgcttctcctcgaatgatgcctggaagtagcttccgtatgaatccacctgctcctcttccttttataccatcttctgttacccctcttacacagtttcctggaggttcagcacagcagtctgagaaaaggccacctccacctccacctccaccaaatgtagcccccccaccatttactcgtcaagatataccacccccaccaccatctccaccaccactacctattactcagccaccttctgtgccaccacccccaaattcccctcctccgcttcaacctgctactgacccttctgactcacaaaagcaacgttctcatcctcgatggcagggctctctttcaaaaagtggtttacattactgttcaatctatgcaagtagaatagagttggatgcttgtagatatgaacatgcagtttctgaaccgacagggtggccttcaagattagatgtgacaaagcgaacggattaccaacatgtgaagacaactttctccaatactccacctagcaaactaatggtgcatggtcatatctctgaacttgaaatctggcaaatagcatcttttgctatttag

SEQ ID NO: 20681 - DNA, 1547 bp, Oryza sativa
  Clone ID: PAT_MRT4530_26023C.1
atgggccggccggcccaagaaggcggcccagggcgcgcgcgcgggccgggaggagggagagagtcggtgggccgggtccatcccgcgtggtcccgggtgggacccgcttgtcggtgactcggctcaccgtgagcgaggtgcacgcgggtcgtgctatggtttggggagggaggcgcggcgcatgcgcgcagttcgcggaggacgcggtgcggcgagcccacgcgcagcctcacggctcaccgcggaccatgcgcacggggggggggggggaacggagggagcggctggccgggtcagccgatccggtcgcggccgaggtggcgctgacgtggcgcttacgtggctgccacgtgggccggcgggaggtagacgacgacgtcggccggaacggacggcggacgacggcggcgagcggcggagcgaaccatggcgatacaggcgaaggcgagcacaccgggatgttgcacaggacgaggggagacgagccaacggctcggattcgccggagggagctcgacggcgccggattgcggcggcggcaaccggcgacgaggtcacgaggggccgattcccggcggcgagagcatctacgcagctacgggaacccattgctagcgtcggattgggcggagctacgccgagcgaggccggcgacgagcgggcgctacggagcatgggcggcgacagcggcgagcacacggtgagcgggggaagaggaagaaggcgagcgcccggagtccccttccgcgtccacgaacgcatcggctctcccggtgtttggcgatgaacgtcggaggcaagacagaggggcggcaatggcgcggtggcggcgagcgaaacgggaggaggaatcgatgggagggcgccttggtttataggacgacgatgtcggtttggaaaccgaccttgggcggtcaaggcgcgagctggcgctcggcgctcgcggccaaaacggcgacagaggcggatgacgccggcgggaaggggaaaaggaaaaaggaagggagaaagggagcttgctccttgccactttgggaaaaagaggagggagcgggggcgacgcggcagagggaggaggagctctgcctccgtcccttggaggctagcgcgtggagtggcgggggccgggtcgtgacgacgtctatgacggcgggggtggtgtggagcggagtggcgacacgggcggcaggcgcgggcagacgcggtagataatgacggcggcagcgaccaggcggttggccaccaaggcgcgcgcgcgcgggaagcaacgggaggcgcggcgattttggcggcgtcggcgggaagcggcagcgagggcggagggcgcttggctcagcgcggctcacttgcacgcgtgagcagcgcacgggcagagcgggggagagggagagagagagagagagatgggagggagggggagatgggccgagagggattcggcccatcgagggaggccaaatagacttttgcggaggccgcgtgtctctgtcgagccgccgccgccgcctagccgagccaagtcaccctagtgccgccgtgtcgcagca

SEQ ID NO: 20682 - DNA, 105 bp, Oryza sativa
  Clone ID: PAT_MRT4530_26024C.1
atgataagcagatctggtctggctcaccgtggtccacagcccctgccaaacactcttgccgcggcaagtgagccaaatgacaggaggacagttgaaatacgttga

SEQ ID NO: 20683 - DNA, 248 bp, Oryza sativa
  Clone ID: PAT_MRT4530_26025C.1
aaataaccgcatccaattaaactcgggcgcaactaataatagaggcgccattttcatcatattttaacctaacatactaccactaccatgaccgcacgcaaaacttaaccaactctaaaatctttcaaaaccagccatcataactcaccaatctaatgatcctcattacttcttggaggaacccttgctcacctctacaccgcctgagtccttcttctccacgttctttataactcccacaaccacct

SEQ ID NO: 20684 - DNA, 417 bp, Oryza sativa
  Clone ID: PAT_MRT4530_26026C.1
gaacaaggagcgtttgactgaacatctgctaacaaagtgagctaccgagttacaaggtacaggatcagcagtgacagaaaatgagcgaagtgaagtgaagtaacagttgctactacattgagcgggaagaacattggctggaacaattgcaagaattgccatgggttatctacctactgagaacagacagggcttctttgtggctttgctattgggaagatcttgaggtgcatacaaggaaatgtagtgcactttactccagaggctttaccaaagttgtttggagggagaggcacctgtggggactatcttgattatggcatgagcttgtaaatgatgacagcaggcaaatcttggcagcaaaccggtctgaaggcgtttgtaaggccacatgatctatcaattggccagatcttt

SEQ ID NO: 20685 - DNA, 816 bp, Oryza sativa
  Clone ID: PAT_MRT4530_26027C.1
atggccacaatccttttcgtcggcgttctcctgatgagctgctgcttcgtgcttatttcctctgcatctggcaatggaacgatcaggccgatcttttcgatgaaccaagcgagaaaatgtggtgcaattggaggaacagcgcgctgcaaagagatcgttgacggatacattattgaagacggcagtatctttcaggcagcggggtatttgacaaaaacatatgaggcacactatggatttatagcaacaatggacgtttacggcttccctcttagcccgggccaaattgtcagttatggttcagcttggatcataactgataatgttgatgatccagtatcgaatttagaagtcattcagatcggttggagggtcgagccaggtgataaacgcctgttttcgacctctattgcaatggatcctgatctcattggtcgcattcccatgtcgtactacagtacactatctaactcagcaactaacatctggtttggaggcatggtggctacaaatgctacatttcaaccgactcctccgcttccgatgggcagcggttacatgccagctgacaacggtaacatggcagcgtccatgaagaacattcaactcatcgatgagcaagggcgagcctggtcagcaggaaatggtttagttggcttctccaccaagaaggatgactacacctttactcctattgttggcgatcagtttttctacgggggccccttccagctcacaagctcgggaaccatgttgcgcgctaatgtcgtttaccctcttctactagtgttgtttttttattatcttttctcatag

SEQ ID NO: 20686 - DNA, 171 bp, Oryza sativa
  Clone ID: PAT_MRT4530_26028C.1
atggccgatgagccgatgacaatcacagatcacgcggttgatgcagagggcatagttaaaagaaatcagagtgctatgagaatgagaggtataaacatgggtcatgagaatgagaggtatccaggaagcaggtcagaagcactagacgccacactgatcgaagatgattga

SEQ ID NO: 20687 - DNA, 622 bp, Oryza sativa
  Clone ID: PAT_MRT4530_26029C.1
ccggccgggactctttctctcgtgtttctctcccattcccaaatcgattgcatcgatgcagcggcggtaagatgcgagacctcaccaagcttccgaccccctccccacctccctcccactcctcccagcacatcccggcggtggaggtgatggggagacgcggctttgtcggcggcggtggaggcgatggggagacgcagcttcatcggcggtgggggcttgtatgcctaattgcttatcattcccggaagatttgatgcggttgcttgatgcacgagccgcgttggtgaaggcaaacaacactgcatttcttttttttctctaggttcttgctatgttcatgcactgcttttcttttttctctgggttcttgccatgtttatgctgttgccagtagtactagtattttctcaattggagagattttctttttaagtatttgctttcggcaatggaaacttttggcattttttattctgcgtcatatgcttctggcatgtgtaatcaatagatgcagagaaatgacatatgtaatcaacagatgcagagaaatgacagtaatatatggatgttgtcacggagggtattttcatcatttaaaaaaaaaaaaaaaaaagcggcc

SEQ ID NO: 20688 - DNA, 798 bp, Oryza sativa
  Clone ID: PAT_MRT4530_2602C.1
ttacagttcttcctctggttcattcttcagagcattctttacaatgcactggaaagcctcctccacgtttgtaccatccttggcagatgtctcaaagtatgggatattccctttagaggcacaccatgcctttgccttcttctcagagaccacacggctgttgccaccgtctacatcaactttgttgcccaaaagaacaaaagggaagttatcagggtctgatgggcttgcctgaattagaaattcttcacgccagttgttaagattatcaaatgacttcatagaattgacatcataaactagaccaagcatttgctcccggtagaatgcaacaccaagactctgaacctttcctggccagcagtatcccatatttgcaaagtgaagagcctatcctcgaactgaacctccttggtgaggaaatccgcgccaatcgtagccttgtactggttgctgaacttcttgttcacatatctgaattaaatcacagctcaagaaaacaaaccccccaaataaatcgaagaagaaaaaaaaaacccgcccgtgttcgtgaaacgacgcgggctatatcatccgccatcccctatccgaatcgaaggatactggttcatcagggacgtcttcccaaccccgctgtcgccgaggatgatgaccttgaggagggtgcggcggcgcgaagccatcgggatctagctgctgcccccggggggagcgatctcgccgcggcgcggggaaggggaagaggaggaggaggaggggttggggactcgggggggagagacgaggcgaagctgtcgc

SEQ ID NO: 20689 - DNA, 788 bp, Oryza sativa
  Clone ID: PAT_MRT4530_26030C.1
gcacgaggggcacttctcttcttgttaccttagctaggtaggcagaccggctttctcgtaacataacgtagcgtgctaggctagctacccgagtcgatcaccggcgacatgatgcggcgtccggcgccggtgctcgtgctggcgatccttgccgtcgcggcgtcgacggcggcggccgcggcgatcgagggagaggtcaagtgcggtgggtgctcgccgtgcggcggcgctgactgcccggtgctgtacccgtcgccgcccccgccggcgctccccccaccaccgccgtactactactacagccctccgcctccggcgtattaccccgggtcatactgcccgccgccgccagcggcgtacgtccagttcggcgggggcgcgcagtccggcagagggcctctgtacccgcaggaccccgggttcatgccgtcgagcgcaccgtcgtcgcacgggagccgcgccgtacgtctgttcacggcgtgtgctgcgttcgcgagcctatggttcctatggtaatcgatcggcagcaattgcaaggtggcggacatctccggtacgtcgcgacggagtcacgccggcgttccagggatctgcactctctagtactctggtcatatgatccgtatagttcttctgccaatatatcaagtttttttttcctttttgctttgtttctctttactctctcctgtgtttagatcattcacagtcacttgtaagaaattaattgcaaagcagaatgtactgtagcagttcatttcatattgtcaaaaaaaaaaaaaaaaaaa

SEQ ID NO: 20690 - DNA, 1048 bp, Oryza sativa
  Clone ID: PAT_MRT4530_26031C.1
tcagtagagcctcctggagtggaggaaggacttgtggttgccggcggcggaggcgaggtaggcgaggaaggtggcgaggtcggtgtccatgtagcggcgcgggtggcggtcgtcgatgagctccggcgccggcgacaccaccctctccggcgccacgctgtggaacgacgccaccgacacccgaagcctcctcgagttcaccttcaccctgtgcagcacgctcctgtaccgtccattgctcaatatgtacctccaagtggtcgccgacgttgacgacgaaggagcccgggagcgggtcgacggtgagccactcgccggcgtgcatcacctggagtccggccacctcgtcctggagcaccagcgtgaggaagccgtagtccgagtgcggcggcatccccaacgtcagctccggctgcgggcactccgggtagcagttcaccgtcatcatctgtgtccccgccgccaggtcctccatcacgccgccgccgcccacgcccagcgcctccagcgccgcctccatcacctccatgaacacgcgctggttcgcctccgcgtacctcgacgccacctcccgcaggtcggccggcgaggtgggccatgactcgacgacggcggcgagcggcatgcaggcgagcttgaggaagtcgcgccagcacagcacggcgtccctcacctggttgaagctggtgccgtacctcaccggcgcccgcacgtcggcggacatgtaccgctcccgctccggctgcggcagctcgaagaagcggcgcgccacgtcgagcatgccgcccaccacctcgccgcccacgccgtggttcaccacccccccggcggcggcggcggcgccggcggcttggccagggcggtcggaggccgggaggacgtagttgccgggaagcctggtaatgccgctgtcgcacaggtgccggacgcctcgccggcagtagtactcgcggctgtcgtccacgccgccgtcgccatcctccgccgccgctctcttgctgcccatctgctgctgctctccggcattgaccaagtcaacgatcgccat

SEQ ID NO: 20691 - DNA, 1305 bp, Oryza sativa
  unsure (1)..(1305): unsure at all n locations
  Clone ID: PAT_MRT4530_26032C.1
agggaggggaaatcacacaaaactatcggcctcctctctgtctcctccactcccccacgccaccgctcgccgccgccgccggctcagcttctcctcctcctccgccgccgccgccgccgtcctcgggtgaagcagcgcagttcggaggagggaggcggagggggtttgttcgccaacctagctcgctcgctcagctgccgagctcttcttcgctggtctttgagagatgaaattttagtgatatcagctgctagaggatagactgaagtaactttcaacaattatagaatgggtggttgctgttgttcatcgacaagatctgcatccgtcggagcaccagtttatatctatcatcaacaaaatccggcctctacaattgttgcaatagacaaaaatctggatacatccactcctgacacttaccgagcaccacctacacctttgccttatgatgttggtctagtgttgaaagataaccctgatttggagaagacaggcatcaagaggaaaattcatgaacataaggagtccttaatgatggatgataatgagtcattgcaaaaatgtgtctctgaagataagcctgatgaggaggatgtttgcccaatctgtcttgaagtttttcgttattcaccagaatatgatgaagaaaatccccgctctatgactaaatgtgagcatcattttcatctttgctgcatacttgagtggatggagcggagtgaaacttgcccagtttgtgaccagataaccatgataaatgcgatgtatgaatagccttggtggccctggtggatcctctcttgaagctcatgcttattcagtcggtttggcagaagtcatttgatggggaagcacaatgagcaactgctctgctctcgacattggtttggtcttttttggtggaaggagtgaaattaaggagacaaatgacatgaaatgttctggccaacactgttttgtacctttgttgccaatctttggctaatttatagcaagtagcaacaggaggattaggaaaatgcttggatgcgatatacataccggtcacatgatcattcagtcattcggttcaaagtccaaacattaaaaatcagctctttttttgtttaaacttaggacgaatgttacttcacttctaatccagttagtgtctgtgtatatcatacataacataggtgaaaaagaaaaattggtcgtagtctctcagtctaggcttcatttgtataatacttctagttggacaagctcctgaatacatcccttcctatttcctataaaaaaaaaaaaaaaaagancgnccgc

SEQ ID NO: 20692 - DNA, 124 bp, Oryza sativa
  Clone ID: PAT_MRT4530_26033C.1
aaacaaaagttcaaagaacttttattggcaacagagggaacagactgcatataacgcatgtgattgcctgggttcgaccaggaagaaaagatctcaccgtctttgaaagggaggtcctgaacaa

SEQ ID NO: 20693 - DNA, 162 bp, Oryza sativa
  Clone ID: PAT_MRT4530_26034C.1
atggtgcgcttgccggtgtccctctccaagccggagatggtggagctctcgctggcgaggagagctatccttcgactgctcgccgtcggccgctgtggcggcgacatcgtgctagccgccactggcgtcggtgttgttccggggcggcgaacatcgtgctag

SEQ ID NO: 20694 - DNA, 426 bp, Oryza sativa
  Clone ID: PAT_MRT4530_26035C.1
atggcctactggatccatttttccctaaaaagtctaatatcgttctccggggtccgcggcggccaagcattgtctcccacgggcggccgggccagcgcacaaatccggcggccgaagcagcagcagaaggtcgcggcaaaacctccgcgtcgcgtccccgcaacgagggagcacgcgaccgcgggacgagcagcagccgatcagcccgccgccgcagaaggttgccaacttgccaagacggcagccggcgaggcctcccgctccaccatcctgtccgggtcggcggaccgcggacaggccgtgctgcacgttcttcgcttcgccggccaaggcggccaagcaggaatccaagaattcttccagcgaggcatcccgctccggggctacaccaccggcgaggccgtcctcctcagtggagatgggtag

SEQ ID NO: 20695 - DNA, 504 bp, Oryza sativa
  Clone ID: PAT_MRT4530_26036C.1
cgtgtgggtcccctgtgatttgcctttttgtagtggcggtgttggcccgtctggtcctgggtgttttttctccgtgctgtgggttatcgtccgcgccccttggtggtggcgccagatccgcccatttaaaggtggagttaagcttcaacttcatttagccacacaccaagcgtgtaacaccgttaatgctgtccgggctcagtaatgttttgtgttgggaagtggtggaccgggattatccaatgtgcaaccaccaggatccaagctatggacccagtgagtgtacgcccacagcctcttgaatacgacttcacctattagggaaagcgtggtaacaccactgacaaggtaccaggtccaggaattcccggtcagacccacgcgtccgatgtttgtaaatagtccagactctggaacaagaaataagacatgtgcaaagtatgagtaaatttatataataatcaagctaatgaaatggactgttggatccaaaaaaaaaaaaaa

SEQ ID NO: 20696 - DNA, 777 bp, Oryza sativa
  Clone ID: PAT_MRT4530_26037C.1
atggaaacagctgatgatcaggagagagcacccctgctttatcctcaacctcatgcacaggagggtgcaggttcagaaggtgatggatcagtggacatacacaaccagcctgctctcgagcgcaacacagcgaattggagagcatgcttcatgatcctaggtgatgtgctcagtgagtgcttggctttctatgggatctccaagaatctagtgacctgctacctggcggcgggcgggcgaggagccaacgccgacgggctgccagcggcggggatggctgcgggcggcaggcgaggagccgaggctggagctataagctcaccattaacggattacttgaaaaagggtgacgtcgagtatgaagtgaacaagatggtgctgaggttcatctcaccgtcgtgcaagacgccaccggcgaaggaacaccgggcgctccacccgctcgacttgttccgcaagagcttgcttagcggccagcaccatagaccacgcggcgaccagggcagaggcggcggcggcgccgccaggagagacgaccgccgccacgacgacgacgaggaggaggccaacggcggcatcatccggtcagcggcggagctctacgaggcgggcatccggttcaggcgtcctcatcatccggtcggcggtggagctctacgaggcgagagaagagagaggagagggaggaagatgggaataggagtatgacacatgggaccatatatttttaataaataaggtgctgattggattgcccaaaaaaaaaaaaaaaaaaaa

SEQ ID NO: 20697 - DNA, 453 bp, Oryza sativa
  Clone ID: PAT_MRT4530_26038C.1
gaaaaaacataaattagtgttacttttactaccagggaacactggtaactatccagaggagcctcccgactaactgagcagagagcacactgtggacacatgtatgggattgcaataactgtcgatgacggtataaacgaatagctctgcaaaactcagagactccttcgtcggggacaagctacactattctgacaacgtgttgtacatgaagatccaaggcaaaaaaaatacaaggtaaggatcctcaaaaaggagagaaaaagaaacggcattagaaaggaaaatgtagtctgtcaacaaaagtgccaccaattgcatactggtaccagataatccttaagagcattcaccctgttcttgctgctcagttgccgaaatgcgggtgactctaattgccggatccgctggctggacacactcatggtgtagccaatctcgtgcacggtactt

SEQ ID NO: 20698 - DNA, 1224 bp, Oryza sativa
  Clone ID: PAT_MRT4530_26039C.1
gcacgagggccgtcaaagccagaggcgtgcaatgtcgcggccgccgtcgccgatgctctccgtcccggagaagaagacggccgccaccgagctcttccgggaccgccacttcttcaactcggccttcttcaccgacctccgggaggcacgcgcttccctctccgctccgagctcccaggcgacgacccaggacgccgcctcccgccgcgcgctcctactccggtaccaccgcctcctcgcctccgcgcgcgacgacccctgcgacttcgacgacgacctcgccttcacctggcacgacgccttcaggccccacctcaggcgcaccgcggcgtccctccgcttcgagaaggccgccgtcgtgttcaacgtcggcgccgcctcgtcgaggatcgcggcggccgtcgaccgggcggcggtgggcggggtcaaggctgcgtgcggggagttccagcgcgccgcgggggcgttcagagcggcgggggagatgatggagggggaggaggaggacacggaggacacggtggatatgggccccgaggcctccgcgatgctggagcggctcatgctcgcgcaggcgcaggagtgctgcttcgagcgcgctctcgccgcggggacgtcgtcagcggcttgctccaaggtcgccaagcaggctgccttgtattatgaagaagcttatgcttcactggttatccctccactacaaaaccactttgagagatcttgggtagcacacatcctgttaaaggctgctctattcaatgcagaagctagctatcactatgctattgaactgcatgagaaaacagaaatcggtgaagagatagctcgattacagtttggaattaatgcaattgtcgatgcaaagaaagctgtccgtggagccccaggatccctttatgatgctgcctccagactcgaacaagatatgaaccagaacttggagagagcactgaatgagaacaaccgcatctatcttctgcgagtcccagcagccaaactactagctcctctgccagcagcttcacttgtccggtctgcttccctgagtgagatcttagatgtgaagacagaaaccgcgtcctccgtcctcctcccctcagccgccgccgccgccgccgcccgatgcctcgggccgctgccccgccgcgcgcgcctccggaccgcgcgccacaggagggcaaagggaatcgcccgcgagcgtgcaaatcttgtgcgtctgcgtgt

SEQ ID NO: 20699 - DNA, 465 bp, Oryza sativa
  Clone ID: PAT_MRT4530_2603C.1
gctccccccgcgcggccctcccccacgcgtccgcactgcggcggcttcttgctccctcctcccgccacctgctgctgcttcgccggttgtctaggtcagagaggacggggaaaagcggcgaaggttgaggacgaggtgcgtgatgcgccgaggcggtcgttcttcgcgtggccggcgggcacgacgaggagaagaacgcgctgcagtccacggtcgcgtacgacgccgaggccgacgcatgggtgccgctcccggacatggcgacggagcgggacgaggccagggggctctgcgtcagtggcatgttcgtcgtcgtcgttgtcggcggagacggagctcgctcgggcagccacgacggcgccgcctctgccatgcacgccttgctcctcgccgccgcctccaccatgtacggcgtcggcgggcggcggcggcagcggcgtcaacacgccctccacggcatccgcc

SEQ ID NO: 20700 - DNA, 212 bp, Oryza sativa
  unsure (1)..(212): unsure at all n locations
  Clone ID: PAT_MRT4530_26040C.1
catagctagtgagtgagtgaggtggtgtatcatatctatcagcaactgtaacatctgtgtcactcactcacncactcactagctatgtgntggtcganggtnatcganggcggcggcgagcgtggcgtcgaangganagacgttnatgcggacgtcctgcttnccgaggtagtactcggcgaccttgtcccagncgctccggtgaaccgcct

SEQ ID NO: 20701 - DNA, 359 bp, Oryza sativa
  unsure (1)..(359): unsure at all n locations
  Clone ID: PAT_MRT4530_26041C.1
aaacacacacatncacccacgccacacancatccaaaaacatacatataacaacaccacaaccaatgggccagtttataatataagaattgaccacccccatatcaaaacctaatccaatcatccttaataataaaccaccttttaatatccaactcttaaaacttctacaatataatatattctactccttaatcaccaaataataaaaccataataaccaatcaaactccacatcatcccatctcttaatatcataaaaccatacaacctacaaaccttacaaatcccattatcaatatataaaaccttacaacttattaaacttacattatcccatgtttttaaatcacaaaacca

SEQ ID NO: 20702 - DNA, 2097 bp, Oryza sativa
  Clone ID: PAT_MRT4530_26042C.1
atggcgaagtattggggccagcggctatggcggccgccggcgccggacgccgccacgaccgttcacctggcctccctcctccagtcgtgcggccgcgccggcgacctccgccggggccgcctcctccacgcgcggctcgtgctctccggcgcggccgccgcgtccaccttcctcgccaaccacctcatcaccatgtactcccactgcgccgacctcgcctccgcgctccgcctcttcgccgccatgccccgccgcaacgccgtctcctggaccaccctcgtctcgggcctctcccagaacctcatgcacgccgacgcgctcgccgccttcgccgccatgcgccgcgcgggcgtcgcgcccacgcggttcgcgctctccagcgccgcgcgcgccgcggccgcgctcggggccccgctcccgggcgcgcagctgcactgcgtcggcgtcaggctcggcttcgacaccgagctcttcgtcgcgagcaacctcgcggatatgtactccaagtgcgggctcttgtctgaagcatgcagggtgttcgaccaaatgcctcagaaggatgccgttgcctggacagccatgatcgatgggtatgccaagaatgggagccttgaggcggctgttttgtctttccgggacatgaaacgcgagggactggttggtgctgatcagcatgtgttctgcagtgtgttgagtgcgtcgggagggctcaaggatgggtggctcagcaaaagcatccattgttgtgtgacaaaggcagggtttgaactggaggttgctgtgaggaatgcactcattgacatgtacgctaagtccatggatgtggagagtgcctctcgcgtgctgaagattgaccctggaggttggaatgttgtatcaggcacctctatgattgatggttacattgagaccgattgtgttgaggaggcccttgtaatatatgttgaactgcggagacaaggagtcgagcctaacgaattcactttctcgagcatgatcaagggctgtgccatgcaggctctgcttgagcaaggtgctcaattgcatgctcaagtgatcaaaacggatttgatcagggactccttcgttggttccaccctagtggatatgtatgggaagtgtggccttataagtttgtccatgcagttatttaatgagattgaatacagaacagatattgcttggaatgcggtaatcaatgtattcgcacaacatggtcatggaagggaagcaatccaagctttcgataggatgatctatagtggtatcaggccaaatcacattgcatttgtcagcctgctcacagcatgcagtcatgctggattagtggatgaaggactcaagtatttttactctatgaaggaagcccatggtattgagcctaaagaggagcactattcctgtatcattgatacgtatggtcgagctgggagattagatgaagcatataagttcatatctgagatgcccatcaagcccaatgcctatggctggtgctctttgcttggagcttgccgtatgcgagggagcaaggagctgggggaggttgcggcacaaaatcttatgaagcttgaaccaggtaacactggtattcatgtgtccctttctgggatctatgcatccctgggccaatgggaggatgtgaaggcagtcaggaagttgatgagagatagcaggattaagaaacttcctggttttagctgggtcgattctaacaaaaaaacccatgtgtttggatccgaggattggtcacatccacagcagaaggacatatatgaaaaacttgaggaactcactacgaggataaaggaggaaggttatatcccggatacaagcttcttgccatgtaatttagaagacatcgcaaaagagaggattcttcgttatcacagtgagagaatagctgtagcttttgctttgataagcatgccagctacaaaaccaatcattgtgaagaagaatttgcggatatgtatagactgccacactgcattcaagttcatttgtaaggtagaaagaagggatattattgtgagagataattccaggtttcaccattttgtgaatggtaggtgttcctgtggagattactggtga

SEQ ID NO: 20703 - DNA, 443 bp, Oryza sativa
  Clone ID: PAT_MRT4530_26043C.1
cggaaccacgtgctgctgcaattaatgcaaacagccgatcgacgtggaggtcagcgtggctgttggaggaatacgttgaagcgtctaaggtcattcctaacccaatacactagacatagttttcataaaggaaaaagtacgaattacccccccgaactattgcggtcgtccgaattacccccctaaaccacaaaaccggatattcttcaccctccattatgcaaaccggacgaattaccccgctcgacccaatccgcggtggttttggtctatgtggcgtacgcgtggcagcccaatcaggggcgcgggaacgggtggcgggccgccctatctcacatcatgtcttggatattgtgtagaaaccatgtctcatgcaaaatatggtttccttctctttcctcatttattcactttaccatatcatttttttcatcttaggtggc

SEQ ID NO: 20704 - DNA, 180 bp, Oryza sativa
  Clone ID: PAT_MRT4530_26044C.1
atgaagtacggtgcatttgatatgtggggcaaggctgccgatcgcaaagtgagcttgagcgctcttaaaaacactaacagtcaacacagcctctcatggtcgcaccacaagctccaaaaggccaagggcctccaggtcatgcagattattggatacgctgcacgtatcagggagcaataa

SEQ ID NO: 20705 - DNA, 2892 bp, Oryza sativa
  Clone ID: PAT_MRT4530_26045C.1
tttgtttttttactcgtaactgataggtgctgatcatttctataatgataacatatataggcacattggcaccatcaatcacttacacttgccttccagcgattaatggaaaacgttcacaagtgctaaaaagctcccactaattccaactaaacattggcaaatcctagaaagcactgataagtactccttttcctagtttccatcaaataaatgagatgaaatttccaagaatgctcacaagaacaagcttctcacctatctatggaatgcctatacagttcttcaggagtcaattttgtagaatcaaaccgctcgagacaataatgcacatacggaagcacatcgagcgggcaacaaactatgcatacacagaaattctaatgaaaacaaaagataatacataaggtattcccaaacaaatatactgaaacgaagatcgaattaatccagatatgttccttgtgatatgtagcatggtcctacaaatgtttcaaatgccaaataccagaatgcttcaatcaattacgattgtttccctttccctttccaattagcaaaaatgagagcaattttcttgtatgctatgtctctgaacgtctccttgcgagctgagggatagcaaacatcgaaacattacccaacagaagttaacaataatcgatttctacctgctacaagggcatgccccacacaccttgaacatgttaagactggcaccatgacgaggggggcctcatggacacatgaacttcatgttcttcaggaccaacacggtattttggaacaataatctctaggcctgttcctgattcatcacagtatgcttctaaagtagcatcttccgggatccgagtagggagtggaatttcccgaataaactctcctggtggacaatgctcaggtgtaggatcgactaacttgaaggtccggtcatgtctcttcaagaatggcatccggccaacactagtgcatgataccttaactatcccatttgtaagagtattcttccatgaaaccttcaccctttgtatatcagcaaacggtaggctaatgatgatcaagtaccccttgctatcttcatagattgtttttgctgcagtcactggaccagaagcatggcgcatcacaccagtgaagtcattcatccatgacggctcgaacgtgtggctcacttccatgtcctggaccttgtctgaatttgaattgctgcaatcttcttccatcgctgtgggggaggaatccttccggcgcttgttgcaaatatttgggatgtccagaccatccccagagctgtgattcgatggctgtgttgacaggttaaggccagaaccgttgagcaacttcttgtgatggccatgtgagctagtcttcgtggcagcagtagttgctggcctctcaagctcaaaatctgtgctaggaagatttctccatgactcataatcactcgcctcagcatcaatcgagaagttagcgtcccttccggtgagctctgtccacctcttcaaatcagcttcgggcacaccagccaagtttggtgcccggacgatctcgatcccgtgcaggcactgcgggttggacagcccccggtagtgcttgcgctgcatgcggtgtgagcgcacgaaccctttctccgcgctgaacgggaactgaggctccccaaggcgcgagtgcccgttcatgaagctccttagctgcatcttccccagggcattctctggccgctccttgaacacccacatgtacatgttctccatgtcgtgctgcactaggaaagcatccagcgtagcattattaccgttcccaccggcggtgggggccttcgccttgccgttcttgtcagccgacatgaccggcttgaagtagtgggtgaagaagaaccacgcgccccatatggtatcgttcctcttcacgcacttgcgggcagcgctggaattggagcccttggcatgtgatacggcgaccgtggtggtcgcggccgccggggcaggggacacgccggtggtggcagcaggtgagtccgagtcgtaaagctgcgggccgccgaggccgacatcaagcatgtcgacgttggggtcgtggagggcgccggactgcagagccggaggcggaggggaggggtcggcgtcgagggggaggttgatgtcagggggggcggcggccgcggcatggaggcagcggcggaacggccccggcggcggcgggaggaagaggtcgaagtcgtcgtgggaggcggtgtccatggagaggaacgtggaggggccctggtgcgggtggtgggccgtggtggtgtccatggagagcgcggtgagcagcgactcccccatgacggcgtcggccggcggcggaggcggagggggaggagcaggagcagccctcttcctgccctcgtcgcccgccggttgctcgtcgtccgtcgctgctgcgcttctcgccaactcgtcgccgcttccgcctccaccgcctcctcaccgcgcgctcctctcctccgaatctctccacgagcatcagcgactgggcttcacacctccctcgcgtccatcacacagccgtcgggttgataggaaaaacgaaaatctctcctccttaggccaaatccaagaactccgcaactcccgaatcagaggacctccttcctcctcctcacatccacagacgaacgaacgaacgaacaatcaaaaaaaacgttattacaggacgaaccaacaaaaacacaatccttgaattatttttttcgattcgacggcagcgtttcaatcaatcaaagatcaaatcgaaccgcgcgtggatgaatgagcagcgagcgggtgtgggggagggggagggggaaggggagagacggtaacggagcgaggggggtgttaaaggcgaccacccacggtgggcgcaggc

SEQ ID NO: 20706 - DNA, 489 bp, Oryza sativa
  Clone ID: PAT_MRT4530_26046C.1
aataaaaaactgtatcaaacacgcgtcaattattagaccatatatacgaccaggctagcacaatggagaatttcccatggtgaactttgtattaattccacgatatgcttagcagtattgttacatgatatttttatttttcaagggagggaaaaagttttgcctcgtatattaatagagaaggaggtattattacatgataatcccaaattgaaagcaaagtagaacacagtacaagaaaacatttcgaaattcctctaaagctaaagaatatgaagcatatcgccattgcccattgtgcaccagcaactgcggacaacagtaacagcgtggttaatttgtctcaattctcaaacacgaagagctgaaaatgcttctttgattgtcatgacttcagcgtaaacatcttgcattgctgggcgatcctttgggtgtctccatggagcatgagataccaagcttagcaagttgcatgacacaacccagcat

SEQ ID NO: 20707 - DNA, 609 bp, Oryza sativa
  Clone ID: PAT_MRT4530_26047C.1
atgattctcacagaccccccactgggttctccggcatcaggcggggattacgagcggcggcaagatcgagagggggggcacacgctccgcgtctctatcgtggggaaggggacgaaatgccaatgcccaccaccaccaccaccaccaccacccgcgtcggtgctaaaattgcgcggagaaaacgaagggtggggctccgatcacctgatcaccgcgtcacccgcgcccctcccgcggacgggaccgccggcgatccgccaccggcctttgctcgaccaccaccagcagcagcagcagcaccgaaaacccgacaacgaaacgaaggcaagctacgaccgacgacgtccgacgtcgcccgccgcgacggaggagggggcacgctcgatccccacctccggcgtcgtacgcccgccgtgcccgtacgcgcgcgcgctcgggcggcggcggcgagcgggcttggcgtggggtggtggattcggggtggggttgtgcgggatttgggaatctgtctcgcctcctcgctgctgctttgccttgctttttgtggcacggcaggaggaggcaggtgacccgctcccccgtaacaccgcggggaagttggggggttaa

SEQ ID NO: 20708 - DNA, 516 bp, Oryza sativa
  Clone ID: PAT_MRT4530_26048C.1
atggtggattcagcatcaacgacggattcaaccaccctccctcgcagattcggcagcgacatatttggagtcatgacgacaacagcgatagggaggggaatgacggcggcggcgacaacctcaagacgcctcttccacacccgccgtggatcccgccacctctcccctactctcacatgtggatccgtcatcaatgacaagggaagggacagatctggtggcctctcctcctccgtgcagatcttgccgcctctccgcccccgatgcacgcggatccgccggtggcaacgacaggagaggcggatcctacggcctctccttctcccgtgcagatcccgccacctctctacccccacgcactcgaatctgccgccggcagtgataggagaggtggacccgactacctcccaatacaacgacaacatcggtcggcctcggagggaggggggcatgatgatgtggcgggtgaccacgacggtggactttgggcagcaggggttccgtcgctggggatga

SEQ ID NO: 20709 - DNA, 330 bp, Oryza sativa
  unsure (1)..(330): unsure at all n locations
  Clone ID: PAT_MRT4530_26049C.1
tttgatcggccnattcgtacgaattcngcacgagcncccngccgtgaatgaccatnattggaagacnagtnaacnananatantgtcnccgngataagcctantactactacnaaatncgcccaatttttaacgggtttntaanaaatgaaacccgtctaattttttnncctanatttttaaaggaacccttcccnttgttccnanaanaagcntaaggggccttacccaaaatttnaaaggccaaccgtnggaaattnattaaggaaantcttgancnttttacttngcgttcaaccnaccnccatccacanttttnaaaattccccct

SEQ ID NO: 20710 - DNA, 813 bp, Oryza sativa
  Clone ID: PAT_MRT4530_2604C.1
atgaagctcctgttaccgaattcggaggtgcctcggatctattgggagaaagctcagcatctctgtgggttcctgtccatgaagctcatttccagagccagatgtgtggcaagttctgtcaaacaatcttatagttttctggtttgcaaaagtaaccctttggtagttcagctcgtttactttgtgataatctcatttgctggtttccttgctctgaagaatctcaagccccagggtaagccaggtccaaaggatttggacctattgttcacctctgtgtctacacttactgtctcgagcatggcaacagtagagatggaagacttatctgacaggcaactctgggttctgatccttctgatgctaatgggaggagaggtgttcacatcaatgctagggctctacttcaacaatgccaatgccaacagaaatgagaacagccagagaagtttaccttcaatcagcttggacattgaattcaacagtcctgcaaacaatggggatcacaaaattacggaatgtggccaatcagaagaaactatgtcgcaaaaccagaaagaactgggtccttttgctcctagtgatcccgcagattctagcaggcaacaccttgttttcaccactcttgcggctatgcgtatgggttttggggaaggctactcactaggatacagttgccagaagttgttgaagcctgatgccacttgcaaagatgcttcctacgggttcgtcggcaggtggaccgaggagggtaagctgatagttatcctggtgatgttcctggggaggctcaaggagttcatcctgaaatga

SEQ ID NO: 20711 - DNA, 1582 bp, Oryza sativa
  Clone ID: PAT_MRT4530_26050C.1
acactcaagtgatagctttattgattttgcgcctggacactaatgaatttctctcgagatctgagaatattcagcaatgttcttacaattttgtgaaaaatgagactgtaggtcgtgtagtacaatcggtgctaaaaccgaacccaactcattttcttcgtcgatgtacaagcctaatctatgtatcccaaatcaaaacaaaaactgcgagaactgtaattaagcgtgtcctctcttctcaggcattctttggttttgttctcttcaacctggaatacaggaaaactcctcccaatgcaacaccagttcctagtgcattgacaggtgaaattggggttctgaagaagagaacagacgccacgatgacgaccacacgcttgacgcagttggcgacagagtgggtgacaggtgacactctggccaggatcaagtaggagagcttctggtagccatggaagcaaaagccagctagtgctgctcttacacacagctcttggaggttaaggccagtgctccggaggtatcctgggctgaacttgaccccttctgagaacagcatcagaggcaaagacagcagaaatgacagtatagtgagtattgagaagaggtttatgtcatccaacgcttcctcttcgccgccaagaagcttcttgctgagcacatttcttgattggtatagaagattcgatgccatcgcactccagaacccaatccagttgaaagagagttcagtcaacgatgccaaggcgacgccgccgacgatcggcacgagggagcccagcaccagcagcgaaggcgtctgcaattcaaacacaaatttgaattcagcaccaatttcatctctgaatcgattgacaggaacccactgaattgtgtcacccacctcgccgaggaagaaggcggagaggaggacggtgaagaagggctcggacgccttgatggtgtgggtgaaggagacggcgaccttgctcaggctcatgttggtgaacaccgtgcccagcatgtgcccggcggcgagcggcgcgatcttggccagctgtgaaatggagattctgggcgcgggatgaagcttgagcgcccacatgaggaagatgacgaaggagccgaacgcgagctggaaggcggtgatggtgtaggggaacggcaatggctgcagcacctgagattctccatggctgattgggttaagagatggcgaggatgaggaaggagaaggttcttgaggggggaggaagacctgcttgttgtagatgttgaagtagatgttgaggaggtaccacgccacgatcatggcgcccagctgcgccgtctccgcgagtgcgcctctctcccgcccagccgccgcgtcggcgtcgtccgccggcaacggcgcctccgccgccgccaccctcgccgtgaccgccctgccacccgacagcagcggcagggacatgagctggccgccgcgaacacggagcggcagcgccgcaccggcgacgatgccgccgccgccggagaaggaggcggaggcggtgacgcgggcggcgccgtgccgtgccgtgctccatgccgtggcgcgcgaggccgccgccgcgcgctgcat

SEQ ID NO: 20712 - DNA, 466 bp, Oryza sativa
  Clone ID: PAT_MRT4530_26051C.1
aaaatactcaagaggaagtccagggagcccaaggtggggaatgatactcttcgacccactgaccgtgaaggagagtactatactacgtgcatgtttggagttgctcatatcttcgcatccttcaaatgacacattcattttaactactgttttggccagctactatgaattattgcaggtgggaggtggcatgaagatcaaagctgattgtgatgagtcatccccatatgcagctatgcttgtttctcaagatgttgcactgtgttgcaaggtttgtatgcagacattgttcttgcttatgctctgtgcggctggaggcaacaagacaaacacacctggacctgatgctcaatctgcttcaaggctcttgctcttggtcgatatgggattaaaatccgttcccttggttaagtcaaagttttcaaatactagttgatgctgacacaatcgaaggatacggaaatgt

SEQ ID NO: 20713 - DNA, 748 bp, Oryza sativa
  unsure (1)..(748): unsure at all n locations
  Clone ID: PAT_MRT4530_26052C.1
gttccaggttcaaacctaggattgggttttttttgggacggagggagtagtagctatagtcagtttttcctcacttaatagctatagtaaaatactcaagaggaagtccagggagcccaaggtggggaatgatactcttcgacccactgaccgtgaaggagagtactatactacgtgcatgtttggagttgctcatatcttcgcatccttcaaatgacacattcattttaactactgttttggccagctactagtactaattcctgcagtctccagtctaaccacctattcactgacttgtcaggatggcattactgtgtacttctagattattttggttggttctctagctgaaattgatcatcctctgaattattgcaggtgggaggtggcatgaagatcaaagctgattgtgatgagtcatccccatatgcagctatgcttgtttctcaagatgttgcactgtgttgcaaggtttgtatgcagacattgttcttgcgtggagtataggacaaatggacagatcttgggtgactgttttctggaattctgtctcattatgctctgtgcggctggaggcaacaagacaaacacacctggacctgatgctcaatctgctctcagggctcttgctcttgctcggtctgggatgaatattggtcgcattggtaagctcagagtttcaaatactangtgatgctgacacaatcgaaggatacggaaatgtntgtgatgctgtgcacaatac

SEQ ID NO: 20714 - DNA, 5466 bp, Oryza sativa
  Clone ID: PAT_MRT4530_26053C.1
atggctctggtgatcaggggagaggtggcaattcttcaagtaggtgccgtcaaagtagctcactgggaggcatgttgtcgtcaaaatcaggagatcgtcgcgctcgggcaagataagcatcgcgtcatggcccagctcggaggaggagctcgtcgctgctcgtgcctcgctgagaagaggccgaggcttttcaccctagtggcaaggacaacttcggtgatggcaacgatgaagtcaagaggcacaagttcgaggcgccgcatcagaggaagtgaattctatcacttcagcttctacaatgatgatgaaattaagaggatcagtgttaaacagataacaaagtcggatcgtgtcgatgccaagaactgtcctgtgccaggtggattacttgacccagcaatgggacccacgaatgatactgacacctgcaagagttgtggtcagcagtccattcgctgccccggccattttggccatatcgaattggcgaaaccactatttaatccattgctttttatgagtcttaaaaaccttctccaggttacgtgcttccattgtcacaagttccggttgaacaaggaacaggcagacagatacacaaatgagcttgaactattagtaagaggtgatattgctcatgctaaaaatttggaagacttgggtggcaaagtactttcgaaagaagatgatgaaactgaggccacttcaggtgataaatcggctcgttcggagtgtgagaatacatgtagcatcatcagcctgtttgctttactgcattagtccaattttgatctaatgtaccatagaccagtaggaatgtgtcacagtgaaaagtacttttcgcttgcaagaaatccaagttatgtcaggttgcagttggatttgtgtagcacctctcgaacatgtgatgactgatactatgcttggtagtagtatggtcgtcatgttaatgactcaagagaaactggtgtttccggtcttgatgaagaactaacttcacctggtactttgtccagaagatcaaccaatgaaacaagacgcatttctgatgatacaatcaaagaaatggtggcatcatcaggaaagaaacatctcttgactacagaggttgaatctattctgaaagatttgtggaaaaaggaagcaaggttctgcatgttactatgtgatttccaacagaatacattgagtgtatcagaaaagagaaggggctatgagatgtttttcttgaagaatctgctagtggcaccgaacagattccgcccctcaattagctctagtcttggaatcatggaacatccacaaaatgttctgctcagcaaagtgcaagagtccaatcttgcgcttcagcagagtattgctgcttctaatcatatggaagttcttagaagatggatggatctgcaaagaaatgtaaatgtgctgtatgatagtagtaaaggcctttatgcattcatgcatcccttaaaagaagcaaaaaatgagaagaatgcaaatggtataaggcagttgttggaaaagaaagaagggattcttcgacagaagatgatgggtaaaagagttaattatgcatgccggtccgttatatctccagatccatatttggctgttaatgaaattggaattcctcccgtttttgccacacgattgacatatcccgagaaagtgacaccctggaatgccagaaagctacaagaagctataaataatggtgctgacattcatcctggcgcaacccattacagggataacaacaacatgtacaagctacaagctgcccctcccaaacgccgtgcgattgctaagatgctacctgcttctagaggatccatttctcaaccagggaaagatcccaagtgtgaatttgagagcaaagtggtatatcgacaccttcaagatggtgatgttgtactagtcaatcggcagaaaggatacccagttctaagagcaaattggaagtttgatttacaaccaccaactactacactacaagcatactttactaagatgtcgtgcagcgagcctactcttcacaagcccagcatgatggcacatgttgttcgtgtgctacctggagagaagacaattcgaatgcactatgctaattgcagcacatacaatgctgattttgatggagatgaaatgaatgtgcactttccacaagatgaaatatctcgtgctgaggccatcaacattgttgatgcaaataagcagtacattggtccaaggagtggggatgctgtcagaggcctcattcaggaccacattattggtgctgtactcctgacaaagctggacacctttctaagccgtgaggaatataatcagcttgtatatgggtctgtgctctcttcaactcgtagatctggtcagtttggtaaaaagatatctattattatggatgatgatgcactcgaacctgtacctcctgctatttggaagccaaagcccctatggacaggaaaacaggttataacaaccatcttgaaccatgtaacaaaaggtcgccctccatttactgtggagaagaaggggagaatcgaaaaagaatatctaatccctgaagaacgcaatggtgataaagttaaaactataaatccttcagagcaagttttgtatgttcatgacaatgagctcataaaaggcatgatagataaggcccagtttgggaactatgggatagttcatacggttcatgaactatatggtccagagacagctggagtactactctcatcattcagtcgcttgtttacgatggtcctgcagttgcatggatttacatgtggagtagatgatctgttactatcccaagagtcagatatgacgagagaggaaattcttggaaaaagtgaaaaacacagtaaaatagtgcatataaattttacacgtcccaaaaaggatgataaagctgaagctaaagctgaagatatacgccccaaagagggtgatgaagctgaagatacacgccccaaagagggtgatgaagctgaagatacacgtcccaaggaggatcatgaagctgaagatagtacacatcccaaagaggatcatgaagctgaagatagtacacatcccaaagaggatcatgaagctgaaggtgatgatgaagatcaaatgaaattgcaaatggaagtcgaaaaaattatacggaggaatggagaatctgcgactgttatattggatagaaatatgtcaagtgaactgaatactttaacatctaaagtcaataaaaaagtgtttccttatggtctacggaagccttttcctggaaattgtctctctcttatgactcaaactggagctaaaggtggtttggtcaacatgacacaaatttcatcattgctaggccagcaagaattagaaggaaagcgtgttccacgaatgatttctgggaagacgttaccttgctttccaccgtgggatacttcttcaagagctggtggtttcatcggtgatcgatttttaactggtctccgtcctcaagagtactattttcactgcatggctggcagagaggggttggttgacacagcagtcaaaacttctcgtagtggttatcttcagcgttgtcttatcaaaagtctcgaatcattaaaagtctcatatgatcacacattttgctatggagaagatggagttgatgtgctcaaaactagctttctagacgacaaattcagggagctttctgataatagaagagctctccttggcaagcttgatagccacaatgacaagcacctgttattaaatccaaatggatacatttctgaattgcctgagaagctgattgaaaatgcaatggagtttctaaaatccaaaagaaatgagaaaggtcgttatgacattaaagagaaagagctaatgaagttactgaaagtcaagtacatatctagtcttgtagatcctggggaagctgttggtgtggttgctgctcaatccataggagaaccatcaacacagatgacgctcaacacttttcatctcgctggacggggtgagatgaatgttacgcttggtattcctcgtttgaaagaacttctaatgactgcatcggctaaaattagtacaccttttatgaagtgtcctctgcttgaagataagacttgggatgatgatgaagaagaaatggatgataaattaaagaaggcccgtgatgctgaacgattggctgctaaattaaggacgattgatgatgctgaacgaattgctgctaaattaaggagggttcgtgtagctgacattgtagagagaattgaagtatgcacagttccttttcacaacaataatggttgtgtttcaaccctgtataagttacagttgaaactctacccacaagggctatatccacgtcagtcagaacttacagtagaagagtgccatgaaaccttgagaactgtttttattgatgcaatggatcttgctatcagcaaacatttagatttgctacacaaaattaatgagatccaggcagttaagtcaaatgatatggagagtcaacggtctgatggagtcgaagaatctgaaaatggacctactgatgaagacaatggtgtgagcgatggtgaaaatgaggatgatttgggagctgatgcagaaaaatggaaacggcaagagatagatgagatggagtatgatgatgatgctgaaaaggaagagggttttgatatggatagtgaatctgaagaagataccaaatctaaacctgagagtgaagatcatcaagcaaaattagatgaagagttagaagagtctgaggaaggacatgtgctagattctagcaacaagggggaaaatttaaaagctaagcaagcaacagccagactcgaagatgaaatgaatgaagctgaggatgaaaaggcgcaagtgaccataaagttcaagaaaaacataaaatggactattcattatgaatcaacaggtttaaattttgaggttcactacgctttgcaagagcaacctcatattctgttagcccagattgctcagagaacagctaggtctgtttttgtcaaggcctcaggggtgaactttgaagtattccataagttagtggactatctcgatatcaatgaggtcagatccaatgatatacacgctatgttgaacacatatggggtagaggctgcaagggcaaccatcattggggaagtgaagggcgtattcggtgcttatggtatccatgttgacatgaggcatctgaacttgattgcggatttcatgaccttcgacggcggttaccgaccgatgagcaggctagggatgggccagttcagcacctcgccatttggtaagatgacttttgagacggcaaccaagtttattgtggaagcagcttctcatggagagtctgacacactggacggcccttcggcaagcgtctgtctggggaaacctgttaaggtggggacgggttcctttggcttgctgcagaatttttccctggagcaacctgttgcgatgtaa

SEQ ID NO: 20715 - DNA, 504 bp, Oryza sativa
  Clone ID: PAT_MRT4530_26054C.1
atgaagggtagtggctgggtagggcttgaagaagtggcccctaggtgcaagcgagcggtggcccaaagagcagcttgggcgctcagcgtggaggcgatgagactccagatttggggatttggagtggcggtggtggccggatttagagaaaatggcggcggtggtcgttgggcactggtgaggagtgaaatagggtcacagagggacaaggagcttggggcagccaacacggacgccttggtgcacagccaagccgtcggcaccggcctcacagataaagccatccccgatgctggaggaggtgggattggtgggggcgctctgccggcctactccgggcgccgccgctccgtcctatcgcctgttgcagggagagagaggatagagagaggagaggaagaagaggatgagggttcaccgacatgtggggcccacgctcgggaaatgactttacaagatttcaccgaccacgcggatgacgagtacctctacgttccaaaataa

SEQ ID NO: 20716 - DNA, 570 bp, Oryza sativa
  Clone ID: PAT_MRT4530_26055C.1
aaacagccagactcgaagatgaaatgaatgaagctgaggatgaaaaggcgcaagtgaccataaagttcaagaaaaacataaaatggactattcattatgaatcaacaggtttaaattttgaggttcactacgctttgcaagagcaacctcatattctgttagcccagattgctcagagaacagctaggtctgtttttgtcaaggcctgtaagaatattgatcgatgtgaagtgaataaaccaaagaagatagataataatacgataaatactcccatcactctacaaacagcaggggtgaactttgaagtattccataagttagtggactatctcgatatcaatgaggtcagatccaatgatatacacgctatgttgaacacatatggggtagaggctgcaagggcaaccatcattggggaagtgaagggcgtattcggtgcttatggtatccatgttgacatgaggcatctgaacttgattgcggatttcatgaccttcgacggcggttaccgaccgatgagcaggctagggatgggccagttcagcacctcgccatttggtaagatga

SEQ ID NO: 20717 - DNA, 267 bp, Oryza sativa
  Clone ID: PAT_MRT4530_26056C.1
atgcgcttcgcgaggaccttgatagtcgccgctgcggtggagataaagacactcaatgatgacttggtgaaggccaacaaagcactaaaggcggcccttgatgatattaaagcccgcaaggaacacaatcatatactcgggaatcaaaaaggcaactttgaagactcctgggcacagttgtcagacctattgccggaaggctcagccgctatccgtcgcttctctgaagctgttgcaaataccagcgtgggatatacatcggcttga

SEQ ID NO: 20718 - DNA, 1599 bp, Oryza sativa
  Clone ID: PAT_MRT4530_26057C.1
ctctctcacgctcccctcctcgcctcgcctgagcagccaccggagcagcagcagcagcagctcgccgccgacgagtcgccgacgacgatggggtacacgtacacgccgacgtactactcgggcctgcacgacaccatcgcgtcgctgtgcaagtccatcctccccttcggcggcttcaggtccggccgccgcctcaccgccgaccaggccgcggcgaggcgccacgccgacgcgctcaagtggcagcaggaatcgttccaccgcatcctccacctctccgcgctccaccgcgagggcatcgtcccgccctccgacgtcgacgccttccgcgccgacatgctcgccaccctcgccgccgccccgcccccgcccgcccaccccgaccagcccgccatcctccgcgacaagctcctcttcctccaggagctcttgtacgccaagtgcatctcggcggcggagtacaactccaccaagagcccactcgtgcagcgcctcgcggcgttcggtgtcgtggtcgactgccccgacgcggacgtcggcgatggcggcgcggcttcggcggcggcaccagcctcgtcgtcttccatggaggagtggtcggagatcgacctccgggacccgccgcccgccgcggcggcctccgacaagccgaagcacaaggccttcgtcccgccatggaagagcagaggcaagaaggagctggacgcatcgaggccaccgttagcccccgtcgaccagaacaacagcaagaacgccccatccgtcctcatggccgagagctcgccgtcggaagccatgcccaccgccaagaccgacaaggggaagaggaggcacctgacggcgatgttccacaacggcggcaatggcagcgagaacaaggagcccccggcggcgtccatggaaggcacagatcaggagaaggatgcgtcaaagagcaagaagaagagttcgtgggggttcgatggcctcaagaagtggaagaaggcaagcaacgatgaggcgacggccggcggtgagcggccggagcacgctgcgccgcggtcttcgtacagtgagtgccggcttgaggcgagcccggctgttgccaaggatgcaaagagagccaagaagaagctgaatacggccaccggcgacgatgattctgcttccgatttagcgaatgataaggttttggtggagaacacaaagaaagagctttcaaggattcaggctgagttgtcatccaccaaccgaaacttgaacttttcggatcaacaaattgaggccatctcaacaaggcttccagtggacaaatctgacctcaagaccttcttcccaaaggcatggtgcgatgaacacggagacaacgtgatcaacgtggcgaagaaagagttcaaggagcacgtcgaagagatggagaagcagagggacatcaccggcggcggtgatggctgggttgcattcggagacagccatgacgaaaatttcaacccgagagcattctctcagcatcaggctgcagtgaagggtaacgtccatgacagtcttagcagcagtcaacatttcacaaaccctttctatgacgagaagaatcctttcttgactccaagctacgattga

SEQ ID NO: 20719 - DNA, 246 bp, Oryza sativa
  Clone ID: PAT_MRT4530_26058C.1
atggctcccaatgctccaaagtactcttctgctcaatgccatcatgaggttgggggcttattggtttacacatttttgcaaggagatgatccatataaaaggaaatacaaaaatgatatacatacgaccctgttgtccggctaccgtgtgctgattgctgaagaatctgcattgcttgattatgagatcctaatcctggatgacattaatgtatctacgtactacagaagaattggaggacagtag

SEQ ID NO: 20720 - DNA, 405 bp, Oryza sativa
  Clone ID: PAT_MRT4530_26059C.1
gatggaccgggggttctgcttattttggtctgtggtagtgattatatgcaactactccagctctgtcctatggtgtacactattcatattactagagaccactagactgcatatgtttccaaagagcagaaactggcgaatagagatatttagcgatatgatcttcagtatcatatagtcatggatcacgtattcaaccgataatattggggcacactcttaggctgaacctgggcctgtttgaaagcttggttcatagaatcaaaaaggggcttctaggacccaccgggaatacaagtgacatatacttacctgcgtaaagaatcttgatgctgtcaatctacaaagatagatactgttaagttagcaatacatacccacttacacggtggataccaaggtgac

SEQ ID NO: 20721 - DNA, 243 bp, Oryza sativa
  Clone ID: PAT_MRT4530_2605C.1
gataagaaaagcatttatataaaaataaatccaatggtatcacttgtgtcactaaacatattgtattgcctttttttttccaaatacataacacaccttctatttgattcaaccaaatggggtagccttgaacaagggcaggggaggtccttaactagtaaactctgcattgtgagcaccacgtatcacattagagcacccttggtttcatctgtatattactgatgttgctattcactgtct

SEQ ID NO: 20722 - DNA, 750 bp, Oryza sativa
  unsure (1)..(750): unsure at all n locations
  Clone ID: PAT_MRT4530_26060C.1
tgcatatctagcatatggcattccaaacagttctctgaaaagaatggctctatttcacaaggctgcctacaatattggaggccatgcagtcacggccaattccatcgaacacgctctactatgctgcagatctccacggattggtcgttggtttgaatccatactgtcgacggcgatgcggaagaaatgcgcagatgagaagcaactcgtccagctcaaattcggcctgccggactgccagcctctcgccctgttcgctctgtgcacaggagcttcatctgatcccatgctgaaggtgtacacggcgaagaacatcagtgaggagctggagcgtgcgaagcgggagttcctgcaggcgagcgtggtggtgaggaagtccaagaaggtgttcctgccgcgcctcgtcgagcggtacgcccgggaggccggcctcgccggcgccgacgagctcctcgcgtgggcgcgcgacaacgccgacgcccgcgccacccaggacgccatccagcggctgtgcgtcgacgccggcggcggccggaggaaggcagcgcaggccgtcgagtggctcccctacaacgccaggttccgctacgccttcccccggaccatggtcgacaagccactcttctgagcaagaaacaagcgtacattctgatgctccaatgtttcgcgctngcattgntgtnttgngatcttgagatgaagaanttgagatgagatgagatcagtggacaagttcagaagtgctacatc

SEQ ID NO: 20723 - DNA, 297 bp, Oryza sativa
  Clone ID: PAT_MRT4530_26061C.1
atgaaggtgaagagcaccatgatggctgcttccttcctgctcttcctcttcctcctctccggcatcttcaccgccaccaccaacaacaacattcgcctccccagcatcggctgcccgtgcgtcgatgacaacgtgcaccgtcgtcgctgcgcatgccggcgctgccaggatgctacatcagcgaaaccacccatatatactgccatacaaccttatgtgtacggttgtataagttcaggggtacacatttctggttttgtggttaagggacctcaaaaaatcttgcagctaagttga

SEQ ID NO: 20724 - DNA, 363 bp, Oryza sativa
  Clone ID: PAT_MRT4530_26062C.1
tccggaattcccgcgtcgacccacgcgtccgaaaaattctcttttttcccctctctctgaggctcaaaagaaaaaaaaagaagtggtttttttcctctctctctgagtctcagaggctccccgcgcgcggagccggagaggcggagagcgagacggccaggtcgccggcgccctctctcctcccggggtttgcagtggcctctcactcgcgccctgggctggccgaccactctcgctcgtttcgcagccgaactcactcctgctccataagaagcagatggagtatcctccaccgcgctctcgcgtgcgggtccgcacgcgcgttccgcgactccagggcggtgtgcggtcgatcagactgga

SEQ ID NO: 20725 - DNA, 1485 bp, Oryza sativa
  Clone ID: PAT_MRT4530_26063C.1
cgccactggaccccctcggcccggggcactagtcccacgcgcgactgagtactcggtcgctcctcacttgctccctgcactgcagtgcaccaagcagcagcagcagcagcgacacggcgacgtggtgctattaatttcgtcgccgccgtctcgcgcagctgccaggccaccactgtgcgcgcgatgctctttgccccccgcgaagacgagcagcggcagcagcttccatgcttggcgattcgatgccatgtaggaagacgaagatgatgaagctagcgtagcctagtgatggctcaacccgccatggaagggacggtgcagggtggaggaggaggaggaggaggagcacaagaacctcgcggacagtacggcggaggcggcaagaacggcggcgacgcctccccgcgcaagcatgccgctgccgctgccgctgccgccttgccgcgacaccggcgatccaagagtgcttcttccgatcggagcctggagccatgcaagcacgcggggttgcacgatcagcgctgcacccaagcagcacaggcgacgccgagctctcatcaccaaccggacgcgacgacgaggaaatcccacaccgccgccgccgccgccgccgagggctcctccatccaccatgttcttacgagagatcgcagtgcatatctagcatatggcattccaaacagttctctgaaaagaatggctctatttcacaagccgccctacctgcttcggggccgggcggcccggcccatgcctgcccgcgcgctcggccgcgctgccggccccctcgctccgggccttggtttgaatccatactgtcgacggcgatgcggaagaaatgcgcagatgagaagcaactcgtccagctcaaattcggcctgccggactgccagcctctcgccctgttcgctctgtgcacaggagcttcatctgatcccatgctgaaggtgtacacggcgaagaacatcagtgaggagctggagcgtgcgaagcgggagttcctgcaggcgagcgtggtggtgaggaagtccaagaaggtgttcctgccgcgcctcgtcgagcggtacgcccgggaggccggcctcgccggcgccgacgagctcctcgcgtgggcgcgcgacaacgccgacgcccgcgccacccaggacgccatccagcggctgtgcgtcgacgccggcggcggccggaggaaggcagcgcaggccgtcgagtggctcccctacaacgccaggttccgctacgccttcccccggaccatggtcgacaagccactcttctgagcaagaaacaagcgtacattctgatgctccaatgtttcgcgctgcattgttgttttgtgatcttgagatgaagaattgaagatgagatgagatcagtgacaaagttcagaagtgctacatctatttttgctgtgccgtgtacagaattggattgttgctaatatctagtagcaatggattccttgaaaaaaaaaaaaaaaaaaaa

SEQ ID NO: 20726 - DNA, 3549 bp, Oryza sativa
  Clone ID: PAT_MRT4530_26064C.1
atgccgcccgcgcgccgccgccgccgcaccgccgccgaggtggacggcgaggccgtcccctcctccgccgccgacctcctcgccctcgccgccaccctcttccccgccgccgcagacgcgccgctcagggaccctccccacctcaagcacctcgtccactccctccccgactcccaccccgtcctcctctccctcccgggcgccctggcgccgcccctctccgacggcggcgcccccgggtaccccccgcgcgccgccgcggtgctcctccacctcctcctcacccacccgtcccacccgccgcgctggggcgacctcctcccgccgctcgcccgcctccacgaccgcctcgcgcagctcgccaccgacgacccgcccctggccgcgctcgccgtcgcgtgcttcgagctcgcctggagggccgccgcgccggggcgggaggcggtcgtcgcacagaccctgccgtacctcttcgccgaggcgctctcgtgcggctccgccaccgcgaggtcggtgctccgccgcctcctcgcgctccgcgacgcgctggcgctgctcgactacgacgacgacgacagcatctccgacttcaagatgctcctgctgcgctgcttcgtgtcgccgctcttcctcaaggccgaggaaggcaggaagctcctgtccctcgtgctcggcgtcagcgagggcctcgccagggaaggcctggagctcatcagagcgcaggtggggatgccgggggtgaagcgggcggcgctggtggcctacggggaggtggtgttcagggcgtggaaggacgggggttgggtcaggggggaggtcggggaggcgttcctgcaggggatgctggagggggccgtgcacgccaggagcaaggagcttgccaaagcggctaggaagcttctgtctgcgttcgtcgagcagagaatggtggctggagttgaaaaattaatctttcagcttgccgagcccgtgctggtccgctctctgccggttgcaaactccaatgtacgccataattctttgcaccttctattagatttgttcccccttgaagacccggatgtgacaaaggatgtcaatgatcctctactagagaagcaatacttcttgctagacaaacttctcatggacgattgtccagaaatacgaacggttgcgattgaaggactctgtcgtattcttaaccagttttgggaagttattccttccctaactatttcaaaatttttaagtaaaattgttgatgacatatccaaagattcttgcactgaggttcgggtgtcaaccataaatggtctgatatacttacttgacaatccgcaaagtcatgaaatactgaaagttctacttccaagattaagtgacatggtctctgatcctgctttatcggtcagatcttctgcagttgatcttcttttggctatacgtgatcttcgatctttccagtttaataaggttgttggattgggtactttgctgtcttcactctcaaatgaccacccccgtgtcgcacagaaaatcacaaagcttctcatcccttcatattttccaacaaaattgccactgaaagaagcgtgtgctcgctgcattgcacttataaagaggtcacccacagctggagcaaggttttgtgaatttgctttatctgaagggtctcccccaagatcccttgttgaactgatcaaagtctctattactctggcactggcaccaacaggaatgaactctgaacagactgatggtcttgttattgcttcagccaatctaattaaaagcttatctgaggagcgctctagtttagcttccttaagagaattctttgcaaatgcaaagttgaagctactctttaaaacagaaatttctgtgggagcccggtctgctctactcagtatggctccagttgtatcacctgatgatctatctgctttgcacgatgaatgcatgaatgtagtcatgaacgctgcaggggtttccacgcaacaaggttgccaagaagcagtgctagcagcacataagttggttttttcaagtggctggtctgacgaaatgtttgaagcactgacaaatattctgcaatctaaagtgtcttgttttgctgagatttatgatatagaacctcctatctgtcccgttgctacttcaaagaggaagaaaggaaaatcacttaagaaaacaccagcaaagtctggtcatgatattggaaacgggtcatccagtgaagactttgatattgttgcaggtgcatcatggcagattaatgacatactgaaagatgaagaaaagagagttgcctttctacaatcttcttattcagacgtcgcattttcatctctgaaggtcatttgtcaagtgtacattgagcagtgcctgcagtttgactctttaaatgccacacctcttttggcttatttgagtttggctacacacagcgctcttcaggatattgaccaaactgatatcagcacctctgagtcaacaaccatcaatcactcactggaccatctgctgaattgttttgacaaactcctaaatgaatctgttactggttccacaaactcattgaagttgaagcagaataagaaatctgcacggcagaaacaccatcatggagttcctgaagggaatgcattgagagggacagttaatgtatacatgcttggcacttcaattctcaagtttatcgttgacacaataaccatcaagttgatcagtgataataaagtaggatgtctcaattttgcattgtccttcacaaaatatgcatcatcagccataaaaatgcatcaggagcagagctcatctttcaaagggaatgatctgaaagacatattgatgcttatacggagttccttcacatatgcagccaagctgcttcatttggtcctagcaaactcaattgagtcacagagtcccccagaggaagccttctttcttgccaataatcttcttgatcttgtaccctctgttgagtctgctgcaggctccaaatttgctctcagtttagtttctgtcgtaaagcagtggctaccagttgtcataatgggtcttggatgccgctggttgattgggccacaggctgagggtaacatgtgtgactttggtgggtcttgcttgccactatgggtggttgcattggccaagaatgagctgcttgatgatgaaaaacctagagatgatgatcaaagcgagcaggccagtgaggactcacagtcatccagaaaactagcagaaatgatggtaattcttctgaagaaagggagcccgaaaattcttgattctgtggctggcgtcttcctgtccaccctcaagttggcgctgcagagagcggagtacggtgttgtcttgggcttgacacgctttgtctgtgtcaggttgcttgggagtgactcctcggcatcggagaagctgcatcttgctcatgattcacttcgtgagaacttctttgagattgacaagcatgtcatggacgatctagttgacagcgaggaatcgaggcagcaactggagagtgccaaagctttgataagatcaattctctctgacgtctga

SEQ ID NO: 20727 - DNA, 1306 bp, Oryza sativa
  Clone ID: PAT_MRT4530_26065C.1
caataaatcaggtgcaataaataaaaaaaagtcattttggggaagtactcccgtcaatatcattgttttctcctgtctgacttgagaaaagcagatgtactaactaggtattggccaaactggaaagcccccaatttctgaattctgaactagtactattacgtaatgccaactcccatgccaagcagcgttgtctcactcgcgtgcaacggcgacgagctgttttccaacgctacggccagtgaagagcctgatgagcgctgccggtgctgtgtcgagcccctcaacgacatcttctacgtatgacaccttttcttccttcaggtacccagccatctcctcctcgaaccggtagtacctgtcatagtagtcaaacacatggaagccctccatgcgcaggcgcttggtaacgatgtagtacaggtttcgcaccccctcgggctgctccaggttgtactgcgagatcatcccacatgccacaatccgaccacccagactcatattaggtagaactgcctctagcattttcccgcccacattctcatagtagatatcaattaccctctggaaaaacatctccttagggctgactcaaggtcttgttccttcttatagttgaaagcatcatcaaagccaaacttactcttcaataagttgaccttttcgtcataaccagcactgccgatcacgtagcaacctatgatcttagcaagctgcccaacaacctgacctacagcaccagatgctgctgaaataaagacatattcacctttcttcggcttagacacttcaaagaatccagcataggctgtaagccctggcattcctaaaataccagtgtagtaggacagaggaagtttagggtgattgatcctgaaaagtgattccggattgttaatcacggtgtattcttcccatccggttattccccaaacaagatcacctgccttgaaatctgggtggccggatgatatcaccctcatcacgccaaaatttgccaaaacctctcccgggataaagtctgagacatagctaggcacctcatgacgggtcatccggttgcgcatgtaaggatcgcaggagacatacaggttcttcaccaccaccgcctccgaccctgctgggacgacggccaacggtggcacttccgtcgtcaccacctccatgtcatcctccgacaggagccccgtcacgtaccgcttcaggatcaccctcttgttgctcgccgtcgccgccattgctgctctcgtgctcacctagctccctagctaattctcctggtgagcgggggcctgcctgcctaacc

SEQ ID NO: 20728 - DNA, 292 bp, Oryza sativa
  Clone ID: PAT_MRT4530_26066C.1
acatgaagaaacctcacaatgcctgtattaagaagtaaactaacttgaggatgaaaaaggacagaacagcaaacttactaagagaaaccgagctgcatcaactaaaaaaggaaaacataaaaagcaaaccatacgacaaaaacgaaagcgacagaaacagtagcagaagatgaaaaaaggaatacttgtagatgatttgaataacacatttaaatccctcggtcaaattatcaaacactattgcaacacgtacctagctaaatgcccagagccttcacagttgtagcaagca

SEQ ID NO: 20729 - DNA, 1155 bp, Oryza sativa
  Clone ID: PAT_MRT4530_26067C.1
atggtggcgtcggcgtcacggctgagaccgtcgagcacgacgaggacggcatcgagttgcaagccagagacagcacggggaactcacgttttcaccatacacggatacagcctgcaagcagtcgatggtgccggcagcaacaaagccagcttcatccgctccgcggctttcgacgtcggtggattcgactggtgtctccgctactaccacaacggcaacatcgagtccgacgacgactacatctccgtcttcctcgagcttatgaccaaggacgccgaggtgagaaccatctttgacatcaggatgttggatcaatataccgacgactcgtcttgcgttctggtctcgactacgaacaacacacggagagtgttcggcacgactaatttcaaaagcaaatgtctcgtgtggggtagtaagaatttcatcaggaggagtgagctggagggatcggtttatctgcgcgacgaccgacttatgattgagtgcaatctcaccgtcatcaagacaccactggtgaagacggaggagagagccgccatgccaggtgatatcatccacttccaagtgcctccgacaaacttgtccagggacctgggcaagttgctggaggacaatgtcggagccgacttgagcttcgaggttggaggagatgttttccccgctcatagcgtggtgctagcggcgcgatcaccggtgttcatggcggagctttacgggccgatgagggccaagagaggagagcggatagccatccaggatatgcaacctgttgtgttcaaggctctacttcattttatgtacacggactccttctctcctgctattaatgatgatctcagtagagatgaaaggcaggagttggctaagcatctgcttgtagctgcagatcgttatgctgtggaaggattgaaaaccatttgtgaaaaggcactctgcatgagtcttagtgttgataatgtggcaacaattgttgccctagctgatcagcacaattgcggaagattaaaagaagcgtgtgttaaatttatcgcctcatcaaatagattggatgatgttgtggagactgaagggtatggtcgcctcaaaacatcttgcccttctatcctactggatgtaatcgagatggcaactaagtctcgcaaaattaattag

SEQ ID NO: 20730 - DNA, 717 bp, Oryza sativa
  Clone ID: PAT_MRT4530_26069C.1
gaagaagtcatgaaagatggatggttcccacaggagatataggtgagattcttccaaacggagtactcaagatcatcgatcgtaaaaagaatctgatcaaactttctcaaggagaatatgttgctctcgagcatttggaaaacatcttcgggcaaaactctgttgtccaagatatatgggtttatggagacagcttcaaatctatgcttgtcgcggtggttgttcccaacccagaaaccgtcaacaggtgggctaaagatctcggttttactaaaccattcgaagaactctgttctttcccggaactaaaagaacacatcatttcagaactgaagtccacggcagaaaagaacaagctaagaaagtttgagtacatcaaagcggtgacagtggagacaaaacctttcgacgtagagagagacttagtgactgcgacgctcaagaatcggaggaacaatcttctcaaatattatcaggtgcaaatcgacgaaatgtaccgcaaattggcctcaaaaaaaatctgaaagtgttgcgatgatgtgtgtgctgttattgatagttatatatgtacgttatatgtatcaataattcatagatatgaccttatgctttatgtaatattttatttttatgttgtatgacatcataattatggaatttttttttgttgatttttgctttggtaatgtaactctctatttgtatccataatctacc

SEQ ID NO: 20731 - DNA, 1669 bp, Oryza sativa
  Clone ID: PAT_MRT4530_2606C.1
tgttgaagaatgcatccaccaagtttagtgctagataccttgaagcgtatcaaactatacatagccatgaagctcctgttaccgaattcggaggtgcctcggatctattgggagaaagctcagcatctctgtgggttcctgtccatgaagctcatttccagagccagatgtgtggcaagttctgtcaaacaatcttatagttttctggtttgcaaaagtaaccctttggtagttcagctcgtttactttgtgataatctcatttgctggtttccttgctctgaagaatctcaagccccagggtaagccaggtccaaaggatttggacctattgttcacctctgtgtctacacttactgtctcgagcatggcaacagtagagatggaagacttatctgacaggcaactctgggttctgatccttctgatgctaatgggaggagaggtgttcacatcaatgctagggctctacttcaacaatgccaatgccaacagaaatgagaacagccagagaagtttaccttcaatcagcttggacattgaattcaacagtcctgcaaacaatggggatcacaaaattacggaatgtggccaatcagaagaaactatgtcgcaaaaccaggtacagcaaaacaaaagcataacatataatccttgcgctgtgttggttcgcatagtgacaggttatttcgtagctactgtcatttccagttctgtcatcattattatttacttttggattgattcagatgcaagaaatgtactgaaaagtaaggagatcaatatgtataccttttgcatcttcacagcagtgtcctcgttcgcaaactgtggcttcacgccactaaatagtaacatgcaacccttcagaaagaactgggtccttttgctcctagtgatcccgcagattctagcaggcaacaccttgttttcaccactcttgcggctatgcgtatgggttttggggaaggtcagtggaaaagcagagtatgcttacatccttcagcatcctggggagactggctacaaacatttgcatgtgaggagaaattctgtttacattgttctgagtgttactggactgattctactgcaagtaatgtttatttgctcgtttgagtggaactcagagagcttagagggaatgaattggttacagaaattggtaggattattattccagagtgttaatacaagacaagccggtgaatctatccttgatatatcaacactttctccatcaactctgttgctatttgcagtcgtcatgtaccttccttccgatgcttcatttctcactgccaatgctgataaccagcccttgacagataaaaagacaaactcgattagcagagcactgtggaggaattttaccgttaacaagctttcttgtttagcaatgttcacattcctggcatgcataacagaaaggaagtcaatttcttctgatccactaaatttcaacatcttcagcatagtttttgagataatcagcgctttcggcaatgtaggctactcactaggatacagttgccagaagttgttgaagcctgatgccacttgcaaagatgcttcctacgggttcgtcggcaggtggaccgaggagggtaagctgatagttatcctggtgatgttcctggggaggctcaaggagttcatcctgaaatgag

SEQ ID NO: 20732 - DNA, 186 bp, Oryza sativa
  Clone ID: PAT_MRT4530_26071C.1
atggtcggcaggccccatgcccagcgaggcatggtgaaccctattcaccattgtagattaagcaagcatgcatggcaatgctatgaccacgccccactcaaagatgccccgaggccccagtggattgggtgggtcaacgtagcaagatctagctcgccatacctcatccgcagtgtgccctgttaa

SEQ ID NO: 20733 - DNA, 351 bp, Oryza sativa
  unsure (1)..(351): unsure at all n locations
  Clone ID: PAT_MRT4530_26072C.1
agctaagaactatncgtcccctcgattcggctgaacattccnaaaaggcangtgangttggagaaggatataccgccaagtgccgganagtgttcgcccgtgctcatgtgtncaacatcgactccntntcgaacaactgtgacggggagacgttcgtgtcggccgannacctcnngatcaacctgtggcncctggaaggtgacggaccantgcttcaacntcctggacatgaagcccgcggacatggaggatctcaggtgatctcttcggcacaattccncccgtcgtcgtgcacctcctcgccttcngcagctcnangggcttcntcnggctggtccacctgcggcantc

SEQ ID NO: 20734 - DNA, 327 bp, Oryza sativa
  Clone ID: PAT_MRT4530_26073C.1
atggccaacgccttcggcctcatcccagtgcaaaacatgaagaactttccccaacatccattggatataccattttctccactgatatatattaatatgtacatggacatgaatgaatatatgggatattatgatctcattgagcacgtcgtccgcaacatgatgaggaagatgagctatattggaagacatttcaagcgttacgttgccagcagtatgcagggcaacttttcccctctatttaaaggtctcatggagcacgtcgtgtcgttcggccaaaaattgtggtcggatatcccagatctacaacatgatgaggaagattag

SEQ ID NO: 20735 - DNA, 519 bp, Oryza sativa
  Clone ID: PAT_MRT4530_26074C.1
atggattcgacggagctgaggaaggtgttcaagatgttcgacaagaacggcgacgggaggatcaccaagaaggagctgggcgagtcgttcaagaacttcggcatcttcatccccgacgacgagctcgacgccaccatggacaagatcgacgccaacggcgacggctgcgtcgacgtcgaggagttcggcctcctctaccgctccatcctcggcgacgacgccgccggccgagcccccaggacggcggcggcggccatcggcggcgagggcggcgcccccgacgacgaggacgaggggatgcgggaggcgttcaacgtgttcgaccagaacggcgacggattcatcaccgtcgacgagctccggtccgtgctgtccagcctcgggctcaagcatggccgcaccgccgacgactgccgccggatgatcagcatggtggacgccgacggcgacggccgcgtcgacttcaaggagttcaagcagatgatgcgcggcggcgggttcgccgcgctcggtggctag

SEQ ID NO: 20736 - DNA, 653 bp, Oryza sativa
  Clone ID: PAT_MRT4530_26075C.1
atgaaggagagggagaaggtggtgcgactggccaagctcgccgagcaggcggagagatacgacgatatggtggaatttatgaagacacttgctaggatggatgtggatatgagtgctgaagagaggcttttattttcagttggttttaagaaaactattggtgccaggagagcatcatggagaatccttgaatcacttgagcagaaggtgacagctggtgaccaaccaggtgtaacaataaatggctacaaaaagaaagtagaggatgaactaagggcagtttgcaatgaagtattatcaattattgctattcattgccttccattggccaattcgggtgaaaatgtcgtgttcttttataagatgtaggtgcaggttttaccaaatgatgctgaggtttcatatggaactgaaaagaaggctgctactgatcagtcccttatggcctatcagcacgccatggttggtgcctgcagtgagctttctcctgcccatcaattgaggcttggccttgcgctcaactttggagacttcttgagataatgaactctgctgagagagctagccaagtggcgaaacaagcactagatgaggctactgctgagattaactctgctggtgtggtaggttacaagggcagtgtgcttatgatg

SEQ ID NO: 20737 - DNA, 122 bp, Oryza sativa
  Clone ID: PAT_MRT4530_26076C.1
acagtacacatggtgctgtatgacttcaatctttacatacaaactattttattgtttcaattcagtaccagataccatccacagtgccaatgctcctgcgcatcaactatagtagttaaggg

SEQ ID NO: 20738 - DNA, 1526 bp, Oryza sativa
  Clone ID: PAT_MRT4530_26077C.1
agctctcgtctcgtctcgcggcctcgagccctcgaccaaccaaccacccgcttcttctctcccgtctcccgaaacctccgagagctcagaagaaaaaagaagaaaaaaaagagaaaaaaaaactggtggaaactggaaggtttgcggcggaaacgagggggagggatggtggcgaggagggcgtaggcggggggtgggggtgaggcggatgatggcgtcgagggtgatggcgtcgtcgtcgccgtcgcacacggcatcggatctcgcgcggttcgcggcggggaggggtgggggcgggagcgcggggctggggtcgatgaacgtggaggagatcctccgcggcatctacgccgacatgccgacgccggcgctgcccctcgtcggcggtgacaggccgatgtcgccgctcccggcgccggatgtcgccgccgcgccgcggacggcggaggaggtctggaaggagataactggtgcgggcgtcgccgccgccgccggcggcgtggtgccccctgctgctgctgctgctgctgccccggccgtcgtcgctggcgctggcgctggcaccggcgcggagatgacgctggaggactttctggcgagggagggcgcggtgaaggaagacgaggctgtggtcaccgatccctcggcggccaaggggcaggtggtgatggggttcctgaacggggcagaggtcaccggaggcgtcaccggcggcaggagcaggaagaggcacctgatggatccgatggaccgcgccgcgatgcagcggcagaagcgaatgatcaaaaatcgcgagtcggcggcgaggtcacgggagaggaagcaggcctatattgctgagctcgagtcgctggtcacgcaactcgaggaggagaacgccaagatgttcaaagaacaggaggagcaacatcagaaacgacttaaagagctcaaggaaatggttgttccagtcatcattaggaaaacgtcagcacgagatcttagaagaacaaactcgatggagtggtagacgtgagccaagctcagttgccatccccatacagtttatgtagcatttgctcctgttttgtcaattcttctgttttatcggcagtagcctagttgcggtgaatacatgagtatttaggtgacacgaagcttaaatgtctggagtcatatgctacggaggggagagtgcgtacgagctacaaaagcaatcatatgtgtagggaggggagagtgcatatgagctataaaagccatgttccaatttgtcgcgggagtgtattctgtcccatttgttgtctgtttcattttcagtttaacaattaggtgtagtgaggaagaattacgagtactgagtagtactaaacagggtgactctaggtatgctgatatgatatctagttaggcattacttctgattctctgtttggtgccacgactcaaattgtctgtacatacacgttggatgtaaagtcacattatcaagtgaaatcatgatgtatttcctccagaattttttttaactgaaaaaaaaacaaaaa

SEQ ID NO: 20739 - DNA, 1299 bp, Oryza sativa
  Clone ID: PAT_MRT4530_26078C.1
atgatctcgctgctcgccaccaaggactccgcgaaggacgcctgggatgccatcaaagtgatgcgcgtcggcgtggaccgcgtgaggaaggcgaaggcgcaacagctgcaccgggagtatgaatccatctcgttccatgatggtgaatcgatcgacgacttcgccctacggctcacaagcctagtgtctcagcttgggacattaggagaacgaatcgaggagcagaacgtcatcgagaagttcttgcgcgtcgtcccagagcgattttcccaaatcgctgtgtcgattgagaccctgttggatctctcgacactcaccatcgaggacgtcactgggcgtctcaaggtggcggaggaacggcgaccagctccaacgtcgacgactactccagccggaggccagcttctcctcacggaggagcagtggctcgcacggcagaaggagcgacaaaaaggggagcgatcctccaagcagtcgcaagtgcaggtgagcctaggagccacggacgctgaggacaaggaggcgtggtaccttgacacaggagccaccaaccacatgacgggccgtggtgacgtctttgctgagctcgatcgaagcatcaccggcaccgtcaaatttggagacagctccatcgtagacatcaagggtgccggtaacgtcatcttcaccggcaagaatggcgagcacaaggttctcagtggcgtctactacattccgcgcctcaagagctcaatcatcagcatcggtcagcttgatgaaagcgggacgcgtgtgctggtcgaggacggcatcatgcgtatctgggaccgccgccgccgccgccgtcttcttgccaagatcaagcggggacgaagccgtctatacgtcctccgcctcgaggttgctaggccgatttgcttggctacgcgacacgatgatgttgcctggcgctggcacgagcgcttcgggcacatccacttcggctcgctagagaagatgggccgacaagagctcgtgcgtggcctgcctcgactggagcatgtcgagcagctttgcgacacgtgtgtcatcaccaagcatcggcgcgctgcctttccaaaggcagccaagtaccgcgctcaggagccgctagatctcgtccatggcgacatctgtggccctatcacgccggcaacgccaagtggccggcgttacttcttgctgctggtcgacgatgccacacgatacatgtgggtggcgctcctagcagccaagagcaatgcacctgacgccatcaagaaaattcagatggcagccgagactcactgtgggcgcaagctg

SEQ ID NO: 20740 - DNA, 745 bp, Oryza sativa
  unsure (1)..(745): unsure at all n locations
  Clone ID: PAT_MRT4530_26079C.1
agtacaattcaccttcttggggaataaactatgtaacactactagccctaattatttggacaaaagagattctttgtccaaagaacacaaaaaaaaaatccaaggattacaagagtttgctttgttctcataaatatcaatgtgaaatacttacaccaattaacttagccacttatgattcacaaagataagatataactaactagcctatcaatagcaatttgagaggacccaccgtcttccaagcagcgtgccactttgttcttaagctcatttgctctttccctcatctcagctccctcatttttccccattaatttcataatcgctttctcaattttgcaccactctaactttccctcgagctcaaaccctacaccccacaccgcttccacgtaccttgtatttatcatctgatctgcgaattgaggcctacatatcataagaactccctcacatatactctccaatatcgagttccatccaccgtgtgtccaaaaccagcccactgcacagtgtgccagcacctcctgctgtggggcccacttaatcaccttacccctaccttccaccgcactctcaaacccatccggcaagcatgctctctccacccccctcacaaggtttggacgaaccacccatagaaaaggatggccgctcttctccaacccaaatgcgacctccatgaactcgtcggagtccattgggatggnaagctcccaaaggctcacggtacaacacggga

SEQ ID NO: 20741 - DNA, 190 bp, Oryza sativa
  Clone ID: PAT_MRT4530_2607C.1
cacggcggacgagtacgtgcgcatccgctcgggctcggacattcccttcctgggcggggtgatgcaccacatcttcaagaacggctgggaagacaagaaatacctggaggaccgtgtctggggcatggacaaggtccgtgaggaggtgctgaccaagtggacgccggacaaggtgcaggaggcctgcggc

SEQ ID NO: 20742 - DNA, 5645 bp, Oryza sativa
  Clone ID: PAT_MRT4530_26080C.1
atggagggagtaccagctgctggagccaatgcttccaggtcgccacaacaccgcggccgccatcactcgttatcgccaacaccacggcgaggacgaggtcgaggcgctgctgttcgagaggttgttgtgcagcggactgtcagggaggttggcggcgctgctgctttccccaccctcacgcgaaccaactacaccgagtggtcgctgctgatgaaggtgatgctgcaagcccgtggcctttgggacgcggtggagcatggtgaatgcgatgagcaagaagacaggatggcaatggaggccatcctacgcgctgtccccagcgagatgatctcgctgctcgccaccaaggactccgcgaaggacgcctgggatgccatcaaagtgatgcgcgtcggcgtggaccgcgtgaggaaggcgaaggcgcaacagctgcaccgggagtatgaatccatctcgttccatgatggtgaatcgatcgacgacttcgccctacggctcacaagcctagtgtctcagcttgggacattaggagaacgaatcgaggagcagaacgtcatcgagaagttcttgcgcgtcgtcccagagcgattttcccaaatcgctgtgtcgattgagaccctgttggatctctcgacactcaccatcgaggacgtcactgggcgtctcaaggtggcggaggaacggcgaccagctccaacgtcgacgactactccagccggaggccagcttctcctcacggaggagcagtggctcgcacggcagaaggagcgacaaaaaggggagcgatcctccaagcagtcgcaaggtggagctcgtcagcgacctcgctcccatcgcaagaaaagaggttttggtggcggcgtaggaggcgagaaagggaacaccaatcgggacacggcaccaaacagatgccacaattgtggccgtcttggccattgggccaaggactgtcgccagcccaagaaagaagccgctcacctagcccaaggtgatgacgatgacgacgtcctgctgctttcgcgggcatgcgagcttgaagatgacgatgccactttgttgatggcccacgcttgcgagctcaatgatggccccatcatcgcgccatctcctgtctccctcgttgaaccgcgagtgcaggtgagcctaggagccacggacgctgaggacaaggaggcgtggtaccttgacacaggagccaccaaccacatgacgggccgtggtgacgtctttgctgagctcgatcgaagcatcaccggcaccgtcaaatttggagacagctccatcgtagacatcaagggtgccggtaacgtcatcttcaccggcaagaatggcgagcacaaggttctcagtggcgtctactacattccgcgcctcaagagctcaatcatcagcatcggtcagcttgatgaaagcgggacgcgtgtgctggtcgaggacggcatcatgcgtatctgggaccgccgccgccgccgccgtcttcttgccaagatcaagcggggacgaagccgtctatacgtcctccgcctcgaggttgctaggccgatttgcttggctacgcgacacgatgatgttgcctggcgctggcacgagcgcttcgggcacatccacttcggctcgctagagaagatgggccgacaagagctcgtgcgtggcctgcctcgactggagcatgtcgagcagctttgcgacacgtgtgtcatcaccaagcatcggcgcgctgcctttccaaaggcagccaagtaccgcgctcaggagccgctagatctcgtccatggcgacatctgtggccctatcacgccggcaacgccaagtggccggcgttacttcttgctgctggtcgacgatgccacacgatacatgtgggtggcgctcctagcagccaagagcaatgcacctgacgccatcaagaaaattcagatggcagccgagactcactgtgggcgcaagctgtgtgtatttcgcacggacaacggcggcgagttcacgtcgcttgagttcgccacctactgcactgatgagggtatccaacgtcatttctccgcgccctacgccccacaacaaaatggcgtggtcgagcggcggaatcagacagtggtgtccatggcgcgcgcccttctcaaacagaggggaatgcctgcggagttttggggggaggctgtcagcacggctgtcttcctcctcaatcgtgcaccaaccaaaagcctcactggcaagacgccgtatgaagcttggcacggcaagaagccgatggtcagcttcctacgtaccttcgggtgcctggcgtacgtgaaggagctaaacgatgtgcgcaagctcgacgaccgcagcacacccggcgtcttcattggctatgaagaaggggtgaaggcatatcgtgtcctggatccaaggacacggcgtgtacgtctcgcccgtgatgtcatctttgacgagagccgtgggtgggactggacggcagcaagcggcatagatgctcgaccgagcagcgatttcgccatcgagtaccatgttgagaagaccactgggcatcctatccctagtgtggggggaggcgtggtgaccccatcagcatccccaacgccactacaagagacttcaccagcaacccctgccacaccagcaccaagtcctagcgttgccccaacagagttcgtgtcacctccctcacacgacgaggagaggatcgacgcggcgcactccaacacccctgtccgctaccgcacagttgacaacttgatcggggagaatgccccggcaccagggattgcaaaacgggaactcgaggaggcgtctttgctcctcgctggacctggtgagcccatgctcgtttgcagagccggagggtgatgatgcatggcgagcagccatgcgtgaagagatggacgcggtgaatcgcaatgggatttgggagcttgttgatctcccacatggccatcgcccaattggactcaaatgggtctataaattgaagaagaacgaggccggaaaggtggtcaagcacaaagctcgtctcgtcgccaggggatttgtccagcaacctgggattgattttgacgaggtgtttgcgcccgtcgcgcgcatggagtcaattcgtctcctgcttgcggtcgccgcccaaaaagggtggcacgtccatcacatggacgtgaagtctgcctttctcaatggagatttggcagaggaggtgtatgtgaagcagccccctggttttgtcgtcgccggagaagaagacaaggtcctccgcctgcgcaaggctctttatggcctgcggcaggcgccaagagcctggaatgcgaagcttgattgtactctgaaggagctcggtttcgaccaaagcaagcatgagcacgccatgtaccgacgaaacaatggtggctctgctctactcgtcggggtctatgtagatgaccttgtgatcaccgggccatcgacaagagcaattgaacaattcaaggaagaaatgaaggcaaagtttcagatgagtgatcttggcttgctctctttctaccttggaattgaggtgaagcaaggagatgatggaatctccctgaaccaggggcgctatgctcagcgcattgtggagtcggctggcctcaaggactgcaacccttgcgccactccaatggaagaaaggctcaagctgagccgtgatagcacggcacctcccgttgatgcaacaaaatatcgacggctggttggtagccttcgctatcttgtgcacacacggccagacctagcatttgctgttgggttcgtgagtcgcttcatggagcggccaactgaggagcacatggtggccgtgaagcgcattctacgctatgtcgctggcacgatggagtacggacttcattacaaaagggagaaagaggagcagcggctgattggttacagcgacagcgacctcgccggcgacattgatacaaggagaagcacaagtggcatgttgtttttccttggttcaagcttggtgagttggcaatccatcaagcagagagtggtggctttatcttcctgtgaagcagaatatgttgcagccaccaatgctgccacacaaggaatctggttggctcgattgctcggcgaacttcttgggaagcaacctaaagcgatcgagctaaaggtggacagcaagtctgccttggcgctggcaaagaaccctgtcttccatgagcgcagcaagcatattgatttgcgctatcacttcatcagaagctgcttggaggaaggaagcatcagcgccagcttcatcaccaccatggaccagctcgctgacattctaacgaaggcattggggcgagttcgattccatgagcttgttgcaaggattggagtgatactgaaccgtcaggttgtgaaatctgattcagcaactattaagattccagaactggactttgagatccctccagaagctcaacgtggatcactttcaacagtggaagggattattatgcgagctgtggatgagctgcaggcacttcaagatgaaagaaagaaagtggatcctcaaaaggccgaagctattgataaatttttagcaaaattgagatctcttggattaggagaagctgctttcacctttgttcttgatgatcctgctggaaatagcttcattgaaaaccagaatgcaccttcatcagatcctttgttatctgtgagattctatgaaaggatgcgtgagcaacaggcagcacttggttttcttgttgaaccatccacagaagaacctggggatcagcctgttaatcatgcttcaactgtggaagggaactctgaggtgttgcaggagccccacggttcggttggagctgttgcaggtcgccgtgctatagctcaaggaaaccctgatgaagttgctgcagcgctgtgcagatattcagcaccagaagagtgtctggtctttgacctttggttagaaatcccatattttcgtgaggttattgttatggcaacaacatgcgacatgtgcggctatcgcaactcagagttgaagcctggtggtgaaatcccagccaaaggaaagaaaattacactacgtgtgcagaacggaaaagatcttacacgtgatgtcataaagtcagattcagctggcgtaaaagtacctgaactcgagttggagctagcaagtggaacattgggtggtattgttacaacagttgaaggtttaattgtgaaaatatgcgaggctctgcagagagtgcatggattccatttgggtgatagcacactggaatggaaaaagaagaaatgggaggatttcaacgatagattatccaagcttctaagtttacaagagccttggactttaattatcgatgatggattggcagcttcatttgttgctccagctaccgattctttagaagatgacaaccagctaaccattgaggagtatgtgaggagctgggagcagaatgaggagcttggcttgaatgacatggacacatcgtctgctgacgccgcctacaacaccaccaacccataatgtactcaatgttgtaacatgtgatattatcaaatatacttattgtgctccatgttgtagtaagttgcgatatttctcattttaaatcctcaagttttgtgttagccatagcttttgtttatgagacgatcgaagatattcagttgaccaaatttgcttt

SEQ ID NO: 20743 - DNA, 1355 bp, Oryza sativa
  unsure (1)..(1355): unsure at all n locations
  Clone ID: PAT_MRT4530_26081C.1
ttagtactgttccaatgaaagctgacttgtcatccaatgccgaatgcactggtcctctgtgttacttgagtatccagaggctaaggtcacgttgaagtatgctgggtgcttgggcacaggcagactcaccccttcacttcttagcgttgccacgacaattaatatggtaggtcgaccagccgcattctcatatgcttcaaaatttatcaagtcaccatcctcgtggaacctacgacctcttttcccacttaacatctcgagggtcacatgaccgaaactgtaaacaccggagttgcaccttactagacaatcagatggagactaaggagtcatggaaccgtatgtaccagcgactcttcttgtgtccccttcagcatcattagagctgattattttgccttgcccaacctttgctttcagttcactaagtgtggcgcgcaagggggagtgctcgtgtaagttcctctgtccttgtttgatcccttcacttattgccagtggcttgttccagtcttgtaaagttcattgagcagtctcatgttgaccagtatcagcatcaagcctgttaacagcagtcaatcatctgtcaagtttacccctgtatattgtaccaaacttacctccgccaatttcgttctctcgagagaagttattggttgcacgtattatgcatgcaaagtcaaacaacaactccgagctctgtccttgtatgggccaggctagtgcttcctcttcatacaagtatgtagaagttttttcttgcagggaagcttttccatctgcagatgttgaattcgttgatggccccataattcgcatgggctccccgttgtagaatatgcttgtttcgaaccttatcaaacaacgcaccccaataatccttccccctctcctcccatcaaaccacttcagagactcctgaatagtaccctgaagacacttgaagcaactttctgaagaaaggtctggtgtgcactgcgtcagggaatagattgtcggaaaggctccaccgatgtccatcttcgcggtggcaaatcgctttttggtgctgtacgctgcccactttgctgtttcacgaagtagtgtatacacggtgccagtgacaaaggaaatactctcggcgttgttgggtcccacccagggaacactggctcggtaatgttgtttatgttccatgctttagataccaaatatgaagaagtctaggctttttgtttggtagatattcatacaccaatatcttntcttctcctttactgcagcaacccaggagtctaactaaattggagtgctggagtttggctataagttgaatttcatttgtgaactccacaaaaccttgaccagatctcgtg

SEQ ID NO: 20744 - DNA, 298 bp, Oryza sativa
  Clone ID: PAT_MRT4530_26082C.1
atattcgacgtttcgccaaagcaaccgctgcttcgtggcctatgaattctccatctgcattccacggtgtcgcgcccgccagcctaccttaatggcgcggatagtcgacgcgcttgacaccaacatcatattcgacgtttcgccgaaacaaccgctgcttcgtggcctatgatattcgacgtttagccgaaacaaccgctgcttcgtagcctatgttgtggaccctcagatattcgacgtttcgacgaaacaaccgctgcttcgtggcctatggaatcagccgaggtacacaaactga

SEQ ID NO: 20745 - DNA, 457 bp, Oryza sativa
  Clone ID: PAT_MRT4530_26083C.1
agcgggagagataaaaggacttattattattacttaatcatgctcccgcctagctaggaggaggacccaagcacgcaacagcttaagcttagtagctggggatgtcgggggggggggggtcctttgggtggacgtcttatttttcggctccggggggggcggcaatcagggggggaaggcggctatctctacccccttgttgcccagggaaggctggggggggtctcaagccctgaaaaggcggtaggaggagatgagggagaggaggatgtagccagcaaccgaggctaaggtgatggccaccgacgttcttgcctgccggtagaatccaccgaaaacgcgcgacggctcgctacacgggaccttcttgttgccgttgtgccccaggtacagattttccggcgacaccgccccctgtttaaggataaggaacgtgaacacctggtggggggggaaa

SEQ ID NO: 20746 - DNA, 203 bp, Oryza sativa
  unsure (1)..(203): unsure at all n locations
  Clone ID: PAT_MRT4530_26084C.1
nnggggtttatcaaaaatctgtggaaaccactcgatatctaagatattcgattattctgatattcaaaccacttgatatactgctctgttagcaattggacatcttttctccacactcatagttctaacttacgtcatcattcagtcttctatccagccacttcccggagcagccaatcattacacaaacagcaacattctga

SEQ ID NO: 20747 - DNA, 856 bp, Oryza sativa
  Clone ID: PAT_MRT4530_26085C.1
gcatcatcatcaatggagtgcaccggaaacatgtcggcggcgccattgctcgtcttgacggtggcggtgctcgccgtgctagcctccacctgcgccgccgacccagagccgatacaagacttctgcgtggccgtgccccgtgccggcggcgaggcgtcgccggcatacccgggcttcccgtgcaagccggcgtccgcggtcgtctccgacgacttcttcttcgccgggctcgccgccgccggcagcacggacaacccgttcggggccagcctgaagccgggcaacgtggaggcgttcccggcgctgaacacgctcggcgtcgccatcaaccgcgtcgacctcgcccccggcggcgtcaacccgctgcacagccacccgcgcgccgccgagctggtgcacgtcatcaccggccggatgctcgtcgggttcgtgagcacggcggggaagtactactccaaggtggtcggcgagggggagacgttcgccatcccgcgcgggctgatgcacttccagtacaaccctgggaacgcctccgcccgcgccatgacggtgttcaacagccagctccccggcgtcgtgcccgccgcgacggcgctgttcggcgccgacccggagatccccgacgccgtcctcgccaagagcttccaggtggacgccgagatcatcaaactgctcaagtccaagttcaagaagtgacactgacgtctcatccgccatggctacagcatatctgttttgctttagctgtcctagatacagtaaatagagttgtttcacgtttgatattttggtccgatatttgcccatttggcacatcaataaagtaaatttgaattgtcctaaaaaaaaaaaaaaa

SEQ ID NO: 20748 - DNA, 936 bp, Oryza sativa
  Clone ID: PAT_MRT4530_26086C.1
atggcggtgggattccggcggacgctgtcgacgctcacgtcgcacaaggcggtggcgccgtcgttcctgctcgactgcgcgcggcccaagaagctgtcctacgcgcgcgtcaggtcgacgagcctgcccgtccgcctccacccgctcgtcgccggcctgcacgacgcggcgagggcgctgctcaagtgggcggacgcaccggcgcagacggggccggcctgggtggcggacggggcggacagggcggggaaggtgctcgccgggctcgccgacctgctccaccacccgcaggcgcaggacgcgctgcggcggccgtggacggagcagctgctcgacgacctcctcctcctcaccgacctccacggctgcttcagggagtcgctcgtcgcgctcaggcagctcctcgccgagacccacgccgcgctccggcgccgcgacgggtcgcgcctcgccgcggcgctgcgcgcgcagcggcgctcggcgcgggaggtctcccggctcgcctcctccgcgcgcgacctctcccaccgtgccgccccgggagacgacgccgacgaggccaccctcgccgacgccttcgcggccgccgcctcctccgtggcggccgcggccgccgccgtcttcgccggcgtgtcgtccgcctccgccgagtccgcggcgagcgccgcgccgtcgccacggacaccgacgccctactcccccgcccgcacgccggccagccccatgtggctggtgaccgacctcctccggcggcggcggaccgtctccttcgaggactactgcaacgaggaggaggaggagaggaaggcggccatggcgagggtgcgtggcctcgaggagtgcgtcgccgccgccgagagcggctgcgaggaggtgtaccgcgcgctcgtcaatgccagggtgtcgctgctcaacctgctcacgcccacattttga

SEQ ID NO: 20749 - DNA, 201 bp, Oryza sativa
  Clone ID: PAT_MRT4530_26087C.1
attgttctcacgaagaaagctctcatttagtgacggcgacaaacttcttgcattccagcggaaaaacagagtaaaattcagagaaaacgccaatgatgacgtctacagtggtcccatgggaaacatggacggtgggatttgccttcataacgcttcaagtgtctcctgggccgtccaatcttcatcagatcagtccttcca

SEQ ID NO: 20750 - DNA, 129 bp, Oryza sativa
  Clone ID: PAT_MRT4530_26088C.1
atgggcagcgccgaaggcaaactggcgatgacgatgacgccagtcaataatgacaaagacgcgcagccgtggagtaaaggcgacggcactagtcaacagcagaagagacgaccggcggtgaagacgtag

SEQ ID NO: 20751 - DNA, 495 bp, Oryza sativa
  unsure (1)..(495): unsure at all n locations
  Clone ID: PAT_MRT4530_26089C.1
cggacgcgtgggcgcgctcacagtgatcggagatggcgaaggacattgaggcggtggcngngntntgatcaccattgtgcactgcgggtcctacttcagctgctctctttcttccgttagttgttaactttttgcttcattgtcctggttcttcacattcactccctatgatcctcttatgtttgttggttcctttttatcttattttttttctcactcttcttttctgtttatctctgtttttttattctctttttcttttgtttttttctttctctttcttttttttatttttcttcttcttcttctcttttatttcttttgctttgtttgtcttttttttatttattttcttttctttttttaatctttcttttttctttcctttcttttcttttcattttctcttttattttcactctttttttttatttttctttgttcttttctctctttttttttgtatctgctttctctttatctatctttcttttt

SEQ ID NO: 20752 - DNA, 577 bp, Oryza sativa
  Clone ID: PAT_MRT4530_2608C.1
agatcatcccctacaaacaccttgaggactattacctttccaaaagcattctagtctcgctactttaaatcttcaattgaatcggccatcgacacaatgcctcttaccggcagctgcatgtgtggcgccatcgcttacaagagcaccactgaccccgatgttactgctctatgccattgcaccgactgtcaaaaatggactggcggtgcctttacttccaacgctgtagtccctgaggaatccttcagcattgccaagggtacccccaagcaatacgacgtcacaggcgcttctggcaagattaatcatcacttcttctgtggtgattgcggttcaagcctgtacactcgccttgacattatggagggcaagatcattatcaaggccggtggtcttgacgagggcaaggctaacctggacaacaagattggtgtcgagttttacacccgtgatcgtgttccgtacattcagcctgctcagggagcaaagcaagaacagatgtttggttaagccgcgagtcttcgcttactagattagtagatagatagttggtataaataaatagcatacttttacc

SEQ ID NO: 20753 - DNA, 960 bp, Oryza sativa
  unsure (1)..(960): unsure at all n locations
  Clone ID: PAT_MRT4530_26090C.1
cgctcctcgaagaaatcaagaaatccaaaggcagcagcaatggcggcgaggtgcctctcttctctcgccctcctctccccctccccctccagctccgggaaggtgtcggccatggcctccccgcccgtcccctcctccgccgcccctcgccgccgtcccgggacccgcctttcggtggccaccggcggggagcaactcgtcacggcgcaggaggcgtcccaggaacctgcttatggagttgttagcattcaccatgttgggatcctatgtgaaaatcttgaaaggtcaatggccttctacaaagatctgcttggtcttaaggtgaatcctgctaggccaaccgacaagcttccttacagaggtgcttggctctgggttggttctgagatgattcacttgatggagctgccaaatcccgatccattgactgggcgcccagagcatgggggacgtgatcgtcatacctgtatggcgatcaaagatgtgttgaagttaaaagaaatctttgacaaagccggaatcaaatacacacttagcaaatcagggcgaccagcaatatttgctcgggacccggacggaaatgcactggagttcacacaagtgtagaagctgaaccaagaattttcaactagaagagatcatagccctactgtagttaccagtatccggttaagaaaaaactgattgtacatatcattatatcggttaaaagggtaccacatgatgatatattgatagtgaagttgtatgttggtattggaccccttgaaatattctccagtttggtttgtactattattcattattcaaacatattgttgttactgatagacgaatactgtaagctcccactttcagattagtacacatatactcctctcgtactgttaatatcaaaaaaaaaaaaaaaaaaggggcggcccgaatcacaccatgcagttgccacttgccaaaaaaaan

SEQ ID NO: 20754 - DNA, 699 bp, Oryza sativa
  Clone ID: PAT_MRT4530_26091C.1
atggcggcgaggtgcctctcttctctcgccctcctctccccctccccctccagctccgggaaggtgtcggccatggcctccccgcccgtcccctcctccgccgcccctcgccgccgtcccgggacccgcctttcggtggccaccggcggggagcaactcgtcacggcgcaggaggcgtcccaggtggtagctgttcgattgagtgttcctgttaaagatttactggctgatttcgggagtgtttcaagaatcaagatcagtctgaactctgaactgtaccctggagctacatatgaacaagagttagtaaatcttgaacctgcttatggagttgttagcattcaccatgttgggatcctatgtgaaaatcttgaaaggtcaatggccttctacaaagatctgcttggtcttaaggtgaatcctgctaggccaaccgacaagcttccttacagaggtgcttggctctgggttggttctgagatgattcacttgatggagctgccaaatcccgatccattgactgggcgcccagagcatgggggacgtgatcgtcatacctgtatggcgatcaaagatgtgttgaagttaaaagaaatctttgacaaagccggaatcaaatacacacttagcaaatcagggcgaccagcaatatttgctcgggacccggacggaaatgcactggagttcacacaagtgtag

SEQ ID NO: 20755 - DNA, 423 bp, Oryza sativa
  Clone ID: PAT_MRT4530_26092C.1
atggcggtggcgcacttcgtgttcgtctcgctcatggcgcagggccacctcatgctggcggtggacaccgcactgctgctggccacctgtggagattatggataccccatacctacacggcatggcagcggctacgcggcggctagcagcggacaacagcgggtgcggtgcacggcaatgaccggctcgacgctagggccaaataagattagattaaattggattaagtccctagggataaactacaccggggtagcgtcaagttttttgccaactagtgcgatgggtttcgtctccggcatcgacgacttcgtcttcccacccgggcaggcgttctggttcggcagcctcgacttcatcaccaatgacttcggcaggatttctctcctcgactcggagccgaaccagtcggggagaggctag

SEQ ID NO: 20756 - DNA, 930 bp, Oryza sativa
  Clone ID: PAT_MRT4530_26093C.1
atggcggcggctggaagaactacgctcgttaaatctgtgcttacgtcgcagccgatttacctcctaactgctctaaaaattacgaaggaatctctggagcagatagacaaacagcgaagacgctttctatgggccggcacggaaggtattaccggggaaaatgttagccagggtggacttggagttctaaatttggacaagttcacgagggccttgaggttgaggtggctctggcacaagtggaaagacccgaccaaaccatgggttggcctggatatgccttgtgacgaaattgatagagacctgttcgccgcctcaacagaaataacaatgggtgatggaaacatggcacgcttctggagctctgcttggatagatggacgccgacctaaagaactcatgccactggtctatgcgatctccaaaaacagaggaaagtccctgtgacaaggaaaagatggtgacgtataggtacgagatctgatcattgaaccgcattcgccgatcacagtcaacctcattgaccacagtcgccctgtgggaagcggtccggaatgtgcatctagacagtgaagaaccggatcagattgcttggaaattcaccatcaacaggcaatacacgtcatcctcggcttaccaagcacagtgctatggggcacctaatacaaacatcggtgcttgatttggaaagtttgggcacccggaaaatgcaaattccatgcttggttcattatccagaacagagtctggacatcagatcggcttgcgagtaggggttggcagaacaacggacattgtctcctatgccactgtgagaatgagacggctttgcaccttgtaggcacttgtagatacaccaagagaatttggaatctcatcgccacatgggtgggccatcagcagttggaaccggcccattgggaggaagcc

SEQ ID NO: 20757 - DNA, 599 bp, Oryza sativa
  Clone ID: PAT_MRT4530_26094C.1
tcactctcttcccccactcttcctttccccaccgcaggagccgggcggagatagaggtcgcagtggtcgggcagagcggcggctcaagcgggggttgcggaggggatccgatggcgtcggctcgtcagggcgcggtggtggcggcgccatggccttccacggtggcgccggggcggggcgggccggctgggctgcggatcgagggatcgacctcggatggcggcggcatgcgcggcggcgggcgtcggcgtcggtcggtgccttcctcccctagccagactgccaacgagtcctatcgcaccatcatccccggtcgacgaggtggtcggattcgctgtcgctgctgccgtgggagtcggcgcctccactgccgtcgttctcaagagccctgccgcgggagttggtgcctcgagcgccgtccttccctccccggtcgacgccctcctcccccggccgacaccttcctcccctggccggcgcgccgaggccgctacctgccacagtcgacaccgaggcagcgagctcgatgaggccggcgacgtccttaacttcttcggtcccctcccctccccctcccttccagcgactgtcgagctcac

SEQ ID NO: 20758 - DNA, 1565 bp, Oryza sativa
  Clone ID: PAT_MRT4530_26095C.1
atggccgagaaggaggaggcggaggagagggcgaaggatggggaggagtactagagcgcccgggaggacgcgccgctgtcgtgggcgaggcgacgcagcgccacgcgcgaccaagaggagggggccggtgcatcgggttcaacggcgccgtggagcgtggcggggtcagacatcgactccaaatcaaaaactgcggtggccgaaagttatgagatgctagaggtgataacgtatgggtgcgaggaaggttatgtgagaggagttccaggcgtgagaggctttatgagacgtgctcccgttattctgcaaagggcagtagaaggggaccaagaggctcttttagagcatggggtgcggatggaacacatcgttatgatcatggctatcttgaaagaactttatcccaatcttactatcatgatgatagagaagagtacaagtatgtcccaaaggaacgacgtactttctttgctaccaccagggaccacattagctttctgaaagaatccaacaatatgtatggcagtgccaataactacaaaagagttccaagtaagatttcacacttactatgatcatggtgataccaagaattttgcctatgttcaaagagaatcacatacctattatggcaatgctaaagatttcaccagtgcacacgatggttacagggggggagtttctaacccgtatgtatctcattggaggagtgatccagagatatgttcagaaatgacagtggaaggggaccaagaggctctttcttccaatgcagaagggggaaagcatccctctcaaactctgggtttccaaactgaaaaatactttcccatgaagaaaactactccatcaaacttgaattcagcttcaccatccttttaccattctagatcatctcatcaggaacaaccttttattctgagagggaaagcgcgagctgtgatgtttagtaaactcttcacatcctctgtccgtatggctcataattctctgaagccacaatcgcgaagggggaaaaatcatctcatcaggaacaaccttttattcagagagggaaagcgcgagctgtgatgtttagtaaactcttcacatcctctgtccgtatggctcataattctctgaagccacaatcgcgtcctgtttatagagtgaaggctgttgttccatctggtagagggaacactcttgattctcttagcacaaatgctatggaggaaattgataatcctggctcaaatttatctggatcagcatcagacaactacatccaatattcaaaatccagtgataaaggaacaggagcaaggggccttacactcagtgacaaaggttttcactcgatccccagcattacttccaagtttatgttgttagctagggtgcatcaactcgacctccatcattattttagattcgtattgtttcacagggcactctattatatggacttcccagtctcatttctctttcctccacagctttgcagttcagtggacaacatcctaggggacctgatacccctttcattggcaggactctgcctagatttgtggttcgacaactag

SEQ ID NO: 20759 - DNA, 352 bp, Oryza sativa
  Clone ID: PAT_MRT4530_26096C.1
gttcaaaactttgggccccaaggattgaacggtacagtatttttggaaagaatacattgccttctaagcgggttgggggccaaaaaaattgttaaaaacagggaagacggggaaaaaaatgtccacggttccaggggttcagctatcccaaaaaagcagggttggcatttcgagatcttccgtctcttaaaactgaagggatgcccacgccccaaaaaaaaacccttggggccgcaactgaaagcctgaaaaaaaatcaccaatctaaaagccgtcataggcccccccagccagggggttggctagatcttcctcctgatggaacctttaaagcctcttttcagccctctcc

SEQ ID NO: 20760 - DNA, 1482 bp, Oryza sativa
  Clone ID: PAT_MRT4530_26097C.1
atggattcaaaggttaaagctatgatcaaacttctcaatgaagatgctgattcttttgcacgaagagcagagatgtactacaagaaacgcccagagctaatgaaactggtggaggagttctaccgagcttaccgtgcattggcagaaaggtatgatcaggccaccggtgcacttcgacaggcccataaatcaatttctgaagcatttcccaatcagatgccaccaatgtctgatgagtcacccgcttcttcgggccaagaagtggaaccacatactccagacctgtttactttcacccgtctcccttttgatttggatgacctgcagaaggatggagtaggtgtgtcaccacaacaattcacctccaagaggaatggtacacaccctgaggaagccagtgcactgccaaatcgaaaaggttttgatgtgaaagtgcgtaaaggcctaagctttggaagcccagaagttaaaggcagtgatgccatcagcaatgagatggtaaatttgcaacaagagatttcaagattattagctgagagcaacagcatgaaacaacagatattatcagaatctgagagggcaaacaaagctgaaaatgaaatccagtccactgagcggttatctactctggagtctgagctctctaaggcccaggatgacctcaagaagctaactgatgaaatggctacagaagttcagaagctgagtagcgctgaagcacgcaatagtgaaatacagtctgagcttgaggctttggatcaaaaggaagaacaagataagcgcatgcaggctgaaagtgctctgctttcagaggggaaagaacttgctcaatgtcaagaagaagtacaaaggttgactaaggaaatccagatggcaaatgaaaagttgaatgagctcaagcagaccaaagtaaatcttgagaatgctgtttctgagttgaagaaagaagtcgagaatcttactgaacaaaaccgctcctccgagctgcttatacaagaacttcgcgatgaaattaattctctgaaggattcaaagaacgaacttcaaaatgaaatccaaagccttcggagcaccatttcacagttaaacaccgagaaggatgcaaccctatttcaacaccagcagtctgttgaaagagtatctgatctggaatctcaactcttgaagctacagcctgagctggaagaaattgaacagaaggttcagatgctgatgcaagatcttgaacagaagagacaggaagcagatagtgcccatgcccagctgcaagatgaatgcaataggcacacacaaactgaagcagatcttcacaggtttaagaatctgcattctcagttggaagaggaagtgataaagctgacagaaaatcttgacagatcaacaaaggaactggaagagttggaaaatgcaaagttagacctggaaaacacatcaagagagttaaaaagcacaatcttagatttaaactctgagaaggatgca

SEQ ID NO: 20761 - DNA, 411 bp, Oryza sativa
  Clone ID: PAT_MRT4530_26098C.1
ggctaaaaatttttaggaatatcattttaaaggattcctcacatgcttatccattaaattctttgggcaccacactgggctacaggccatttggctatttggacaaaaagggaaacagatcaaatcctagtccataacagcaaactttaaatggaagaaacaaatggcaaaaaaaagctttgcccaggtgcacacgcattatttggtttaaccggcccccattttgggagcccccccttgggttcccttaagggccctcaaaacattgttttgtccccaaaccatgggcccttattgccaaaagctgtttaacaacttggttttcaaagcttgctcttggccctcttggtcagctttcaccttgggcccatgcttaatggacctggggggcgccattttgggcgcccctgg

SEQ ID NO: 20762 - DNA, 359 bp, Oryza sativa
  Clone ID: PAT_MRT4530_26099C.1
ataatagccccaatatcacaggccatcgagacgtgttacctcttgcaaagcgaactcgttggaaaattaatagatacaattgccttaatcaagctccatctctagttggcaaatatggttattccaatctaggcccagaccgagcccaaatcataccatatcggctgtatcagccatctgcctcatcaacctttatcaactcgcactctgtttctagctgatacggtatccagccgatgtgtagtccgactccaaatccaactcgatttcacaccaaattcgcttcaatcttctaccttcttctccgaatctgatgcaaaattccgttgttaacaacaacactatagcagacgagacat

SEQ ID NO: 20763 - DNA, 1150 bp, Oryza sativa
  Clone ID: PAT_MRT4530_2609C.1
gcggtttattgcaatttggtcgctaagtatggagaagctgtgaaaacaataccagatttttttgaaggtcttattgcacttgggcagcagcagtttgagcaggccaagctctgttggtattatgctcttgcatgtaagatagacatgggaactgaggttttgggattatttaaccatgcacaggataatatggaaaagggaatggggatgtgggagggaatggaaaatacacgcttgagggggctctcaaaaccaagtaaggagaagatcatatttgagaagatgggcatagatgggtacatgaaggatatgtcttccgatgaagcatttgaacaggcttctagtatccgatcgcatgtaaatattttgtggggcaccattctttatgaacgttctgtagtggaatttatcttgggacttcctagttgggaggagtctctaacggttgctatagaaaaatttaagactggaggtgcttctcccgcagacatcaatgtgatggtaaaaaaccattctgctaatgaaactactcaagaaggactgagttttaaggttgaagaaatagttcaagcatggaatgaaatgtatgatgcaaagaagtggagaaatggagtgccatctttccgacttgagccaatattccgacgtagagctccaaagttgcatcatatgctggagcatatacactatgcttgaccctctaatatatataagaggctctggtttgtcatcatggagaagttatttcatgattttatcagggcactagggtatcaagggatcttatactcagttgtttttatctgttactcctacagctgttgaactaaaggagctaacggtagtcagccacccctcaggtttgtttattctgggagctgtactgcacttactcgtcccgcctgatgcaaagaagtggagaaatggagtgccatctttccgacttgagccaatattccgacgtagagctccaaagttgcatcatatgctggagcatatacactatgcttgaccctctaatatatataagaggctctggtttgtcatcatggagaagttatttcatgattttatcaggtttgtttattctgggagctgtactgcacttactcgtcccgccaaaagaaaaacatataaaaaaaagaggaaa

SEQ ID NO: 20764 - DNA, 1695 bp, Oryza sativa
  Clone ID: PAT_MRT4530_260C.1
atggcggacctcggcatttccacctccgatctggcaacgctggcgaagctctccaccgacggggcccctcctccagagcaagacatggccagagaagaaggaggtactgccccctcccctgccctaggtcgtatggtagtagtagaagatttcgttcgtagtggctttctaccgccgccgtcggaattccttttgctggtcttgaacttctacggcctttctctcttgcacctcaaccccaactccatcgctttcttgagcatttttacccatctgtgcgaggcctacatcggggtagtgcccttcttggatctttttcgcttttcctatgaactccggtggatggaagctggcaaagtatcgggatgttgcgggtttcgcctgcgcgatggcatgaaggcgagatacatatctctccagtgccatacatcccagtccaagtggcggtccaggtggttttacctcgagctagaagaactcgatccggttcttgtcgtgcccgagaaccaacctgttcgacaagactgctggacttccaaacctcccatgaccccttcacttgaagcctttgcgaactttatcggagatttgcgagaacaggggctaaccgggtatgaagtcattcaagacctcgtcgcccgacgcatccagccactgcaagcccgtgcccatcccgcgtttgattatgagggagcatctgacgtgacgcggatatcatcgcgggctctctgcgtggatgtcgtgacgcagcgggtcaaggacgttctgatcagtcctgcatccacggccgaggaggtgccgaccctgttctgtgacaagccagcgccgacaaggcagccgccatcaacatgcgtgagaacaaaatattttctgcacttcctcccaaggatgaaccaaaatgacctcaagctctgcttccgcctccctcaaggaggaagtcgtggaagaggttgttgtcgcttcctctgcccctatcatcgcggagggaagtggaaccaagaggaaaacctaggccaggacaagcggcgctgccggatctcggcagaagtccagcggttccgaggacaccagcggcctccctcctcctccgaagcggaggtctgtgaagaagatcgccggcaaactgcggtgccgccgtcagggccacaggactggtccaacatgatggccgagtgtcgccgcctcttcgagaacgcttttcgggtggtcggggctcagatggactacctaacggcccgcgcggtgtcgtcggatgggagggtggcgcaactggatacggaactcgaagtcgctcgcgacgacctccagaagatgaaggagatcatggctggcaacgagatgcagcatcttggggtggagaagaagatgaacgaccttcaagaccacatcttctccatccgcaaccagctccagaagagtttcaccagcctgcaccagctagccttggagtgcggcgtgaagtcttccatccctgcgcaccccgacgagacctctctgacatcggcgttgggcgagctggcgacgaagatggaggccatcccgtcgaagcatgccgccaaggtttcggaggagatctccaacgggatccacaccggggtttgtcatgtcctcgcttgtgtgaagctggctctccccaacgtcgatcttaaagagatcttgtcaaagggggccgccgatgcacacacgaggacgtga

SEQ ID NO: 20765 - DNA, 4728 bp, Oryza sativa
  Clone ID: PAT_MRT4530_26100C.1
gttttttttagggtgtatgtaagatctccattaagattcaccttttagttaatatttttttttttttttacagtgtaataccattataccactactatattatcttgccgcacataaatgcggtaattcccagtcaacagttaactgctggttcagcagaaatataaaccaaagaagaacagcaaaaagtaatctctgcaattaaattagcccaaaaaggaaggaaaaaaaatcaaatattcttccccacatcaaaatgccacgcgccgctactaatttatgtacattcccgcgtttcttccgatgatgccactgcagctagtgttactgatcagcggctctacatgtttttactaattaacaagagaccgtcttgatcttttcaagggaggcgtcccagtcttcttctaccaaccggagccccgatgggcttgaagagtctccacggattggccggagttggaggagtagatgtcgacgggggcgttggtgcagttgctgctcgagtcgacgacccttgtgtgacggcgaccgcggtggcggtcaaggtagacgacgatgacgctgatgtcgtcgtggaaatggcgcctcactcccttctctatcgtcttcagatcacggaagctgacctccctcttcctcgtggcttcctttaaagcggccttcaccaatctgtttgctatacccgtccttggattcttgaagacaatctgcaccgcagcgtcgtcactgagatgctcccagagaccatctgaagcaaatatcaggaacagatcatttggtttgagcttgcgaacttgaatcgatggttctgcgctaagagctggccgcttcaaaggaatagggggaccaacgttacgaaacacgggatccatgctatactcttgtttcttcaagtaaacatcaccaatggttctcgatacctgaataatctgctaaaccctccaagaaaccgtggttttcaccaccaaatcctgaatgatccctttcaccctccacgcacccctggcgtgcaccacgatctgcgcatcgtccgggttgagcgcggtgagctcccgccggacctcctcggaggccgcgttatgctcgtcggtgagccgctcggcgacggccaccccgcccccgaccacgcggcggccgagcacggcgcgggagtcgccgaggttggccacgtagagcgtgtctccggagatagccccgagcaggcagcaggagcccacggccgccatcttcggccgctgccgccatgcctgcctcacctgctgcaggaactcctcctccgccgcgccgaacgccctacggatcacctccgtgctcatccccccttgctccttctcgaatcgttggacatgggggaagaggcgggagcggaggaagcgggaggcgtcggcgccgccgtgcccgtcatacacgccgacgagcgtggcggcgggggaggcgagcacctgcgcctggtcctccatggccaggttcgcctgcgccgccgccatcgagaactcccccgccgcgtgcggcctcagctccgtctgccacagcatcccgtccgccgccgccgcccccggcggccagtgcccgcagcacctcgccaccgccctcaacatctcctccccactccgatccaacacaagcttcgctcgcttcttcttcctcctcgtctcggcgtccaatcctgtgtgctgtgtttgatcgagataagtaattcaagatggacaatctatatgaagatctgcaaattagggaaagaaatcatattcccagcctgtacagtgctcagggcgatggtgtttatgctgaagtgattgtcaagttcattgggttttgaagcttcggcatgcgggagatgtaatgtttggatgtcagcaagcgctgcaagttctgatagctaaagaggtgattctgggtttttggatggcgttgttcctgtcaagtacttagagaagattgaaacgtggccagggagagaaccgataccatttcaaaactagagaccacggtgtgtaattttggttatgcatggctactttttcagatgatgggtgtaattttgcaaacaagtttctgttatgcaaaaacagaaacttgttcagtttcaacgtcagtttcttctcagtttcttctttcaggttcaacgtcaggctgttcatattttcactcttctgtgtgatttctagctccagtagctgcattttctgttcagaattcttcagttccaactgtgttttagagagctgtagctccaaatcagatatttttgccaaagattgctgttgttgcagaagtactgcatccttctcagagtttaaatctaagattgtgctttttaactctcttgatgtgttttccaggtctaactttgcattttccaactcttccagtccctttgttgatctgtcaagattttctgtcagctttatcacttcctcttccaactgagaatgaagattcttaaacctgtgaagatctgcttcagtttgtgtgtgcctattgcattcatcttgcagctgggcatgggcattatctgcttcctgtctcttctgttcaagatcttgcatcagcatctgaaccttctgttcaatttcttccagctcaggctgtagcttcaggagttgagattccagatcagaaactctttcaacggactgctggtgttgaaatagggctgcatccttctcggtgtttaactgtgaaatggtgctccttaggctttggatttcattttgaagttcgttccttgaatccgtcagagaattaatttcatcacgaagttcttgtataagcagctcagaggagcggttttgttcagtaaggctctcaacttctttcttcagctcagaaacagcattctcaagatttactttggtctgcttgagctcattcaacttttcatttgccatctggatttccatagtcagcctttgtacttcttgacattgagcaagctctttcccctctgaaagcagagcactttcagcctgcaggcgcttatcctgttcttcttggaaggttaagttgaagcttttcagttccttctgcttttgttcaagttcttcttgctgcatcttcaccttttgatccaaagcctcaagctcagactgtatttcactattgcgtgcttcagcgctactcagcttctgaacttctgtagccatttcatcagttagcttcttgaggtcatcctgggccttagagagctcagactccagagtagataaccgctcagtggactgattatattgcagcagagacgtgtctttgtcagaattcaatttcaagacggtatcctttagaacctggatttcattttcagctttgtttgccctctcagattctgataatatctgttgtttcatgctgttgctctcggctaataatcttgaaatctcttgttgcaaatttaccatctcattgctgatggcatcacagcctttaacttctgggcttccaaagcttaggcctttacgcactttcacatcaaaaccttttcgatttggcagtgcactggcttcctcagggtgtgtaccattcctcttggaggtgaattgctgtggtgacacacctactccatccttctgcaggtcatccaaatcaaaagggagacgggtgaaagtgggcaggtctggagtatgtggttccacttcttggcccgaagaagaaggtgactcatcagacattggtggcatctgattgggaaatgcttcagaaatcgatttatgggcctgtcgaagtgcaccggtggcctgatcatacctttctgccaatgcacggtaagctcggtagaactcctccaccagtttcattagctctgggcgtttcttgtagtacatctctgctctccgtgcaaaagaatcagcatcttcattgagaagtttgatcatagctttcacctttgagtccatatctgttgcataattcaagtgctgaggaagtgaggtcttaattattgtttggagttggtccgtgttgctttcgtggcaccaatggcggccttggttggtcatgacgcgaggcagtattcgtggtggtgggttagtcatatcagccccaagaactccaaatggctccaagaaaatctcaatggtggggtctttttcatcagataccgtggacagaaaaatagtacagctgctaagatgtctattagcgatagctattagtaggcttaccaactgattggtccttaaagtccagatgataaccaaattcgtcaatgtaatcgaatatgaaccaagaagcttgagtaaaccagccggagccccgatgagcttgaagagtctccacggatttgccggagttgagtagtagatgtcgacggggccattggtgcagttgatgcttgagtcgacgaccctggtgtgacggcgaccacggtggcggtcaaggtagacgacgatgatgctgatgtcgtcgtggaaacggcgcctcacttctctatcgtcttcagatggaagttgacctccctcttcctcgtggcttccttcaaagcggcctttaccactctgtttgctacatcctacatgaatattcagaggaacttggtgttatctcattgtgtgattcctcgttcattcatggggaataaactcccgatgatggcatgatcgaatgctgtagatgttgtctgaacttaccgttcttggattcttgaagacaatctgcaccgcagcgtcatcgctaacatgctcctagggaccatctccagcaaatatcaggaacatatcatttggtttc

SEQ ID NO: 20766 - DNA, 200 bp, Oryza sativa
  unsure (1)..(200): unsure at all n locations
  Clone ID: PAT_MRT4530_26101C.1
ccttctcctcctcctactcccagccgctcactcgaacccccccccccaccttccttgccgccgctgccccgagggcgcgggagataacctcgccggagcaccgcaccggcgntgtcgatcttttttcccgagggaaaggcaaggggtcttaggcaaacttangtttaagngnttaagntnagggaaaggaattggattca

SEQ ID NO: 20767 - DNA, 470 bp, Oryza sativa
  Clone ID: PAT_MRT4530_26102C.1
ctctgtctcttttaccttaatctcgcatataccctagtaccaacgatcctcatactatgcaaatactggaatcgtgacatcaaacacacaagtgagtcatggttgtcgtggagttacgactactacctggtcttcgaccagaggtgtagcgattctcccattacctttacttcaacaaagttgatatcaggcctccgaggaacctaagggaacttcggctagggacgcccagagccgataaggccttgtcggatcatgtagagacaaaataccatgaaaattctattcaacatcgttgaagactccatgtctctatggttctacaccaagatcgactaaggcgagtacgacaaatgttgacaaggcttcatcgcaggctctgtgccttctcaatcgctcaagaacggttggtggatctcgacaaggaatacggaatgaagagatggtgtacccgccgagataaaatttct

SEQ ID NO: 20768 - DNA, 3141 bp, Oryza sativa
  Clone ID: PAT_MRT4530_26103C.1
atggacggcggtggcgtcgccttctactacaccggcgttctctacgacattcgcttcttcgtccccctggatcgcttcatcgcctactccagctcgggcgtctcgtcggattttcggcggcatgccgaggactgggccatcacccggcgtcccgggagcacctttgccgtcaccttcgtcgctaaggatactggaaaaccgagcgcggcctaccactacgagcaggttgcggcggcggaggcgagcggagccgcggtggtgcggattgagcggcggagccggagccggagccgcggtggtgcggatcgagcggcggcggtggccggcggggaggcgcaactggtcgccgaggggagcatggcgcttgacggtggaggtgcggccgacggcagcgcggccagcagccgggccaccagcccaccagttatcttaggattacttttgttcctggccacggccacttttatccaacaatatggttcaatctttggaggaaccatatcaatatttcaggcagcaatcccaataatttacggtgccttgaagggtagatacttgctgacactagagctttggaatgctagcattacgatcattaacttggtgggaaacacgacgtggatgatctattctgccgtcaataagggagttgagctgtcaatgttaatgactaattcagtcgcttgtggactgaacatctaccacttgctgtctatttatagacacaacaaggaaaggaaaaaatggtactcaactctgtcactagaaattcacgttttcatactgttctatgtaccaaatatactatttgctgccagtgaattggttttgattgtctacaagcagtacagcatgaaaatttatgtccagctctcatacattttgaacacaatcttctatgtgattgagctccctgtcatgattcgcgcaatgattacaaataatccagattctgacaatgaagcaatcgatatcgagaatcaagcaattgtaaagattgatgggcaaaagaaacatcacaatgagcgtcaagaggacagggcagagaagaaaacgaccttcacggaagtttatttgcttcctgcgccgcctgggctctttggccaaggaaaaagaaaacacagcgacaacgacaaggaaattcatttttcaaagaggatgagaagtcatatttattcaagatctatcaaaagaggatctccccccactaggaccttgcaactccaaatggattcactatctgaagacagttatgagcctgaatatgttgaggagcatcgcctcaaggatctggtgaagaactctgagttcatcagctaccctatctccctgaatgagaaaaagattgagaaggaaatctgtgatgatgaggaagtcgatgctgaagagggaaaggttgaggatgttgatgaggagaaggaaaagaaaggggagaagatcaatgaagtctctcatgagtggcattcctcgaacaagcagaaacctctctcagattcaaaggagattactagtgagaacgaggaagctaaagagggaaaggttgaggatgttgatgaggagaaggaagagaagaaaaaacaagggaagaagatcaaggaagtctgtcatgagtgcaacttgatcaacaagcaggaagccatctggatgaggaaatcagagggtcagcttgagttcaaggccatcctgtttgtacccaagggagcaccatttgacatctttgacaccagaaagaagcttaacaacatcaagctgtacgtacgccgggtgtttatcatggacaactgtgaggagttgatccctgagtggctcagctttgtcgagggcgttgttgattatgaagaccttcccctaaatatctcatttgagctgctgcagcagaacaagatcctgaaggtgatccgcaagaaccttgtgaagaaatgcgtcgagctgttctttgagattgctgagaacaaggaagactacaacaaattctacaaggccttctccaaaaatctcaagcttggcatccatgaggactctaccaacaggacgaagattgctgagctcctgagcaagaaggctgttgagaactcccccttccttgagaagctgaaggactatgaggtcctgtacatggttgatgccattgatgagtacgctgtcggtcagttcatggagtttgagggcaagaagctcatctctgccaccaaaggactgaagcttgatgagaagtttgacaatttgagcatagtgatgaaggaggtgctcgttgacacagtggagagggatgttttttctgaccgtgtggtggactcttcctgctgtccagtcactggcgagtacagctgggttgctaacatggagaggatcatgaaggagaatgccatcatggacgagctacctaacaaatcccaagtgaacaaatgtgccccaaagcaaaaggttgatatccttcctgtgaaggagaatgctatcaggctccaaagcagtgaagagagagaagttaatactaaattttctgttaccggaatctgtggagatggaagatgcctattccgatctatagtacatggtgcttatattaaactaatgatgattccacctgatgataatcttgagaaagatatggctgatgacttaagaaaaaaggtttgtgatgcgttggagaaggaatgtgctgacaaaccctggatgcccatcaccgtgttcgtggtggaaaaaactggaggtttgagggtattcaccaaatacggaaaggagtatggacggaatgcaatacaggttctttttgatggctgcatgaaagcagcttcaggttgcttaccctgcaaaacttctctgccgcgtgagtcggctagtgcctggtggacacaagtcgacaccgtctctggacaaggctgtggagagagctcacctctttgccggccgccggcctacccacctgagccgccggttgtgctgagtttggttggtgggcagctggttctacgacttccatctggggtggtcgtcaatttggatgacctatcttgtgagtcagttagggtttgggtacaagctatggagtggagcaagtgttcttctagccattgtgctgccgtcaccttccttgggatagtgaggttcaaggcttccagctacttggcaattgctctttag

SEQ ID NO: 20769 - DNA, 276 bp, Oryza sativa
  Clone ID: PAT_MRT4530_26104C.1
atattaagtccaaaaattgtgaaaccaaatgtgttagtcttagaaaacactcctctacatctctgtgaagtcaaaactaataaacatctgtacaaactctacagagtaaaaactaatcgattagccgtgctcgcggtcaagagcgacgtgtggatatgtattgagtatagacttgtgtttattcttctaaatgctgaaatttaccttcaaattgggatgagatttgagaatgatctccttgctgccatggaaggcaatgaggtgcatatttataca

SEQ ID NO: 20770 - DNA, 351 bp, Oryza sativa
  Clone ID: PAT_MRT4530_26105C.1
atggccatttatcccaccaacgaggagtcccctcaaaataaaaacttcgacgatgacccgctagcagaggagtactcccgtaatgacgacaagagtagcaacaaagctaatgacaatgacgggggccatagatcgcccgaggaccatgtgaaggccagggtcaaggagaatgcctcgatccctgaggtgagtgcctacgtgaccgtggcaacgctggaggccaagccgtcgtctagctgggaggaggctccgaccaaatcggagctggaggagaaggcaccacaccagcccccatcttcgaccccggaacagggccagccaacagaaccccgactagtgttcgacaagtga

SEQ ID NO: 20771 - DNA, 495 bp, Oryza sativa
  Clone ID: PAT_MRT4530_26106C.1
atggccgccgccggagaggagaaaccgttgccggcggaggaaatccaggggatcaacgacgaggcggagccgcatcccccgagtcgtaacaaagacttcctccacaacgaggagttccagcgtgtgatgcgcgacgtcgtcgtcggcccggattacgttcccggaggatatgcgttgaggattctcacagacccagctactgcgttcgaagagctcctagagtactaccgtaaggccggtctgattgaaggccaagtctggaagcgttataacatcttcgaggaggtggaggggttggataactcgcaggatgagataaagatggaggaagagccgatgaaagtggaagaggccgttcgctgccgaggcagagacgcgacccctgattgccccaatgaggtgaagaaacggcgcttgatggactcagatcgcgaagcggtgccatgcaacctccctcaggagtgcctcagcaactcttggtatgctgccgtttga

SEQ ID NO: 20772 - DNA, 1569 bp, Oryza sativa
  Clone ID: PAT_MRT4530_26107C.1
ttcacgcgtccggctaagctaagcctgatcggtgtagtgttggcaatggctcacacgagctcgcaaaagcacggcaacgacgacgtcgacaccggcgcggaggcggcaatggaccagctcgccgggaggtcgtcgttgtcaccggcgcgggagaagacgaggaggcggccggagaagagcggcacggtgtggacggcgacggcgcacatcgtcgcgctcctgatcgggtccagcgtcctggcggtggcgtggaccttcgcccagctcgggtgggtcgccggccccgccgtcgtcgtcgccctctccgtcgtcacctactactcctcggccctcctcgccgactgctaccgcgacgacgaccctcttcacctcggcggcggcgccgtccatggcgagtacatcatgtggtcaaaaagaaaccaaggtccgaaaagcgtgacattctgcggcatcatccagtacggcgttctctgggcggcgatggttggctacaccatcacatcaagttcaagcatgagtgcggtgcgaagagtgaaccgcttccaccgcaactggttggccgccggcgacggcgacggtggcggcggcggcggcggcgccaccggcgtcaggtacatggtggtgttcggcgcgttccagctgctcctctcgcagcttcccagcctcgagaatgtagcgtggctctccgtcatcgccgtcgcgacgtcgttcgggtactcctccatctgcctcggcctctgcgccgccaagtgggcgtcccaccgcggcggcgtccgtggcacgctcgccggcgccgccgccggctcgccgggggagaaggtcttcaatgtcctcctcgccgttgggaacatcgctatctcctacatctattctcccgtgctcttcgaaatccaggacacggtgagaacgcctccgtcggagagcaagacgatgaagagggcgtcgctgtacggcctcgccatgagcgccgtcttctacctcgtgctcggagcatccggctacgccgccttcggcgacgacgcgcccagcaacatcctcaccggcgccgccttccacgagcccttctggctcgtcgacgtcgcgaacgcctgcgtcgtcgtccacttcctcggagcctaccaggtcatcgcgcagccggtgttcgcgaggctggaggcgtacgtcggcgggcggtggccggagtccaggctcgtcacggccagctacgagctccgcctccgcgtgccggcgtggacgtccgcgccgccgacggccgtgacactgtcgccggcgaggatggcgctgcgggcggcggtgatcgtggcgacgacggcggtggcggcgatgatgccgttcttcaacgccgtgctgggcttcatcgccgcgctcgggttctggccgctcgccgtctacctcccggtgagcatgcacatcgcgagggtcaagatccggaggggggaggcgcggtggtgggcgctgcagggcgcgagcgcggcgctgctcgtcgtcgccgtcggcatgggcgtcgcgtccgtgcgcgacatggtgcagaggttgaacgaagctgctcccttcaagaccacgggctaa

SEQ ID NO: 20773 - DNA, 293 bp, Oryza sativa
  Clone ID: PAT_MRT4530_26108C.1
gtagaaatataatgaatgcatgtgagtttgaacagcattccggtgagtcgtctaacaatcaaaacaatcacatattcttggacagcgggatttctttatatatggtgatacaaggactgaaatacactaaacttgatatgcttggggatgtgattggaaaagtgatcagtctccctccaaatatgattcaatacgaaaagtggaaagcttcgtttcaactggaaaaggattatttcgatgatgcaccttcagatccttgttcaactcaaagctcacaagagtcgaatattgcc

SEQ ID NO: 20774 - DNA, 241 bp, Oryza sativa
  unsure (1)..(241): unsure at all n locations
  Clone ID: PAT_MRT4530_26109C.1
tagggtttagtgggctgagatcgcnacccctgatgtcgagtaccgctgcttcatcggaggactctgctgaggcaccgacgaccgatccctcgaggggcgcttgtccacctacggtgagatactggactccaagatcatcaactacacggagacagcgaggtcacgtgggttgggcttctttaccttgtcctcctcacacacgatgcgcgacgccatccaaggcatgaacggtaaggagctc

SEQ ID NO: 20775 - DNA, 221 bp, Oryza sativa
  Clone ID: PAT_MRT4530_2610C.1
ttcctgcagcccaaaaaaaaaagaacaaacatgtatcatgcgatttctaccacgtatcgcgtgatactcgcgaggtatcatgtgaaacctgtcaggtatcagacgatttcaaccacgtatcgtatgatactcacgaggtatcatgcgatacctgtcatgtattagacgatttctaacacgtatcgcgtgatactcgcgaggtatcatatgatacttgtcag

SEQ ID NO: 20776 - DNA, 485 bp, Oryza sativa
  unsure (1)..(485): unsure at all n locations
  Clone ID: PAT_MRT4530_26110C.1
nnccggccgggnaaaactcacacntcccacccagcccccagtcgccgcgcgcacatccacttgcctcaccaccaccacccctacctctgcctcatccgcctgctgccaccggcccccgtcacgtggtcacgcctccccggcctcgtcgtcgccttcctcctccctctccctctctgccccgaggcacaagcggcggatcagcggctcccggcgcggtgactcctcgacgcagcggctgcccagcggcgcggcggctcggcacctccacagcggaggcccccctctgacccctccctatcctcttatgccctatgcgaaggaatccatctgtgcgattatcgctactgttgtctcatcctatgtctgatctattttgcgacgtgatgatcggaacgtctcatgtgctggattcattatcgggatgatacttggcgatgctcgttggattgggattctactacgatgacctcgtttcgctcttatac

SEQ ID NO: 20777 - DNA, 695 bp, Oryza sativa
  Clone ID: PAT_MRT4530_26111C.1
gcacgagggacgcgcccaacaccgagacaaaccctagctcacggcggtggcggcggcggtcgccggcaaagcaaaccctagctcaccgccgtcccggccgggggaaggcggtcgcgggcacgccacagcaaaggcaaacccgcagcagcacgaacaaacaggcgagcgatgggaggaggcgaggccaccagcggaggaggaggagggttccgcgcgcgggtggagcactacctgtacagcggcgagaagaagcacgtcgtcgccggcatcgccatcttcgccgccatcttcggcgtcccctggtacctcatgacccgaggggcaaagcatcagtcgcaccaagattacatggaaagagctaacaaggcgaggtcggagaggctttcttctggacaggcatcttcgccaaaagagtgaaacagtaatcccctaactcagatttgcaaaacctcaggccgacacagctatgataatctgagaattcgatcctgttgtgaaataagcagaccatctcgattctcatctttcagttgtaggaaacatgggttgaatgtaatacgtcacatgaaattttgtcaaatgcagctagctctctttacattccgcactattctacaaggagatgattgacaaagacaaacacctgatttatttgtctcaaatgacgattttagagccaattaccttgacttgag

SEQ ID NO: 20778 - DNA, 2271 bp, Oryza sativa
  Clone ID: PAT_MRT4530_26112C.1
gggtgcggtgccaaactgatcagatcacacacttcgcacgacggtcaaacagagcccttgcttgctttgcttgtgtcttcaacttcagagaccccctcctaccctcaaaaaatttcccctttcttttcctccgtttcttgcagcgacaagagaaatactaatactcctcctcctactactgctactgtgcaaggggaaggacacgacgacgaattggagagcggcgtcctctctgatccttttttttcctttattgcatctctctctctctctctctctcgccatttttcttctaggttggtctctggatcaggccattgagggggaaagaaaaggtgcgggttttggggggaggttgttcttgcgggaggccgttgatttcgccgtgtgatcggagagtttggtattgagggagtgaaaaggagatgaatgagaaggacgccactgatttggaggagaggagtgaggccagtgagcacggccaagctctgagtttccatggtggtgccatgttcttgcaagaggctcagattgcttctcctgcagctgcaaataatgcattgacctccatggcgaatcctttccctatccctcctgggttgtggaattccaccttcacacaacatgggtcggccggcgcgccgccaccgtttgtggctactcccgggtttgtagattccacggcggggtttccttgctacaatggaggcaatcttggagccatgatcaatcaccctttccctggtatccaccagcctttgggtgatttccaaaacggcgtcgagccatgtagggagattgaggatattgagattgaaggatccaagaatgtgtcacaaactggtgagaagcagcaaggggatggtgagacaacgcatgccgtcgattcctcctccaaggagctaagcatgccagggcgcaatggtggcgctggccatgatgaggggactagggtgtcttgttccaagaagaggaaaagatcaggacaggatggtggggtgaagcatgcagaaggtggtgagcaattagcaactgtcggttcagcgcagaagaatgaggatgatgaaaagggtgaaccaaagaggtcttctgtggcgtccgggaaatccagtgggaagcaaataaaggataatgcaggttcaccaaaggaagactatatacatgttaggagggagaagatcagtgaaaggatgaaatatcttcaggatcttgttcctggttgtagtaaagtaactggtaaggctgttatgctggatgagataattaactatgttcaatcattacagaggcaggttgagtttttgtcgatgaagctagcaagtgtcaatccaacactggacttcaacatagaacgcattttatctaaagatatttttcaatgtcgaggcactactgcatcatctgcctttggcttcttcccagacattgttcatccccgattacacccaccaaaatatacacaagttgggatgcccagcattgtgaaccccactgatgcatttggaagagtaatccatgctccattaggaactaacagtgcattcaaagaacctaaacatcagatgcccaacaatttgaatggagagttccaggacgtcattgagatgccttttactcatgaccatcatggatcaaatgatcaaccctgagattgattccacaactgaagcaagagatcaatatgtgccatgggctttcagcaaaactgtgatatatgaggcatgttgatatcatggtactagctcacagctgatcactgaagtataagcatccaaaatgcttagttagtgctatttttctcatgttcatagcagcaattgacctcctgtggaagcctctctttggatgttccatttgctgttatagaaagttgggagataaaaaaaaaaggatgttcacatggagatctcaagcaatttgttctccactgaagtagtctacagtcttgaaatggcgagaagcttcattttgcaagaaggtgatttttctgtggtctcgtcaaccccaggattattacatacactagctagcattgtgaggctacagaaattgttctttgttgtacttgcttagcccatgttccatctgtcaagcaacataggcagaaatgcagtcgctgattttgtatttgttgaaaaaaaaaataaatgggcttggcctgatgtagcaagcatttgaattttgcaacgggtgcatattggcacagatgtttttattccagcaaagctgtgaattctgaaagagaagaaaagagaactgtgatctagtgtt

SEQ ID NO: 20779 - DNA, 241 bp, Oryza sativa
  Clone ID: PAT_MRT4530_26113C.1
cttacacgcccccccatgccttcaaagaaccagttctaagtttaatcatctttgtcgacagagaggaccaaaatctctttgtgtcagggtaccttattatccccgcggatccaagtcaagatgataatattgtggacgttgtatatgggggacacattgatggtacagatggtgtacaccagtgtgtcacgcaacgtgagcgtttctttccagtgacgaaagttcatgctcgccctgaaag

SEQ ID NO: 20780 - DNA, 660 bp, Oryza sativa
  Clone ID: PAT_MRT4530_26114C.1
ttttttagtaatgtttatcataaaatacataagcatagcagcatgccccaccgcccgtgtccaccgccgtcggcgcctccagcccgcacgccgccaccgccgacgttcgctgccggcacctccaccggccagctcgcgcgccgccgctgctgcctgccggcgccgtcaccacccagtctgcgccactgccgcccgccacccatcacccaagccgcgcgccgctgccagccaccgggccaccgccaccagtacgcgcgccgctgcccagccggcacgccgtcagctagcccacgcgccgccaacagctctcgcgtcaccgccgccagccagcctgccgtcgttcgtcgctgaatcgtaccaaatctcactggtggtgataggaggatgggaggagagagaacaggaggagagaaggtgtgaaggggtacttcagtggtatttttgtgtaaatacgttaaaaaattaaagggtagtggatcttttagggtggtttggagctgtggagcagcaaaaacccagctccacctccgtagtacaaatttgtggaatagctctgccaactccgctccaaaaaatagagaatctataccatttggcacagttccagctctaggtaagttggagttgggagctagagctgtgccaaatttaagagttctg

SEQ ID NO: 20781 - DNA, 121 bp, Oryza sativa
  Clone ID: PAT_MRT4530_26115C.1
atggacggcgtcctcgcaacttgcgagaaccgcctcctgatgacgacgaagatgataaggaattattgtagtcggaggttcggctcctggacctactacctcatcctcgggctctctagaa

SEQ ID NO: 20782 - DNA, 3256 bp, Oryza sativa
  Clone ID: PAT_MRT4530_26116C.1
ccttttgcaggtcgtgatttgcttgatgctgaggaagactctcccattcgtcaattatgtgcagggccatcctgaaatagttagccaacttgttgaccttattggataacttctataatggaggtgttgatccgcttgatcggtgctgatgaaactatgtattctggttatgttgactcaatgcggtggttggatgacatataggtccttgagatgattgttgacaagttcagttcatctgattctcctgaggttcatgcaaacgctgctgaaatcctttgtgcgataactagatatgccccaccagcgcttgctacaaaaatatccagtgcaagttttgtggcgagactatttcaccatgcttttgaagattcaaggcctaaatcggtgttggtccactcattgtcagtgtgcatatctttgttggatcctaagagacttgtattagcttcctaccaagttttccgtagtcaactaagccatgcaacattggtcactgcaagtccagatacagttggtggcatgctggatagcctatgtgatttgttgaagctgctggatgtttcatctgctgaaaatgttctgccaacgacatatggagtcttacaacctcctctaggaaagcaacgcttgaagattgtagagttcatctccgtcctgctctcattggaagtgtttctgctgaaattcgattgaatgtgttgtgtaagtctgcgggacaaagttcaagtggagcaattactccactacattgtcgaagaggcacctgaagatgctgaaaagaagaggatatttcgatttccttttgtagcttgtgaaatatttacatgtgaagtggatgtcataatgaagacattagtggaccatgtgatgctaggaatcctatggatccccctatgggtgcatgaaaagcagaatgctaatgtaaaatcaggtgaatttgataaggtctcgtgggacaaggtggatatcataattatgataatggatgatcaggatccagggcgtactagaaaaatcatccattcatgtataatagaacggctaatttattgattttctgcccctgcatgcatcatacaagtgctggccatgcagtattctgtcttggtgctgtttatgtattcatagcttcgcctatatgctggcaacattcttatgcggaatgctgaaaatagtgagccttcagtctttaacgcgtagggtgctgtgcgggctgctcgggttacccgaggtgatttcttgtagctgattggtgatctatcgtttggaagttttatgtccagtagatgttgctgttagcacaacaatttaggctcggattcagtgcggttaatgttattatattattccttattttttttggaaactaataagaatgtaattagtttgttccaacttttagcaagtaaacttctcaaagaaatattttttaaggaaacttttaacaactttttgcaccaccatgtggagagcatcatcagttcttgtttagatagtaagcaggatcagctgatctgtcatgttcttgatgagtgtaagcttgttacaagaattttggaagctgagaagaactctgctctatcaatagagttaactaagcacacggttcctttggaggggaagatttacacctaggatcggacttaatcaagcgtggcatagatctattttttgaaattttggacgctgagaagaactctgctctatcaatagatttaactaagcacacggttcctttggaggggagatttacaccaaggatcggacttgttggtcatatgacacgcatatctaacaaactcattcagctggctaagaccaacagcataattcaatcacatttgcagcaaaattctgggtgggctgagtggcatgctggaaccctaactaggtgtaacgcagtagaaaatgtttaccagtgggcttgtggccggccaacaacactgcaggatcgaggtagggacagtgatgaagaagactttcgagatagggactacgatgttgctgcgcttgctagcaatttgagtcaggcatctaaatatggtatttacagttatgaagatattgatgaggatcaagtaccacatgagcgagatgatgaggacgtatattttgacgatgaatctgctgaagtggttatttcctctcttcgtcttggtgatgaacatgacagcaactccttgtttacaaattccaattggtttgcatttggtgaggataaagcactgaacggcgaggtcaacccagaagcttccccatccccaaattcagagatatcttctccaaatgttgatgatgagaatgatgaagtcattcttactgaggttacagatggcagaaagggttcggagtcacttttagcagtcgacttgaatgaagaatctagtcacacaggcttgacaaatgtctccattgataaattggaagatgacatcagaccaccaactccagatgtaaaagaaagcccacctgaatttgtggaatggagggaggaagaagcagaacctgctgacgtacctgagaacgacacagcagttccaaatggcgaggttggtagtgtggatcagatggatggaattgaggatgttatgtctggcacaactgaattaagagttgaaaaggagattgaagttttgtctggaacctcggtacctgagagcacaataggagaactattaccaggttcaacggaaattagtacaaccaggcaccctgaaccagttgatgataggaatcctatggagccccctatgggtgaacaaaaagcagaaagctgatgaaaaatcaggcgaaatagaaacagactcgtgggaaaaggtggatgtcataatgatgattatggatgtgcaggatgcatggggaacaagtcaaaccattcattcatgtataatagaactgctgatgtattgatcttctgcccctgcatgcatcatacaactgctgaccatgcagcattctctcatggagctgcttaagttttcatatcttcgccaatatgctggcaacattcgaatgcggaatgctgaaaatagccagctctcattcttaaacgcgtagtgtgatctgcagtctgctcgtgtcaccgtggtaaataatagtaactgattggtgatctgtggtttcgatgctttagtttctgtagttggtgctgttagcacaacaattttgactcggattcaggccgatgaatgttatcatattattcatgatttattttgtaaacaactaagaacatcaatattttttcccatgt

SEQ ID NO: 20783 - DNA, 396 bp, Oryza sativa
  unsure (1)..(396): unsure at all n locations
  Clone ID: PAT_MRT4530_26117C.1
gctaacccattcccaaaagcaaagcgagcctaagctcgcttcgtctctctctcggattcgatcatggcgcagagggagaagaaggtggaggagccgacggagctgagggcgccggagatgacgctctgcgccaacagctgccagaactgcttcttggctgcctcggcgtcttcttctgggggttccgccgctgcctcgccgtcgacgacgtcgttgccggtgtttccggtggtggagaagccgaggcaggccgtacagtcgtcggcggcggcggcggtggcgctggtggttgagcggccgacggcggggccggtggagtcgtcntcnaaggcgtcnaggtcntcntcnggcaaccgatgccacagntggcggaggggggtgggcctgaccgggttc

SEQ ID NO: 20784 - DNA, 779 bp, Oryza sativa
  unsure (1)..(779): unsure at all n locations
  Clone ID: PAT_MRT4530_26118C.1
ggctgcangattcggcacgatcttcttgatctgatcgtcggacatggcgtcgcccatgctctccgccgccaccgtgccactccanggangcggcttgtcgganttctccggcctgagganctcgtcgtcgctgccgctgcggcggaaatgccacctccgacaacttcntnacccggtctcnttcaggaacccacgcggttggcacaaacggcggggcncggcgggcgccaacggangcaaanctnaaggtggcnatcaacgggttcggccgcttcgggcgcaanttcntgcggtgntggcacgggcgcggaaaaattcncccctcaanttnttccnntcaaaaaccccagnggtttnaaangggtntcccnncncctcattttaaactccactctcggtttnttnaaccaaatttnaacctgtggganaaaaccccttctccntaaagggaggtgtnntngnngtcttctanaaccanancccntnnaatctgtngggggganntctcnnnntcnactcttctngngggcngggnttttttcnncnanaagangggggggggnaannnttnnnanccgggccaaantgtnctctcccccccccggnnggngttaantccccccttcttctcggnntttntgccaanantttnnnccccaaaaaaccttcntcnnnaccctcctgcncnnnnantncnncccccccttcttaaaattccccaacnanatttncggnttcntcgggggnanaaaaaccccccccntcctnnnggttntntn

SEQ ID NO: 20785 - DNA, 1178 bp, Oryza sativa
  Clone ID: PAT_MRT4530_26119C.1
ccacgcgtccgctgtccccccgatcgttggccccctcctgcaatcctcatcacacagcaaacccaaaccgcgagcggaatcctcagcctgctgagagagcctgagaccaagagggggattcttttttggttattgacgatggcgcagcgcgacaagaaggatcaggagccgacggagctcagggcgccggagatcacgctgtgcgccattcccaaaagcaaagcgaacctaagctcgcttcgtctctctctcggattcgatcatggcgcagagggagaagaaggtggaggagccgacggagctgagggcgccggagatgacgctctgcgccaacagctgcgggttcccgggcaacccggcgaccaacaacctctgccagaactgcttcttggctgcctcggcgtcttcttcttcttcttccgccgctgcctcgccgtcgacgacgtcgttgccggtgtttccggtggtggagaagccgaggcaggccgtacagtcgtcggcggcggcggcggtggcgctggtggttgagcggccgacggcggggccggtggagtcgtcgtcgaaggcgtcgaggtcgtcgtcggtcaaccgatgccacagctgccggaggcgggtgggcctgaccgggttccggtgccgctgcggcgagctctactgcggcgcgcaccggtactccgaccgccacgactgcagcttcgactacaagtcggcggcgagggacgccatcgccagggagaaccccgtcgtccgcgccgccaagatcgttaggttctaaaaggataatacaaggggaaaccaacctgaattttcctccttttttctttcttttttcttcttctttccttttaaaaattaaagttgagggtattattttttcttttcctgagagcttcttaaaggtgaaaggggaaaaaaaagaaagaaaaagaaaaggagatgagatgggtgactcaagatgcatcaagcaaaggaagaacaatatgatgatgatgatgttgttgttgtagtggtggttgaggttggaagttggatggaaagagggaggaaggaagaagatggggttgttgtgttgtcctcccacaaatctctatttaattttaattcccttttgtataaaatttattattatctgtggagagcattattatcagcttaaaaaaaaaaaaaaaaaaaaaaaa

SEQ ID NO: 20786 - DNA, 225 bp, Oryza sativa
  Clone ID: PAT_MRT4530_2611C.1
agtggcacggaacgggactgctggagggtgacggaggtatggtgcggggtcagggctgccctgcctgcgccagcccggaccattgcgtcggaatgagacaagcaacaaggagtgcccatatgatgagagaccaatgaagatacactgaccccctctgtcaaatgtaaaaaggacattttgaaatcaaaggcatagatataaaatctggtcttgtcagagaaaaaa

SEQ ID NO: 20787 - DNA, 331 bp, Oryza sativa
  Clone ID: PAT_MRT4530_26120C.1
accgttctttagttgaaaagagttattagctacctgtcggtcaagtaacaacaattgttgcgcagtggttaaggcgcccaacggggatgttccaaccatccatgatccgtctgtaggctggttgtatctacgagacctcctacatgtccatcatgaagtgcgacatttatatgaggaacgacctttattgcaacattgtcactctccggtggaacaaccatgttgccaggcatcactcctcgtatgaccacggagatcactgccctatccacgagcaggatcatcactaaggtagttgcttcacactaatggctagtacactgtatggatc

SEQ ID NO: 20788 - DNA, 406 bp, Oryza sativa
  Clone ID: PAT_MRT4530_26121C.1
atctggtcgatcgcccataaccgcgggcatggctattcgaatagttttactctggcaagaggtgcacaactgtgtccacaagacacaatccaccggcatgtcattgtgccaggcctgacacatcaccatgtcgagtgattgtgacaatgcaagacccttcgcataaccctcccctaaccatccacaccatgctaaggtttcacccctacccctaaccaggagtgggcagtcccctcgtgcgccactggtgaatccggaagttggacaaccggacaccccagccgacccaactccatcacgcccaccctcgccacgggtgcctaggaaagggtcgagctatactacagctcaagcagttacccactcccacatgtggtaagcgatgtatgtcttcgagggtttcctg

SEQ ID NO: 20789 - DNA, 442 bp, Oryza sativa
  Clone ID: PAT_MRT4530_26122C.1
tggttttttataaattttttgggttttttttttttttttttttttttttttttttttttttttcccacccccaaatccaaacccttggcccttcctatcaaaaaaccaaaatgaaccggttttaaaattcatttcccaactcgacaataatttacccccccatttaacacatttttccccccttctaaaaccccccccttttttttcccgggtaaaattaaaattaacttgaggccaccccgcgtccccggcggcaaaatttttccaggctgggcgtcctcttggcggcccccaaaataaccggaaccaggtttttccccaaggggcccctaaggtgcttgaaaaggttttcaacggggccctcccccgtaacctaggcctggataaaaaaccccacccttgaaaacatggcccccccccccttcttgatccccttcacctt

SEQ ID NO: 20790 - DNA, 144 bp, Oryza sativa
  Clone ID: PAT_MRT4530_26123C.1
atgtggctgcttctgagctctgaagccacactaggctccaacaaaacctgcactagagggaatggaaaggtctctcctttctccactccagctctgcagaaaccccgcactctgcgttatatacagcacagccacaaccagtga

SEQ ID NO: 20791 - DNA, 117 bp, Oryza sativa
  Clone ID: PAT_MRT4530_26124C.1
gtatgtttgagagggatcaaccaaaacatcatcgggagatctgtgtatacgtgccctcgagctaaccacatgggtgagggacggggacgcattcagtttggcgccatgtgtatatga

SEQ ID NO: 20792 - DNA, 1688 bp, Oryza sativa
  Clone ID: PAT_MRT4530_26125C.1
ctcgaggaagcaacgcctcccttgggaaaggaagagagagattttctcttcctctcgccgccgccgccgccgccgccgcggcgccggccatggcgacctccggcggcgaggacccatccggctctgcctcgtcgtccgccagcgcgctcgactccctgcccttctcctccgggaacccacgcatcgaggagacccgcggcgtcgtcctcctccaccccgaaccacccgccgcctcgtcctcgtcccttctcccggtggggaggaagccgcgggtgtgcgtgcctggcgtgcccaaccacctgacctacgccgacttcggccgcttctgcgcatcctgggcctcccacatcctcgagacgcgcatcatcaggattgatggggtggaggatcagtacggcgttcttataaaattcgacactcagagcttcacggatagcttctacatgagctttaacgggaatcggttctcatcactggagggtaatgtttgccgtgttcgttttgtggaagacgttcactacactcaattgattgagcacgcacatagctcagttacaagctcagctgaacaacctacatgcccagtatgtcttgaacgacttgaccaagatcctggaggcattcttacaacaatatgcaaccattctttccactattcgtgcatgtcaaagtgggcagactcttcgtgcccagtttgcaggtattgtcaacaagaaccagagaaatccagctgtttcagtttgtggaacatcagaaaatctttggatttgtgtaatctgtggccatgttggatgtggaaggtacaaaggtggtcatgctattgaacactggaaagaaacgcaacattgttattcacttggtccctcgtgctgcggccaactatgtgcatcgtttgattcaattagaaacagatgggaatctggttgagtacaatttctatggtgatcattcagttgatggtatgtgttcaacatgcaatggtgatgcggggatcagtgaagctctgctcgacagtaaaatggaagctattgttgaggagtacaatgatctcgtcacgtctcagcttgaaaaacaaagaaattattacgaatcactcctgctagaagtcaaagaggataatgagaaagaaattgctgctgctaccgagaaagcagtgggcataaaagtacaaaagttacaagcaaagcttgataagtgcatggaagagaccgggtttcttaatgatattcatgaaaatcttgtaaaaaacatggagatgtggagggagagaattcaaaaagtaaaagaaagggaacaagctgccattagattgaaagatgaaaaaattgagaagctggaggaggagctaagggatttgatagcccattttgagcgccaaaataccgtggcagaagcttcagagtcaatgtcaagcgatataaacggtagcacaattctctcggtaccatctgaatcatctgcaagcagcaacagcagcatcagaaattaggattgagatttgttaccgtaagctgtatttcagcatcagaaattagtctgttactggccttaccgtacattctttgctcccttattatctaataatgacagttatgtgttaccatggttatatacttgttggcttctcaaatgcatagtacaaatcaagcctttgtacagtgtgtttttctggacaaaaaaaaaaaaaa

SEQ ID NO: 20793 - DNA, 1456 bp, Oryza sativa
  Clone ID: PAT_MRT4530_26126C.1
gctttgcccaactcgttctcttggagcacctaactcgagctgagctcccttcccgcggaattcgggtccctccctgatggcggagccggagcagcagcagcagcaggcgaatcccgacgaggtggtgctcgggcaggagaccggcggcgcgagggtggcgatcctcaaccggccgcgccagctgaacgtcatctccgatagagtggtgtatctcctcgcccagttcttggagagctgggagaaagatgaggatgccaagctggtcatcttcaagggggctggacgtgcattttccgctggtggggatctaaagatgttctatgaaggaaaatcagatgactcctgtctcgaggttgtttacaggatgtattggctttgctaccatatccacacgtataagaaaaccgcggtggctcttgttaatggacttgtcatgggtggtggtgcagccatggttgctccactgaagtttgcagttgtcacagagaaaacagtcttcgcaacccctgaggctagtgttggattacacacagactgcagcttttcttatatccattctagactccctggatatttaggggagtacctggctttgaccggtgcaaggttgaatgcaaaggaaatgattgctgccggtcttgctactcattttgttccttctgaaaaattggaagaacttgaaaaatgcctgctgaatttaaacacaggagatgagtctgctgttcgagctgctattgaagagttctcaactgatgttcaacctgatgaagatagtattttaaacaagttaagaactgatgtccttttccaaatgctcccaactatcaacaaatgtttctctgctgagactatcgaggacatcataaaagcttttgaatcagaagggagcattgatggaaaccaatggatcgctacagtactgaagggcatgcgaagatcatctcctacttcactgaagatgactcttcgatcgatcagagaaggtcggaagcagagcctgccggaatgtttgaagaaggaattccgacttacaatgaacactctccgatctgtagttactggcgatgtctatgagggaattagagctctcagcatcgacaaagacaatgcccctaagtggagtcctgctacccttgaggaggtcaagaacgaggacatcgaccgtcttttcgaaccattcagttcagaaaaggagctccaagtcccatctgacgattccaacagatggagtggcaaatttgagcacacagtctatggcagaacttcagagtaattggcagcagaaatagatgttcatcatcctcacaagcatgttttaagtactcgtaaccccatgtattctcatacttccctgtataacattgtaacacaaaaaattgaaaattacataacgcacgaagcaataaagcatctcaaatgttttgttaaaaaaaaacctcgtgccgaattcctgcag

SEQ ID NO: 20794 - DNA, 2759 bp, Oryza sativa
  Clone ID: PAT_MRT4530_26128C.1
atggcgaaagacgagaacccgtcttacctccatctgatatttctctcttctcgcatccgtgtcttcatccttgatcctccactctctcttcccctttccaatggtcagtgcgagctgcaggttgtggaagaagcagccaggatccctcagggctcaacctgcaggggaatcctgctgagaaccaggagagctggacctccggcgtgtcagttgggaggggcaccccaaatttgggtgttgggacggccgtggcaggccggagctgcccgtcatcaacattgttcccggggtcctccctgtcgtcgacggcgttgctgaataccatgcacgagggctcctttccacagacagccttggtggcgggttccgtgagcagcgccgatgagcagcatggtgcgccccccgtacggccatcctacaaccttcctgcaggatgcacgcaggtgccgataagtattctggtgttccacaggaggctgacggggaggggatccaggtgccggtcgccgcaatctcgtagctttatgcctgctcctgcactgtccggtgtctcagaggatggagcttatgggccgattcctcaaagtgatttcttgtcgcttcgaggtccatctgaagtttttcctggtgatatggcaatgaatcattcagaaccggccacttcatatgggtacaattcagagtatgcacctatgcatcttcagccaaatggcttatacactgaagcttccaacactgaaagtgaaagagaagctagccaactgcaacaatcagcggaagctgttatctgtgacagcctcagtaagttggaatcggctatggagaaaattcagggtcaaaatcctcaagaatcaagtggcttagttgcagagggttccgctgatgataacattcacaagtaccatcagaaagctaaaagggccaggacacaaatcactcacagtgacaaaatagacttaccaacacaagctgtatctgcatgcaaggaaaaaacaataactcagatagagatgcagattgcagatgctgagagaactgaagcactcaagggtgaggatgccccagcacaaaagctgaagactcgaaggagaaagcacaggcccaaggtaatccgtgaggacaggccagccaaaaagcaaatggccacaacatcagaagaaaaacctctcaatcagaaacccaaaagaaaatatgtgcggaagaatagaaaccccagttctttggagaagtgcgcagaaccttttagtgaccattcaatttctagagaatccagaactaccgttagaagcagcattgcatcagttcgaagaaggctgcaatttgagttcggggagcacggggtgcagagggaccaatcatcaatgaccaattcatggtaccaaaaccaggagaaacctgttaatgctgagagttctttgtgctcagtgactaaatcgtccgtgcaggttgaacatggacaggaattacacatggaaaattcaccagaagggttgttttttggcatcaactccaaactgaacaaaattttagatgagtacatacatttgccagaagccgcaccaaaaccttcagagcaaatcccactggctgcttctggtcatgttagcgaggaactagcaaggaaacaatatgatgtgagacacactcatgatcctgattctacaagttataatatagaaaggagtggtctgatcacaacgaaagggcacaaaaaggacctagacctgaactattctaacacaaatggttttcagatgtattgttcggctagtttgttaccagaaatggactccacaaagggcagtatgactaaggtatcaaaaatggacaagaacaaaaaacgacattatggaggtgagtcctccctagctggcacacagagctccattatcatgagaactgcagctgagatgctagcagtttaccaagcttgtggtattaaaaagaagcgatcggcccgagtccgcaggaattcctttctttctgttatggatcttgagaagaatacttcacaagaatcaacaagattgccgcggtcatgcatggaagccctgtacgagagttcctacatgaaatttatgaacaagaaacgttgacaggaggcatggcaccacaacgaaaaggcacaaaaaggacatagacctgaactattctaacacaaatggttttcagatgtattggtcggctagtttgttaccagaaatggactccacaaagggcagtatgactaacctcagattccagatgataagaggatcaaccttgacattcattgcgaagtaccagtagaaaactcaccaaatacatcaacgccaccatatatggattaccttcaaggagttacatcaaagtttagatactttgatttgaacactgagcaggtgcataaaactgagatgcatttgtatcaaaccatgccctctctttcttctttaggagcaacaaattatttgccgaatgctctagtcccatatgttggtggggcggtggttccttatcagacacaatttcatttagtcaagaagcaacgccctcgagctaaggttgacttggattttgaaacaacgagagtttggaaccttctgatgggtaaagcagctgaccctgtagatggaactgatgttgataaagagagatggtggaaacaagaaagagaagtttttcaaggtcgtgctaattcattcatagcacgtatgcgcctagttcaaggtacttttagtgctggagtaaatccttttttgaagcccatagtatgctga

SEQ ID NO: 20795 - DNA, 243 bp, Oryza sativa
  unsure (1)..(243): unsure at all n locations
  Clone ID: PAT_MRT4530_26129C.1
gagaagagaaaaaaaggtggaagaaaagcaatggcggaggtggcgctcttccggggcccgaccaacctcgntttaacccgaaagccgnttccttccttcctccttccttctcctnctcaattgcggttaatttagccaacttccgattggcgacgtgcttnccaagaagaagcagcagcngttaggggcaagcaagcctggggatctacaggaagcttngggaatcccaaaggaacgggcggc

SEQ ID NO: 20796 - DNA, 168 bp, Oryza sativa
  unsure (1)..(168): unsure at all n locations
  Clone ID: PAT_MRT4530_2612C.1
cgtcgacagccctctnccttttttttttttttttcaatatcaacaggggcggggtattttattattaatgttgcacaccataagcatctggtctgccaccctggatctattacacccaacaaatatcaagagggtttttttcaataatcttttacacttttacacaat

SEQ ID NO: 20797 - DNA, 847 bp, Oryza sativa
  Clone ID: PAT_MRT4530_26130C.1
atgatgtcagcggtgacgtcatcaccggcgacggctcggatggcgcatgcttgccggcgaacgacggcgcgggggcgcgaacggagggcaccaatacgtagagggtgacgcggcgatctttactgaggcacgaacggcggcggacgatgaccagatgacaacagcggcgaggatgagcggcggcgaccttcggcttgacgacgacggcggtgctccagcgatctacggcgacgacggaggggtggacgaggtcggcgacggcttggcgatcacgaaggcggttttcccgagcgacgacggtgaccggagcgacggcggcgcacggctggacgaactgcggcgacggcggcgctaggctgcacgaggctagggcgctacagacggcggcgagcgaaggcgagggtggcggcgggtggaggagacaccgggggtcctttcatagcggctaggaggcggcgacggtggcccacggtggccggcgacggcgatggaaactttagggttcgggagagagagaggaatccgattcgagctcgaatccatcgatttccaaaccgaattaagcgacgattccaaaagagaaaagatagaggagatctcggggatcatttcccctctattgatttcaccggagatggaaaggaacgagcgaattggaaaggcggcggcggcgcggcgcaactagggttcgggcgcgaggaggacgacgggtccgacaggtgggacccacctgtcagcggctgagggcgcgcgcgcgcggtggctgctgctgactgggccgactgggcctagggagagagagaaaggttttgggccgactttcggcccaaagccaaaagagaggttt

SEQ ID NO: 20798 - DNA, 285 bp, Oryza sativa
  Clone ID: PAT_MRT4530_26131C.1
atgacacatttagcggtcgagaaggggcactcagaggtagtcgagaatgaggactttaggttggaactcaatgttggtgacggaggacacaacaagctacaacaacatcgtcgcccgccactattccatgatgccactctcgtggaccgtggtgaggctagcccgagaggcggtctaggaggcagctgtagagaagagaatcatgtcccgatcccccacgggctccacctcttagatcaccaagtcagaatcatgtcccgatcccccacgggctccacctcttag

SEQ ID NO: 20799 - DNA, 259 bp, Oryza sativa
  Clone ID: PAT_MRT4530_26132C.1
atagtgggttgtgagcacatggttttgatggtcgtgctcatgacagttaaggaccggttcgcgagcatcggttgtgaaacattaaccatgtcaaccacaagccagtatgggcaacggctttaccttttgtatagcatggttcattgtggggcaccagactgagaagtggcggagataagcccacgggggtcgctggggagtccatgccttgctttataagggggtgattatgatccaggaacggtgcactgctgtgaat

SEQ ID NO: 20800 - DNA, 2186 bp, Oryza sativa
  Clone ID: PAT_MRT4530_26133C.1
atgaggaaaggagctggtttgcgaaaattcattaaaaaatcccatgagtctgacagaagaagcaagaagaactggaatcgagatcgttccatctatcaattactcaagatggtgataaaccctgaagttgggaggaaaatcagactaaagtgtagaggtggtgacagccctcaagatcacttaagtcctccctatccggggcctaatactcgcacgcacgcattcccatgctgcccacaaaaaaacgattggaaagcacgcgcaaacgtttccatcccgtgggatgcttccaaccaacggcagcagcaagctgcagccgccaacccaacgtcccaacccacgcgacgcgacgcacgcaggcaggcaggtgggattgatttgggtgacatggtgcaacaccatagggccaccctcctgctgcaccagcagcagaggaaaggggatgcgacggcagaggaggggcagcagctggtggccgaggaaggagccggcaagatgaaggagctccggcgccggctcgtggactacgcgtgccaccaccggaagcacggccacgacgcgctgctgcggatgctcgcggggttcgcgcttgtctcctgcctgctgctgctgctgccagggagccctttctcagccgcggtcgacgacctgctgcagatggggaggacgcgcctggacgacgagacgccgccgccgccgccgtgcgcggccgtgtccaacggcaccatctgctgcgaccgcaccgccatgcgtacggacgtgtgcatcatgcgcggggacgtccggacggaggccgcttccaattctctcttcttgctcgtgccgccgccggacaattccaccgccgccgctggccgggacgagcgcatccgcccttacacccggaagtgggagtccagcatcatgagcaccatcgacgagctccggctccgtgccgtgcccgaggggggtgcggcgccggctagctgcgacgtccggcacgacgtcccagccgtcgtgttctccaccggcgggtacaccggcaatgtgtaccacgagttcaatgacggcataatcccgctctacatcaccgcgcgccagtacaacaagaaggtggtgttcgtcatgctcgagtaccacgactggtggatgaccaagtacggccacatcgtcgagcagctctccgattacgcgcctatcgacttcaccaacgaccgccgcacccactgcttcccggaggccgtcgttgggctgcgcatccacgacgagctcgccatcgacgccgcacgaatgccgggcaaccgtaccatccaggacttccgtcggatgctcgacgacgcataccgcggccgcatacagatgatcatcgaggaggaggagaaggccgcggcggtggccttggggacgccgacccaaggcagcatcaggaagaagagcgcgctcaaggacgacaagccacgactggtgatcgtgtcacggaacgggtcgcgcgcgatcgagaacgaggccgagctggtgcgtgcagctgctggcgccgggttccgcgtcgccgtgctccagcctcgtcaggatacggagctcgccaagatgtaccgtgctctgaacgcatcggacgtcatggtgggcgtgcacggcgcggccatgacgcacttcctcttcatgcggccgggctccgtcttcatccaggtcgttccgctcggcaccgactgggccgccgagacatactacggcgagccggcgcggcggctcgggctgcggtacatgccgtacaagatcaagccggcggagagctcgctgtaccggcagtacgccaaggatgacgcggtgctcaccgacccggacaccgtgaacgccaaggggtggcaggtcaccaagaaggtttacctcgatggccagaacgtgcggctggacatggtacggttccgtcgccggctgcgcgacgcgtacgaccactgggcggagctgaggaggcgccacaacgcggacagtactgagacggaacagcggaaaccatggtaggagtaggagtagcatggtctcctaccgagttcttttgattaattctttctctttttgacacatatacatggttaattcaaatactgtatagagaaattcagggagatagttgctttacatgccaccagtttgatgggatgagtgacacttgttaatggactacagctgttaatgtacataaaaaaaaa

SEQ ID NO: 20801 - DNA, 192 bp, Oryza sativa
  Clone ID: PAT_MRT4530_26134C.1
gttgctgtgacacttgctgatcgcgcatccgcagagggggtattgaccctcgcgacaacacacacacagaggcggacagagatataccgatggtcgacgcagtcatgaagaggctcggggggttgtggaccccgacgaacgacatcatcaagaaggagaaccagtggctgctgaggggggcgccggtgatgg

SEQ ID NO: 20802 - DNA, 753 bp, Oryza sativa
  Clone ID: PAT_MRT4530_26135C.1
gcacgaggacctcatcgtgcggaacgtcccgtctctcatgccgcgggagccggccgccatgcgcgtctacacggtctgcgacgagtccaagtgcacgcccatggatgccgaggactgtgacccctacaccgacgttttcttcatcaagttctcgcaggtcagcaatgccaggtttgcaaagaggaaattggatgagtctgtatttcttggcaaccggctgcaggtgtcatacgcccctcagtttgagagtcttctggacactaaggagaaactggaagtcaggagaaaggaagttcttggccgaatgaaatcatcttctggaagacctgaagggttatctcatcattctccaggtcagggatcatctgctgcaaactcacaccgtcagatgagctctaataaaagggaatacacaaaaacacttcatgcttctcaatttgaagatcctcgtttcactcatgtatcctctaataaggattattttccatctgagtcgatgaatgcaacagtaaacctagtcagggagaagcttgataagttatgttctatttggatctcaaatggttcctatgaggttgtgacatctgtgttatggcatgaagaatttcatgatgtctgacgtgggatggagtagaacatgcattttttttcttcatctactttcttgtagtttgttttataattggcagaaaatagtgtactataatgctaaatgctgtctatattctccctcagttgtaaaagtatcccctt

SEQ ID NO: 20803 - DNA, 478 bp, Oryza sativa
  unsure (1)..(478): unsure at all n locations
  Clone ID: PAT_MRT4530_26136C.1
ttacctaagagcaaggctaataatncatccgacttgttggctataaggttttttttagcattctctcactctacccatataataagtcagctntttacaattaatacaaggcccacttgtctcactcacagtgtttcttggttcttgtgtccaagccacaagccttggttcttgtgtccaagccacaagccgactgtaagtttacaggccgcttctcctctctctactctcttctctcctccaactcagcatttagccggtttatagtctactattatacttgctctaagtattattatacttgctctaagtatgtttgttcaggtatgggttctcgcctatggggagactccaaatgattnatagagggaagnaaaagccacactgaaccacatgtactagtctttgtaatgagtaaatcttttcaaattattagtactgggaaggttttgagcagtacaacaaaaaaaaaaaaaaa

SEQ ID NO: 20804 - DNA, 564 bp, Oryza sativa
  Clone ID: PAT_MRT4530_26137C.1
atgccgcgggagccggccgccatgcgcgtctacacggtctgcgacgagtccaagtgcacgcccatggatgccgaggactgtgacccctacaccgacgttttcttcatcaagttctcgcaggtcagcaatgccaggtttgcaaagaggaaattggatgagtctgtatttcttggcaaccggctgcaggtgtcatacgcccctcagtttgagagtcttctggacactaaggagaaactggaagtcaggagaaaggaagttcttggccgaatgaaatcatcttctggaagacctgaagggttatctcatcattctccagggaatacacaaaaacacttcatgcttctcaatttgaagatcctcgtttcactcatgtatcctctaataaggtatgcagtacaacagtatgtatcctctaataaggattattttccatctgagtcgatgaatgcaacagtaaacctagtcagggagaagcttgataagttatgttctatttggatctcaaatggttcctatgaggttgtgacatctgtgttatggcatgaagaatttcatgatgtctga

SEQ ID NO: 20805 - DNA, 400 bp, Oryza sativa
  Clone ID: PAT_MRT4530_26138C.1
gcgacatcctccctctcccggcgatggcaacggctcagtgacgaggaggtcgcgacaatgatgacaacgccttctggatccgctgccggctcgccccgggcacacggatccaccgccgaccggtcgcgggcgcacggatccgccaccggctagactcggggaggggaggggaggtggcggcgacaaggaggtgaggggaggggaggggatgtggcggctcgactcctccctctcctggcgacgggaacgactcagcgacgaggaggtctcgacgacaacgacgacacctcctggatccaccgccggctcgccacgggcgcgtggatccactgccagccagtcttagggaggggagggaaggtggcggcgacgaggaggtaaggggaggggaggggagggg

SEQ ID NO: 20806 - DNA, 547 bp, Oryza sativa
  Clone ID: PAT_MRT4530_26139C.1
cggtcgacccagcgttcgcccagcgtccggcgaggtggtggtggccccatggatgggatgggattgggttgggtggagaggtagaagaagagagggggaagatgccgccgtgttgctttgcatgccgtggttggttaattgcttggattatgattataggttaattagcctccaacgcaattaccacactgtaacccgctatatactcccttcttttttaaataaatgatgcatttaacttttcaaaaaaaaaaaaaaaaaaaaaaaaaaaaaaaaaaaaaaaaaaaaaaaaaaaaaaaaaaaaaaaaaaaaaaaaaaaaaaaaaaaaaaaaaaaaaaaaaaaaaaaaaaaaaaaaaaaaaaaaaaaaaaaaaaaaaaaggggggggctttttttagggacaaaattttaaacccccggtattgaaaattttttttttttttttggggccccaaaatttaatttaatggcccgtattttaaaaaccttgaatttgaaaaacccttgggtaccccaaattaataactttgaaaaaaaacccccttttc

SEQ ID NO: 20807 - DNA, 400 bp, Oryza sativa
  Clone ID: PAT_MRT4530_2613C.1
tgtacatttggagaaagctaagatgatcgatgggtagttgagctccagatccgattatgaaattgcagaccgaatactggggcataaagtgggcgccatgtgaatcaagacatgatcctgtgcttggggcagcctactccaaaggaagaaggccagctactgtgccggaaaggacttctaggtgaaacgatagttgcttaagaggttgacatatagatgaatcatgataaggcatatggttgaagagttcttggagctacacatgctgaacaggaggactaacaacatgcaataagagtaatgatatgtgctctagaagctgacccaacaaacctgaaagattttccagcactaggtgtgagtgacactaatgagacggagctaggagaatcatatgcat

SEQ ID NO: 20808 - DNA, 530 bp, Oryza sativa
  unsure (1)..(530): unsure at all n locations
  Clone ID: PAT_MRT4530_26140C.1
ggccggccgggnactcacacacacactcctcatcccagagcaagaagctcagctcctcctcctctcgcatggcagccatggccaccaccgcgtccagcctcctcaagacctccttcgccggcggcggcgcacccggagctgatcctggcgtcgaaggacgacggcgagatcgtggacgcctgagcgaatagaacagggtaaaaaaaaatccgcaagacgtggtggtgacacggaggcgttggggacgagaagaagatgtggactttcccctgtgttttttttttcgggatttggtttgatccccttgtttgttttagctctggatgttgattagcgtcttgttcatagcacttccactgccaccgtgtgtgtgtgctctgcttgcctgatgagggcaagaaaacttccatggatccgtctctctgggaggaatgaataaaaaggatgaggaaataaaaatgattcagtgccccaaaaaaaaaaaaaaaaaaaaaaaaaaaggcaaaaaaaaaaaaaaaaaacccgcggcc

SEQ ID NO: 20809 - DNA, 1597 bp, Oryza sativa
  Clone ID: PAT_MRT4530_26141C.1
tagtggctccccccgggacccaggcacgcccccactcctcatcccagagcaagaagctcagctcctcctcctctcgcatggcagccatggccaccaccgcgtccagcctcctcaagacctccttcgctggcgcgcgcctccccgccgccgcccgcaaccccaccgtctccgtcgcgccgcgcaccggcggcgccatctgcaactccatctcgtcgtcgtcgtccactcccccctacgacctcaacgccatcaggttcagccccatcaaggagtccatcgtgtctcgcgagatgacccggcggtacatgaccgacatgatcacctacgccgacaccgacgtcgtcgtcgtcggcgccggctccgcggggctctcctgcgcgtacgagctctccaaggacccctccgtcagcgtcgccgtcatcgagcagtcggtgtcccccggcggcggcgcgtggctcggcgggcagctgttctccgccatggtggtgcgcaagccggcgcacctgttcctcgacgagctcggcgtcgcgtacgacgagcaggaggactacgtcgtcatcaagcacgccgcgctcttcacctccaccgtcatgagccgcctcctggcgcgccccaacgtgaagctgttcaacgccgtcgccgtcgaggacctcatcgtcaaggagggccgcgtcggcggcgtggtcaccaactgggcgctggtgtcgatgaaccacgacacgcagtcgtgcatggaccccaacgtgatggagtccagggtggtggtgagctcctgcggccacgacgggccgttcggcgccacgggcgtcaagcggctgcaggacatcggcatgatcgacgccgtgcccggcatgcgcgccctcgacatgaacaccgccgaggacgagatcgtccgcctcacccgcgaggtcgtccccggcatgatcgtcaccggcatggaggtcgccgagatcgacggcgccccgagaatgggcccgacgttcggagccatgatgatctccggccagaaggcggcgcacctggcgctgaaggcgctcggccggccgaacgccatcgacggcacgatcaagaaggcggcggcggcggcggcgcacccggagctgatcctggcgtcgaaggacgacggcgagatcgtggacgcctgagcgaatagaacagggtaaaaaaaaatccgcaagacgtggtggtgacacggaggcgttggggacgagaagaagatgtggactttcccctgtgttttttttttcgggatttgcattgatccccttgtttgttttagctctggatgttgattagcgtcttgttcatagcacttccactgccaccgtgtgtgtgtgctctgcttgcctgatgagggcaagaaaacttccatggatccgtctctctgggaggaatgaataaaaaggatgaggaaataaaaatgattcagtgccatttgtgtgtgtgctctgcttgcctgatgagggcaagaaaacttccatggatccgtctctctgggaggaatgaataaaaaggatgaggaaataaaaaagaaacagtgccaaaaaaaaaaaaaaaaaaaaaaaaaaaagatctccggccaggaggcgtcgcgccc

SEQ ID NO: 20810 - DNA, 2436 bp, Oryza sativa
  Clone ID: PAT_MRT4530_26142C.1
atggagatggacgaagtcgggggtcgatggacatctctagggcaaatgaaggctacacgagctgcggcccgaaaatccattaacaagtggagcaataaatcattgaatgatttgctagcaattttgcaacaagcaatcccaaatggtagcaatatacctagaacattttccgaggctaggaagataattggaaaacttgggcttagttatgagaaaattcatgtttgtccaaataattgccaactataccggaaagacaaggctaatgatgacttttgttctaagtgtggagcttcaagatggaaaaacaaaaaggataaaactaaattaactaagaaggaaagaaagaaggcagcaccaaggaaggtgttgcgatactttccaatcaaaccaaggcttaagaggcttttcatgcacaaagaaacagctgcagcattaagatggcatgatgagggacgtgtaaaggatggggcattgcgtcatccagctgattcagaggcttggaaggcaattgattctgagtttcccgagtttgcatcagattctcataatattaggtttggaatggctagtgatggtttcaatccatttggaacgatgagttcaagttatagttgttggcctattgtcttaataccttataatttgccgccatggttatgcatgaaagcttcttctctaatgctttctctaataattcctggtccatcttatcctggaaaggattttcatcttgcatattctcgaacttcaactctaaagaagatacaagaagttccagattttgaaaagtcaaaaacatggaagggtattagtggtctattttctttgccttactgggacattaatttgctccgtcacaaccttgatatcatgcatattgaaaagaatgttccagatggctatgcaggaaacatctcaagatgtgtaaatgttgagcaaggaaaaatttctggccttaaaagtcatgattgccatattcttatgcaagaacttcttcctcttgctttgcgaggtgtacttcctgataatgttacagctgtcttatttgatctatgtgggtatttcagagaactaaatgcaaaagtacattatatagatgagcttaagaagttagatgagagaattaaattgacattgtgccatatggagatgatatttccacctgggtttttcactattatggtgcatttggttagtcatttattagcaactggggcattattaggtggtcctgcgtgttttcgtactatgtactttgttgaaaggtaccttggtgtgctgaagtcatatgtgcgtaatagagctcatccgaagggatcaatggctgaagcatatttggcagataagtgcatggttttttgttcacgatatcttgatggttttgagactaagcataaccgtccttcgaggaatgatgatacacatgagctagatagttatcctattgtgaaacaaggatcatcaatattttctcatgttggaaaaccacttggaaagcctagcaactatgttataaggggtatggctaaagtacaagcacatcgatatgtgttgttcaattgttcagatgttaataagtacttgcgagctcatgctgatcagattgcaagtacgtatcctcgacgtggtgtcaatccaaaaactattgagcgtgtacaaaatgagaaattccatgaatggtttagagcacatataatggatctggagcggaagaatggcttgcacattgtcaacgaagatgttagatggctagcccgtggtccacttgatgcagccaaacgatatcgtgcttttaacactcgtggtttcagatttaggcctaaacgcttggatggagtgacacaaaatagtggggttgtgctaactgcaaaaaaatctagctacactaaagcaagtgacgctaatccaattttaggtgatgttacatattatgggaggataatagatattattgagctgaactactctggaaaattttcagtggtcttatttaaatgtgaatgggtggatgttatttctggaaaaggaattaaaaaggacaaatatgattatacacttgtcaacttctcacatcttatacatacaggagaaaaaattgagcatgagccttttattcttcctaaccaagctgatcaagtgttttatgtggatgacccaatgaacccagggtggtctgtagtaaggaaaatgaaacccatggacatatatgatactggcaaagaggaatggatagatgagatggaagctgagccttttcatgtttcacacctcggggagttattcgatcaatcaaacaatcaacactgggttagagctgatgttgaaggaacaatggttgatgctaataatggacttggcactgaggtactttggtactttgttagctccattcaagtgccatgcttcttgtttcatatggaggaacaaatataa

SEQ ID NO: 20811 - DNA, 234 bp, Oryza sativa
  Clone ID: PAT_MRT4530_26143C.1
ccacgcgtccggatggcttttgtgatcccctatccattcgccggagctcgacgcgggggaagccaataactaccatgatatttggcgcacgattttctgcatgaacgccggaagacaaggcagtttatgagggacataccgcttgtaccttactgagtggcaagaaggacgggagagccatgatttaggtcatgagcaccgatggaaggagtctttttttcagtgcttgaagag

SEQ ID NO: 20812 - DNA, 278 bp, Oryza sativa
  Clone ID: PAT_MRT4530_26144C.1
gcacgaggagaaaacaattgatgatcagccatgggcagaagaactcccatcgtcgtcaatggccgtggctaacccacctccaacaaacgaatcatcccccacccaatcaaccaagcaactaaccaaccaaaagcttcatccctctctttgctcacctgtgtggcatgtgttacgagctcagccgcctccgcatggagaagaagacgacgacctcggatctcgcctcaccgggaagacgagtaaagagagaaagagagagagaggaagaagatgatgca

SEQ ID NO: 20813 - DNA, 1727 bp, Oryza sativa
  Clone ID: PAT_MRT4530_26145C.1
tacattgtgttcggctacttgagatgggagctatcccctcgatttagccactattaagaagttactactttcccctagaccaagtgatgactatttgactggtgtagatggttttcttgattttgcatacaatgggaaaagttctggagagaaaatccgatgcccatgtgtcaaatgtgctctaaggtggttacggaaacggaatgaagaggcacagttgcaagaaaaaacaaaaactaatatgcaccagttagtcatagatgcttttgggcatatggataatggacatccaatgaattcatctacttgccaaaattcctttgaaacaggaccaaaccctgaaacccaagctttctttgacttaattagagaggccgaccaacctttttggcggaaagacaaggctaatgatgacttttgttctaagtgtggagcttcaagatggaaaaacaaaaaggataaaactaaattaactaagaaggaaagaaagaaggcagcaccaaggaaggtgttgcgatactttccaatcaaaccaaggcttaagaggcttttcatgcacaaagaaacagctgcagcattaagatggcatgatgagggacgtgtaaaggatggggcattgcgtcatccagctgattcagaggcttggaaggcaattgattctgagtttcccgagtttgcatcagattctcataatattaggtttggaatggctagtgatggtttcaatccatttggaacgatgagttcaagttatagttgttggcctattgtcttaataccttataatttgccgccatggttatgcatgaaagcttcttctctaatgctttctctaataattcctggtccatcttatcctggaaaggattttcatcttgcatattctcgaacttcaactctaaagaagatacaagaagttccagattttgaaaagtcaaaaacatggaagggtattagtggtctattttctttgccttactgggacattaatttgctccgtcacaaccttgatatcatgcatattgaaaagaatgtatgtgataatatatgtgggacacttttaggattggagggcaaatcaaaggacaatttacaagctagactagatctgcaagatatgaacattagatcgtagttgcatccacaaagacgtgctaatgacaagtattacttgcctcctgcttcttacaccatgtccaaaaaatgagaaacaacaattttgtaaagtacttcatgacataaaggttccagatggctatgcaggaaacatctcaagatgtgtaaatgttgagcaaggaaaaatttctggccttaaaagtcatgattgccatattcttatgcaagaacttcttcctcttgctttgcgaggtgtacttcctgataatgttacagctgtcttatttgatctatgtgggtatttcagagaactaaatgcaaaagtacattatatagatgagcttaagaagttagatgagagaattaaattgacattgtgccatatggagatgatatttccacctgggtttttcactattatggtgcatttggttagtcatttattagcaactggggcattattaggtggtcctgcgtgttttcgtactatgtactttgttgagtaccttggtgtgctgaagtcatatgtgcgtaatagagctcatccgaagggatcaatggctgaagcatatttggcagataagtgcatggttttttgttcacgatatctt

SEQ ID NO: 20814 - DNA, 225 bp, Oryza sativa
  Clone ID: PAT_MRT4530_26146C.1
atgaacctttttgtgacgctgtcgacgtttgatatcacgactacggaatttggatggtatgtggatcgttggtatcagggtatatgcgagattgagatgcccatctgtccatgtaagactagggagaccaatatggatacaatccgagtagtccttgtcgtttccatatggaactctatccgtccttccttatccggaactctttctatacacaaggtttgtttc

SEQ ID NO: 20815 - DNA, 563 bp, Oryza sativa
  Clone ID: PAT_MRT4530_26147C.1
cctacacatcgaggccggccagaaacaactcttccaaataaagatattatcaccgaaataaaaacaactcaaaaagaaataaattactgtgtccttacatctctatccgaagggctttcaccaagaagcaaataccaaaccagcagcccgccaacacttgcaacgaaggaccccctatgtccctcaagctcgacacgaggcagggaggtgaaagggttctgacccgagaccataggatagtagggagatggtatttacattgccccaaaaattggcactacacggtatactcaccaaaaaaaataggggaggagatctctaaggaaacggaaaaggacattaaaggccttccgcattaccgataaagataacggtacaaaaccgtcagggaaaggtgtactacgacacatacgacgggaggtatttaatcacggccattactgtgaccagagcgaacacaggaaaaatgtctcgaatcttaaaaacagagcaaccataaccctcaaagacatcatcgaaaaccccacaatcatgaggaacaggactatgactaaggaaatggc

SEQ ID NO: 20816 - DNA, 215 bp, Oryza sativa
  unsure (1)..(215): unsure at all n locations
  Clone ID: PAT_MRT4530_26148C.1
ataaaaaatggtgctacaaaagtaaacactaaaaaaacacattgtaacacttgaataggcggcacatgcacatttagccatcaaggagaaattaccacaaaaaagaatcaacaacaggtccataacaaaaccagaggaccgctcttgaaggggcacttctttattgccggggccaacagatcccaaggaaagcacattntctcactaagaaaaac

SEQ ID NO: 20817 - DNA, 365 bp, Oryza sativa
  Clone ID: PAT_MRT4530_26149C.1
ggttcctgttttttattattttcatttttttattttgtttttttttttttgtggtttgttttgtgcaccgaatcaaagcccctggtcctgtttaccttactctgggtttgtgtcctgggattcccaaaaattacttcccttaacaggtgttaatgcggggggggggcacggtgttttttttgtgactaaaattttttgaccccattttattggtcgcttgataacggagccgccctctgaaccctttatgttcctacgggcgtttctccatcctctctctttccaccaccgacgccgaatctatccttgtgacccttgtcattaatgatgtcagaggccctctctgtgggaacagtcttgctccc

SEQ ID NO: 20818 - DNA, 990 bp, Oryza sativa
  Clone ID: PAT_MRT4530_2614C.1
tcacaagtttttgatagaattaggcttgtctctgctttgcccgttttctttactgtatggtgcacttgagccaacctcaatgttatcacagacagcactccctaaaatctcctcgaaatcgatggatcgcggtctaaccgaagtagatgcaccggtctgaccgcctggttgccgtcggtctgaccgagattcaatctccagtctgaccgccgggatcagctgccgcttgctgtcgccgccgccggtctgaccgcccgtatgccgccggtctaaccgctgcttgtcgccggtcggaccgccgttgagttgccggttagacaccaagccgactcccggtccatcagtgcaaatactctctcgaggcatcgagtcaccggtcccgacaaaccagtaaaccctgttcatctcctgaaaattgattatctccaaaaccacttcgacgataatctcgaaccaacggccgcgtctagccgtcccgtccgcgccatgccgccgccgctcgtcggagcgcgcgcgcagcgtgcgcagctgcgcctcccagacgtccctcgccaacgacgacgacgacgacgacgcgtcctcctccgccgccggcctcgccggccgccgcacgcgcatcatcagctcggcgtcgtacctgacccggagcgccgggtcggacagcgtctcgtaggcgcggcggagctggaggaagaggcgcgtggactcggcgcggcgcgacggcgggcaagcgtccgggtggtaccgcagcgccagccgccggtacgcccgccggatctcctccgcgcccacctcccccgccctgtccagcgacagcaccttgtagtagtcgtcctcccccctcccgctcgccaccgtcgacgtcgccgccgccctgatcaccctgcagtgtcccgccggcgccggcctcatcatcctccggccaaacgctgcagcattcaccccgccgccgccggcggcggcgcacctaacctcgacggcggtgttcat

SEQ ID NO: 20819 - DNA, 431 bp, Oryza sativa
  Clone ID: PAT_MRT4530_26150C.1
tctctgggtgatagggtttgtaactttcttcttgagttctatccttgacaatttgacttccactattgagatggtttcattgcttcggaaactagtacctccatcagagtacagaaaattgttaggcgctgttgttgtgatatctgcaaatgctgggggtgcatggacaccaattggtgatgtgacgaccactatgttgtggattcatggtcagattacaacgttgaacacaatgcagggcttgcttgttccctcagatgtttcattggcagttccactggctctgatgtccctcacgagtgaagcaaatggatcttctcagaaatcttccagcttgctgtcatcagagcagatggctcctcgaggacaacttgtctttgctgttggccttggagccttagtgtttgtcccagtgtttaaagctctcactg

SEQ ID NO: 20820 - DNA, 598 bp, Oryza sativa
  Clone ID: PAT_MRT4530_26151C.1
atataacccaagtcgaagtccgcgtgaaaagaaaaaaaagcgcagatcctgccctccccgccgacaactgaaatgatatgcgccgctgatgtctcccaggttccccatgggcacactagtgaacctcgcccaacaccccgatagatatgaggacacccccgacaccatgaagaatgttcttctgaccgttcctacagaggatttcgcatgcttgcgaatgcattcttcaaactaaatgataaccgattgtctatgtgccgataggctggagcatggctgaatcctatcgtacagtgcaatcaaagacaataaacgtgcaaatgggaatactcgtatatgcctcacagaacattaggaagacattgatactgctcactgctactatactcgttgtgtgatcctcagaggttcattgattacacatacttagagccttcatccgctgctcttgattgatatcacttccactcgcgatatgaaaggattcatcacttcaatatatctctcgcagatatataagactggtctatataaggaacgatgctagtggacaacaccatgaagtcttaccaagacactgattatattgccctgatac

SEQ ID NO: 20821 - DNA, 519 bp, Oryza sativa
  Clone ID: PAT_MRT4530_26152C.1
atgacggcgggtcggtttggagcggagcgacgacacgggcggcaggcgcagcaggtgctgacggcggcggcgaccaggcggtcggccaccacagcacgcgcgcgcgggaagcaccggcggcgcggcgatttgagcggcacgctcgggcacgcgtgctggcttgcggggccgagcggctgcgtggcagggcagcggggccgggcggcgcagacggcgcaggcgcggcacgggcggcgaccacgcgggcgcgcgtgcgcgaacaacgcggtccacgtcatcactccgccagagaagataattaatcattgctggcagtgctccgaagggaccgctagcgaaaatggacatatcttcgctggcggcccgtataactcagccgctaacgaagatcctttttcgctggtgggtttgagggtggaggcggccctccccttcaccgccgccctccgcttcaccgccaccgctaagaatgggaagaggagaggaagggaagacttgggaatgagactaggcaactga

SEQ ID NO: 20822 - DNA, 348 bp, Oryza sativa
  Clone ID: PAT_MRT4530_26153C.1
atggccgccggtcaccggacgctgctgctcctcgtcgccgtcctcttcgcggcggccgccgtggcgctcgccgacgacgccaagccgacgatcctcacccccgtggcgaacaccccgctcggctccttcgacggcgactcgccggccgacgacgccatggacgacgaggacgccgcgccggtcggggcgcccatcggcaccaccatgaccgagcccaagcccgagctcaccaccacgccgggcgccgccggcgaggcggcaggcggcgccagcgccggttactcccttggtgttgcctctcacgtcggcgccgccgccgcgttcgtcgccggcgtgttcgccttctga

SEQ ID NO: 20823 - DNA, 486 bp, Oryza sativa
  Clone ID: PAT_MRT4530_26154C.1
atggcgaccctctcgatggtctccgtccccatcgccacctcctccctgcccctctccgcccgaggccgcagctcctccgtctccttccccgttcccaagaaagggggtattggtcatggtggcctgcggatcgagtgcattcgtattggtggagtggagatcccgaaccacaagagggtagagtactcactgcagtacatccatggcattgggcggtcacgctcccgtcagatcctcttggacctcaattttgacaacaaggtcacaaaggacctctccgaggaggaagtcatcactctccgtaaggagaaacggtttaatcgtgtggcgattgagaggttgaaggagattaggtgttacaggggcatccgccacaagctagggctgccagttcgtggacagaggacgaagaacaattgcaggacgctgaagggaaggagggcttctgttgcgaagaagaagtcgcctgcttcccaggaggaataa

SEQ ID NO: 20824 - DNA, 877 bp, Oryza sativa
  Clone ID: PAT_MRT4530_26155C.1
ggccgcaaattttttttttttttttttgctttttttttttttttgatggactgaaaaacatagtataaccttaatttagcatcagttcatgtaagacaggtgacaaatataactttttcagtgacagatcacaacccgtgattcatctatgacgacaccaacataaaatctcataataccagacaagagcgtggtcaagcagaacacaaaaaataaacaagaggcaaagaaccaaaggtaaatacatggcaatgtgtcttatttctcctgggaagcaggcgacttcttcttcgcaacagaagccctccttcccttcagcgtcctgcaattgttcttcgtcctctgtccacgaactggcagccctagcttgtggcggatgcccctgtaacacctaatctccttcaacctctcaatcgccacacgattaaaccgtttaaggtctccctcaatcatgtacttggtaacctccttacggagagtgatgacttcctcctcggagaggtcctttgtgaccttgttgtcaaaattgaggtccaagaggatctgacgggagcgtgaccgcccaatgccatggatgtactgcagtgagtactctaccctcttgtggttcgggatctccactccaccaatacgaatgcactcgatccgcaggccaccatgaccaataccccctttcttgggaacggggaaggagacggaggagctgcggcctcgggcggagaggggcagggaggaggtggcgatggggacggagaccatcgagagggtcgccatttctgcgctcccgacgagggacggaggtgcgtgcgcttctctcccggagctctcggtgctgtctcggatagaacccaacgggaaggaagccgatcccggccgg

SEQ ID NO: 20825 - DNA, 598 bp, Oryza sativa
  Clone ID: PAT_MRT4530_26156C.1
atgggccggccggcccaaggcggcccaaactcgcgcgcgcgcgggagggaggagagagagagagagccggcggacctgactcaccacgcgcggtcccgggagggacccgcttgtcagcggcttggctcaccgtgcggagggagcacgccacgcacgcgcgcgggcagggaacggactccgtgcatgcgcgcggtccgggacggacgcacgtgcggcgggcccacacgcagactgacggctcgcggtggatcgcgcgcacacggagggaccgaccggggtcggacccaccctgtctggctgagctggcacctacgtggcacctacgtggctgccacgccggccggagggaggtaaacaaccacccggccgcgaatggacggcgggcggcggcagcgagcggccgaaccaaccacagccatacgggcaacagcgagcacaccggacggttgcacctgacaaggggaagccagccaaccgctctgattcgacggaggttgatcgacggcggctgattgcggcggcagcaaccggcggcgggagaagaaggaaacagcaactaagtcacgagaggtttattcccggcagagagagcatctac

SEQ ID NO: 20826 - DNA, 2274 bp, Oryza sativa
  Clone ID: PAT_MRT4530_26157C.1
ccgccgccagctttgactagcagctagcaagtgtacacacatctataaattgtagtaaaccaccttagctgaggtgatggccatggcgatgatgagaagggtggtgatggtggtggcggtgctgtgtgcggtagcaactatggccatggcacaagaggcgtccaacgtgcgtgccacgtaccactactaccgtccggcggaaaacaattgggatttgggggccccggccgttagcgcgtactgtgccacgtgggatgctgacaagccgcttgaatggcgccagaagtatggatggaccgccttctgtgggcccgttggtcccactggtcaggatgcatgtggcaaatgcctcctggtgacgaacacggcgacaggggctcagatcactgcgaggatcgtgcccacgcgtccgcccacgcgtccgcccacgcgtcgaaccgattgagggaaaaaaaaagagaaaaagaaaagaaaaaaaagaagaagaagagagaactcgaactctcgcctaccatttcgcccccctccgcaagcaatccaccactgcatcggcggcgagggctcaccggcggcgagccatgtgcggcggcgccatcatccaccacctgaaggggcacccggaggggtcgcgccgggcgacggaggggctcctgtggcccgagaagaagaagcccaggtggggcggcggcgggaggcgccacttcggggggttcgtggaggaggacgacgaggacttcgaggccgacttcgaggagttcgaggtggactccggggactcggatttggagctcggggaggaggacgacgatgacgtcgtcgagatcaagccggccgccttcaagagggccctctccagagataacttgagcaccattaccactgccggatttgatggtcctgctgcaaagtctgccaaaagaaagagaaagaaccaattcaggggcatccgccagcgcccttggggtaagtgggctgctgaaatcagagatcctcgcaagggtgttcgtgtctggcttggcactttcaacagtgctgaagaagctgcaagagcttatgatgctgaagcacgcaggattcgtggcaagaaggccaaggtgaattttccagaggctccaacaactgctcagaagcgtcgtgctggctccaccactgctaaagcacccaagtcaagtgtggaacagaagcctactgtcaaaccagcattcaacaatcttgccaatgcaaatgcgtttgtctacccatctgctaacttcacttcaaacaagccgtttgttcagcctgataacatgccatttgttcctgcaatgaactctgctgctcctattgaggaccctatcatcaactctgaccagggaagcaactcatttggctgctctgactttggctgggagaatgataccaagacaccagatattacatcaattgctcccatttcaaccatagctgaagtcgatgaatctgcattcattaagagcagtaccaacccaatggtccctcctgttatggagaacagtgctgttgatctgcctgatttagaaccctacatgaggttccttctggatgatggtgctggtgactcaattgatagccttctcaacctggatggatcacaggatgttgtcagcaacatggacctctggagctttgatgacatgcccgttagcgatttctattgaggaattcgaagtcttctagtcggagcatgtacacagggaaaaaaaaggaataaatactattggagattgggaggcacctgcatggcaccttgggggtagcatatcgttatgtttagcttagatgcaaaaggctgcatcctgaaactctttggtgattggacctgttccctatccgctgtctatgtatggcagccatctatgagactcaagaactgcttttttttttccgttctagttttctgtcgttgctacctgtatatggctatgaacatcgtgaatccatggccattatgttttaatctatgttgttgactgctctttctttcggtctttgctgtgctgcgctatgttggtgataactagctaccatattgattttctgtacataattcatttgttgaatccgaaattaaatagtgcattgactatatatttatatattatatgtccacagccacgcccaaggctaccagaagggccacctcatccgccagtaccagctcgaaccctgcgcgccacaccagcagctacccctatctacccctcctatcacttcccctactcccacccccccctccgacgcgcccgcattcctcta

SEQ ID NO: 20827 - DNA, 453 bp, Oryza sativa
  Clone ID: PAT_MRT4530_26158C.1
atggctggggggcgcagtggaagccggcggcggtgcgacggttcgatcactgcaacgacaaacccgcattgggcgatcggtgactcgcaagatgggaggagctgccgggattggggagaggggggatggtcggggggcgtggtggaagccggcggcggcgcgatggaggattcgtcgggattggggacggggagggagcacgggtcgggtgaggtggcggcgtcgacgggtgatggcgcggtcggcctcggcgagcgccgcgcggggggctccgcttcttggtccctgcggcggcgcgcgcacgggcgaggagctgggcgccctgcgcgaagtggtggcgagactgcgcggcggcggcggcggcggcggaggaggaggaggaaccggcggaggcggtgggccgcggcgaggatgaagaggaggacagtgacggggttctcattggcggcgtga

SEQ ID NO: 20828 - DNA, 195 bp, Oryza sativa
  Clone ID: PAT_MRT4530_26159C.1
atggcgaactacggtggcgataacaatgacgatggcaacgacgattgtggcgacaacaacgatggcggctggggtggatgggagtgtgatcgaggaagcttcctcaagatggatccaaatgtgctaaacgtgttagttagcaaagcgaaggaaaatctagtccatgcggagtcgaatgaaaaaggacaagcataa

SEQ ID NO: 20829 - DNA, 566 bp, Oryza sativa
  unsure (1)..(566): unsure at all n locations
  Clone ID: PAT_MRT4530_2615C.1
gctcggctcgccggagatctccggccggctgccggcggcggtgagcngtgacactaatcacatatcgatcgtacacgcgcgcgtattacgtgtgtgaaggaacattagatagatagagagagagaggggatgggcggtgggtcgccgtgcgcgtcgtgcaagctgctgcggcggcggtgcaccaaggactgcatcttcgcgcccttcttccccgccgacgacccccacaagttcgccatcgtccacaaggtcttcggcgccagcaatgtcagcaagatgctccaggagctgccggcgcacagcgaggcgacgcggtaagcagcctggtgtacgaggcgaacgcccggatgcgggaccccgtctacggctgcgtcggggccatctccttcctccagaaccaggtgtcgcagctgcagatgcagcttcgccgtcgcgcaggccgagatcctctgtatccagatgcagcaccgcgacgacggcgccgcccaccagctggacgccgccgccgaccaccanccgctgctggatcagcagcagcaanagcagatggtcgtggacnccgccga

SEQ ID NO: 20830 - DNA, 484 bp, Oryza sativa
  Clone ID: PAT_MRT4530_26160C.1
cccacgcgttcgggcggactcgccggagccggaggttgccggaggcggcggcggcggcggcatcgcgctcttcttccttcgctgcttctccggaaaagaggcagggtcatcgtggcaactcaaaacaatgggccatttctcaaaccaaagacggggtgttggatttgataactgggctgggcacccccgaggagaaaaagcacaccctgctatagttacaaaaaatgggcccgcaccaaatcctgggatctttgtgggccggctgcggagtccagacctcccaattttgcacctaaggtggccccggaagacatggttaaccttgatggtgggttttacgggcaactacaaccattaggtgaagcgggcggaggtgactccccaggaatatctgaggacctgatgtgctatttgccgccttttaagaaaaaaggcagttttttctccgggaaaaaaaatgatgaagaatgtgtcatctgaaaat

SEQ ID NO: 20831 - DNA, 439 bp, Oryza sativa
  unsure (1)..(439): unsure at all n locations
  Clone ID: PAT_MRT4530_26161C.1
ngagccngntncntntncagttntccatngcggtgcactttatgcggacacttcctacaggtagcgttgaccctaattttggtcgtcgggtacgcaatcgccgccagttaaatagcttgcaaaatacgtggccgtcttcatttccatgcggtgcactttatgcggacacttcctacaggtagcgttgaccctaattttggtcgtcgggtacgcaatcgccgccagttaaatagcttgcaaaatacgtgggttggcttctcctccccctctttaccttttcctcctcggttcggttccgtggttcgtctagggtttagtnggttgagatagcggcgcggantgtcgagtaccgctgcttcgtcggcggcctcctggggccaccgacgaccgctccctcgaggccgccttntcacctacggcgagatcctcgactccaaga

SEQ ID NO: 20832 - DNA, 489 bp, Oryza sativa
  Clone ID: PAT_MRT4530_26162C.1
atggcccttagtttcctgccaaattttggtaactataaaagaaatcctgccaaaattttggtaagttaccaaaattttggtaactactttggctatgccaaaatttggcgtacaccggtgagagagacatgcacagtgaaacattgtgaaatggacgtacgagtggaacaaccgatggcaaaatcggttcgacgcagagacagcgccaggcatcaacaacacttcaaagacaccaacatggtgggcttaccaggcaaagtgccttggggcatcaaacacggtcttcgattcgctcatttggaaagtttgggtgccaggaaaaatgcaaattccacgtatagccagtcatccaaaatagggtctggatctccgaccagttggcgactagagcatgacaaaataatgggatctgccccatctactgtagagaaggcgaaacagttatacatctcgttgtcagctgcagatacacgaaaagaatttgaaacc

SEQ ID NO: 20833 - DNA, 523 bp, Oryza sativa
  Clone ID: PAT_MRT4530_26163C.1
gggcttgtgctgctctcccgccaccggccgcgccggttgggcgtagagacggggagggtgttgaaaaacggaccatacctgtgccccagtccgtggggacattgtgggggaaagatgacgaccagggatccacagtctgtggcaccagctaaacctcgctattgaccctgaataacccgctgaaaaggtagtatttttttctccagaggacagggcaactctggatcatgcaactgcctaagcataaaactcgctgcttgctgtatgtgatattcctgcacttttgtggctgatcgtgtccccttgacgttgcaatgtgaacgactttgaattgttttgcctgacaaattgtgtagatcgattatgccttgatcgcaagcattactgacatgcatttacgcatatgtcttgtcagaagagtagtgatgattgcactcatgtacttgatgacgagtcatgttcattgtcacctgagctactacatgctgacttatcgacatagcggatcttactgagatactgg

SEQ ID NO: 20834 - DNA, 201 bp, Oryza sativa
  Clone ID: PAT_MRT4530_26164C.1
atgataccaaacctggagaggtgggcccacaacacaacaggcacgtgggacccacacataagcgactcctctctttgtccacggatggacggcggtgcgatgacatcaagcgacaaggagcatccttcccctacatggccaaacgagctcgagtgtggcgaggagcaacaacgcccggcggacgagcccaaatctgcatga

SEQ ID NO: 20835 - DNA, 705 bp, Oryza sativa
  Clone ID: PAT_MRT4530_26165C.1
atgagagcatcatcaattgttccttgcaacccattgttagcgaaagagaggtactccaatgatgtggcattgaagagatcacctgggagaggccctctgatgttgttggcattagccttgagaagtctaagggcagaacatttacctattccaggggggatgttgccactgaactggttgtacccaagatcaagaacagcaaaagatgtcgagctgctgcagaaggaggaaggtatgtgccctgtaaaactgttgttgctcgcgttgattgcgaccaggttcctcattttctcccatgtgatggatggaaactctcctgtaaaccggttgcttgagatattcagtaccttcagtggctggttagatactgatggattcaactcttgcaggtccccgttgaggcgattgaagctgacatcaaggacgacgatgctgccagaggacatcaactctgctggaaggctaccagatagggagttgtacgacaggttgaggcgcgacaagctggtgagctctcccagtgacggtgatgccttcccacaacagcagtccatgccattctgccatgacatggcgatgccaccgtcttgcgacagctcagcaatgaaccggaggagggagctcttctcctgctcgacgcaagccatggcggaggtggccacgatgagaagcagcagtagcgaggccattgaaaggcatgactag

SEQ ID NO: 20836 - DNA, 749 bp, Oryza sativa
  unsure (1)..(749): unsure at all n locations
  Clone ID: PAT_MRT4530_26166C.1
cctcatgcagtttttgaatttctcatggcatttcacactcatcagacctgcaaccaagaaaaagaagaactaacatgagttggttcagtaagagatgagatgaccaggaaaatttcataaagaaacaactgcagtgcttgtctctcacccctggatagtatgtttcatgcatagcccagtgaaaaatgatcaggcaatccaagcaagcattataatggttgtgaataagagggtgaagatgattgttttcgcgtaagtggggtatctctgctagtgtttctttttaaagaaaaaaaactcctacatagtatctctgctagtagataaagtttgattgtccagtgatttgaattcatgtgagttgatgtgcagcaatctgaaattgtttcgtgtgcaatcattcaagtctaagacagtgaattgagttagagtaaatgtgtagtatgcttattattgtaggagtgaagtaattggtagagagatccagagaggaagaaagaaactcctaacctttcttgtcgacgcagtgngtcgtggtcgcggcagcaggcgtcgaggtcatcgcagggctcctctccatcgcagccgctccagccaacgccgcagtacttgccataccggatccctacggctgcagagacaaagagttggaggattagatggtgggggacgccaatcagttggaggtaagcgctcacgacgcacagtcgcagttgagggcggcgcacgagcggctgcacnggcggcga

SEQ ID NO: 20837 - DNA, 1879 bp, Oryza sativa
  Clone ID: PAT_MRT4530_26167C.1
ccacgggcttctacacgctcctccccctccccctcgaccccctcgccccgctgcgccgccggccgcccccccctcccccgcgcccgccgccgccgccatggcgtccgcggcggcgccgaagcggtgctactacgaggtcctgggcgtcccccgcgactgctccccggccgacatcaagctcgccttccgccgcctcgcgctctccctccaccccgacaagcagccccccggctccgacgtcgccgccgccaccgccgccttccaggagctccagcacgcgcactccgtcctctccgacccccacgagcgctcctactacgactcccaccgctcccagatcctcttctccgaccaccacccctcctccggccccggccgcggcggcggcgtcgcctccgcctccgcgtcccccgtccccgacctcttcgccttcttctcctcctccgccttctccggcttctccgactccggccgcggcttctacaaggtctacggcgacgtcttcgaccgggtcttcgcgcaggagctcgcctacgcccgccgcatgggcatgcccgccgacgccgtccccacgccgccggtgatcgggaacctcgattccccccacgcgcaggtcgccgcgttctacagctactggctcgggttcggcaccgcgatggacttcgggtgggcggccgagtgggacgccgcgcggggggagagccgccgggtgaggcggctcatggaggaggacaacaagaaggcgacgcgcaaggcgcggcgggagtacaacgacgccgtgagagggctcgccgcgttctgcaagaagagggacaagcgggtggtggacatggcgctgaagaagaaggtggaggaggagaagaggaaggcggaggaggcggcgaggaagaaggaggaggagaggaggaggaaggagcgagcgatggcgtaccaggagcccgagtgggcgagggtggacgaggatgaggcggcggtgtttgaggacgacgaggaggaggagacgagggcgaagaggaaggaggagctgtactgcgtggcgtgtaataagaagttcaagtccgacaagcagtggaagaaccatgagcagtcaaagaagcatagagataaggtgtccgagctgaggatggtgtttgaagaagaggaagaagctttgaaggatgctgaagaagaggagccagaagaagttgatgtggggtttgattttcagcctgcacaggaatcagaggagagtgaattttcagatgctgctgaagagttggctgacgagttgagcgagggattggaggtgcgtgatgaagaagagaagggtgataagcacttgggtaatggggaacaaaaggttggttcatatgatgaaaccagtgtgttagaggaaatgctatcgaggtctaggcgcaagaataggaagagtggttttgtcgctcctcaggaggaagcttcaccagctggtgccatggatgatgatgacgatgaggatacaagctatgagattaataatgtcaaaaagaaaggacgccggagacgggcagcaaagaagggaggtacttatgctgataatgggcaaggtaggaagagtgagaatcagcctgaggaatccaggcataataatgatgaaaatggtgctgatgataagatggaaggtccatcttctaatgaagacagtgctgcagcaagtaaagaagatcagcagaaaggaaaaaccggtaatactaaaaagaacaagaaaggcacagaaaagaacacaactatatcttctgaacaaaagggtacatcgaagggaaagaagcaaaaggaacaagttgttttctcacttggaagaaacaggtcatgcaatgctgaagacacgacagaaaaatcgctgaagaggacaagaaagtag

SEQ ID NO: 20838 - DNA, 897 bp, Oryza sativa
  Clone ID: PAT_MRT4530_26168C.1
atgggagaggaccacgtgaggtccgccgtaccgaggctcgggaaggctgacgacgcgcaggaggcggacctcgctgtcaccgccgccgcatgctccgtgcactgccacgtctacgccggggatgcgccggcgtgccacccgaagatcctcggcatcgaggcagccgcggcggagacggcctcccgctcccgctacagccgcggctccttgtggtgctcggcggcgtacgcttgtggcatcccggacgtgtccgcctccaccctggccgacagttgcctcatccgcgactccacccagccctatggcgttgccgacggcaagctgctcggtgatgacgcgcaggaactggcacacgcgcgccacgaggatggccgagccgacgccaccgaggaagcccgcgacgttggagtagacgacccccgcgccttagcccagtgcttcacgcaccacagcatggtgcggaacgcggcggtgcccgagacaagccgcaggatctcgtcggccacgcggacgccgttgaggctgcgcgccgtggcgtggtcgtcaaggccacggagcatcgaccggtcgcgctgtggtccagcgtgctccgtgcttgccgcgagctggcgcagacggcagcgcagcggcgcggtgagcgcggcacaggctgcaacgctgctggttgcagggaggccagaggcagtcaggaagcgcctcggccttggccgctcggcaagcagggaaggacggtggcaaggtgcctggttcctacttggatttggccatttgggagcctcagagcatttgttcgtaggaacctcagttgcaactgctggtgttgaggggggtattttcttcgatgaattatatcaaaacaagctgagaaacaagacaggacaacaaatttttgaatga

SEQ ID NO: 20839 - DNA, 741 bp, Oryza sativa
  unsure (1)..(741): unsure at all n locations
  Clone ID: PAT_MRT4530_26169C.1
ccggccgggacgagttgagcgagggattggaggtgcgtgatgaagaagagaagggtgataagcacttgggtaatggggaacaaaaggttggttcatatgatgaaaccagtgtgttagaggaaatgctatcgaggtctaggcgcaagaataggaagagtggttttgtcgctcctcaggaggaagcttcaccagctggtgccatggatgatgatgacgatgaggatacaagctatgagattaataatgtcaaaaagaaaggacgccggagacgggcagcaaagaagggaggtacttatgctgataatgggcaaggtaggaagagtgagaatcagcctgaggaatccaggcataataatgatgaaaatggtgctgatgataagatggaaggtccatcttctaatgaagacagtgctgcagcaagtaaagaagatcagcagaaaggaaaaaccggtaatactaaaaagaacaagaaaggcacagaaaagaacacaacaactatatcttctgaacaaaagggtacatcgaagggaaagaagcaaaaggaggcttcaaaggcacccagtaatgactgtganacgtgtggatcaacgtttgactcaggggnaacagtgttttctcacttggaaagaacaggtcatgcaatgctgaagacacgacagaanaatcgctgaagagacnnagaagtagttttcttttaccgnttgtccaagttgatgctgatagattagcacatcgacaaaa

SEQ ID NO: 20840 - DNA, 195 bp, Oryza sativa
  Clone ID: PAT_MRT4530_2616C.1
atggcggcgacggcggcgctaggctgcacggcgctagggctctaccagcggcgggagacgaaggcgggggtggcggcggctcctgccttccaaagtccctgcaagcccgacatctccgacctcaatggcaacgataacaatagtgcgcatcacgataggggaggagaaaaagacttgtcggttactagaggttaa

SEQ ID NO: 20841 - DNA, 1620 bp, Oryza sativa
  Clone ID: PAT_MRT4530_26170C.1
atggagtcgatggagaccaacgcgctgcaggtgctggggctggacgacaacatgcggatggtcaccaagaacgtctactcctcgctccccgacccgcccgtctccctccacgcgcccctcgccttcgccgccgcggcgtggcccccgcgcgacggcgtcgatcgcatcagcgccctccccgtcgacatcctccgcgacatcctctcccgcctccccgccagggacgccgcgcgcacctccgcgctctccacgcgctggcgccgcctctggcgctcggcgccgctcgtcctcgccgacgcccacctcaagcacaccgggcgcgctcccgggcccgacgagctggaccgcactggcggcctcctgctccgcgccatggacggcatgcgcgacgtcgcgcgcatggtgtcgagcgccctcgccgcgcacccgggccccttccgcagcgtccacatcacgtgcacccccatggacgcgcaccggagcgagctcgcgctctggctccagctcctcgctgccaggggcgtccaggaactcgtcttcgtcaaccgcgcctccaagttcgacaccgatgtgcccttccctgccacgctcttcaggtgcagctccctcacccgcctctacatcggcttcttgaggttcccggccgtcgccaccgtcccgcgcgctgcctccttcccccacctccgggagctcggcctctgctcccttatcatgggtcagcgggagctcgccttcctgctcgacagatgccccgtcctggagaatttcgagatcgtctgccaccgcgagctcctgcgcctccgtgtcgccagccacagcctgcggtgcgtcgaggtgtgcatgtccatcgtggaagagatcaccgtggagcacgccgcgcgcctcgagaggctcatgttctgggaaacttgtggaaccggcggtgtcatcgacaacgtcggcggcatcatcgacatgcgcacgagagtcaagattggtcatgcacccaacctgcgcgtattgggattcttggtgcctgtaatgcacgagctgagcatcggcaacaccgacatcagggctgggaccaagccgacccgaagaactatggtcccgagtgttcagatgctgggaattcagctcaaactctttgacaacaatcaagtcaggatgttgccgagcttcctcagatgctttcccaatgtcgagacactctacattcagtcagagaccactcttagtggcaacaccaccggcaagctcaatcccaagttgttgcaggagacctccccaattgagtgcctccagaagcacatcaagaaggttatcatgcgtgaattcagaatgcaaagaagcgagcttgattttctcaagttcattgccgggcgtgggcaggtgctggagaaggttgtcgttgtgctgacacatacctgttcatcttcagctgatcggctgcgtgccagtctgagcactttcatggcttctacaagattggccaatgaagactgtaagctgattgtctatgagagtccatttcctatagatgctacagcatggtgcttccagggggcattcaacatgtcaaaggaccctttcgatgtttcaaaatgcttcaaggatggcgcctcatgccgagctgattag

SEQ ID NO: 20842 - DNA, 192 bp, Oryza sativa
  Clone ID: PAT_MRT4530_26171C.1
aatacttgtaaagatcactatctcgcagcatgcaacacagcaacggtgcgagccgactagctatgaggcaagccggctaagcctaccactggccggcggcaaaaaagctgaactgggggggctgaacccggcacatcaacggaagctgagccgcgttctggcgggcgctggtcagcctcacgcgggccatcc

SEQ ID NO: 20843 - DNA, 159 bp, Oryza sativa
  Clone ID: PAT_MRT4530_26172C.1
aaattacaagatttatacatttattttaattgtcccaaacaaaaaaactcgttagccacaacattaacttaccaccttatacaaatgcatgaactaatatagttattactgtccctttaccatatcaatcttatcatgggcataatataatctgttaat

SEQ ID NO: 20844 - DNA, 407 bp, Oryza sativa
  unsure (1)..(407): unsure at all n locations
  Clone ID: PAT_MRT4530_26173C.1
gcatatcttaacaaagttgaggtttttttccttagaaaaacaaatatatatatatgacaaactattaagatgacttctaaacttggaatttaaactattaaggttagcttatgcatatcacggattataattgtgggtggttacagttttagatctttttagtgagacacgtttaccattttctgtgcatttgctattgatagtatttaactttatcngttgtgtgatatgttatctgcatattcttgtgttattctagtatatacaatgcttaggttgttctacgagtgtgcataccatacacaagcattcaagttatttgatttgataaatgtatgaacttctttcatgtaataagctttgcggtcatctaaagtagcgaaccttatctgaaaaaaaaaaaaaaa

SEQ ID NO: 20845 - DNA, 2032 bp, Oryza sativa
  Clone ID: PAT_MRT4530_26174C.1
gcacgaggctcgcctcgccgccgccggatggtgcggcgatcccgcggcagctgctgccccggcggcgcccattcctgagcgcgcgccgtcgtcgtcgtcgtttcggttgttgtcgtggccgccgccgcgggagatgtcgctgttccggcggctgttccaccggcggccgccacaggggctcgtggagatctccgacaacattttcgtgtttaaccactgcttctccacggatttctttgaagaagatgagctgaaaccgtacatcggaggcatcttgaaacagctaattggccgctattccattgactcattcatggtgttcaattttgagggaagcaagaaggacaaccaaattgcctgcattttctcggactttgatatgagtgtgatgggttacccacgaaactatgagggatgccccttgctcaccatggagatgattcaccatttcgtgaggtctagtgaaagttggctctcattaggccaggacaacttcttgcttatacattcagaacaggggggatggccagtccttgctttcgcattggcagccctactgctttacctccgaagatataataatgagaggaaagcattggaaatggtctacaaacaggcaccacctgggctagtagagcacttctcaccactgaacccggctccttctcagatgagatacttgaagtatgtgtcaagacggcacatgtcaccagaacaatggcctccagctgatagaatgataaatttgaattgtgtaatcatcagaggggtgccaaattttgatggaaaaggaggatgtagaccaatattgcagatttatggtccagatccttttgctcctaatgacaaaagtactaaagttctcttttcaaccccaaagacaagtgattctgtccagctctacacacaggaagattctgagataatcaagtttaatgcccggtgtcctgttcaaggagatgttgtcatggagtgcattagcctggatgaaaactttgaacatgaagtgatggtgttcagggtcatgtttaacatggcttttattgaagacaacctattgctacttgatagggaccagattgacattctgtgggacacaaaactccggtttcctgtagatttcagagttgaggttatattttcggagatggacacaatcacatcgcttaactcatctcaattatcaagtgaggataaggaaaacttttctagggttgaagatgcattcagtcatctggattggtcaaccaaaagcgatgacgtgacaactaatgcaacagaacagaatgggtctaacaatgagcatgatggctttgatgcagtatctcttcaggaaacagaaaacagcaattccacatctgaacatagcttgctaggaaccagatctgtccaggttattcagatggaaacagaacataaccattcttctgcgccaacgttcgacattgtcaaagatccggttgctgatacacattccttgccagaaacttactcacttgcactagaatctcaagagcacaaactctttgaagattcatctccaagggagctaccaaaattggataccaccaagaacaaccccaactccgacctgccttcggcgaattcacgagactcagaagctgctggtgatgctgctgttgctgaatggtcagacaccaacacggacacgttcctgtcagatacaccttcaagcagctctccatcaagcccgcagaagttcgatgaagattccatggaggctggaattgttgagatccagacacaaacagcagaacctcaaagatgttgaagctgcaaaattcttcctcctgtaaattggggcaacactgatcactggagctgcccagaatgtagtcacatatgtcgatacatatacacctgcacagtacattggtaaaaaagagtggtttatccagaccacgaagcatgtatagctgttctcttcggtaatggtaaacatgtacaaaaatttcagattgcctccaaattttggagaatatgagttcttgccgcgatgcaacttggatat

SEQ ID NO: 20846 - DNA, 192 bp, Oryza sativa
  Clone ID: PAT_MRT4530_26175C.1
atggggatgggaggagtaggaggggggattatagttcaggcgggtggcgggcttttgcggcaaagccggggggttgaggatgatgtaatgaaggcgcgtgtgacggggggagcgtggacggatggaggcatgagtgtgggcggggcgaacaagtgtttaggtgttgagatgcccatcggtgaccgtgtgtag

SEQ ID NO: 20847 - DNA, 2448 bp, Oryza sativa
  unsure (1)..(2448): unsure at all n locations
  Clone ID: PAT_MRT4530_26176C.1
gcaaaaaaagttatttgctaatagaaaataaatttgttttgccccctttttttttttttctcnctttttttaaagcgggccggcaaatagtttttttttgcccctaaaaaaaaagtttttctttctcaccaccgttctaaaaacttggaactttaaatagggcccccccctatttttattatatttttttttttttttttttttcttttttttttttttttttttttttaatgttttccttttttttttttttttttttttttttttttttttttttttttttttttttttttttttttttttttttttttttttttttttttgcctaccaaaatttggtttatttaagaacatcgctgtctgaacaattattattccagtccaaccaaacacatcaatagcagactcacgctaccggctcaaaaatggcaaaactctccaaagaaaaaacacgggggggaaagccgtggggttgcaacatcactgtttctaaccccacatgtcagatgacacaagcgaatgtggatttagtaatccatttgactcagagtggggttgcttggccactgaaagagggagaagacatgatggttagcatctctgtcacagaggccatggcgcttaacgctgccttcaggacatcctgggagcatccaggcttcacaatacttttgaccttctccaagtattcctggagtttcttgatcctgcccatatagtcttgatcttccacgcacagtgaaataggctttgaatcagcacctgctccttcgaattggagtggtcctgggtttctgtagatgtcgtcgattaagaagctggtagaattgttcctcaatagctcgaatgctttgcctttcaagtcgacagtagccatatggacagcaggtttccctatttgagtagccgcaggaccacgtgaccatctcttcacggtcatcatagacgaaatcggagccgcaccacatcgccatttgttcgcaggactcttaagatttgtcacagtagccatgtaaccattcaaaccagcagctaagatgtggtagcacacgtgcccaagaacataagcataatcacagtcaaactttgagggtagggcacctctggcttggtagccaaagaagtgacaaattgcattgaatttctttcctttgtaagtgccttccttcagacgtttgttcatttctgcctcaactaattgggctagaagtttctcagtctcaatctgtttcctaataaatggaggcaaaaattcaaatagagctgaagcccaaggcgaaagatgagaagatatgttctcaacagaaacacctttatcatgtagcccatgaatttcctgaagcaaagcatataattcagggatactttcaacaagtccctcaggaataagtacaacaccatgatttttgtccttttcagcccttgcctggactgcgtcacatatctgcttcgtgatatcaaaaattgtaagttttgatgcagcaacctcctcacctagtataaccatatttggatgcgattgaagagcacattccaaagccacatgagatgctttccgtcccatcagccgaacaaagtagtaatacttctcagcagaaagagcatcagtgcagacattgcttatgagctgcgaattcaccttacatatggtatcaaaaccaacagttgtctcaacaaactggttcttaaggtccccattcagagttacaggaacaccaactacctttgttgaacactttgactcagcaaaagtctcagcaagctgagcagcatccgtgttggatgtaacacctccaattattacaagagcatccaacttcaaggcttggcaagcagtcattgcagcattcacttgttcagttgttctgatctgatcccttgtccgtccaagcaaatcataaccaccttgatttttataagaggaaaggacctcatcggagatctccaaagttttctgtgcaaacaatccatcagttcctccaaggaaaccaatgagcttgctgtttgcgttgtgagcctttatagcatcatggagtccccatataacattgtgcccacctggggactgcctcccactgaagacaacaccaaccctgacaacagggtgctctgttatgacggtagcatccggcacagcagcagtcttcctgaggaaatgcgccagcggctggccgtaggtgtgcgggaaggcgtggctgatgacatgagcgcccgccacgtcggccgcgatagccgcgtcgccgtactccaccttcaccgtggtgccctggaggcagggcgggaggtcggggcggtagagcgcgcgggccttctgcagcgccgacagctcgcgcggcacgccgtagtcggagtccatcgccacgctgcccatcacccgccggcgccgccgccttttctcgtctctccctcgccgccggccagtgaggcgttcggctaccggacgcgtgg

SEQ ID NO: 20848 - DNA, 401 bp, Oryza sativa
  Clone ID: PAT_MRT4530_26177C.1
caatttttgatatcacgaagcagatatgtgacgctttccatgcaagggctgaaaaggacaaaaatcatggtgttgtacttattcctgagggacttgttgaaagtatccctgaattatatgctttgcttcaggaaattcatgggctacatgataaaggtgtttctgttgagaacatatcttctcatctttcgccttgggcttcagctctatttgaatttttgcctccatttattaggaaacagctacttcttcatcctgaatccgatgactccgctcaactttctcagattgagactgagaaacttctagcccaattagttgaagcagaaatgaacaaacgtctgaaggaaggcacttacaaaggaaagaagttcaatgcaatttgtcacttctttggctac

SEQ ID NO: 20849 - DNA, 1912 bp, Oryza sativa
  Clone ID: PAT_MRT4530_26178C.1
atggcggcggagagggtggaggctgccggcggcggcgacgacgactacacgcaggacggcacggtggacctccatggcaacccggtgctccggtccaagcgcggtggctggaaggcatgcggcttcgtcgtcgtgtacgaggtgttcgagagaatggcgtactacgggatatcgtcgaacctggtgctgtacctgacgacgaagctgcaccaggggactgtgtcgtcggcgaacaacgtcaccaactgggttggcaccatctggatgaccccgatcctcggcgcctacatcgccgacgcgcaccttggccgctaccgcaccttcatgatcgcctccctcatctacctcatcgggatgagcctgctgacgctggcggtgtcggtgccgtcgctgaagccgcccaagtgcggcgccggcacggcggacccgggctgctcggagaaggcgtcgagcctccagctgggcgtcttcttcctcgcgctctacatcctcgccgtcggcaccggcggcaccaagcccaacatctccaccatcggcgccgaccagttcgacgaccaccacccgcgggagcgccgccataagctctccttcttcaactggtggatgttcagcatcttcttcggcaccctcttcgccaacaccgtcctcgtctacctccaggacaacgtcggctggaccgtcggctacgcgctccccaccctcggcctcgccgtctccatcgccatcttcaccgccggcacgccgttctaccgccacaagcccacctccggcagcagcttcgccaggatggccagggtcatcgtcgccgccatccgcaagctcgccgtcgcgctgcccgacgacgcgagggagctccacgagcttgaggatgagtactcgtccaagaagaagtccacgccgctgccgtacacgccgtacctgaagatcctgagcaaggcggcggtgaagacgagcacgacgtcgaggtggtcgctgagcacggtgacgcaggtggaggagacgaagcagatactcaagatgctgcccgtgctggcggtcacgttcgtgccggcggcgatgatggcgcaggtgaacacgctgttcgtgaagcagggcacgacgctggaccgccgcgtcggcggcgggggcttcgagatcccgccggctagcctgcaggcgttcgtgaccatctcgatgttggtgtccgtcgtgctgtacgaccgcgtgttcatgccgctcatggcgcgggcgaccgggaacccgcggggcatcacgctgctgcagcggatgggcgtggggctcgtcatccacatcgccatcatggggatcgcctccgtgacggagcggcacaggctcgccgtggcgcgggagcacggcatcgcggacagcaagggcaccaccatcccgctcaccatcttcgtgctcctcccgcagttcgtgctcatgggcgtcgccgacgcgttcctggaggtggccaagatcgagttcttctacgaccaggcgcccgaggggatgaagagcctgggcacgtcgtacgccatgaccagcctcggcgtcggcaacttcctcagcagcctgctgctgtcgacggtggcgcacgtcacgcgccgccatggcggcggcggcgggtggatccagaacaacctcaacgcgtcgcggctcgaccactactacgccttcttcgccgtcctcaactgcgtcaacctcgtcttcttcttcctcgtctgccgcctctacgtctacaacgccgaggtgtcccgcgtcgtcgacgtcggcggcagaggcggcggcgaaggcggcgaggtgctcaggcccaaggaggtggccatggtggacacaaatctatagaaaatgtatcgatcgatgatcaaatataccatgaaattaatatcaccttcagaaatgctaacaacagcggcttcagcttattttc

SEQ ID NO: 20850 - DNA, 307 bp, Oryza sativa
  unsure (1)..(307): unsure at all n locations
  Clone ID: PAT_MRT4530_26179C.1
gcctaccaaaatttggtttatttaagaacatcgctgtctgaacaattattattccagtccaaccaaacacatcaatagcagactcacgctaccggctcaaaaatggcaaaactctccaaagaaaaaacacgaaaaagaaagccgtggggttgcaacatcactgtttctaaccccacatgtcagatgacacaagcgaatgtggatttagtaatccatttgactcagagtggggttccctggccagtggaagacgatgtcatgatcgccaatgtctcggtcacagatgacataacgctcancgctggct

SEQ ID NO: 20851 - DNA, 527 bp, Oryza sativa
  Clone ID: PAT_MRT4530_2617C.1
cacaaaagcagcacagagctagtctagtggcagccatggcgagctcagagcgcggcggcggcggcggcatccacgtcgtcttgctcccgtacccgagccaaggccacatcaatccgatcctccagttcggcaagcgcctcgccggccatggcggcgtccggtgcaccctcgccgtgacgcggttcatcctccgccagggcgagccgccgtccacgggcgccgtccacgtcgccgcctactccgacggctacgacgccggcggcttccacgaggccggcagcgccggcgagtacctgtcccggctggagtcgcgcgggtcggacaccatggacgcgctcctccgcgccgaggcggagcagggccggccggtggacgcggaggtgtacgactcgttcctgagctgggcgccgcgcgtggcggtgcgccacggtgcggagaccgtgtccttcttcactcaggcgtgcgcggagaacgcggcgtacgatagcgaggacacgggccggaaagaactgccgctcgtcatctac

SEQ ID NO: 20852 - DNA, 359 bp, Oryza sativa
  Clone ID: PAT_MRT4530_26180C.1
aggccggggttgccactgcaatatcggacccggaaacgcggggacgcccccttgggtaaaacgagaaataccttaccgggcccgagaagaatacaagctttccctaagagagaaatggttattgggtgagaaagaaacaggccaaacatgccccaaggaaaaaaagccaaacccgaaaaattaaaaaacaaagtcccctcaggaaaaatgaggggcaaaccctgggggctctccagaaggaaaaccccccctttaaaaatcttaaccgcactgcccccctatagaggagaaacacccttgggccagggggaaaagggaatcgcccacccgccgggggaagggggtaaaagttgagggcc

SEQ ID NO: 20853 - DNA, 5868 bp, Oryza sativa
  Clone ID: PAT_MRT4530_26181C.1
atggagatggctctccggcctcaaagccttctatgccctcggagcaggctgaaggtcgtcatccggccagctagcagtgccagcggtggtggcctcgcgcagtatttcttaatgaccaggagatatactggaagcagaattgttcgatgcatggtttcaagttcagactgtcctaataggaaagcaaagaggacgatttcccttcatacggaagtcgcttcttctaggggatatgctccgagaattgctgctgaatcaagtattcaggagcgagaacatattaatagtgatgaagaaacatttgatacgtacaacagattactacgtaatgagtcaacagagtggaaaaagttagatactactgaagtggatttgtcacaagatgtttcaagcagttcaatgaggaaagtggatgcgacggatgaagctaagctagatatacttgaggatgatttgcccagaaatttgttgaacggtgtaacaatgggggaagtagatatgttggatgaagctggggcagaagatgatgtatttgaggtggacttgtcagccttgcataattccacagtggggaaaatggatgcggtaaatgaagttgggactgaaaatgacttatttgaggtggatctgtcagcattgcatagtgctgcagtggggaaggtggatgtagtagatggagctaaagctaaagaagatttgtttgagatggattcattagcattgcacagtgttacaatggggaaggtggatgcaataaatgcagctggagctgaaggagacaaatttgaggtggatctgtctgcgctcgcgtcgaacaattcaatgatagaggcagttaatgtgatggatgaagctaaggctatagaagacacactcgaggtggatttgtcaggaaatgctacaagcagttcaacatatggggaagttaaatttgaggtggattcattaggaaatacttcaagcactgtaatgtatgggccagcggatggagcgtatgaacctcggtccgatgaagtcacttttaaggtggattcatcagaaaatgcgtcaaacaatgtaatgtatgggagagcagatgtggtggatgaatcttgggctgatgaaggcatatttgaggtggatttttttacaaatgcttcaagcggcgcagaatatggaaaagtggatgtggtggatgaagctaaaactgatgatttcacatttgagattgattcattagaaaaagattcaaacaataaaatgcatgggaaagctcatatggtggatgaagcttgggacgatgaagccatatttgaggttgatttgtttggaaatgcttcaagcattccgatatatggggaggtgaatgtgttggatgaagctcgggctgatgatggaaaatttgaggttgacttattagggaatacttctagcaattcaacacatgaggaagtggatgtggtagatgaagctcaaacaggtgaagccacatttgaggtggatttgcttggaaatgctttaagcagtgcaatatataaagaagtgcctgtcatgggtggagctcaggatgatgaagttgatgtagatttctcaataaatgcttcaatcaccgaaacagaaaaggaagcagatgcagttgatgaagctagagttgaagatgagacatttgatatggatttagtaggtaaacagatatcaatcgattctatgaatgatgatgtagttgaagaagggactaaacatcacagatatccaatgttgtcttcagcattcatagaagtcaagaccattcatgaaacacctgtaagtttaaagcctgaacttatgtcagttgtcatggatcaggaacaagacaaaccaatttccagcgtttatcaacaagaaggatcaatttttaatttgcatgcagaaaaccaatcaacggtagattttcatgaacgggagcaaatggctattacttttgataaacaaaaggaatcagttgctaaactctctaaagaagaccaacagactgctggtttacctgagcaaaacatgtcctttgatggtgtccataggaaaagccagtcaattattgggctcccatttcaacaccaatcaattgttagttcccctgaaaaataccgatcaattgtgggttttcatggacaaaatcaatcaatcatcagctctcataaacaagacaaatcaattgttggtgttcctaaaaaaattcaatccattgttggttccactaagcatgatgattcaattgttggtttccgcaaacaagacagatcaattgttagtgtgcctgagcaaaaacaatcaatagttggttttcataaacaagatctatcaattgttgctgtcagcgaacaaaatctatcaattgttgctatacctagagagagtcaatcaaagcaaatttctattgttcggagacatgatccactacatttgaaggaagtggaaacaaaggatagagatggcatatctaaaaaatctggtggtgacgatgatttgccacatatgctcttcgaagaagagctttcacaggttgaagatgtagcaagggcaatcgcctataaaaagcagcatgaagttgatgtaatctctttgactccagatatccaggagtcaccacaggacaatatcgacccacaagaactccgaaggatgctccaagaacttgctgaccagaattgttcaatgggtaacaagcttttcgtttttccagaggcagtgaaggctaattcgacaattgatgtatatttgaatcgtaacctatcggctttggcgaatgagcctgatgtccacatcaaaggagcattcaatagttggagatggaggcctttcaccgaaagactgcacaagagtgaattgagtggggattggtggtcttgcaaactgcacatacccaaggaagcttatagattagactttgtgttcttcaatggtcgtttagtctatgataacaatgatagtaatgattttgtgctgcaagtagaaagtacaatggatgaagattcctttgaggagttcttggttgaagaaaagaaaagagaacttgagagagttgccactgaagaagctgaaaggaggaggcatgctgaagagcagcagcgaatgggagaacaaagggctgcagaacaagctgccagggaacaggctaagaaggagatagagttgaagaagaacaaattgcaaaatctgttgagttcagccagaacacatgttgataatttgtggcacatagagcctagcacatatagacaaggggacactgtcagattgtactataacagaaactcaaggccgcttatgcatagtactgagatctggatgcatggtggttgcaatagttggactgatggactctctattgttgaaagacttgtcgaatgtgatgacgaaaatggtgattggtggtatgctaatgttcatatacctgaaaaggcctttgtattggactgggtttttgctgacgggccacctggaaatgcaaggaattatgacaacaatggtcgacaagattttcatgctattcttccaaatgccatgactaacgaagaatattgggttgaagaggaaaactgtatctatacaaggcttctccacgagatcagagaacgggaggaagctattaaaataaaggttgagaaaagagcaaaaatgaaatctgagatgaaggaaaagactatgagaatgtttctactttctcagaaacacattgtttatactgaaccacttgaaatacgtgctggaacaactgtggatgttctatataatccttctaatacggtgctgaatggaaagccagaggtttggtttaggtggtcctttaaccgatggatgcatccaagtggtgttttaccacccaagaagatggtgaaaacagaagatggttgtcacttaaaagcgacagttagtgttccatcggatgcttatatgatggactttgttttctctgagtcggaagaaggtggaatctatgacaacaggaatgggacagactatcatattcctgtttctggttccaatgcaaaggagcctcccattcatattgtccatatagcggttgagatggcacccattgcaaaggttggaggccttgctgacgttgtcacaagtctttcacgtgcaattcaagagttaggccatcatgttgaggttattctcccgaaatataattttatgaatcaaagcaatgtgaagaatttgcatgtacgtcaaagcttttctttgggtggtacagaaattaaagtgtggtttggactagttgaagacctgtctgtttacttcttggaacctcaaaatgggatgtttgggggtggatgggtatatggagggaacgatgctggcagatttggcttgttctgtcagtctgctctagagttcctccttcagagtggatcttctccacatataatacactgccatgattggtcaagtgcaccagttgcctggctatacaaggaacactatgcagaatccaggttggcaactgcccggattatatttaccatccataatcttgagtttggagcacattttattggaaaagcaatgacatactgcgacaaagccacaactgtttctcacacgtattcaaaggaagtcgcaggtcatggtgccatagctcctcatcgtggaaaattctatggaattctcaatggaattgatccagatatctgggatccatatactgataacttcatcccgatgcattatacttctgaaaatgtggttgaaggcaagaatgctgcaaagagagcattgcagcagaggtttggactgcagcagactgatgtccccattgttggaatcatcactcgtctgacagcccagaagggtatccacctcattaaacatgcacttcatcggacacttgaacgcaatggacaggtggttttgcttggttcagctccagatcctcggatacagagtgatttctgcagattggctgatagtcttcatggtgaaaaccatggcaggatatatgctggctctgacttcatccttgttccatccatctttgaaccttgcggtttgactcaacttgttgccatgcgctatggatccatccctattgttcggaaaaccggaggactttacgacactgttttcgacgtagaccatgacaaagaccgggctcgagttctaggccttgaaccaaatgggttcagctttgatggagctgactgtaatggtgtggattacgccctgaacaggcaaatgaacggtccaacgttggacacgaatatctacggctacacttattttaggatggagaattggaattggaatttggaaggtgagaagttagcttgcttggggcaaccaggaaaggtagtagtgaagaaagcaaggcagggcgcgcgtgatggcgaggagctcgttcaagctggagcacccactcgatctcactctgtttatgccatgtgttgtgtcgcagaaaggaggcaggctgaggccaaccgcatcagggagaagtatcccgatagaattcctgtcattgttgagaaggctgagaggagtgacattcctgacattgacaaaaagaagtcagttctcaaccattttacttttaagaataaatctagtgccactttatctctatttgttttggcaagttatgttgacacttcattttttatgctgctgaaaatagttttagcaaattataccaggtaccttgttcccgctgacctcacggttggacagtttgtgtatgttgttcggaagcggatcaagctcagtgctgagaaggcaatcttcatcttcgtcaagaacacgcttccaccaacagctgccctgatgtccgctatctatgaggagaacaaggatgaggacggcttcctctacatgacctacagcggggagaacaccttcggcctgtttgtctga

SEQ ID NO: 20854 - DNA, 760 bp, Oryza sativa
  Clone ID: PAT_MRT4530_26182C.1
cattccctctccaaagttttctctcaagttcattcaagctttgacagctcgcccgcgcgagaccatgcgaggcggagagaacggctggagcctgcgctgtggagggtgtgcctccgactcgcggttccctcgcacccttccgctctgcgtcgccgacctcgtcgtcatccacgcgctccgcttcgtgccgccgccctccaaaacctcgtcgccggcgggaattggagacgaagcgaggaggacgacgaccacgagcggctcctgatcagcgccgccgcccacgtcctctcgccggcacttcttcgcgaggcctcgaggatgccagcgccgctcggccccaaggatgccaccgctactatgggagtgggagaggagagccggggtcgctgccgtgccgccaccgtcgtcgaatcgtcgtcgtcgccctccagatcggcgccgccatcatcggctcgtcgccctccggatttgcgctcccctcgtcgagtcgtcagctcgtcaccctccagatccatgccgccatcgtcaagtcgtcgcccactcgcgcgtatcaccgtcgctgtcgtccctcgtcgtcgtcgtcccccgctaccagcttcctcctcatattctcctcctatctctcagatcagatctagctccttcctctcctctcctccccttcctcctcctctccctcctccccttcctcctcctcccctctactcctcacatctgagggccggcggcggcggggccgtgaccagcgcggtggcgggcg

SEQ ID NO: 20855 - DNA, 819 bp, Oryza sativa
  Clone ID: PAT_MRT4530_26183C.1
tttttttgttttcatgccctgtggttagaatagcagcttcagagagaacactgaagcaatgcaattatgcaacttgttgaacagaaagaacagaccagacagttgttaatgtactaagagcaccgtgtgctttgatgattacagggtaggtttttgacaataagatgctaagggatttggaacatgctgctagaccagattatatacagaggttttttttagatgcctatttacacgaggcattgtcgaattgatgattgctgccactcagacaaacaggccgaaggtgttctccccgctgtaggtcatgtagaggaagccgtcctcatccttgttctcctcatagatagcggacatcagggcagctgttggtggaagcgtgttcttgacgaagatgaagattgccttctcagcactgagcttgatccgcttccgaacaacatacacaaactgtccaaccgtgaggtcagcgggaacaaggtacttctttttgtcaatgtcaggaatgtcactcctctcagccttctcaacaatgacaggaattctatcgggatacttctccctgatgcggttggcctcagcctgcctcctttcgagtgggtgctccagcttgaacgagctcctcgccatcacgcgcgccctgccttgctttcttcactactacctttcgagatcggattggggatcgcggcggcggaggaggaggaggaggaagtggttggttggttgtttgcggcgtgaagcggaggaagacgagaagagatagggatagagtccttttcatctttccctcgcggtacttgttcgcttcccggccgg

SEQ ID NO: 20856 - DNA, 483 bp, Oryza sativa
  Clone ID: PAT_MRT4530_26184C.1
ggggggaaccgggggagttttattaaaatgggcaaaaaccactttttaaccgaaaaaaattttggggggggaaaaaaaaaaaaggccccacggggggaggggacagaatttttaaaggggaaaaaaaggccaaaaaaaaaaatatttcccccactttaaaaaatttcaattaaaccggttttaaaaacctgggaaaaaaggggggggggggcgggaaaaaaaggaaaccggaagggcccgtctcccccatggtaaaagcaaaaagaaaccaggccctttccaaataattgggtaaaagcccaacctggaaaggccgggggggggccaaatttgccttttcctttgccagacaaggggtttccttggttttttaaagaaaaaaaaaaaacccgggggggggcccgccgttttaaaaggaaaccatctttccacggggggggacaaaaaacaggggggggaaaccttgacaataaaacccggtgg

SEQ ID NO: 20857 - DNA, 1217 bp, Oryza sativa
  unsure (1)..(1217): unsure at all n locations
  Clone ID: PAT_MRT4530_26185C.1
agttctacaccttcattttacttgcaattttgcaaacatatgtacacggttctggtactaaatcaagtattcataattaaaactgagaataggaaacatagctgatacatactcccacaattgtttatgcatgctgtaaagagtctttattctgcatatatatgtgtagctcagataaaagatcttaactttgaaccatgtttgagttaatttgtatctgcagctcagataaaatattttaactttgagccatgtttcatttaatttgtagtatctgccaatgcttgctttctcttgccaccgttggatgggggcctcaaaatttgtgagctgaatggtacagttcaatgtagtccagggcaggccggttccaggaccagtcttgctccatgacccttttgcagagggagtggaaccaaccgcgggcttcaaaccaagaagagattgctctgttcagggcgtaatccacaccattacagtcagctccatcaaagctgaacccatttggttcaaggcctagaactcgagcccggtctttgtcatggtctacgtcgaaaacagtgtcgtaaagtcctccggttttccgaacaatagggatggatccatagcgcatggcaacaagttgagtcaaaccgcaaggttcaaagatggatggaacaaggatgaagtcagagccagcatatatcaggtgtgagagaggctcgtcataagttaaacatagtctaaccctgccatggttttcaccatgaagactatcagccaatctgcagaaatcactctgtatccgaggatctggagctgaaccaagcaaaaccacctgtnccattgcgttcaagtgtccgatgaagtgcatgtttaatgaggtggatacccttctgggctgtcagacgagtgatgattccaacaatggggacatcagtctgctgcagtccaaacctctgctgcaatgctctctttgcagcattcttgccttcaaccacattttcagaagtataatgcatcgggatgaagttatcagtatatggatcccagatatctggatcaattccattgagaattccatagaattttccacgatgaggagctatggcaccatgacctgcgacttcctttgaatacgtgtgagaaacagttgtggctttgtcgcagtatgtcattgcttttccaataaaatgtgctccaaactcaagattatggatggtaaatataagccgggc

SEQ ID NO: 20858 - DNA, 503 bp, Oryza sativa
  Clone ID: PAT_MRT4530_26186C.1
gggtgttcattcctatcctcgcaagcatcactcttttggaccttgatgaggaatacatcaactgcagacttaggttactcgagtactacacattggtgaagcagaggcccagctacaaggttgcaattggcaagttcttcggtgggtggaagaagtaccgaactctcttcaagacctcgttcttcctttgtgtccgaaccttgttcaggaaatactaggtggttcagcagacagcaatgtgtacagtgaattcaacctgaatatacgaccactacatcttgatgtgttttctgccgaggggttgtggttgatggctcctgatagttttcgttttagtttgtgaaatcaaatgcgtttgtttccttatatgtctctctgcttgcatgctcctgtccacagctcagaacttgtacatcataatgcttacacaatacatatacattttggttttgtttatttagctcatatggaattggaatatctctaatcagggttgtttcttg

SEQ ID NO: 20859 - DNA, 171 bp, Oryza sativa
  Clone ID: PAT_MRT4530_26187C.1
atggaggtggatcctctgccaccgcacggcacaggtgggtgcgaggtcaaaatggcggcatgggtggaggaggaggaggaggaggaagaagaagctatgcaacctgctgatggtggcctcctagttgtcttcactgttgaacacttccatgtgaagcaatggcaattatag

SEQ ID NO: 20860 - DNA, 249 bp, Oryza sativa
  Clone ID: PAT_MRT4530_26188C.1
atggtggcgacgttcgtcgcccgcgtggctcagatggtggccgccctcccctgcatggcggcggcggatccggtggtagggatgcgccgatccgatgacattcgacctcccccgtacggcggcggcggcggatctggtggtggggatgtgcggtgcggcggatcaggcggtagggaggtgcggcagtggcagatccagcagttgggaggcatggggacggtagatcttgctccccctcccgcgcggtga

SEQ ID NO: 20861 - DNA, 186 bp, Oryza sativa
  Clone ID: PAT_MRT4530_26189C.1
atggatggcacgacaccaaaaggtgtgttctatggcaatgggcggatcgaaggagtcaaggaggcgggagcagactacggctctgcaagcgagcacagcgtgcgaatggcaaccggcaattgccgcgaaaggctcacgccgattcgagaatcaggagggggcgcgttacgttctactgatccctag

SEQ ID NO: 20862 - DNA, 210 bp, Oryza sativa
  Clone ID: PAT_MRT4530_2618C.1
atgtctccgagttctacttggaaaccgcctgacctgcgatataaaagggaccccctggaggacctaaggcatcgaatctcggagccaacacaacccccacagcctacgaagtcggagcctgcaggagccaaatcgccgggagatctagtcgaaccaactcgattacgatcccgtcggtttcatcgagttccatcgtgggatgcgaaataa

SEQ ID NO: 20863 - DNA, 516 bp, Oryza sativa
  unsure (1)..(516): unsure at all n locations
  Clone ID: PAT_MRT4530_26190C.1
tttataagccagacaagccaagcgactaatatatagttagaatcagaaagaatgccaccgtcgtcggcggccaccaccggcggcgccgtccataaaccaattatcatgccgcccgagtcggagaggcagatcaataatcttccagacgtactgcagccccgccggcggtggcggtcctcgctcgccacgggcttccgctcggccctggcctgcaccatcgtcggcgtggcctccatctacgctccgctcgtcatccgccgccacctcaccttcccggccttctcttacgtagtcaccgtcatcgtagtcaccgacgccacgctgggcagctccctgcgcggcgccctcagcgcggtccacgccacggccatgggcgcagttccatcggtgctgccactctggctggcgcaccgcaccggcgccggggagtcggtgctggcgacgacggcngtggtggcgctgagcacgttcgcggtggcggtggcggggtcggcggtgaccgtggcgaagcggatc

SEQ ID NO: 20864 - DNA, 1246 bp, Oryza sativa
  Clone ID: PAT_MRT4530_26191C.1
tttttttctcgctttttctatttaacttatataattttttttttttttttttttatcattgttaaaactttttctttccattttaaattatctgcaaagtaagaaagtaacactcccaagttacaacagcacaccatccatatatccatgcaggcagcctgtttgtgcccttgtgcagatgcatttcatttatacaagtagaaggcactcaaatcagccaccacatgaacacacacatgttccatcatcgatcgatctacacatgcatcacccggtcatgcacttacaaacaaaagatctacttgaagaagtacgggaggtcgagcacgtagaggaggaagtaggcccagaggacgccggagatgccgccgaagaagaagccgccggtgaacttggcccagccgtcggcggtctgcagcttgtcggcctccttcttgcggccggtgagcgtcagcgtcggcgccgtggacggctcgccctcgccgaaggaggcgacgccgtacatggtgaggcagacgctgaggatggcgacgaggcctgcggcgccgagggcgccggcctggccgtgcaccggcgtgttgcggagcgggccggtgagcgcgaagggcccgacgaggaggtagccgtgggcgaggccgacctcgatgccgcggagcagcgggctgacggcggtgcggtacgccgggaggttggagaggtaccaggcgaccagcgggctggaggtcaccggcgtctccaggctgccgatgaaggggtcgccattgatgggctgcaccacctggtacgttggcttctcagactggatggccttgactgtgaagcggggcctccttgtcagcgaagcaccagacagccccctcggcttggagcacaccaagctgctcttcatcagctggctcgccatgggagcataagcagtggccatctctctcctctcgtctcttcctttctctccctagctagatgctctctctcccggccaaaaaaaatggatgtgaaacagccttcttggcaactgccctagaaattaaagtttgtgatctttacaagctgcaggagagaaaatctggagtatgtgtttgggtgggtccctgaagatgagatatgggtccgcgcgccgtggccctcctgccatggaggatgccagcaaccctatcccttatctgaattcctggagatccccctccttacgttggacgcctagctggcggtgccgcccgtcgcgccaagtggaaaacagaatctg

SEQ ID NO: 20865 - DNA, 329 bp, Oryza sativa
  unsure (1)..(329): unsure at all n locations
  Clone ID: PAT_MRT4530_26192C.1
ttgcacgctacttttcttggacctctagacggcgcgggggggggggggggagacaaaaatggggatcatgtttcatgggaggtaacttaccactttcattancccaatggctaaaatcaaaaaaatgacttccaagctatatgttgcacatacgtatccaaagggggggggggggggtatactgattaggcgtatccanatagcaatagcatggtaccgggaggcgagaaccagagttgaagaggagaacggcgttggaacaggacagaaaccttatggcgtcagctgatcctccaataattgggagacaggagatctggaattggagc

SEQ ID NO: 20866 - DNA, 409 bp, Oryza sativa
  Clone ID: PAT_MRT4530_26193C.1
tttttgttttttttttttttttttgttttttctttttttttttttttttttttttttttggcaataaactgggtgtccccaaaaactaaaaaaaaaaaggctttatttgtctttatcaacctcgcccaataaagtccgctaatttggagaccccttctgttacaaactacctggaaaaactaggttaccttacaggggggggctttggcttttgaaaggaagggccccacagtttgttacatactttacactttttttaaaaaccaccaccaacatgcgggacaaaaaaattggggattttcttccctcaacatccctataacttttttgccttggacccacccggacaggaacctcccaccgccaaaccgggttacacccagatgggccttacatgggtttggggggg

SEQ ID NO: 20867 - DNA, 379 bp, Oryza sativa
  Clone ID: PAT_MRT4530_26194C.1
atgaagagaatagtggaaagtaaactgaacataaagaaagtgaatccgagttgcttgttcgtgagagctattcccagttatgaatcaagtgatatgttcgaagataatctacagagtggtaacttgtatgaggttgacgccaaagatatgaatgataagaagttctagaactgaagccccatcctcaaccaccgcagcctagtctgagtcagttaaaggtgcaaccagggacaagtcgggtgaagagaagattccatctgcaacaggagatcgagccaagcagtccagagtggagaagtttagttagacaagtttgttatagaagacagagcggaagaagtcagacaagaagagaagaccgcccaacctatcttcttgc

SEQ ID NO: 20868 - DNA, 1347 bp, Oryza sativa
  Clone ID: PAT_MRT4530_26195C.1
atgccgccgcgacgccgaggcgcaccacgcggcgcggccgccgcccgtctcgcgccgtaccacaaaggctggctgtcgcgacggcgacggcgaggccggacgaacagacgcgccaggaacgacgacagagacggcaacggcggcgcgttctcggacgttccggacagcgtgctcgccaacgtcttcacccgcttccctgacgccgccgacctagtccgctgcgccgccacgtgccggcggtggagccgtgtcataaccgacgcggccgtcctcctctgccgttcgctgccgctgccgcagccggttttaccacgcttggccctcggcttcttctaccaggaggcggccgccggcaagcggaagcgctccgcggcggcagggcagacttgccgctttgtcccgacggctgccggcgctcgtctcctcggcccatccttgagcccgttcgtggaggacggcgagtactcccgcccggtcacgtcccgcaacggccgcgtcgtcctcgagctccggcgcgaggggcacgccgacgggctcaagctctgtgtctggaaccccatgacgggggacgtcgccacgctcccgcctctccatggcgacgacaagccgggagcgtacgcgtgcgccttgctcaccgccgacgacctcgacgacccgccgccgtcgtcgccaaccttcttccgcgtcgtcgtcgtctacaaccggcgaacgtacaccgcgctccgctcctactcgtcggacaccggccgctggagcgcggaggctagacgatcatcaggtcccaagatgagcagctacacgctccacaacctcaggcagagcgtcgtccatggcggcgtggcctactggcccctggcgcacacggcattcgccgtgcgcgccgacacgccggagcccgaagagatgccgatgccgccggccgttccaaaggcgccgccgcacgaccatctgctcggcatcagcccggacggcaagctgagcttcatcgtcacctcaaggtatttcgacggctccgccggagtgtcaagctgctaccaccttgctttcggcagcaatggcggttgtacgcgcgaacaggtgagcgtctgtacatggcgcgtcaggttgcatgagttgagagtgcatcgctctgacgccatgaacctgaggtggttttgcgagaggagtggcttgctcttcttcacaatcgacgccaaagggagcagcactcctggtgcttatgtgctcaacattgcaaccaaggagcttgagaaggtggctgatgacatcgactgtaggtcatggacgaacttcgttggatatgagatggatcaggcatcttattacctatcttccgtagcttgctag

SEQ ID NO: 20869 - DNA, 732 bp, Oryza sativa
  Clone ID: PAT_MRT4530_26196C.1
gtcatggacaccgtcgtccgcgaccccttctaccaccacataccggccttcttccaaatgtcaatgaaggaactcctcgaaaacaagcatccaacagcatggtctgaatttgagatgggtctaattgatgagaatgaactggccaaaaagttcttcaatgatggcaggtcttttgatttggaaggtttgaaagcatgcatggtgagggcatatgagtacatcgatggtgttgaagacattctttacagtttgaagcaaaataactatgaagtgcatgcatttacaaattatccagtgtggtaccagttagttgaggagaagttaaagctctcaaagtatttgtcctggacattctgttcatgcacagttggtaagcgcaaaccttcgcctgatttttatctacatgctgtggaccacctaaacgttgatccagcaagctgcatattcattgatgacaggatgacaaacattgaagcagcccttagtgtaggaatggttggtttgcaatttaaaaatgctgaggtgctcaagaaggatttatgctcgcttggagttgaatttgcacctgtgcatgaaggtgaaatacaagtccaataaggttgcactttgttaactcttctgctcatgtgtataaaattcatatatctgacccttctgtcttctgaaccttgtcaataacatgaagacccctgattgttgcagatataaactactaatatattttgtttattc

SEQ ID NO: 20870 - DNA, 1012 bp, Oryza sativa
  Clone ID: PAT_MRT4530_26197C.1
atggcgtccacatccgccgcggcccctgccgctgcagcggcgacggcggaggcgtccgcgtcccggccgccgaggaagctgccggtgctgctgttcgacgtcatggacaccgtcgtccgcgaccccttctaccaccacataccggccttcttccagttcagtgcatctcccgtcccttgtgatcggtgttggtgtggaatgtcaatgaaggaactcctcgaaaacaagcatccaacagcatggtctgaatttgagatgggtctaattgatgagaatgaactggccaaaaagttcttcaatgatggcaggtcttttgatttggaaggtttgaaagcatgcatggtgagggcatatgagtacatcgatggtgttgaagacattatttataatattaaacaaaataactatgaagtgcatgcatttacaaattatccagtgtggtaccagttagttgaggagaagttaaagctctcaaagtatttgtcctggacattctgttcatgcactttgaatcaaagtaactatgaagcgcattgcatttaccaattatccagtgtggtaaacgttgatccagcaagctgcatattcattgatgacaggatgacaaacattgaagcagcccttagtgtaggaatggttggtttgcaatttaaaaatgctgaggtgctcaagaaggatttatgctcgcttggagttgaatttgcacctgtgcatgaagatgctatgagggatcttgtgaaattgattgctattgcaaccattaaattgtctagctctattttggctgtgtagaggatttatgctcgcttggagttgaatttgcacctgtgcatgaaggtgaaatacaagtccaataaggttgcactttgttaactcttctgctcatgtgtataaaattcatatatctgacccttctgtcttctgaaccttgtcaataacatgaagacccctgattgttgcagatataaactactaatatattttgtttattcaaaaaaaaaaaaaaaaaaaa

SEQ ID NO: 20871 - DNA, 1044 bp, Oryza sativa
  unsure (1)..(1044): unsure at all n locations
  Clone ID: PAT_MRT4530_26198C.1
attcccactccaccccccctttcccccctcccctcctcgtgctccgctttctccccccaaattcctcgccgccctcggtcgtcgccgccgcctccgccgcctcgcctcccggagattcgccgccttcgccgccgccgccatgaatcccgagtatgactacctcttcaagcttctgctcatcggagactcgggcgtcgggaagtcttgcctgcttctgaggtttgcggacgattcatatctggagagctatatcagtaccatcggtgttgattttaaaatccgcactgttgagcaagatgggaagacaataaagctgcaaatttgggatactgctggccaagagcgatttaggaccattacaagcagctactaccgtggtgcccacgggatcattgttgtttatgatgtgactgatcaggagagcttcaacaatgtcaagcagtggctgaatgaaattgataggtatgctagtgaaaatgtgaacaagctcttggtggggaacaagtgtgatctagctgagaacagagtggtttcttatgaggctggcaaggcccttgctgatgagattggaataccattcctggagaccagtgcgaaggatgcaacaaatgtggagaaggcattcatgaccatggcaggagagataaagaacaggatggcaagccaaccggctacaaatgcaagcaagcctgcaaccgtgcaaatgcgaggccaacctgttgcccagcaaagcagctgctgctcttgattatcaatctagatcacaatagtgtgcttgtttgtgcaccaagcaacacttaattggttgctctatccctgtaaattaagtctattagtactatcaaaaagcttgatgtgttctgtgtcggatattattggaaaaagtctgtcccctaactgtaacgaagcggcagatgctgtgggcctgttttaactgcctgttcatatttctatgtttcaagtggcatcgatgttcgactttattcgattaatggttccacttgcaaactgtgctacgaaaaaaaaaaaaaaaaaaaanaanan

SEQ ID NO: 20872 - DNA, 705 bp, Oryza sativa
  Clone ID: PAT_MRT4530_26199C.1
atgaagagcaagtaccatctagaaaaattcaaagatgtgacagcaggagaaagaaacctggttttcaaggccacaatgaagagcaagtaccatctagaaaaattcaaagaaatgtcaatgaaggaactcctcgaaaacaagcatccaacagcatggtctgaatttgagatgggtctaattgatgagaatgaactggccaaaaagttcttcaatgatggcaggtcttttgatttggaaggtttgaaagcatgcatggtgagggcatatgagtacatcgatggtgttgaagacattctttacagtttgaagcaaaataactatgaagtgcatgcatttacaaattatccagtgtggtaccagttagttgaggagaagttaaagctctcaaagtatttgtcctggacattctgttcatgcacagttggtaagcgcaaaccttcgcctgatttttatctacatgctgtggaccacctaaacgttgatccagcaagctgcatattcattgatgacaggatgacaaacattgaagcagcccttagtgtaggaatggttggtttgcaatttaaaaatgctgaggtgctcaagaaggatttatgctcgcttggagttgaatttgcacctgtgcatgaagatgctatgagggatcttgtgaaattgattgctattgcaaccattaaattgtctagctctattttggctgtgtag

SEQ ID NO: 20873 - DNA, 2051 bp, Oryza sativa
  Clone ID: PAT_MRT4530_2619C.1
ggagcaccgaatccaaggtcgaggggaagaaaaaaagagaaaattccacgaataaaaattcaaaaaaaggaggaggaaaaaaactgaatccccttgcggctcgtgctccttctccccgacctcgaggcaaggcaaacccatccttccccctggcctcccttctccgcttcgccggctcacgccttccctctctcgcgaggcggccggcgagatctgcctgcgccgcgctcccgctcgcgccgtggtcaggtgagccccatctcccggcccgatctcgtgcgggtttcctgccaattcgggggggcagggcgaggtgaccttgtcgtgtggttgttgttgttgttgttgttgttgttagggtttcgtcgcgtgatggcgtcgtcggggaagatggaggggccgtcggcgccggcgatgcggcgggacccgtacgaggtgctctccgtgccaagggactcctccgaccaggagatcaagtccgcctaccgcaagctcgcgctcaagttcgtgctccccctaacctgtccgccctgctcttgctgctgctttcgatcgcgctattcagattgcagaatgtatcaccctgacaagaatgctagtaacccagaagcatcagaactcttcaaagaggttgcatattcatatagtatcttgtcagatcctgagaaacggaggcaatatgatactgctggttttgaggcattggagaatgaaggaatggatatggaaattgacttatctaatcttggaactgtgaacacaatgtttgctgcacttttcagcaagctcggtgttccaatcaagaccacagtatctcctaatgttcttgaagaagctatgagtggaacagttacagttgacaagcaaagtgctcatttttatggtgtaacaataagtgaagaacaagctcagtcaggcattgtagtcagagtcacctcagccgcacaaagtaaatttaagctgcttttctttgaacaagaaattaatggaggttatggactagctctcaggagttttggatgcggtggcatcgagtgctggaggacaggggtgctgtcgatatatccggctagaggagacaaggccgcctgtagagcgctggaggtttccgctattgtcagatctattccaactcctgaggttgccactgctgggctgggggagcaatggtgtgtcattgtctcattgatggatccatctggtggaggagaggaggaagatagtcagaagactggtaaggtgacatctgcaggcatgtatttcttgcattttcaagtgtatcgtatggattcaacagtgaatgcgttggcaatggccaaggatcctgaggctgcattctttaaaaggttggaaggtctccagccgtgcgaagtgtcggctctcaaatctggaactcatatatttgctgtatacggtgataattttttcaagccagctagctatacaattgaagcaatgtgtgcaaagagttacgaagacacaacacagaggctaaaggaaatagagtctaaaattctagagaagagaaatgatttgcgccaatttgaaactgagtacagaaaagctttagcgcggtttcaagaagtgaccaacagatacacccaagaaaaagaagcggttgatgatatgctgagagaaagggatgacatccactcctccttcacgaccgaacgaactatggtgaactctgttggagctggtagcagcagtagtagataccccactgagagtcccgagaatggtaacatagatggtaaagataaatcaagtaaaaagaagtggttcaatttgaatcttaataggtctgacaagaaagcttgagtaatctttcatcaaggatcttccgctgttgtacatttcagaagccctattgtatttgtgcgttgtgagctataacggttaccaattcttgggagttttgtagcattagaagttttggacacagaaagtcatgtattatccttctttaaattccatgttcctgtctcaccttttcttccaaaaaaaaaaaaaaaaaaaaaaaaaaaaaaaaaaaaaaactcgagcctcgc

SEQ ID NO: 20874 - DNA, 315 bp, Oryza sativa
  Clone ID: PAT_MRT4530_261C.1
atggggtctcaagaccagagggaggaggccaccccccaacaccacatggccctccctcgaggggagtctggcccgaggtggggtggcggccactccttcctagagactagatggaggaagctgccccccaatgccacgtggccctccctcgaggagagtcaggcccgaggtggggtggcggccactccttcccagagactagacggaggaagctgccccccccaatgccacgtggccctcccccgaggggggtcgggcccgaggggcaccccccgtgttaggcggcaagatttggcaggcctcatcatcaagatg

SEQ ID NO: 20875 - DNA, 248 bp, Oryza sativa
  Clone ID: PAT_MRT4530_26200C.1
gcgggaagtcttgcctgcttctgaggtttgcggacgattcatatctggagagctatatcagtaccatcggtgttgattttgggagtggaatttttccatgtgcataagtttgcacaaatgagccttttttttttctccttaataaccctttcactccatgtttgacctgctaaaaaatccgcactgttgagcaagatgggaagacaataaagctgcaaatttgggatactggtggccaagagcgattt

SEQ ID NO: 20876 - DNA, 301 bp, Oryza sativa
  Clone ID: PAT_MRT4530_26201C.1
atgacagttatggtggttggaatggtcgaaaataccctccaaccaccatagggagtgaatctccaccgttcccccaaaaccctgaatccatcagcactggcattggttcggccgaaccccctggttcggccggaccctaggctggcccaaccatcccacaagttggctggtggcctcctggacttctcctctccgcagacttgtgaattttggcccaattggtcgtgtcatttctatgttcttggccctttcatacacaagtctgattctcgacatcgtccgattgatttatcgtctgatt

SEQ ID NO: 20877 - DNA, 305 bp, Oryza sativa
  Clone ID: PAT_MRT4530_26202C.1
cgaaattttacgggggttttaattaccaatcaaccgctaaaccccggagtagagtagagtgatacgcgagcggattcgattcacttcacgctcacgcttgcggtttcctcatcctcgctggtgccacgtccttttcttgtcccgtttgattcttgcaagcctcctcatccagcttgtgctgctagctacgaggtcggctttggcggtggcggggggcgccttgaatccgaggcgatttggtgtctgactgattgatttgcctcacttggggtgggggggagttggggtttcttggtttcatcggg

SEQ ID NO: 20878 - DNA, 1653 bp, Oryza sativa
  Clone ID: PAT_MRT4530_26203C.1
atggaggaagagatccgcgcggagttcgagggcagcggcttctccataggcggcgccgaccccgggcgccgccgcccagatcctctccacgctgctgacctactgcatcaactacagaatgagccctgcgcaactcgtcgccaactggggggtctactccctcagctcgtctgcaaatggctcacctgcagcacacactaaaagaaagagcgctcgcttgacacacccaacagtaaagacgaaaacctcaatggagaattgtgtgactctgagcttgcacgactgaacactgataggttatcatcaagcagattgaccaaaacaaaaggcgaccgcattaccccgttctctcaacgagtaaataattttactcaacagtatgttcttaattctaataacgtggctagtgtgccaagtaaagacgagattgaatccacagaaaatgaagtaattcgaagagttcaacctagtaaaaggtgtaccttgcaagttcaacgctaacagcctgaaccaggttgtaggttcatgtatgacagaatagaagatagatttaattatttggaagataggataaggaggtctggaagcttgttttctgcatctgggctttgtggagaacctgcagatgctacccttgcttcagaggagagtatgttttcagttggcatggtaatttgtgatggggaaggtcatctaaatgaaaaatctatcttgctacaaggcagtgttgagcactccaggggacagcatgtacgcttagacttgaaggacgtagaccggttttccttgtttcctgggcaggtcgttggcattcaaggccacaatcctagcgggcattgttttgttgtgtcaaagttgaatgattccataccaaactttgttgatgctcaactgcctcgtgctaagaaacaagctgtggacagtgaaggcaaccaaagttctgacgttgtatcaagagtgctatcatcaatgggaccctttattgattctgatcatcctgaaataaaaaagggagctgttgataagagctttcaggacatatttcttttcgaaattctgagaaagcttcaagacttcacccagtatttggggcacaatgttcgtgtgattcttattccatccgtacgtgatgcccaccatgactttgtttttccccagcctgcatttgacttgaatttaccagaagacatcacgcatcagattacttgtctggctaatccaagcctattcagttgtaacgagatacactttggctgctgcacaatggatatcctgaaacatctgagtggtgaagaaatttctcgcaagccacctggtgaaaagcatggtgacagaattggtagaatttgcacacacatattgaagcaacaaagctattaccctttatatcctcctcctgctggtgtacccttggacttttcactcgctaacggagcactggagatcgcatcagctcctgacgttctcctgcttccttctgaccttgctccatttgtgaaggtgctttccctcgatgaaagtagcgaagaacctaagcgttttatttgcatgaaccctgggagattagcaaagggcattggtggaggcacatttgtagaactcaactacaacgaggacacagacaagacaagcgcctcccttattcgcatctag

SEQ ID NO: 20879 - DNA, 774 bp, Oryza sativa
  Clone ID: PAT_MRT4530_26204C.1
agagctattgctagcctctcccaagtgtttcttgccttctcccatcagcgcgttcaaatcctagattgttgaccagagaacaaccacaacatgctgggcaaagtgtcaatcggctgactcaggagcaggttgctgcaatgtttttaccaaatccaccaacagccgacccaatccagtcaatgccgattcagcaaatgttgccaagacagccgatggttcggccgattcaacagcaaaacttgcaacatgcatcggctaggctgaggaatcggccaaggcagcatgctgcaaatcaagtagttcatgagcacttggtccataatgtgcaggccaatcagtcagtcgtacctcaagttgttcctgaacatttggtgcacaatattcagttgaatttctagaattatcaaggaggtaatttgaattatcaatatcaggctccgtcacctcatgttcagtaccggcaaacaaaattgcctcaatatgctcctcagtttagatcagttcgagccgatacaacagcaaacgcaaggaatacctcagcaaaggccatggtctgatatgattgcagatgtgatgagggagcagtttgggttaaagccaaaggacactggaaacttgtatcggcatccttaccctgagtggtttgaaagggtttcattgcctagccgatacaaggtgccagacttctcaaaattctcagggcaagacaatgtttcaacttatgaacatgtcagccgattcttggctcaatgtggtgaggcatcggctgttgac

SEQ ID NO: 20880 - DNA, 661 bp, Oryza sativa
  Clone ID: PAT_MRT4530_26205C.1
attagccgccattgaaaaactagcaaaagcagctcacaggtagtattccagattcattaagtttgacagaccaagcgattgccctaagttataccaatattacattacccgatagttagcgaaatgttaggcttaatcgatgatgatcaaccgcttgaattagtgatggctctagcccaagcaaatggcgatcaagttatggctattatccaaaacattgcaacaaaaggcattgactggcaacaattgctaaatgatgtggcagaaaccttacaccaaattgcaatgttgcaattgcttaaacaagaaacaccatcagacacgccattacatttgctcgcaaaacagataccacctgaagatgtgcaatttttttatcagttaatgctcatcggcaaaaaagaattagcttatgcaccagaacaaagtattggtgtagaaatggtatttttacgtgccttagcatttcatcctaaacgtactgaagttacacaagtaaccacagataaaacaagtgcacaagcggtcgaattttcaagcaaacgatcaataaagccggcgcaacaaactgtgccggctaatattacagatagcacaaataatacgctaatctcacccgcacttgttgcaatgcaagcgcggaaacaattacaacaaaagg

SEQ ID NO: 20881 - DNA, 730 bp, Oryza sativa
  Clone ID: PAT_MRT4530_26206C.1
gtcaagaggaattgccaatgttggcataatatacaaagctacaatggtaccgtcacataccccaactccaatcggttgtctcattgcacgatgtctatgacaaacagattttgcaatacgaatcttcgaactggaggacgtacacgagacaacaatttgtggcaaaaagctaccactctgtgtgaaaccccacatcaattggattgctttttccagaggccgaggggaataagacaagcaagacaatgactgattggactttggatcagcaaaacatcacagcaggcaggcattcgatatatgatggctctacccaacatcagtgctgaggtcgacattgtctaggaagcagcaggagagctcttattctccaaaagcttcagctcctctttccaaccttctatcttcttcattttctcgagttgttcaggcttcaaattttctggatctccttgcacttgcgcttctgctaagcgtatctgtgataaatcaagacaaatttatccaggtcagatctaatttagtcccatggtggcagatcaaaatagcactgttaacatatactatggctgctcgcctgctcctagaggttgaaagcatggactgaatacctgagatgtcctaagaacataaaatcaatgattggttactactacattagattcttggcagttaccatgaataagttaaacttacaagaagaaaaactgattacaagtgcttataaaat

SEQ ID NO: 20882 - DNA, 517 bp, Oryza sativa
  Clone ID: PAT_MRT4530_26207C.1
aatgagaaatttggcccaaaagtgtttccagatgggataactataggacagattctattttttttctttcctttttccgtccacataacaaaaaaagaaaaaaaatagaatctgcccaaaagtgtatccagatgggataactatacgacacatactattttgtttctttcactttttccgaccacataagagaataaaaaacccctatttcagagtaaaatatatgagcacaatatctttggatttacatgaccaaaacccgtgctaaaaagaatttatgaaaagtcaatgcggcatgagaaaaaccaagacggagagaatttattcccgttttcacattacacttgatacaacagaaaggagccaatccctgtcttctgcacagacgtgacaggctttaaaacaccatgacgcattcaacacaagccctcaagggcaccttccaagcattatgagacgggtgaaaaaggatgtctagtcctaggagttgaatgggtgaaaaagtggatggcaaaaa

SEQ ID NO: 20883 - DNA, 4797 bp, Oryza sativa
  Clone ID: PAT_MRT4530_26208C.1
atggaggaaggagatgttctcgttggtgcggatgctgatggaagagggcagttgactgagctgttgttccgtgttgatgccataggggattcagtcctggaagtaaaagccttctggttttccattatttctgaggattttaagggatctattggacctgagggtgcagttgatgtgaaacagtctcttgtttctttgggagcaacaggaagaaggcctggtttcatgattcgattgtgcacctgtactggaaggccatcatcacttcgtaatcttaataactcaggtgtttcaatgacctgcaaaggctgtggtggtgaatcaacaacagacagagctgggccgtcgtgtagcagcaagctcaacaccatgggcttggagcttccaaggcctatagatcctgaggtgagatggaagaccgtaaacagaaggcaaagagctgcaaggagagcaaggacctctttctctggagaagacagaataagggatgaaattagatctttctatgcatgtggcaatgctactaatcaagaattggcacaagatgatgctcctgtttctgagtctgagaagtttggggtatctattcttggtcggcgctttagtgatcctgtgggaaatgttccaataaaaaagagaagatttcttatggattgttctccatcacctccacccactccattgctagtggatccatatgaaaaactgttgagcagatcctgtggaggtatctcgtcacatggaaagcatcataaggttaaaacacctagacttgattacatggaggaaacaaaagagcattttggcgtagatgatttttctggcatatcaatacttgcggctgctgcctgcacgagcgagttggatgatgacacgttgaatgtcgaatgttcgaagtcagcccactgtgttgaaaggaaaccagaaaatatcactggtagttctgaattgaatttcctaaataacatcaaggaggacatgctaaatagtctggatgcttcaaattgcaaatcagacccgctgctggagtcgtctgaatctgttcctgatacgaagcctgtggttgccactagattgaactgtgaaaatcttgttgaatctacacacactcagaaggactgttccgcgtctttttctgcattgagcagtgcaaacaaagcagatgattcttcaactgcttctgacacgaagtcttcaggtgttaccatgtcaatcaacgcaagtaatccagacaaatctgtaggcggcttgcaggatgcagttgtggaaactaagcattccaatggcacccgtgactcaagattgcactgggatcttaatgttgcaatggaggcatgggacactgactgtggtggtgatgatgttcctgatgcggctgatcctgatcctgttgcttttgctataagcagttgtagtgatgctgaaaatgtgttgaacaagctgcaggtgtgtcaagctccttttgactcaacaattgctggtaacattcctgatctttcagaggacaaaactcctgtgattgatgcaccaaaagatgcttctacaaagagcgaaagtgattttgctggtgacggttcatctcaacctttgtgcagcctgtctccgcaaaatgtaccagtattagaatcgagaccgctagaatgcgatggtttatctgcaggaacaaaggagttgcctgataacaatgatatctccaaagtaaaatcacagctagggtctgatcctgattgcagctctttgcctcctatgactgaacgttttgctttgaccgtaattgaggagaaacttgatgtttcacatgcctcagcccttgattgtgtaggtttgtcccagatggtttctacagatggctgtgatgggatcaattcagttcaaatgagtgaactgggatccagagtgaagcctttcacaagtaggttagtttctgaggaaagcacaaaccttgcaacagtaactgttttcaataaaagttctactgatcttggctggagcaatgataaacttgggcaaacatctcaacaaagcatatctgaattgaagaaccaggatcttttggatgttgattctggaactagtaaaattggacagtcaggtcacgacaaagttgaacatgtcaccaatgaattgagcatctccaagaaagctgcagatgtagatgatgatttggacctctccgattctcatatgaatgacaacccaggttcttctgatcgtgctccccctatcaattcagaatgcataaaaccatcaactactgacagggacagcattgccgattcacaatctgcagaacaaagctacctcgggaaggttctatcgaataattttatggagcactgtaatgaaacggaggcacctcatattattaaagatcttgctgggactggaaatattgttgctgaagaggatgattctcaatatgaggatggggaactaagggaatctggcgagtattggggagatgattgttatgaagaagttaaacctgccaattaccaggtgttagattgcaagagtgatgccccaggcatttctcccttccctcttggctccatgtcaaagaatacaggtgatcgagttgctaatttcaatggaaaacattccaggaatggaggtggtgatgtttcaccagccgcattgaagtgttcatggtcaactacctgcatagatgatggatctggaacgatgtgtgctggaagcactggtgaaaaggctcttagtgttcacttgagagttaatggggagactcgaatgtatgagatgaatccaggccatgtaatagctggatcttccgcaacagtcaaccagtctgaaagggtcaatgatggtttaggggacgatctttcaagtctgagaacaaagcccacaggatgggatatgttacctgaagatcagcggcattctcaacatgattcaagggacacagttgattcatctaaccggtgtgttttgagcacatcagatacagctggaggtggtgaatcattgcgccatatggagttatcaagtggagatatgcaaccacgagctgatcggccaagatcatttgacagagcccacataaatgagttatgcagatctgatgatggttatggctcaggttcaaaggctgaaagaaccattgatattcgtaaatcacatgaaagaggtggagcatcacgacatattcaaggtagcagccgggtggaacagtgggtggaaaattcaaacaattctcgcactacctggcgcaaatcacctgattattataattacggactgcctggtccaaggaatgctgcagaagctgctgttgcaaagatgcagagcaatggctttgttgttgcacctgatggcaccttggtaaaggcggttgatactgcaaatgctagtaaaatggctaggagggtgagaaacaacactttgagtagctcataccgccctttatctggacgtggttctccaattgacagagatggaggttgtggggtgtctagaggtcctgcacatgctagggaagcatccccagaaagacgcttcagtactagtggtaatcgatctgttagatatgggcctgatatggataaagatcatgctaatgtaaatatgagctcagctcgttgctcactggccagtagacaaaggaggttcccgcaacatagagcctcacttaacctatcacgtgctcacagccgatccccttctggttcaaggtctcgatctccgcatgcttggacatcacctaggaacagaagggaagttatggtgaatggtagttcaagtttatggaggcatagtagaagtagatctccgcctaattacatgactgaagttagaatgggaagaatgacttcgccttctagacaacctggatttggtgatcgagttatgcgttatagcccttcatcaagagatcgtgcttactctcaacatgcttctacatgggctgatgggaggaactgctcaactgttgatcttcctgatcataaaaagcgatattcaaggaggagcccacccctgagagttacctcaagaaatgacaggtttgatgtggactcccatggacggccaaggtctggagagttgtatcgcccaacacagggaagacttccttatggcttcgaaagggggaggggaaataggcatgatgggaatggtgatgatcaaagggagtatgctgatagatatgaaactcattctgccaagccatatgacaggaatggtgccacaaagcagttcagaaatcatacaggagataaacttcgtccatgtatttcggctcccagatccccagaaccccaaagaaggggaagccctcggagatttgacaggggcttcgggaggcagctgggtgtggatttgcctcgtggaactaaagaagataataaaaatcctttcagatatgattgaatgggaaagcaaacccatgctggaagcctggaattgaatcataaggctcactgctatttgacacaggattaccttgacagcattgcttgttgttctgcttctgcatctgtgctcaagccacagaaaagctgaaatcgtgcacttgggagggatttgcagattaactttacaattttcttcttttcgtttgtaaatatttatatcggtagtagatcacaatcactgttttacagctttatggctgttctttttttatttattatatttacttcccccctcgttgcactcttttttcaatggacattatgcctgtatgaggtccatttaaacatgatcaatcaattaattttgaactgaagcttgtggataaaaatttatgtttatgcctttcattggcatttttgtacc

SEQ ID NO: 20884 - DNA, 603 bp, Oryza sativa
  Clone ID: PAT_MRT4530_26209C.1
atggcggcggacggcggcgacggcagcggcggcggcaggaagacgccgtggacgcaggaggaggacgaggcgctgcgtcgcgcggtgcgcgagcaccggcggcagaactgggcggagatcgcgctggcgctgccccggcgcgggcccaagtcgtgccggctgcggtggtgccagcacctgtcgccggagctggacagccgggtcttcaccgccgaggaggacgcgatcatcctcgcgcagcagcgcgtgcacggcaacaagtgggccaccatcgcgcgctgcctccccggccgctacgacaacgccgtcaagaaccggtggaactcggcgctccgcaagctgctgcaagtgcaacacgccagcggcgccggctccccgccggccgctgccgccgccgccgccggagacgaccgggacgatgccccagtctgcctccagctgttccccgcgagggccgggggcgtgaaggaggctggcttattcgccggtgagaaggatgtggaggaggaggacgtggcgaccagcctgacgctggggttgccggtgctgtgcgaggcggagctggagctcaggctggggcctgcgtggccggccaccgcgtga

SEQ ID NO: 20885 - DNA, 1063 bp, Oryza sativa
  Clone ID: PAT_MRT4530_2620C.1
ggaaaaaactgaatccccttgcggctcgtgctccttctccccgacctcgaggcaaggcaaacccatccttccccctggcctcccttctccgcttcgccggctcacgccttccctctctcgcgaggcggccggcgagatctgcctgcgccgcgctcccgctcgcgccgtggtcaggtgagccccatctcccggcccgatctcgtgcgggtttcctgccaattcgggggggcagggcgaggtgaccttgtcgcctgcgccgcgctcccgctcgcgccgtggtcagggtttcgtcgcgtgatggcgtcgtcggggaagatggaggggccgtcggcgccggcgatgcggcgggacccgtacgaggtgctctccgtgccaagggactcctccgaccaggagatcaagtccgcctaccgcaagctcgcgctcaagtatcaccctgacaagaatgctagtaacccagaagcatcagaactcttcaaagaggttgcatattcatatagtatcttgtcagatcctgagaaacggaggcaatatgatactgctggttttgaggcattggagaatgaaggaatggatatggaaattgacttatctaatcttggaactgtgaacacaatgtttgctgcacttttcagcaagctcggtgttccaatcaagaccacagtatctcctaatgttcttgaagaagctatgagtggaacagttacagtgagacctctcccagttggatcatcagcaacgggaaaggttgacaagcaaagtgctcatttttatggtgtaacaataagtgaagaacaagctcagtcaggcattgtagtcagagtcacctcagccgcacaaagtaaatttaagctgcttttctttgaacaagaaattaatggaggttatggactagctcttcaggaagatagtcagaagactggtaaggtgacatctgcaggcatgtatttcttgcattttcaagtgtatcgtatggattcaacagtgaatgcgttggcaatggccaaggatcctgaggctgcattctttaaaagggttgaaggtcttcagccgtgcgaagtgt

SEQ ID NO: 20886 - DNA, 385 bp, Oryza sativa
  Clone ID: PAT_MRT4530_26210C.1
aatgtggacactctgactcaaacagcataaagatgatccaggttccacatgcggaccatcacgacatgagtgaaggattgtaataagttgcactcgaacgtacgattgtagatgagaaacacatgcgtaccacaaaagggaagtgaaatactacaactaaagcagatctattaggattcaaccaactagaacatgtaagggtaacggaacaacacatgcgggggtcaaaaattaacagcttgtcctataaatcggacaggggagtcatttgctatttgagacaaattatcttgtggatatacatgcaccagggttgagggctgcccgccaaatttaagaggagcacaggtcatcatgtcccaatggtctaacacacactgtgtga

SEQ ID NO: 20887 - DNA, 204 bp, Oryza sativa
  Clone ID: PAT_MRT4530_26211C.1
ttccccgggactgtcgtgcgccgtgattgggtggtgcctgatgaggtggcgcccttggaccaggtttcaacgtcgggggcggagggacacgtgtcgggatcccgcgcgccgccgtgcttttcatgtcaaaactgcttcggggtggtcgttttcgggggtggctcgctgctggaacgagggcacattccgcgtcgtgawyagtag

SEQ ID NO: 20888 - DNA, 527 bp, Oryza sativa
  Clone ID: PAT_MRT4530_26212C.1
cggggcccaatttaattaaggggtttggggaaaatttaacttttcctttgaattttttccctcccttgtttaaatctaacccggtgggggggaaatcattgaaaacttgtttaaagggtcccaaattttttttttggggctttcagcgcaccgacggggcaccttagttggagatgattaagtatttacgggcccaaattctccagttttgaaaaatttttcgttgcttttttagtagggtgggatttggggggaaaggaaaatgaaactaatttttttcggctgtaaaaccccccttttcctggacaaccgttgaggggggtaaaaacaggcgtcccatttatatgggaaacgagagctgccccttaaaaaggttgttgacgtcggggcccagcgaaatggggggaataacgtactctttgcggggggggcccttgctcagctgtttggggcccaacacgatgaggggggcaaacacccgggggggagggcttccgttttcggtctgccccccctccccgggggga

SEQ ID NO: 20889 - DNA, 461 bp, Oryza sativa
  Clone ID: PAT_MRT4530_26213C.1
tttttttttttttttttttttttttttttttttttttttttttttttgttagatcaaagaacactttcatactatagatgaactcacatactgaacaattccacatgcacagcatgtcacatttaacaaaaaaacaataaggatctcgttactgcacaggttcaactaaaacacagctctgtttagctcattggctgttaacaatcagctactgtccacttctctcatcatttacaccatgcgtactcttaactggtttagctcacgcccgtcagaaatcagcagcaggtcacttcttctccttatcaatttacaccattgtatgctcaagttgtaagtcagcataatacgtggcaatgaacatcgcttcaaaaaattcatcaagaagcccagaaaattgttcgttgaccatattcccgaaatctttttcagagaagagtagttttctgccctttaccacc

SEQ ID NO: 20890 - DNA, 210 bp, Oryza sativa
  Clone ID: PAT_MRT4530_26214C.1
atggaggctcttcgtcaggaggtcagcaaggtagaagcagccgctaagagagacgcacaacggttcgcgcgggagatggtgaagaccactaagtccgcaaagaccgtgtgccgcacgctttgccttgcccttaccgacatgtgggcgaaggtgcgaggagtccccgacgaagatgcttctgcctttgacttctcggagtggactcaatag

SEQ ID NO: 20891 - DNA, 1913 bp, Oryza sativa
  Clone ID: PAT_MRT4530_26215C.1
atggcggcggcggcggtggaggagggaggcggcggtggtgccgtggcgcggatcttcgtgggtggtatttcggagggcgtggcggccgccgacctggaggccatgttcgcctccgtcggccgcgtcgccggcgtcgagttcgtgcgcaccaacggccgcagcttcgcctacgtcgacttccactgcccctccgacaaggctctcgccaagctcttctccacctacaatgggtgtaagtggaaagggggaaaacttaggctggagaaggctaaggagcactaccttactcgcctgaagcgtgaatgggagcaggaagcggcagcggcgcaggaaatgccagctagtgctgatgtggagagcaagaaggagaagctcgagctgaataaggctgttttggatagtacgaagattaacatctacttcccaaaactgaggaaggtgaaagccttgccttttaaaggcactggaaagcacaaatacagtttccggcatatcgaagtcccttcttacccaattcatttttgtgactgtgaggagcactgtggacctccagaggcagctaatgatgaatatgcttctgttcttgatgctgctgcatatgaaaaggagcgcagtattatgaattctgtgatgagcaagctctttgagaaggagaatgaccatttagattcaatggaaattcagaatcatggtgtcgattttgatgccgcggaaccctctaacgccaggaatgagttgcaaatggataaaagagaagaaacttctgaggaagatttggatgaccaaatggaagaaacagaagatccttctgaggaagaattggatgatctcgtgcttaacatcgtgacttgcaagccaaaaagctctgtagcacaattgaatagcgaaaagcaagcagcggataaggactcgcgcttcagaaaacgtcaacaatttgaagaatcttctctgcagaagaggcataaatcctctgatttctctgaaactagaaataggaaacagtctttccctgctatatcaggagccatccaaaatgaacaaaaatcttcagatttgtcaggaaaaggtacacatgagttctcatcagaactcgatggagataaaagttctgctagtgtccaagatgttgaagcactagcagattcttctaccagaaatgggagtgaacaaaattcgcttgctagtgaacctaaaagagtttccttgtggactcagaaatctgcctggagggatcttgttggtggcatggggagtgcatctttcagtctatcacaaatattgccaaacaccaatccagcaccaccaaaagtttcaaatgctaccgaggcctctgcttcacatgctgagtccaggacgaaagtgaaaccaagcgggaaatctttgaaaccctcggaagctgcaactcagctcttgcctgagcagaagatgcctacaagttccatggcaatgctgtctagtgagcgtaaggagaataataagctggaaaaggagagggtggttccaaagatcactattggtgaagtgtgtccgttcatgagaaattcagagtcagaaaagcaatggtcaaaggcaaagaaggttctgactggtttcatcaagaagggcaatgagagcactggatcgaatgtcgggaaagggaagccatcaacaaggagataacaacgtagcatgtcattccagcttcatcttgttgaactacaagctcggtagcatgtcattccagcttcatcttgttgaactacaagctcggtggtttcgtgtctcataggaacatgtgttattttgttgattggtctcatagtctgcctgttaagaatgatctgtctttgtttgtgaagcacaatgctacgtacgagttttgttcaaattgttattattctttgtacgagcaatttaaagtcaaaacctcgtgc

SEQ ID NO: 20892 - DNA, 472 bp, Oryza sativa
  Clone ID: PAT_MRT4530_26216C.1
gccaacaaagctggtgttatattaagtaggggaggaaaaagtatttacaagatgaagtgctatattgtatgtaggaaactgtaacgtgttgagaaaaaaaaaaagaggcagcaacatcctagtcgtacggctcgtctaatcaaccgtacaagagggaggattgaagccttgaaggatctgaaactaaaggaaggactattactggtaaatcccaatataggagtgaaaacaagacgtaataaaaaggatcgacgcggaaagttccgattgaataggatctagacaagggagatcatttgccattcgttggttattagaagcatcccaaaagcgtctgggtcaaaatatggcttttaaattaagttccgagttagtagatgctgctaaagagggtgggggtgtcatacgcaaaatgcaagctgacccatagaatagaatggcaaaggcaaatagagctcttgcacattttcgt

SEQ ID NO: 20893 - DNA, 422 bp, Oryza sativa
  Clone ID: PAT_MRT4530_26217C.1
ctggggggaaatcaggggggcaaactggagtccattgggaatcaccaaaaccattttcacacactaattattggccagacacttggatcactaatgatgcatccgccgattgggaatcaaacgatcgaattaatcaggataaagcctttattattcataaaaaatcatgaaaaggccacccctaaaataaaattttttaagagctagggactaaaataatatttggggggggggattacaatggcaataaatatcattatttttgggaataataacacgtaacgacttttacctcggaaccccaaacaagtagcccaccccatgagagcaacctactggtacccttttggcctttacgggggtcggggtgcccggcccaccaggccccgggttttccccccccgccccggtcaaaacccccc

SEQ ID NO: 20894 - DNA, 491 bp, Oryza sativa
  Clone ID: PAT_MRT4530_26218C.1
cagagaaacgtgcccacaattactagttccctgctatctagggtgcttgctatctcagctcccagacgatcgatcgagcgatcgagctagctagtgtctgcatatagactgatagcgagtgggataagctggacagcgagggaagagaatgcaacgagatcaccggaggagctcgccgccggcggccgccgccagcagcgagaggtcgtcggactccgccccaaacaccgacgacggcaaggaaggggtggatagcgacgacgaggagatagtagggagggttgcccggagttcgggcttggcgctgccggggacgtcgacgtcgggcagaggtagtgttcgggtttgccggtgacgcggcggcgacgtgcggccgtgacgtcgtcgtcgtcgcccgcggcgcagtgccggcgtcgccggcagcagcagcagcgggcgccgcctcggacgcagccccggcgacaaggagcaccggcgcctcaaaagattgc

SEQ ID NO: 20895 - DNA, 1336 bp, Oryza sativa
  Clone ID: PAT_MRT4530_26219C.1
gagcgggaggggaagaggccgacacagggagagagcgccccgacgccgggggagatgggccgagagaaattcggcccatcgaccccgggggaggaccggccgggtacacaaacgacaatgttgacattcagatccacgtcacagggcccgccccgctcctaaactatccaaaatcaaaagattacactagggtgaatccggaagcgacagaggccgtcacagggcccgccccgctccatcacgcccacccttgcctggatgagttgactagaggaaagctacactacaagcccagccgttgcccacgctggcttgtggttgctgacgtcatcaaaggggggggggggcggcgccggcaagcgggccccaccggtcagcggcacaagggggagggcggttcaccgtggaccgggaccacgcgggtggtccaccgccagtccacgggaccgaaggcccagatcgccctcggggccgatcggacgggcggtggcgacccagctcggctcaagaccggccaagcggccacggcgacggcgacggcgcgcgcacacgcgttgccggcgacggcaaccggcggcggagacggcggcgcaaaggcggcgccgacgggcgcggcggctaagagggagagggaggggaatagaagggagaggatgcctcaccgagggtggccggcgcggaggaagacgatggcgaacggcgatggcgagccacgggaggacgacggccaccggcggaagggattcggggtgccctaaggaaggagaagagagagattagagggagggagatgaaccacggcgaccggcgcgtatggccgaaggcggcggtaggggttgaactcaccggagcgcgaggggatgcaaattctggcgacgaaactcgacgggcaaggggtggccggggggccggacatggccgggagaggcgagatttcgccggccaacgtggggagtgggggaggagagagaggcgggattcgaaaatcgaatcccggccatctcgggcgcgggcgcgggcgggagagagaggggagtgggcgcgggggacgcagcgcacacgcgggtgtgggcgacgtggcccggaggaggcggaggcgggggcgctgcggcggcggtttcgggcgcggcggcgccggctagaggaaggggacgggtccgacaggtggggcccacctgtcggcgtcccggggagagagggaggggcggcttggtgtcacaccccgaagttctcctcccaagcctaaaatttagtttataaacgaccccaaaaaaatgcaggtgcaatcaagagaaaaccctaagaaagtaatgcaaataataatcggaatgggcat

SEQ ID NO: 20896 - DNA, 1608 bp, Oryza sativa
  Clone ID: PAT_MRT4530_2621C.1
atggcgtcgtcggggaagatggaggggccgtcggcgccggcgatgcggcgggacccgtacgaggtgctctccgtgccaagggactcctccgaccaggagatcaagtccgcctaccgcaagctcgcgctcaagttcgtgctccccctaacctgtccgccctgctcttgctgctgctttcgatcgcgctattcagattgcagaatgtatcaccctgacaagaatgctagtaacccagaagcatcagaactcttcaaagaggttgcatattcatatagtatcttgtcagatcctgagaaacggaggcaatatgatactgctggttttgaggcattggagaatgaaggaatggatatggaaattgacttatctaatcttggaactgtgaacacaatgtttgctgcacttttcagcaagctcggtgttccaatcaagaccacagtatctcctaatgttcttgaagaagctatgagtggaacagttacagttgacaagcaaagtgctcatttttatggtgtaacaataagtgaagaacaagctcagtcaggcattgtagtcagagtcacctcagccgcacaaagtaaatttaagctgcttttctttgaacaagaaattaatggaggttatggactagctcttcaggagaggaggctgcaaggaccagcatgcaaggactctctgtcagggaaggaaggcagtgaaaccaacagtgtgacaaggagttttggatgcggtggcatcgagtgctggaggacaggggtgctgtcgatatatccggctagaggagacaaggccgcctgtagagcgctggaggtttccgctattgtcagatctattccaactcctgaggttgccactgctgggctgggggagcaatgctctcttgcatattcaagaaaaataataacctccagtttttttccgcacttccaggaagatagtcagaagactggtaaggtgacatctgcaggcatgtatttcttgcattttcaagtgtatcgtatggattcaacagtgaatgcgttggcaatggccaaggatcctgaggctgcattctttaaaaggttggaaggtctccagccgtgcgaagtgtcggctctcaaatctggaactcatatatttgctgtatacggtgataattttttcaagccagctagctatacaattgaagcaatgtgtgcaaagagttacgaagacacaacacagaggctaaaggaaatagagtctaaaattctagagaagagaaatgatttgcgccaatttgaaactgagtacagaaaaagagctttgatcgagttaaatggtgtgcaggctttagcgcggtttcaagaagtgaccaacagatacacccaagaaaaagaagcgtcttgcagtctgaacgttgactctgaattgtgtgaatccatggttgatgatatgctgagagaaagggatgacatccactcctccttcacgaccgaacgaactatggtgaactctgttggagctggtagcagcagtagtagataccccactgagagtcccgagaatggtaacatagatggtaaagataaatcaagtaaaaagaagtggttcaatttgaatcttaataggtctgacaagaaagcttga

SEQ ID NO: 20897 - DNA, 1192 bp, Oryza sativa
  Clone ID: PAT_MRT4530_26220C.1
gccgcaggccgaggcctagccaggccgccccgcctccctcctctcccggggtcgccgacaggtagggcccacctgtcggccgccgctagggtcgccgcagcgccgcgccgccgtcgccgtcgggttcgcaaggacgaactccatctcgtccgccccttccccgtcgggattcatcgccggaattcgcatccccttgcgctccgggcaccccgaatcccgtcctccggttgccgtcgtcctcccgtggctcgccgtcgccgttcgccgtcgtcttcctccgcgccggccaccctcggtgaggcgcctcggcgccgcctttgcgccgccgcctccgccgccggttgccgtcgccggcaacgcgtgtgcgcccgccgtcgccgtcgccgtggccgcttggccggtcttgacccgagccgggtcgccaccgcccgtccgatcggccccgagggcgatctgggccgtcggtcctgtggaccggcgatggaccacccgcgtggtcccggtccacggtgaaccgccccccccctgagccactgccgagtgggcccgcgtgccggcgcccctttcctccctctcccgagtttctccgaggagtaggcttcgtccataccgtcgaggatgcctgtggagtggtgttcccgctgcagttctagtcaaggcttagctcctgttgtctttcgtttttccgctgcatttataattctattcgggaatttctgggcatgacagggaagtcccctactccggccagccgcgggcgctcttccacacgatcctcctctctcccactggacgcgccacaaatccactcactcggcctccacccagcgagggggcggggaggccgacggtgggcccccgctccggccggttgcaggcgctcctcctctctcccgttggccccgcgcgacgctcctctccaccgccaccgtgccgcaaatccgctcgctcggtctccgcccggtgaggctgtgcacaatcacgaaccggacacagcccatgccgcacaggcatatccatcctgatctgaccaccaaaaccgatcgatcgatcattcttcgcgacctgccctgcagtagtctgcacgcgtgcgacgacgacgcaaaacgcgacggcgatttcgtcaagttttttctcttcacccgcgcagcgccatgcatgcgtgcctgcatcctcggcggatttcaggcca

SEQ ID NO: 20898 - DNA, 414 bp, Oryza sativa
  Clone ID: PAT_MRT4530_26221C.1
gcgtcgtcagtcagcaggtgctctaagaaaaacgggagcaacagcaccgagaggatttgccaccggtgcatgacggacactctgcaaagccagcaccacagccatcgcacagcaacagctttacttaattaggctaaggctttctgtataagaattgcttataaaagattccaaaagatagcaatgtggcgatgctccattctgagcgttgccgatcgatcacagctgctgatgtgatcagctctgcttaattagttagatggtggatcagcactgaaataagatggcgagggcgccattgccaaattcaccgaatgaggagacgtcagtgggagcttgatgtggacacgagatgtgttgttctgttggagagcctgaagaggactacagcatttaaacttgtgcgcctgtgga

SEQ ID NO: 20899 - DNA, 1008 bp, Oryza sativa
  Clone ID: PAT_MRT4530_26222C.1
atgcggctatgcaggagggtggggcgagcggccatggagcaagcaccacacaactttgctactctgaaaaatttaggtgaggctgaaagagatggcaacaatggccttcttgtggtggcggcgggcacgtgtggcagtgcggatgccggcccgcgggtggcggagttcgccggcactcgcgtggtggcgttgcggcgcctgctggcttcggtggtcggtggggctctacaccttttgagggagtcaagcctagtctggtctcctaggatcggcgacatcgacgcctgcgggcgccgtttcctccctggagcggcttctgtcgttgttcacctccttggaggcttcgccgaaggtcttgctcctccctcgcgggaacaccactccacaggcatcctcgacggcacggacaaagcctactcctcggagaacccgccatcggacacatactcatactctggggtttcacccctgtccccagcgggcgacgggcagtcccctctcgtgcctaggtggatccggaagcgacagaggccgtcgcagggcccgccccgctccatcacgcccacccttgcctggatgcgtcagctagaggaaagctacactacaagcccagccgttgcccacgctggcttgtgggctgacgtcatcaaggggggcggcgccgataggcggggcccactgatcagcggctcgggagagggaggaaaaggggcgccggcacgcgggcccactcggcagtggctcagggggggcggttcaccgtggaccgggaccacgcgggtggtccaccgccggtccacgggaccgacggcccagatcgccctcggggccgatcggacgggcggtggcgacccggctcggctcaagaccggccaagcggccacggcgacggcgacggcgcgcgcacacgcgttgccggcgacggcaaccggcggcggaggcggcggcgcaaaggcggcgccgacgggcggcggtgctaaagcgacggctaacgggcggcggcgctaa

SEQ ID NO: 20900 - DNA, 410 bp, Oryza sativa
  unsure (1)..(410): unsure at all n locations
  Clone ID: PAT_MRT4530_26223C.1
tggagtncagattttcggggctgggaccactccatggcggaaggcgcatcatgaaactcccgccgcctcggcgttcgccaaancgcanccaanaagcttcatcnnaccgcngaangcccgcagcccccggcggcnccgtttcgcctcattgtcacccgggcaaaccaccgncgcccccgtccattctcctcnnggacttgggggggctccnccccgnangggcatnnccnggnactggggggccttccaaangggccaacgnancntgcnccaaaactcccgcanagttccncnttctttccccntttccnnacggnccaantcccccccntncccnggtngccnaacnctnttttcnttttttggggcngnaacccgggnaccttntttannnggntgnnanctcttcc

SEQ ID NO: 20901 - DNA, 1120 bp, Oryza sativa
  Clone ID: PAT_MRT4530_26224C.1
gcacgaggaaaaaagaatgcagggcttcggctcggggggaggagtggcgtgaatccgctccaccaccggcgtcgcctcgccgtggcctcttcctcttcctcttcctccgcgtataaatagattcccctcttggggccttgcctttcgctgtcagcctcagccaaactcttctcttctcttctgcctacttcccacgccacccccaccctcgccgccgattccgattccgattgcgctcgcccatggcggccgccgctctccgcgaccagctcaccgctctcctctcctccatgttctcccagggtttggtggacgagcagttccagcagctgcagatgctgcaggacgaggggggcaccccgggcttcgtctccgaggtcgtcaccctcttctgcgacgacgccgacaggatcatcaacgagatcgccaccctgctggagcaacccgtcgtcaacttcgataaggtcgacgcctacgttcatcagctcaaaggcagcagcgccagtgttggtgctcagaaagtgaagttcacttgcatgcagttccgtcagttctgtcaggacaaaagcagagatgggtgccttatggcattggctgttgtgagaaacgacttctatgatctgcgcaacaagtttcagactatgcttcagctggagcagcaaatccaggcttatgatcccaagcagcaataattgaagcaaaagagtgtagctgcatgtgatctcacatgataaatgtatctttgaagatgtagaccatgttcaatgggcttctggcttagagtgtgtgcgcgtgtgcagaatcaaatcatttggtttgaggcttcatgcttccaactttgagctcataaccctttaattgttagtgacaactgatcgtctagtgtcgatgtacctgttacctgtctgtgttcggttgtctgccacctttgcaaactcttactggttgtctggtgacttgtttagctggcttgtgactttaggaagggaaagtgtgtgaaattgcaccataatttctgacttaagagttgtgaagtcttgatgctgggtggtatacaagtctataaacaacgatcaccctgtttaatatcaaaaaaaaaaaaaaaccgtattcagttttg

SEQ ID NO: 20902 - DNA, 246 bp, Oryza sativa
  Clone ID: PAT_MRT4530_26225C.1
atgaaggcagcgacaggggtagccgccgacgaagttaacaggagggcgtcgggcggcggacgcagggaagcagaagaccgcgttttctttttgatagacagaatgactcaacgcgatggtgtattgatcatggagcattacatgcataggcctctatcttccatactcactctaccgatttatggaaacatgaccggaaaccatgatcgggagaaggaaagggagccggtgatagaggagacatga

SEQ ID NO: 20903 - DNA, 603 bp, Oryza sativa
  Clone ID: PAT_MRT4530_26226C.1
atggcgggtggacagtcgctggagttgtggaccacgagacggtggcttgtcgggcgggcgggcgatggacggagcggcggcggcggtggtggcttgtcaccgtggaccacgatggtggtggtgtcgtcgacggtgtcgcgcagccatgcacgaggagctcaggagggcaaggcgactccgcagcgtagcactgagctccatcagcccagatccagagctccgaattggccacgacgggcggccagaggacgagctatggcagcagggcggcggcggtggcctgacgtggtcgcagcggcggagacagtgatggctcggtggaaggcgtcgccggagaccactcctcgcttcgcgccgccgcctcgaggccgagacgtgcccgccaccgccgccactccaacacccgcaaggaggagctgctcccgcgcctgtcgcccgaggtctaccgcccaccgccgccaccactccggcacccgcccgctgccgcctccactcgagcccccgcctgccaccggctcatcagaagcctctggggcgcaaattgacccagctatgcaccaacaaggaaattattgtgtcgcgccctctgtccctaagacttag

SEQ ID NO: 20904 - DNA, 351 bp, Oryza sativa
  Clone ID: PAT_MRT4530_26227C.1
atataaattgtgatttgaataatatcgattaatgttatgcaaccataactctactaccataccagtgcttttccaaatatggcattttgcatgtacacgaacaatacctatgaggcaatacaatgaattggggatcataacttcatttcccaattacttaatacagaactccgaaaggataagttccggaaaactgtactttgagaagaatccctctgtttctccaacttgacgaacacactaccatcggatatacctctgacactatccttgggaaaatatcccgtcttataaattcgaagaccataaaatagcccccactcctttaaagcctgcaccccatgattgggg

SEQ ID NO: 20905 - DNA, 283 bp, Oryza sativa
  Clone ID: PAT_MRT4530_26228C.1
ggttgctggccgtggataggactttacgctccaacagatgggtacttctctgtagaacctactgtacgcctggctgccacaactggtccttgtaacatctgcttctggtatggcgagatcagtgggggcattccatattagctttgcgcaagtgattgctccgtcagggctcgtacacatgtcagggtcgcatcctaatgcctggcatgtcgactcttaatcatgcgatgatcaacacaggactgctggaggagcacaatactatactggctcacgtcacata

SEQ ID NO: 20906 - DNA, 379 bp, Oryza sativa
  Clone ID: PAT_MRT4530_26229C.1
atgttggcgaaagggatgatgcaattggctgagaaccttgcgataaaagaaagggatggctgtgtatggaatcactcacctattgcttccgaattatacgtatccgcgcgattaatgtttgtgggtttcgatgtgcaaagcaaaccatttgctgattgggaaacattgcctgatgaatggaattgccttgagggaacctggtgatgaatgaaatgggaatgatgacccgaattggtggatgcaatgcaaatgattggctaagtgcctggtatttactaccgctcggaattagaccataaaggaatttctatctacaccgggactataatatcagattggggaggaagattggaattacattgataaaaaaaaaaaaaaa

SEQ ID NO: 20907 - DNA, 1041 bp, Oryza sativa
  Clone ID: PAT_MRT4530_2622C.1
atgcgggtggtgcacccgcacaagaaaatcggttttttgcgtgcaggggacggccgccatcgcgtggtctgggtgggggatggccacctccactggatctgcgcagggcacggccgtcgccactcgcccaccgccgccgccgtgctcatcctgccaccgtgctggatccacgcggatccgggcgggggatggccgccgctgccgctgtcgcccctcatcgccttcgccgcattcctgctggcctctgccaccgtcaccccttgtcagctcgccacgcttccatcgaggggagatgttgagaagacggcggcgaatgaatctacaatatttgaaagcaaggaagggatcggagcaagcggcacggatgcagcaacacaatgggatcaacagttggcagggcggctggcgggcgcgtgcggccgccggggggcgacggcgaggtggggggcggtggtggccgccgggaggacgggggctaggggaggctcacacctccaccgcaaaactatgaactgcgagcacagcgatctcgacgcgattcgcacccgccaccgacctcgggccgaggccgacctcgacgctggccacgtccgcgctgcacgcaagcacgcccgccaggccacctgccttgacccggactccccgcgcgcctcgctcctcctcaccgccgtctctatcctcgtcgccgaccactcctcccaccgcgccaccctcctcgccatcgccagcggtgtcggcctggacgaatgtggtggggaacagggtggtgtcaatggtgcgcgggacgacgggcctcggggaaggcgctgggtgacacaactggagaacggcgagggcgacgcggagatgctgccggggtcgtggattgcgaccccgacacggcggcttgctcacgcatcacagccgccgtcgctgcctcgtcgcccgccgccctcagccccgtcgcaccactcgtggccgacctcttcgaacgctgccacgtcggatataaccggggtcaaaaccaccgatggacctaaaacaaacggttttgttagttga

SEQ ID NO: 20908 - DNA, 361 bp, Oryza sativa
  Clone ID: PAT_MRT4530_26230C.1
ggaaaaaaaaaagaaaagagaagaagaaatcctccgaaatggcggcgtccggcgagggggcgtcgctgacttatgccgcccaaggacatgaccactgctggcgaggaatgagctacttatacgagccgtcaatagaggactactactacgcccaccggcaccgcaggaagccccaacatatgcagaatctgcacgtcctccggctccacttcgtccggcaccggctacacggctcctgccccaagtgcgtgtgctcgcctgccacccacgccgtctccttcaagtgccagttccaccgcatcatcttctacggccacccgaacttctttctcatcgacgccgtcgcgctaaaggattttca

SEQ ID NO: 20909 - DNA, 421 bp, Oryza sativa
  Clone ID: PAT_MRT4530_26231C.1
ctttgggtcttatctagtttatctactgacctaggtaagggaattattgaactatataggggaataattgaattaatagggcagtaaaactacttgtctctagtttatcgatgttatgaaaatgactaattcaatttatgttggaattggaaattgttttgaggtaaactttcaaacttactttcttaagtgtacaggtgctactatcttctttaatggcctgtccaagtatttaattcatggattgattcaacggcgggaagatagatttactacatcaaacagcagctgggtgttcttttgaaaaaaaagcatcgatctggtttgccgggccaaaatgcattaatcttgttctggagataattttaaattccttcacagtgtacaactttgaaccaatgggcttctttgatgctaacgg

SEQ ID NO: 20910 - DNA, 3014 bp, Oryza sativa
  Clone ID: PAT_MRT4530_26232C.1
ttcacttctcccccctccaattccgttcgaatccacacgccgtgcctctctcctcctcccgctccgccaccacaccacctcgctccacgccacgcggcatggtggcctcgcctcctcctcctcatcctactccgccggagcaggtcggcgacggcgtggaggcccgaagctgcgcctcgccgacgccctccctccgcaggaagggctcccccaaccgcagcggcggaagcgcccgcaagagttcaagctcaagagaatttggaagttcaattttgaattctgtaaataaatcagcatcccaattcaagaagtcaattaatcgtaaaagtggttcccctatagattggttccctcggaagaagactgaaccatacttgaagagaaagataaagcgtcttcaggagagcaatggcatgactgcatctcttgatgagactttgggaagtgccaatcctcactacacgcgaatggcaagggagaaaattgcagctagagaagcagccagaaaggcaatggaagctcgcaaagctgccatggttgaagcatcgtggtgcagaattcttcatgcagcaaggatccaaaagaaggacgctgaagaagttatggaaaaggccaagtttcgggcaactgaagcatttgaagaagctagagtaataggcgtaatgatgtacgacagaccagattgttcaagtcagcagtatgaggtggaatcatcgtcacagactgggggacgatcaactcataaggtcactgcttcctttcagactggttttgaggttgatatggaggttgccgctgcagttaagaaggcatttattcaacttgcgaattcttctatttcatcaaacaaagaagagtttaaggagcttttatggaaaattagccaaaatcctgatgtaactgagattgatgcaaattctgaagatgagcagcatcagggggactgtaacagtgaagacaaaaggaatttgaaattcaataaagaaaccttgggaacaggcatctttccatctgactttgacaatactaacgttcagcaatccaatgatcttgtgaacattatgctggaaaggctaaaagctcttcatgaagatgaacttgcttctctggcagttattgttgccacttctggcttaaatgctgtacttcaaagtgacaggggcaaatatcaggaaactgagtctgtgaacagctttacatcacaaagggcacactcaagaagatattccactgcagctagctttgttgatgtcctacaaccaaagaaagaagtcacatctgagttaccaagtctggacaagttcttggtcaagcatctttcaaagcttgaaaaagaagttcacgaagcaagagaagcaggtagaaaagcctcttcagtaaattcttgtgcacaaggtgctcaaagacagattacaggcaggaatccaaaggcaacagattctgcttcagatctgagcagcattcttgtgaagcacgtgtcgaagcttgagaaggagattctagaagcgaagaagaataataacacacgcattcaactcttggaagaaagctgcaagaaagtagaagcgcatgtggagaaagatgccagcaaagaatctgaattttacaatgctcagtcagaatccttctgtaacagtggttccgtggggagttgtaattccagggaatcatatgaaaaaagcaagcacggccgagattgttcacaagacaaagagaataaaattttattttcacatcaattaccaccgtctggtgcaaaaggtaaacagggaggaaaaagattaactaggattgaagctgcaaagctggaagcacttaattctttctgtactaaagatggcaatgcatttgatgttggccttgataagatcttaatcaggccaatccatagattggagagggaaaagaagaaagcactcgaacatggacaaaccaatgtgcagaaagatccacagaagaatgttgaccgcacaattgtgacagggagtttagatgagatcttagtgaagcatgtgtcaaggctagaaagggagaaaatcgattatgaaaggaggaatgcactgggggaaggactgaccaatgtgccacatgatcagcgaaagcatggtaacaatgctacagcatctgagagtttggatcaagtcttagtgaagcatgtgtcaaggctagaaagggagaaaattgattatgaaaagaggaatgcactggaggaagtactgaccaatgtggcacatgatcagcgaaagcatgataacaatgctacagcatcggagagtttggatcaagtcctagttaagcatgtcagtcgtttggaaagggagaaagttgaatatgcaaagaggaatacattgggagaaagaaccagtgaacagaaccatcaggaaaggcacagtaacactaacatagcatctgatagtttagatcagatcttagttaagcatgtctccagacttgaaaaggagaagatggagcatggaaagagcggtgatatgatctttctaaagaagaatgactcaaaatgcacaaatgaagaagcagatctgtctgacatccttgtcaagcgttccatgaagcttgagcaagccaagctggcttcttctgctgctgaagaaacactgacaggcagctttaatccagtccaagagcgcagaagggcacgtgagaaggaacttatggatgcatggggaggagtgggtctagggaactccatgaagcctcatctctcgaaaattgagaaggacaaggtatgcaaaaccctggagcatactttgccactgtttgccactaccactgatgcactgattcatgctgaaccctgtgtttactttctacggcaactcacttttccgctggtgctcctgctttcccatgcacacgcatttggtaaatcatgagtcgtcatattctctatgcctgtatattctactactggtaaagtgaacgttaattctgggatcttcatatcagaaaacaagaagatcagcaactttctgccaaacaaaaaaaaaaaaaaa

SEQ ID NO: 20911 - DNA, 231 bp, Oryza sativa
  Clone ID: PAT_MRT4530_26233C.1
acccacgcgtcgcgggctacctcttcatctactagcaggtcagggagaagctcgtcaagatcgacccctacttcgtcaagctagcccatcaccccttcgggtgatttgagcctctacatcgagctgaacccctccacttctctctcctagaacagcatggccaagtacattgatccagcgtgcttctgtttcgcatgaacaatactaccacttaaatgaaactgtacctgt

SEQ ID NO: 20912 - DNA, 1755 bp, Oryza sativa
  Clone ID: PAT_MRT4530_26234C.1
atggaggaagactgcaagtgcattgaccgggcaaaggtggcccagccacacgccatcattaccaacggttaccatgcaggggcagtttgctggcgctggttggggaagtgcggcggcggccctagcggctggcggcaccgagccacggcacatcggggaagtgcggcggcagtgacggcaatggccctagcggctggcgacgccgagccactgcacgtggctggggaatggattgcaccggagatcggaatgggcggcttcgcctaccccttcacgccgtcgccggcgtggtcgcgggacgccgtgttcgctggctcgccgtgggccgcaggcggcgtctcctccctcgccgacgctttggtgagctacggtgccgtcgacgacgaggaggccgcgttcctcggcaagaccgccgcgtcgtctcccagtacggcgaggctgcacgagcagcagcagctgctgctggaggctgagctgctgcgccacggcgacggcctcggcttcgccgcgatggacgacgacggcggcgccgcgatgctcggcgcgctggagccgtgcgccatgccgctcaccgacagcggcggccccccggtcatctgcagcagcagctccaacgacagcagcgggagcgagcactccgccgccatgcctgcaggaggcggcttcctcgtcggagagcagcagcagcacgtgccgccggcggcctacgccgcgggaggtgtactcccgtccatggccgcgggagaagaaacgccgcagagcttcggctttggcagcctcttcaatggcgatctcctgcaggaggcgaccgtgagcaagtatcatcatcatcagcagcagcagcagctgggcgttgtgccttcgtcgcagccgcatcatctgaatgatgacatcgatttcaacactggaaaattgatgtcttttgcttctggacagcagcacgttacccccagcattgacagcctgcagatcgaccagaaggaattcagcagtggcctgcaccacctcaatctctcctcgctgatttctggaccactcgcatcattcaatgcaacacagagccatagacagcctgctgaagcttgcggtggcaaaaatggcggcgccgctccatttgtgaacctatctgaggtgctaccaaagggcaatgggagtggtagtgctgggaatggagcacccaagcctcgtgtcagggctcgccgaggccaggccaccgatccccacagcatcgcagagaggctccggagggagaagatctctgacaggatgaaggatttacaggagcttgtcccaaactcaaacaagactaacaaggcatccatgctcgatgagatcatcgactatgtgaaatttctccaattacaagtcaagagccccgggtttctcctgtccccaagatcatcatcaggagaaaggcaggcaggagcaggagcagtaacaggagggctccccggcgatcagccggagctcctggacggcggcgccatgttcgagcaggaggtggtgaagctgatggaggacaacatgacgacggcgatgcagtacctgcagagcaaggggctctgcctcatgccggtggcgctggcgtcggcgatatcggcacagaaggggacgtcctcggccgccgtccgaccggagaagaagaagaacggtgatggcgatggcggcggcgacgaggaggacgtgaagggagagtttgacgcaccgaggaggcctcctgtcggccggccgaaggagatgaggtccagagtctaa

SEQ ID NO: 20913 - DNA, 710 bp, Oryza sativa
  unsure (1)..(710): unsure at all n locations
  Clone ID: PAT_MRT4530_26235C.1
tttgttgttttnttnnccngggtgatcgccccctttgattgggcttnaccctcctctgttctgtntgtgtctccgtccgtgagtgagngtgnnaattnaccttcctttatcccacccggccccgtgtntcgtgggatgctgtatttantaanaattgcatccattgncttncaaatggttgcnnctccccgattnatttntaanagntntccnaccaggttgggatccccaatttcncgccnncnntnatnnnccccnaacttcncnngtcnacggtttcaanaancttaaaatctaantcnggccnaactcttnccnaatccggcccaangggtcnannntcgnaaaaattttttantttcnnggcgggggggggaacnannaaaaattttncnnctnngcctcnngancntttccngggnttttnanaactccccctnnncccnnggnnggntncattgttttttttttataacangnncgtttaannncccnnnggtnnccttcccgngnnnagannnatctccgnnntntngagantnntncccnnanncccnaccgntntnaaaacccttctttnctttctncgtctnctcngggngccnctgcnganttcttnnaacctnccnccnnttnncncnnnctccnctngnnccggggnngnccnnctngtnttntgnnnntccnnngtntcnctngncccccnnggn

SEQ ID NO: 20914 - DNA, 390 bp, Oryza sativa
  Clone ID: PAT_MRT4530_26236C.1
atgccgagcagcgcagtcgccatcggcggcaactggtcaccgtcattgccgccgctgccgccggcagcatcagcattctcggtcgccgccgcctttgctaaagcactgctcagcgtcggcagtcgccgtcgaggcctcaggtgtgaggcgacgaccggacgacgcctcggccgctcggcggcggcagcggacggcctgggcggctgggcttcggcgatggcgatgctgcgtcgaatcagggacagggaggagccagcagccagggagatgaggccggtggcgacgcgccgtcgccgagctgccgagcgccgagccctcaatgcgccgtcgcccgtcggcgggagtggaggcatggattgggatttgggaggagtgtggacttgggactag

SEQ ID NO: 20915 - DNA, 404 bp, Oryza sativa
  Clone ID: PAT_MRT4530_26237C.1
atgcctccactccccgccgacgggcgacggcgcattgagggctcggcgctcggcagttcggcgacggcgcgtcggcactggcctcatctccctggctgctggctccctgtcccggtgtccccagtctagttctcactcctcccaatccacgcctccactccgcaacgacgggcgacgtcgcgacggccgatggcacatcgagggctcagcgctcggcagcttagcgcgtcaccaccggcctcatctccctgactccctgtccctgattcgacgcagcatcgccatcaccgaagcccagctgccgaggccttccgctgccgccgccgcgccgccgagcgccccacgcctcgtccggtcgtcgcctcacacctgaggcctccacggccactgccaccctgagcacc

SEQ ID NO: 20916 - DNA, 564 bp, Oryza sativa
  Clone ID: PAT_MRT4530_26238C.1
gcaccgtctagttccaggttggcttcgtctccgaggcgctcccggcgtcgcagttcgacgcggtgcccgcctgcggcgccggcgcgcagctccgcggcgctgccggggttatccgggagcttggcctgctccccgtggctgaggcatgagcttctgagttgggaatcgacctgcagcaaacttgagcacctccggttcgatgttgttacaaaataaagaagacgcgcccttgagctcaggaggctgtgcaaggtttgctgtttagtgtgtacgttttgtgtggttatttatttatgaacatggatgctatccacaagtctaagatcaatatatttctaccgcgcccgggtagagctatagattaaagtcggaccgtgttgtcgtcggattcatgtgagttctgatggcatagggggtccgaatgcagtgaaaatttgcatggaacttcatatatgtagtgtatttatgtgtatgtaaatggcaagtacctggctacctgctcccatgttttaaggagaagagttggatcttgaagtttcaaagccctgcagccagtgttaccat

SEQ ID NO: 20917 - DNA, 396 bp, Oryza sativa
  Clone ID: PAT_MRT4530_26239C.1
atgcctccactcccgccgacgggcgacggcgcattgagggctcggcgctcggcagctcggcgacggcgcgtcgccaccggcctcatctccctggctgctggctccctgtcccggtgtccccagtccagttctcactcctcccaatccacgcctccactccgcaacgacgggcgacgtcgcgacggccgatggcgcatcgagggctcagcgctcggcagcttagcgcgtcaccaccggcctcatctccctgactccctgtccctgattcgacgcagcatcgccatcgccgaagcccagccgcccaggccgtccgctgccgccgccgagcggccgaggcgtcgtccggtcgtcgcctcacacctgaggcctcgacggcgactgccgacgctgagcagc

SEQ ID NO: 20918 - DNA, 531 bp, Oryza sativa
  Clone ID: PAT_MRT4530_2623C.1
aagaaggggtaaatcttaaaaatttacgaagaatcaaacgatccacaaataaaaccttgtggtcgtgactaaaaacagagaaggaataacaagagccagccaatcacttgggcaacagccattctgtgtagaacagttctgcagttctgtaatgaggcaaaaataccacaatcgttacatcttttaatcacacgtattgtctatataataaaaaaaatatagttacagaattacaaatcgtagaggaccttgtattcaacagaagaactgagctcagtaatttgcgggcacgaattagtggtggtagcaaatgaaggttgtgtatatgaacctcgtagcagtccaattgcaatggccttgtatgcagcttctgatggatggaagccatcccatgacccaaacttttgggggtcatcgcaaaccttgtattcaccatatccacatcttggcagttccagatacaccatacggtcctcctccaccacaacaagctgtcacaaggatcttcgattccaaattgttcaggggaaa

SEQ ID NO: 20919 - DNA, 273 bp, Oryza sativa
  unsure (1)..(273): unsure at all n locations
  Clone ID: PAT_MRT4530_26240C.1
agaggcaaagaataattctaagaaaagtcacccacataacacattctcaacagcagctgtagaaacaccgtcagttcagatgcccgtacatgtccacggtctatttcatctggatgcattaaaggagcttcatactccgggtgtcaagccagtactctaatgcaattgtcactgcgcataacgtttcgtgttacaaccgncccatgtgtaagcacgatataattatgtgaatctcatgtcatgacgaatccacagctaaagttgcaaccttac

SEQ ID NO: 20920 - DNA, 937 bp, Oryza sativa
  Clone ID: PAT_MRT4530_26241C.1
caaggctgtaagagaccacaaacatcaatatatgctgatgaacttacacagcaccaatagctgaaaagcccaaatcaacactgataatagtttcatacatcatcttccatgcctcccagaaatcggcttcttgatacccaacatgtcctatgaaagaagccaattcaattcaggagatcaagctcaacagggtctttccacaactatcatttggaaatctgattacagtgctggacttgtaaatacaatcaaactcgcaccgttcccagtcaatcatcaaacacaagagcactacagatccaaataatagttaattggcgatcttataggcttggaagggatcctgctcgtatgaactctttgagaagggccttctccccgttaatcttcttcttctccgcagcatcgcgtggcttgatcttgcgcttctcctccagcatccatttgtacagctggcgctgatcgtcttgggagattggtgtgagcacctttatgggtgcaacaattggttctgcaggcttctcagcagccgcgggagatgaggtcggcgtagaagaagtaggatcattctcggtatctttctttcccgagtccttttggtaggtcctcataagcatataagctccgacgaagacgttggcggcgaggaggaaggggaacatgcggcgcatgaagctcttcttggcctccggaggcggcggcggcggcgcatgaggaggaggcttgggcttgccctccaccggaggcgggggcggcggcggaggaggagcatgaggaggcggctgcttgggcttggccatgtccttgagattggatttagattctctctctgtctcgctatagtaggaggagtacacagcacagccagacagagagacagactacgagtgggagggaggggaaagggaagccaacacaacacaacaatcccggccgg

SEQ ID NO: 20921 - DNA, 253 bp, Oryza sativa
  Clone ID: PAT_MRT4530_26242C.1
gcacgaggggaagaattgcttcttctgtactgccaactgccaaaacaataggtgaaatgatactttggtttgtttttgtgttgcgactgtggatgctgtgctagcttttcttttgtggcatttgcaagagagaaaccttgtaacgtatagctgactttattgctggtcgtgtgtaattctcttgagatgtatttagtattgctcctgttgttattgtcaccattccatcgcatcaaatatcctcttgttcttt

SEQ ID NO: 20922 - DNA, 748 bp, Oryza sativa
  Clone ID: PAT_MRT4530_26243C.1
catcctctataaccaatatatatattcaaaatcatgcttatatatagccccacaacaatattttggaagaacacatttatgccttattttgccactggcctattaccacaaaataatcatgggaaattaattgcttgctcactcacacacggcatgatatcttctaaaacataattatttagaggttaataattcccatgcgacccaacacaagagcacgtatgtctattaattagaggttgatgccattcttgtattcagtgccagctgtaaagctttcagggatgacgttgtcgatgacatggtagctgccgttcttgacaaggaagcggacggagaaggagcccttgagcagcgcctcacttttcagcgtccaggtgttagtcgacgactccttgagccccacccagtacttgccacccttctccttgacctccacctcagagatggtgacattggtgacgagctctagactagtgtcgctagagccctcaccgaccttgtcaacgacacggtagccaccattcttgacaaggaagcggacggagaaggggcctttgagcggcgcctcacttttgattgtgcatgtgttagttgacgactccttgagcgccacccagtccttgccgcccttctccctgatctccacctcagagatggcgacgttagtgacgagctccagactatgtataaaatggatagctatgtactcccaatgcatcatgcttatagtatctgtaggtgtcat

SEQ ID NO: 20923 - DNA, 295 bp, Oryza sativa
  Clone ID: PAT_MRT4530_26244C.1
attcaatatatgtgattgagcattgcgggtcatgaaattacatgatataaaagcatacttacgactgtttactggttattgtgttgaaatattcaggtttcagatcgtaaaagcatctttttactgatgaatccggcctagacttttctatcttgcaggatggcgcgacaaacattacatgcttgattccagtaagagtatttgtaatatcacacttatggagagactgattatatgatcttgaatggtatcggaatgcctattagaatttgcaaatgctaatgaggtgtaaaca

SEQ ID NO: 20924 - DNA, 588 bp, Oryza sativa
  Clone ID: PAT_MRT4530_26245C.1
atggcacataaggaccggtttgcggtatgccctggaagaacttatcgcttcatccgtgccgtcgaggatgcctgtgaagtggcgttcccgctgcagtccaagcagagcggcggcgggcggcgggcagtgggcggtggacgcaaggacggcgggcagaggggcggcgggtggtgggcggaaggacggcggtcggtgggcggagcagaggggtcgcaggtggaagtggagcggtggcggctggcgaactgccactactcttcggccctcccgccggccgcggaggtggacatggcagactcggagccccggcgtgctcccgcgccgcctcctccctctctccgcgtgctcgccgtcggcctctccgcctcctctccctctccgcatgcgagcaagcgagccatcggtggcgttggcgacaagggcggcgcaatggatgaggccgtctgtcatcgtttaccgcgctcccctccgcctcctccccacctcgccgaggcgtcggcgctcggtgatgctgtcccggtgcgcgcggagggcgtctgggtggtcggcggcagcgacacgggtggcgacgtcgatggcatcttttag

SEQ ID NO: 20925 - DNA, 1391 bp, Oryza sativa
  Clone ID: PAT_MRT4530_26246C.1
gaaatgacaatcttcctaaggcaattttttttacttaataaaaaaatgttttttttttcaaggacaacacagcaactcttgcggacccattatgtattgctcctttgttcgttcaaggaactactacagcaatatgagcgtgttcatgcaatggaagcagtaatggcttgatctcctcgtgaaggttctggagcaactatgtctgatgacgaagacaatcaggttgatagtgagagcaacatgtttgatggaaatgatggatcagatggtatgggctttggccccttaatgctgacggagggcgagagatcattagttgagcgtgtacggcaagagctgaaacatgagcttaaacaggggtacagagaaaagcttgtggacattagggaagagatactccgaaagcgaagagctggaaaactcccaggagatacagcgtctactttgaaagcatggtggcaggctcactctaaatggccatacccaactgaggaggacaaggctcgcttggtgcaggaaacagggttgcaactaaaacagatcaataattggtttatcaaccaacgtaaacggaactggcacagcaatcctgcttcatcctcatcagacaaaagcaagagaaaaagtgcaggtgatggcaaggccgagcaatcttggtagaacgtggttggagaagaagtatatatatgtaaataatgcatccattgtgaagaatgccagtatatttattgctcccaagatggcgattcggacagaagcttcctgggggcagaatgtcatgttataattttagtcatgtgaagctatagctatatatagtaatttatacgaaagaaattatgtcatgttataattttagtcatgtgaagctatagtgcgtatatatagtgacttaccagagagtagtttttatgtttgctgttggctagtgtgcatttgtagttgggacgtgctggctgtctctctacagctcggtacaaccatgtatttataacgtgttgtgaagcatatgttgtaaaatcgtggaatgggagtgttctgcgatccccatatgttgttgtaatgttgtatattgatgaccatgctgcaacggcagcatgtttgtaactcgttatatcctcaggctcttgtgttgttacaaattacagaactatattgtctttaacgagcatctcctgttggattaataatatatactaggggctttaaaggatccctccccccacaactcctcccgccccgacgaacccagggtggtggtggccgcccgtctccgccgccgcaaccgcggcgtccatcgccagcgcgtggtcctggtagtggaacgccatcacgcgcacccctgctgcttctgcagcgccccaagcccacgcgtccccggacgccgtggg

SEQ ID NO: 20926 - DNA, 1540 bp, Oryza sativa
  Clone ID: PAT_MRT4530_26247C.1
tcttcgtcttcctcctccacctcgcgcgctgcagcagcagcagcggtgcgcgtgatggcgttccactaccaggaccacgcgctggcgatggacgccgcggctgcggcggcggagacgggcggccaccaccaccctgggttcgtcggggcgggaggagttgtggggggaggaggaggaggagggtgggagcgggagaaggccgccatcgcggcgcacccgctgtacgagcggctgctggaggcgcacgtcgcgtgcctccgcgtcgccacccccgtcgaccagctgccccgcatcgacgcgcagattgcggcgcgccccccgccgctggccgccgccacggccgcagcggcggccgcggcggccggaggggcgccgtccggcggcgaggagctcgacctcttcatgacccattatgtattgctcctttgttcgttcaaggaacaactacagcaacatgtgcgtgttcatgcaatggaagcagtaatggcttgctgggaacttgaacaaactttacagagccttacaggggcatctcctcgtgaaggttctggagcaactatgtctgatgacgaagacaatcaggttgatagtgagagcaacatgtttgatggaaatgatggatcagatggtatgggctttggccccttaatgctgacggagggcgagagatcattagttgagcgtgtacggcaagagctgaaacatgagcttaaacaggggtacagagaaaagcttgtggacattagggaagagatactccgaaagcgaagagctggaaaactcccaggagatacagcgtctactttgaaagcatggtggcaggctcactctaaatggccatacccaactgaggaggacaaggctcgcttggtgcaggaaacagggttgcaactgtcacagctcgcgtccgggtttatcaaccaacgtaaacggaactggcacagcaatcctgcttcatcctcatcagacaaaagcaagagaaaaaggtatcgtgtcgtggacttctaacagaaattccttttacatatttttggtttccattttcctgtctctgtctgtttatgcctagaaaaagaagcaatgcaggtgatggcaaggccgagcaatcttggtagaacgtggttggagaagaagtatatatatgtaaataatgcatccattgtgaagaatgccagtatatttattgctcccaagatggcgattcggacagaagcttcctggggctaatttatacgaaagaaattatgtcatgttataattttagtcatgtgaagctatagtgcgtatatatagtgacttaccagagagtagtttttatgtttgctgttggctagtgtgcatttgtagttgggacgtgctggctgtctctctacagctcggtacaaccatgtatttataacgtgttgtgaagcatatgttgtaaaatcgtggaatgggagtgttctgcgatccccatatgttgttgtaatgttgtatattgatgaccatgctgcaacggcagcatgtttgtaactcgttaaaaaaaaaaaaaaaaaaaaaa

SEQ ID NO: 20927 - DNA, 996 bp, Oryza sativa
  Clone ID: PAT_MRT4530_26248C.1
atggcgttccactaccaggaccacgcgctggcgatggacgccgcggctgcggcggcggagacgggcggccaccaccaccctgggttcgtcggggcgggaggagttgtggggggaggaggaggaggagggtgggagcgggagaaggccgccatcgcggcgcacccgctgtacgagcggctgctggaggcgcacgtcgcgtgcctccgcgtcgccacccccgtcgaccagctgccccgcatcgacgcgcagattgcggcgcgccccccgccgctggccgccgccacggccgcagcggcggccgcggcggccggaggggcgccgtccggcggcgaggagctcgacctcttcatgacccattatgtattgctcctttgttcgttcaaggaacaactacagcaacatgtgcgtgttcatgcaatggaagcagtaatggcttgctgggaacttgaacaaactttacagagccttacagttgtgactcttactgcaggggcatctcctcgtgaaggttctggagcaactatgtctgatgacgaagacaatcaggttgatagtgagagcaacatgtttgatggaaatgatggatcagatggtatgggctttggccccttaatgctgacggagggcgagagatcattagttgagcgtgtacggcaagagctgaaacatgagcttaaacaggggtacagagaaaagcttgtggacattagggaagagatactccgaaagcgaagagctggaaaactcccaggagatacagcgtctactttgaaagcatggtggcaggctcactctaaatggccatacccaactgaggaggacaaggctcgcttggtgcaggaaacagggttgcaactaaaacagatcaataattggtttatcaaccaacgtaaacggaactggcacagcaatcctgcttcatcctcatcagacaaaagcaagagaaaaagaaaaagaagcaatgcaggtgatggcaaggccgagcaatcttggtag

SEQ ID NO: 20928 - DNA, 499 bp, Oryza sativa
  Clone ID: PAT_MRT4530_26249C.1
cccacgcgtccgcccacgcgtccgcttacacttcgctgacgcgtggtcggacacgtcgtcttccgcatccctgggggcgcggttgtcatcagcaccgtgagccactacgccgcattcgtcagggccctggtatgatacgtaccaaggttcaggacgatcgacgtaacctcggtctggtcctacgtcaagtacgatgcgttatggtacacctatgcgatctacacaacatagatgattactatgcctactgctaagctaagcgcattaccagtcgctactaacgtggactgcagactaatcatttatgtcgactatcacttcatcattttgcgctcctgcgtgtgtacatatcggggaaactctgctctaatgaagcagataggttgagagcgtggctcagtacattgagccatatataatagcgtagatcgatcgcgagatatgcgaggcattgagcagggtgatactcaatagaattaccgtaaaatatttgtgcgag

SEQ ID NO: 20929 - DNA, 258 bp, Oryza sativa
  Clone ID: PAT_MRT4530_2624C.1
atggagcggggcgggccctgcgacggcctctgtcgcttccggattcacctaggcacgagaggggactgcccgttgcccgctggggacggggacaaggccagtgatgatggggccggtgccgcggctcctccggcgctagtacccccttcggaccagcggcttggtggcagcggggtcacctccaccaaccaccgctgccggaagggaagaaggaaaagggaagaacaggaaagggagagggaggcagcaagggagtag

SEQ ID NO: 20930 - DNA, 269 bp, Oryza sativa
  Clone ID: PAT_MRT4530_26250C.1
tcgttttcagctagaattactccaaaaccgggagggtctacatctaacttactgaggggatcacccggtcgcccatcgagagaactgacgaggaaggcacagaggcattaacaaccggacaaagagctccaccaactgtcactggtgaaatgactagatggccgagttcacgaggtactacggcaactacctatcataaaaataaacacaccacctcattatggagatacaaactgtactaccatcctcatggagagaacacaaggacg

SEQ ID NO: 20931 - DNA, 882 bp, Oryza sativa
  Clone ID: PAT_MRT4530_26251C.1
cgagccggccccacgcgtcggcgacgattagctatctagcttagctactcgatcatcagatcatcgatcatccgacgatcaaatcagtaatcttgaatatggcggctttgaacggtaaggtggtggtggcggtgatggtggtggcgatggtggtggcggcgccgggagcgtcggcggcgatcacgtgcggtcaggtgggatcggcgatcgcgccgtgcatctcgtacgtgacggggaggagcgggctgacgcagggatgctgcaacggcgtcaaggggctgaacaacgccgcccgcaccaccgccgaccgccaggcggcctgccgctgcctcaagagcctcgccggcagcatcaagtcgctcaacctcggcaccgtcgccggcgtccccggcaaatgcggcgtcaacgttggcttccccatcagcctctccaccgactgcaacaaggtcagttaaatcaatcctgcttggatcgatcgatcgagcttaacatgctagctcaatcggagttgatcagctagtaattaagcacgtatttgctacagcatatatgaacaaagtaattaaaataacacctgcggcagacatgcagcgctccattctctctctgtatcagctgtatactttatgttgcacgctccctgtgtgcatgttctatcttaattttcttcagtatgtacacgatctgtgtgtactacgtgtaatcctatacgttttatgaattgcatgttgtccaaatgtctttgtcctagctactagctactccagcttcttgctgaggaaatctgcagtagtagtaatccctcgttgtgatacgcaacaaaattgtttaatgtgatcctgctatatatatagaaaatcatctctattattttacaggcat

SEQ ID NO: 20932 - DNA, 339 bp, Oryza sativa
  Clone ID: PAT_MRT4530_26252C.1
atgagcagagacctcgccctctcgtgcagcgacgtcgccatcgcgtgggccgcgctgtgctgctcgcccggcagccgccgcgccgcctcgacggctgtctgcaggatagtggatgatagggccacgagtagcaagaaaacggcgaggattttgtctctctgggacgacatgatcatcgatcgatcgatcgccgagagtgagtttgccttaattgcggtaggaaaacgaggccgatcggtcgccttctcatgggtgggacagtggacagtttgcactatagaccaacgatcggtcgcctcatgcatagggatggcaatcgggtccgacgggcacgggtag

SEQ ID NO: 20933 - DNA, 243 bp, Oryza sativa
  Clone ID: PAT_MRT4530_26253C.1
gatcccctgagcgggtgtggagctgcgttttgttataattctggagctgttaattgttcttctttcgcaaatttaacccttattaccgctggctggatagaaggatagagagctcaagcagagacgctggatagagggatatacggttttagaggttattgttcgttcaacctgcttagttaggagtataccttcgttgttttagtaatttgtggaagcatggggtagcatatctaggacatg

SEQ ID NO: 20934 - DNA, 669 bp, Oryza sativa
  Clone ID: PAT_MRT4530_26254C.1
gtgccgaatggaggacgccgtccgggggatctagcggcgtcatctcatcggaactctactgcaagatttgccgaaacgtgatggccgacgcggtgctggcgagcaagtgctgcttcgacagcttctgcgactggtgcatccgggaccacatcgccgccaagtccaagtgcgcgtgcggggcgcaggcgtgcgtcgacgacctgatccccaacccaacgctccgcaccaccatcgccaacgttctcgccaccaccagcggcacagcgagcgtttcaagtggaaccgagaagccaaggagctccgccagcagcaacgcgacagaggcggcgccgcagagcctggccgcttcgcaggtgagccgcagtaacgtgtcttccaagaaaagcgccacgatctcatcaggtgtcctcggaccaagaaaggcgtgggagacggtggcgggtgaccactccacagaatatggagccctcgccgtcgacggcgatcaccacggcagctatggcttcccgttcggcccggcgccaggctacgtcgaccccttcttcggcgtcggcgtgccattcggagctgatccttacatgtactacggcgtgccttacggctgttgtggtgctgcttacggctactacggcgacgaggatcgccgtgacacgaagaggacgcgcctac

SEQ ID NO: 20935 - DNA, 588 bp, Oryza sativa
  Clone ID: PAT_MRT4530_26255C.1
atgaacggcggcgatcttccgctggagacgagcgccgaatggaggacgccgcccgggggatctagcggcgtcatcccgtcggaactctactgcaagatttgtaggaacgtgatggccgacgcggaccacatcgccgccaagtccaagtgcgcgtgcggggcccaggcgcgcgccaacgacctgatccccaacccgacgctccgcaccactatcgccaacgttctcgccatcaccggcggcgcagcgagcgcttcaagtggaactgagaagccgaggagctccgtcggcagcaacgcggcagaggtggcgccgcagagcccggccgcttcgcaggcgagccacagcaacgtgtcttctaagaagagcgccacaatctcatcaggtgtcctcgaaccaagaaaggcgcgggagacagtggcgggcgaccaatccgcagaatatggagccctcgccgtcgacggcgatcaccacggcagctacggcttcccgttcggcctggcgccaggctacgtcgaccccttcttcggcgtcggcgtgccattcggagccgatccttacatgtactacgacggcgcaccttacggctag

SEQ ID NO: 20936 - DNA, 300 bp, Oryza sativa
  Clone ID: PAT_MRT4530_26256C.1
atggtgggctcggccgcgtactccgcggcgtcggccatcgtcgtggtgatggccaagggcaaggggcggggcggcagaggcggcccctctggcgccaacaaggtcagctcattcctcctcccctcagaacatttagtgtggtacattctcaatttaatagcacatttgttggattatcaacaaatggaagatcttgtattggacccatgggtaacaggtcggctttatggctttgcgtcctcacacatgacacgctgcctatttatgtgtaggtttctgagcgacggcctcctaggataa

SEQ ID NO: 20937 - DNA, 368 bp, Oryza sativa
  Clone ID: PAT_MRT4530_26257C.1
aacaaaaaaaagagagggaacgaggaccaaatttgcataccaaaccaggaccggccccatgaaatgaaaccaaaccaaacaggtgtccaggattccaggggtgagaagagacgagattggaattggtgacaatactaatgagggaccaagggctttggaacagcatatagatgcgggccttggatgaacaaaaaattagacctgttaacctggccccacagggcctcaatcgggggggggcaccattaaaacacttgcacagcatgcatgtaaaattcttacaaaggcacgctctgccttaaaggtcagagggaaactccaatccgaatgaagttaaaagttccaaaaatacaattgattacagggcc

SEQ ID NO: 20938 - DNA, 174 bp, Oryza sativa
  unsure (1)..(174): unsure at all n locations
  Clone ID: PAT_MRT4530_26258C.1
gcgcgcgccagagctaggtggttagcccaagctcgcgagatcgatcgctactataggctaaggacacgtacatggcgcagctcccgcccaagatcccggtggcggcgccggggcaccaccagcactgggcctcggccgggggcgcccgacacgcgggangggcgaatgagaagc

SEQ ID NO: 20939 - DNA, 513 bp, Oryza sativa
  Clone ID: PAT_MRT4530_26259C.1
atggcaattaaggaccggttcgcgggaaaccctggaagagttcctcgcttcgtccgtgccatcgaggatgcctatggagtggggatcccgctgcggtgcaagtggcgcacccgcatgcgaaaatctgcggaggcccagctagccgttacccgcgccagatccatcgccgtcatgcttgtagctaaacgccaccacggcgcagctacctggtgtcgcgcctcctgccgtcgcacgcgccaaatccgtcgcgttgtcgccagatcctcgctggagggaaacggtggagaaggtggagcccaaggacgcccagttggccgctgctcgccactacgccagatccacgcgcatgagggcagagcgacgttcggatctatgctgagggaggtggagcccaaggtgtcccatccagccttcgctcgccaccgcgccagatccaccgtgttgccgccggatccgggagcgtggggggcagagtggcggtcggatccacgctggagggaggcgctggagtag

SEQ ID NO: 20940 - DNA, 681 bp, Oryza sativa
  Clone ID: PAT_MRT4530_2625C.1
atgcacaacgaacggctccatggtccaatgcaccgtgaccacgacctccggcggggtagggagaacaaattttgtgccaatgaatatgggtgtgttcggctgccattttttcagctgcggctacggttgcaacatttcgaaattgctgcagcttacaacgattttgaactaccgcagccgcagcggctgcggcagccatacctgccgaacagggcctatggacagttcgatagggtattttttatgccctgtcgaacaaccgcagttcgacagagagcgaaatcaaccgcatggcggcggcttttcgacacgcggcgaagagtgtcgtcggagccggcggccgtacgtcgcgtgctacggacggcggcggcggcggcggctactatcctcaaggaggaagaatggcgggtgttgctgctgccgaggctagcttattcccccggcaccggcggcgccaggtcgacgtacgacgccgctcctccgctcattcacctccgcggccggcggagcaccaaaccatcacacgccgcgcacgccgtctcatcatacgaatccggccggcaacatgagagaattacctgcaacaacaacaacgacaacaacgtacgactagccaagtcgaggagaagaagaacgagctgctcaaaatctgctacccgagatggaataatccagcggtga

SEQ ID NO: 20941 - DNA, 869 bp, Oryza sativa
  Clone ID: PAT_MRT4530_26260C.1
cccacgcgtccggcggcggcggcgcacgactgggggaagggaggcgacgctgcgctcaaccgaaggagtccagggagctaggccgccagcgtgggcaagcacgcgcccgcgcgacgacgacatcttccacctcgagctcgctcgaggttttgatggaatggaactaaacaggatgcagacagatcccaaccatggatcaccaagaactagaagatggagctgagaaggtgaagctgttaggcatatggtcaagcccttaaggtgtcaaagtgatgtgggcactaaggatcaaaggcgtggagtatgactacatcgaggaggatctgaggaacaagagcaacttgcttctggagtgcaaccccgtgcataagaaggtccccgtgctgatctatcaaggcaagccgattgctgaatcagacgtcatactggagttcatcgatgatgtctggaaggatttgagataccgtatcttgcctgaagatccctatgaatgtgccatggcacgtttctggtccaaatttgggctggacaagctgtcacctccaatttggaagtggttcaccacacaaggcaaggagcaggaggatgcatacgaagctgccatggagcagctgctggttctggaaaaggtgctcgatgagaagaaattctttggtggagagaggatcgggttcgtcgacttgtctctgggctccctgtcgtatgtgattccgatatatgaggacatcaccggtgtcaggctgatcaccagcgacaagttcccttggctgtctgcatggatggagggttttctgggcttgccactcgtgaaggaacatctgctgcctctggacaagctacggcccagcagttccacttcacactgctag

SEQ ID NO: 20942 - DNA, 414 bp, Oryza sativa
  Clone ID: PAT_MRT4530_26261C.1
attacttaaagtggcctacaaattgagagaacatgggtgtttcaaaccaagcatataatttgggacaatcattgatgctggggttaacagaatcggtgcttatgataactgtaatgacagggcacgtggagcataagctaatttttttaagctgttttagctttggtgtaacatcggaattaccatgtgtgaaccatgcacaggatggttgggggattactgactggaaaagactcgtttgaggggtggacggataacaccgtggagaccattgaaggcatgtaccagttcgtgcggagcgcggaggccctgaacatattgacgtcccgttctgtcccaagagttagtcgcaggagttcttgaagatgcagttggagctattctttatggggattggagcaaaaccaggagcgc

SEQ ID NO: 20943 - DNA, 298 bp, Oryza sativa
  Clone ID: PAT_MRT4530_26262C.1
aaggtgcttcttttttctttaccattttttttttctttgtcccaacattcatcacatttctatttaatttgccgtctcatttaattggaccatccgatgacccccgaatttcttttcgcacccccccggcgttccacccggcatatccggacccgtacctgagcgcggcccaattatccctataggtggttcctttataacatggctatcccatccccattgctcgccacatacgaaaattgtatatccttcgcaaatcctcccgtgcctcaagccggaactaacacacattaatccc

SEQ ID NO: 20944 - DNA, 177 bp, Oryza sativa
  Clone ID: PAT_MRT4530_26263C.1
tatgcatgggatgacttgggatatgctgcaagctgtgtgtaccttgcaagctggtgccctgctgggataacgctggaggatgatgcagcctgcaggaagtgatgctggatgaagatcctgactgctgggatgaaggctgggagaggggaatctgtgtgaaaccatgcgatatgtgca

SEQ ID NO: 20945 - DNA, 133 bp, Oryza sativa
  Clone ID: PAT_MRT4530_26264C.1
tgtttttttatttaattatatatgtataccccgttttcgtttaatacctgtcttgacccattaccccacaaaggacaaccttctaaaagaccatgctacaaaatcaagctgactaaagaaacaaagagagatt

SEQ ID NO: 20946 - DNA, 476 bp, Oryza sativa
  Clone ID: PAT_MRT4530_26265C.1
ttaatcatatactaatgactcacctcgttttgcgtatcttcccaatcttgtcttttcccctcctctcaaactcacccttagatgcactgatttcgaatttacagtttcaagccattgattgatttaatcaatcagtaggctttttagtgaactatacaagcagttctaccctcttgttgttcgaacatatcaatatgattcctaagaagaatccagttcggcctccggagacagcattgacttcaaacggacctagcgccttcatgtcaactccgatttgggtgatcttggacttgatgaaagcttatctaactacctttcaaacgcatccagtctcatatccaaattcattccgagtcaacgggaatcgtcaaaacaagatagtgtttttgcagaaaccgagcttgggccttgggccttgtaataggctagacccatctcggaagtgtctccctccatctccacgaattaccacc

SEQ ID NO: 20947 - DNA, 1377 bp, Oryza sativa
  Clone ID: PAT_MRT4530_26266C.1
atggaggggcggcgccggcggggggagggcgttgaatcaatttgggataagggggatgaggagagacgtcgctcgatttgggagagggggaaggcgtggggtccatgcgtgggcccacgttggagagccccaaacgcagagcccaagagaccgagttcccaaatcccaacggcccaacctgatccaatggtcgaccgcctccgcgcgctggtcgtgaaccgctcgtggcgcacgtcgctccaggcgctcccgccaccgcccctgcctccgcagctcccgtggctactccgcccatccgccggtggccctaccttctcctgccttctcagcggcgccgacgagctcagcgtccaccgcgtccgcgtccccgccgacctgcgccacgcgcgctacttcggatcgtacgacggcggctggctcttcctcgcttctcgacaaacttccggccacatgctcttcaacatccgcaccgagcaatgcctcttccttcccgacactgtcccccggccgtggagttcagatgacttccccatgatcatgctcgccgccaccgtctcctcccctccgagccgcggcaccgacgacccatgcatcggcgctgccatcgtccactgcacgcctttcatcaccgattcgcggcagatcacgttctggcgaatggggtctcacatggccatcccgtccatccctccggaccatcagttcgacgtggtgtccaaccagttcgtcgtggaggagatggaggacgtcatctaccacaagggagccttccatttcgtcaccaagctgaagaacgtcttcgtgtgcaggctggcgttgcatcaagcagacctggtagtagatcatcgggagtggttgatgttcgcgccacaggacgacctcggctaccctcgcccggttgccaccgctcgctacctcgtggagtctcgcgagcagctgctcatggtcctcaagtgcacgtgcaaccttcctggatggccgccattggtgttctcggtgttcgagatgacgcatgttcaggctccagccggggcgcctcagtacgtctggacgccggtgcccacgctggttggccggatgctgttcgttggacatggctgctccagatcctacgaattggctaacttcccaggctttcaggagggcatctacttcttggatgacctgcagttctattcagtatccaggattgttcagtaccaggagtacctctgcttcgacaatggcaagtacacgttggggccgcctcacgttgccagccgctgcttctggccggatcaagtcaactcgaactactcttcaccggtttggcttctccctggaggtgaagatgatgccaataatgctcaagctcaagttgatgttcacatgatgtag

SEQ ID NO: 20948 - DNA, 516 bp, Oryza sativa
  unsure (1)..(516): unsure at all n locations
  Clone ID: PAT_MRT4530_26267C.1
ggttgcgtgggaacgaaacgaaacggagtagattcccccaaggccccaacctcctcctcgccttcccacctgtccacctccccccctccgccgccgccgccgccttcttcccgggggcggggcggggagaggaggcgcgggggtgcgggggtttagtatctcctctcgccggtggccgcgcggggaggtgacggcctgagattctcgccgcgtccgcccgtcgttctggtggtctcctcctccgccgccgccgccgcccgcgtgttgggggagagcggtttggcgtgaatcgggccggggtgagcggacgccgccgccgttggtggctgcttcatggagtgcttcctgctcagcctgaacccgttccggttcaagccgatttggccgccgaggaccgcgcccaaatctccctgaaaccctagggtttcccctcctccctgcccggngatttcgagaaaaaggaagtcccgggcggcgcttacccccaacccctcgttttttttttgggttcatctc

SEQ ID NO: 20949 - DNA, 367 bp, Oryza sativa
  Clone ID: PAT_MRT4530_26268C.1
ttctaagaaagatgaagttgaatacctgaaaagtctaatataagaggttgaagagaaaaacaatgccatgaaggctcgaattgaactcttgaagaaagatgatgatttggctgcaggaaaacaagtccttgagaaggttctcttacaatcctatccatctgtatcacacttttctcctactgtcactctcattttggcttgacttctgcaaatctttttgcagctgatgcaatgcaattctgcactctacaatggcctttgagttttagattttttagccgatccgatgattatttacttgctggagtgaaaagacatctgttggatagctgtgtaggtttagataggatgttgatccaagaatcga

SEQ ID NO: 20950 - DNA, 368 bp, Oryza sativa
  Clone ID: PAT_MRT4530_26269C.1
attactttgtctggtccgagctcaagccgtactcaaaagcggtgcctctgacgacagcagacagcagattgctgaccgagcttgccaagttctgccaggcagtctgaccggaccggaccaattcaagcacatacccatacaagcgaagcgtgatcagcgcttggcaaggttgccgcataagccgtggtattatgtccatggcgtgtccttggaatgcatagtgggcagcacacgcctgagattgctacattcactgctttgtggcactctggtgcaacagcaggtggcttgagacacatcatccaacttgtctttagtgtgttcgcttcagctaccagacatttaaacagggcgcttgaacccggaac

SEQ ID NO: 20951 - DNA, 700 bp, Oryza sativa
  Clone ID: PAT_MRT4530_2626C.1
cggacgcgtgggctgagtattaacaccgtatattatatgtattccgtccctaggttcaattcataagccaacattaatatttggttaatatttctcattctctaccctgtcgcataatttatctcactattttatactaagttattggctctgtaagatcttggataagtttggggaagcaatatgggtagatggtggaacattactagtttgagacagcctgcagtttcgtctactgttagttagggttgaaacatagttgcaacttgcttctcctttgctggtcagggtagatattggtttctgctgttctgtttccttagaggtagcactcagctagttatacaggaattaaaatttaataatgaacttaccaagggaaaagtgctgtctgttctaccttttgacttacatattttgtgaaatgacatattaaacaattatatcgtgtgcaacaaatgtgaagccatgcctagttcattgttaatgaagcatttgattcaagttcaagtccagactcaactgtatcgtttatcgttgaactgataaacttcttggcaaggatctatttgtttgcagcatgattttcttcaccgccttttgcccagtcatctactttcacagtttcacatggaaaaaaagagagaagttttgagggatggtcctgtctttatgcccagaagaacccttttttttccta

SEQ ID NO: 20952 - DNA, 1968 bp, Oryza sativa
  Clone ID: PAT_MRT4530_26270C.1
atggcgttcgcgacctccacgctcccattcgcgccatccaacccctcgccgtcctcccgctccgccgcagcggctttctctccccgcggcggggtccacttcgccgccgctaggagcggcctcccgctcgcgtgcgccgcgccgaggcaccgagggaggcctcctccgaggaggcgccgcggagggtgcctggtggtgtgggcgtccgccgactactacgccacgctcggcgtgccgcgctccgcgagcaacaaggacatcaaggccgcctaccggaagcttgcgcgccagtgttccggttctccttttagggttaggacacctttgtcactggttctagcagtattgacgctgacaccttcaactctgaaaatcccaatgccatcctcagtggatgaatggcatgagcgtgccatgctggagcaaccaacattggtgccagttgctgcaacactgtaccatcctgatgtcaataaggaacctggagcaaccgataagttcaaagagataagtgcagcatatgaggtgctatcagatgaaaagaagagggcgctgtatgatcaatatggtgaagctggggttaggagtgcggttggaggctcagctggagcttacacaagtaatccttttgatctatttgagacattctttggagcaagcatgggtggcttttctggtatggaccagggaacatttaggacacgcaggaggagcactgctgttcagggggaagacatcagatatgatgtgaatctggggttctcagaggcaatatttggaacagaaaaggatattatattatctcatttggagacatgcgatgcatgtgctggttctggatcaaagattgggtcgaaaatgagaatatgctccacatgtggtggtcgagggcaagtaatgagaactgagcagacaccatttggtctgttctcccaggtttcaatttgccccacctgtgcaggagagggtgaagtcatttcagagtattgcaagaaatgtgctggagaggggcgtgttcgtgttagaaaggagatcaaagtaaaaattcctccaggtgttagcaaaggtagtactcttcgtgtacgtggtgaaggtgatgcgggaccaaaaggaggacctcctggagatctttttgtttgccttgatatagaggagccagcagatattaaaagggatggtatcaacttgtattcaactgtttcagtaagctacattgaagctattctgggcactgttaaaaaggtcagaactgttgatggaaatagtgaacttagaatacctccaggtacccaacctggtgatgtagtggttctagcaaagcaaggtgttccatcattgaataaaccatctgttcgtggtgatcatctattcactattaaggtcactatacccaaacgtataagcggacgagaaaaggagctacttgaggaactggcttctttgagcaatggtggttttgctggtgcacctgtgaagccaaaatccatacgccaagagaatgaaactactgttgcccaagaaaattcggatcaacctgatgaaggggagggtgactggttgaagaaacttcaagattttgcaggatccattgctaatggtgctgccaagtggctaaaagacaacctttagcctgtaaatagttaccgcggaatgcatttatattaatcgctgttatggtgtagtccaatctgctattcttcaattcattggatcccacgagctgttgcatttgttttggagaggctcaaagttctcaggctgtgaagtggcaacgaagaggctgaatctgttaattaattccatcggcaacgttcttattttggtatgcttgtaaagtggcatgattttttatgtagttgcagttatcattccctagagcatgtgatggttttacgtcacttgctgctgatactgaattcagtaaagataatgcactgtaaatatatatttcatgcagtagagcatctt

SEQ ID NO: 20953 - DNA, 436 bp, Oryza sativa
  Clone ID: PAT_MRT4530_26271C.1
caataaaaaactattggaataattcattaagaaaaaggttagatggttacaatgccacaaatattctgccagttcaactacacgttgtttctaaatatttccaaaagttatcgaagctatcacctactaagttaaaaaaaagagctgatcatttattctacatatcacttgggaatagttaacaattatcctaaccctcattgaggggcttccaatttaaaagaatctcaattcttgttttggatgcaaatttgtgagcaatgatgacttcatgtgaggcatcagtagatgatgattgtactattgatgtagcaacatgctcaaaacagtttcttaaaggcactcattataggctttaccatactcctccatacgaaatgatgaaacagaaagagatgtgttggttgtatactcatcaagatgattgaaagggatc

SEQ ID NO: 20954 - DNA, 1303 bp, Oryza sativa
  Clone ID: PAT_MRT4530_26272C.1
ccctcctctccgcctccgcccccacgctccgaatccatgggtggtcaccactttgaaaaaccattatccccaccttgtccacaagtccaaacacatatcctgatatggtattaagcaagtccctatgtacgagagtgctatatgttgggcaccgtttgtgttcatcagcccatcactcttttctgtggcgccggcgggtgcgcgggccggagggggagtgcggcacctggcaggtgcgaaggccgaaggcggaggtggcccgggcgggtagctaggggccggatagtaggaggcggcaccggcgtacggcgccagtaggaggccaggagctacggggtaagccgcctacctatcgccggagataaggtacggcctactactactagtaccctattctaccaatactactacgactatctacctactactactactactactactactctctactactactactctacctatctactactactattgtagcagcggcggccccatcgagccaaagatgaagacaacgccactgcccaacgccatcgacaagccccgccatccatcgctgcttatctccagtcgacgacgagcttctgcatccccacctggcctccccttgacagccccagcaaccatgaacccgggggctctagatccggacaccctgaactcgaaggtcgcggatccagccatcccgagtttgggtgctccagatccgtccgcgaggaaagcagtccgccgtccacaccactccgcgtcgtcgaggtcaacctgccgaggggagagcaggcgtcggctatccccttccaccccatcgtcgatctgagcttgcagtcaaccgattctagcatctcctgtggctcctgtggctaaatccttgtccaaggatgcatctagctttaaccccaggcaaaaatcacgagctactggatcattaattagatgctctttgtgtactagtattttgtttggatagtgggcatgctgtttcgctttgttttcttgttctatttaagttgatgcatcactagatatgtttttattttccttattagacctcttaccagaagtttttttgggtgtgttcttggatactctacaaatcccccaatttctatgctagctgaacaaattagacgctagttctttctacaaatggcactgggggctgtactcatgatctaattgtaagtttgtatgttataccatattcgtcaggctcagaaaccaaaagaaggaaatgctatgttcaagtttgtgtcaaaaaacaaaaaaaaacaaaaaaaaaaaactcgcctcgtgc

SEQ ID NO: 20955 - DNA, 468 bp, Oryza sativa
  Clone ID: PAT_MRT4530_26273C.1
gtaaaattgggataaggtagttatgacctatttgctgcataccctaccttgaataattgtgatcctttctgtttgaacccctataaatggttagagtactctctttgagctcaaatgggtttatatatgttctatgtgcaactacttgcttagccatgcttagaaatatgcaaatgctcattccatctatgattaaaatgtgattttgacacatgaacctttgctggaataaaatgaatgtgatgggtatttgtgaactaaaatgtgaatttatacttgggcggcaagtgatgtgcatatagtgtttgttgcataccgatagggggagtgtttgcccaagtccgtaagaactgaacttgtgtcaaccacttaaagttatttgtacatctacatgtgctagtatgggatggcctaggctgattactctatttaggactagccttgcattctggtaggccggtgtgtatg

SEQ ID NO: 20956 - DNA, 1117 bp, Oryza sativa
  unsure (1)..(1117): unsure at all n locations
  Clone ID: PAT_MRT4530_26274C.1
acgaggctccaattctctcgacttctcctctctctctctctctctctctctctctctctccgtgggtctctttgtgcagcggcggccccatcgagccaaagatgaagacaacgccactgcccaacgccatcgacaagccccgccatccatcgctgcttatctccagtcgacgacgagcttctgcatccccacctggcctccccttgacaggcccagcaaccatgaacccgggggctctagatccggacaccctgaactcgaaggtcgcggatccagccatcccgagtttgggtgctccagatccgtccgcgaggaaagcagtccgccgtccacaccactccgcgtcgtcgaggtcaacctgccgaggggagagcaggcgtcggctatccccttccaccccatcgtcggtagtcactgcctcctcatctattttacttagtttagtactaagcagaagtcaccctttccttctcttgcgtccagatctgagcttgcagtcaaccgattctagcatctcctgtggctcctgtggctaaatccttgtccaaggatgcatctagctttaaccccaggcaaaaatcacgagctactggatcattaattagatgctctttgtgtactagtattttgtttggatagtgggcatgctgtttcgctttgttttcttgttctatttaagttgatgcatcactagatatgtttttattttccttattagacctcttaccagaagtttttttgggtgtgttcttggatactctacaaatcccccaatttctatgctagctgaacaaattagacgctagttctttctacaaatggtaagcttcctctgctagttgatgtatttccgtttctttcacataatatttaactactgacatgcatatggatgactatcaaggatgggtgaaaggctaatgaatactaatctgaggtaaacttctctgaatgatgtcattgcaggcactgggggctgtactcatgatctaattgtaagtttgtatgttataccatattcgtcaggctcagaaaccaaaagagggaatgctatgntcaagtttgtgtcacttaggctgtatttctcatttttcaggatgttggcattgaagtatga

SEQ ID NO: 20957 - DNA, 1327 bp, Oryza sativa
  Clone ID: PAT_MRT4530_26275C.1
ggtggcacaactgccttagccatatttatagggggacaggtcatcattttttttgggttgccaaaaattggagaactaaatatagctaactggaatccagcccgtgatcctttgaacaatacagggaaaactctacatacaaactaattatttcagaacactgggagctagtactacactgaccattgagactgggcctaaactcgtgttgtctggaccggaactaccattacatgaaatgatgcgccaatggtgtgagatgggatggcagtgcaaaaggtttgttggagttgccaagaccagatctggcactgcagccagtgggcagcgtcagtgcgctttttaggcgggagggcacgcatatcaagcggcgtttctctccctcttcagggctctgggcacaatcaggaaaaactgctttgatggcatgcagcagccccatctgttgcttactgatagctgcctgttcacttttcttggcccaaagaacacaataaagaccaccaaccattaccactccgcttattatgcttcccagggtgactgcttctcctaatacaaatgaggacagcattattgtgacaagaagagttatgggcattgtcatggccaaaaagaccggcccactcttgtcaataacccatacttgcatgtaatatgcaactcccgagacaagtacccctgagtagatcacagcaataaggcccatatccaggtgcagcttccatcgtgaaaaatccctctcaatcgccagagcgatgaagaaacactgaatagttgcaaagactatctggatggttgtgttgaggagcttagaggggtatacctccaacataggaccctgaagcactgtccaaagtgcccaacatgttgttgataaagtcgtcagaaaaattcctaatatccatgtcgttgcaggatgtgaagtagccgcagcatagacagtactcgtgcgaaaaagatggtgatggttgaatgatttcaactcaggtccttggtagaacgcaagtatgatgacaccaacaatgcacaacactacaccagaaacttttgcaattccattgatcctcttcaagttcagggactccatcccatataatgcatgcaaaaatagtttcagagacactttgaatgtcagtggtggagcagttttcctttctagcacaaatgcgacgggaaccaagaacaggatagcaatcacatgcctgtagaaaacaaagacagatgtgctcatgccttcattgaaggcaaattttgttacaatctgcatccctccatatagggaccttatgaggaatgcaaccacaaaagccgctctagtgcccat

SEQ ID NO: 20958 - DNA, 1875 bp, Oryza sativa
  Clone ID: PAT_MRT4530_26276C.1
ccctccccccccccccccccgctcccccccgcgcaccgaccccactcggatcctctcctcccctcctcactgcctctctcccgtccacgagcggttggtcgatcgatcgatcgatcggcgcggtccttcgccagccatggcggcggcggcgatggcgccctcgcctccggagccggcgttgccgcgggagctcagcctgggggacctcagggcggtgtccatgctcggccggggcgccaagggcgtcgtgttccacgtcgtgcccgcggcggcgggggaggaggaggcctccatggcgctcaaggcggtctcgcgggaggcggcgcggcacaagaagaacgggagcggcggcgaggacgggcaccggcggatctggttcgagcgggacgtgctcatgtcgctgcgacacccgctgctcccctccctccgcggcgtcctcgccaccgacgccgtcgtcgggttcgccatcgaccgctgcggcggcggagacctcaactcgctccggcgccgccagaccgagaagatgttctccgactccgtcatccgcttctacgccgcggagttggtgctggcgctcgactatctgcacagcctcggcatcgtgtaccgcgacctcaagccggagaacgtcctgatacaggacagcggccacatcatgctcgtcgacttcgacctctccacgaggctcccgacgccgccgccgccaccggaggagcaggacgcaacgattgctgattccatgccggagcctccgcccagttcaccgtccccgaaccgcgcgaagggcaagaggcaaccgggggcggcctcgtgcttcccgttctgttcggtcggcgccacgaagccggccgcgtcggcggactcgccgtcgccaacgtccacctcgcgcacggcctcggcgtcgtcctcgtcctcatcctcgacggccaccaccgcgtcgtcctccaccgccgctggcgtgcggtcgccagcgaagtcgaactcgttcgtgggcacggaggactacgtggcgccggagatcatcgccggcagcgggcacgacttctccgtggactggtggggcctgggcgtggtgctctacgagatgctctacggccgcacgccgttccgggggctgaacaggaaggagacgttctaccgcgtcctctccaagcagccggagctcgtcggcgagaagacgccgctgcgcgacctcatcgcccgcctcctggagaaggaccccgagaagcgcatcggcgcgcgcgggatcaaggcgcacccgttcttcaacggcgtcgactgggaccgcatcctccgcgtggcgcgcccgccgttcatcccgcccccgccggaggacgaggacgaggccggcgaggtgctcgacgtcgagaaggtcgtcaacgaggtgttcgcggccaatgacggcggggccgcagcgggtgtggtggagaagccttcgccggaggcaggtggaactctggccgtcggcgatggcgagcagaggagagatccgtccaaagaaggcgatttctccgtatttttctgagcgtatttattgagttcttttttagcgttctctctcttaaaaatggaaaattacatagctattttggttttttctatggactagaattattatgggggtctctattagtaatagacataattaagacaaagtacggcccggtggagtacaatgaaatcgactgttgctcttgtgtttaaatggagtacagtctgtatagtattttgcccctttcccttttattttcttctttgttggatacatttccccgtgcaacgatgcaagctaggggattactgaagagtgtacataaggaatgatgaacagcaaaattggcctaatgttgtgtcaaaaaaaaaaaaaaaaaaaaa

SEQ ID NO: 20959 - DNA, 337 bp, Oryza sativa
  Clone ID: PAT_MRT4530_26277C.1
aacaacaaaaaggagcactttttcaccagtttttttgttttaaaaacatttaattattaattattggtttggaacactatctggttgctggcaacacagcaacggggggatcctactagctttgaggcaggccagttaagcttattactggccgggggaaaaaatgctgtattgttgggggtcaacccagaacatgaacggaaaggtgcccgcttactgcttagccttggtcagcctaacgcgggtaatcccgcggttgctgttggtgatacccgaagtagccttcctccgacgacccctggcggtagaacctttgttagaacaagaaccccttgtc

SEQ ID NO: 20960 - DNA, 592 bp, Oryza sativa
  unsure (1)..(592): unsure at all n locations
  Clone ID: PAT_MRT4530_26278C.1
ctagtggatccccgggctgcaggccagccgccgccgccgccccgcgtcgtcacgcgcgcgcgcgcgcgagaagagagatccccctgccccagccgccacggcggtcggcatacgcgctgctgctacgacctacgcctcccgcggcccccgctacgcctccggggtccacgcccactccgcgatctccgcctccgccgccgccgccgcggccgcagccgccgcgctctccgccaccggcatccccctctccgcgcgccacctcttcggtttccctgggntttactatagcccattgtgatgctggtgcaccaactggattgaatgatgctcctgatcttattaatggtcttaatgacaaaatacaagactccctccagtacccaataaaggaataccccttggagttgaagccactcttttcggcctttgctttaaagaattttagcttgacaaccctgaggtccttcttattgtactatttgccacttttggaacctcatccgcacactgatggtgatgatgaggatgacctgcttcaagatgagtctgaaaataggccacctgttgatttggttactcccttctacaattc

SEQ ID NO: 20961 - DNA, 1049 bp, Oryza sativa
  Clone ID: PAT_MRT4530_26279C.1
atggacgacggcagcaagctgcagccgacggcaacaaggttccggtggctgaaccttgcgcgctgcacgctggcctccgtggtcaccgtcctcgccgtcgtcgtcatcgcccgcgccgtcgtcgtgctactccgcccggagaagctccggctaagcgtcgccggcggccgcgtgtccgtcagcaggatgccggcgatgaagccgctgccccgcgtgaacatgagcttcgtcctcagggccttcaaccccagcggccgcgcctccatcgagtacacgggcatcaccgtcgcgctccgggccatcgacgacggcgacgccgcctcgccggcggcggcggcgccgatcatcgcgcagttcccgttcccggacgtgcccgtggcgcagcaggtggcgcacgaggcggcggcgagggtgtcgctggcggcggcggaggacgtgcctctccggtacgtgaaggcgctgttcgacggccgtggcatcagcgcggcgatacaggtggacggcttcctcaccacccgcatggagatcgacgggaggatcagcaggagcaacggcggcgtcgccaccacgttctactgcctgccggtgaccatcgccgtcggcgacggcgacgacgatgagtcccgtaccagggacacgtggtgcctagacaaattcttcggtggttttgaccccggttttgttctacgtgcagctgagtcagcgtgggacccacatgagcctcacatccggccagcacttgggaggaggccgccggggcgaggcgaggcgggagaggaggaggcggcggcggtggcggagggagaggagatgccggggaaggggcggaggcggagggagaagaactacagggcggcgcacggcggcgaaccgcggttgcccccaccaccgaagcagcgggagctcgacgcgctcccgtccaagctccgccgcctcatcgccatccaggagaagcacaagggcggcgagaagggcgccgttgccggagactcctcagggaaacaaggagagagcgatgcggcgaagaacaaggctctcgcaaagataag

SEQ ID NO: 20962 - DNA, 426 bp, Oryza sativa
  Clone ID: PAT_MRT4530_2627C.1
gcacgaggcgccgccgccgtcgacgactgccctcccccgccttcgccgcctcccccctgtcgtcacaccaccggtgcgccgcccttccctcaacgctgcatccgccgcctggccacccgtgtcgacgcttgtcctcccccacctgccgccatccctcctccccggtggcgcctcctgccgccgtccccacttcgcgcagattgggggaggtggagctccgtatggacgagttcggcgacgcggacgagctcgtggctctcgagttggtgcggggacggtgcggagtttgtccgcggcggcgacggtggcgagcaagatcggcggcgaggagcagggccagcggatgcgtctcgcgcaggctccggcgacgccgctcggcctcccaaccaccgccagtgctgccggccggctatcctcgcccttctt

SEQ ID NO: 20963 - DNA, 259 bp, Oryza sativa
  Clone ID: PAT_MRT4530_26280C.1
aggagacatgcctgctatgatgaagtgcagagctgatggagaagcttgagcaagatggtcatgatgcggtatgctctgattgtcaagagcgacttgcgcatgtacgcatatgggctatccaataccaatgacgatgacagcggaacaggctacatgcacgaggtgcgagagctaactgtagaagagctgatgtgatcatccaactgagccagaagctgacgagattattgccaagaagggagtgaccatattacctgac

SEQ ID NO: 20964 - DNA, 699 bp, Oryza sativa
  Clone ID: PAT_MRT4530_26281C.1
tttttttttttttttgcaactaatgcctttcctcttttctttgttaattaacacacacttaaacagatgattacatagcttatatagctagctagtcttcctcacatgcacatacgggagcgcctactccccaggtcatacgcgcacgtacgcacggcctgcacgagccacgaactcatgcacaacagactcactaactccatgatccacatgaagcggtctaccagcctgaccacctaatcacgcatacaactaactaactacttgctaattccatgcatctagttattccactaattaaattaactcctacatgcaacacacgcgcgaacctttaccgatctatgcacgacaacacatgcaaaatattctaatacatgtacaagtcatgattagtgttaacagccgccacatccctgccttcactgtagttggcaagaatcttgcagccctttgttctacatgtttctctgtgtttttcccagcgcccggctcgcctagccgccgcctcgcccactcgctgccgtggccggctcgccttctggcctgttcgtcgtcgtcggcccactcccagccgtcgcccaggccgccgccgcgcccagccaccgcctcgcccaggggagggggaaggaggaggggaacgcagccggggaggagaccggtgggaagccggagagaagaggagaagagataaggtag

SEQ ID NO: 20965 - DNA, 414 bp, Oryza sativa
  Clone ID: PAT_MRT4530_26282C.1
tttggtttttttttttgtgttggttttttttttttttttgttggtttttttgaaaaaataaacaccaaaacaagtatatacctgcaaaaaagggccaaacccaaattaggcccgaggaaaagaattcccggaggggccccggtttaggactggaaaactttcactaaaaaacaaagcctgggtaccctaaactaaaccacctttacctaaaaggaaaaggctaagaatttgggaccctagaccggaaaaagctttttaatctaattttcaaagggaccagcacacggttttttggttaggggaagctgcttagggggcccgaccagggggtggttttggggacccaggatgggccgggggtggaaaaatccgggctgggggggggttccggagggaaaaggggggcattctctc

SEQ ID NO: 20966 - DNA, 4140 bp, Oryza sativa
  unsure (1)..(4140): unsure at all n locations
  Clone ID: PAT_MRT4530_26283C.1
gctcctcgttcctccttccgcatcaccaccattgagcaacatttcgacaccagataccaagcagcggaggagagagagagagagagagagactccatagacggccatcgatcgtacgcgactccccccatccatccatccacccgccggcgccccctccctctcatcgatcgatcgattcccaccgccgcccccgttttgaccacctacctagggtttcccccatcggaatgatgaccatgagcgacgatggagaccgcacctgcccgctctgtgctgaggacatggacatcactgaccagcagctcaagccctgcaaatgcggctatgagatttgtgtctggtgctggcaccacatcattgatatggctgagaaagaggacactgagggccgctgccccgcatgccgcactcgctatgacaaagataggattgtcaagatggctgccacttgtgacaggacggtagtggagaagaatgtggacaagaaacagaagacccaaaaggtcaagtcaaaggccgcggtaactgtggaagctaagaaacatcttgctagcgtcagggttatccagagaaacctcgtgtacataattggactacctgcaaatttatgcaacgaaagcatacttgagcgcagggaatactttggtcagtatggcaaggttctgaaagtttcagtttctcggccgactggggctccttcccagcaggcaccaacaaacaacagtatcagcgtatatattacatatgccaaagaagaagaggccatcaggtgtattcaagctgtacacaattttgttttggaagggaaagtgttaagagcgtgctttggtactacaaagtattgccatgcatggctgcggaacatgacctgtggaaatccagattgtctctatttacatgatgtaggaagccaggaagatagtttcactaaagatgagataatctcagcatatacaaggagtagggttccccaaatggcgtctaatgtttctcaaagacgcgcagggactgtattacctcctccagcagaagatttctcatatagtgcagtggttgcagctaaacatccaatcaagaatggaataactaatactgcaaatcaatccaggctttcgcctccaaacagtagttctgggagatccacacttccaccagctgcttcatgggggcatcgcgatttgaataccaggacaacagcaactggggtggcatcgtcacaatctcttactaaatcaaaagcagatcctcaaagtaattcattctcgagttcttcgactgtttcaagtacaaaactaccttcttcatggaatgatgacacaagcacagttccgaaaatgacggaaggacgagatagtttgtctaaaaccttgaagccatataagcctggtattgcaaaggaaacccaagctgtaacatcactggagtcatcgcttgacatagacttctctaccataccttcagcttggaacgatgatgatgtcacatcagatggcatgtcaaaaggaagtgatgagaagcaggttgtaaatgacaatggaaagtttgaatgttcagtttcttcaaagccagctgaatcagggcatcttacatcgaagtcaacgacatcaccaaagaaagacatcgcagtaaacagtaccaggcaaagtcctctaaattgtgtatcaagtccatcgatttctaaatcagaagtaaaggatggtgatggtgattaccaagtaaccaacatggcttctaaaacatctacttcggtaattagaaaggaccaatctaatcaagcagctattgacacagcaaccgaagatactagatctgagagcacggatattgataggctgtctgttggagtatcttcagtaacattaagcagaaaagatggggttcaaagtattgccgaaaaccaacaaccggatgcaatcctaagtacttcagttgtggtgccctttagtcagaatttgaaacttgctgagtgtaatgattctacatgtcagcctagttcagataagcatcgtgattggtgttcagatatccagagtagtgtgtctcctcagttaaatgacatagaaagttatgcagtagccactgataaatctcatggtagagtgctggatgctgctgatcaagcttcgtcttcaccatatgtccatttccctaacactgctcctatttcactgtggaatggtaaagagattaaccatacatcaacaagtgatagaacttccacaatgatgcaacctgggctgttatcttcagttgacagcacttctaccatgttaaatggacatcaagaagggctagggactatatatgcacctggtaaggtttctgaacatcctagaatgaaaaaccatcagcctggagcagttggtgcagtgagaattgataacataggcagttttgacaaggctgtaagtgtaaataaggatgagagcagcataattgctgatattttgtctttggagtttgatccatgggatgagtcgtattcaacggctaacaattttgctaagatgcttagtgcatctgaaaagaacgatgtgctttttgatgcacgttcatggaaaacaaaaaccagcaatagtgagtctagattttcatttgctagacaagataatcaaggaagcctcctagattcatctatgagaaattataaaagtgagcagaatttcagtttgccatcccagaattctcatggaaacatttatcagagtggcattgcatttcaatctcctgaggaaggtttctcaaagagcaactctcttactatgttggatatgctagctaccggcacatcaaagcctaaagtatccgcgcctcctggattttcagcaccagcaagagttcctcctgggttttcttctggattttcatcccatgaggggttgaatccacctccaggattttcatctcataatgggcctaatccccctcctggattttcttctcagggtgggtctaatcagatctatggttcggcatactcagaaactcgcccatttgatgatcttttgggtataaatactagccattatcaaccacagttagctagacaaacaagtgatatagaatttgttgatcctgctatattggctgtgggtaaagggcggatgcctggaataagtgattcagggttggagatgaaaacttcccatacttttccttcgcagttgcaaacatcaaatgatccaaggtttcaattacttatgcagcagaacgtgccttcccatcaaaatgttggatttgcagaacatgttcaagatgcattcaaccctatgaatgataattatcttgcatcccgacttatacctcagaaccatggttctctatcctcttacacacagatgtcactccaacaacctagaagctcacatcttacaaatggtcattgggatggctggggtgatttgagacaagggaataatgtttccatgcctgacatgtcaaggatgttatatccaactgaagcaaacaacttccacatgctgggttcaaatgatctgtataacagagcttttggactgtgattatctttgggagatgcgacttgacctatcacccagctaacttgcacatttctcagttcttgaaattgattggttgcacaggctcaagatactcaacttggtgattgttgagcttgtggattggcgcatgagtgtttattgaaaggcattggattcaagtggaccagcatgaaactgggtgtgtaaccagacgtttcaagcaccaggttctgttttgggcgaaaggatatatatatcagatgcatccatgaggttgtccttcaagtttatatatacttgtggtggaagcagactcgagaatatataaaccgtttagcatttgcttcttctttttttgccgtcatgtggaaatattttcttggttttggcatagtaaaagcgtcattttgtacatgatacgttactcgttgctagtagcttttgtggtgcacatgagattattttgttgatgggtttgctgaaccaaacgtaaatggctatatggtaccaggccagccagcttatgctgaattgggtgttgtttggtgttgaatcaaaaacaaggtcgaggagtacttcggtgtgctgttgttaataatatcaattcatgacaaaaaaaaaaaaaaaaaaaatttnaa

SEQ ID NO: 20967 - DNA, 363 bp, Oryza sativa
  Clone ID: PAT_MRT4530_26284C.1
aggattttcatctcataatgggcctaatccccctgctggattttcttctcagggtgggtctaatcagatctatggttcggcatactcaggttctctctctctctgcttctcctaaaacaatttcagtttctaataagtttgcaatgttttgcagaaactcgcccatttgatgatcttttgggtataaatactagccattatcaaccacagttagctagacaaacaagtgatatagaatttgttgatcctgctatattggctgtgggtaaagggcggatgcctggaataagtgattcagggctggagatgaaaacctcccatacatttccctcgcagttgtctacatcaaacgttccaaggttt

SEQ ID NO: 20968 - DNA, 509 bp, Oryza sativa
  Clone ID: PAT_MRT4530_26285C.1
atggcggcggctggggcgcatcgggcacctcgtaacgccgcggttgttcttctcatggcctccgttggtgaagcggggctcatcgccgtcgccaccatcggagttaataccgagggagaaggagggcgcgttgggagcctcgtaacttcatcgttgctcctcccggcggcgctcctcatcgtcgtcattgtccgagtcgatgccgagagagaaggatggtgcatcaggagcctcataacgccttatgttcctcccctccattgccgccgtcggtgaggtgggattcgtcaccgtcgccctcgaaatcgatttcaagagagaaggatgaagtccatccgccagtgacgacgagggaggcatttggtggagaactgagtaggccggcaaaggggggatcagtggtcgacggagcagagcagcggaggccggagtaggccgagagaggggagacgaaggcaggcgacgtcggcaaagggggcggagcggagtggctgcggccgaagtaggcc

SEQ ID NO: 20969 - DNA, 887 bp, Oryza sativa
  Clone ID: PAT_MRT4530_26286C.1
gggatataaaaaaaatcagtatatgcatttacaggaaacattcagcatatgcatttacaggaaaatttagcatacaaatctgaaagcatgcaagggctgaagtacacaatatccatctatttctataaagatattcaatctaattgtctcctaatcaaccactggcaataatttttggggcatacttttgactatggtgataaaatgattatcctcacctgctgctttgccacatgtacgtgaatactctgctgctctccttcagatgtgttcatcacatcagggcaaaagaaaccagatggcagccgggctgatgtggcgatgatggcggtattcaacaagtcaatatatcctgcaacgaggagaacaatggtgtcaactgtacatcattgagcagacagacaaacaaatcaacatgttgttgatgaatgaattatcaattgagcatcatccatgtcttgtttcaaaatccatctctttcttctttggttgtagtggttccactccggttatgtttcaaggttcgttttctctttctcgttgccacgacaatatgaggcttcttctaccagtaccagcaaaccgatgcccacataagcaacacctagctagtaacaaaattcatggcttgaatcttaggaactattaggcttgtttgccggcagtcagatctaaccttcatcttgcatctaaaaatatagttctattcctaataagcactaaagaattaaaagatctgccatcacaaaagagtaacccatctgaactacatggagctatttactcaaagatcaagattcacaattattagctagtcctctgtactataatgcatcagaacagagcagtatccatcacttaatctgatcgagcttgacaatgtaatt

SEQ ID NO: 20970 - DNA, 374 bp, Oryza sativa
  unsure (1)..(374): unsure at all n locations
  Clone ID: PAT_MRT4530_26287C.1
ccttaatgttgtcaaaattgttattcctagataagataagtactacaaaattccttttgtttaaaatatcatgttgccaatgcttgagaaaagaatctttatagtttcttacaccatgaataattcctgtcctcgaatcactgaagacagactgactgcattccatgagtttttttgaacatgacaaatttagttagttcctcgtatgtattaaaaagggactgctttatgtcttttttacgtataatttatctggtcacaaacagacagttcagaagctgcatgaaaaggtttgacctctaattggcaggagcatcccaaccctaaactttcctaangcggtgcccagaatggatgcgggctcccaatttttt

SEQ ID NO: 20971 - DNA, 254 bp, Oryza sativa
  Clone ID: PAT_MRT4530_26288C.1
aaaaaaaaaaaaaaaaaatagaaaactaaaaaaaaaaaaaaaaaaaagaaaagaagaaaaaacattaaggagatgttgcaacataataccaaaaggtattaattaaaaaaagataaggcaataaaaaatacattgatccttaaacaaggggggccccctttgctggtccccagttttcctcccctgccttgcggcattttgatgtttttatgggggtaccttatattttatttcctcgcccgcttttttacacc

SEQ ID NO: 20972 - DNA, 1359 bp, Oryza sativa
  Clone ID: PAT_MRT4530_26289C.1
atggagagcgaggtgtgttggctgctatgcgcagcgctcgccgccgcgatggcttgctactacctcaccggcacgatgcgccgccgatcgcggcggctgcctcctggcccgacgccgctcccggtgatcggcaacgtgctcagcctgcgcggcaacatgcaccacgctctggcgcgcctcgccggcgagcacggccccgtgatggcgctgaagctgggcctcgtcaccaccgtggtcgtctcgtcggccggcgcggcgagggaggcgttcaccaagcacgaccggcgcctcgcggcgcgcgcggtgccggacactacccgcgcgcgcgggttcgccagccggtccatgatatggctgccgagctccgacccgcgctggaagacgctgcgcggcgtggcggccacccacgtcttctccccgcggagcctcgccgcggcgcgcggcgtccgggagcgcaaggtgcgggacatcgtcggccacctcgccgggcacgccggggaggtggtcgacgtcgggccaggtcgtgtacgggatggcgtcgctgggccggagaagcgctacgacaaggtgttcggcatcttcgacagcgtaatcaacagccgcttggccgacgcctcgaccggaaagcacgccgacgccggcgcaggcgacttcctggactccctcctcgacctcatgtccgccggcacgatcgctcgcgacgacgtgacaagcataatgtacgacttgttcggcgccgggaccgacacgatcgccatcacggtggagtgggcgatggcggaactgctccgcaacccgagcgtaatggccaaggcgcgcgccgagatgaaccacgtcctcgccggcaaggtgaaagccacggagatggaggagaacgacgtagagaagctgccgtacctccaggccgtggtgaaggaggtgatgcgcctgcacccggcggcgccgatcctcgtgccgcaccgggcggaggaggacgacgcggagatcgggggctacgccgtgcccaagggctcgacggtaatcttcaacgtgtgggcgatcatgcgtgatccggtggcgtgggagaggcccgaggagttcatgccagagaggttcttggacatggcggaggaggtggatttcaggggaaaagaccacaagttcatgccgttcgggaccggaaggaggctgtgcccggggttgtcgatggcaaagcgcgtcgtgccattcattttggcgtcgctgcttcacgcgttcgagtggaggctccctgctggtgtgacagcggaggctttggatcttagcgagaagtttactactgtcaatgttcttgttactccaattaaggccatccccatacttgcctctgatcaaatttaa

SEQ ID NO: 20973 - DNA, 487 bp, Oryza sativa
  unsure (1)..(487): unsure at all n locations
  Clone ID: PAT_MRT4530_2628C.1
agttcttggctttcttcgccgtactcgtcttagcaacggcggtcgttcctgccgtcagccagcaaggatacctgagcatcgactgcggcctggaggccaacagcagctaccaggacgacaacaggatcttgtacgtgcccgacggtccgtacgtcgacggcggggagaaccacaaggtggcggcggagtacgcgtccagcttccagcgcccagaccagacgctccggagcttcccctccggcgtacggaactgctacacgctccccaccgccgccgggtccaagtacctggtccggctggtgttcgtctacggcaactacgacggcaagaacatctnctcctcctcctcgtccgcggcggcggcggcgctcaggttcgacctgtaccttcggctgagccgttggaccaccgtgcagggcggcacccgcagcggcggcgaggtgcacaggccgtgttcgtggcgtgggccagctgggcgcccgtgtgc

SEQ ID NO: 20974 - DNA, 936 bp, Oryza sativa
  Clone ID: PAT_MRT4530_26290C.1
atgcccttattatccacggcgagtcctcgtgacttccaaccggtttgccatctccgctcgatgcacgctgtcgtcgtctgtggagttccgccgccaagaagaaagggatggcgtcgctgggcggagaagcgctacgacaaggtgttcggcatcttcgacagcgtaatcaacagccgcttggccgacgcctcgaccggaaagcacgccgacgccggcgccggcgacttcctggactccctcctcgacctcatgtccgcaggcaagatcgctcgcgacgacgtgacaagcataatgttcgacttgttcggcgccgggaccgacacgatcgccatcacggtggagtgggcgatggcggagctgctccgcaacccgagcgtaatgaccaaggcgcgcgccgagatgaaccacgccctcgccggcaagaaaaccatcgaggagaacgacgtggagaagctgccgtacctccaggccgtgctgagggaggcgatgcgcctgcacccggcggcgccgatcctcgtgccgcaccgggcggaggaggacggcgcggagatcgggggctacgccgtgcccaagggctcgacggtgatcttcaacgtgtgggcgatcatgcgtgacccggcggcgtgggagaggcccgaggagttcatgccagagaggttcatggacatggcggaggaggtggatttcaggggaaaagactacaagttcatcccgttttgggccggaaggaggctgtgcccggggttgctgatggcagagcgcgtcgtgccattcattttggcgtcgctgcttcactcgttcgagtggaggctccctggcggtatgacagccgagtctttggatcttagcgagaagtttactactgtcaatgttcttgttactccactcaaggccatccctatacttgcctctaaaaatgaaaatattagggaatga

SEQ ID NO: 20975 - DNA, 167 bp, Oryza sativa
  Clone ID: PAT_MRT4530_26291C.1
ttctcaatacggccaagatcacgttttatcattttccattcaggatcaatgtccatagctacattgatgaagtttttgtcaaggaacggaaaatgataaaacgtgatcttggccgtattgagaaatgggttctcatgaatggacgcgtggatcaacccggggggggg

SEQ ID NO: 20976 - DNA, 586 bp, Oryza sativa
  unsure (1)..(586): unsure at all n locations
  Clone ID: PAT_MRT4530_26292C.1
ctaacagcaccagcgtcagagaacacacacacacagatttccatgaaacccagaacgcgagaaagcagttcatcaacccgggcgaggcgactcctcctcacttgccgttggattggccgtggccgtggccgtggctgggctcccagaggatggtggtctcggcgatcatggcggtcaccaggtacgggtccatgttggacgccggcctcctgtcctcgaagtaacctgacgaaacaaaccaaaccaaaaccgaaaatcaacacgcgaacatcaaaaataagcagcagaaatttctcccatcgatcaatggcgacgcctcctttacctttgccgtccttctcggtgtcccggccgacacgcaccgacgcgccgnggttcgctacgccctggatgaaacgaagcaagaaaaacgtcgccggagttaagcaaaggaggagcagaagcagagtactataaattgagttattttaccatctttgaagagataccataatataataattagagataactttatcatttattttttttccggctagatcgatatgtggttgtctattaccctagtacataatataataattag

SEQ ID NO: 20977 - DNA, 395 bp, Oryza sativa
  Clone ID: PAT_MRT4530_26293C.1
gtctctcgtgaacagacaatttataacggactatacttaaactattcacatatcaacaatcaacttggatcggttaaccatgtacacaaatgtttataagctaatatgcataactttaacaattttacactgtacaaccactttatgaaataatggccaatcacgataaatagattggcttcgatatttacatgcaaactgctcatatacaacctcactattcacattaatactgtatgcaatttttcaaacatttgatgagactgaaaaatactaagtcataaggactcttaatacaggcttctaaaacatataccatcctgctaggattaatcatctgatgatattggctttcactatagatctgatagaatgcgcttaccaataaaggaggg

SEQ ID NO: 20978 - DNA, 354 bp, Oryza sativa
  unsure (1)..(354): unsure at all n locations
  Clone ID: PAT_MRT4530_26294C.1
cgcttctcttcttcggcgggcccaaccacccnnaaggggtcttttgatcatagcgggtggctaaaaccccggcgtgtgcctcaccatcgtccggttaatcccgccggggtacacggcgcctgcgatctcgcctccacaacctccgatgcccaccgcccactcccgcgccatcaacttcatcccctaggtccccaagagctagctccagatggactaggagtacctcaactagttcctggcgcgcaacctcgggaacaacgccatcctctacatccagcaggtggtggccaacaacaatgagactgtccccgccatccccagccatctggacaactcccactagctgtacatcgt

SEQ ID NO: 20979 - DNA, 144 bp, Oryza sativa
  Clone ID: PAT_MRT4530_26295C.1
gcatctcctttcagctcacacaccacctactgatctcctgctcctcttactcaactacgtcgcgagccagctaccagattccaagccaagggtcacggcagcagaccctacatgcggacgcatcgcaaaagcttctgtagcact

SEQ ID NO: 20980 - DNA, 276 bp, Oryza sativa
  Clone ID: PAT_MRT4530_26296C.1
atggcagactgcaaagggcatagtcaagaagcaaacccaatcaaggcctccatgatggaggttgaagctttcatggccaaacaagaaaaccacaatcatcgctttgagatccaccaccaaagtccacagggaagagcgccaacccttgcaggtctgctcattggaaaattgaagaatggccggcgtaaccttttattgcttgtggatttgaaggactacatgttacagatgttgataaccaaagcatcggttctaagcctgacggttgctagctag

SEQ ID NO: 20981 - DNA, 366 bp, Oryza sativa
  Clone ID: PAT_MRT4530_26297C.1
ctagtgctgcttgtcaggagacagaggtggcaccggcagcacgtcgccgtagccgggccaagtgaaagcttcatgggagccgccgctggaggtcggcgccggcggtggctcgccgccgcctcgcccggccatggactgccctgcacatggcactggcactggcaaaagagacgttgcattgttcctgccgcccttcgcaagggcggcaagccgacgtggcacacgccgcgctggacggcgcgggacggccgtcctcctgccctcttgccgccctggcaaagggcggcaggacccacttgccgcccttacagagggcggcaggcctggccgcctataaagcccagccggctcctttgaggagcccat

SEQ ID NO: 20982 - DNA, 794 bp, Oryza sativa
  Clone ID: PAT_MRT4530_26298C.1
ctttttccttttttttttcccgtcatctgaatggtgcggaactcagatgggagaacaacattttggtatcgccgctttcggcccactttcccgtggtccagccctctcaaggtctgcccgggatcgacaccaacttgcaccgtcacgtccaagccaccggagacgaggacgacgagttcgcggagctctaacgccttcaagtggaccaccctcctcatcccgcccaccacagctgctcatcactcaacatcatcggcgtcgtcagccggcgtctcacgacgccatcaacaacggctccgaggcgtgggcccgcatccttcggggaaagctctttctttcgcccttcctggtcatcagtccacctctgtaccccctttcccttcaaaggggccttccattggggaaggccaaggaaacacgaacgccccaacccatttggtttgtcaattctggttcccgtgcttgcctcgccctcccatcttttttccacttggctccttggttccaaggattggatccacttcaaccaattccaagcccaagggcccctggaccagtccagccaagtccggccaatcaaacttgcttgaagaaggaagggcttccaccgaatttcttgcaccatttccgccaataagggggccaaccaaagaaagatcggatttggtaaaagttttttattgctctttgatttctctatgttcttctgtaatattttggaacccagaaatgtttaaactttgaagacggactggacagatgcccatatttgaatctaagcacccaaaaaaaaa

SEQ ID NO: 20983 - DNA, 232 bp, Oryza sativa
  Clone ID: PAT_MRT4530_26299C.1
gatcgtagtcgagggattcgacaagatctcctggcgacttggctccgtgtactccgacttcgtaaactttgattccaccgcgatatttactgggaacaactccatatacgtgcaaggtatacccttatcggctatatgtccatacagtcgtatggataggcagtcggcttgtctgtcgcttcttgtgtgtggtgaccgagaagcacgagcaagctcattgacaacactaacg

SEQ ID NO: 20984 - DNA, 1251 bp, Oryza sativa
  Clone ID: PAT_MRT4530_2629C.1
atgcctaacactccagccattgtgtcactggttctgttgctatcatgcttggtggcgaccggtgatcagcatgcaacaccagcagcgtacaagctacccctaatcgtccctctcatcagggacaccaacacctccctctacacgatcgccatcaagaaagacgatgcccctctcgtcgtcgacctcgccggcgctctcgtctggtcgacgtgccggtcgtcgacgcacgccacggtgtcgtgcctgtccggcgcgtgcggcgcggccaaccagcagcagccgcgtcgctgccggtacgtcgacggcggctggttctggtccggccgcgaggcggggtcgcgctgcgcctgcaccgcccacccgttcaacccggtcaccgcagcggcaccaaactgctgtgcccggaggcgttcgccaccgtcggcgcgtgcgcgccagagcggctgcttggcgtcgctccccgccggcgccaccggcgtcgcggggttctcccggcggccgctctcgctgccgtcgcagctcgccgcgcagcgcagcttcggcaacaagttcgccctgtgcctccccggattcgccgcgttcggcgacacgccggtgtacatcgggacggagagtctaggcatcgtcaactacacggaaagcctcccgtacaccccgctcctgacgaacccaagaaaccccggctactacctccccgtcaaaggcatcacggtgagctggtacgggcgggacgtcccggcgtccctgccagccggcgcgctcgacatggacgcccgcacgggccgcggcggcgtcgtgctgagcaccacgacgccgtacgccgtcatgcggcccgacgtgttccgcgccttcgccgaggcgttcgacgccgccatacgaggaacggattacgccaaggtggtgcgcgtgccggcggtggagcccttcaagctgtgctacgacggcgcgttcccgttccggaagcggccgccgacgtgggacgttccgacgatcgacctggagctcgccggcgccacgggcatctggaggttgttcaccgagaactacatggtgcagacgccgcgcgggatgtgcgtggggatcctcgagatggaggccggcggcggcatgccggtggacggcgagccggcgatggtgctcgggctgaagcagctggacacgaaccttctggtgttcgacctcgacaagatgttgctgtggttcagcggggagctgtcctttcgcttgacgggctgtgtgtcgcccttttga

SEQ ID NO: 20985 - DNA, 633 bp, Oryza sativa
  Clone ID: PAT_MRT4530_262C.1
ttcttccttctccgcctccgctgagctctgaccgcttccgccatggccgcctcgcgggggccgccgcttctagggttccgagccctcgcgctcgcgctgctgctcgcgatcctcctcttgctcggctgctccgcccccgccgcgtatgcgggggcggagggggtgctgaggcaggtggttgggaggaggggcgacgacggtggtggtgggaacttcttcgagccgttcaacgtgacgtacgaccaccgcgcggtgctcatcggtgggaagcggaggatgctcgtctccgcggggctgcactacccgcgcgccacatccgagatgtggcctagtttaattgcaaagtgcaaggagggtggcgcagatgtaattgagacctatgtcttttggaatggccatgagccagccaaaggtcagtattactttgaagaaagatttgatcttgtgaaatttgcgaagctggttgctgccgaaggtctatttctttttcttcgtatcggcccatatgcttgtgcagaatggaatttcggtggtttcccagtttggttacgtgacatccctggcatagaattccgaactgacaatgaaccattcaaggctgaaatgcagactttcgtgaccaaaattgtcact

SEQ ID NO: 20986 - DNA, 999 bp, Oryza sativa
  unsure (1)..(999): unsure at all n locations
  Clone ID: PAT_MRT4530_26300C.1
ccgggctgcaggaattcggcacgaggaacagcatgtgcagcagtcctgatgaagtttgctgcaatcaaattcaacctgaactcatggcaggccatttgagatcactagtccaacatacattcaatggcgctgttcttgctgtacatccatatctagatagatatgtgttggcagcagctggaaatgtgctttttgtatttggatttttaaatgaaagtccccatcggataaaaaagtatactacgagtaggacacgatttacaataacctgtatggtgttctcttctattcttatcatgagcttctttgtcgttacctctaatcctcgtattgatttatgccagaatcttaggaagttggaactgatctattctgatcctgcccaacggctagtgggtgatgttgcccttttgagctgtgaaactgctgttgtatcagatcgacgagggagcatatctgtactgtcttgcccaagattagaagtatccgaaagtccagagaagaacctagcggtgcattgttcattttacatgggtgaaacagctatgagcatccagaaggttgcatttaagcattggcttccaattgatgatttgacagaaccagtgttggagtcggtatacaactgtgtcgtcgcaagcactctgctggggagtatctttgttatgattccactcacaagtgaggagcatcaaatgttgcaagatgtccaagaaagactttcggttcacccattgactgctccactcttaggaaatgatcatgcagagtttcgtcgccgtggtatcccgtcgggagtaccgcccattctggatggcgacatgcttgtgcagttcctggagctcaccagcgaacaacagcacgatgttctcaatattgtttctcctggaaagaagaggcaacacgatatctcggttttccaggtcatgcgagcattagagagggtgcattacgcactcaactgagccgagggcggttnaaacaattccattttnaacc

SEQ ID NO: 20987 - DNA, 750 bp, Oryza sativa
  Clone ID: PAT_MRT4530_26301C.1
tggaaactaaacaaggaatgtttctatagatagtttccctcctaatgcttgtatggctcacatcattgcttatattgccaataattaatggttctaacttagcagcgttgaatacaattcttactcttatgtggcatatctggaaggcaaggaatggatttaaatttcagggcaaacacaaggagccgtctcaagtatgtcatggtgctgaggcaatggtaagtacttatttgaaatattcaaatcatctcaatggaaatagatgttatgtggatgcaagttggaaagatggttcaacgggtattggtaactttattcacttgacttctaatcacaatgctatattaatcaagcggagcttattgccatgcatttagccatgcaagtaatccacttccttaatattcctgaaactaccttcctcacagataacctgataattgcagaagtgttcaggaaaaaagactttggtgcagatccaggtcattggagtctcaggcccttttggagtcaaattctttccaccattcctgaaagttggatgcaggtcacttggatacccagggagatcaacaggatggctgacaagatggcgaaagaagctagagctatgttgcttaatgatcctatctataattgtcaaaatgtctctcaccttgcttacccaaatagagggtgttatgccaatgctattaagaatagcttcagtggcacaaactgtgtaatcaagcatgtcttgtgcttctaatt

SEQ ID NO: 20988 - DNA, 243 bp, Oryza sativa
  unsure (1)..(243): unsure at all n locations
  Clone ID: PAT_MRT4530_26302C.1
gttgaagcacagtagtagaatccaacaacaatgaagatcattttcgtatttgctctccttgctattgttccattgcaatgcctctgccgccggtttgatcctcttagtcaaagttataggccaatatcaactacagtcgcatctcctactacagcaacaagtnctcagcccatgcagtgagttcgtaannacagtatagcatagtaacaanncgccnnncaaccagctacgttcatgataaca

SEQ ID NO: 20989 - DNA, 495 bp, Oryza sativa
  Clone ID: PAT_MRT4530_26303C.1
atgcttgattacacagtttgtgccactgaagctattcttaatagcattggcataacaccctctatttgggtaagcaaggtgagagacattttgacaattatagataggatcattaagcaacatagctctagcttctttcgccatcttgtcagccatcctgttgatctccctgggtatccaagtgacctgcatccaactttcaggaatggtggaaagaatttgactccaaaagggcctgagactccaatgacctggatctgcaccaaagtcttttttcctgaacacttctgcaattatcaggttatctgtgaggaagggaggaggggttgggaaccgctgctcatgagggagagggcggcgcactgccactcaccggtggggagggtgccaccgccacttgctcttggggagaagctaggcgccgccgcaactctccttcgcgagtggataagggagaatgagagggagaaggagagggttctcacgagtggataa

SEQ ID NO: 20990 - DNA, 528 bp, Oryza sativa
  Clone ID: PAT_MRT4530_26304C.1
atggcacaaggcggcggcgtggtctccattcgtcaaagcaccggcgctggtgctggatctactcgcgagtggcgatggggactgcagaaggaggagaggggtggcggcggtggcttgagggattgggacgcgagggatgaaaaactaggttttcttatgtgggctgctggacttctatacgatggatttaggcccacctgtcagtggatagctctaaagtctggtagtggtagtcgtagtcctgaatatgtagagtcaggggatagcagctctgctagtgagaacatctctgatgatgaagatgataatgtggctgccaagaatagaacctctaacaatgcccaagcaaagaactccaaagcggtccatcctgctccgcgttcaaataggaggctgaagaatatcaacaccttaatagacaatgacaaagtactggactgtcgatggactgtatatgaatttctagactttattgtgtgttcaaggatattgtatgaactgacttcagtgttcaaggatattgtctga

SEQ ID NO: 20991 - DNA, 744 bp, Oryza sativa
  Clone ID: PAT_MRT4530_26305C.1
gtagaatttatctaacagtatacaattggctgcaagaaggttgcgttcgatctattgccccttccatctacgtacgatcatgttccggcccacgtgcgctggcatcggacggtggcagaagcgctgctggatcgcagatggatcagagacatatgtggggcgttgggtatccaggccatcccggactacctcaagctttggtcgcttgttcaatctgttgatcgcagtaccgccatgttcttcggtcctttctctcagccccaatctggaaatcgctcgccccgcctcaacgtcatttcttcatatggttggtagctatgaacagatgctagacaaccgatcgttttacgcaaccgtgggttgccacacctggatcgttgtgtcctctgcgatcagcaagatgaaagcattgaccatattttggtagcttgctcggaatcaaaggcaactttggtggtagacgttgagagcgatagagcatccagactgcttgcctctaaacgagacatctttccacctctgactttgcagaagccgaatgaagattcctaagtcacatcaccgaggatttgacactgtcgcaacgctggtggcttggacgatttgaaaaagaatgaaacaatcgggtattcgatcaacagaacaggccttgggtcgaggtggcaaagggaaaggttgaggaagcggtgctttggtgagcagcaaactcaacgattcccttcattttgccgttgcgaggtcgtg

SEQ ID NO: 20992 - DNA, 423 bp, Oryza sativa
  Clone ID: PAT_MRT4530_26306C.1
aaatataccgtcgatcttgcgcaatcgttgcgcgaaagtgacgagagcgtgacgatgcacgcggtgtcgcgcgagaccgcgtgtgagcgacgagtctccagcgattgtgacggacctccagtgagccctctccttttccctcccgcgaactgctctaacggagaagaggacacgcagtcgagcaatgacagcggcgacggcaagcggagcagcaaggaaggcggcagcaaggtttggattcatcacgacggcagctatcgcgatgtggctgaccgttgcggcggggtgaagggaatgattgtggtggtggcgcggtgccatgacatcatcatgcacttacctctagcgaaagtcccgaagtatgcttgtcctcagatccatgtcataggtgttgatgacaggtgcggctgcggccacttctag

SEQ ID NO: 20993 - DNA, 402 bp, Oryza sativa
  unsure (1)..(402): unsure at all n locations
  Clone ID: PAT_MRT4530_26307C.1
ctctttatctgtctacgagaggtagccgcaggccggtgactaagttgcgtgcgcgcgtgcacgccgagctgccgaaagtatgggcacgcacatcgaccccactggcggcggtccaacggagacagcctgagaagccgaagctgcagattgatgatcgacaacacaggggcgcaagtcctacaaaggcgacagagtgggcgctctcggcacgcagaaagcgagggggacgccacactgcacatgctcattaacatgggccacaactnctctgacagagaagtgagaggaaagccatggccaatcatgtgcgacataagtactccaacaccatgctgctggcccagatgaaaaagggcactgtcatgctatgaacgacgctgtacaacaccgacaagaagctag

SEQ ID NO: 20994 - DNA, 221 bp, Oryza sativa
  unsure (1)..(221): unsure at all n locations
  Clone ID: PAT_MRT4530_26308C.1
gtttgggcagtacatagggattactatttaataatatacgaatgttgaaaaatagtttcatgcaaaanttggaaagggtgtatgaaatgctgtaatacggaaggaaaggtggttcttactccacgaacgcatttnctagatatttatatcaataaaatttcctcaaaaaaaaaaaaaaaaaaaaaaaaaaaaaaaaaaaaaaaaaaaaaaaaaaaaaaaaa

SEQ ID NO: 20995 - DNA, 384 bp, Oryza sativa
  Clone ID: PAT_MRT4530_26309C.1
gttggcttctcctccccctcccggttcggatcgggtcggttcggatccggttcgagttcggattttccttcggttcgggggttggtgggaaagcatggtggagaccgatgatgcaatccgatgctacgaaggggtacccttgtgaggaatgagtgaacactcacctgaagcaagaggcttgacctaagagagattgataacaccaagatcatccgccaggcttaccggaccatgcttgtcaccgaaccggactcggaacagtacatctacggtgccatcctgtacgaggagacatctgaccaattaattgatgatggtaaaaaagattgttgacatctctcacagagcagaaaattgttcaacgtatcaaggccgacaagggtt

SEQ ID NO: 20996 - DNA, 219 bp, Oryza sativa
  Clone ID: PAT_MRT4530_2630C.1
atgctgccgaccttggcagtggcgaggaggttggcggggaagaaggtgatgaaggatggtggagctgacgaggccatgctggccggcgacgaagaccttggccgtggggagccaactgtcttccctcctgctagatctagcagaggcccactggatctgccacgccgaactcgagacaatggatctggggccaccgagattgtgaggggaggaggctag

SEQ ID NO: 20997 - DNA, 739 bp, Oryza sativa
  Clone ID: PAT_MRT4530_26310C.1
cggacgcgtgggcggacgcgtgggcggacgcgtgggcggacgcgatgactgccgccgccgccgccggagaaattccggcggaagatgccccgccgccaggggcgctctactcgttcgggacgccatggccggagttcaacgaagggatctcctacatcgacacgttccgatgcgccgatgcaggcgccaccacgactttgatcgagttctactccaccagctacaagagctccgcgccattgccagggtggattaagaggattcgtgatggacagataacagtagatggtgaagttgccactgatccagatatgattctcagggagggttctaagttggtatatcatcgcttaccatggcaggagcccttcgcaccacatttacttgatgtgctttatgaggatgatgacatgatagcccttaataagccttctggcttgcaagttcttcctaaaggacttttccaacagcgtactgttttagcgcaacttcaattgaaagactggaagatgccttcatcattctgctcaaagcgaaaagatgcgcaatcacaccctgtacctgttcatagactcggaaggggcacatcaggtttactgctttgtgcaaaaacaaagcttgccaaagctcagcttgcagcttattttgctgaaggcgctacaaacgctggaaagagcagatatttgcaaagcgcggaaaatttcaaagttctatcgagcactagtaactggtatccttg

SEQ ID NO: 20998 - DNA, 405 bp, Oryza sativa
  Clone ID: PAT_MRT4530_26311C.1
atggatgactccggcagcagctcgccgccggcgccggcgccctccttccgcaacaggtactggatcctccgccatggccgcagcgtccccaacgagcgcggcatcatcgtctcctccctggagaacggcacgaagccggagtttgggctggcgccgcagggcgtcgagcaggcgcgcttggccggcgaatcgctccgtaaggagcttgaggaattgggtgtgccactggattctgttcagatccgatattccccattctcacggaccatggagactgccagagaggttgctagagtgcttggtgtcccctttgatactcccagctgcattccagctgttgaacttcgggaacgctattttgggccatcgcatgaattgctttcacatgagaaggaactcatttga

SEQ ID NO: 20999 - DNA, 413 bp, Oryza sativa
  Clone ID: PAT_MRT4530_26312C.1
gagtggtagagcttggaaattcccttataggaacaacaaagaggggaattgggccatgctattcaaacaaagttataaggaatggacttagagtcagtgatctgcggcatatggatacatttggtgctaaactcaataccttgctgagagatgcagctctgcgctttgaaggatttgaatacagtaccaagacccttaaagaggaggttgagaagtacgaaaagtttgccgagcgtctaggaccttatattactgataccgtgcactttatgaatcaatcaatcttgcagaataagaaaatattggttgaaggtggccaagccaccatgttagacattgactttggtactttacccaattgttacttccttgagttccttaatttggtggtattttcacctggacttggtatt

SEQ ID NO: 21000 - DNA, 219 bp, Oryza sativa
  Clone ID: PAT_MRT4530_26313C.1
atggcgacgcgatttctcgccgggaagctcctcgccgccgctctccgccggaggactgcggtctccaaatccgccgccgccccctcctcctcaggtgtctgtcacgagcaaggattatgtggagaagaatcggggaaggccgtcagggaggtgttcagggagctggagccggagctgaagcacgagatcttgggaaagtattcatcaccaagtaactag

SEQ ID NO: 21001 - DNA, 3570 bp, Oryza sativa
  Clone ID: PAT_MRT4530_26314C.1
tcatcctcctcccctcgcaaaacctctccgcctcaaaccctcgccgatcgatcggcggctgggcttctcaggacgaactggtagggtttagcgagcgagcgagcaagagatcccccccatccatcccgcgagcgaggggtgggggcgccgtcgttcgtcgtccgacgaatatcgcggattccagatgggcacttatgttaggaactattcagatgatgaattctctgtggctggcgagaagccagatgtagagttcatggactatcagaatgatggctctattcaagattattcactcgaagatgcccctgtggttgtcacggttcctttccctttcatcgacggcaaaccaaaatctgtccttgttggagaaacatctgccgacaccattagcatagaaaatacctcttctgaacccgtgaatttgtggagtgtgagaatattttcttccaatccagaagacagttatgtgctttctatgatgaaaccaccactgaatgatactgatgaggaagcaaagaggaattttcttggtttgacttctgtggaagatcgtacactccagcctggacaaacccttacaatttggctctcctgtacgccaaaagacattggtttgcatacatcaatcgtccatgttgatatcggtgatgagaaaatcgagcgtgtggcttttctattggccgatgataatgtttcccaggctttattttctgacaaaccctattccaggaaacacactcagaagaagaagtttgagtgcagttcatttgtgccaggttgtcgaccaactcggcagcatagtcaaggattcaagttcaagctccctcagtttgcaatacctgcagacatccgcgaactcattcaaagtaaacagagacctgatgtcctatctgaagagctgaacatgacaaactatgcaaaattctttagcactcttttagtcatggaagagataaatttggaggaggagatgagatcatatgacatggagcgtatcttaatgaggaggaggggtctcgaatttttgtcacttgaggtccctggcttggctgagaaaaggccttcactagtccatggagattttatatttgtcagacatgctggaagtgatgctcggccttatcagggtttcattcacaaggttgaagcggatgagatatttttgaaatttgataatcagttccaccttgctcaccgtgacaggaatcagtacgatgttagtttcacatataatagactgaacatgagaaggctttacaaggctatccatgaagcagaacttttgggacctgacattctatttccctgtcgatcatcctccggaagtgtgaagaaggggccgtttaaacctctaaatccacatataaacactgagcaagctgatgcagttgcaacaatacttggctgccgaggggttgcgccatacgtgatatacggacctccaggaactgggaagaccatgacccttgtggagtctattttgcagctttatacagccaagaggagggcaaatgtcctcatatgtgctgcttctaatagtgctgctgaccatgtattggcaaagcttcttcaggctagctatctgattcgaccaagtgacatatttaggctaaatgctgccagccgtcaatatgaggatgtcgatcctgattttattcgattttgcttctttcaagatatggtgttcaagtgtcctccattgcaagcactattgcggtacaagatagttatatcaacctacatgagttcatcgatgctgcagtctgaaggcattcgtcgggggcatttcacacacatttttttggatgaggctggtcaagcctctgaaccagaggctatggttcctttgtcgggtttgtgtggaagagacactgtggttgtgttagcaggtgatcccatgcaattagggccagtggtttattgtaaacaagcagagaaggatggtttggggaaatcgtatctgcaaaggctgctctttgaatacgagcagtacagcacaggggatcctaactatgtgacaaagctagtgaggaattatcgatgccatccagcaatcctggaattaccatcagaacttttctatgggggagaattaattgcctgtaaagaagatgaagtgtcgtctatttatgacagcattgatcttcctaacaagtcgttccctgttctttttgttggcattcagggatgtgatgagagagaaggaaataatccttcatggtttaataggattgaagctagtaaagtagtaaatatcattaggaatctgacaaggggtggtgatgttcgtgaagctgacataggagtcattactccatatcgacaacaagttgtcaagataaagaaggcacttgagacatttgaaatgcctgacttgaaagtgggaagtgtcgaacaattccagggtcaggaaagggaaataataatcatctccacagtcaggtctacagtaaagcataatgagtttgacaaattcttcaacctgggattcttaagcaatcacagaaggttcaatgttgcaatcactcgtgccaaatctttgctaattatcataggaaaccctcacattatcactaaggatcggcattgggataggctcctgaggtattgtgcagacaatggttcttaccaaggatgcccacttccaccaccagaagagacccaagtctctggatttcgtgacagccaagacgaacctgctaggtggggttacaaccaacaacaagagtcatctgctaactacagctacaagcaagacccacacgactctggttccgaacatgtaaatggtttgccctccactgaaaatgaagtggaatggtctgagaagacgctgaatgaggagcaccagccatgtagcagtgctgctgaagcagactctcctgagttcatgctgaagcagaaggctgaggaagaggaacatgttgagcaagatggcgtacagcctgagcaatgtccagccaaggacaacaaactccaagatgcgtatgcagcgaagtactcctttcctcctgaatggtgtgatgtttcaaatatccctgcaacaggatgggatgattgatcggccccgtgagtggccgccttatttttttttttcacaagaaagtttttacctaggtgcatttggtcgaataattgatatcaaccttgtgaggactaacattcaggcacttctttgccttttcttgaaaagtatgagtttaacctgagtgccattgttgtgagtgcaggctgaggccttaccttgggggggggccccgtgccccattgcgtcctgtagggagttgatttacgccgcgcgactgggcgatgttgttacactgtgtgtactgggtaaaccactttgttgcccaactgaacgagggtagtctctacatcctttgttcaaatgacaatcgctgaacagttcatacaaaggccgtatacacatattgggtactaatttaatcgtcccacctgttgtatattttttgctctgtgtgtttgattcttatagacttaagcttgagtctccttttcgatgttgagtatgtgtattattacatatgtatttatcttgttattact

SEQ ID NO: 21002 - DNA, 504 bp, Oryza sativa
  Clone ID: PAT_MRT4530_26315C.1
ctctcctgagttcatcctgaagcagaaggctgaggaagaggaacatgttgagcaagatggtacagcctgagcaatgtccagccaaggccaacaaactccaaaatgcgtatgcagcgaagtactcctttcctcctgaatggtgtgatgtttcaaatatccctgcaacaggatgggatgattgatcggcccggtgagtggccgccttttttttttttttccacaagaaagtatttacctaggtgcatctggtcgaataaatcgatatcaaccttgtaaggactaacattcaggcactctgtagcctttccttgaaaggctttcagctcaccctcagtcccattcttctgtctgcagtctgtagccttcccttggatttcttgatgccattatctacctggtgtttgagtatacgggaacaaatatgttcctgtgaaaactccgaaactgattatcttgctagctatggcaatatatatagcatcctcacttgctgttatcatgagt

SEQ ID NO: 21003 - DNA, 1849 bp, Oryza sativa
  Clone ID: PAT_MRT4530_26316C.1
gaattctctcctttctcccacgcccaaatcgcgcacttcccctgttgaggagggaggcgacgtcgcccctctctccgcgtcggctccggcgccgacccactcccctcctccgccgccatccatctattcgcgccgcaccgcccgctcaactcttccttcgcgcaggcggcggcggtggcgcaggcggcgtcctcctccacctgatccacctccacttcctccggaccgcacaagaataagaagaagaagaagtgcaggtacggtgcaggtgcagatccaattgcgagctcacctgctctgccctgcccactaccaagtagtagcctcctcctcctcccctttctccccaacatcccatcccaaatcaaaggctactagactagtgttgggggagatccaagagatggcgcggagcccctgcgacctccgcatcctcctcgtcgccgccgctgcagccttcatctacatccaagtccgccttttttctactcagtcccactacgccgaccgcctcgcacaagcagaaaaatccgaaaaccaatgcaccagtcaactccgctccttgatcgatcaagtcagctctcagcaggagaagattgtcgcgttggaagagatgaagatacgccaagacgaagaacgtgtacacctcaagattttaatccaagatctcgaaaaaaggagcgtgcagaccttagtaaacaacaatgtggctcctgttgctgctgttgttgtaatggcttgcaatcgaccagactatttgcaaaggacagttgaatctatcctgaagtatcagacatcagtggcttcaaagtttccactatttatatctcaggatggaataaatggagaagtgaagaaaaaagctttgagttataatgaaataacatatatgcagatccatgagtcatatcagggaaactctaggtccaatggatataaactgagcagtgagaagcaaggccataatcataccccaaacttgtggatgtattgtttgaaagggaagcttgatgccactgtactgtacttcccccctccacataacataggcatgcagcagtccgatatttgtaagaaacatgggaaatatttttcagctaagactctcagtgaacattacaaatgggccttggatgagctattcatcaaacacaactttgcgcgagtaataattctggaagatgatatggagatcgcccctgatttttttgactacttcgaggctgcagctaaattacttgataacgataagacaatcatggccgtttcttcctggaatgacaatggacaaaagcaatttgtttacgacccaaactttacttattgggatgactgggtgaggctaaaagaggtacacagagaccggcaatttattcgcccggaagtctgcagaacatacaattttggcgaacatgggtcaagcatggggcaattcttcagacagtacttggaaccaatcaagctaaatgatgcccatatcaagtggaattctgaggacctgagctacctcaaggaggacaagttcctgatccaatttgggaaagacgtcgctagtgccacccctctccatggatctgatgccgcgttgaaagcccacaatatggatgcggatgtaaggatccagtataacgatcaggaagactttgagcggatagctcgtcaatttggaatatttgaagaatggaaggatggcattccaagaacagcttataaaggagtagtagtcttccggtacaagagtagtcgaagacgaatatacctcgttggtccggattccctcagtcagcttaggtttttgaactggacatatgctagaatgaagggaaatgagatactaattgatatttga

SEQ ID NO: 21004 - DNA, 1594 bp, Oryza sativa
  Clone ID: PAT_MRT4530_26317C.1
atggcgcggagcccctgcgacctccgcatcctcctcgtcgccgccgctgcagccttcatctacatccaagtccgccttttttctactcagtcccactacgccgaccgcctcgcacaagcagaaaaatccgaaaaccaatgcaccagtcaactccgctccttgatcgatcaagtcagctctcagcaggagaagattgtcgcgttggaagagatgaagatacgccaagacgaagaacgtgtacacctcaagattttaatccaagatctcgaaaaaaggagcgtgcagaccttagtaaacaacaatgtggctcctgttgctgctgttgttgtaatggcttgcaatcgaccagactatttgcaaaggacagttgaatctatcctgaagtatcagacatcagtggcttcaaagtttccactatttatatctcaggatggaataaatggagaagtgaagaaaaaagctttgagttataatgaaataacatatatgcagcatttagatcttgaacctgtgcgcactgaaaggccaggagagttgatagcatattacaagatagccaaacattacaaatgggccttggatgagctattcatcaaacacaactttgcgcgagtaataattctggaagatgatatggagatcgcccctgatttttttgactacttcgaggctgcagctaaattacttgataacgataagacaatcatggccgtttcttcctggaatgacaatggacaaaagcaatttgtttacgacccaaaagctctttaccggtcggatttctttcctggacttggatggatgttaacaaagcctacatggattgagctgtcacctaagtggcccaaagcttattgggatgactgggtgaggctaaaagaggtacacagagaccggcaatttattcgcccggaagtctgcagaacatacaattttggcgaacatgggtcaagcatggggcaattcttcagacagtacttggaaccaatcaagctaaatgatgcccatatcaagtggaattctgaggacctgagctacctcaaggaggacaagttcctgatccaatttgggaaagacgtcgctagtgccacccctctccatggatctgatgccgcgttgaaagcccacaatatggatgcggatgtaaggatccagtataacgatcaggaagactttgagcggatagctcgtcaatttggaatatttgaagaatggaaggatggcattccaagaacagcttataaaggagtagtagtcttccggtacaagagtagtcgaagacgaatatacctcgttggtccggattccctcagtcagcttagggtatagtgttgttgaggtgtggagatagtttctcattgtttcagatacaagcggcagcacctcacctgaccactgagcagagctgacctgcctgacattttgctgtatatgtgattcatcacgtgagattcatacatagacgacttccattgcaccgaaagcttaaacatcacatcgtgttctgtgttttgtttgccattgaaaactgcctgtaatgtagtttttgaactggacatatgctagaatcaaggccaatgagatactaattgat

SEQ ID NO: 21005 - DNA, 613 bp, Oryza sativa
  Clone ID: PAT_MRT4530_26318C.1
tccccgggctgcaggaattcggcacgaggaatatattgttttagaatattttactagagggcatattgtttatttatcttaacactagcttcgagatgacaaattgctctagaatgcattctgcttatttccaccgatgatttacagatttaacatgaaaaattcgttcctgttcacaaacagttaatatttcacttgagcgttcagtgaccaaaaagtgaccagtctattgggagatccatcacctctgctacaaacatgctcacatagcgatcagagtttatcagattggccagtgggacatcatcggcacaatccatatattccctcattgtccagattcgatacttcatgctatggtggccatccctcatacgaatgatcatctttgcatggttatattatcaagataatgaagaagtgttttatttctctacttcctgcatcttggtgcatatacaagacaaaaggtccagcattctttttcattaaaacaaatctcaggtttagcacttatttttcaaaccattttcttagctcattttgccttttgatctatcatcaagtcaattcttctctccgttgtgactgtgacagcacggccatcatggct

SEQ ID NO: 21006 - DNA, 210 bp, Oryza sativa
  Clone ID: PAT_MRT4530_26319C.1
atgcggcatggcaagaaagtttctttcttgtccgacaaggacttgtatcaacccatgggtataaatatgtacacccgggtctatggctgcatcgtcttcgatctccggcgaagggataagtccaatgttccgccggtccaggcaattgtatcgtctacgttggcgtcgttcaaggctgcatcaggacattcgacctcttggattgctctg

SEQ ID NO: 21007 - DNA, 505 bp, Oryza sativa
  unsure (1)..(505): unsure at all n locations
  Clone ID: PAT_MRT4530_2631C.1
attcagaaaaacattgaaggtcaacatttattccccccaaatatataaataggggccccccggcaaaagaaagccctaattttggggcacccccacaaaggccccccccccccgctaactataggggcccagggcccgggtctggggggcccaggatccccaagccaggggcagaccccccccggcccctgggggggggccacgttgcaaaaccccgggggggtcgccgccgcgcgccccaaggcccctttccgggaggcggggaacaccccggccagggggggcccggccttgggggggccgagccccctgaaaatgcccgacaggaggggaaggagggccccgaacctgcaccagccgttgttgacgggggggaggtggcggaagaaattttggaagacttggtcggccgggggggggggcgggcccaggacaaaacaagggggccccaacaatggtagaaattgggggaagggggggggngacccggggaattcgggaccgg

SEQ ID NO: 21008 - DNA, 1100 bp, Oryza sativa
  Clone ID: PAT_MRT4530_26320C.1
cacgcgcgcgcgcatcatctctctcctagggttcgtgcgttgattcggcggcggtggaggtggaggaggagggggttggattcgggaggtttgtgtgggggtgtggggggggggtgagagatggcgggggggaagaagcggaaggcggaggcggcgcggctggaggagacggacagggcgctgtacggggcgttccggggcgcggccaactcgctgtcccagctctacacgctcgccatgggcggccagaagctctccttccaggccggcgagcgccacgccatggaaaagctctatgaatggatcttgaggcagcatgaaaatggcttgaggctgacagttgctgatatagcctcgcacatccagcacgagatccagtatggaggtgacaatgcatcagcctctccaagatcacagcatgcaagccaaagcactcaagctacagtgcctattcccaacacaatgagccagcagccatcaccaaacttatttgcgctaggaaatacaggattggtgcagtccaagaactcagcggtcttttcaaatgcactatctagccccgttcgccggagcctgcaaccattccacctggagcagggtggcgatgcggggtacttcgcaaacggcgttaaccgcgatcaaaactcgacggcttcgaacgattcatccatggacatgcattcagacagcccagctcatgactcttactgagttgtttgccccctctgtggagctggaagagcaacacttccagtggaacagaatgtgtgcctttgctaccacagctcatgtaggactattcaatttaacccccctcccctagcctccaatgatgctaagcttgtattctgttgctgccaatcaccagttactagtaccgattacattgctaagatattgtaacttgcatgtatttatgtccagagtaaaactgtactcggtttacctgtgcatactactacagttggtatgtggtgaaaatgtaggtggcaaagcaaaattgagaagaataaacagtattgtactgttgttccctctcctagactcctacgctaaccctttctgaagttgttatcaactgtcgttttgttccaaaaaaa

SEQ ID NO: 21009 - DNA, 494 bp, Oryza sativa
  Clone ID: PAT_MRT4530_26321C.1
acctggcttagttcacaactttttggagaagttgaatcctttgatctttaaatcaattgagagttttgcttatgggtgctactcgacctttgaattggctgttgccatcagctaccccccatttgtgcattcttgtgaagtctgaatggtaattcgtgtgtttggtattgttgatctgtatcttctttgtcaataattgccatggtaattctagagatagttctgttcattatgaagagcatttatcagcacatgactttgtaatcttacctgtgttgattggtcttgcaaagatatcagcaagtccctttctgtcaacgtctgttccagctggttgatctgccagaagcaactggtactaaatgatcaacatagcttgcaattttgtacattttcatgtggtttttgttgagcctgctaaggggaaaaacattgagtatcttcagctcagcaaatcttccaaggaagaacttgttttaaaaaaaaaaaaaaaa

SEQ ID NO: 21010 - DNA, 220 bp, Oryza sativa
  unsure (1)..(220): unsure at all n locations
  Clone ID: PAT_MRT4530_26322C.1
tgccgcccttttttttttttttttaaatgggttttttttaaggngaaaaggctgtattacatacctaagaaagcttaccacaaacaatagcagtgaatgcattctgaggatcaacccctacgctccataattcaacattgacaaacatgagcatgaggaccaaagtaataagaagagccttgtaagcaccaaggctaagaatggaagtaatatgatggaa

SEQ ID NO: 21011 - DNA, 425 bp, Oryza sativa
  Clone ID: PAT_MRT4530_26323C.1
gatctaacgttgtcttttccccccttgatgaaaaattttcattttaaaataatgagatagaagacagtgtgggaagctccactgacctgcttcaccagtgaaaccggtggcaattatttctgaaagtcaaccatttaaagcctatggaaaggggctttaaaggaaacgacaaagaaaaatctactcaagaaaatctatggaaaattcgggaagaaaggcaagagactgtgatatttgaactaaagcaactctctgcttcccttgtgccaggtcagcaaggcaggcactccactcctgaaggctgcagctaaaaacacgaacctccctgctcccttgagctctcagtctaagggctctcttcctgggagaagcaggacttcagaatttttcctccctccccagctgagcagcgggtgctgagtaaa

SEQ ID NO: 21012 - DNA, 1650 bp, Oryza sativa
  Clone ID: PAT_MRT4530_26324C.1
aataacaagaagtactcctacataaagagagagagagctagctaagggagtaccgaccgaaaaagcagaaacagcctgcctgaccccaaaaaaatggaggaaggcgtcgtcggtgggggcggcgctgccgttcttgttgccttgctcgtgaccgtggtgttggcggtgatgaggtcagctggaagcagaagcagcaagcgcggtcggctgcccccgagtcccatggcgctgcccatcatcggccacctccacctcatccggccgccaccccaccgcgccttcgaccgcatcctcgcccgccacgggcccctcgtctacctccgcctcgggccctccacgcactgcgtcgtgatcggctcggccgacgtggcgcgcgacttcctcaagttcgaggccagcatcccagagcggccgcccacggcggtgacgcgacagctggcgtacggcaaggccgggttcgcgttcgcgccctacggggcctactggcggttcgtgaagcggctgtgcatgtctgagctgctgggcccgcgcaccgtggagctgctccgccccgtccgtgccgcggagctggcggacgtgctgcgcgcggcgcagtcggcggcggagaggggcgagggcgtcgacatgagccacgagctggtccgcatggcgaacaacagcatcatgaggatggtggcgagcgctctgcctggcgagatggcggaggcggcgagggactgcgccaagcaggtggcggagctggtgggggcgttcaacgcggaggacttcgtggcggtgtgccggggctgggacctgcaggggatcgggcggaggaccaacgaggtgcacgccaggttcgacgcgctgctggagaccatcatcgaggccaaggaggaggcgcggaggcggagcctaaggctgggccggcgggagagtagcagcaaggacctgctggacatgctcatggacgcggcggaggacgacaccgcggaggtcaagctcaccagggacaacatcaaggccttcgtcctcgacatcttcaccgccgggtcggacacgacggccaccaccgtggagtggatgctggcggagctggttaaccacccggagtgcatggcgaagctgcggggcgagctggacgcggtggtgggcaggtcgcgtctggtgggagagcaggacgtggccaggctgccctacctgcaggcggtgctcaaggagacgttgcgcctccgcccccccgcggtgtttgcgcagcgcgtcactgtggagcccgtccaggtgcgcggctacaccatccccaccgacacccaggtcttcttcaacatcttctccattggccgcgacgccacctactgggaccaaccgctccacttccgccccgaccgcttccttcccgacggcgccggcgccaccgtcgaccccaagggccagcacccgcagctcatgcccttcgggagcggccgccgcgcctgccccggtatgggcctcgccatgcaggccgtcccggcgttcctggccgcgcttgtgcagtgctttgactgggcgccgccgccgtcgcagccgctgccgcttgacatggaggaggcggcggggctcgtgtccgcccgcaagcacccgctcctcctcctcccaacgccgcgcatccaaccgctcccttccttctactcctga

SEQ ID NO: 21013 - DNA, 306 bp, Oryza sativa
  Clone ID: PAT_MRT4530_26325C.1
atggaggatgagatcgacaggagcccataccatgacgccctcggggagcgctatttgggggcgcttcatgccgtggacgcgtcccccgctggttcccggactggagcaccggcgccggcgcgtgatgagaagagggcgcagttggcggcgtcggcttcctccaccgcgcgtcgccgaggggaggggagaagaagaggtccggcggcctgcgtagctgtcgaccccatccttgtcatcaccgcacaaagtcgccaccgccatcgtgttgctcatcaccggccaccagacctcttctcctcctactga

SEQ ID NO: 21014 - DNA, 434 bp, Oryza sativa
  Clone ID: PAT_MRT4530_26326C.1
atccatccatggatcgagatttcctcttgtccctgttcttgttgttgttgttctctgtgaatttaacaggaaatcaagaactaggtgctggttttgactaacaagaactcggtcgaacacttggtgcgtgttgttggtggtatggcttggccggcggccggcacacggccgtgcaaaaactaagaggctacactgttggggccttcttgcttattgagctggcggaagcggacgacgtggctgccgcgaggagggtcgtggaggaggagaaggtgtctcttggcgtggctgggttgtggtatgggccttcggcgagcggcgtggcgaggctcgtgatggagcggaggacggcggcgatggtggcggcgctgtacgggagcacggtggtgcttgggtatgtcgtggcggcagcaccggcggagggcgctcgcgcg

SEQ ID NO: 21015 - DNA, 788 bp, Oryza sativa
  Clone ID: PAT_MRT4530_26327C.1
ttttttttttttttttttttgaaatcggtggaacttgtgttctttttttttgtcgaacagtacttattgccaagttaagtgacatcccgttaccaaccaattaacaataatcgcgatcttcagccacactggcaggttgatcaattagatagatctcaaacgcttcaaatgcaagctactcgacctcagctaggtacgtcgggcttttgatatacagcttctagacattctttagcccgatgaactttcgactggagatagaagctcccattcttagcattcctctcaaacatagtatcgtatttctggacgatctcttcccaagtcgacttttcgctgatacctagtatttgccgggcttcttgctcagtcatggccttgctggcccttcgaataccatttatagcttcctgggcagctccagttttgtttgcattgacgatggcttggcgatacgcctggaccgcggcacctgcccagcacggtgccgccgatgacgaggagattcgcgagaagcctagcagccatctcgctgtatcctcctcttccttcgctggcggcagcggcggcggcgatggaaccctaggtgtgacctcgacgtgggagctcgcggtgagggcggcgaatcccaatgggcgaggcgtggcggggaggggagagcgcgctggcggtgttgctcccgcagaagctggagatgacggcggcgaatcgctggctggtcctctctctctctcggcggcggaggcggaggcggcggtggcttggtgtttgtgtcgggcttggctttg

SEQ ID NO: 21016 - DNA, 1224 bp, Oryza sativa
  Clone ID: PAT_MRT4530_26328C.1
atggccgggtgcgtggtgggcgagccggagttgccgccgggccagcgcctgacgttgctggagatcgccggcggcggaatcaggggccccatcccgggcgacatccacgacttccgcgaggacgagctgccgcagctggatggcccccgcccgcgtctccccgatcacctcgactgcattgccggcacccgtcccggccgcctaatcagcgccatgctcgccgcgcccggaggccccggcctcccgctcttcgacgcccgcgacagcagccccgtccacctcgacaacgccccactcctctacccacaaaagaggcaccgcatggcggcgggcatggcggcgctgaggcggcggaggtacgccggcaagtccgtgcaggggagcctcggggagaggctggcaaggacgagggtgtgcaacacgatgacgagcggcgtcctctccacgtttgacgttaggctgctccagccaaccatcttctccacatacgacgcgaagagcatgccgctcaagaacgcgctcctctccgacatctgcatcagcacatccgcggcgccgacctacctccccgcgcactgcttccagaccaccgacgacgccaccggcaaggtccgcgagttcgacctcatcgacggcggcgtcgccgccaacaacccgatcaccaagaagataatggtgaaggacaaggaggagctgtacccggtaaagccgtcggactgcggtaagttcctggtgctgtccgtgggcaccgggtcgacgtcggaccaggggatgtacacggcgaggcagtgctcgcggtgggggatcgtccggtggctgcgcaacaaggggatggcgcccatcatcgacatcttcatggcggccagctccgacctcgtcgacatccacgccgccgtcatgttccagtcgctgcacagcgacggcgactacctccgcatccaggacaacacgctccacggcgacgccgccacggtggacgccgccaccagggacaacatgcgggcgctcgtcgggatcggcgagcggatgctggcgcagcgggtgtcgagggtcaacgtcgagaccggcaggtacgtcgaggtgcccggcgccggcagcaacgccgacgcgctgaggggcttcgccaggcagctctccgaggagaggagggcgaggctaggtcggcgaaacgcctgcggcggcggcggcgaaggagagcccagcggcgtggcgtgcaagcgttag

SEQ ID NO: 21017 - DNA, 308 bp, Oryza sativa
  Clone ID: PAT_MRT4530_26329C.1
gccccctgaaacaaaaatcttttttgttaatcaagcttattttcatttttggaagggatattttttttttccaaaagaggcctaacccctttcccaaaactattcacccctagctgcaaagtttatgcaaaccgaaaaaaaacccccccccccttttttgctccaatttgccccttaaaaggggctgggccaacaggtttgcagggaccccaaagccggggggtaaaaggctcaaggttttttttttccccccacaaaaattccctggggccacaaaaatttattcccctttttttggagaagggggg

SEQ ID NO: 21018 - DNA, 503 bp, Oryza sativa
  Clone ID: PAT_MRT4530_2632C.1
aaccgccctcgtcctcggtagcagtgcaggcggagacgaaagtggcgggtgagagcgtcagccgcctctttccccctttcccgctggcatccactctcccatcgccctcatctgctcgctcttcggccggcctccactctcccctcttcggctggcaccagctgctgctgccgccgccacctctcacccctctatcatcgccacctgctcaaccagtcgctgtctccgtttgggactcctcccgacacgagctcgcgcaggcatcggtcctccaccgccggccactctgcacctctctcagccctcctctcccccatctcacaccggcgcggccggtcgcctctccccttgccggccgctccgcgtgccgctgccaccacaacctaggcggggagacggcgggcgagcgcggaggcggcagcggagttcgtccgggctcgccagctcgccttgccctcatctgccgccggccggcagcctcctgggagagaagaactgaatag

SEQ ID NO: 21019 - DNA, 532 bp, Oryza sativa
  unsure (1)..(532): unsure at all n locations
  Clone ID: PAT_MRT4530_26330C.1
gcgggggggggttttttttttttttttttttttttttttttttatttttttttttttttttttttttttttttttttttttttaaatatgaaagacaactttttttttatttatatcccccaaagtttcacatgtcacatatgatgatatatggggggggggggaacttcccaaccactttactggtaaaactcattacaagacacccccaagggggggaatgggcctgggggccccataatccccaggggggatcccatatttagagggcccgttaaaagccaacagagcttgaacttgagcccaattcccatcaaaggagagatcaccaaacggggggagttgaaactgctgccctttggcccgaacaatgttaatgccccgatagggagattggtgccccaccagcgcgagctgttgccaaacttggggggttctcagntgaaacccacctgattgcaagaaggggcttgccgctatgccaaactggtgccttaccaacccaatatttggggctaaaccccttttgctg

SEQ ID NO: 21020 - DNA, 297 bp, Oryza sativa
  Clone ID: PAT_MRT4530_26331C.1
agctagcgaatcatcaagaggggtagagaggaacatcggcgttcataaataagaaaccccacatttgcttctattcatatggcccacagtttcacttgtagcatccgcacgctatcgggctcagttttgttctgcggcccactttgctggcaaaactcattacccggcaccggccagggggttaatggttcggggtgccccctatgcccaacggcggaagccttgtctacatgcgccgcaaaaacccaccacagcttgcgcttgacacctatgtcatgcaaagcccaacatcccaaa

SEQ ID NO: 21021 - DNA, 357 bp, Oryza sativa
  Clone ID: PAT_MRT4530_26332C.1
atgccttgtacactacatcttgtcaagaatgatggacaactgtcacgcccagaaattcacgaaccagaatttctaagctgaatgtgcattaaacccatgtccagaaccagccagggtatacaaacgacaattgttgaaatacagatccacgttttacaaaaatataaaagattacaaatgcagcggaaaagatgaaagccagctaagcctgaagacttgactccacatgcatccttgacggcagcgacgaaaccaatttcttcgagacatctccaactaagaagaacttcaactctggtgtggggaagagagagcaagactaagtacttcccactgtactcaacaagtcataccgga

SEQ ID NO: 21022 - DNA, 471 bp, Oryza sativa
  Clone ID: PAT_MRT4530_26333C.1
atggcgctcatagcgccgagcccccgggtgctgcgcgcgcgcgaggcgcccgccgcaggcgccctgcagccacccgcggctgcatgctcgaccgtcgctggcggtggcggggcggcggggaggccgctcgggatgtggagcggtggcgggggcgggggcggggggaaggggaggaggagggagagaggggatgggatgttgagggcggaggcctacttctgggacgtgtcgaagccggtggagatggaggagatcgactccatggagaagctcgacgacgcgctccgagtcaggttctactttgtcgatgtcaacaaagttccacagactgtggtgaaaagagggaatataactaaaatgcccactatccagttatggaaggatggagaatgggcagcggaagtgataggaggccataaagcatggcttgtgatggatgaggttagggaaatgatccagaagcacaagtga

SEQ ID NO: 21023 - DNA, 209 bp, Oryza sativa
  unsure (1)..(209): unsure at all n locations
  Clone ID: PAT_MRT4530_26334C.1
gttgttataggactggggtgctcccacacaaancagcgcacttgttgctcgtttgtaaggaggaggccacacttgggtcanccctgcaacaaggagtgaataatgttggtggctgctccacatgatnccaaccagtgtatatagggatgaaaccaagtcgaaaccaggtagcgtttctttgggcacaccaaaaaaaaaaaaaaaaaaaa

SEQ ID NO: 21024 - DNA, 504 bp, Oryza sativa
  Clone ID: PAT_MRT4530_26335C.1
atggcgctcatagcgccgagcccccgggtgctgcgcgcgcgcgaggcgcccgccgcaggcgccctgcagccacccgcggctgcatgctcgaccgtcgctggcggtggcggggcggcggggaggccgctcgggatgtggagcggtggcgggggcgggggcggggggaaggggaggaggagggagagaggggatgggatgttgagggcggaggcctacttctgggacgtgtcgaagccggtggagatggaggagatcgactccatggagaagctcgacgacgcgctccggtggtccgtcgagaacaagcagcccatcatcatcgactggttctactttgtcgatgtcaacaaagttccacagactgtggtgaaaagagggaatataactaaaatgcccactatccagttatggaaggatggagaatgggcagcggaagtgataggaggccataaagcatggcttgtgatggatgaggttagggaaatgatccagaagcacaagtga

SEQ ID NO: 21025 - DNA, 597 bp, Oryza sativa
  Clone ID: PAT_MRT4530_26336C.1
agcccatccaaatttatccctggccatccttaaagagagaagcatcagaagtgagtatacagttagggccaccaagaactagctcctggatataccttagggttcatagcctactgaccatagactatgccagatacttcagataaattgtcctggataccgatcttcctgtctatggacagttttcactgctgtacctggatatctgtgaaacccccttagggacatgtggctggttcctacatagagaaaggatctatgcaaggactcataaaatctgaatgatttatccaaagcaaagagtagaatattgctccctctggtcctttctttgtggtgaaggcctacaacaagctattcttgctttacactagaggatcttcatgaaaattgtcctcacttgtttcattgtcaaaaagattgatttctcttctaggaacaattataatgagaaataggtgtcctatttctgaccaaggacccaaggtaaaactaattggggcaaaacatataacagctataaaaatctacaatagtttaaactagcaaaatcttgcttgaaatcagagtcggggaacatattgaacatatcagtta

SEQ ID NO: 21026 - DNA, 828 bp, Oryza sativa
  Clone ID: PAT_MRT4530_26337C.1
ttttttttttttttttttttttttgctggcccgagcttctccttttttttttttggaccttgaaaaaaaatcagaacactttctctgaatcagaatacacaagtaaaaacaccatttcctcctttgttggccataagctagaacttcaacgaacttcctcagagattacaaggagagggagtgctgtgcagcaactaaacaaaatgttgaagagtgccaataacatgagcaaatcgtatgcattccgcaaattgaagtagctctgatcagcagctgttgacatgacatagtcactcactctgtggcttggtcgtcatcctctcctgcgactgtggctgcatcctcattaaaatcgtcgaagctgaggctaagtgtttgcagcttgaagccagctccctggatggcttctaccaggtttgaggccaccccggtagcttgcaccgtcgtctcctttgtcaacacaacacttccgatgccttcctcgatgagcacctccaggtcgctcaccccctccaccccctcgagggcctgggtgatcttggggatggccctctcctccatggtaccctccgccttgaagtagaggatgagggagtcggaggtgtagcccggagcggcggcggcggcgtcgggcgcggccacctccgcgctggccgcgcgcaccaccccgagccggcggctgcccctccgggccagagctccgcggaggaggcgaagggagcggggcccgagggagggcgaggcggggaggcaggcggtggccgccggcgacgacatggtcatcatcatcttgctttgctcgctcgctggcttgcgacctcctcgtgc

SEQ ID NO: 21027 - DNA, 513 bp, Oryza sativa
  Clone ID: PAT_MRT4530_26338C.1
cccatgactaagttcccactttcgaggaaaccgtcaaccagatctatgggtacctgggaaagcccaaggagagctacggacaattaacccagactggtgtgagcttcctgggtggttacattgccggtattttctgcgccgtcgtcagtcatccggctgatgtcatggtcagcaagttgaacgccgaccgaaagtctggtgagggtgccatgaaggcggtctcgcgcatttatggcaacatcggattctccggcctctggaacggacttcccgtgcgtattgttatgctgggtaccctgactggcttccagtggttgatttatgattctttcaaggtcttcctgggccttcccaccactggtggacattagataatagtgcatcgttccaggttgtatttaatgtctgtcttctagcgcgggtgttggtgtttatagaagctcctcatgatttgtgaaatgatgatttttacctgaatcagactgtcaatgagaagtgaaaaaaaaaaaaaaa

SEQ ID NO: 21028 - DNA, 733 bp, Oryza sativa
  Clone ID: PAT_MRT4530_26339C.1
cgcggtgctggttgtgtggccaggctctccggtcgtccgaccggctcgcgatcgctctcggccagcaccctgcggcgcgccggtggccggggggtcggcgtcggaccgccgccgggtcctcctcctccttccccgaccgacgacacgctcgccgcggcgtcctcgctcgccgacgcttccccttcacgctccttgactctcgcgcgacggacgggcgtccttgctcgcggcgacacgcgcgtcgtgtgtcggcgcggacgcgcgtcgtaggacttggcggactgcgcggcgtacgtcgcgctcgacgctgcttgtgtcttcccccggcgcgcggcgtgttctggacaccccgaccggcgaccctggctgcggctgcacgcccgacggtcgcgcgccacgccgctgccttcctgctccgtgctccacgcttgtatctcctggctcgaccgctccggctccacgcgcgcgcaccctggctccaccgctcacgccgccgtcttctatctccccggccgcccgccgccgcgtgccgcacgcacactcgccctgtacctcgtccacatccatctccatcctccaaccgcaaaaacaacagcagcactctgcaacccaccgggacgaagcgctgctggaccttctcactgcttcaatccctactgtctcacgacgtgaacttcacaaaagattcgacgagtagcgggaggcggacgcggttgtcacaaagactcaatgg

SEQ ID NO: 21029 - DNA, 163 bp, Oryza sativa
  Clone ID: PAT_MRT4530_2633C.1
gccagatatatggacatgcgaatgtatattggttgtaactactatggatagacaatatttgattgttctatatatacatggacacatggtgctcagtcaaaaaaaaaaaaaaaaaaaaaaaaaaaaaggggcggccgttataaaggaacaaagctaacgaacg

SEQ ID NO: 21030 - DNA, 927 bp, Oryza sativa
  Clone ID: PAT_MRT4530_26340C.1
atgaacgccttcaggctcgccggggacatgacgcacatcatgagcgtcctcgtcctcctgctcaagatccacaccatcaagtcttgcgctggtgtttccttgaaaacacaggagctatatgctcttgttttcgccactcgctacttggacatatttacagactttatatccctatacaatacagtcatgaagatgattttcctgggtagctcattctcaattgtttggtatataaggcgccacaagatggtccgcagatcatatgataaggatcacgatacatttcgacatcaatttcttgttctaccatgttttcttttggccttgcttatacatgagaagttcacttttagggaggtgatgtggacgttttccatttatctggaggctgttgcaattcttcctcaacttgtactactacagcgtacacggaacgttgataatttaacagggcaatatgtgttcttcctaggcgcataccgagcattatacatcctcaactgggcctaccgctacttcactgagccacactatgtgcattggataacctggatatcaggattcgtgcagacattgttgtatgcagatttcttctattattacctcaatagtttgaagaacaatgtgaagctcaccctaccagattgatctttcaggctcctaagttcaacatagtcgagcactgatcattttgcattatcatgttaagttttttgtttaccctttccaatgatttagctgtttttcttccatggataataagatgcatatgcaacgttatcagttagaaattttcaaatgatgtacaccataatgtattccattgtcatctatttacataagggcatgtgttgttaaagatatttcagacttgaatgatgtgtctaatgtctactgttcttttagtcaatgagaaacatggtcatt

SEQ ID NO: 21031 - DNA, 402 bp, Oryza sativa
  Clone ID: PAT_MRT4530_26341C.1
atgagaatgggaaaggtggaggaagtgagtgttatgggggtaatgttttggatgtttatggttattagatgggttattaggggaatgagggaaaggatgggtaggattagtgttatggcgattgtgtacataatttgtgattttgatttcatgattgtgttcgtggatgagatctcatgggtgatgttgatgattaatgtgttcttggatgaatggatgatgctcttggcgttttccaccaacattatatcacttgaatacgaagttctactcggaatgagtggcatggggaagagagacattgccaaatcttcattctgcaccagccaaatccgatcacagaatgtgctgctatcaggggcgaagccaggaaaaatagttatcggggccaccactaactga

SEQ ID NO: 21032 - DNA, 1383 bp, Oryza sativa
  Clone ID: PAT_MRT4530_26342C.1
gtcacgatggccatggctgcggcgagcgccatgcggccattagctcccctcttccttttcttcttcttctcccttgccgcctccgcgagtgacaacattcttgccaactcatctctcgccgatggccagaagcttgtctcggccggtggggtcttcgagctcgggttcttcaccccgccgggctcgacgacggcggcgaggttcttgggaatatggtacagggacatcgatccgccgaccgtggtgtgggtggccaaccgggatgctccggtgagcggcacggccgggagcttggctgtcgtcgtcaacggcggcggcggcggcggcggtggtcgtctggtgctcggcgatgggtcggggcgagtggtgtggtcgtcggcgccgtcgaacgtaaccgcgagtgatcctgtggcggcgaggctgttggatagtggcaacttcgtgctcgccggcggcggtggctccggggatgtgatctggcagagcttcgattacccgtcggacactctgctccccggcatgaagtttgggtgggacctcaccaccgggctcgaccgctacctgacgacgtggaggagcgccggcgacccgtcgccgggcgactacacgttcaagatcgacccgcgcggcgcgccggaggggttcatctggtacaacggcacgtcgccggtgtaccggaacgggccgtgggacgggctgcagttcagcggcgagccggagatggagcccaacaacaccagcttccgcttcgagttcgtcgccaaccgcaccgacgtctactacaccttcgtcgtcgacggcggcggcggcggcggagtcctctcgaggttcgtgctgaaccagtcgagcgcgcagcggtacgtgtggctgccgcaggccggcgggtggagcctctactggtcgctgccgcgggaccagtgcgaccagtacgcgcactgcggcgcctacggcgtctgcgacgtcggcgccgcgtcgatgtgcggctgcccggccgggttcgcgccggcgtcgcccaggaactgggagctcagggacagctccgccgggtgcgcgcggcggacgcggctcaactgcacgggcgacgggttcctgccgctgcgcggcgtgaagcttcccgacaccaccaacgcgacggtggacgcggccatcgccgtcgaccagtgcagggcgaggtgcctggccaactgctcctgcgtggcgtacgccgcgtccgacgtcaggggaggcgggagcggctgcatcatgtggagctcgccgctcgtggacatcaggaagttctcctatggcggcgaggacctgttcatgcgtctcgccgcatccgatttgcgtatgattctcctctcctctctagttcgtatgccatatactttccttcgtttttaa

SEQ ID NO: 21033 - DNA, 124 bp, Oryza sativa
  Clone ID: PAT_MRT4530_26343C.1
ggcttgggtggatcggtacgatctaagcagtaaggggctgagtgcacttggtgacagggaaccagagtttgagtgcaggactgtaaaaaacactgaaacgtgcgacgtgcatggatttaagagt

SEQ ID NO: 21034 - DNA, 353 bp, Oryza sativa
  unsure (1)..(353): unsure at all n locations
  Clone ID: PAT_MRT4530_26344C.1
ggacggntgtcaattttgaggagcaagcagatattctcgcaggcggagagtgaagcaatgtcgtgtacaagggatatctgttgatgtaagctcaagaaaaacgaagaattgtgagctataaaaagattggaattgattgaacagtgggactactatactgccccttncagagggtctggtgtgaacaaaaactcatcncttcttcctatatagttggtacctactacaagtattaacactntaaagaagcatgcaggttaagccacgtcatcggtaaccaatagccgtcggatcacgtgtatctttctttgttgttgtttagctggaattcattcattcgttcaatggacatg

SEQ ID NO: 21035 - DNA, 170 bp, Oryza sativa
  Clone ID: PAT_MRT4530_26345C.1
tgcttagatgtgatgacgttgttaagggccttcatagggcaacgtggctttcagcccgagcactccaccttggagactcagcatcacgtccgcgtctgaacctatcaaaacctgaagatcacgcgttcaaagaggatcatgtgttctttgaagttatcgagagcgtgtag

SEQ ID NO: 21036 - DNA, 1533 bp, Oryza sativa
  Clone ID: PAT_MRT4530_26346C.1
atgagcggcgcgggcggcaccgccgacttcttctaccgcgaggcgcagcgcctcggctacgtcgcccgctccgcgttcaagctgatccagatacagaagcagcacaagctcatcgcccccggcgccgccgtcctcgacctcggctgcgcccccggcgcgtggctccaggtggcgtgccagaacctgggtccgctcgagaagggcggggtgatcgtcggcgtcgatgtcaagaaggtgaaggttccatctgcgcactgtgactcgagggtcaggaccgtttgcgccgatgtgatggctctgatgaagcagcaagctcgggcaatgtcgccacaggaacgaggattctctgtaatattgtcagacatgtgcccagtagtttctggaattacaaccaaagatgcggctatatcttgcgagctgggcatgcgtgctctttcattggcagttggtaagatgaaagcaaaagattcagattgcattgcaattttagagaagtttcagagctccactgagccagatcctgatgaagatggcattctccgtcgtggaggcagccttgtaattaagtttcttgagaatgaggatataccaggttttggcaaattttgcaaagagaagttcaagaaagtgtccttattgagacccaaggcgacaagatctagttcgagggagattttcatggtctgtgaaggccgcggcttctcggtcgcgccacgctggcatccactttctcatggcccggcgacgtacgggacgggctccacgtgtcacgccgccgcccacagcttggtcgaattgagaactgttgggcttcaaagagaggctcccaagtgcagtgacctgaaagctcaagctcaacctgcggcgttcgtgcggattccgcggggcgcgtcccttcccgccacccgcaacgccgctggactccactccactctcctcgtcgcttcgttgctgcacatcaccacccaccgcggtggcactcacttctatattagcttaagcgtggggtgggagacgccgaggagggaggagtgccgcatcccggtggtgccgccgcagtgcccggcgccgccgaggaagaggccggtggcgctgccggagctggggaaggagcggcgggagccgcccaagggcgggtacttccagccgccggacctcgagtcgctcttcgtgctcgcgccgccgcggaggcaggcgtccagctgcgcgtagtgctgctgcgcccagtctccgtgcagcagcacgcacagtgtgttggttgctgctactcctacattatagtagtgttactagtacagctttagccttttgtgtagggattgctgctaactctgcagttgcatcttgtttggtggttttttttgtggagcaagatggatgtgcatttgctgttctgcttttgtgatgggaagtagctgtatctatctaccgccctgcgtgtgaaatcctgttaatttagcagggggaaaaaaaccctatgtatctatgtacatgttattccaagttcagaaaatgggaaaaaaatgttcctgg

SEQ ID NO: 21037 - DNA, 1611 bp, Oryza sativa
  Clone ID: PAT_MRT4530_26347C.1
atgcctacgaccacctcggaccagggccgagaacaacacataaagtttgctgtaaccatcctaataaatcatggtagaaatgcaaattacatgcagcgccttacagaaccaagtgatcctgcaccaggaatgttctcccttcagatggatccaagtggtgcaaaccagtacactcttctatggaataactccattgagtattgggctagtggcaactggaccggcgactcatttactggtgtgccagagatgtcacctgcaagcgcctatcccaattctgcatatacattccaatttatcgacaatgaccaggaggtgtccttcatgtacaatgttacagatgatgcattattaacaagaaatgttatagacatgtcaggccaaacccaagcctgggtgtgggtagatgcagcacaagcatgggttctctatttttcacaaccaaaattaatgtgtggtgtgtatggaatatgtggagcatatagcaagtgtagcagtaatgctgtgttatcatgcacctgtctcaagggattcagcgagagtccaagaaatgggaatcctggtaaccaaactgctggctgcaggagaaatgtcccgttgcaatgtggacacggtgactcagcaaaggtgaagaatcaagaaggtttctacatgatcggttgtgcccatttgccagacaaggcacaaggcacagatgctgccaacgttcacagctgttggctggctcagaacttcctgactcaagaagggagaaacattggcatcgggatcatcattgttggacttactgttataattccagacacagctacagtagcagttaagaggttagaaggcctgtgtcaaggggagaaagaattcagagcagaggtgagcaccattggaaagattcatcacaaaaacctgattcgactacttgggttttgttgtggaggatcaaagaagttgcttgtctatgagtacatgcccaatggctcactcgaccagcacttgtttggaaagagtaatctgactcttagttggagcacaaggtatcagatcaccgtaggaattgccaaggggttagcttatctacatgaggggtgcagggattgtatcatacactgtgatatcaagccacaaaacatactaattaatgaatcgcttgcaccaaaggtagcagatttcgggctgtccaagctgataggtcatgatttcagcagagtcctgacgtcgatgagaggaacactagggtaccttgcacccgaatggttaagcggccaggctatcacttcaaaggcagatgttttcagctatggcatgatgctttttgagatcatttcagggaagaggaacatagagcacggagctagcacaagtagttcaatgttgattgcagaggagattccaaaaggaggagaggtgcacagattgttcgaccctgagctggttggtgatgcaaacccagaggagctcgccagggtgttcaaggttgcctgctggtgcattcagaatcaccctgactgtaggccatcgatgcgagagatcattcagattctggaagggctaaagcctttcgaaacaccacctgttccaaggtatctcaaacttcttgctgatggtcaagagtaa

SEQ ID NO: 21038 - DNA, 290 bp, Oryza sativa
  Clone ID: PAT_MRT4530_26348C.1
ttgtttctgatccctgtgttaaaaaccccatcccccaaactatcgagcccttaatactctaacatacaaaatctaaattccaataacacaaaaccctgtggcaacatcctctaataaaacgaaaaatctaacaactgtgtatatagacagagacatgtcaccttttttttttccccagcaccatcatggaaactggaacgggctctacatcaaagaaaaggccgacgaaactctgcatatggtgggttacagagaatcccttgaaactttaagaacgcatcttcctacag

SEQ ID NO: 21039 - DNA, 277 bp, Oryza sativa
  unsure (1)..(277): unsure at all n locations
  Clone ID: PAT_MRT4530_26349C.1
tctccttcctattgcttcatgcttctcctctcctcatttttatnttttanctcaatattatattcaatatcancttctttctcctcncctncttcttcttctttttctnancccatatagtgggggggggggggggctttttttctgtgcggctanccccttcttacattctttgcgtttcaactgataaactccaagtcttgcttctcttctcgccggcggcgcatcaatctctctatcaggacattaacatcgtncaggccctagcgcagcagct

SEQ ID NO: 21040 - DNA, 631 bp, Oryza sativa
  Clone ID: PAT_MRT4530_2634C.1
ttaagtgtccgccacattttcgctggcggtaggtaatattagaaaaaaattggggcgaataaaatccaccacgcgcaacccactgcccttatcccttctcggtctctccacctctctcccttcttgcgtctctcctctctcccttctccaccgctgccagcttcggtcgccaccccaccactgccggctgccgtcgcctccactgccgccgcatcgaccaatggggagggcctcgggagcggcagcagagcgcggcctcctcctctccgctatgggctgccacgagctcggggccggatccaaccgtcgcgataacaggggaggccggatccgcctcctcgacgacgtgggaggccggcgggcaacaactacgaagggggcggcggcaactctcggaggcaacagcacgggagaggaggcggcgagaagcagatccggcgcctcctcccgccccactggcggcggcgtcggcaaaggagtggatggtggcagtgaggtggtggcggtgcttgggaggacagaggcagatccggcggcgctcagcagcagcagcgcgtgggaggagtggcggggagcagatccgccgacggccatccacgccctccctccatcctcagctcttactgtgtga

SEQ ID NO: 21041 - DNA, 1917 bp, Oryza sativa
  Clone ID: PAT_MRT4530_26350C.1
cggaggcggagatcgacttcgccccgccccgccccgccgccttcctccgccgccgatctccatcccgcgagggtgaagcagcgttgccggcgtcgtccccctcctgctcacttcctcttccttccgctcgccgccgggggcgcgctctctctgatggtgatggatccccttaccaacaaggctgccttcagtggcctgagacagtatgtgaaggagcttgattcgaacacgctcccgccatttcttgcccgcgtttgtgaccccgtgaagccatgctccttctccgaggaggagatgctgtgcatcttcgagaccgccgcgcaagcgcacggccgcaagattgtgccgcacatcgccctgatcgtctcggcaatcgttaggatgatgtcctcgcggaatgccgttggttgctccaaggttgtttgcgcgctatcgcggtacgttgttgatcctctggcgacggaagcgttgaaaagcgcgatcattggctcgctttgtcgtccctttgcagattgtctgatgagcactaaggtggagagcaactcttttggctctgctctttgtgtcgccgcgcttgtgcaatccaacaactggcggtttgcgtctaacgagctggttaatgatgtctgcttgaaagtctcaggggccctagaggaggcgcatgctcagagtatcgcgcacttaaacttggtggttgttttgctgacacaaaatccactgatgcttgagccttatggccgatctttgattcgatcgggcttacagatactggatgagagtgctaaggcaagcagttctcagatgattatttcatcgattcaaatgatacattccatcatgaagggtttggatctaggcattatatcttctgagatcagtagtattatccatgctatggaacaattccaggacgacactatgccagccatcagcattgcagctttcgaggcatctgagactgctaagctacttgttggcaggcaaaaagagagtgggcatgacaataatttgagtcagttagcaaactattctgtaagaaatggcagaaagggttcatattcacattctctcatggatgatgcggatatcagagacgatggttcatgtgattcacattcttgtgacctgaactctgttcatttgtctactgattttgattctcaacattcagtgggacaatgtggttctggaagcacacgtgcaaggcggcagctatggtgtaacaaatctgacaaatcacatggaatgtccaatcatgacttatttcgcactgttattccagatagtcatgaggcttcaggtttgatggcacatttcagctctgttgatccaattaagccagacaggaggttgtcagatgtgccaacaagagttgctggcccatgttatgtctgttcagcagcgcatgaaacgaatcactgctctcagatatccagggcacaggttttatcaggtgacatgaggatgaattctactccaagaaagcaactccattcttgcaccttctgtagagacccagaacaagatggtcacccaccacttgaaagtccagctatacaacactgctcagggccaggtactaatattcttcagttcagaaaaaacagtgagcttaaggaaagaaaagaattttgggactcaattcggcaggaaaatcaatgccatatgcaaaacactgatgccctaatagaagatttgaagttcccggctgacgatgatgatgaggattttgatggtgcagccaaatctccatgtcaagaatgtcaagctgtgaatgagaagaagactggaggcaagaaaagaaatgcaaaccgttctcactatccagtttttcttttcgtttttgttgtggcaatcattgctctcttctttccttggtggaaggactacaaagagccttatgttgttcctacataa

SEQ ID NO: 21042 - DNA, 255 bp, Oryza sativa
  Clone ID: PAT_MRT4530_26351C.1
atgacaagatcagtcacaattaagttcacaatacaaccttttcattttgccagttcattcgtttgcctaactgttggtgtaaccagctctgcattgcatgggattgggaggcactgggacacgctaagatgcaagatccttggcatcctcaagtgcatagtgaagtacaagttctgggacgtcgtctctggcactctttatgttgttttgagtgttttaacacctggtaatgtggttggatctgttttaatctga

SEQ ID NO: 21043 - DNA, 665 bp, Oryza sativa
  Clone ID: PAT_MRT4530_26352C.1
gtacaaatattcagaatagcctaacttggacaagtacaaaagataataatgtgcttgttagacagagatgtcaggatctgacttaacctcaacaatcaccatcagtgcatatttcaataaatattcaccaaatgtccctttcattgcgtagacacatcttcccacatcgtccagcttcattccatgaaattatcttgttataatgcatttttcgtatgttagtcagcaaggcaccatgtatttgttggcagtgtcaagctcattttgtactttagtcccttgttgtggcaacccttgctatcgatatactggataccatggactgacactttttgtaaaagctttattaactattccaacatatccttatctccgctcatcttactgcaatctatcagagtcccacttcgcataagctcttagtctgataagagaatctttgatgcgatgcaagtttagtctttctgtcaaaaactgcagtcacttgagtgaaaaataagtttgtaccatgtccatagtccataccctttattgacatcttaactttggtagttctgttcaattagatgcttctatgcttatcaccttttcacagtcatgaaattcataggagcataaccaggcccaaattacatgagacataagtaaagcttgttacttctctt

SEQ ID NO: 21044 - DNA, 207 bp, Oryza sativa
  Clone ID: PAT_MRT4530_26353C.1
tcgttaaccctccccagctccactatatggggggggttcattgacctcaggaggcgtttcacccacgggatggagaagcccaaggtcctcacgcgggaggagcggtagaagctggagctcgagcgccggcagggcggcgcaaccgaccagggacgctccgtcctcgacctgctccagtcgctccctcgacaaggtacgccaccgtcg

SEQ ID NO: 21045 - DNA, 772 bp, Oryza sativa
  Clone ID: PAT_MRT4530_26354C.1
caaagactagacaaagcagctaggacagtaaagctaagtgttttcctagctaggtagctagctagctagacaagcttgccggccggccggccggtgtcggcgaaccatggacttcgatgaccatgacgacggcgacgaggagatgccgccgatgccggtgagctcgagctacgagactccgccgcagcatggccttgccggcggtgggatggcgcccaagcctcctggtgagattggcagccgtgtgaagggccccagctgcggtggcggcaggtaccgcgagtgcctcaagaaccacgcggttggcatcggcggccacgccgtggacggctgcggcgagttcatggcggccggcgaggagggcaccatcgacgcgctccgctgcgccgcgtgcaactgccaccgcaacttccaccggaaggagtccgagtcgcttgccggcgagggctcgcccttctccccggccgccgtcgtcccctacggcgccacgccgcaccaccagttctccccgtactaccgcacccctgccgcgggcatgtccctcggcgccggcccgtccggctccggctccggcaagaagcggttccgcaccaagttcacccaggagcagaaggacaagatgctggcgttcgccgagcgcgtcgggtggcgcatccagaagcacgacgaggccgccgtgcagcagttctgtgacgaggtcggcgtcaagcgccacgtgctcaaggtgtggatgcacaacaacaagcacaccctgggcaagaagctgccatga

SEQ ID NO: 21046 - DNA, 412 bp, Oryza sativa
  Clone ID: PAT_MRT4530_26355C.1
ccccccaaggttttgaccttggtcccccataaggacctccaaaaaaatcaaaaaagcttttggcctgggcaaaccccgtggtctacaacaaacaacaaggcctggagtgatcagtggatcttctgggtcggcccgttcatcggcgcggcgatcttggccctgtaccacaagatcatcctccgtgccagtgccagggggtacggctccttccggagcaacgcgtagttgagctcgtctggcgagatccgtggtcaagtcgccatttgtcgaaactagatttcggcaataataaaagggggtggctatcaagctggaaaagtgtatgggtttggagacaaaggatttatacaggttcaggccttcttataaaagaagtaataccctactcccgcccggggatgaaaacaccaaa

SEQ ID NO: 21047 - DNA, 455 bp, Oryza sativa
  Clone ID: PAT_MRT4530_26356C.1
ttggttttttttttcaccctacacacataaacacagttgcgatcgagtctcgaaagacaccaagagtacagcgagaattcacttccgatccgacgacgcacgagtgcacgacgacacgttgagctcctcagctcggccatgccatgccaatctccctagctacgtatggcaactggggcagcgggggggcacacgcgcgctaggcgtcgtgttgatcaggttgcggcggtgggagcggctgcccccggatgaaggaggagaccagcaccagcgctcgttccgggtggtcgatcggggccatgtgcccggacccgggcaccgttgggaacaccagcccgtcgtacgcgatcacgtacccgggaacgtccttgccgtccgccgaccacgggcgccagtccgccgccacccgaggtggagcctctccattgactggctcggcgccgtcaccggcacca

SEQ ID NO: 21048 - DNA, 819 bp, Oryza sativa
  Clone ID: PAT_MRT4530_26357C.1
ccaaactaatcccaatccttcgcacgtttacggtggcgactggcgatgctccccgctgcggtcgtccgttcgtcactccgccttgcccctccccgcgccgccgctcgtcggagagccgccgccgtcatcacgatgcgggacaggagcaagaaccggaagccgacgcagcggggtcgctacctcagcaccgaggccatccaggccgtccagtccctcaagcgcgccgccctccggggctccccctccgccgccgccgccgccgtccccgtggagcccaagctccggcggctgctcaaggccgacatggtcgccgtcttccgcgagctcgccgcgcagggcgaggccctcctcgctctccaggtctttgaggagatccggaaggagcattggtacaagcctaagttgctgttgtacgtcgatatcgtgacagtgctggcaagcaaagggttgcggtctgaggttgacaaggtttgttcatatctgaagagggagcagttggaacctgacactgaaggcttcaatgtgcttctgaaggcactgctggatgccgagtttacacaattaaccatggactgcttccgtctaatgaaactatgggacagtgatcccgacaggataacatacagaacattgattaaaggccttgagtccctaggagagatgggtctatctgctgatataaagttggaggcgcagaacgattacggtgacttggactttcttgatgaagaggagatgatcgatactctggaacaaaagagcatttggcgaggttcatcgctcatcgcggagaataggagggcacgaattagctcttaa

SEQ ID NO: 21049 - DNA, 222 bp, Oryza sativa
  Clone ID: PAT_MRT4530_26358C.1
gcagacagccgcaccctcgatgagacgctggagaacatagcacgccactcaacaaggatgttcaagcctcgacattcgagaaggcgagtcacttgagcagaagatgcaaggccgaaggtcggagaagttcccagaacctgaggagttgaagaagcagagtctctttttcttcagcccgtgtatcctactatgtatactaactaccatatctgctccagacag

SEQ ID NO: 21050 - DNA, 1182 bp, Oryza sativa
  Clone ID: PAT_MRT4530_26359C.1
atgttccccacagccggcggccgccggctcctcgtcctcatccgccgcgcctccgccgccgccgcggccggcgcaaaccctaaccaccaccaccaccacgccacgcttttcacccatcgctactcttcgtcccccctagcaagaacccctgaggcggaatccgccgccgcggcctcctacctcgtcgcctccgtcggcctctccccggccgccgccgccaggatctcccgcaaggcacgcttccgttccaacgccgacgccgaagccgtcgtctccctcctccgcggccacggcttctccgacgccaacatcgcgcaggtgctcccaaaaatcccgggcctcctcatcctcaacccggacaagatcctccggccaaagctcgagtacttcgcctccctcggggtggtcccctcggcactgtcccgcgcacccctcctcgcgcgcagcctggagaagcacctcgtcccgtgcgtcgagttcatccgcggcgtcgttggcaccgacgccaacctctgcgcggccatctcccggaacccctgggcactctggtgcgacattaacagcagcatgcgccccgccgtggaatcccttcgccgccacggcctcgctgaggcgaacatctccaggctcgtcgtcatcaatctcagcgctctcacgatgtcacccgaccgcattgacgggatctttggggacctggaggcgctcgagctgcccatctcgcattcgcgcttcgtgtacggcttctgggcactgtccagactcaagaggggggcatgggaggaacggatgtccgtgttcatgagatttggggtttccaggagcgagttgctcaaggcattcagggagcagcccggtatactagtgttcacagctaaaactatccagcggaagctcagtttctaccaggaaaagctgaaggttgcaccggcagatgtgattgcacatcctcttctcttgacgttcagcttggagaagaacatcatacctaaatgtgccgtgctgaatgtgctattgagggaggggaagattaagagatatgggagagagatggacttgttgagacccttgcagcgtagcaatataagtttctttgagagatttgtgaggaagtatgaggaagatgtgccagatgttgtaaaagcgtacgaggggaagattaagttcacgggattcatggattag

SEQ ID NO: 21051 - DNA, 352 bp, Oryza sativa
  Clone ID: PAT_MRT4530_2635C.1
cggacgcgtgggcggacgcgtgggcggacgcgtgggcggacgcgtgggcaaggcaatgcggctctttgtgggagagcctgtctggacgccgtacaaccgtccccatgaccatctgccagctagaaaggagtatgtctaaaaaattatcaacaggggtggaactcaagctgtcgaagcttgttaaaggcatatcaagatgtgcttcctagttcggtgttctgttacactctacatatactgaataaactgagctatcagctgttgcaatgggctcctaccgacatcttacattatttggcagtttcttgctcagaccctcttaaaatctttctagaaatacgcacgttactat

SEQ ID NO: 21052 - DNA, 547 bp, Oryza sativa
  Clone ID: PAT_MRT4530_26360C.1
gggaattttgcgcgtgcggaagaggttcgtcagtgcgcccttccacttcctcccggcagatcccccgggaagtgcacgcggaagagttcacggcgtggccctccctctccctctcggccagatcactagtggcagcgacgcagccctcccctccctatttcttccactccctcccatcctctccttcccagatctggcacagaggggggaagtaggtggcggcgacaaaagagagtgcgaaggcacgccttctcctccccttcctcttcctctcagatccaaccggaggggggagccggcggtggcaactgcaccagtagaggcagcagggagaaggtagcagtgccggagctgtgatgacaaactccttcattggcaccacactgcgatgacaatgattatgtttctatttgttgtttccatgttgattgatgttaacctacaagtcggtgttgtgaatttgaatccggtgctcttgtgttgatgtatggatgtttgtgatcggaatttttggatggatgaaaattttgtgaaaaaaaaaaaaaaa

SEQ ID NO: 21053 - DNA, 2079 bp, Oryza sativa
  Clone ID: PAT_MRT4530_26361C.1
atgccccggcgctccacctccacctacaacgccatgctcgccgggtactccgccaacggccgcctcccgctggcggcgtccctcttccgcgccatcccgcggccggacaactactcctacaacaccctcctccacgcgctggcggtctcctcgtccctcgccgacgcgcgcggcctgttcgacgaaatgcccgtgagggattcggtcacctacaacgtcatgatctcgtcccatgccaaccacggacttgtgtcgctcgcgcggcactactttgatcttgcccccgagaaggacgccgtctcatggaatgggatgcttgcggcgtatgtcaggaatggacgggttgaggaagcgaggggtttgtttaattcgaggacagagtgggatgtgatctcttggaacgcactgatgtcggggtatgtgcagtggggtaagatgtcagaggcaagggagctatttgataggatgcctgggagggatgtcgtatcctggaatattatggtctcgggttatgcaagaagaggggatatggtggaggcaagaaggttgtttgatgcagctccagtgagggatgtattcacatggacagcagtcgtgtctgggtatgcacaaaatggaatgttggaggaggccaggagggtgtttgatgccatgccagagaggaatgcggtgtcttggaatgcaatggtggcagcctacattcagcggaggatgatggatgaagcaaaggaactgttcaatatgatgccctgcaggaatgtggcatcatggaacacaatgttgacagggtatgctcaggcagggatgttggaggaggcaaaggcagtttttgacacgatgccacaaaaagatgcagtctcctgggctgcaatgctggctgcatattctcagggtggttgcagtgaggaaaccctgcagttgttcattgaaatggggaggtgtggtgaatgggtgaatagatcagcattcgcttgtgtgttgagcacatgtgctgacattgctgcacttgaatgtggaatgcagcttcatgggagattgattagggctggttatggggtgggatgttttgttgggaatgcactcctagctatgtactttaaatgtgggaacatggaggatgctcggaatgcattcgaggaaatggaagagagggatgtagtttcatggaatactatgattgctggttacgcacgacatggttttggaaaggaagcacttgaaatttttgacatgatgaggacaacatccaccaagccagatgatattactctggtcggagtgcttgcagcatgtagtcattctggcttagttgagaaaggcatttcatacttctactcaatgcaccacgattttggtgtgacggcaaaacctgagcactatacgtgtatgatagacctccttgggcgcgctggacgattggctgaagcacatgatcttatgaaggacatgccatttgagccagattctaccatgtggggtgcattgctcggtgcaagtcggatccaccgcaatcctgaacttggcaggagtgcagctgagaaaatatttgagttggagcctgaaaatgctggcatgtatgtcttgctttcaaatatatatgcatcttctgggaaatggcgagatgcgaggaaaatgagagttatgatggaagagcggggtgtgaagaaggtgcctggattcagttggattgaagtacagaataaagtccacactttctcagctggtgattgtgtgcatcctgagaaagaaaagatatatgctttcttagaagaccttgacatgagaatgaagaaagctggctatgtatcagctacagatatggttttgcatgatgtggaggaggaagagaaggagcacatgctcaagtaccacagcgaaaagcttgctgttgcttatggaattttaaatattcctcctgggaggcctatccgagttataaaaaacctcagggtatgtggagactgtcacaatgctttcaagtatatctccgcaattgagggcaggctgatcctattgcgtgattctaaccgatttcaccactttagaggagggtcttgttcctgtggggattactggtga

SEQ ID NO: 21054 - DNA, 420 bp, Oryza sativa
  Clone ID: PAT_MRT4530_26362C.1
tgctattgctgcatgcaacgcctctgcgcatattgatgttacacgacaaagctataggcacaatcaactgcattcgactgtactgctacagtaacaggcccttaacctatataatgagatcacaaggcaccagcatggcatagcatggagccccttgcatgcattcagctgagggtcaactcaaaaacaaccaagtatggcaacagctcacgctggtggcgcatcaatctcactatcatgacattaacaatgatcaagccatagcacatgaactacaactcctacagcctgaacatctctactgtgatcagaatgagactgaagctcaacctctgctagctgttaacagaccatctagatattgaatctacactaagtactatggagcaccgagctccattaccacccatagcggtgtct

SEQ ID NO: 21055 - DNA, 407 bp, Oryza sativa
  Clone ID: PAT_MRT4530_26363C.1
agctggtcgatcgcccataaccgcgggtacggctattcaaatagttttactttggctagaagtgcacaactatacccacaagacacaatccaccggcatgtcaccatgcccggccggacacgtcaccatgttgagtgattgtgacaagacccttcgcataattccctctgaccaatcgatgccaaacctcaagtttcgcccccgcccctaacaggcagcgggcagccccccctccccccgtcgtgccacggtgaatccagaagcagcatagggcgtcgcagggcccatccatactacatcacgcccaacctagactgggtacgtcagtcagaagaaagctatactacaagtcaagcagttaccattcccgcttgtggtaagcgctatatgtcttccagggtttccca

SEQ ID NO: 21056 - DNA, 166 bp, Oryza sativa
  Clone ID: PAT_MRT4530_26364C.1
agagaacggccttccgaaccttggcgacgaccgtgaaccacgcttcgggaacctccggaacgacaggagctacgcgaagcacacaagcagagctaaaccctataaagaagcaataacaatacataaaaagaaagcacagggttctttaggttataacaaacattag

SEQ ID NO: 21057 - DNA, 2580 bp, Oryza sativa
  Clone ID: PAT_MRT4530_26365C.1
atgacctcctcctcggcctcgtccaccccgaccaggccgtccccgtcgccgtcgccgttcgcgccgccgcggcaccgccggaaggtcgcccccgccgcggcgtcgcccgcgcccgccgcggcggcggcggcggcgagccacctcctcccctgccttcaccgccgcctccgcctcctccttctcttctccctcccgaccctccacttccgctccccatccccggccagcctcccgcgctccctcctcaccccattccttggcgccgccgcttcctcctgcgcgctcctcctcctgctctgcctccccctccttcgccccacgttcccgctccccttcacctctccgctccccagtccgcgcggatcccctatcccgtcatcggtgggcactgctccttcatcctccgcagccgcgacgaccaccggacatactgcccatgcctcagagatgggcaatctgtgcgttccccagttccacccaagcagctcctgtggcggcctttgcttacgctaggacaagggttgcacgagtgaggaagagtggatcttcttgtagtacgatggcgaaggaggccagaccaggtccagtggatgcttatttttcggaatgtatgtgaaactctcaccataggattatgggacacagggaatgaacaccgatgatgtaataaatacagatcttttcagaccactgactcctggatttaaccttcacacctgcgtagatggtagccgctgcagggcgggattcaagaggggtgtccagcacggacttggcaactaccgtttcagtatttgcgataactatgcaggggaatcctgtgcttgtaggatgcatagcttcggagtctatattttagccaatggtcacagatacgagggagcttggcatgagggtagaaggcaaggattaggcatgtatactttcaggaatggagagacacaagcaggccattggcaaaatggagttcttgacaccttgagcacccaaaacattatccctgggtcccctatagctgtgaaccattccaaggtcctcaatgcagtgcaggaggcgagaagagctgcagagagggcctatgacgtcccaagagtcgacgataaggtgaacagggccgttgcttcagcaaataaagcagccaatgcagccagggtggctgctgtgaaggctgcacaaaagcgcatgccaaataatggcaatgatctaccgttgtcagtagtcagaactcctgcgcagagagagagagcttcctgttgtcgaaggcaactgatcgagctgccgcacggggcgccctgcatccgctgcgccatctgcggggccgtcacctacgtcgccgccgccgcgccgccaccggcccacggcgaccccgcccgcggcgccgcggggccgggggcggtggcgccccagcaccaggcgccggggtgggggccgcctcccccgcccgcgcacgggcggaagcgcgccgtgatctgcgggatctcctacaagttctcgcgccacgagctcaagggttgcatcaacgacgccaagtgcatgcgccacctcctcacgacgcgcttccacttccccgacgactccatcatcatgctcaccgaagaacaaactgacccttacaagattccaacaaagcacaacataaggatggccatgtattggcttgtacaaggttgccagcctggagactcattggtattccattattctggtcacggagcacaacaaagaaactacagcggagatgaagttgatggaatggatgaaaccctctgcccattggattttgagacacagggaatgattgtggatgatgaaataaatactgctcttgtcagaccacttactcctggagttaaacttcatgcactgatagatgcttgtcacagtgggactgcacttgatttgcctttcctctgcagaatgaacagttttggtgtggtactgttcaccatccgtttattttcacaacttactgctaatttgcccatactaatatccctggtcttctttggtacaggagtgggcaatatgtatgggaagatcatcgacctcgatctggctttgtcaaagatcacttcaactggcgctatgacattttgctttatccaagcaattgagcgtgggcagggcaccacctatgggagtatcctgacctccatgcgttcgacaatacgcagtacaggtgattcaatgggcagcggaggtggtgctgtaacatcgctaatcacaatgcttcttacaggaggcagcgttagtagtggcggcttgaagcaggatccacagctaactgcaaacgagccattcgatgtgtatgcgaagcccttttctctatgacacgatcctggtattctccaccgcgtctatgattatatcactagtccccgtataaattatcatgatgtaaatttcactgttgaaagggctccatttcataaatagagctaacatgttgcatgtattgttgctcattacattgttcacgccctttggaatgtgatttgtaccttggtcacattgttccttgatcaagaccatattatgctcagtgcaatatgcacgggttaatgagattgtaaaaaaaaa

SEQ ID NO: 21058 - DNA, 422 bp, Oryza sativa
  unsure (1)..(422): unsure at all n locations
  Clone ID: PAT_MRT4530_26366C.1
gacgtcgcagcacgcgacgaagctggaccttagagcggcgccttttttttgtttgtttttttgacttaaacttttttagggagttanttttttagaggaaagactacataaagatttgtttggggaaaaaacaaccaaaaaagcaaaattggtggaaaacattggggggggcaaaaccgaacgggggggccccctgcttaaagggaagcccgacaaacctaaactggccgggggaaaaaaactaacctggtgggggtcaaccccgaaataaggggaggtggcccagacgggctcccctggaaaccccacccggggaaccccgggtatgggggattctacacaaaaagcggcagggggggccaccccggaaatcccgacccggaccggaaggggtacacaattttcctaaaaagaattcgatt

SEQ ID NO: 21059 - DNA, 399 bp, Oryza sativa
  Clone ID: PAT_MRT4530_26367C.1
acacaatgctactactcccagctcacttgaatgtatacttaaaagagtaaagttcatcaccggtccctaaacttgagccgttgtgtcatcccggtccctaaactcacaaatcgaccgtttaggtctttaaacttgttcgactgtatcatctcggtccctaaacttgcagatcactcgtttaggtcctctaacttgttcagttgtgacaccccggtttctaaacttggatttgaatattatctgggtcaaataggacgggaccggagtgacacaaaacaagttggaggaactaaacgaatgatctgcaagtttagggaccgagatgacacagtcaaacaaactccctccatttctacatatttgacacggttaactttttaacacatatttaaccgttcg

SEQ ID NO: 21060 - DNA, 351 bp, Oryza sativa
  Clone ID: PAT_MRT4530_26368C.1
ttttgtcctgtcgcagcacagacagggacgggtgaacgttcaaggcagagcaggtttcagctacaacaggatcgacggcctgaaggctggcaccactcatcatgtcagtgttgaccagacgatatcgctgtcaggtgaccgaacaacagggctggatgaatgcagaatctactacctgattgacagtggacaggctcttcccgctaaagtcctttagggagacggtacccactgcccgcgcttaatgagccaaagaccgtcgcacttctagtgtatgaccaaggaacaggtgctcctcgaccgatcacaacatgcgctggtgtcggaaacttacgaacacaactatacatt

SEQ ID NO: 21061 - DNA, 246 bp, Oryza sativa
  Clone ID: PAT_MRT4530_26369C.1
gcacgaggatttacgtttctcccatctggagctatatcataggacactattgcattttgagttatggcaagaagattaaaatctgtatggctcacaggttgctcttgagcgaaggatactagagactatttgcgaatattattcctaaattactagtacagtatcttagttgtaaacagaatatgaaacagcatggattatctagatgatatttgaatacagtgaaaatagtatgctatcccagag

SEQ ID NO: 21062 - DNA, 1242 bp, Oryza sativa
  Clone ID: PAT_MRT4530_2636C.1
gaagatatgcaagctgttgctgccaggtatttaagccttgggggcactgttacaatgctcccaaaggagatcacaaaactgaaatttttggagacactcgatgtacgaagaacaaagataaaagttctgcccatacaagtcatcaagctgccatgcttgacacatctatttggaaatttcaaacttcaagatgtaggccagaaaattagcaagctacagaagtatctgtctgagaaaagtaagctggagacactagcgggattttttgccaataatgaccaaggatttcctcaactcattgatcatatgaaaaacttggccaaggttaaaatatggtgcgagagcgagaccccttccaattctagcagcaacactattcacctttcaaaggccattcaagttttcatccagaggggcaccaatatgaacgatgtccgctcgctttctctgaattttggggggtgcttccaagaccaagagaatatgctgaagttttccctggaagattcctgctacttaagctctctgaagctaaaaggcaaaataaacatattacctccatttgtaaccttgctgaaaggtcttactgagctgtgtctatcatcctctgataagctcaacagggatgttcttgctgctctaagcaatgttcgctgtttgcattacctcaaactgattacacctaatctggaaaagtttgtcataggacagggtccactcaaaagcctacgacgcttgtgcatcatggtgcaaaccatgaccgagccagaaatccaacagggggctctgccaaatctggagtcattccggctgctctgtaaggatctaaatgggctatgtggcatcaacatccagtacatcggccccgaatgcctcaaggaggttgctcttgacaaaagaattagcgaagaaacaaaaaagaagtggaaggaaacagtgaagaaccatcctagatggcccaaggtctcatttgttaatacaggagaggttggtcagatgcagaatatggaggttgctcagcctacagaggatgctgcagcactggctttggctgccggctccctaaggccggttccggtttttagacgtccaaaggcagatcaagaaaggaccttagatctctgttccatgggccaaacctctagggaatcttgcagcaatactgagccatacttcaaaactaatgggacttcaccaggcaagctgaaccctgtgaatgatgaatgtcaccatttctgctag

SEQ ID NO: 21063 - DNA, 430 bp, Oryza sativa
  unsure (1)..(430): unsure at all n locations
  Clone ID: PAT_MRT4530_26370C.1
ttttttttttcatggtactactaccacacatgaaattattgatcggttgcatagtactttacatatggaattattgataggctgtcgtttatggattgaatgaacagcacaagcacatcaaaggttccagtttctgaagttctaacccagccatgatgcaattattccacgaatttggtttagactagattgggtaataacaagagctaactggacttgatcaccaacatccgacgaaaccgaaggggcaatgggggccaaaaaaaaggtgctgtaaaatcaacaatttattgacacaaaaaaaaatgtagtaactagtaatttactcttttccttagtcacagnatgacgcagcctgacttcctgctttcgggtaacgagggttacacattttaccctcagaaattagaactggcgatacccagccctc

SEQ ID NO: 21064 - DNA, 1783 bp, Oryza sativa
  Clone ID: PAT_MRT4530_26371C.1
atatttgagccgtcgtattttgaatgccgaaacgaggccgatgttattaaacatatgttgcaaaggccaattttgagggggagaacatgatttggcttatgaacaattaaaatatatcaaaggccaaactgcagttgattttatagtagatcatcatgtggatgttgcttatgataatgaggtttacttgcttagtgtttgaccttggaaggtttagtttaatggttcttctggtaaggaaggacaaggtatagctgtagttttgttttcgctcagtggtttatgctttgagacatcggttcgtttagaatatttttgtacaaataatcaagccgaatatgatgttttttattcagcttataagtgttgcaagctatagtggctacagatgtagaagcttttggtgattcggaattagtgatacaacaagttgccgggtatataaatgttttgatgggtcactaaatagttatgatcaatgctcggatattattgccaattttgatgatattttcattcgacatattgctagggaggaaaaccttagagcaaatagtttagctcaacaaacatatggctataatgtgaagagaggagtattcttgattttggaaaagtcggtgtttgaattcaaaagtttggacaaaattggcaagattacagaccaggagtggtttgactggtgcattgcagccggtctgaccggtggtgaccgtctgtctaatcgcctcagcatggccggtctgaccggtggtgaccgtctgtctaattggtctgaccggctctgtatggctagtctgactggatattggaagaatgggacgatcgatttagaggccaaattgattgtaaattcgggcatttgtgcctaggagttagaggaaaactggagaatccctttgatatattatttgaaagatcctagtcttagggttgatcagaaaatttgatgacatgcatttaaatactttttcttgatggagagttgtatcgccgaaatgtagatggggtgctattgaaatgcttagataatgatcaatccaagatttccatgggagaggggtatcgattcatgctagtaacgatagattatttcactaaatgggccgaagccatgtcactcaagaatatgactcataaggaggtaatttactttattttaaaacatattattcatagattcggcattccttaaacattaactacggatcaagccaagtcgagtagtaaaacattgttgaaattggtcaaagaaaagatcgaagaacatccaaagaggtgttatgaggtgctttcggaagcattgtgggctcataggatatctaaacatggtgttatcaaggttactctttttgagttggtttatggacaataagccattttaccggtggaggtgaatcttgtctctgttagatatataaagcaagatgatttatcggttgaggaatacaaagcattgatgggagacaatcttgatgatgcgaccgataaacgtttgaatgctttggaagagatagagaaggagaaaaagggagtagctaaaccttacaataaaagagtgaaagcgaaatcgtttcaagtaggagacttggtgtggaagacgattttccctttgaataacatgttctatgcttttaggttcacaatgttcaccaaaaagttaagggcatgtgtttacacccaaagttggtgccaaggttcaaattaggaaaatattgccgaaatttggaagagcactgggggccggtctgaccctcgtgtgttggccggtctgaccagtggt

SEQ ID NO: 21065 - DNA, 363 bp, Oryza sativa
  Clone ID: PAT_MRT4530_26372C.1
atggcgtctccctcctcctacgttgcaaccgctccttccccttccacagtcctcgctcacctcgctgctgccaaggtctccatcctcctgggcctctccgaccccgagcttgcctgcgtgacctcaaacttcctcccaacctccaattccgcaagaggggcggtgttggcagtcgccgtcgctgattacattcaaaattttaaaagtgctaaacgtgcatacgtaactatctttgccgagatatacggttctttttttttgccaccctgcactgctagctctccatggtacgtgtacatggttctagctcgcatcggcatgactgcaaaaacagaatggaagatgaagatggattacatctga

SEQ ID NO: 21066 - DNA, 290 bp, Oryza sativa
  Clone ID: PAT_MRT4530_26373C.1
gccgcccccctttttttttgttgtttttttaatatttttggttacaatcctttctttttttttttttttttttcttttttcatctttttgttctcctcatacgtttttcgggcatcccctcgggctatttacccaccaacagagccccccacgtcaccagaggaaagaacaaccccgatctctggtgtccgaaaaaaaaactttcccctctggggacccggttacccccaaccccatgtaacaggtgaagaaaccccacttaaaacccaaccccccccttctcttaccaa

SEQ ID NO: 21067 - DNA, 1068 bp, Oryza sativa
  Clone ID: PAT_MRT4530_26374C.1
atggcgctcatgctcgccgcgttcctctgcgaggccgtctccgtccgcttcgtctccaccgtcctcggcctccattggcaccgatctacagctcctcttcccgacactgggcagtggctgcttctagcattgaatgagaaacttccgcaaattgtggttgatctcctcagagcacccatcatcagtcttcatcactatctgatgttgtttatcatgctggggttttcagctctgtttgactgcatcaaaggccctggacttggcatagctgcaagatatatgttcacaatggcagttggacgttcgctgcggactgtaacatttcttgctacgattctaccatccgcgaggccttggtgtgctgaagctcgatatcaaatacctgatcatcctcatccttgggcacagaaatactatgctccatatgcctctgatccagatgcgatccgtagggtcatacaagaggatatgccatatgctttcgttaaagagtaccctcgtgagtatagacctaagtggggacatatgagcttcttagtagacattttgaggccaactgttgaagaggggtcctcatggtatcattttctgaagaaggcaagtggtggctgcagtgatcttatgtatagtggccacatgcttgttgctgtcctcaccgctatggcatggacggaagcatatgggggatggatctctgttgttatatggtttcttgtcctccacagcgctcagagggagatacgggagcgccatcattacagtgttgattgcatcgtggcaatctacgtcggaatcctcttgtggaggatgactggtttcatttggtctgcgatagacaacagtcatgccagaaggcttgcaaagctcgacaaggttcagaacagactatttcaggctgcaaaagattcagacatggatgaaataaggggtctgctgaacgaagttgagctggctggccaagagaggaagggcttctcgcagcgtgtcatcttgtctttctcctctgctatgatagttttcaccctctcatgtgttctcctagcattcacactaaccagcgatggatga

SEQ ID NO: 21068 - DNA, 471 bp, Oryza sativa
  Clone ID: PAT_MRT4530_26375C.1
atggcaatgaaagcaccaaccatggaagcaactgagtcatccgtcaaccgtataggcgaagtccgccaaccgtataggcgaaaataccagtcagtggcgacgaaggcggtcgatggcgagtacaccagtcggcggctgatgaggcggctggtcggtgaagacgcgaaaaaccagttgacgacgacgacggcggccaatggtgaagacaatgccgccatcggcaacggaagcggcaaagatgagggaaatcaaaggtgcgggttccaaaaccgggaccttagagaggttttaggaatcaaaaaaaggcatcgagcagctcccattcaccccgccgagaacacatcgaagaacatccaagaacgaatgaacatgaacatcaagaatattcttcccaactactgggaaccatcaaaactactcatccccatcaagaacacaattacaaaaaacacatcaagaacaaatagatag

SEQ ID NO: 21069 - DNA, 444 bp, Oryza sativa
  Clone ID: PAT_MRT4530_26376C.1
atggtggacaccgcccccggtggtttgaagtaccaccagccggtgacacagatatccaccactggggctgcctctcaaagcgagaaggacgacgaccacgagttgctccatcactactccgctcagcgcttcccggagacgagcatgaggacgttgtcactgctccactacggatccgcgcgctgccaccatgcatcctccgagccctcgatggtccgtctcctcgtcgttggccaagagaggaggagcgaggcggattggggaagaaatggcacgatggatttgggggagaagcggcgcaagcgtgtgagaagaatgcctccgcctaatacaaagagaggcaatttacccattggggccatggacctaagggcctttatggtgctgaggatgtggcaagttccttcgttcaccagctcagatattcgcctaagtgttgactaa

SEQ ID NO: 21070 - DNA, 1145 bp, Oryza sativa
  Clone ID: PAT_MRT4530_26377C.1
tatgaattgattttaactgtttttgaaaaattatctggcttgaagataaattttcacaagagtgaattattttgctttggccaatcaaaggaatgtcatgagcaatattcaaatatttttgggtgcagagattttcttgttagatattttggcattcctatgcattttagaaagcttagtaataaagatgggtcaaagaattgataaaaaacttagtagttggaagggtaagcatatgtctgtaggtgggagattggttttgattaactctatgttatcaagtttagttatgtttatgattttgtttttttgagattcctaaaggggttcttcaaaaaattaattattatagatcctgtttcttttggcaaggtgatgaacataaaaagaaatatagattgacatgatgggatattatttgttagcctaaaaatcaagggggacttggtgtttataatttagaaatccaaaaccagtgtttacttagtaagtggctgtttaaattaataaatgaacaaggtgtgtggcaagattttttgaaaaggaaatatcttggtactaaatctataactccagttgagaggaaacaaggggattcccattttttgtcaggattgatgaaagttaaaaattattttctaaatatgggttcctggtttattaacaatggtgaagttagattctgggaggataagtggttaggtaattcatctttaaaggacaaatacccatcattatattccataataagaaggaaaaactcctcagttgcaagtgttatgcgtactgttctacttaatgtctcttttaggagagcattagttggtcagaacttgattagatggcacaatttgtgcgcttcaattgtgcatgttaacttaacagaggaggctgatatatttggatggaatcttcatcaaagtggtcaatttccagttcgatctatgtctttggctctaattaataatgggtatatcgagagaaataagtttatttggaaacttaagatgcctcttaagattaagatttttatgtagtatctccttaagggaatttgactcggaggaattgaaacggtagtttgaaatgttgtttttgtatgaaaaatgaatcgatttaccatcttttcctagattgccattttg

SEQ ID NO: 21071 - DNA, 655 bp, Oryza sativa
  unsure (1)..(655): unsure at all n locations
  Clone ID: PAT_MRT4530_26378C.1
tcagatcagatgagacgagatgcgtgggtggtggtggtgatggaggtgctctcccggaccgagtgtgtaggaggaggaggagccatggttgaagtagccttcgcttcgtccggatcctccgtggtgcccgacagcgatggcggaggtggagggggcctctactacagcctcgccccgccttcgtagggacctcgtcgttagggacgctcttccatatgccggggtggctcctccgtcgctggcgcgaccgctgccgcagctgcaggctacgacgagtgggggcggcggcggcgctagaagggggaagagtagccccgcggtgctcttcatcatcgtgattctcgcggtggtgttcttcatctgcggcttgctccacctcctagtgcggctccttatgaagaagcaacatcgtgcggaggaggaggggattcggtggccggggtgtcatggtcggccaccggggatgacagaggaggaggggacgtggcactgcagaggctgttgcagcagctgttccacctccctcctcgcccggccgccgcgagctgcccctcctcactcggccgccgagcgccgcctcctcgcccgaccgccacgcaccgccttggggatgggagaggggagtgatgaggaanaanaggggggagagagttga

SEQ ID NO: 21072 - DNA, 385 bp, Oryza sativa
  Clone ID: PAT_MRT4530_26379C.1
tgtaagagctgcattagacactcttccgcatcaacctttgcctacaaaggatgataaaagctcacagaaccgcacgaaggatggcagctcaggtgatgatttcaacaaagattcaattgaacgtgatgataaacgacttgtagagcttggctggaagacactggaattttttgccttggcccatatattcagccgaatagaagtggcataccaggaggcagtggctttgaagcgccaagaggagctcattcgtgaagaggaagctgctgggcttgcagaaattgaacttaaggcaaaacgtagtgctgctgagaaggaaaaacgcatcagaaaaaagcaggcttaacagatgaaaaacaagtcggaaaataataaagggaaaaat

SEQ ID NO: 21073 - DNA, 1652 bp, Oryza sativa
  Clone ID: PAT_MRT4530_2637C.1
attcaagatcctcaggggcatccgttcattactgaaaaggtgcaacttttctttctttccaggttgccaaaagaagagaaaagctgttgaattacatgctttttctcagggtcaccccaacattgccaaacaccttcattaacttagcttcacccatagtagatgtgccctaccatatattcttactggcaactctcatcggtctcatcccagcttcctatgttactgtcagggctgggattgctctaggagagttaacatcattgagtgacctgtatgatacccaatcgatagcgctgctgttcttgatcgggattgtttcggtcatgccatcattgcacaggattgagagaatggcttccagctcactcggggtttccaatcaaatcacgcgtgctaatccaaatggttttatcgtggcaaaattctactcacgcataaccggagagataaattctactcacgcagtggcccaattcacggccttctcaggaccgagagaacttggcccagatagcaatactgggaggaaaaagtacaacgaagctgagtcagcatccatatgtcaggatgccgcatcagcgcacactctctctttcccctcgtctcccttcctctctcctttttcccctgggcgttgtggatggcgacagcttcatcgacgcagcggggaggagatgctcaaggcattcatgcccgtcgccgtctactccctcatcgtctccttccacaccgactccttccgccgcgcctccatgctcaacatgctcggcatctccgcgggcgtcgccgtcgccgtcgccgcctacggcgaggcgcggttcgacgcgttcggcgtcatgctacagctcaccgccgtcgccgccgaggccacgtggctcgtgctcatccagatactggtcacctccaatggcaagtcgctgaacccccatcacctcgctctactatatcgcgccgtgctgtctcgtgttctagacgctgccatggcgaaggcggcgccgccgtggctggccgcgaacgacgtcgtcaccgctgtcaccgccgccggccgccggctgccgacaccctcctctctcgtcggcctcctccccacactgactagcctgcgcaaagagatgagagagaggaggaagggagagaagaagaggaagagcaagggtgtgacatggaaaccctgacatgtagggctcatatggtcgcacgctgagttgggcaaggacgaagcgcaagaaaaaacaacggaaattgcagttaccgcgtcatgatcaccgaagcgccgatccgcatgccctcacctgtacatatgaagctccagcatgcagggttgcttcagaagtagtaggagcatcaaaggcctgacaacaccatggtttgcaaagactacacagcatgacaggacctccaaccccaagtgcttccctgacccctctccattactggaagcctgcttgggttgccatcgaaacatttacgaagtgaagtgtttagccacccaaattatggagtctggggaggcacaatgcccatcaggcaaagctgctttgatgtgtaagcattaagccaagtagtgttgtttagatgggacaagcaaactgatctgatccctgtatatattgatcagattcattcaatccatattcagtggttcaatc

SEQ ID NO: 21074 - DNA, 166 bp, Oryza sativa
  unsure (1)..(166): unsure at all n locations
  Clone ID: PAT_MRT4530_26380C.1
agccacgcgtncgcccacgcgtacgncacgcgtccgcggacgcgtggtcggacgcgtgggcgaactcgatggtcgtcgaggagattgagtcgcggaaggcgatgctgggcgcgttgatctgcgttatgaaggtgatcctgagcaagaacggcgtgaagctctgtca

SEQ ID NO: 21075 - DNA, 3553 bp, Oryza sativa
  Clone ID: PAT_MRT4530_26381C.1
atggctggtactttgattgaggactatacaggggatggtagatcctcgtcaactgaagagttgccaagcgatcagcaaagtcattctggggaatctttagcagaatggagatcgagcgagcaagttgagaatggaacaccatcaacttctccagcttactcggacagtgatgatgatgattgtgggccaaggccttctgagctttatggaaaattcacttggaggattgataatttttcccaaattaacaagagagagctgcggagtaattcctttgatgttggcggctataaatggtacatcttgatttacccacaaggatgtgatgtttgcaatcacttgtcactctttctttgtgtagccaaccatgataagctgctcccaggatggagtcactttgcacagtttaccatagctgtaattaatagagaccctaagaaatccaagtattctgatacactgcaccggttttggaagaaagagcatgattggggatggaaaaaatttatggagctaaccaaattacatgaaggctttgttgttgatgatgttcttaccatcaaagctcaagttcaagtgatcagggagaaggcagaccgtccatttcgctgccttgatggccagtacagaagggaactagttcgggtgtatctctcaaatgtggaacaaatttgtcgacgctttattgatgaaaggagaagcaagcttagcaggttgattgaagataaactgaggtggtctagtttcaatgcattctggctaggaatggatccaagtgtgcagaaatatatgacaagggaaaagactgacactgtattgaaagttctagtgaaacatttttttatagagaaggaagttacatcaaccttagtaatggactcactatatagcggactaaaggctcttgaataccagaccaagaataaaaagggggtgcccaagctagcagagactgtccagatggatattcgaagcactcctatggtgcttgttgatcaggacatgtttgtcttggccgatgatgtgatacttttgcttgaaagagctgcattagacactcttccgcatcaacctttgcctacaaaggatgataaaagctcacagaaccgcacgaaggatggcagctcaggtgatgatttcaacaaagattcaattgaacgtgatgataaacgacttgtagagcttggctggaagacactggaattttttgccttggcccatatattcagttcttccttcggttgtcttgtattctcaccttataagtcttgtatcagccgaatagaagtggcataccaggaggcagtggctttgaagcgccaagaggagctcattcgtgaagaggaagctgctgggcttgcagaaattgaacttaaggcaaaacgtagtgctgctgagaaggaaaaacgcatcagaaaaaagcaggctaaacagaagaaaaacagtcggaaaaataataaagggaaaaatgagaaggttgatataaaggaaatagtaatagagagcagcagcccaccggatgataggatcctggatgatctctcaagtcaagcagaagaaataacatcaaatgcggacaaccctgaagaagtgtctgatatctctgataacagagatgatagttctgagttgcttcataacgaccttgaagacagtgaatccagtcctgttaattgggaaacagatgcttcagaaactcaagctactgtgcctgaaggtggtgaaatgcaaaatgaacatgcaggaaagaggacttctttcctggatgatagctcatctacttgttcatctgattcagttccttcagttatcctgaatactggaggtgcctggacaaatgtcaaatcctcatcaaatagaggaaacaacaggaggaataacaaggatcatgatgcacgaagtgggcttggacatggtgggttgaattcagtgccaaatggtattgccggatctagcagtagtacttctgttaactcaaaagaccaccaacatgaggatgacagagttgtatcacagaagaagcaaaatgcacatcggcagactgatgtcatgagtccgtccaagttaagaatgacagagtcttctgtcagccctattaagaagcaacacatcttttcgcagcagccaaaatcttcattagaaagcgccaataacttgagttcccgtgcaagtgaagcttcaggtgctgtgactgctagttcagtaatgggtgtcactaccactccaactgctcagttagtttcaaataaaggacctctgacaattcaagcaacccataatgagaggtcagttccagttgcacgacatccgcaggtgcctacggtctccaaatctgaagctcagaagcagacttccctggtaagcagtggtacagcaacccaggcaattacagtatcgaggcccttgagtgctccacaagtccctgcagcaaaacaaacagcacctgtggcttcagcagttcaaactgtaccacttctttcccattcgatgagtgcagttggacgtctaggcaatgaaccctctgctagtgctccaagctacattcctcgttcataccggaatgccatgatggagagaagttctgttggtgctagcagtttcactcatcagacaagctcagagcaaagagttgcacagtcgcaatcgatgttttcattgtcaccctccattctatcaccagagcacctgattgggaatgacagatcatcgttgcgacaagggttgacgtttggaactgtcaagcctgagacactcaaccagtggagagaagagagctctcagcaggcaagcagcagcagcagtagcagcagcaatgatcatggggcagtaagctcaagcaatggaggtgagtttgagaagttttatttgtttggaaagccacggagcaagcaactgtcagaaatttctgccagatctactccatttcaaccacaaggcctggtcagtgatgagtttccgcacctagacataatcaatgacttgctaaatgacgaacagtgtgaaaggcgaacattaaaggttcttcagcggagccaacaggcatttgctcgacaatactcgatgcccaataattccagcacacctgattatggcatgtttgctcaatctgatccatacctgtttgatcaacctgagcaatactatgacgaggaaatcccaaggttctataattctttgaacggtacttctcgggggctaagggagaggagttattcgcattttgatctgccttcatactccaacggccagtttgatgatatgatgatgaaccagtggccatacggccaaacagacctctccttgccaaattttggggcagatatgaatggttacccatatcagtcaagtgattatccgaattccgcaaatgggttaagcaggtacccaccctatcgacctgccaatgggcattgagcacctctaatgattagtgattgcaattcacaataatgtgttgtaatctcatgctgttttcttctgagctgagtgtaattgtaatccttccctatagttttataaagaacggctcctcagttccttattcaaaagctta

SEQ ID NO: 21076 - DNA, 260 bp, Oryza sativa
  Clone ID: PAT_MRT4530_26382C.1
aacgccgttgcactttttctccaccatgttgcaccattccatcttatacatttcatgtacattcattacatttcatttgtgtcatgcagtgggtttattcactccatagtcactttcacagggtggcatttcatatcttcatcaccattggcatcaatttttttcaaatcacagcattgcacatgggtgtcacacaccattgttgcagcacacaacagtcccaagtgggcggtcccatctcattcaacacacaccggggt

SEQ ID NO: 21077 - DNA, 482 bp, Oryza sativa
  Clone ID: PAT_MRT4530_26383C.1
gaaaaaagaagcactacacccctagcagaaatgagaaatgataggagacggagtcgctctcatccgtatcgatcgatgcaccgcactgctctcactctgatgacctatgctaaagctgtacgctgcctcagctgcacggacgcttgctgctagagcaacaactactaagggcaactcctgagtgggggaggcagcagcaatgcatagcaccaagcccgttattgcaaggcaaagggcgctgcagctaaaacacacgcaaatgacggaacagctcacgctggtggcacagcagtctcactatcaaccaatccacatgacgggaccactatagggcatcaaattcaaccgcaggagcctactcatctctacttcgagccgaatctggggcaagctcatactcaagctctgtaggctctcgacctgccatctatatatggtatctaccctacgtactatcgtgcacttagtagcattaccaccct

SEQ ID NO: 21078 - DNA, 2475 bp, Oryza sativa
  Clone ID: PAT_MRT4530_26384C.1
atggaggaggacgtgtcattgacggttggctcgcatgattcaggtcatggaactccgaagtatgctccttcactagattggactgaaggaaacccagctgaaaaagagggggcagggataccgatggaaagactgaatgaatacaatcttttcagaatggtagtagataatgttgacagtagtgctgccattcctccggagtatgctgatcctaatattcttgctcccgcattggggcaaagatttaagactgagagagatacctttaatttttataatgtttatgctattagtaaaggatttgggatccgtctgaataaagagcgccttaatgttaataagcagagaacaatgcgacagatttgttgttcacaccaggggaagaacacaaataccaaagaaccttctattcgaattggatgcccagcaatgatcaagataaataggtcgaaaggtgcaggaagctggacagtaactaaggtcgtcgctgcacacaactatccaatgaaaaagagtataggggttacaatgaattatcattcacacaatcaaatagatgaggggactcggggtattattgaagagatggtggacaatagcatgagtctgacaaatatgtatggtttgttgtctggcatgcatggcggagcttccattgttccattcacgagaaaagctatggataggctagcgtatgcaattaggcgggatgagtgcagcgacgacatgcaaaaaacactaaatgtcctgaaggatttgcaaaaaaggagtaagaatttcttttatagtatacagctcgacgaggcttgccgtatgaagaacatattctggtctcatgctgtgtctagattgaattatgagcattttggtgatgtcattacatttgatactacgtacaagacaaatagagaagagaccaaagaatcgtttgcatggttgttcgagacattcaaagagtgcatgaatgggaaggaacctattggaattttaacagacaactgtccttcaatggcagctgccattcgaaaggtatttcccaacacaatccatcgtgtgtgcaagtggcacgttctgaagaaagcaaaagaatttatggggaacatctactcgaagcgtcgatcattcaagaaagcatttcacaaggttctcacgcagacactgacagaggaggactttgaagctgcttggcacaaactgattagtgattaccaactagaaaacagtgtatatttgcgtcacatttgggacataaggcgcaaatgggcgtttgtatattttgcccataggttctttgctgggatgactactacgcaaagaagtgagtctgcaaaccatgtgttcaaaatgtttgtgaaaccctctagttctatgaacaggtttgttaagaggtatgaccggtttttcaatgagaaactgcaaaaggacgactcagaggaattccaaactagtaacgacaaggttgaaattaaaacaagctcaccgatagagattcatgcttcccaagtatatactagagctgtttttcagttgttctctgaggagttaactgatagtttatcatacatggtgaaacctagggaggacgaaagcacagtgcaagttgtacgaatgtgcacagaagagtctagctcattccttcggaaggaatatcaggtgtactatgatgtggaaagagaggaattttcatgcgtctgcaagatgtttgagcataaggggatactgtgcagccacgttttcagggtgcttgttcagtatgggttgtcaaaaattccagataggtacatattgaaaagatggacgaagaatgcacgggattctgttccacctcatctacatggatacaaagatgatgtcgatgcttcacaatcgaggagttacagacatgtaatgctgaataaaaagtctgtggaggtggctagtgttgcaaacaaagatgtgcagacatttaagatggcaatgacagtcatgaatcaacttttggaagacatgaaaagtcggttatctttggatgacgatgacaatagtggagcagccccaaagcgagcaactagacaaatatcaaggccaacggtattatccgaagatggaaatgaagatgttggcgctgctgacgtcgacagtgtgtatgatatgtcgagtgaggaagagagtggagataatactggtgatgtacttccacccgtgagaaagagaagcagaggaaggccaaaagtgaataggtataaatctggcggtgaggctgccagcatgaaaagaagaaaagaaggagtgaaaagagtaaagcagcaaatgagggtgattccgttgaagaagaaaaccaagacaatgatcatgcggatgaaatgccttttcctcgtaggttttgccacacatgccaccaagcaggacataattcaagaacctgcggccggatgtctatgtacaagagaaaactttagtatatggttcattgtagttttgtatagccccttctga

SEQ ID NO: 21079 - DNA, 205 bp, Oryza sativa
  Clone ID: PAT_MRT4530_26385C.1
cgaatgtcaccgggtggtgtgaacctattcctttgttatggccgatttgcattgaatatcctattccttgataccttgggtaataaattgattagcttgaaccttatgtattggtttggtccagctaaatgttatatataattacttagcagtgcttagaaacattagctcactaatgggatgaatcgtatatactacattatta

SEQ ID NO: 21080 - DNA, 1377 bp, Oryza sativa
  Clone ID: PAT_MRT4530_26386C.1
atgaattctaagcatgatgatgatgaggtgcagaagattgagtcttgctttgtacagcccagcaagatgttacccaggcaagctctctggctctcccctctcgacatcatcaaggcgagtagaggccatactccgctcgtgcacttctatcaacacggtgatgatgctgccgccgacttcttcgacgtcggcgggctcaagaaggccatggccaaggccctggtcgcattctacccctttgctggtcgcctcaccacggacgccgacggccggcccagtattgactgcaacaacgagggcgttctctttgttgtggctcgttcagagcagctcactgttgatgccttcagcaacctcaagtccttgccagagttacggaggttgttcatcccctgcatcgagccgccgtccactgtgctcgccatacaggtgaccttcttgcggtgcggtggtttggcattagggtcggcagtacaccactccgccgtcgatggccatagcatgttccacttcctccaggcatggtcttacctgtgcagggaaggtgacgacgctgctgaggcggtgatggatcccccctgccacaaccgcgctctcctccaaccacgctccccgcccgtcgtccacccggatgcactcgccatgttcagccccaaaaccaacctccacgagcgcccccccggccgccccgtctccacgaagatcttcgccatctccgacgacgaggtggccgccctcaaggcgatgtgcggcggcgcgagcaccttcaccgccgtcagcgccctcgtctggcgctgcgcgtgcgccgcgaggcggctcccgccggacgcccggtcgaagctcagcttcccggtgaacatccgtcgccgcgtgcgacccaccctcccggaccgctacttcggcaacgcgatcgtcaccgcgttcgtggcgaccgcggtgaggaacatcgtcgcgtcggggtcatcatcggcgacggagaccacgacggcgtcgttggccaaggtcgccgcgcggataagcggcgtgatgcgccgcctggccgccgacaacaaggagctgctgcggtcggccgtcgactaccacgagatggcggcgacggcgacgtcgcgctggcggcgcccggacaggggcagcctgccggagacggagctgcgggtcatcagctggctgcacctgccgctatacgacatggattttggatggggtttcccgcggatgatgtcccgtgcagagtcggtacgaggcgggttcgttcacgtgatgagtggcaggccagccgacggtggtggcgttcgcgtgctagcatgtttggaggctgaaaacatggacgagtttgagcgattgctttctgccaagtttacctatgcaaggatttag

SEQ ID NO: 21081 - DNA, 520 bp, Oryza sativa
  Clone ID: PAT_MRT4530_26387C.1
ttttttttttttttttttaaattaataagacacacacaaacttttattcattaccttaaaatacatacaacaacatgggatggggacagacaagggctaacatattacagcttattgtaaaagcatatagtttcatgaccggctgtattttattggcacatcatatggttataaccagctcgtatagcagcttatttatcatctggcgtatcgtacccaataggcttatttactgtttcccttgatcgtcagaaagtggctgtagactgcatcagcgagatcttcaaaccggcaggtcggtgttctcctcgtgccgaaatggcgccaatttagggtgtgctgcttgtaagatcttcccaatgggcatttctggcattgatctttgcaaaggctccaatgggtcaacatttgaattataacccaggttagcatgcatcctcttgacgaaagtttgaatgtgctgtagttctgtccctccagacagctcgtctgataatcggaggtcaggtgaatccgaata

SEQ ID NO: 21082 - DNA, 669 bp, Oryza sativa
  Clone ID: PAT_MRT4530_26388C.1
atggccggagcagcgctgctgttcccggctaccgtcatcgccgccgcctgcgtcgtcctctccggcggggcgtcggcggcgccgccggggcgcgtgttcgtcgtcggcggcgacgggccgaggggttggagccagccgacgggcaccgacgagacgtacaaccactgggcctcccggaaccgcttccacatcggcgatttcctcgatttcaagtacgccaagaacgactcggtggtggtggtgtcgcgcgccgactacaagctctgcagcgccgacaagccggtgcagcggttcgacgacggcgccgacgtcaggttccgcctcgacaggaacggcaacttctacttcatcagcggcgcgccgggccactgcaaggccggccagaggatgacggtccgcgtcatggcggaccacgccgccaagggcgccggcggcggcgactccccggccggtgcgccgtcgcccgacggcgacggcgacgacgaggacgacagcggcgggtcgtaccgcacgccggggtacggttactcgtcggggtcgccgccgacgccgccgcacgggaataccagcgccgccgccgtcgtctcgccgtcgcgtggtggtggtggtggcggcggctaccaccgcgtcgccggggttgccgccgccgcgctgctcgtcttggcttga

SEQ ID NO: 21083 - DNA, 513 bp, Oryza sativa
  Clone ID: PAT_MRT4530_26389C.1
atggtgtgggtgtcgctgtgcggcagcgcctctacgaggacttccccgacgagcaattccctcactctcaacgggctctgtctccatgcgcgccgcgccgagatcgtgaggagggcaccgatggtaaagggcgacgacgtcatcgccgccgacgaggccgagcggcgcggaggcgttagggctggctctccccatctgccgccgctgtcagaagagaagaaagtaaaaaaaaaggagaagaaagaaaaccaatggtggagggcgacagaggccaccgccgccgatgaggctgagcggcgtgaaggcgtcgggccgctcagcctcatcggcggccggctctccccatctgccgccattgtcagaagagaagaaaataaaaaaaaaacaaatagatgtaagaaaaaaggggaagaaaaaagaaaggatgtcacgtcagcgaaaccggatatccatactgctatgggacctaaaatgcacagttttgtacagtttaggaagagaagatttatgtac

SEQ ID NO: 21084 - DNA, 288 bp, Oryza sativa
  Clone ID: PAT_MRT4530_2638C.1
atggatgctgatactgataattcaagttacccccctggtaattatgaaggttcggctgaatattacgtgccaaatgctcaggaacaacttaaggaagctatccaccagaggttgcatacccggccgatgcactcattgaggcttggtgctgagtcggctgaacattttgttgtcccaatggcgtctgctgaatcggctgcaaaggctgctgccttggcggtgcttgctgacctggttgaggtggcagaaacatggcagcaacctgatcttgggtcagccgattcgtaa

SEQ ID NO: 21085 - DNA, 267 bp, Oryza sativa
  Clone ID: PAT_MRT4530_26390C.1
atggcggaggcaggagctcaagctgattgtaatgtcacgtcaaatgaataccaggtaggctacactgcggcccgctgcctacttcgcttcatacggccgaaaagccgtgtcttcctcgaccagcctacggcgatggcgatgaggcgacgagctaggcgtgacggcgccggctgggcagtgggcgtggctctccggcggcccggagcggcagacgccggcgagggagaatcatctccaggccattcctcaacaggtgctctcccctaa

SEQ ID NO: 21086 - DNA, 366 bp, Oryza sativa
  Clone ID: PAT_MRT4530_26391C.1
atggcgatgatcatcgaaggtgagggtccctcgaagtttctcccctctaaggtgaagttctgtacggcgtcgtttgggctccgattcgagtgtcgcggtgcggggattgggtggctagggttccgatcctccctatacgagatgggtaacgtgaagatcattgctgccacatatgggtggaaagggaccatgatcgccacagggatcaccgtgatagaagcaaaagaagatagcatcgtgattctgaatattctgatgatcgcgatcggccttgggacgatgattctgaaagtgctgcggaggctagagaacaacagtattcagtcctccaaattagatgttgcaccattgttggtgaccggctga

SEQ ID NO: 21087 - DNA, 603 bp, Oryza sativa
  Clone ID: PAT_MRT4530_26392C.1
atggcgatgatcatcgaaggtgagggtccctcgaagtttctcccctctaaggtgaagttctgtacggcgtcgtttgggctccgattcgagtgtcgcggtgcggggattgggtggctagggttccgcttctacttcttcagtccttggctgtcggatcgggctaccaaccagtcaacaacaggtgagatactgagaatcattcctccacaaaagagatcctccctatacgagatgggtaacgtgaagatcattgctgccacatatgggtggaaagggaccatgatcgccacagggatcaccgtgatagaagcaaaagaagatagcatcgtgattctgaatattctgatgatcgcgatcggccttgggacgatgattctgaaagcagaaatcacttcagttcctctcctgcacatgaggactgcatgtttgtacaatgaaagtattgtggggttttatcaagatgcaacaacgggaagattgaaaaggctgctgcctagagggattgaaaggagaaacactcccaaggagaaggagaagagcgagggaaaacaccagggtgatattttctttctcttctgcaccctttggagcatttaccagtga

SEQ ID NO: 21088 - DNA, 216 bp, Oryza sativa
  Clone ID: PAT_MRT4530_26393C.1
tatgcagcactgccagtgccctttgcccttttggcgagggctgtcaagaccattggcaccttcctctccaccgactcagacgccgcaaggggtcatccaaattactaccatctattcagaatactagaaatattggcgtactacgccgcgcctgaccataatgccgctgaattgagtatacataattgctcaaactggttcaagagaattaacaat

SEQ ID NO: 21089 - DNA, 684 bp, Oryza sativa
  Clone ID: PAT_MRT4530_26394C.1
ccggccgcgcgcgttctcccctcgcccgccgcctgcgcgcctatctccgccgcgcgagaggtggcgcggtgcccagcgcgcgtcctgctgcttccaccgcgtcctcgcctgcctgcctgccgatcccacaagtagaattttgatgttggcaaaatcagggtctttgagatagcttacccttttgggctagagaatgtggaatttcgcgtccagtgcttggggatctggtttagggaagaagaacactcccaactgcaccccgtccaatggtgattgctctgatgatgaggcatcttcgtgtacaagcagggaagaaggccttgaatgccccatatgttgggagtccttcaacatagtggagaatgtgccatatgtactatggtgtggccacaccatgtgcaagaactgcatcctaggacttcaatgggctatcatcaaggttccgacggtgccaatccagctaccattctttgtctcctgtccctggtgcaatctcctgtcgctccgcattatttacaaagggaatctcgcatttccacgcaaaaactacttcctcctttggatggttgaggggatgaatggtgagcgagccagatcgcgctctgctattcatagtgagcaacaaactacatgggctctcagtagcagtagggcaagtggaatggaagttattcgaatcccatc

SEQ ID NO: 21090 - DNA, 770 bp, Oryza sativa
  unsure (1)..(770): unsure at all n locations
  Clone ID: PAT_MRT4530_26395C.1
ccccaatatactccatatgccgacatccagtacgtaccgcactaactcccacacacatagaccgactccattattccgtctcatcgctctccttgcctcttagttggcctgccccacttnctgcccagtttgcctactcttccgatcccccaagttcctacgaccacataatncncacatacccacaatacagcccctncatccccctgggccttccccacgaccccnacacccagattggcctcccccgacccccccttggccccgatagccgattaccgttccagaggcccacacgaccctacgaccctacgattggcccaaccccctttcctggccccacaccgacatccagcttctcccatatgcctaacacacaccacaccccagattccctagccccgacccccacaacgataggttttgcccccccaacaccgacctcccccgaggcctcggggttccaccgcccccacaccatacatccccatcccacacgagccccctatacgatacacagtttcccgaggccgcctatgntgccccgaccccacatcccacgacctggcgccgaccccaggttctggggtgggttttggttctttcccaatatttggggccaccccgacccaatactcccagaccattccccaagaacctccccccagaccctttttggcgtngggccccctttcccaaacatatggccccctaccccctactagatgtggtcctactcctctacctccaacatacactcccacctattt

SEQ ID NO: 21091 - DNA, 1743 bp, Oryza sativa
  Clone ID: PAT_MRT4530_26396C.1
atgtggagcgggctggggcaggcggcgacggtggcgcagctggtcggggcggacgtcggcagcctcatctccgtcatcatgcaggcggcgatgacggctcgacagaacaaggagtgcgagcaactcgcccgccgcgtcttcatgatcgccgagctgctgccgcacctgcaggacccggaggtgatgcggcggccggaggtccggcggccgctcgccgggctcgacgatgcgctccgggaggcgcacgagctcgtggcatcgtgccagggaagggccgcggcctaccggttggtgatggcatggcggcaggccgagaggttcagagaagttcagagcaagatcgactcgtacctcctcgtcttccccttcatcagccacatcgacatcacccgccgcctcgatcgaatctacagagttcttcttccaaatgacacgaccctgccatccgcatctgcaggaatcccgaatcatgagatggtactacaaattttaagcaattttatagttcttgaggaggaaggtgagagattcaccatggcagagctcgctgcggcgaccaacaactttgcaacagacagacagatcggtacaaacccagtagccagggtgtacaagggacggcttgccgacgggcgggaggtggccgtcaagcagctggtaggcaacagcaacctatctctggcagtcgaggaggagttccaggcggagctctcgctcctctcgatccgccactgccacatcgtgcgcctcctgggctggtgcgcggcgggggagaagcacctggtcgtgtacgagtacatgaagaacggcacgctcgacgaccacctgcacggtgccccgtcgtcgtcgccgtcgccggtgacgacgtcgtggaggacgcgcgtcgagatactgctgggcgtgtcgcgggccgtcgagcacctgcagtcctcctcctcggacggcgagcggcggcggccggtgatccaccgcgacatcaagccgtccaacatcctgctcgacgacgcgtgggcgccgcgcctgacggacttcggcctgtcgctcacctgggacgagagggagtgtagctcggagttgccggtcgttggcacgcacggctacgccgccccggagtacgtcgcgacggggcggatcaggccggcgagcgacgtctacggcgtcggcgtcgtgatgctggaggtgttgacggggaggaaggcactgtctcaacgagcggtggtactgaaggatgggtgtacgggtttcgcccccgagagcttggtggacttggcgctgccagtgataaggtcggggaaggcgcggaagcttctggacaaacgcctgacgccgacgccgaagcggaggcagctccgggcggcggatatggtggcgcgcacggcagcgcgctgcttgctgcacgattgggtgaaacggccggccatctcggaagtcgtggtcgacctcaaggcggcgacggcggcgctggaagactcggctcggctcggcttcttctccctcttcctcgcgctctgctcggctttgggcggcaaggcgccgcggcggcgaggtgaagctcggcgcccggcggccggggcggcggcgacctcgggcggtgcttcgctggcgacggcggcgctaggagggcaagaccggcagctcgagatggcggctcggagagaagaacgagagaaagagagaggagaaagagatggagagggatggcaatggtgtggagaaaattgggcttggggtccccttttatag

SEQ ID NO: 21092 - DNA, 744 bp, Oryza sativa
  Clone ID: PAT_MRT4530_26397C.1
atgatttatcgtcgggagggggtacttgcaatcacaataagcttcaccccaaatggccgcagcttgcgaaggatggcagtgaagatggtgttctctgactcggcccagaatagcgggcacgccgatgctccagatgtcgacctcgggaccatacttcctcttgagcacctccagtgcgatgtgcgacagaatcagctcatgcaggttcccgaagatcgacgcgaactcggctggaaaccaccaacatggaaggagcccgtagggtcggaggccgagccaagccaccccgacgtgcccgatagcagcagcaacatcatcggcactgctgcctccatcttctccggggggcagcgtccttgggcttgtcggagctgtcatctccggggagggtgccgctcttctgccaccacgcgtcgacgggtgaccgcagagccgcgagcgttgaggtcgacgccgccggtagccatcagccgtccagatcccaccgaaggcgccggattccttcgtccccaccatcgccatgggaataggcccctcgcccttaggcgagccgacacgatagcggagagtagaacgcatgcacgcaaaccttacccctatgagcatcttcaaaaactggaccgacaaatccttaagattgacgaagtcaccacatgcgccccgctgtcgagtggtacgtccctaaggcagccaataggactagaaattactatcattcgatcacctttagatccctggatgatc

SEQ ID NO: 21093 - DNA, 468 bp, Oryza sativa
  unsure (1)..(468): unsure at all n locations
  Clone ID: PAT_MRT4530_26398C.1
cganctcctttcttccccgcaatcaattgctcaccggcggagaggccgacgccgccgccgcgttcttcctcctcctgagccctaaaagggaatccagctcgaggtcgaaccaaccaaaagcttggcggcgtcgcggagacgcggccaacctgctccacatacaccgcccgtttcgccagtgtcttttctctttttactggcgcgcgcgcgggcgcgggcgcgggagaggcgagggagtggtggtggcgcgctgcagggggggctgcttggctgcggagtgcggacgacggctataaagagggcggaaagagagcgcccgatcccgctactcatcagctgccgtctcctctgtgtgtgtgctcgcgcgcgcgctccggntgctcctccttgggttcttgatttgctacacgcgtttgcttgctcaccacgtgtttgatggaatacctgtgagtttgcaggcctgatact

SEQ ID NO: 21094 - DNA, 426 bp, Oryza sativa
  Clone ID: PAT_MRT4530_26399C.1
ccggcatcgccgctccccccttcctctctctgccgcctcgccgccgctggcaaagccgcgcggccacaagaacggtggcggcggggcttcgtcgccttcgtctgcctctcccgtcggcggtgggggcccgcgcgagacagcgaaggctacccagatccgggctgccgcggccggatctggcggggaggccgccggcggagggtcggcctgaggtggcggcggcagttggtggtggtggcggcggagattgaagatggcgggctggcgacggcagttggtggcggctggtggccggggtgaccgcgctgggaatggtgagggggtgccagcggcggggatggaggtggcggcgaggctgatgacggcgggtggatctggcgggtaggctagcgacggctgccggatccaggcgtgctgcatgccgat

SEQ ID NO: 21095 - DNA, 1536 bp, Oryza sativa
  Clone ID: PAT_MRT4530_2639C.1
tcactgctgagcaatctgcaccggttgccgcttgcccttgaggaagtcccggtaccaacgagcggaacgcctcgctcgccgcggccgcgccccgtcgtcgaaatccacgcggtacaggccgtatcgcgtctggtagccggccaggagctcgtacacgtccacaaatgaccaagcgaagtagcctctcgcatcaaccccgttcctggtcgcattcaggacgccccctatgtagcccttgatgtaatccaccctgtcagggtcgtcgagactgtcattgctagatcccttccctgaaaaaacaggaaggagatcgagctttaactttccattctcctggacataaattggcaagtcaccataggactctttcaggtgctgtagcattagttgtaatccgtgtggatcacccatagaccgcgttggggcttgctgccccgacgatggatccgttttagaagctctgcagcttactgatcgatcagcaatgaagtctcgaactccttttgccaaagggagatcgctcacatagagagaaaagtagtgatttactccaatgaaatctagagtacccttgactagttcagtttggactttgctgaaggatggaagacgagaaccgatagctttcttcattacttgtgggtaatctccaaataccaatgggtgcagtatccatccgtacgtgaaatccttgtatctttgagctgcttgcagatccgcagtggagtctgttaatggataactccacaaggaaagaacgtttataccaacaatccccttttgcagagtttgatatttttctctgtacagtctaacaacagctgcatgtgttagtatcatattgtgagctgctacatatggttccacactggaattccccactgtacatttggtcactccaaaaggatcagagcaacgtcctggagcgaattctcctgtgtcataacctccaagtgcagcgacattaggttcagccaaaatagtccagtgcgaaactctatcaccaaattccctgaagcacacatccgcataagcagtaaaatcctccacaattctagggcttaaccatccagcatactcatcttccaaagcttgcgggagatccagatggtaaagcatgacatggacttgaattcctcgttttgttagctcatctataatgttattgtagtacttgagcccctgttggttgacagctccccttccacttgggataagccttgaccaggagatggaaaacctatatgcctctaggccagtttcagtcatgagcttgacatcacccttgtatttgtggtacccatctgaggcaacatcgcctgtacttttgtccttcattttccctgcatgagtgaacgtgtcccagatgctagcgcccctgccatcctctgcggcagcgccctcatactggtacgccgaggtggcggctccaaagacgaaatcagcagggaaatcattcctcgtgtagccaccgagaacgccgtgctgcacggagatgaacagcagggcgcagaagaaggcagcagcagcggccat

SEQ ID NO: 21096 - DNA, 827 bp, Oryza sativa
  unsure (1)..(827): unsure at all n locations
  Clone ID: PAT_MRT4530_263C.1
tcgaggnnccggccggaaaaaaaaaaaaaaaaggaaacggcgccgactcctctccctcgaccgccgcccctcctccgacttctctccctccaccgccgcctcctccacaccatcaccgcccctcaatccatcctcgcgcctccctcgaccgccgcccctctgctgtcgtcgcatcccgcctcctccacaccatcgccgccccccaatccaccctcgcgactccccacatcgccgcgtcggcgcccccatcgtcaccgtcgaggattcgccatcgacgccctcctctctctcgcactcaccccgtgacccgacgccgccgactcctccctcctccctcatcgcgccgaaaccctagacccgcaccgccctcgaccgccgcccctccgccgtcgtcgcatcctgcctcctccccaaggccggcgccaactattcccaagggagttgaaggagttgtagttgtaccaatttctctccgttatttcccagccgatcccatcgcccatgaccatgttgcccgcctatcctccgtcgctgcctccacgagtcgcctcacgtctatctcctccgcgcaaccatcaatcccgcgtcgatctcctccgcgtcccccttctgcgagccccggccaccaacgacggcgccctctattgcggcaacctcctcctcagccggtgcaatgggaagtgttcgggctgccacaccattaggtgcagtgagactgaatcttggagataaattattgaagaactgaactctaattaagaagatatgcagcgcaattccagtaaccaaggttcagatcaactcagttgagggagaagcagtattgc

SEQ ID NO: 21097 - DNA, 776 bp, Oryza sativa
  Clone ID: PAT_MRT4530_26400C.1
atggcatggcggctcaaggagcccgaggagatggaggtgctcgagtgcacggggcaggcggcaaggaggccggggagctgtcggaaggacaaggcgcaaaggaaatccggcactgccgtccccgaatctggccagcgccaggctggatccagccggagcgcaggcggcggtgcagtggagcgtcacgaagtggaggcggtgtggccggcggcggagggggccactgcggtgcacgaagccggcgtgcgtgaggccggtgcggtggatggggacgtggttgataagccagatctgccgatggcgacggtggacgtggacgacgaggacgttgccggcccctctcctatcgttgaacggaggatgatgttgtcggctatggtatgggagggagggtatggcttcaacgatgaccggggtgggactgctggttttgacagtgacgcgctgacatgcgagggaagagagattcctggcgaaagcctagttctttttaggactgacagtggcgatgctctcgagcgccataaccctaatgagggcactgccgtggtgtttccaccctccttggtagattcctcaggtgaaaaccacgccctggcggcaggaggggacgcggcggtggtccaaccgcccggtggcgccctcccctccgccagatctggtgggaggggaggtggcggcggcggctcgacagtgggaggtggcgacagcggcttccttggcagcggtagcagtggtggcggcgccctcctcctctccatgcggcagtggcggtg

SEQ ID NO: 21098 - DNA, 328 bp, Oryza sativa
  Clone ID: PAT_MRT4530_26401C.1
aaaaaaaaaggtcctgggaatccccaggaaaaaaaaggggggctgggacaaagcctaaatacccactggagaaaaaccaggaacgggatttggcctccacattttgggatgggaacgggtctgaaaaaaacagtttttttgggagggaacttaaaagttttttttattaaaaaacccgggggggggcaaaccctaactatttgcccctttggggtttgcttaattttagggggggcataaataaaggagggttttttcctcccaaagttcctgggcaacggcgcccatttttttccttgaaaacttggggatggggaaaccctgaaaa

SEQ ID NO: 21099 - DNA, 1516 bp, Oryza sativa
  Clone ID: PAT_MRT4530_26402C.1
ggatcccccgggctgcaggatcggcacgagggagagaactagtctctaagcttcttttttttttttttttttttttttttttttacagaaggtttcttttattactagcatgcaccttgtaatttaggaagattacaacaatatacagcttcctcaactgatcaaaacagatcagaattttagccgtctcatatttgtgcgtgagttgtacacataggaacataccagaaacctaaactaggtaaaaaaaaaaaaaacatagcaccaagccttctgaccataatttcccttgcaaaccaaaaacttggtttcatgttgccagtatgattaggcaatcccaattatcagcaaaacctcaaggcatattcaagttccttctcatcagcacagctgtaacccaactgatatgcgcgtgcaaatcgtccagaacccataaatggctctgcttcatcggtcataccagcttgttgtagatcagtatcatcatcagcatcccactcatcatcaggacacaaccacctttcaaagcagtgcccagatattgtacaaagcagcagcccactagactggtccaagacaaattcacgacaagcgtcatcgcaaacatgaacacggcctgtcttctcacaaatataagcatcaccaatctgggtgtaagagcatgtattcccagaacaagaatgccccttgaccgcatcatcagtgaggcctctgctgcttttccagctagacacctgatcggctattgttttatcaagaataaccttgtcatcgttgacttcagagggaaggggagcttgactcctttttgaagcctgcatctggatataatactccttgaattctgtaggtgtatttctcacaaactcaaccatatcctctctatcttgctggatgtagagtttcttccaagcgcactccctgagtttggtattgcatgacaggccccaccgcatacaatacaggcggcgccagagggtctcgtcggacgcaaccacgttcatgaagcggcagacgagggcgcaggagatgagatcctccgatgagaggaacttgaatagtctacaagaacaactccatttgggcctgtctcatcatgccggtgtcaatctgaggcgccacgaacataccagaaacctattctaggtttgctctcctcacactcttgacctgctcctccccgctgccgctgccgctatccccatcagattcagactcctgcgtcctcttgttgttcttcgcatcatctatcagctgattctccagctcatcccattcctcctgaccggtagggtcgtcgccgctagatccagaaaggatctccgattcgagatcagtggccaggccgttaattcagtcctcctcctcttcctagccgccgctgccgccgccgtcttcgccctcttctcgacctcgcagctcatcctcgagaacaaggtcatcgtccagacccgcggcgtcctcctgacggaaggccatgctacaaacgccaccgcctcgacctcgacgtcgtcac

SEQ ID NO: 21100 - DNA, 885 bp, Oryza sativa
  Clone ID: PAT_MRT4530_26403C.1
atggagggtggccagggcgagtccagttacatcaacaacagccaatctcagtcccgaaacctgaaaatgatgctgtacgcccttgaggagacgctggacaagatccagctccctcgtcaccggccggggaaaaagccgctactgacggccgccgacctgggatgctcatgcggccacaatacgctcctcatcgcggacgtgatcgtcgaccacatgaccaagttgtgtggcaccggctcccttaagtggtacgtgccagagggagtcgccgacaagcgatcaccggcatacaataaaggtaaggtgttcgtgcatggtgcctctgaggagacgggcgcggcataccggcgacagttccagtctgacatgatgcgctttctacactgtcgcgccgccgagctgaagactggtggtgccattttcatcgtcagccttggccgcctgtcgtccacctgtggccccacggatcaaggctacatctatgaagtgtatggcgtcatgttcgacgactcatggcgtgacctcatcgaagaggggatggtcgacggcgagaagatggacagctttaatgtccccctttatgctcctacagtggaagagttcaaggaggttgtggacgccgacggctcgttcaagatcaacgagttggagatcgtgatggcaagccctcctgtcgtggatgatcccgctgaccgcggcatggccgggcgcatggtggcaaactacgtgcgcgccctcctcgggctactcatcgacacgcacatcggcggggtgatggctgatgagctattcatccgaatgcagcgccacgcggaaatacgtgccgaggagctcatggatgaaatatgcttcccccatattctatgctcactttcactggcgtaa

SEQ ID NO: 21101 - DNA, 264 bp, Oryza sativa
  Clone ID: PAT_MRT4530_26404C.1
cccactcctccggcggatatgattttaggggatctgctatctctgctgggtggtggagccccataggcaatcaccaacggagggctcgccagcgacgcgcctcccgaaggccgagtggctccccgacggcttgggggagagctgcgccgtcgaccaagcgccccctcctaccgccgacgccggcgatgccgcaagccgctccctcgggctgaatcaataccgtttttttttggacggagaaggaggtgaccaaaccctaggggc

SEQ ID NO: 21102 - DNA, 403 bp, Oryza sativa
  Clone ID: PAT_MRT4530_26405C.1
atggttattattgtcatgattacgaataaggcatacctcctattctacgacttatggaatatatggatatggtataccttcatgtacacgggttatttccgtatgtgttgtaggaatccgctacaaattatagaaaatatccctacgagttaagtgatttccaaagtcctactaggagtcttacttggagatcaagatgatatatggtataaaagggacccccagagagggatacaaggcatcgaatatcatcgccaacacacccaccacggtttacaaagccggagtacgcggagccaagtcatcgggagatcttgtcgaatacatcgactacgatctcatcctcgttacaatgtacatcaatacccaactcatccggtttacgagtatcactcatcgacaa

SEQ ID NO: 21103 - DNA, 1941 bp, Oryza sativa
  Clone ID: PAT_MRT4530_26406C.1
atggatcttgacaagtccacctcaaccaccgcgtccttgaagaaattgcaggacgacagtgccctccctggtcgcgggaccatgcagagggagacaggaggtattgaacccgaacccatgttgggccgtatggttgtggttgaggattacatttcttgcggtgttcttcctccaccttccgagtttcttcttctcgtcttgaacatctatggcctttctttgcttcatctgaaccccaattccatcgaattccttagcattctttcttatctttgcgaggcttacattggggcagagcccttccttgagctcttccgcttttactatgagttgcgttggatggaaccaaatagggtatctggatctgttgggttccgaattcaggattgcctgaagtcgcgctacatcccctaccagtgcccatcctctcgtagcaaatggcgagcgagatggttctatcttcagatagaaaactcagaccccgtccttgttgtccctgaagagcagccagataaaatcccagagtggaccgccaaacccgccctgactccctccctccagtctttcatcaacattatcgatgatctccaaacacgagggttgtcggggtatgaagtcgtagccaacttcataggtctggacagcggcaccttgggatgccgcgtcggccaggtgatgatcagcacccccttgacggcgagcgacatccccatccctctttgcgagaagggcccggccgagcgcgaggctgcatcaacctttataaaaggggaaaaactcttcgtaggatggcacgggcgaaggcggcgcaagacaggaccagcgcggcttccagtgcgtcccctgcagcgacctcgacagatgtcgaggtcgttgctaaggaccgggtggcaacaccgagtagccccgccgtcagcctcgtgcctgctcggggctcatccactgttgccctcacctgggggggagctccaggcggagatggagtgtctcctccaggccggtgctcacggcgtaggccgcgagattgaggaggccagggcggctgagtcatcggcaaaccatcgcgccgagcagctggcacgtgacctggcggaggcccgcgaggacctcgtaaagatgagggagctagtggccggcaatgagaggcagcggcaggggctcgagcaccggatgtcgaagctcgagaacaacttgtcagagatccgtggctcgctgcgggtatcatacaccggcctacaccagcttgccggggagtgtggtgtcacaaccaccatcccggcgaaccctgacgagttctcactgatgtcctcactcgcggagctggccacggcgatggaggagatcccctccaagcatgcggccaggatcggggaggagacgtccaacgggatctacaccggggcgtgccacgtcctcacgtgcgtgaggttggcgcaccctgatctagaccttaaaaaagttttgggtcagggagccgtcgatgacgcgcgcaagggcatgatggaggaagtcgatgttgatgtcgaggatgtccagcagtgcgggcagctggacatgctggtgattgttctggctcttgcgctagagccattcatgccacgggaggagacgaagctcgaggtggccgaacttgagaggaccatggtggaagtgaagaaggaccaggacgtggaagctctccgaggtcgcgagctcgaagggatcggcaagcatgtcgacgaggccctgaaacaggagtgtcgtcgagcgagccgctacgccggaggacatgtgctggcctcaatccgagatcaccgcccgcaactgcacctcgagttcctcaatgaagggttctcgcattctcggaggactcccgtggagatcgatggccttgcgcagtcgatggcgccgcttgccgagaaggtttttcggtccatggattggcgttggccgtcctggtag

SEQ ID NO: 21104 - DNA, 331 bp, Oryza sativa
  Clone ID: PAT_MRT4530_26407C.1
ctcttggtcggctacgcgagaccacacttcgcgaggccaatatgcaacaaacccactggctcagggtcatcgctccgaaggagatgtgcgataggatacaaaacagtgtcaggccatttagtcagctccgccaaggaggcatagctgggatgaatcctgctaatattgcacattcagaggggcattctggagcccaatctcatccgcatcagatcgagaaggaaaactgatacaaggagatcgaggcatgcgagaagccccggattagtcgctagcgtcataccagaagaggctgatttctgcacctgcagctagatactgtctagctaca

SEQ ID NO: 21105 - DNA, 1123 bp, Oryza sativa
  unsure (1)..(1123): unsure at all n locations
  Clone ID: PAT_MRT4530_26408C.1
ttttttttttntttttttttttttttttgaaggccaaaagaaaccaaaatctgcacactgttttgtccctttggacacaatttacaaacgcaaccggccgcaaattttttttttttttttttcctctgaccatcaaggccccaactatctgcatatgattgaaatcaaacaaacaaaaccagcactccatgggggaaaaaatcaatcaacctatccctctctctatacaggaaacaacaaatcaaccatcatccagttaaaaacccaattccaccatcttgtacaagcaaacacaatattgatcaggtcatggctctttcagaacctcaataaccaaatccctagccctgtggaagcacttggcagagaatctctcgtacaccatctcgtacatctgcaggttcaaatacgcaaacctcatgtatctgtcaatgcattcctcatacttctggtacaatgcagggatggtcagaacagcaacaatacttgtgtaacataaagtggtgaaatcagtcaggctgccaatgatagaaatgatccacaggctaaggaagacttgataaaatagcaccgagtctttcccgagtgcgatgtcatggaagacagagaagaccgtgttcatgccagaatgcagcagggctgccacttcattcacaacctgctgcgaaatgcgcatctctggaataggtggctctggcctgttgaggaggcgggcggccttggcccagaggaagaggacggtgaggaggaggaggaggacgttggaggcgagggagaggaaggtgtagccgccggagccgaagagcagccagccggagacggtcgccgccagcaggcaggcgctcacgtcgccccgccgccacatcaccacgtccccaaccaattgcctgatcagcggtgcgccgccgcccccgccgccgccggagcagcaagaatcgtcacgacgatccatggacggcgaatcgaatcaatccgaacaagcagcgaatcagcaaccagctggctagaccgcggatcgaaggaggaaggggcaagtcaatgccttttcctacaaggggtggaatcggggatttggggaactttccccaaaatgatttccccggccggnncctcgaggaaaaac

SEQ ID NO: 21106 - DNA, 473 bp, Oryza sativa
  Clone ID: PAT_MRT4530_26409C.1
acgtcgcatgctcgcctccttcagcttgtatcctcttttttggccgccctttttttttttttttttggaaaggaataaagattgaatggaatctctttcatggttatggcgcttcacagttcacactgatttacagttctaaacaaggtatcgggaaaggtttacagccctccaatacaatgctaatggagtgctgttcttacctgatttagtgatttcacatttcgactgagaatccatcaaggttagtacacgggtctcaaagaatgaatccggaaagttgtttcagtcagactaatgcatcttatcaaagggtgacacttcgttcacccagttttcgtccacaagtttcgtacattcaaaagtaacttgaaaattccccaaaaaaagccaccagtttttttttttcagcttttgtcctaaacaatttttttattaacaaactttaaccaactaccatgtttgacaagcac

SEQ ID NO: 21107 - DNA, 1432 bp, Oryza sativa
  unsure (1)..(1432): unsure at all n locations
  Clone ID: PAT_MRT4530_2640C.1
tgaggagaagatgcgggcgttgtatgacaggcaacgtgaggagctgaaaatattagatgagaaaggtgcagaagctgataagcttgaggctactgaaagatccatcaggaagctatcaacaaagataagcatagcaattcaggttgtcaacactatctcagacaagataagtaagctgagggatgaagagttatggccgcaaacatgtgagctcatccaagggttgatgcggatgtggagcactatgttagaatgccatcagatccaattgcatgccatatcccatgctaaaaacatagattccatggggctccgggcaaagtttggtgaagctcacatggacttgatcaagcgcctagagcttcagcatttggattgggatagcctcttgtgcctcatgggtgaatgctcaaaaaagctacgttggtactttaaatgactggttgaggaaaggagtcacatatggacctgaggtaactgatgatggtgtgcctcctttttctcctggacggctaggagcgccacctatttctggcggatcccccggctgggcactcggcctgaggaggatatctgagaaggaagtagttgaggcaatgcaggcctttgcatctaatgtgcttggcctctgggaaaggcacaggtcagagcaaagacaaggtcttatggctaataaaggtatggacaaggaccttagggtgatggaaagggatgaacagtcgatgcgcaaggctctggaagcacaaaataagaagctggtgctcatttctaatcagagcggtgtatccttatcagcacaagcacaggccttacaagatggaggttcccatggtgatactggtagtttgcaactaagtctgaagaatatttttgaagcaatggagaacttcaccgccaactctgcaaacacctacaaggatctccacctgcgtgctgaagaagagaaagctcgcgttgcccaagagagttgcagagtttcctagttcctttcgtggtttccatgttacatgagggcatgagccctttttaacgcaaaggagctgactgcagtggttcagatgagcactatagtttgcatggcagcgtcacaattcaagtggcaagtgatgcaccttgcatgaaatagcttctacccagggctgcgggctgccagacaaacctgtggcgtaaatggagacttgctagattgtgtttttttgaattggagcaacactcctcatgccatacagcccaggaactcaattttgctaatagctgaatcacaagacattgccgataggggaagaaaaatctgaagtggcgagtgacaagattcactcaatgttgggaaatcccagtaaatagttggaagatgtaagctgcattaaacgnaatgcatgggtcttaagcatgtggcngtaaaatgttcccntcatgaggtccacggtttcat

SEQ ID NO: 21108 - DNA, 711 bp, Oryza sativa
  Clone ID: PAT_MRT4530_26410C.1
atggcgaggccgcaagaggcgccggcgtcggcgccggccaagaagacggagacggcggcgatgatgtcgacggtgcagacggagacggcggcggcgccgccggcgacggtgtaccgggacagctggttcgacaagctcgccattggttacctgtccaggaaccttcaagaagcttctgggctaaagaatgaaaaggatggctacgagagcctgatagatgccgccctagccatctcaagaatcttcagtctggataaacaaagcgagattgtgacccaagctcttgaaagagcacttccaagctacatcctcacaatgatcaaggtgatgatgccaccttcaagattttccagggagtactttgctgcattcaccacgatattttttccttggttggttgggccgtgtgaggttatggaatctgaagttgaaggaaggaaagagaaaaacgtggtatatatccccaaatgcagatttctggaaagtacaaattgtgttggtatgtgcacaaacctttgcaagattccatgccagaagttcatccaagattcacttggcatgaaggtctacatgtctcccaattttgaagacatgagctgtgagatgatatttggacagcaacctcctgaagatgaccctgcattgaagcagccatgcttccggacaaaatgcgtcgcaaagcagaatcatggtgtgaattgctccatctga

SEQ ID NO: 21109 - DNA, 126 bp, Oryza sativa
  Clone ID: PAT_MRT4530_26411C.1
gcaagttatggcggcccgatcgacattggagcttgccggccggtggctactacaaccggcgggagactaaatctagctattgcaaccggcctcttcgatcgagctcctgaccctccgccagcctag

SEQ ID NO: 21110 - DNA, 288 bp, Oryza sativa
  Clone ID: PAT_MRT4530_26412C.1
atgtgctgcaaggcgattaagttggcaacaagaggagatgaaactgaaactggaagctgtggcaaccatcccaggctgcgcgaccaatggtccattggtccccttcctcctccaaagctcaagctggagggactgtctggtcccaacggcaacttgaacaatgtcctgcgctacagtgctggaggagtagctcatggtgaaacggcgagtccgggggtcaaacctactctacacatgtgcaaccctgaaacccggcgtggtctacgtgtgctacagcgcctgcctttt

SEQ ID NO: 21111 - DNA, 409 bp, Oryza sativa
  Clone ID: PAT_MRT4530_26413C.1
agccggtccggaacccccagtgttcgacccacagcgaccgctctctgctaatacaaaaaaaaaaggaaaaaaaaccaccgcttttcgcagagcgcttgttctatctccctctctgctctggtcttcctgagctccgaggcaaggaagcttatggaaggatctgcaggatgacaacgagcaaccatggtggcgagtgcatggagccatcagaataagcatctagcttggagaccgatcgatcgaccgaccatatgtcgattcgaatcgatccgatggagagcagaagcagcagcaccagcagaagcgtggtgatgatgtgctgcgcgctgatgtagatgattgcggcggcggcacatgcgggcgaacaggaagcacaggaacgcactcgcccgatgagcatttaagaagc

SEQ ID NO: 21112 - DNA, 1279 bp, Oryza sativa
  Clone ID: PAT_MRT4530_26414C.1
tttggttttagagaagctccacatgcaaaagtatatattccagtgtataatatccaggtaaagccaaagcctacacaaaccaaccacagaaccacattctcaccaggtcacctaaacttctaaacaagtctttgtgggagatatccaggtagtatatatattgtgaatcctcacccagagtttaccatgtagaagattgagatgtactgcacacaggaatggtcatcagtaccatataacggacgattgctgattactattactggttgcaatgtaacacttcggatacaatagtacattacagagctagctaaatgcgaagccacaataccgtcagcgcaagacgatcataaataaagcttacacaacatagccaacatgcaaaccattcggactgaccagagatgagggttcttgaagctgccgtggtgtgccatgcatcacaaatgccgaacaactagattgtagcagccaacatgaaaggaaaaggcatggataatgcagcaaagatggatgatgaagaccgcagattgtgacgcttcgttcaccaaccatatgaaacccctaaattttgtcaagtttctccgccttcaccaccggattagccttggcaatagcatccctagcagcggtccgatagccgaccgggcagtcatgcttatcggaatagcggtgcattgcgcagtacaagttgccacatcggcagttgaatccggtaagaccaaccctcttccgacaagtggagcaccgatttggtccttccctccccttggggttcaccgtgaccccctcactaggaccagcaatctcagcaggctgcacaacaagcgtcttcacctcgacttgagcaacagctacttcagcgtgaccagcaataattggttccttcccggaatcaccaccattgacaatgctgtcgatagaggaggctgccagcttggcctgctcctgcttcatgatcatctccttgtggcactttgagcacatgttcatggtagccgcactgccaaagaagccgcagttattgatgcaaaggattgggccctcgggctgctggcagccagcctccttgtgttccatcgcaactgtgatcctggtcgcggcggcggcggaggccgaggcggcggtggcggaggaggcgtgcggggattggaatcgcgagctcggtgcgcgtggtggcgtctcctctctctctctctctctctctctcactctctctcggacgcgtgggcggacgcgtgggcggacgcgtgggcggacgcgtgggcggacgcgtggg

SEQ ID NO: 21113 - DNA, 2671 bp, Oryza sativa
  Clone ID: PAT_MRT4530_26415C.1
tgtagagagagagagagagagcgaggatacgtctcctgacggaccgagctcgcgattccaatccccgcacggctctgtcctgaccgacgcctcggtctccgccggcggcgcgaccaggatcacagttgcgatggaacacagggaggctggctgccagcagtccgagggcccaatcctttgcatcaataactgcggcttctttggcagcgcgccggccatgaaccccccatttcgaagcccaccgaattccattcctcgcgattcctctcccctcgcctcctcgtcctccccctcctaggggatcgccggagaggaatcgcgcggaggaaaaaaaaagaaaagggcttcctcgtcgtctaagttaaaaggaagccatggagcacaaggagactggatgccagcagccagaaggcccgatcctttgcatcaataactgcggcttctttggcagtgcggctaccatgaacatgtgctcaaagtgccacaaggagatgataatgaagcaggagcaggccaagctggcagcctcctctatcgacagcattgtcaatggcacgagggcggccgggaaaaaaaggagctacctgcttggcgctgtcaagtcgaggagatctgggttggggtggggggtggacgcggtgccattggctagcttgcccctgaccgagcgtgcggggcgcacccaagggcgggaggtggctcgggaccctgtggcgtgcaagaccggagcggtggggatcgcaaaggtggagggggggggtggcgcgacgggccgtggcgtggcgtgacgtgtcctgtatcgtggctacgagccgttcgctctctaccatgaggtcgtctgccggcatggagtcgtctaatgtagcgccgagccccgacgaacggggcaagatggaaggcgccgtctgaatcagggctgcggggagcgaagacaggtgcggagtgtacactttattattagatgttctaccctaccctatgcttctctcatcaagttgtttatttgttccgctctgtttctttttttactatcttgtagtgcagtacacttcaccatctcatggaagtcaagtggttttcgtgatggagtgaagtgaggttgggtacgggtcggcagagtctgctattcgttaggtttcttccttatagtgctgtcttgtggtggtgggcctggtagtgtgctgtaatttaccccgtgcgccgcttcagtccggtgccgtcacgcctaccgacgccgcctcctgccgcaaaaaaaagagagagcgaaagcacaccgagtgagaggccccccggccggccccatttcgaagcccaccgaattccattcctcgcgattcctctcccctcgcctcctcgtcctccccctcctaggggatcgccggagaggaatcgcgcggaggaaaaaaaaagaaaagggcttcctcgtcgtctaagttaaaaggaagccatggagcacaaggagactggatgccagcagccagaaggcccgatcctttgcatcaataactgcggcttctttggcagtgcggctaccatgaacatgtgctcaaagtgccacaaggagatgataatgaagcaggagcaggccaagctggcagcctcctctatcgacagcattgtcaatggtggtgattccgggaaggaaccaattattgctggtcacgctgaagtagctgttgctcaagtcgaggtgaagacgcttgttgcgcagcctgctgagattgctggtcctagtgagggggtcacggtgaaccccaaggggagggaaggaccaaatcggtgctccacttgtcggaagagggttggtcttaccggattcaactgccgatgtggcaacttgtactgcgcaatgcaccgctattccgataagcatgactgccagtttgactatcggaccgctgctagggatgctattgccaaggctaatccggtggtgaaggcggagaaacttgacaaaatttaggggtttcatatggttggtgaacgaagcgtcacaatctgcggtcttcatcatccatctttgctgcattatccatgccttttcctttcatgttggctgctacaatctagttgttcggcatttgtgatgcatggcacaccacggcagcttcaagaaccctcatctctggtcagtccgaatggtttgcatgttggctatgttgtgtaagctttatttatgatcgtcttgcgctgacggtattgtggcttcgcatttagctagctctgtaatgtactattgtatccgaagtgttacattgcaaccagtaatagtaatcagcaatcgtccgttatatggtactgaaaaaaaaaaaaaaaaaaaaaaaaaatcaatcttctacatggtaaactctgggtgaggattcacaatatatatactacctggatatctcccacaaagacttgtttagaagtttaggtgacctggtgagaatgtggttctgtggttggtttgtgtaggctttggcttttcctggatattatacactggaatatatattattgaatatggagcttcacaaaaataaatacacaagatctatctgtgcagctatatctgatgcaaaaataaaagaaaagcctgctgagattgtgggaacggagagtccaaacacgaaccttgaagtagctgttgttcaagtcgaggtgaagacgcttgttgcgcagcctgctg

SEQ ID NO: 21114 - DNA, 1755 bp, Oryza sativa
  Clone ID: PAT_MRT4530_26416C.1
ccggccgggccctacagtactccgcggctgcctgccaacccggtaatcgcagaggcaggtcatcgtcggatttgatcttgacggctgacccgtcccgccggcggtagctgcagccagtgcctcgccccccttccatataacaccaacctcctccgcgatcgcaatcgccaccaaccccatcgagaagcagacgccaccaccgcgattcgaatcgccgccgtctcaaactcaaaactcacagatcgatcagatcatgggggacgtggtcaaggacctggtggcgggcaccgtcgggggagcggccaacctcatcgtcggccaccccttcgacaccatcaaggtcaagctccagagccagcccacccctgcccccggccaattccccaagtacgccggcgccgtcgacgccgtcaagcagaccatcgccaccgagggccccaggggcctctacaaggggatgggtgcgccgctcgccaccgtcgccgccttcaacgccctcctcttcaccgtcaggggccagatggaggccctgctgcgctccgagcccggccagcctctcacggtcaaccagcaggtcgtcgccggtgcgggtgctggtgttgccgtctccttcctcgcttgcccaactgagctcatcaagtgcaggttgcaggcccagagtgctttagccgaggcagctgctgcttctggcgtagccctacccaaaggaccaattgatgtggcaaagcacgtcgtcagggaagccggcatgaagggtttgttcaagggccttgtccctacaatgggccgcgaggttcctggcaatgccgtgatgtttggtgtgtatgaaggcaccaagcagtacctcgccggtggtcaggacacatcaaacctcggcaggggctctctcatcctatccggaggccttgctggggcggtgttctggctctcggtttaccctaccgacgtcgtgaagagcgtgattcaggtggatgactacaagaagccaaggtactcagggtcagtcgacgctttcaagaagattctcgcggccgatggagtgaagggcttgtacaaggggtttggacctgccatggctcgtagtgtcccggccaatgctgcgacattcctggcgtatgagattacaagatcggctctaggctgattgattgctggttccaatggccatttctatctcttatcatggttgaaacaacaaccaggctgtgcagttgagggggggaaaaagcagcagtagcagttccaatcctgttttgcaagtttatttcatctgcaacattgtgattcaaaacattgaagtatggaagatgcaacagcgagcaagatcgctggctctgcattttttgtcaaaaaaaaaaaaaaaaaaaataagcctaacatgtgtggggtgtgggtgtggagtgagtgtagctgaaagaaactcgtcgtcttgtcggaatggttggcctggagtggattggccatctgacggcgatcccatggtgaggggagtgagtgatgctgtctgtgatggcgattgggggtgcgtttggtgagtgagtgagtgagtggccctggtgttgcttgccctcttggcatccgaatcacctctcctcttcttcttggtctgaatttttttgattccctctcaactagcatctttttaattggctgctattgccacagcccttgtattttagtactgagacctggggctctagttgttttgagccagttgagctgctgcagctttgggtgaggtggaggtaggaggcg

SEQ ID NO: 21115 - DNA, 2143 bp, Oryza sativa
  Clone ID: PAT_MRT4530_26417C.1
tcacgaaaagagataccaaatacgcactttaagatactaatccacagcccgaaaacgattcacgatcgcgcacgaactgaacccacgtacaagaaccccaacacaacaaatcagagagattcaatgaataaaataatacaagacaacatataaaaagatagaaaacaaattgataaaataagaaacatcagagaggtgcaggggtgaggaacgcgtgcgcagatatggagggaaggagggtgtggcgcagaaaatacaagggtgtatggcatatggtgcgacgattgtatttataaaatgaaaagtgagggggggtaacgacgaaaaaaaagacgatagggagtagggcgccccaccgaaagttttatatgcatacttgggtattgggggctcccgacaagaaaagggatcctcaacgcaccgaccatagtattaaatccacataattttttttttttcaccgcaataaacaacattcttatccttgcttgatgcatataagttacataaatatttatataacttaagtttataaatatttcacctcatttccatcttggttgggcccgcatgtcagtgactcatcggaagacgtaaataaaaaaaaaattaaataaccatctcctcgatcggtctgtccatggatggcaaatgtacaaaacttctacacgtacgacgtcgccggcgatcgccgccgccgctgctagtggcggccggagtccagcgacgccgccggcgacggcatgctggagacggtggtcctggcggtggtggcggtggcggacgacgtggtggtcgccgacgagaggcgcgccggcgtcacggcggcggcggcggcggccacctgcttgatgaccacgttggggagccccggcgaggcccgccgccgctcgtgctccttcacaagctccgccgcgaacgcgtccagcttctcccggtttgacttctccgacagccgccgcccccggaacagctccgcctccacgttccgctgcgtcagcatcccgtcggcgatcgccgccgccttcttcgcgtccaccgagctcagcgccttcgtcttgcacgccggcgacgccgcctggatgcggacgtagttgcgcccacacgtgtgtccgaaagccatggccaccgcttggtcgaccatgtcggcgacgccctcggcggtgaggcggaccatctcggcgggcgacggcgagcgggaggggagaggcgttcgccacccggcggcggtggaaggggtggcggcggaggaggagccggagccgatggagacgacgaggaggtcgtcgacgccggcggcgagggggaactcctgcttgttgtggaggacgtgggtgatggcggcggcggtggggttgcccatggccgcgacgccgcccgacgccgcggcgatggcggtgcggccgtcgacggagcggacggccgtggcggcggccccgccggcgcacgtcgcggcgcagacgtcgcggaggcggaagtcgaagctgccgctctcgacggcgtcggcgcgggagaagaggaacggcgccgcggtggcgaggtcgtagcacgggacgagcagcggcgcgacggtgtcgcgcagcgtggcgtccccgaacacccgccgcagcgacgacctctccgccgacgacccgcgccggaacagcgccgccaccccccaccacctcctccccccgccgccgccgccgccgccgcgccacccgcccttcccgaggctcgccgccacgaacgccagcgcgtccgccgccgtgtaccgcggccgcccatccgcccccttcaagaacagcatcgccgccaacacaccccccgccccggcccccgccgccgcgtcgaagaaatccgccaccctcgcatcgccatcgccggacttctcccgcaacgccgtctccagcctcaccagcgccgccgccgccagcagagcatcacctggtcccggaccacacccatcgatcgcgagcaccctcaccttccctccaagaagcgccctcccgggcgtcccaggcagcgagcaaacacctccgccgccgccggcgccggcgccgaagaggaagttgctctcgaggagggagaatatctcgtagctgagcttgccgaggtcgacgtcgaccggcggcggcggctgcggcgtcggcggcgacgccat

SEQ ID NO: 21116 - DNA, 252 bp, Oryza sativa
  Clone ID: PAT_MRT4530_26418C.1
ctctggtaacatcttcgacagaccctttccctcagatagaaggattggacggaaccacttcctagatctggatgcggtgagcttcgggatatcattctagtgtgatgtaaattttgctattcttctttgtaggaccctcttcctttacaaagggggagaaatgttgttaatgggggcacaacatgtaattctacctttctcttattgaaattctctaaaatcgatattccccaaagatataaatgtgaaaac

SEQ ID NO: 21117 - DNA, 178 bp, Oryza sativa
  Clone ID: PAT_MRT4530_26419C.1
tggatgtcaagcgccagggatgctttaacataacaaccgggttcagccactcacaggctgtggctgtatgcccagggtgccaaacggtgctctgccagaccacacgagggaagggcaggctcatcgtgggctgctatttacggcggaagggcgactagtgtgtgagtttgatatttca

SEQ ID NO: 21118 - DNA, 216 bp, Oryza sativa
  Clone ID: PAT_MRT4530_2641C.1
atgggtgtggatctgatgaggaggagtgtgtttttagtgggttttgtggggaggggtttatttcttgggagagaagaaggggtgggcactgggcaggcccgcatcgcgtcaattctaacgcgcaccacgacgcttgcctgctttactcccaaccaaagtgttctcttcaatgcgccgccttcatcttcatgtgcctcccctgatcccctcccctag

SEQ ID NO: 21119 - DNA, 199 bp, Oryza sativa
  unsure (1)..(199): unsure at all n locations
  Clone ID: PAT_MRT4530_26420C.1
cgtccgcaacgctacacatgagtatcatggcatgagcgtatagagaagctcatgctctatggcatagtgctcgccgtgctcgacgtcgtaggaggcaccaggtgtgtgaatacaagcgaacttgtattagtacgtgatttgaatggtaatcctttcaccctgacttgnaatantcttattttttttagggggggggggg

SEQ ID NO: 21120 - DNA, 1228 bp, Oryza sativa
  unsure (1)..(1228): unsure at all n locations
  Clone ID: PAT_MRT4530_26421C.1
atcgtgctaagcanagcatcactattgtcggaaatnaggctccagctccattcatgacatttcagtccacaggtttccctccagagattctaagggaggtacagcaagcgggattctctgcaccaactcctatcccacctcgatcatggccaattgctcttaggaatcgtgatattgtagctgtggcgaagacaggttccggaaaaacactgggttatctcattccagggtttatccttcttaagcgccttcaacataattcaagggatggtccaacggtattagtgctttctccaacaagggaattggcaacacaaatccaagatgaagcaaaaaagtttgggagatcatcaagaatatcgtctgtttgtctatatggaggtgctcctaaaggtcctcagctaagagatctagagcgcggtgcagacattgtggttgcaactcctggaagattgaatgacattttagaaatgcgaagagtgagcctacatcaagtatcttatcttgttcttgatgaggctgaccgcatgcttgatatgggttttgagccacaaataagaaaaattgtgaaacaagtacaacccaaacgacagactcttatgttcactgccacttggccaaaagaggtgaggaaaatagcctcagatttgctgtccaatccagtccaagttaacattgggaacactgatcaactggttgccaataagtcaatcactcagtatgtggatgttatcacacctccggagaaatcgaggcggcttgatcaaatcctaaggtcacaggaacctggatcgaaaatcataatattttgctccacaaagaggatgtgtgatcagctggctcgaaacctagcacggcagtatggtgcttctgctattcatggtgataaatcacaagccgagagggattctgtgttgagtgaatttcgaagtggcagatgccctattcttgttgctactgatgtggctgcccgaggcttggacataaaggatatcagagttgtggtcaactacgatttcccaacaggtgttgaggattacgtccatagaattgggagaacaggacgggctggagcgactggagttgcctatacattcttctgtgatcaggattcaaagtatgcttcagatctcgtgaagattttggagggtgcaaaccagtctgtttcgcaacagttgagagatatggtctcccgtggagggtatggtggaaggtcacggcgctgggc

SEQ ID NO: 21121 - DNA, 339 bp, Oryza sativa
  Clone ID: PAT_MRT4530_26422C.1
atctcgatatcgaatcatcagatttcgcggaaggacgtggcttctgaggtttggaagaaactcaacatctatgaactggcaactcaaagcacagacattctccactttgttgagcaagtcctgacagttacgccctcacatctcaaacctggatggccaatatgctttggcgcctgcgcacacaacttatggaaagcacgcaaccatagaacattccagcagcgagatcttaccacggcaaatgtgacacatcaaatcagagaatgtctacaattatagggaaatcacatcaagccgcaatgtcgacctccaatatgcagatggatagacttactagcg

SEQ ID NO: 21122 - DNA, 208 bp, Oryza sativa
  unsure (1)..(208): unsure at all n locations
  Clone ID: PAT_MRT4530_26423C.1
gcaaaggattcagnccgccgcccgttgggaagggagcttcgaggtggncggccgcggcgcgtcggccgggccggcttggccgatggcacgngcccttgggggcttnnncccctaacgtgggtcnntnnnggcggcgggcgnagncnccnnttgcnagcttggattctaacttanaggcgttcagtnataacccgatacacggtagctt

SEQ ID NO: 21123 - DNA, 240 bp, Oryza sativa
  Clone ID: PAT_MRT4530_26424C.1
atggcggcgtcttggtgtttgtgcctgataaccatggtcaccgtctcgtactggaacaatagtgtcaccacgaactcggcgattgccgcgcggtacagctccaatgtccctacctccaaatcagcctctgcgcatgcggcactgctcactctctcgcacctaaacccctctgccaaccctcctagccatgccgctggccctccagcagccggcgccagagtgcatgtgagctttgcttga

SEQ ID NO: 21124 - DNA, 704 bp, Oryza sativa
  Clone ID: PAT_MRT4530_26425C.1
atgaatgatatttttccttttaatgaggtcattagctctttgggttttttgaacttccaattaaaggtatggcttacacctgaagttacatgcaacatcaacctttgttgtatctattgaactctcccatgaattggactctttcctaccctaacacaatggtaaagccattgtcaagaatagtttttcggatcatatcccttgtgtggtgcatattgtgataaatatacctaaagcacatacctttagatttgagagttactgggtggagcatgagggcctttttgacttggtgcaaacaatttgggataatcatggcagtccccttgatcctgctaggaatattactgctaagcttaaggcattgagaaaagaccttaaaaaatagagcaaaaatctttcaaggttgcaagaattgatcaagaattgtaatgcaaccattcattttatagacagtatagaagagctcggagatcttactgtcttggggtgaaaatacatagtctttatcagaagcaaactgatgacctacttgatgtataagcaaacatattggcagaaaatatgtactattaggtgggcaaaatttggtggggagaatactaaattctttcatgctatggctactgaatcctttaggaggaattctataacctatctaactgttgtcgacatggcagtctgacgatctgactcgtagtcga

SEQ ID NO: 21125 - DNA, 624 bp, Oryza sativa
  Clone ID: PAT_MRT4530_26426C.1
atggcgtcgttcctcgactcgttctcctcgctcggcgtcgggtacgcggtcgccatcgcgctcggcttcctcgtcctcctcgcgtcgctgctcctcgccttctacttctgctcccgccgcggcggggccggggtcgtccgccgcggcggcggccagggggtccactccgcgcgccacgccgtgtcctccgcgtccagctccgggcacatctccatcaccgtcccgcgggtcatcttcgtcgcggacgactccgactccccgggctcctcgtcccgcggcggcgccgggggcggcgcggcgtcgtcgcccgtcgggctcgaccccgcggtgatcgcctcgtaccccaaggtgcccttctctagggcggcgacgggggcggacgccgaggccgcgtgctcgatctgcctctgcgagtacaaggaaggggagatgcagcgcatgatgcccgagtgcaggcacaggttccacctcatgtgcctggacgcgtggctgcggcggagcgcgtcgtgcccggtctgccggtcctcgcccatccccactccagtctccactccgctcgccaccccgctgtcggagctcgtcccgctatcacagtacgccgccgaccgccggcgccacaggtga

SEQ ID NO: 21126 - DNA, 6042 bp, Oryza sativa
  Clone ID: PAT_MRT4530_26427C.1
atggccgagcaagcaaaggcgcacgacctctctccgagtgtgagcggcgacgacggggagccgaatccacgccgtcgagctcgtactcccccacctcctccgcgccaaagccctaagcagggggaggcgcttgagaaggtcgacaagtccatggcatcaccagtcgcgggtggtgcaggaggacggcaagatggggagcgccgcctcctcgtatacggcgacggcagcacgcctcagggtgcgcttcaggctgctggcgcgctcttacgacacccgcctgtcgtccatgacccggagtctccagcccaacgatggctggaagatgtggccaacttggtcatgacggctcagcagcgcctgggtgctggtggacggtccaccaccaccaagacctccggcgccgccaccaccggttccgtgtcatcaaggcggagggcgcggcgagcggcggcggctgcacgtcattcggctgccactccctcgtcgacaccgtcgactcgggaggatcagcatgagaagccggatgcccgcctcaacagcgagcgccggcgtaacagccggcgtactccccgtgcaacggagggcgcctcctcgtccagagtgtcacctcgacatggacgtgaggatcagccctccgtgcccccggctggtggtgtcggctgtagagcctttgtggcgagtcttcggaatgtccgttggcccccaaggttccggcccaccatcaccgagaagtacgatgggagcgtcaaccccaccgagtttctccaggtctatacgaccgggatcgaggccgctgggggtgacgacagggtcatggcgaacttctttcccatggccctaaaaggacaggcgcggggttggctaatgaacctgccacccgcgtcggtccactcctgggaagatctgtgccaacagttcaccatgaacttccaaggcacatatccgcgcccaggcgaagaagcggacttgcatgcagtacagcgaggcgatgatgagtcgcttcgctcgtacattcagcggttttgccaagtccgcaatactataccatgcatccctgcacacgcggtgatctacgcgttcagggggggcgtgcggcacaaccgcatgctcgaaaagatcgcttccaaagagccccagactaccgcggagctttttcagctcgcggaccgagtggctcgtaaagaggaagcgtggacatggaactcctccggttccggagtggcagcttcggccgcccccggatctgccgctcagacagggcggcgtgacaggaggaggaagaagaggtcggaccgttccggcgacgagggtcatgtcctcgccgtcgagggcgctccgcgggccacccgaaaggggaggcctgcgagcgacaaaaagaaagaggctggtactcccagcagggagcgccccgccggcaggtggtgctccgtgcacaacacctccctccacgatctcgcggactgtcgtgcagtcaaaaacctggctgagcgaacgaggaagtgggaggaggacaggagacaggaacgccgtgagggcaagtccccggcggttccttccggcaaacggcgaagtgaggccaagcagatggcccccgctgttgacatcgatgatggtgacgatgacctaggtttccaagaacctggggccaccattgccaccgtcgatggaggagcgtgtgctcacgtctctcgccggagcttcaaggctatgaagcgagagcttctggccatggcccctactcatgaggcgatgcgtcgggcgcggtggtcagaggttgctctcactttcgaccagaccgaccacccaccgtgcattgcccggggagggcaggttgcgatggtagtttcccccaccatctgcaacgtgaagttgggacgtgtcctcatagatggaggagcggctctcaacatcctttcccccgcggcctttgatgctatcaaggccccggggatggtgctccgaccgtcccagccgatcatcggtgtgacgccggggcacacgtggccattgggtcacatcgacctaccggtcaccttcggtggacccgccaacttccgcacggagcgggtgagcttcgatgtggcggacctcagtctgccctacaacgcggtcctaggaaggcccgcgttggtgaagttcatggcggctgtccactacgcctacctccagatgaagatgccgggccccggtggccccatctctgtccatggcgaccttaaagtcgcgctcgcttgcatggagcagcgcgccgaccgcctcgctgctgcgtccaagcccgagggtggtgacgagaggcttggcccctctgcccccaccgccccgaggcagcggatggccacatgcgacgaggtcccggaagacgcgctcgtctccttcctgcgggcaaacgctgatgtcttcgcatggagaccagcggacatgcccggggtccccagggaggtgattgagcaccgtctcgctgtgcggccgggcgcaaggccggtccggcagaaagtgcggcggcaggccccggaacgtaaagccttcatccgcgaggaggtggcgagacttctggaggccggattcgtccgtgaagtcatccatccggagtggctggcgaacccggtggtcgttcccaaggcgaacggcaagcttcggatgtgcatcgactacaccgaccttaacaaggcatgtcctaaggatccttaccccctgcctcgcatagatcagattgtcgactccactgcgggattcgcatggctagggaggatgaggaaaaaaactgcgttcattacccccgtaggaacctattgttatacatcaatgcccttcgggttaaagaatgcaggtcccacttttcagcgtactactcgaatttctttgggtagccaaataggacgtaatgttgaggcgtatgtcgatgacttggttgtaaaaacgcgcaaccaagaaactttactttcagatctagcggaaacttttgaaaacctccgctccgcccgcataaaactgaaccccgataagtgcgtgtttggtgtacccgcgggcaagcttctcgggtttttggtctctgcccgaggcattgaggccaaccccgagaagatacgagctatagaacggatgcgcccccccagcaaacttagggatgtgcagtgcgtcactggttgcatggctgccctaagtcgttttatatcgaggctgggagagaaggcgctacccttatttaagctcctcaagcgctcggggccgtttacttggacggaggaagctgaacatgcccttactcagttaaaggtgtatctcagctctcccccggttctagtcgccccagagccaaatgagcccctgctactttacttagcggcgaccccccaagtagttagtgcagcgttggttgtggagcgcgatgaggacaatcctcattctgcgcacccccactctgtgccgacttggcccgggagcaggcagggaggagaggcccccgagtcgaacggtggcctaaggcccccgacgaccggagtcggccctctgcccgctcgtcagacggtgccgggtgcccccgaccctcaggaaggccccgaggccactgcgggaaggccgcatctaccaccctttgaccccgaggctaaccctgtgcagattcgacccgggagagagcagggagaagaggcccccgagccgaacggaggcctgaggcccctgacgaccggagctggccctttgcccgcttgtctgacaacgccaggagcccccgacccccgggacggccccgaggccactgtgggaaggccgcacctgtcatcttcggaccccgaggtcatcagcgcaggagacgagtgtgccccaagaggccacttggacgaagagcaccccggggatacggcccctagcgaagaggatcggccccgccgaaaggtgcagaggcctgtctactttgttagtgaggccctccgggacgccaagacccgatacccacaggcccagaagatgctttacgctattctgatggcctcgaggaaactgcgccattatttccaggcgcatcgggtcaccgtggttacgtcttaccccctcggtcaaatcttgcataatcgagagggtacaggacgagtggtaaaatgggcaatcgagctttctgagttcgatctgcactttgaaccacgccacgctatcaagagccaggccctcgccgattttgtggcagagtggaccccggctccagagactgtctcaatgcccgaggccagcacgaacccctcacagctgcctcaaaccgcccactgggtgatgcagttcgacggttctctgtctctccagggcgccggtgcaggggtcacgttgacctctccgaacggagacatcctcagatacttggtccgtctcgactttcgagcgactaataatatggcagagtacgagggactccttgccggactcagagtggcagctggactggggatccgccgcctcttggtattaggcgactcccagctagtcgttaaccaggtctgtaaggagtaccggtgctctgacccacagatggacgcctacatacgccaagtgcggcgtatggagcgccatttcgatggaatagagcttcggcatgtgcccagacgggataacatgatagccgacgaactctcacggctcgcgtcctcgcgagcccagaccccaccgggcgcctttgaagaaaggcttacccagccatcggcgcgacccgatcccttaggggagacggatgcgcctaaccggcccccgaggcccgtcggagtccaggcctcgggacccgaagggagcgctccaagctcccttagattgattgcttggatctctgagatccaaacatacctcacagataagactctacctgaggaccgcgaagggagtgaacgcgtacaacgcatttccaaacgctatgtgctggtagaagggaccctctatcggcgcgcggctaacggaatcctcctgaagtgcattcctcaggaacaaggcgttgagcttcttgttgacatccatgagggcgagtgcggagcccattccgcctcgcgtaccttggttggcaaggcctttcgtcaaggattttattggccgacagctcttaatgacgcagtcgatctggtccggcgatgcagagcgtgtcagttccacgccaagcaaatccatcagccggcccaggccctgcagatcataccattgtcatggccatttgctgtctgggggcttgatatcctgggaccgttcaaacgggccccgggcgggtttgagtatctgtatgttgcgatcgacaagttcactaagtggcccgaggcttatccggttgtcaagatcgataagcactctgctcttaaattcattaagggcatcacggcccgttttggagtgcctaatcgtattattacggataatggcacccaattcactagtgaactcttcggcgactactgtgaagacatgggcatcaagctctgcttcgcctcacctgcccaccccagaagcaatggccaagtggagcgcgccaatgcagaaatccttaaaggcctcaaaaccaagaccttcaacattctcaagaagcacggcgattcatggatcgaggagttgccagcggtgctctgggcgaaccgaaccacaccaagccgagcgaccggggaaacgcctttcttcctcgtctacggcgcagaagcggttctcccatctgagctcaccctgaggtctcctcgggccaccatgtactgcgaggctgatcaagatcagcttcgtagagatgacctcgactacttggaagagcgaaggcggcgcgcggccctccgagctgcgcgctaccagcagagcctgcggcgctaccatcagcgccacgtccgggcccgatcactctgcgtcgacgacctcgtcctacgccgcgtccaaacgcgtgctggattgagcaagctctcaccaatgtgggagggaccgtatcgagtgatcggtgtcccccggccgggctcgcttttcaataaaagcagtttcaatttcctaaaggttgtgtctgtgccgtttttccttctaaagaatcttaacttgaaataa

SEQ ID NO: 21127 - DNA, 372 bp, Oryza sativa
  Clone ID: PAT_MRT4530_26428C.1
atggatttgcttggcgtggaactgacacgctctgcatcgccggaccagatcgactgcgtcattgagagccgtcggccaataaaatccttgacgaaaggccttgccaaccagggtacgcgaggcggaatgggctccgcactcgccctcatggatgtcagcaagaagctcaacgccttgttcctgaggaatgcacttcaggaggattccgttagccgcgcgccgatagagggtcccttctaccagcacatagcgtttggaaatgcgttagatccaagcaatcaatctaagggagcttggaacgctctcttcgggtcccgaggcctggactccgacgggcctcgggggccggtcaggcgcatccgtctcccctaa

SEQ ID NO: 21128 - DNA, 6084 bp, Oryza sativa
  Clone ID: PAT_MRT4530_26429C.1
atggctgagcaagcaaaggcgcacgacctctctccgagtgtgagcggcgacgacggggagccaaacccacgccgtcgagctcgtactcccccacctcctccgcgccaaagcccaaagcagggggaggcgcttgagagggtcgacaaatccgtggcatcaccagtcgcaggtgatgcaggagaacggcgagatggggagcgtcgcctcctcgtctacggcgacggcagcacgcctcagggtgcgcttcaggctgctggcgcgctcctacgacacccgcctgtcgtccatgacccggagtctccagcccaacgatggctggaagacgtggccaacttggtcatgacggcacagcagcgcctgggtgctggtggacggtccgccaccaccaagacctccggcgccgctaccaccggctccgtgtcgtcaaggcggagggcacggcgagcggcggctgctgcgcgccattcggccgccactccctcgtcgacacctccaactcgggaggatcagcgtggagagccggatgcccgcatcgacatcgagcgccggcgtaataaccggcgtactccccgcgcaacggagggcgcctcttcgtccagagtgtcacctcgacatggacgtgaggatcagccctccgtgcccccggccggtggtgttggctgtagagcctttgtggcgagtcttcggaatgtccgttggcccccaaggttccggcccaccatcaccgagaagtacgatgggagcgtcaaccccaccgagtttctccaggtctatacgaccgggatcgaggccgctgggggtgacgacagggtcatggcgaacttctttcccatggccctaaaaggacaggcgcgggtttggctaatgaacctgccacccgcgtcggtccactcctgggaagatttgtgccaacagttcaccatgaacttccaaggcacatatccgcgcccaggcgaagaagcggacttgcatgcagtacagcgaggcgatgatgagtcgcttcgctcgtacattcagcggttttgccaagtccgcaatactataccatgcatccctgcacacgcggtgatctacgcgttcagggggggcgtgcggcacaaccgcatgctcgaaaagatcgcttccaaagagccccagactaccgcggagctttttcagctcgcggaccgagtggctcgtaaggaggaagcgtggacatggaactcctccggttccggagtggcagcttcggccgcccccggatccgccgctcagacagggcggcgtgacaggaggaggaagaagaggtcagaccgttccggcgacgagggtcatgtcctcgccgtcgagggcgctccgcgggccactcgaaaggggaggcctgcgagcgacaaaaagaaagaggctggtactcccagcagggagcgccccgccggcaggtggtgctccgtccacaacacctccctccacgatctcgcggactgtcgtgcagtcaaaaacctagctgagcgaacgaggaagtgggaggaggacaggaggcaggaacgccgtgagggcaagtccccggcggttccttccggcaaacggcgaagtgaggccaagcagaaggcccccgctgttgacatcgatgacggcgatgatgacctaggtttccaagaacctggggccaccattgccaccgtcgatggaggagcgtgtgctcacgtctctcgccggagcttcaaggctatgaagcgagagcttctggccatggcccctactcatgaggcgatgcgtcgggcgcggtggtcggaggttgctctcactttcgaccagaccgaccacccaccgtgcattgcccggggagggcaggttgcgatggtggtttcccccaccatctgcaatgtgaagttggggcgtgtcctcatagatggaggagcggctctcaacatcctttcccccgcggcctttgatgctatcaaggccccggggatggttctccagccgtctcaaccgatcattggtgtgacgccggggcacacatggccgttaggccacatcgacctaccggtcacctttggtggatcagcaaactttcgcacggagcgggtgaacttcgatgtggcggacctcagtctgccctacaacgcggtcctggggaggcccgcgttggtgaagtttatggcggcggtccactacgcctacctccagatgaagatgccgggcccttgtggccccatctctgtccgtggcgaccttaaagtcgcgctcgcttgcatggagcagcgcgcggaccacctcgctgctgcgaccaagcccgagggtggtgacgagaggcttggcacctccgcccccaccgccccgaggcagcggattgccacatgcgacgaggtcccggaagacgcgctcgtctccttcctgcgggcaaacgctgacgtcttcgcatggagaccagcggacatgcccggggtccccagggagttgattgagcaccgtctcgccgtgcggccgggcgcaaggccggtccggcagaaagtgcggcggcaggccccggaacgtcaagccttcatccgcgaggaggtggcgagacttctggaggccggattcatccgtgaagtcatccatccggagtggctggcgaacccggtggtcgttcccaaggcgaacggcaagcttcggatgtgcatcgactacaccgaccttaacaaggcatgtcctaaggatccttaccccctgcctcgcatagatcagatcgtcgattccactgcggggtgcgaccttttgtgttttctagatgcatactctggttaccatcagattcgcatggctagggaggatgaggagaaaactgcgttcattacccccgtaggaaccttttgttatacctcaatgcccttcgggttaaagaatgcaggtcctacttttcaacgtactactcgaatttctttgggtagccaaataggacgtaatgttgaggcgtatgtcgatgacttggttgtaaagacgcgcaaccaagagaccttactctcagatctagcggaaacttttgaaaatctccgctccgcccgcataaaactgaaccccgataagtgcgtgtttggtgtgcctgcgggcaagcttctcgggttcttggtctctgcccgaggcattgaggccaaccccgagaagatacgagctatagagcggatgcgcccccccagcaaacttagggatgtgcagtgcgtcactggttgcatggccgccctaagtcgttttatatcgaggctgggagagaaggcgctacccttatttaagctcctcaagcgctcggggccgtttacttggacggaggaagctgaaaatgccctcgcccagttgaaggcgtatctcagctctcctccggttctagtcgccccggagccaaatgagtccctgctactttacttagcagcgaccccccaagtagttagtgcagcgttggtagtggagcgcgatgaggacaatcctcattctacgcacccccactctgtgccgacttggcccgggagcaggcagggaggagaggcccccgagtcgaacggtggcctaaggcccccgacgaccggagtcggccctctgcccgcttgtcagacggtgctgggtgcccccgaccctcaggaaggccccgaggccactgcgggaaggccgcacctaccaccctttgaccccgaggctaaccctgtgctgattcgacccgggagagagcagggagaagaggcccccgagccgaacggaggcctgaggcccctgacgaccggagctggccctttgcccgcttgtctgacgacgccaggagcccccgacccccaggacggccccgaggccactgtgggaaggccgcacctgtcatcttcggaccccgaggtcatcagcgcaggagacgagtgtgccccgagaggccacttggacgaagagcaccccggggatacggcccctagcgaagaggatcggccccgccgaaaggtgcagcggcctgtttactttgttagtgaggccctccgggacgccaaaacccgataccctcaggcccagaagatgctttacgctattctgatggcctcgaggaaactgcgccattatttccaagcgcatcgggtcactgtggttacgtcctaccccctcggccaaatcttgcataatcgagaaggtaccggacgggtggtaaaatgggcaatcgagctttctgagttcgatctgcactttgaaccacgccacgctatcaagagccaagccctcgccgattttgtggcagagtggactccggctccagagaccgtctcaatccccgaggccagcgcggacccctcacagctgcctcacgccgcccactgggtgatgcaattcgacggttctctgtctcttcagggcgccggtgcaggggtcacgttgacctctccaaacggagacgtcctcagatacttggtccgtctcgactttcgagcgactaataatatgacagagtacgagggactccttgccggactcagagtagcagctggactggggatccgccgcctcttggtgttaggcgactcccagctggtcgttaaccaggtctgtaaggagtaccggtgctccgacccacagatggacgcctacgtacgccaagtgcggcgtatggagcgccattttgatgggatagagcttcggcatgtacccagacgggacaacgtggttgccgacgaactctcaaggctcgcgtcctcgcgagcccaaaccccaccgggcgcctttgaagaaaggcttacccagccgtcggcgcgacccgaccccttaggggaaacggatacgcctgaccggcccccgaggcccgtcggagtccaggcctcgggacccgaagggagcgcttcaagctcccttagattgattgcgtggatctctgagatccaagcatacctcacagataagactctacctgaggaccgcgaagggagtgaacgcgtccaacgcatttccaaacgctatgtgctggtagaagggaccctctatcggcgcgcggctaacggaatccttctgaagtgcattcctcaggaacaaggcgttgagcttcttgttgacatccatgagggcgagtgcggagcccattccgcctcgcgcaccctggtgggcaaggcctttcgtcaaggattttattggccgacagctctcaatgatgcagtcgatctggtccggcgatgcagagcgtgtcagttccacgccaagcaaatccatcagccggcccaggccctgcagatcataccactgtcatggccatttgctatctgggggcttgatatcctgggaccgttcaaacgggccccgggcgggtttgagtatctgtatgttgcgatcgacaagttcactaagtggcccgaggcttatccggttgtcaagatcgataagcactctgctcttaaattcattaagggcatcacggcccgttttggagtacctaaccgtattattacggataatggcacccaattcactagtgaactcttcggcgactactgcgaagacatgggcatcaagctctgcttcgcctcacctgcccaccccagaagcaatggccaagtggagcgcgccaatgcagaaatcctcaaaggccttaaaaccaagaccttcaatattctcaagaagcacggcgattcatggatcgaggagttgccagcggtgctctgggcaaaccgaaccacaccaagccgagcgaccggggaaacgcctttcttcctcgtctacggcgcagaagcggttctcccatccgagctcaccctgaggtctcctcgggccaccatgtactgcgaggctgatcaagatcagcttcgcagagatgacctcgaccacttagaagagcgaaggcggcgcgcggccctccgagccgcgcgctaccagcagagcttgcggcgctaccatcagcgccacgtccgggcccgatcactctgcgtcgacgacctcgtcctacgccgcgtccaaacgcgtgctggattgagcaaactctcaccaatgtgggagggtccgtatcgagtgatcggtgtcccccggccgggctcggtacggctggccacgggcgacggcacggagctgcctaacccatggaacatcgaacaccttcgtcgcttctacccctga

SEQ ID NO: 21129 - DNA, 4038 bp, Oryza sativa
  unsure (1)..(4038): unsure at all n locations
  Clone ID: PAT_MRT4530_2642C.1
atggcggcggcgtcgtcgtcgtcggcgtccgccgccgcggtggcgcggctgcgggagctgacgccggcgccgggggcggagctctcggagaccggcgcggccgcgctcgccgagtgctgcgcgcgcctcctcatctccgccgcggggggcgacgccggggccgcgcggccggcgctcgacgcgctgtgcgcggcgagcggggaggcgatgcggcgccactccgatgagctcgcgccgctggtcgtcgggcggctcggggacggcgacccggccgtgcgggacgcggccaggagattcctcgtgcggctcatggagatgaaggagatgaatgcaaggatgggaaatggagaaaaaaccccatgcatatcagatgtccaagacaaccgatgtatgacaatacaaattgaaccaacggataccaatcaagcaaagaaaagtcccaaagtgaagattgttacaagagatgcctcacttcttgcaggtgctgccgactattcagccttccctatgctcctaaagcagcttgtgaccccactcataacccagattctggataggagatcaagtgttgtgaaacaggcatgccatttgctaaatttcttatcaaaagaactgctacgtgactttgaaccgtgcgctgaactgcttattccggtccttcttaagaatgttgtgatcactattcatgtaattgctgagtcctcggataattgtataaaagagatgctgcggaactgcaaagtagctcgtattctaccaaaaattattgaatttgcaaagaatgataaaagtgcagttctccgtgccaggtgttgtgagtacgcaatattgatgttggagttatgggttgatactccagaaatacagagatcagttgatctgtatgaagaattcataaaatgttgtatagaagatgcaactagtgagatgataaatgatgaagatgctgagacacagcaaaggcatctttctcctgtagaaagagttaaattgatgcagcctcaatctagttcttgtaattcaactgaaattgacaaagttgtcaaggtcgattctggaacatcgttttcttctgtagaccttcaatcagtacaagtgaaagcatccgttcagcatgatgatatgacctcaaaaattcagcctgaaggcaaaactgatggcactacaactactggaagttcatttaaagataccagtacgttagaaaaagaaacaagcccagacaaaggccctgatcctgataaatgtgattcaggtgtcaatttatcatcttgtgatccatcctctgccactcaatttatactagaacctacttcagaattgctaccgtctgatgcaactgttgtaacaattgttcaagacaaggctgaatgcaggccaaatactgaacagctgactcagcaagttcaagttttgggacatccttctgatctgctgaaccgttcacctcctgttagtttgaaagaatcaggaaactcgctgaaacataaccctattcaagtgaactttgatggtagctcaggtggaaaactaggagctcagaaagtgaagcatcatactagcgctcctaataagagtgttgttcgtaaggagccgcggaacaattacattcccaacttccggcgtcctctcttgagtaagcagatgacaaactggttttatgccagtaacagaagtgatttagatgacaagcaactcattttgggtgaaatggtcagcaacatggatgtgccctcctctctcaccgaggcactttctttgggtcttaaaccaaagtcagattggatgatgagggtatacgcattcaatttcttaagacaatctttgctagagcagggaccaagaggcattcaggaggttgcacaaaattttgacaaggttatgaggtttgttagtcgttacctggctgatcctcatcataaaatagcacaggctgctctctcatcactttcagagatcatgccagtttttaagaagccttttgaacattatctggacaagactctgcctcatgttttctctcagctgaatgatccaaaggaatccatcaagcagcagtgctcagcaattttgaaacttgcaggtgaaatctattccattgattcgctcttaccggccctacttcgtacactagaagaacagaaatctcccaagtcaaaattggcaattattgagtttgcaaactcttcttttgtaaaatgcacagtcagttctgacaactattctagcagcagcttccttaagccatggcttgaaaagctagctcttttgttcaaggacaaaaacagtaagctaaaagaggttagcgttgctggtttctcatcaatctattctcactacgatcctgcatctttgttaagctttctagttagcttgtcaatggaagaacaaaagagattaagacgggcaataaagcagttgatccctacaatagagagcgacttggaagagtttttgcaacaaaggaaacataagccaaaggtgccactatttgattcttttgttggtgcatatcaaccttatgctaaaggtttagtcataaagcaaaataagcaccatctgcatgccacatatcagtctgattgccttcaggctgatgatgtgttcgattctgcactccactgtctcccaagaatttctttggaagttcgtgagcgacgcgctgggaaaattgaatctgaatcttacgatgaatctaatggtcatgatgctgaaatgatggacaagaaatctagtgatacaaggtcgagtgacccccctagaacatttgattataatgtgatatcagataacacagttgagagtccaagaaaagagggtactgacatcaagagatttgaggaatcaaacgagagtgaactgaacataactgtcagaaataggaatgtcatattgaatagctgtcaagatcatggaccaagcatttccaggacatatcatcaggatgaaatgagtcaaatggaagaagttccagagataaatggcccttccgtgtcaatcaagggaatatgcaaaatgcttccgtactattgcattgagatagaaagccttttgcaaaatgatctaactatacataggatgtcctcttctctacttgagatgcttgatgatccagaggaatccaccagagagcttgcacttactctattggttgaaattcttgaaaagcaacgaaaggcaatggagaactgtatcgatactcttatagttaaattgctgcatgcaaccaaagatgctgccttgaaggttgtaaatcaagcccatatctgtttgacaacggtggttactcaatttgatccgctgacatgcctaagagcaattgcttctcagttggccaaccaggatgaaaaagttcttattgtcagcatcaacagtttgagcaagcttgttattcgattatcacaggacaatcttatggcacatttgtcgatatttcttcctgcactcctggacgccttcgaaaaccatagtccatatgtccgcaaggctgtggtgttgtgcttggtggatacgtacctgaagctcgggccagcgttcttgccgtatttggagaggctggacagcgcccagctgcagctggtaaccacgtacgccagcaggctgtcccagacgagctttattgctgtggacgcttgatgcaggcaacccagcagcaacagcagcagcagcagaagacgcaatgcttgtttcaacgataactctccaccgttggttagccttagccttctctttctttttatttatggccatgtgtgcacaataagggcagcagctcagctctctccccctttctccaaatttatgagcatagtagaatagatctctatactgtaaatcataattacctgtttttactacccagaaatgagatacatgcatgtaggcagtgcagattgtacaaccaatggaagaatagtagtactagcattttcatcctgtttgctacagcttatgtgatctaaaggaaaggaagaaaaaaatataaaaaaaaaaaaaaaaaaaactgtgagatttcccnctaaaaaaaaaaaaaaaaaa

SEQ ID NO: 21130 - DNA, 387 bp, Oryza sativa
  Clone ID: PAT_MRT4530_26430C.1
tttttttttttttttttttttttttttttttttttttttttttggtttttttttttttttttttgtgttttttttttttatttaaaaagaagggggccgacgtacacaattggaccgggggaaccctttttggaacagggaaaaactggcgcccgggaaaaaacgggtcccggcccatgagctggggaaacaggaaaaaaaaggacatttggggattaaacgggcctgccggaggctacgcccgcccgaaaaaaaatacccgaaccctcaaggttggctccaaaagggacaaccgaattcccattttaaaagggcccaaagggtaaacccttggggcttcaccaaggggggggcagacccgggagaacctaaatttcccggggggac

SEQ ID NO: 21131 - DNA, 372 bp, Oryza sativa
  Clone ID: PAT_MRT4530_26431C.1
atggagaaggttgtggcgcggacgcagaaggtggtgatgtccggccaaaagtcctcggcgacgtgcgatggaggcagagcaggggtgaccggcggcggctgttcgttgtccccgacaacggcgatagcccagcgtgggcgccatgcccagccgatgagaataccgacgaagacggcaagccagagagacgccgatcacccctggcttggggagcttgagggtgatcttgccaatcaggccgcgccgtcgtcatcctcctcggccgccggagacgacgacgatgacgaccccttcctctcggccggcttcatctccaccttctcagccttctcccgagagagaaagagagagggagggagagagagagagtga

SEQ ID NO: 21132 - DNA, 267 bp, Oryza sativa
  Clone ID: PAT_MRT4530_26432C.1
atgagcagagggtgggcggctggcagcatgatgacgacggtagcggttgaggaggcaggatttcacagcgcaacaacgaagatggtggcggtggcagggatagtgcttccaatggtgatggccctagcggtgcgtggcatcgtggatggtggtggtgatggctctagggatagtgcctaccagatcgtgggcttccgtgtccagatccagccgtgtgaggagtggaacgaagagattgacgtaggtgccagcgatagtagcggttag

SEQ ID NO: 21133 - DNA, 1052 bp, Oryza sativa
  Clone ID: PAT_MRT4530_26433C.1
catcctctgttctccatctctgaggcagctcctgtgcttgcgctggagagctggccacttccccagtccccactgctgctgacctccgactgatccttgatgccttgatggtaagcgcactgctggacaggatgaaggctgtgagcttggaggcgctagaccgagctccaagtaactttcttccccttggcttgagctccaccttggtcagccaggttggaagcagtcaagcacatggaagccagaggtccacagtgccagcccaatggctgtgggtaagccaacaagaggaggttcagtgaagcctccgccgccgacgaagccacatccgctcgttgcctccgccgccaatggagttgcatccactcgttgtctccgccgccgccgcggactccacatctcctcgtcgccttcgccgccaccgacgtcgcatctccccgtcgcctccaccgccactggtgacaccgcatctcctcgtcacctccgccaccgacaatgacgccacatctccctatcgccttcgcgttctccaacatctccccctccttgccttcaccgtcacatctgagtcacatccatccaacgccaccgtcgcctgcattggatctccctcctcgcaagcttctgcctctaccgcccggccccccaccgatggccgcgcccgcacggccgcgccgcgccgcctcctccagcgctcgcctcctgcgccgcctcctcccgcgccacctgctcctcctccccgcagcgctcctcctcttcctgctacttccgtacacgcccggggtcctcctccgccgcgccaactccctcggtcgccggtgccttccgccgccacgcgccgccgccggcgacctcgtcctcctcccgcgcgccgcccccctcctcaagatcgctatcgtcaccctctccgacgagggggccgcccccgccgcccgcctagctggagcaaggtcctcgccctccgcgcccacctccacctccaccaccaccagaaccatgcccccaacctccttacgcatgcgttcaccccaatcctgctcctagtgagccaa

SEQ ID NO: 21134 - DNA, 171 bp, Oryza sativa
  Clone ID: PAT_MRT4530_26434C.1
gtgattctgaattgagagatccaaatacgcccgcaggtatataccattgcttgttgatcggagaggaggaggtgttcgataagacgggccaggtgagatcatatttatatgaccagggcagggggaacaccagcggcaggtccaggtcaatgccgcatgccccgatgaacg

SEQ ID NO: 21135 - DNA, 564 bp, Oryza sativa
  Clone ID: PAT_MRT4530_26435C.1
atgagagatgattttgacatcaccaaggctgataaaatatttaatctactacttcggggaaagcagatccaacttcctactggccactcaatcccatcggttgatgaattagagaaaagaaaatattgtaattggcataacactgggtctcatactaccaatgactgcaaggttttcaggcagcagatccagtcggctattgaacaagggaagataaagtttgatgattcaaagaggccgatgaaggttgatgatcatccttttcctgttaacatggtccatacatctgggacagcagccgatgggaggagtcatcggaattcacagcttaactcagttaggattatcaacaaatatcagaggaggtatgagagacaggaagaaaaatattgtgaagatgatggtggttttgatccgcattgggactacgaattttttaggttttgttggaatgaagagatgagactaccgtcaatagaagactgtccaggatgtagtgaatctaacagggattctgcagggagtttgagccgatcttataaaagggaaagtcggctaagatag

SEQ ID NO: 21136 - DNA, 180 bp, Oryza sativa
  Clone ID: PAT_MRT4530_26436C.1
atgaggcggcgccgctgtatttgccgtcccttggctagatccggcctccccggcgcgagaggtggctctctgggcaacatcgatgatgaagccatgtggtgcgaggaacgaaagaaagtgggtggcaccaactgggagcagatcatcctctccttctgccaacgaggtggctactactga

SEQ ID NO: 21137 - DNA, 261 bp, Oryza sativa
  Clone ID: PAT_MRT4530_26437C.1
tcattgtcgccgccttgcacgaggcctatcgtcgtcgtccccacggtcgccggtgacaaatccggcctccccgcggtggtaggcgacggatccagcctccccgcggtcgccagcgacggatccaacctccccgcggtagcaggcgacggatccggcctccccgcggtggcaggcgatggatccagcctccccgcggtggccggcgatggatccgccctcctcgtggtggccgtcgatggatccgccccgccgccaccaccc

SEQ ID NO: 21138 - DNA, 807 bp, Oryza sativa
  Clone ID: PAT_MRT4530_26438C.1
atgctccgcgctccgcctcaggcgccgcgggcctcgcgacggccgcctccgccgcggtgctcccctgccgcaggcgcgtcgccgccgccgtcggccggcggcatccggcggctggtgctgacgccggagggccgggcgaagctggacgcgcggccggaccgcgacttctacgcgttcccgcggctcgtcaagcacgtggacgacggcttcctcgcggcgctcgccgacctctaccgcgagcgcctccgccccgggtgggacgtgctggacctcatgagctcctgggtcagccacctgccgccggagcgcgagctcccgctccgccgcgtcgtcggccacggcctcaacgcccaggagctcgccaagaacccacgcctcgactacttcttcgtcaaggacctcaacaaggagcagcggctcgagctccagacctccagcctcgacgccgtcctctgcaccgtcagcgtccagtaccttcagtcccctgagaaagttttcgcggagatcttccgggtgctgaagccggggggagtgtgcatcgtgagcttcagcaaccggatgttctacgagaaggcgatcggggcgtggcgggagggcacggcctacagccgcgtgcagctcgtgacgcagtacttccagtgcgtcgacgggttcacggagccggaggtggtgaggaagctgccctccgacgccgccggcgggaagccggcgtcgccgctggacgccgtgatgaggctgttcgggatggcgggctcgtccgacccgttttacgcggtcatctcgtacagaaacttcaagcccatgtga

SEQ ID NO: 21139 - DNA, 230 bp, Oryza sativa
  unsure (1)..(230): unsure at all n locations
  Clone ID: PAT_MRT4530_26439C.1
gagaagatggtgttgtctanatatccatgttggttgacaagtcgattccacttatctggaccaaagttcaatcatggccagaccctcgtttgtgcatgccgatcctgatgatcttggaaagggtgggcacgactgagcaagtaccaccggtaaacgctggtgcccgtgttgcttgcagggatctatcggacttcaaggctgtataacctggaggtgtgaactcaccattc

SEQ ID NO: 21140 - DNA, 141 bp, Oryza sativa
  Clone ID: PAT_MRT4530_2643C.1
atggtgaccggcgaggatttcttcctctaccttcgctccggcatgctcgcccaggcagctgaggctgtggagaaggaagagagaacaaggaggaacagaaggctcgacgtggccattgaccctcccatcgtcttcttctga

SEQ ID NO: 21141 - DNA, 362 bp, Oryza sativa
  Clone ID: PAT_MRT4530_26440C.1
atggagaggtatgcccgctcgctgccgagcttgccggcacgagtaggcgcagcatcgccgccgcctctcgctggtgcaagcagcagcaacgtcgtcttcgccgccgatttccgccatctgtccgctcggtcgcccgccgacggcacaggggagtcaacgagggagtgccaccgccggatccgcccgccgaatcccccgccgagtgccgccgccggatctgccgtttggagctctggctgcagcccccaccgccgtctcgaccaccgccgatcttgcatggcgaccccctccgtggattcgtcgacctccttccgtggccgcctcatccgcatgcacgcgggctcatgtgggaaaggggagaa

SEQ ID NO: 21142 - DNA, 1056 bp, Oryza sativa
  Clone ID: PAT_MRT4530_26441C.1
atggcgggcgcggatgggctccctcccggcctcaggttcgaccccagcgacgacgagctcgtctcccgctacctcctccgtcgcatccagcagaagcccctcccgctcgacggcgtcatcgtggatgccgatcccctgagcgtgccgccatggacgcctcttgcggatcacacccgaggcgacgaggccttcttcttcgcgggggcacgcgccaagaatggcaagggaaagcgacagaagcgaaccgtggagggcggagggttctggcaggggcagcggatggccgtggatggcgagcggctggtcgtcccaggcgacggtggaggcggcgtcgacggcagcggcggcggcggcctggagatcacgtggcgcaagtatgtgctgagcttcttcgccgagggtgaacagggcagctcgggctgggttatgcacgagtacgccgtcacgtcgtcggctgacctcgcctcgtcgccgctccggctgtaccgcgtcagaatcgatgacgatgacctgtctgtgtcgcaaacagagggcaccgagctgtccgagcagggctcctccggcgtgatcgacgacgattattggcgggaagccgatgccaccggtggtgcagagagagaagagatcgctctgctcgacgaggagcgctgcccgcaaccacagcccgctcctcctactgatgctctagtgccaccactgcagggccagaactcctacgacgtgatggccgattcgtcactgctatttgctgatcttcccgggagaatcgatgacgatgagctacagcgatctctgcgtgtgtcggacatgcctgacctgttcttgtcgcagacagaggaagccggtgccggtggtggtggtggcgcagctccagtgctgaacaagcagagtaactcctcacctttgggcgtcatggacagcgaggtgccgattgtgttgtctgatctagagttcccagagagcattgatgaagtgcttagctacattgacttcgccacggatgactgcctcgatttcgacatggacgagctgttttccgatatgccagcagactag

SEQ ID NO: 21143 - DNA, 963 bp, Oryza sativa
  Clone ID: PAT_MRT4530_26442C.1
atggcgggcgcggatgggctccttcccggcctcaggttcgaccctagcgacgacgagctcgtctcccgctaccttctccggcgcatccagcagaagcccctcccgctcgacggcgtcatcgtggatgccgatcccctgagcgtgccgccatggacgcttctcgcggatcacacccgaggcgacgaggccttcttcttcgcggaggcacgcgccaagaatggcaagggcaagcgacagaagcgaaccgtggagggcggagggttctggcaggggcagaggatggccgtggatggcgagcggctggtcgtcccaggcgacgatggaggcggcggcggcgacgaaggcctggagatcacgtggcgcaagtatgtgttgagcttcttcgccgagggtgaacggggcagctcgggctgggttatgcacgagtacgccgtgacgtcgccggctgacctcgcctcgtcgcagctccggctgtaccgcgtcaggttcagcggccacggcaagaagcgcaagagggagccgcagtgtctggactcccacgacgacgacgacggcggggatcaagaaagcgcgactcaccggcgcgccgtggctgagaccactctgttcgacggatacgtgcctcgtcctgcagccgacggcaccgaccagggcacctatggcgtgatcgacggcgaatcttcgctggcgtcacattgtcttcccgatcagatcgttcccccagcagaagaagctgatgccactgctggtgtagagaatcctctgctcgatgaggagcgctggtcaccaccacagcccgctctggtgaagcagaactcctacgacctaatggccatttcgtcactgctgttttctgatcttcccgacagaatcgatgacgatgacctgtctgtgtcgcaaacagagggcaccgatctgttcgagcagggctcctccggcgtgatcgacgacgattattgtcgg

SEQ ID NO: 21144 - DNA, 624 bp, Oryza sativa
  Clone ID: PAT_MRT4530_26443C.1
ccggccgggacgcgcggctccccggcgcggtgtggctcttgctgcagccgacggcaccgaccagggctcctatggcgtgatcgacggggaaccttcgctggtgtcacattgtcttcccgatccgatcgttcccccagcataagaagctgatgccactgctggtgcagtcgacgaggagcgctggtcgccaccacagcccgctttccctactgctgctctggtgaagcagaactcctacgacctgatggtcatttcgtcgctgctgttttctgatcttcccgacagaatcgatgacgatgacctgtctgtgtcgcaaacagagggcaccgagctgtccgagcagggctcctccggcgtgatcgacgacgattattggcgggtgttccatggactttccgacctgatcgcgctgccagcataggaagccgatgccaccggtggtgcagagagagaagagatcgctctgctcgacgaggagcgctgcccgcaaccacagcccggtcctactactgatgctctagtgccaccactgcagggccagaactcctacgacgtgatggccgattcgtcactgctatttgctgatcttcccgggagaatcgatgacgatgagctacagcgatc

SEQ ID NO: 21145 - DNA, 433 bp, Oryza sativa
  Clone ID: PAT_MRT4530_26444C.1
tgattactgaaggataattcattctgaaataaggaggtcatatttccatttctccaccacaccaatttgaaaaaccacagcgaaggcctcctttcaaacagcttccaactcgtttccattgcccatctcaacggctgtcaacccgtaatttctttccaaatacctgccccagtgtctttactttgcaaaagtgtgcagaaccctttaaacgtttctgaatcacaaaggcagggtgagacttcctccatttggccaagagcatcttttaccagctgttacctcagcggcaagggaaaatcgggcggcccctgccgctgtccaacagcttggcccggctgttccagggcagaggccgggtacaacagaggctgaagaacccaacccctggggcgcaggtgaccccttgcagggcaaccttggcctgatgcgccct

SEQ ID NO: 21146 - DNA, 309 bp, Oryza sativa
  Clone ID: PAT_MRT4530_26445C.1
atggccgcaagaggcatcccgaatgttattaagattatggagaaaaaattgacaagaaaacgtgacaaaactgtccagagccaacaactgcaccacagagcaaagaccccaaacattacgatgccggaatgtgcagccactgaaaatgttggcagcacgcggtcttcgccacaccgcactggcacccctctcctagccaacgcccaggctagccgttggcaagaccaccactgccaagccttcccctcctaccagctactacctgttgccgcctctgctctgcttctagaactctacaaggaaaaatag

SEQ ID NO: 21147 - DNA, 205 bp, Oryza sativa
  Clone ID: PAT_MRT4530_26446C.1
cacgtggcggccgcggcttgtctttggctcggacagcgtggctgctgcgtgctccgtgcagctgacaggtgtaggagtagtagaggagagggtgtgcgagttgagtggggacgtgaacggcaagatggcgcggtttaccacggaatctgacgataaatcactgtcttttccgctgcgtccgaaatccgcagtgtcggtcgtgtag

SEQ ID NO: 21148 - DNA, 872 bp, Oryza sativa
  unsure (1)..(872): unsure at all n locations
  Clone ID: PAT_MRT4530_26447C.1
gggcggccgccgctgacgacgacgagcttcgccggcgggcggcggcgctccgggaggtattcggcgactcatcggacagcgaggccgacgaccttcccgttggcggggcgggccgggagcagtggaggtgggaggcggtggagggggtgagggggctatggctctgcgccgccttcctctccgccgacgagcagtcgcgcctactcacggcgatccggcgagaaggatggttcagcgatgcacgcaaccaagcaatgagatttggtgatcttccttcatgggctgttgagctttctgcgcttatccatgaggctatttgttttggtgatgtccgtgttggttgtggtttggagttgaaaaatgaggacgaagatgcatgtcctttaccatcagatttgctgtggaggaaaccgctttttgaccaaatgatcgcaaacagatacgagccaggtgagggcatctgtgctcatgttgatctgatgcgctttgatgatggaatcgcgatagtctcccttgaagtcaccatgcgtgatgcactttcagtcgggcagaaacaagaaggtcctatctgtgagacactggagagtgtgcatgctgaaacctacaaaagaatccctgtctacctgaaacccagggtccccatggtcttcatgtcagggcgacgccaagatacttatgggaaacatgtagatnaaaccgcaagcccaagttgctcaaccattgggggtggcaggggaagcttgaagcanccagaatnttnaacttnnattncnctggagggaagctccttccatccaccaaactaataccagccagaaacagttgttcanggaaatttctccaggnttttttgttcccaagccntctttact

SEQ ID NO: 21149 - DNA, 1805 bp, Oryza sativa
  Clone ID: PAT_MRT4530_26448C.1
cttgacaactacaaagtctctctctcttctctctctcgcctcgacgccccaaaccctagccatggccgacccagccgctgccgccgccgccgccgagttcggggatcccgattcgccgcccgcgccggccgccgaggaggccgaggcggctgcggcggtgggggaggaggcggtcccggcggcggaggccgcggcggcgaagaggtggcccgggtggcccggggacagcgtgttcaggctcgtggtccccgtgctcaaggtcgggagcatcatcgggaggaagggggagctcatcaagcgcctcgtcgaggagaccaaggccaaggtccgcgtcctcgagggccccgtcggcgccaccgagcgcattgttcttgtgtctgggaaagaagacccagccttggagcttcctccagctatggatgctctcatgagagtttttaagcgtgtcagtggtataacagatggagctgctgagggcacacaggcagctactgcacctggtgtatgtgctgcccgtttgttggttcctggagctcaggcaattaacctaattgggaagcaaggtgcttcaattaaggccatccaagagggcactggtgctacaatacgggttatatcaatagatgagcgagagcgacctttctatgtaattgaagatgaaaggatagttgagatccagggggaaacagagaaagtcctaaaagcacttcaagcagtttctaatcatctccggaagtttttggttgaccatagtgtacttccattgtttgagaagactaatgctacagtaactcaagatcgcagcactgatgcttggactgatatatcacatccttcaattgtttctgcacaaataaaccaaccacctcctgtggttgatgaatatattcttccaatgaagagagaccctctgtttctcgaacgggaaccattgatagaccacaatattcatcgctcaggtgtttcgctttatgggcgggatcctgccttgtcaacattacgaacctctggaatacatggtggtggacctggtggccctctactttcacagataactcaaacaatgcaaattccccttacctacgctgaagacataattggagtgaaaggagcaaatattgcatacatacgagctaacagtggtgcagtcgtcacaattcaagagagtttggggagccctgacgatattactgttgaaatgaaggggacatcatcacaagtacaagctgcctatcaactcatccaggattctctggcggcacatagggattctgtcaggagcagctatgcaggattagatccagtatataggccaagctattcacagtatggcagctcgacctatccgtcgtcgtcattgccatcgtattctagcatggatgggggtggatattcgtcttcaggtctcggtggatatgggtcatcttaccggtactaagcagttagtcgataggcttgttgccgccctgtatccatccctgggccatccttgtactgagccagcaatagatgttttgatggcttttgttcttctcggctgtagtcctgcagaaatcattgtgtcccggcaaatgtttttggtatatctgcttttgttagtgtgacagggcatgtggtttatatctcatcatggaaagatgcccctaatttttcatagtttagttgcattttttgtgattcttatggttgtgtggtctacctgtttgtgttgaaaacggatgagtcaatgcacgtgttatgttcatccaatattttcatgctgtaagcatatgaatgaaaaggaaaaaaaaagtaccgtgaagcat

SEQ ID NO: 21150 - DNA, 401 bp, Oryza sativa
  Clone ID: PAT_MRT4530_26449C.1
ttgttaaattataaaagcctctttcatttttctaaaaccataaatcccattttattggtggctcttacggaaagcacctaacaaatcaatgacgaccacatccgacaccatgcaggaaaacatacgcgaccaacacaagacccacgagacatcttacaactggaggacctcactagcgccaaaggggagctacaaaacgcggaatctagcctaaacagacccacgaaaaaggaaccacccccaagacgcaaacggcccccaactacaaactgaccacgaccaaacaaccacagaactgctggagcccccgccgagcacggagacgccgaccaggcagagctcgccgacgtcgcctgaggcgcaagcccggaacccgagcatggggacacgcgcccggggaa

SEQ ID NO: 21151 - DNA, 420 bp, Oryza sativa
  Clone ID: PAT_MRT4530_2644C.1
atgaagggtgtcagtccagacgccgtcaggatcaggctgttccccttctccctcctggggaaggcgaaacagtggtttggtaccaatcgtgctacaattaactcctgggacaaatgctctacggcatttttgtccaagttcttcccgatgggcaaaaccaatgcccattgtaggagaatttctggatttcagcatacgagggaggagtcaatcccagaagcatgggaacaactccaggagtatgtggctgcctgtcctcatcacgggatggatcagtggctaatactccagagcttctacaacgggctcactcccacgtcccgcgatcacctggacgtggcagctgcaggagccttcttctctaagacggttagaggagccgtcgacctcatagagaagatggtctctaacatgggctag

SEQ ID NO: 21152 - DNA, 380 bp, Oryza sativa
  Clone ID: PAT_MRT4530_26450C.1
acaagctgtaccgtggtgtgcggtataaaaactgccgtaagcgaatggcacataaacgtatggggatctaccaaacggagtgtaaactgttcacaactactacagtcatatacctgtaattaacgtacgacacaaacctaattaagcaacaaacattactattgtgacagaacatgacatggatcctcttcatcttgtccaaaatagatactacttgcatagcataacactttcaaaagtgcacaaaactctcttacatgaaaatttctatactaaacttaaaagcaaacaaggtggagttacacacactaggtgtaatatgaccagatcaacttcaaggtgtacttcttctcgagcgagctgagtgcaggcacaccatc

SEQ ID NO: 21153 - DNA, 848 bp, Oryza sativa
  Clone ID: PAT_MRT4530_26451C.1
tcaagaaattttatctcggcgggtacaccatttcttcattccatattccttgtcgagatccagcaaccattcttgagcgatcgagaaggcgtagagtctgcgacggagccttgtcaacattggttgtactcgccttagtcgatcttggtgtagaaccatagagacatgtagtcttccacaatgtcgaatagaattttcatggtctttcgtctctacaggatccgacaaggccttattggctctgggcgtccccagccgaagatcccttaggttcctcggaggcctgctatcaactttgttgaagtagaggtagtaggagaaatcgctacaccgctggtcgtggaccaggcagtagtcgtaactcgaccacttaaagtggaaagtgggagaaacgctacatcgctggtcgaggaccaggcagtagtcgtgtctctcgatcattttgagtcgtggtacgaggaccactacgttattgctgtagtcgtacctcgaccatctgaagttgcggtgcgagagattgctgcgtactggtgcgagaaccagtgagtgagcagaattatctctcgaacaacgatgggagttgcggtgcgagagattggtgcgtactggtgcgagaaccagtgagcgagcagaattatctctcgaacaccgatggaaggtgcggtgcgagagattgatgcgtactggtgcgggaaccagtgagcaagcggaattatctctcgaacaccgatggaaggtgcggtgcgagagattgctgcgtactggtgcgagaaccagtgagcgagcggaattatctctcgaacaccgatggaaggtgctagagttggtttattgcaagtgtatctcat

SEQ ID NO: 21154 - DNA, 2040 bp, Oryza sativa
  Clone ID: PAT_MRT4530_26452C.1
ctaggcagtagccgtaactcgaccactgaaagtggaagtagtcggaggaatgccacatcgctggtcgaggaccaagcagtagccgtaacttgaccactgaaagtagaagtagtcggaggaacgccacatcgctgatcgaggacgaggcagtagctgtaactggaccactgaaagtagaagtagtcggaggaacgccacatcgctggttgaggaccaggcagtagccgtaactcgaccactgaaagtagaagtagtcggaggaatgccacatcgctggtcgaggaccaggcagtagccataactcgaccacttgaagcaaatgtacgagagatcactacgatcaactggttgaggactagtgcgagatattgctgcgtactggtgcgagaaccagtgagcgagcagaattatctctcgaacaccgatggaagctgcggtgtgagagattgcttgaccactgaaagtagaagtagtcggaggaacgccacatcgcttgtcgaggaccaggcagttgccgtaactcgaccaccaacttatagcatatccggatgtccgttcgcaatcatgtcgggtgatcaagccgacgacgttgaagtagaggtagtgggagaaatcgctacaccgctggtcggggagcaggcagtagtcgtaactcgaccacactgaaagtggaatttgtcggagtaacgctaaatcgctggtcgaggaccaggcagtagccgtaactcgaccactgaaagtagaagtagtcggaggaacgccacatcgctggtcgaggaccaggcagtagccgtaactcgaccacttgaagcaaatgtacgagagatcactacgatcaactggttgaggactagtgtgagagattgctgtgtactggtgcgagaaccagtgagtgagcagaattatctctccaacaccgatggaagttgcggtgtgagagattgctgcgtactggtgcgagaaccagtgagcgagcagaattatctctcgaacaccgatggaagctacggtgtgagagattgctacgtaccaactcatagcatatccggatgtccgttcgcaatcatgtcgggtgatcaagccgacgacgttgaagtagaggtagtgggacaaatcgctacaccgctggtcgaggaccaggcagtagtcgtaactcgaccaatcgctggtgaatgaagtagtcggagaaacgctacatcgctggtcgaggaccaggcagtagccgtaactcgaccactgaaagtgaaagtagtcggaggaacgccacatcgctggtcgaggaccaggcagtagccataacttgaccactgaaagtggaagtagtcggaggaacgccacatcgctggtcgaggaccaggcagtagccgtaactcgaccactgaaagtggaagtagccggagtaacgccacatcgttggtcgaggaccaggcagtagccgtaactcgaccacttgaagcaaatgtacgagagatcactacgatcaactggttgaggactggtgagtaggtgtccctcgatcacttggagtcgtggtacgaggaccgctacgctgtcgtagtcgtaccgagagattgctacgtactggtgcgagaaccagtgagcgagcagaattatctctcgaacaccaatggaagttgcggtgtgtgagattgctgcgtactggtgcgagaaccagtgagcgagcggaattatctctcgaacaccaatggacgctgcggtgtgagagattgctgcgtactggtgcgagaaccagtgagcgagcggaattatctctcgaacaccgatggaagttgcggtgtgagagattgctacgtactggtgcgagaaccagtgggcgagcagaattatctctcgaacaccgatggaagttgcggtgtgagagattgctgcgtactggtgcgagaaccgctgggcgagcagaattatctcttgaacaccgatggaagctgcggtgtgagagattgctgcatactttgtagatacatgccggatgtatcttgatttgcatgcccgatatactatcgatttgccatcctccat

SEQ ID NO: 21155 - DNA, 467 bp, Oryza sativa
  Clone ID: PAT_MRT4530_26453C.1
ggccgtcgttcaacttcgcaccacatccgagcgaactccctgtgtccatctttacttattcacttaattcattctcactgatccctttcttacattgtgttttatgatgcgaattccttactgtttttttacctaactaagtgtctttattctattttccttaacaggacgaatcgtggagaggtgaggacaagatgaatgttgattcgatgcactgtcggcggtcagcttacccagcagtcactgcctcagctcagccggccaggccactgccttcatgagacatgctccaactagaacatgtagttatttgttttcttcccctctccctatcaggcttcagggcttgatcagttacttttttttcttcttcctccctccctattaggcttgatgtcaatacgttttgtaacttgctcaatcttaactaaatggatgcatcgttgcccctaaaaaaaaaaaaaaaa

SEQ ID NO: 21156 - DNA, 441 bp, Oryza sativa
  Clone ID: PAT_MRT4530_26454C.1
atgtctaccaagataaatcaacggccgcccgtgatcagatacatccggcatgtatctacaaagtacgcagcaatctctcacaccgcagcgtccattggtgttcgagagataattccgctcgctcactggttctcgcaccagtacgcagcaatctctcacaccgcagcgtccattggtgttcgagagataattctgctcgcacactggttctcgcaccagtacgtagcaatctctcgcaccgcaacttccattggtgttcgagagataattctgctcgcacactggttctcgcaccagtacctagcaatctctcgcaccgcaacttccattggtgttcgagagataattctgctcgctcactggttctcgcaccagtacatagcaatctctcgcaccgcaactaccattggtgttcgagagataattctgctcgcacactag

SEQ ID NO: 21157 - DNA, 724 bp, Oryza sativa
  Clone ID: PAT_MRT4530_26455C.1
ccggccgggaccctccctactacgaatcgccgccgccacaccgagctccgccgccgccaaccccaccgcggcgagctccgccttccgccggccgcgatggctcccaaggccgctgtaaataaggctgatggaaagactaacaagccttgaaggttgccaaggcattgaattctgcttcaattaagagaaagtcaaatgaagatccgtaattttgcgtcctgtttatgcatctaagaccgtctaagagtggcattagaccactaaggtcgctacacccaaaccttaatagcaacggcaagcatatgccattgatatcttgaaagagcagcggagtcctgcattgactatttcaaaggtgctactctcaatttgctcgctgttgacggatccaaatcctgatgatccattcccacgcgtccgcccacgcgtccgcccacgcgtccggaatggttaacaataagaaatgtgacaaggcgcttgtattgccttgtattctcctgtaactctttcaacatttaagaaacagcaagaatcaaattgaactctcgagttgttgtatggaatcctactatagatgttcagctattgtaaattatgtagtgggtggttctattgattgttcgatgagcacttggaatggtacttttaaaaaaaaaaaactcctactataaaaaaaaaaaaaacaaaaacaaaatgtaaacgggagaagccagtacaatatatt

SEQ ID NO: 21158 - DNA, 336 bp, Oryza sativa
  Clone ID: PAT_MRT4530_26456C.1
atggccaccatcctggacaaccgacgaagaatttcagtgggaagttgggttgaggagaaggtggagataggcgacggcgatggggagccactcatggggagggaagctgggtgggaggcactggctctgactcacctcgatctcacattgccagcaacaaaggtggcatcatcggcggagtgtctcggctgtgatggcgctgtatacatggtgacgatggcggagacctcggggggctgccgggttggcggaggacatggaagcgttaaggaaggctgcggcagcgtggttagccgtacgaggcggtggcgccaggccaccacggtcgggtcgtga

SEQ ID NO: 21159 - DNA, 1647 bp, Oryza sativa
  Clone ID: PAT_MRT4530_26457C.1
atggatgaccttgccgaccgcccctctcaagaagctgtatttctttcggccacaggagagattgaccgtctgaggcagaagttttctgctcgctccatagttgcttggcaagttgggactcagggttccaaggttgatcccaatgtgtttgctgacgatgttcgttcagcattccggattaggcggtcggatatccagattacaaagtttcaccctaaagattttttcatcacatgtgccagccagagtgacagggatgccatcctgaggcagccacggcttgccaccaagtctgggcgagtctatctcttccgcccgtgggaagaaggcttgcatggtgtcccggcgtgtttcagattcagagctcgagtatgcattgaggggctcccaatgcatgcccgtacagatgaagcagtagccaagatcattggaagaaagtgctccgttcattatgttgaagagtattcccaccgcaggaactacaaccgcacttttgacttatggatttggactgacgctccaaaattcatcccgcgatcttcgagcttctctctcaccaatgctgatgaagaaggtctgcccatagacatcccccttccggacctggaaccgcaccacaatccgccgccagaggagccaaaggaggggtggacttacaatgtcctgattcatattgacaccctggaagaccttcactgcaagcttgcccgtgcgtacgactatcagtacggtgctgaagatgatgagagagagagccgtgagaacagagaggagaaggcgagcggggcagcggcgctccggtggctggagggcggcgacgtcggcgtccacgcgtgttcccgagcacgaagcacccgggaagggcagtgtctggcggagagagcgagggagatggccggaacggcgacgacaagagctcacctccggcgagtaaaagaagtggtgatggcgttggcggcgccgtgcgccgtgcgcaacacgcgcacgggaggaggcggcggctcggctgaggatgttacacctgatccaagaaagggccctgatgatgatgaagaagacagggagcagcgctcccagggccagcataggagccgctccctctggagccgtgttggtggacgatcctccagccggagcagggaaccggttggcagtgaacgtcaggtctacactcaagattcgcgtgggcggcagtgggcaagggctccctctgaaggcagaagccgctcctaccgctctcgctccccaagtgagcctgagctactgatcttctcgcagggacaggtgctggacatgctggaaaaacacctcgaccccatgctccatgaagccactatccagcactccatgtactcaccagtcttcatcccttccagcgcccaggagatcgttgtgggggctgctacagaaatgcctccaggggccaggaacttgaacgagctggtggcaggcctctccacgcctgtccaagcggcgcatcttccaacccctgacgtgagctctcgccgtccttgccgcaacaagcatttcaagaagccgctgtcccctgcctcaatgaagatgatcacaaccctggttgagaagggaggatgcaaaggcgcccgcctgaagaccgccaagaagaaagcggtggtggtgccggtctga

SEQ ID NO: 21160 - DNA, 306 bp, Oryza sativa
  Clone ID: PAT_MRT4530_26458C.1
atgggtggatacgtccacgacgcgttggttactttcgcggagtgcaaatctccggcttggctttccccccgtgcgagccccgcggacagggacggggtttcggccccgcgcccttggcggcatcgtcatccgcatcgccttttccgtctcgtcgccaccgagccgtccccgtccacggcaaacaggatagaaagcgggagcgagcgaggcagcagcgcccgcgcgcatcgggcgtgcgtggacctaccagcccgccgtcgcgcgtcccgccggccactggactgcggccgcgatcgagagcgctag

SEQ ID NO: 21161 - DNA, 1472 bp, Oryza sativa
  Clone ID: PAT_MRT4530_26459C.1
tcatgaacagctcccgactctgctgagctgcctgctgcctccgacgacccagagcagcgtcctcctcgcgaacgacgggcgctcctccgccgccaccgacgacacggcgctgttcccgccgcagctcccggcctcgacgtcccagtccttcgccgccggccaccggaacgacaccgcgcgcctctcggcggcggcgccgggctctttcttggacggcaccatccagatcttggacacggagaagctgtccttggcgagcttcgcgccggcggccgcggccgcgtcgtcgtcggggttcttgcgcggcgtcgcgcggaacggcggcaggcggagcgaggactcgccgcgcttggaggcgccgaactcgcactccgacatggcgccgcggcggcgcgacttggaggccgccgccgccggcttcttcctcggcggcttgatggacacgcggagggaggcgtgcgcgtccatgacgtactcgtaggatcccatggaatggcaccgtctttgcccgagaccaccagccttggcattggcgtcgccattgccgttgctgctcgtgccggctctatccccttcgccggcgatggcgttgacgttgaagaagacgttgccttcgacgcacatgaacttcccaagcttcacctcgaccacctcctccgctcccggcgcgtcttcgccaccgacgtcggctggctcatcgtcggcggcgtggaccatgtcgcgggagctctcggactcgagcaccatgacgacgggggtgcacgtcggcgagagctcggcgaggaggctcctccggcagagcgggcaggtggagtgggagaggagccaggtgtcgatgcactcgaggtggaacgcgtggctgcacttgggcagcagccggagctggtcgtcggcggcgaactcgcacaggcagacagcgcagtcgaacgggtccttgccatcctcgccgccgacgccgacgacgttccggtacaggaacaccgggagcgcgtcgatgaaggcctggtcgacgccggcgtcgtggaggtggaacagctgctgcagctgcccctcgaacgccgtcgcgctctcggcgtcctccctcgccctccgctgccggtgcagccgcagcaggtgccgcaccagcaggtgcagcagcccgcacacgaagaacacgatcgccaagacggccacgatgaacacgatgctcgggcttatcttgttctccacgccgtcaatccccgacgccgacgacgccgccgccgccggagtctgcggcggcgacggctgccacgtcgaattgctcattcttcaaatacgctctacgatcccaagatgatttttcttgggagaagagacgatttctagcttgttttgcgatgagctaggggtaggagaaggatcttggtgttggcatggcggccattggcgatgaagaaggacagaggacacacagcagcaggtgatggcgatggaagaaaaaaaaaaaaaaa

SEQ ID NO: 21162 - DNA, 495 bp, Oryza sativa
  Clone ID: PAT_MRT4530_2645C.1
aaggaaccgggaaaacccagggcggttattcctttttaaacagaaaaaaaaacgtatccacggttaaaactagggccataagaacccacccttcccgtttttttttctccatacggacgggggccaaaggacaaaggaggaaaacaccccagtttcccagatccttttagcaaaaaaccacctttccagaggcaccccccctacagggagggtttatgcccaacctagggcccccttacgggccacaggggcatgggggggaacttccctggcccaaggaagggccctgcctgcccggggaatgtgggctgggttcaaggaccaactttcacgggaaactttcccagcaggttttcaccaacaagtataggggcaaaggctaatcatggagggggggggggccccaaacccgcggaagaaatctttatggggttgggaaaaacaaaacttttattttttgaaaagtctttccctttgtttaaaccacagggggcc

SEQ ID NO: 21163 - DNA, 2148 bp, Oryza sativa
  Clone ID: PAT_MRT4530_26460C.1
ctacccactaaaaagggcaaccaaaaagaaataaacaagggagctaacactatgctgacacttcactccttttctcctatattccactatcgcttttcttttgcttcttgtgttcctggaaaccgagaagaagtctcttggcgaaggtatatccaaagtagagggccgcagatggttgattccacctccagcattagtgcccgcgctgatgcctacatgagatgcactgcagctacttgtcgcgacgacaccggtatcagtggtggtgaaactttggtgagctgagacagaggacttagtcggcgaagcaaacgggctgtccggcaaattgtgctccaagctttggtcgctatcagcattcaggctcgcctcaccagcagattcttccttatcacctcctccgttgaccattttcctctcttctgtgaagtaacctgttcccttgagctgctcgccagaatcaggcggtgactcgaccatggtggtggcaagaggctgactggaaccgaaggcattggcggtgggaattgtcatcgccattgctgttgtgacagcagctgcggctctattcttgaggtcgagcagctggaggtccatgagacggcgactgtggagttcgatggcctgttgcagctcggcagcctgctgctgctcctccagtttcctacgaagcatcatctcgtttgtgctattggagtgctgcagcatcctcgcaccgagctgatgcagatcgaatgggtctctgccgtccaggccagtgggggtcgtgcagccggagaagtcaccttgatgttgcttcctgtacttgtcggggaccttgcccttctccttgtaaggcttgacgagcacgcgggcgtcgcagatgaaatgcggattgcccttggccaagatcagcttcaccgtctcagggtacacgaaggtgacgaacccgaacatgcgcttctgctggtacgggatgcgcacgtcgtgcaccggaccgtagatgctgaagtagttggagacgtcctcctcgcggaacgtgctgtcggccgggaaggtgaggtaaatctggcgcgatccggggttcatcatgctggcaaagtcgacgcggtccaggcgcggccgccccatgaacttgtgcgcctcgtcgctgccgccgagcatcagcgccgccgccgccgcggctctttggttgtcgttgtgctgctgctgcagcaagaggctgaggcacttggtggcggcggatggcgagccggggagcgaccctgtgggtgaataggggaaggcagcagggccgaggcgctggctcttggaacggaggaggaaatcctggcactgctgctgctcggcggtggccgcgtccatggcggcgcccgtcagagcggcggcgtcgtcgccgtggacgaacctgcagctgctgccgttcttgcagaacccgcgcgcgtagtacaggcaaggcttccacccgaagccgtcgctgctgccgccgccgaggcagagctcgttgaccgacgcgctccggcggtgcccagggccaccgtttgcccagccgagaccgtacgggaacatcccgccgccctcgccgggaccggggctccggcactccgctccatcgaacccctggagagggtggctggggttgacgcccccctcgttgaggaacgcgagctgctcctgcagctggaagtcgtccaggagcacgtccccaccccgaggaaagaagggcggcgcgttcgccgcggcgcctcccccgctgttcgccgggctgattagctcctccccagcgcccaccacctcatccacggacccattgctcctcgagaacggctgcgcctgcgcccacgaggacggcgaggacgcggacagcggcgacggcgacggcgcggggccgcggccggagttctgccgcgacagcaggaacggcgagtgggccgccggcacggtgggcgacgacgacgacggcggcggcggcggcgggaggagggcgagctccttgcgagcctgcgccatgacgctgtggagcagcgcctcggggccgaaggcgaggcgtatcatctccttgtcgccgtggtcctggatgagcaggaggcccatgatcttggcggcgtggtcagggtccagcgcctggatccgggagaacaccaccttggtcgcctcgtaggcgtccat

SEQ ID NO: 21164 - DNA, 465 bp, Oryza sativa
  Clone ID: PAT_MRT4530_26461C.1
atggcaaaacctgtggagtgcgacgtgtcaaaggagataagcactgggagcaaagcaaaggcgataatccaagtcatcaccgggagcaaatccatcctcccactccgagccaccgccgtagcctcccgctccgagctggcgcctcctcctcagccgccgccacccgcccgcgcgcctcccctccccctcctcctcctcctcctcctcctctcccgctggtcgcgctgccagcggggccctctccctctccgccctggccggcggagcttgagctttgcatttccattgctttggccagaggtagaagaagaagaagatgacgaggaggaggaggaggaggtggtggtggtggaggaggaaacacacgaggcaatcccctgtttcttgctcctcccctgtgttctcgccgcggcgatggggtgcccggtgtccaagggcgccgcggtgccgtcgctggcgtactag

SEQ ID NO: 21165 - DNA, 405 bp, Oryza sativa
  Clone ID: PAT_MRT4530_26462C.1
ggctggatgctgatacatgttctaatttgaaaatagacatgtctgttatacaacttctgtgctttcttacatcactgtctgctttaacattcaacagagctgagactccagaattccgaatacaaaccgaaatccttgcaccagcatagagaacaccggtgattaatttgccgacaaaaatatactcgaaagaacatgggagtactataccaggacacttgtattggctcagcgtgaaccatactcgagtagctggccggctcacgattggtaacaccaatagataggaaaaactgcttgtggcgacgagcgcgtatcggtgttgttcttctgtagagttcaccatgggatatggtgactgggattacggcggacctatacttggatatagcccggcgagccgcc

SEQ ID NO: 21166 - DNA, 161 bp, Oryza sativa
  unsure (1)..(161): unsure at all n locations
  Clone ID: PAT_MRT4530_26463C.1
aatctagccccatgcattgcaggctaggtaangtgtccacagccaacatccgccaccacacaatcaaaccggcaaccgcaccccaacacaccgcgcatgttccacacacagggtaacacaccagcatcacagctcagctcccaaatggctcccattgggtg

SEQ ID NO: 21167 - DNA, 497 bp, Oryza sativa
  Clone ID: PAT_MRT4530_26464C.1
gattcaacgtataaataccatttactggagacccaaatatttaccaactccggcagacaagtgaagcccaagcccataactggacacactccttgtgcaaataattatcatggaaacacgccaaacttggcctggggcacttaacacatacattaccctattgatgaagaccagaattgcaccggaaaacacaataattggcctctaaggccaaaatccctgtgctgaactcaattaaatgatacaatttcagccacctcgaatacggatctaaaggaatacatcgccattatctctgcataataataaaccactggcttgcaatgctatctctgctgccccgggcgcgggcctaacaccacctgatggtggaaggccaaccgccacttttaaagcctggaaacctccccgtccagctccacttagtagatccaatcataacactgcgaaagggcagtcctctattgaaaaggcccccaataccaagctttttaaca

SEQ ID NO: 21168 - DNA, 1652 bp, Oryza sativa
  Clone ID: PAT_MRT4530_26465C.1
cccgggctgcaggaattcggcacgaggcctcatctctcctcctcctccctcctccatttctccaatccttttcatggcggatttcgcagtaaactaatcgaaagaggaggctagttaatctcgctgagtcgctgctgcggcggctagtggcgaggcggagggggagcttcgttggtgggtaggtggtggagatggtggtggcggcggggcacggcgggcggcggaggcgggcgtgggggtgggcgatgagggcggcggcgagcgccgtggtgtggacggcggtggtgcagctggcgtcgatcgccgggctgtggaggccgcgggtgctcgccgactgcggcggcgggggcggcgccgccacggggctcgccgcgctcgccggcgaggaccgcgtcgcggcgaggctgtcgccgccggcgctcgtgcccaggagaatttataagagcaatggctatttactggtgacttgcaatggaggactcaatcaaatgcgagctgggatatgtgatatggtgaccatagctcgctatttgaatctaacattagtggtgcctgaactggataagaggtctttttgggctgactcaagtgaatttggagatatctttgacgtcagtcacttcattaattcgttaagagatgagctgatgattgttaaggaacttcctatgaaactcaagttaaaaactaagagaagactttactcaatgccacctgtgagctggtccaacgagacatactatctaaagcgggtattacgtcttgcaaggaagcacaaagtgatccatttcaataaaacagatgcccgccttgcaaacaacggtcttcctgtcaagctccaaaggctgcgttgccgtgtcaactttgaggctttgagattcaccccacagattgaggcccttggacgaaaacttatctccacccttcaaaaaagtgggcaatttgttgttctacacttacgatatgaaatggatatgctttccttttcgggctgcacacacggttgttctgatgaagaaaccgaagagctcactagaatgagatatgcatatccatggtggaaagaaaaggagatagactctgaggttaagaggtttcagggactttgtccccttacacccgaggaaattactctggtgcttaaagctctaggatttaaaaaggatacactgatttatatagcctctggtgaaatctatggaggtgaaaggcggttggcagctttgaaggctgcatatcctagattggtacggaaggagaaacttttatctcctgaggaattgcagccattccagaaccactcaacccagatggcagcactggactacatggtttcaatagcaagcgatgttttcatccccagttatgatggaaatatggcaagggttgttgaaggccatcgcagatacacgggcttccgcaagaccatcctattggacagggtgaaacttgttgaacttttggatagtttccaaggaggtgcaatgtcctggaatgaattctctgctgctgtgaagaaggcacaccagcatcgcatgggtcagccgacagaaagaaaggtcatccctggccggcccaaggaagaggactatttctatgctaatccccaagaatgccttggttcaagggagggattaagagatattttgtga

SEQ ID NO: 21169 - DNA, 5095 bp, Oryza sativa
  Clone ID: PAT_MRT4530_26466C.1
atggaccatatagctgaagaagagactgtgggagttgcggaagaccctggtttggctgatgttggcaaggctgatgagaccaaggaagaaggtggtggtgctggagtgcacttggatgaaactagggttgcagtggatgatcccacggaggtgcgtgcttcgcagattgacgatggtacggctatggtgtccgtattaggtggcgatggcgatagctttgttgagcaagatggtcaggatactagcggcggcggtgcttgcaatgaaggtaatgagcctgaggaagatgctcgtgttcaggtgcgtttggatgatactagtgccgctgtggatgaggggggtgcttccttgattgatgatgttatgaatacgctccccgttggaggtgtggctagctttgatgatggtcctcagacggacaagaatgcgcaggatgagggggcgcttatagatgtagtttcctcaactgtgctgaatgatgcgagcatagatcttgtcaaagctagtgatagtgtctcggaggaaggcacagggatggatatacttgtccaaccgggagaggacattaaggaaatggttacaatagcctgtgatgcggccacagatgacgagggcaggaaggtggatgcagtttccagctccagtgatcgcaacgaggaagtggttggtgcagctggtcttgatgagacagatgaagacatgcgattgggtacagttggcctgtctggtgatgacaatgtggcaaatgaggctgctgccgcagctgctggtggtgcagatgatgaggacttgaagatggatggggtcattaccgccggagataaggatgtggaaaatggcaaggctgacaatgctgatggtgttccggaagtgaatgtagttgccattagtagagataatagtgcggaaaatgaggctgctgcagctggtgatgatggcgcagatgaagagggcattcagatgaatgtgctaaacacaactagaggtgagggtgaagaagatgatgaggctgctcaaaatgttgttgaatatgctgttgatggtacagaagaactggaaactataggcctgactggagatgataaggcggaaaaagaagctgccccagctggtaacaatagtgcagatgaggagggcatgcagatggatgcggttaccacaactggagctgaagatgaagatggcaaggctgatgaaaatgttgttgaagatgatgatggtgtttcagaagaagctgtggctgacacagttggtgaggatatccctgaagaagatgcagtgcagatagatgaggacgaggatgatgatgacgtgcctccaccattgacaaggaaaggcggggggcgccggaagcgaggtcgtgcatcttccaaggctcaggttgtggtgaaaccacctgttaggaagaaggatgatgaggaagtttgcttcatttgctttgatggtggtgaccttgttgtgtgtgatcgtaggggttgtcctaaggcttaccacccttcttgtgttaatcgggatgacgagttcttcaaatcgaagggtcgttggaattgtgatagtgggatgccggatgtagattttgacgacaaaacaagctggtggtatttgttcaaggattattggttgaatttgaaaacaaaattaccattgacgtttgaagaaatatcagcagccaagtctcaaaagaatggttcttctttggttattcgtgacaatgatctcagtgaaccacatgatacaaatgatgaagaagagggtaattcagacagctcatctgtgcgccatctagaaggcaattcaaagaggaaaggaaggaagcgatcaaagcaagctgctaacgatgacagttctgtagttaaagatagcactaggaaatctacaaagcgaggcctgacaggtggccgtgatactaaaagttctacagggagaaaggttagaaaattgtccaagcgtgctttgagcagtgaccatcgaccaagagaatctgaaagcgtagggacatctacatcgtcagctgaagagaccagttgggcttcgaaggagctcttggattttgtagcaaatatgaaaaatggtgacaaatctgtgctgtcccaatttgaagtccaatcccttttacttgattatattaaacgtgaaaacctccgggatcctcgcaggaaaagtcagataatttgtgattctatgctcaaaagcctttttgggaaagcacgtgttggtcattttgagatgctgaagcttcttgaatcccatttcctcatgagcgaggtctcgccagttgaaattgatgacaaccatggtggtgttgtagaccctgatcctagtctggatgctgatggcaacagtgaagcatcaatggtgatgagctcagaaaaaaggaaaaaatctcgcaagtatgaccagaaagctctgcaaacaaaccttgacgactacgcagcaatagataaccataacatcagtttaatgtacctgcgtcgcaacctgttagaagaattgatcagtgaagttgacacatttgatgagaaagttcttgggtcatttgtgagaataagaatatctggaacaggtcaaaggcaagacatctaccggctcgtgcaaattgttggcacaggaatagcgccagaacaatataaatgtgggaaaaagtcgactgatataacactggagattctaaacttagacaagagagaggttattactattgatataacctcaaaccaagagttcactgaggaggaatgcaaacgcttacggcaaagcataaagtgtggattcattccaaggctgacagtgtttttttggcatatgtgcacagtttcgctgtttctaaactatcttaccattcagggagaggtttatgagaaagcaaaggttctacaatctctcaaagtcaacgattggattgaaatatttacgcttagagaatgtgtagagaagctgaagcttctaagtacccctgaagagcgtgttcgtaggctgaatgaagaacctgaagttcatgctgaccataccatggatccagattatgaatctccagaggaacaagagcaggatactggaagaagcagcttcaataagtcaagaggatctttctctaagaaagataataatcctgtatctccaggtaaaggagagggtaggagtcctgcacaaagagatttaaaaaccaactgggagtctaatcgaaacacatggggcgaatccagtacacatatcgagtcaccccttggacgcagacctgcattttcgtctcacggtgaaagtgctggttacacaagtaaatcagatagcccaaacatcggtacacacgcagttaaagtgggagctactgcaggagccaatatagggtcagggggaacacatgcatcacagtcagttattaatgagtctgaaaaaatctggcagtacatggatcctaccggtaaaatccagggtcctttctcaatagtgcagttgcggaaatggaatggcagtgggtacttccctccgaatttaaaaatatggaagtctactgagaagcaagatgattcaatattattgacagatgctttgctcgggaggtttgagaaagacctaccgccgtgggaaccgccagttggaagcagttcagatgttgatggtaggccccgtaatgattcccttcttgaggaaggaacaagagctggagaacaaccttcaaaatcagcagttctaagtagcacacagtctttctcaggaagggctggtcagggaaacgatgcggcaaatcttggaccagccactatccaatctagtacacaaggttattatggaatgcaaaactctcaagcagcgtatgcagtccaacaatctcttagtggaagttggaacgcctcaagtcagtttggaactgcaataaatcctgtgacactttctcagcctgccatgggtagctttgtagttggacaaaatgcagctttaggaagtgcaggtcagctaactcctgtaccaggtcctgcgacagtgagtgcagaagtagttaattcacagttgcagtcccagaaccagatagcatcttttttatcacaaagtgatggcagattagctgatggaaacgattcaaagttgggggaagatgcttcgcgtgaaaggatgaggtcatcgggtgaagatcttggactatctggtgcacaacctggaggggtgcaatcaaatactcaacaacttgaagatgcaaggaaccagttacaaactgatgcttccaactcggtaaagccatctcagctgatatcaacaccatctgctgaagcagtgcagccctcgtccacagccatggctggtggtgataatcaaaacactgcttgggcacaattggcaagcacatctggccaatctcagcctcaggcggctggaaatatgacctggggagctactctccagggtaatgcaaacatgggctggggaatggttggacagaacaacatgaacatgtcttggggaggaacagcacaaagtgccacaggctacaacatgggtttggctatgcaagcacagccaaatgcagttccaaacatgggctgggttacaccaaatcctggaaacaccaatatgaatatgatgtgggcaactcaaggccaaggcactccaaatgcagcagcaatggtgggaactcagatgcaaggagttgcaatggctccatggggggccattgcacaaggaaatacaaattcttatcctggttgggggggccaagttggaaacatgaaccaaaatgttggatggggtgctcccatgcaggttaatccaggtcccagtactggaaatgggacaggccaagataataacaatatgaactggaattcaccaagcgggaacccaaattggaataaccagcagcgagacaatggaggcaggcattctgggcatggtggtgattttaatggcggtgactctggtgggaggtcttggaggtcgcagtcaggtggtgatggagggtcgtggaggcctaaaaggggagtctgctattctatactcgacaagggatactgcaagaatggtgagcactgcaacttttcccattcaataccgaatgatggatatccatcaagaaacagtcggcacttcgataggcaaaattcag

SEQ ID NO: 21170 - DNA, 148 bp, Oryza sativa
  Clone ID: PAT_MRT4530_26467C.1
tttttatactttaagaggatgatcatattcataaatgtcccgtgggtgtggtaaaaggcatgccaatcatctcagcttaggagtgtccaccagacaaaagtgggtgtttgtaaggcgacttcgccagtgccgctattacatggtcatt

SEQ ID NO: 21171 - DNA, 5712 bp, Oryza sativa
  Clone ID: PAT_MRT4530_26468C.1
gttgggtttcttttcggggccgaccatctcccccggggctgttttttagtacccatttcctacctgacaccaggatttattcagaatgtattactgcttgttccgaagcaagaaacagaagggtaggatgcacatgatttataactacaactgttctacatgacaattctgaggagatgcaactcgctacaatgcaccaagttcagaaacatgcatatgtgatatggatgtctactgaggaactacaacaaaagggaggatacaacagatgaaactgagaacggatctactgcctctctcttgattgtgacctagtatcagtcagcctgtcatcatgcctgtcactatccctgccgttgtgcctgtcatcacgcctctcgttgcctgacgattgccgatcaaactgccgatcagtcctctcgttttgcctgtcgtaccgtctctcgttacctgaattttgcctatcgaagtgccgactgtttcttgatggatatccatcattcggtattgaatgggaaaagttgcagtgctcaccattcttgcagtatcccttgtcgagtatagaatagcagactccccttttaggcctccacgaccctccatcaccacctgactgcgacctccaagacctcccaccagagtcaccgccattaaaatcaccaccatgcccagaatgcctgcctccattgtctcgctgctggttattccaatttgggttcccgcttggtgaattccagttcatattgttattatcttggcctgtcccatttccagtactgggacctggattaacctgcatgggagcaccccatccaacattttggttcatgtttccaacttggcccccccaaccaggataagaatttgtatttccttgtgcaatggccccccatggagccattgcaactccttgcatctgagttcccaccattgctgctgcatttggagtgccttggccttgagttgcccacatcatattcatattggtgtttccaggatttggtgtaacccagcccatgtttggaactgcatttggctgtgcttgcatagccaaacccatgttgtagcctgtggcactttgtgctgttcctccccaagacatgttcatgttgttctgtccaaccattccccagcccatgtttgcattaccctggagagtagctccccaggtcatatttccagccgcctgaggctgagattggccagatgtgcttgccaattgtgcccaagcagtgttttgattatcaccaccagccatggctgtggacgagggctgcactgcttcagcagatggtgttgatatcagctgagatggctttaccgagttggaagcatcagtttgtaactggttccttgcatcttcaagttgttgagtatttgattgcacccctccaggttgtgcaccagatagtccaagatcttcacccgatgacctcatcctttcacgcgaagcatcttcccccaactttgaatcgtttccatcagctaatctgccatcactttgtgataaaaaagatgctatctggttctgggactgcaactgtgaattaactacttctgcactcactgtcgcaggacctggtacaggagttagctgacctgcacttcctaaagctgcattttgtccaactacaaagctacccatggcaggctgagaaagtgtcacaggatttattgcagttccaaactgacttgaggcgttccaacttccactaagagattgttggactgcatacgctgcttgagagttttgcattccataataaccttgtgtactagattggatagtggctggtccaagatttgccgcatcgtttccctgaccagcccttcctgagaaagactgtgtgctacttagaactgctgattttgaaggttgttctccagctcttgttccttcctcaagaagggaatcattacggggcctaccatcaacatctgaactgcttccaactggcggttcccacggcggtaggtctttctcaaacctcccgagcaaagcatctgtcaataatattgaatcatcttgcttctcagtagacttccatatttttaaattcggagggaagtacccactgccattccatttccgcaactgcactattgagaaaggaccctggattttaccggtaggatccatgtactgccagattttttcagactcattaataactgactgtgatgcatgtgttccccctgaccctatattggctcctgcagtagctcccactttaactgcgtgtgtaccgatgtttgggctatctgatttacttgtgtaaccagcactttcaccgtgagacgaaaatgcaggtctgcgtccaaggggtgactcgatatgtgtactggattcgccccatgtgtttcgattagactcccagttggtttttaaatctctttgtgcaggactcctaccctctcctttacctggagatacaggattattatctttcttagagaaagatcctcttgacttattgaagctgcttcttccagtatcctgctcttgttcctctggagattcataatctggatccatggtatggtcagcatgaacttcaggttcttcattcagcctacgaacacgctcttcaggggtacttagaagcttcagcttctctacacattctctaagcgtaaataatgaagaaggatattcttttctacggcccatatcgcttgcacggtcacgaagatgcccaagccgcattttttcactttcaatccaatcgttgactttgagagattgtagaacctttgctttctcataaacctctccctgaatggtaagatagtttagaaacagcgaaactgtgcacatatgccaaaaaaacactgtcagccttggaatgaatccacactttatgctttgccgtaagcgtttgcattcctcctcagtgaactcttggtttgaggttatatcaatagtaataacctctctcttgtctaagtttagaatctccagtgttatatcagtcgactttttcccacatttatattgttctggcgctattcctgtgccaacaatttgcacgagccggtagatgtcttgcctttgacctgttccagatattcttattctcacaaatgacccaagaactttctcatcaaatgtgtcaacttcactgatcaattcttctaacaggttgcgacgcaggtacattaaactgatgttatggttatctattgctgcgtagtcgtcaaggtttgtttgcagagctttctggtcatacttgcgagattttttccttttttctgagctcatcaccattgatgcttcactgttgccatcagcatccagactaggatcagggtctacaacaccaccatggttgtcatcaatttcaactggcgagacctcgctcatgaggaaatgggattcaagaagcttcagcatctcaaaatgaccaacacgtgctttcccaaaaaggcttttgagcatagaatcacaaattatctgacttttcctgcgaggatcccggaggttttcacgtttaatataatcaagtaaaagggattggacttcaaattgggacagcacagatttgtcaccatttttcatatttgctacaaaatccaagagctccttcgaagcccaactggtctcttcagctgacgatgtagatgtccctacgctttcagattctcttggtcgatggtcactgctcaaagcacgcttggacaattttctaacctttctccctgtagaacttttagtatcacggccacctgtcaggcctcgctttgtagatttcctagtgctatctttaactacagaactgtcatcgttagcagcttgctttgatcgcttccttcctttcctctttgaattgccttctagatggcgcacagatgagctgtctgaattaccctcttcttcatcatttgtatcatgtggttcactgagatcattgtcacgaataaccaaagaagaaccattcttttgagacttggctgctgatatttcttcaaacgtcaatggtaattttgttttcaaattcaaccaataatccttgaacaaataccaccagcttgttttgtcgtcaaaatctacatccggcatcccactatcacaattccaacgacccttcgatttgaagaactcgtcatcccgattaacacaagaagggtggtaagccttaggacaacccctacgatcacacacaacaaggtcaccaccatcaaagcaaatgaagcaaacttcctcatcatccttcttcctaacaggtggtttcaccacaacctgagccttggaagatgcacgacctcgcttccggcgccccccgcctttccttgtcaatggtggaggcacgtcatcatcatcctcgtcctcatctatctgcactgcatcttcttcagggatatcctcaccaactgtgtcagccacagcttcttctgaaacaccatcatcatcttcaacaacattttcatcagccttgccatcttcatcttcagctccagttgtggtaaccgcatccatctgcatgccctcctcatctgcactattgttaccagctggggcagcttctttttccgccttatcatctccagtcaggcctatagtttccagttcttctgtaccatcaacagcatattcaacaacattttgagcagcctcatcatcttcttcaccctcacctctagttgtgtttagcacattcatctgaatgccctcttcatctgcgccatcatcaccagctgcagcagcctcattttccgcactattatctctactaatggcaactacattcacttccggaacaccatcagcattgtcagccttgccattttccacatccttatctccggcggtaatgaccccatccatcttcaagtcctcatcatctgcaccaccagcagctgcggcagcagcctcatttgccacattgtcatcaccagacaggccaactgtacccaatcgcatgtcttcatctgtctcatcaagaccagctgcaccaaccacttcctcgttgcgatcactggagctggaaactgcatccaccttcctgccctcgtcatctgtggccgcatcacaggctattgtaaccatttccttaatgtcctctcccggttggacaagtatatccatccctgtgccttcctccgagacactatcactagctttgacaagatctatgctcgcatcattcagcacagttgaggaaactacatctataagcgccccctcatcctgcgcattcttgtccgtctgaggaccatcatcaaagctagccacacctccaacggggagcgtattcataacatcatcaatcaaggaagcacccccctcatccacagcggcactagtatcatccaaacgcacctgaacacgagcatcttcctcaggctcattaccttcattgcaagcaccgccgccgctagtatcctgaccatcttgctcaacaaagctatcgccatcgccacctaatacggacaccatagccgtaccatcgtcaatctgcgaagcacgcacctccgtgggatcatccactgcaaccctagtttcatccaagtgcactccagcaccaccaccttcttccttggtctcatcagccttgccaacatcagccaaaccagggtcttccgcaactcccacagtctcttcttcagctatatgtgcttcaacgacaacaattccaacaattttgtggtcatttgttcgtgttccatccatcgacaaatttgctgacaatgaggtcagatacaacaatggag

SEQ ID NO: 21172 - DNA, 1170 bp, Oryza sativa
  Clone ID: PAT_MRT4530_26469C.1
aactagtggatcccccgggctgcaggttttttttttttttttttaggcataaaacaatggcaattcctctactctttatttgcatggttacttcaactgcttgccctattaacagcctgaggtgtgtgttcttcagtaatgtgatccattatatacatggttatataactacacaagtaaggtgacaacatggatctgctggatggctactacttctacataacataaccactatatgcactgacaagcaggttggatcattagaacaacaatctggaattccagtaccccatggataaaaaactccttggagcggttgaatgcttgatccatctgcgtaagtgaatgaaagaatgtgtctcactctcgcttgccaggggcagcagggctcagagacatttcgatttcctcaagagaacgtcctttcgtctcgacaatgaaattgtaggcgaaaagtgctgacaagaaggatactccaccaaaacctgcatagacggctccaacgcctaacttcttcacaagctccaggaaatacagtcccaccagaaaattgcatatccaatgtacagtgaagctgaagcccataactttcgagcgtgtccgagcaccactcagctctggtatgatgattcctgtaactggtccggctccaatggcgaatgtaaatatgtacaacagagttccagtaattgacaggccatggctaactccttcatcaagggggaagctaatagcatatactattaggaacattgcaagtgccattccaagatagcttcctgtcaagagtttctttcgaccttgcttatccatcaaaattgaagcaacaattgcccctgcaaaattagttattccaacatataggcttgccaagataccactggtaataccaacatcatggaatgttaatgatgagaagtacagaacgccatttatgccagcaaactgttgcagaaagaaaagggaccctccaatcagtgcaactgcatatacatcagaaattaagcttcggccgctggggtcgaagaagacgaaggagagagggaggagaggcggcgggatccgcgagcaggccgcagtcgccgatgtccccatatgttctacaacatttctggcatcatctattcttccaaccttggcaagccagcggggactctcaacagcaaattg

SEQ ID NO: 21173 - DNA, 602 bp, Oryza sativa
  Clone ID: PAT_MRT4530_2646C.1
ttaaatcggattaaaacacttatatggattttaattgaattatgacgcaataatgaattatttttgaaaaggaaaagaatgattattgcgtcagcggctagggtttgcggtggatcgggtgcacggcggcggttcacgggaacggacggccgagatcaaccctgtccaaaaaggacggccgagatcgaacggtccacgaccggctcacgggagagggcgacgatgacgtcggcggtgacgtcacctccggcggcggcggctcagacggctcggacggcgcacgctcgccggcgaatggcgaaggggcggacgaggacggcggcaacttggcgatcccgacgatggccttcccgagtgacgacggcgactggaacggcggcggcgcacggctggagcgacggcgacgacggcggcgctaggttacacggcgctagagcgcttccgcgacgagagacgaaggcgaaggtggcggcgggtagaggagagctcgggggtccttttaaaggggctagcgagcggcgacggtggcccacggcgaccggcggcgagaaggaaaggtcggattggagggagaaaagtcgatccgaatcgaactcgaatcc

SEQ ID NO: 21174 - DNA, 270 bp, Oryza sativa
  Clone ID: PAT_MRT4530_26470C.1
gagctctatcctgcctcccttccttaacagcaggttgaatgagcaggctcacctttcgcaaggaatgagatagttctgtcaagtctgagctgctgagcttggattgagcatgcaagcatagattttgcagaagacttgcagccacatatttgtatctgtcatcttggatcatggcagtgagctctctaatgaatgaatatcctggttctttcaacattgctgagcaatcgttgatactttccatcgctagcatggctagtgcttgaccag

SEQ ID NO: 21175 - DNA, 1647 bp, Oryza sativa
  Clone ID: PAT_MRT4530_26471C.1
atggtcaggtcaggggaaccaccaagtggggggagcgttgtccgacgtcgtcgggcggcgatccaccggaggccacgcctcgctggccatgtcgtccatctcgtacctgcccatgtcggtgaacgagtagcgcggcctctcctgcaccgccgccgacgccgtcgtgtcgtggacgaagccctcgtcgaggaagtagatgatggcgtcctcgaacccggggaaccgagcggcctcgaacgatctggagcagcctttccccacgaacagcatccgcccctccaggtagtcgacgggcaaccaggtggcgcgaggtcgcccgctgatggcggcggcgggcgtcagcggcatgacatggaacctgaacacgcggagcacctccgtgccgccctcgttgtagatgtacctcgcgaccatcagcagctggccccgggactccacgaggtagcgcgtgatggatccgttgcctccgatgaagcccatgtcctcgaggtaatcgtcgcgccgcagcatgttgtactccacgcggcgcatccgcatctggttgttggtcaggcggccgtaccccggccagtacacgacgacgccctcgtcggcggtgacgaagtagaagcccccgttgtagtagacgacgtcctgcggctggttcagcctcgggcccctgtgcgggaaccagcatttgctcccctggacccagaacgcgacgtcgagccgccgcgacacgaggacgacggcggcgagcatgtagggccgaggagacgacgacggcgtcggcggcgaggcggagagggtggcgaagcgcgcgaccaaggggaactgcttgcccgagggggacacgatccccggcgggagctcgacgcggtggccggagttgaggttgtagagcgcgtagcggtggctggagtcgagcgcgaggacgaaccagccgccgtcggaggagccgcagaagcgcgcgacgcggacgtcgggcgggagcgggagggggtggctcgtgcggccgatccagctgtagaaggagggcgtcgcggagctggggaagatgagccacggcagctggggcgggagcggcgggagctggggcgccggcggcggggggcgcggcccctcccgcacggcggcgcgccactgcctgttgacgcaggccatgcggacgcggtcggcgcggcaggggaggcaggcggtgaagccgaggaggacgttctcggggaggtccccccacttcgccctgtccatggcggccaccgtcggcaaccgccgggccgccgccaccgcgccacgcccgcggcggcggcgatagtaccgcgtcagggcgggtggtgccttcgcttgcacgaaatggaacgcgaaccgaagaggcccgaacccggccatcgatggattccgccgcttcgctcgccgctcggactcgcgcggccagcggcctccgcttcgacacggagcagctgcgcgttcggccgctcggggggctcgcggcggtgggtacctagtccggaatcgttgtgtgttgccaagcggcgtggtgtcgccgaatgcgctggcgctgcggcggactctccccgtggagcgcgggctcgccgggaaggcgctcggcgaaatggcggcaaggcgctccactttgttgcaggccggaggctgagactgagagctggt

SEQ ID NO: 21176 - DNA, 345 bp, Oryza sativa
  Clone ID: PAT_MRT4530_26472C.1
atggctctaattggggcaaggtcaaaagagaacatggagaacaagtctttgagattccattcctatactctacccagcccagtggtggccggacagggcttgattcttgcattttcaagaagattcgggaaggagaaaattaggagagagctcagctcatgggagaacagacaagggaggaagaaaggggaagaagatgaaagggtttcctgcttgccttatgaacctgagctgggtgcacgacctggaggtgggatggggcttggtggagagcctaggtcagtgacaggtggggccaagtcgagctgggtccacgggacagataaaggaaggttagaaacatag

SEQ ID NO: 21177 - DNA, 138 bp, Oryza sativa
  Clone ID: PAT_MRT4530_26473C.1
atggcgccggcggcggacggcggtgctatgcctggcggcggcagcactgcattcagcatccgcctccagacccgcccactccccatctgcggtgaccttctcaagagctacgcgctcggcaccgcaccaagctactag

SEQ ID NO: 21178 - DNA, 972 bp, Oryza sativa
  Clone ID: PAT_MRT4530_26474C.1
atggagaatttcgatgatggatgttcggagaggaaacatgaggagaataagaatcaggatatagggaaggagtctggctttggggactctggaaacagttccactttgggttctggtggcctgggcattgtgaggggtgggccttctgtacctgcttctcaattaaatctgatacctgaatctgagggcttgactacgtctgatgaagagtttgatggcttagatgaggatactcttatggttgagaaggcaaaggagtgttatgatcaatattctaatatctttggttgctctcacttctcgcacaagcgcgacatagatggagcccgagctcagagatggagcggcggcagcggatggggacggtgcccgagcgacggaagcggcggcgtcggatggggacggagccggagcggcagtgacggatggcggcggatgtggacggagcccgagagcggtggcggcggcggatggattgggacggagcccaagcggcggcggcggatggcggtgacggatggggatggagctcgagtggaggcggcagatgggggcggagcccatgcggcggtggtggatgccggcagcggatgggggagggagggctcggcatggctcttcaccgtctcggccacaagcctcgttccgccgctgccatcctcacgctcccggaactcaaccttcacgcgtgcagtggccgtggccacgttgtcgtcgaacctgatggcgcggccgaattcgtcgtcaccgtcttgccgagcaccgcggcgcggccgccgagctcagagatggagcggcggcgacggattaggatggagccggagcggcagcggcgcatggcggcgatggatggggatggagcctgagcggaggcggtggaagagggcggagtccatgcggcggtggtggatgccggcagcggatgggggcggatgggggagaaagatgagaagaaagggtcttagagactga

SEQ ID NO: 21179 - DNA, 334 bp, Oryza sativa
  unsure (1)..(334): unsure at all n locations
  Clone ID: PAT_MRT4530_26475C.1
accgcctcctcctcctcgncctcctcctcctctccccggcggtggccgccgcctcantccccggcgaggaggagccgctgatccggcaggtggtcggnngcggcgacgacaacgagctggagctgaacgcggagccacttcgccagcttcgtccagaggttcgggaagtcctaccgtgacgncgacgagcacgcgtaccggctctccgtgttcaaggccaacctccgtcgngngcntcgtcaccagntgctcnaccccttcgnggagacggcgtcaacaagttctncganctnaannnggtcgagttncggcgggtctancttgggncttcgaa

SEQ ID NO: 21180 - DNA, 700 bp, Oryza sativa
  Clone ID: PAT_MRT4530_26476C.1
ggtcagatgttgcatgacgtaaaggaggactgcaaaagtgaaaaggagatgcagaaactagagcgcatgtcagcggaccaaacatcgttgtacccaggttgcgaataggggcacaaaaagttgggtactacgttggaattcttgcaatggaatgccaaaattggtctgagtgactaggcatttggcgagttattgaagctcgtaaagaacattcttcctgagggaaacgaattgtccgaaacaacgtacgaagctaagaaggtagtcttccctcttggactggaagtacagaagatacacgtatgtccgaacgattgtatcctctatcgcggtgaggagtacgagaacctagaagcatgtccggtttgtaaagcactacgatacaagattagacgagatgatccaggtgatgttaacagacatccttcgaagaagtgagttcttgctatggtgatgtggtatttccctataataccatggctcgggcgttggttcaggaacaaatcgcatgctagaatgatgcgctggcatgcaaaataatgttaacaagacagggtgctgagacaccccaccgacggaacatttgaagacttcggagaggatgcatgaaacgtaaggttcggtttaagtatggatgacatgaatctatttggaagagatgagcaacagccatagcacctggcctgatgagtacctaaga

SEQ ID NO: 21181 - DNA, 1065 bp, Oryza sativa
  Clone ID: PAT_MRT4530_26477C.1
ctatgggctggttccgccgccacgcggcagcagcatcggcatcgccatagaggtggtgtctcttcggcgctggctcgtgcccacctgccgccaccgcacaagaacgcacggttcccggaccccgtcgctggtagagtcgaccacagaagggggaacaccaccatggcgcacagacggtgcagtgcaggaggcagcaaccaggaagggagtaagagcatgccacttgtcgtcgtcgccacgggcgtcgcgctgtccgacgcggtgttggtgctccttcgttgtcctcatggtgttcctggcgtgcgggaggttccagaggagggccatgccgggtgcttaccaaagcggcacaacacaaggttagcttcgatcctggcccggacctgttctacctggacgtcgttaagccgtacgtcgaggccgaccatggcgacgacgagcggtgttgtaaagacgttgccagagttggtcgggctgaggaaagagcccaggtgggaggataagacaacggagttgctatgcgcctccgccacggacaagcgtggcctcgccatcgccgcggccaacatcacgatgcgcaacgtgacgtccacggtacgcgtcctcaccgagctggtagaggagctcaagctctgcatcaagtactaccaggacatggacgatctcgtggccagcgccatcgacgacctgcgtgtcgggcgccccgccgttacctcgttctacaaactgcaccgggcctcggacgagcccggcaactgtgatataatgttgtttgagggaagcgcccacaagaacccggtgagctcggagaacatgtacaacgaggccatttcaaagttaaccagcgacatcgtgtaccagttggtcatcgtgttagttcgagttcttctcgttatcatccatcttttactgctcaaggtgtccgtcggcttcgacgctcctcgtcttggtggtgtgatctgggaaaaaaaggttgcgccaacctttctcgatttctccgacgagttctatacaaaggaggtggtcttcttcttgacctccagtgaagatcaattacacggctga

SEQ ID NO: 21182 - DNA, 858 bp, Oryza sativa
  Clone ID: PAT_MRT4530_26478C.1
ccacgcgtccgcagagggcaatggcggcatctgcaacctccaggaggagaaggaagatgaaccatcaatgcaattcgaggaatctgagagcatcagtaccccgtccattgaagaccacttacacgagcagcttcccgatccggttgatctgaaacccttggacatgtctgcttctgattcagctctatatggtcagcaggcaccatcgtctgacattccagagcaacaaagcaagaatgaagaagttaaggagagcttctctgaagataaagatgttgtggtaggcaatgagctgcataatggaggccaaggtgctgatgacattgcaaagaacataacaggcattgtcaaggctgatgatcaatcccagcttgcagagaaggaagaggcgagagcgaaagtggacaaggtttggagaaaagatgaaccgaagagcaacgatgtgattgaggaaaccaaaagcaaactccttgaggagaggaagagcagggtgaaggctctggtaggcgcgttcgagaccgtcatgtccttcaaggaatagtgctcagcctacaatgcccatgcccatctcaggatgagttactcctgccatgaaaatatatccaatcacgagttatgttcatatgatgagttccttggttcattgtattcgatgtggtaattttttttccctcaatggtcattgcatttgaatgtggttgttgctgctgctgttcatgtagaaattgaatgaaatgttgattcttgttgattgggaggggaatttgattttgttactcatgctttgcaagcttcctgaagtgaaatatgttgacaggaaacatgaggtaaaatatgcttgttttttactgaaggttg

SEQ ID NO: 21183 - DNA, 2327 bp, Oryza sativa
  Clone ID: PAT_MRT4530_26479C.1
atggcgacgtccaagaaggatcctccgagcagggacagggctgccaggatgtcgccgaacctcaagcgatcgtcaggcattgaggcctcctctgccgccggctatggcccgcggagggcccggtcggtcccgagctcgccggaccgcaagtttggcgcggcggcggcggcaccagcggccgcctccggctccccggacgtttacaggccgtcgctgtctgccgctggccggtccacctcggcacggtctgtgtccggcagcagcagaacccagccattcccaaagcccactctcgccagagtgaagtctgaaagggccaccaccgccgccgcagcctcgccacggcctccagcgctggcaccgccagcgagcaattcgctcaaggacatggccaggacagcaccatcagcgtcttcgaaagcgccatccaccttgcagaagagcaaactgtctccaaggcctagccctgacaaggcggtggcatctctgaagccgatcacccagagatcgccggcttcagtgactgcaagaggtggaaggactacagtagtgtcgtcatcacgtgtaccgggcaacatcgctgcaaagaaaagagcagaatctgcaaatggtggtagtgcaagctcaaaggcaagaagtggtgctcctcagagggcaatggcggcatctgcaacctccaaggaggagaaggaagatgaaccatcaatgcaattcgaggaatctgagagcatcagtaccccgtccattgaagaccacttacacgagcagcttcccgatccggttgatctgaaacccttggacatgtctgcttctgattcagctctatatggtcagcaggcaccatcgtctgacattccagagcaacaaagcaagaatgaagaagttaaggagagcttctctgaagataaagatgttgtggtaggcaatgagctgcataatggaggccaaggtgctgatgacattgcaaagaacataacaggcattgtcaaggctgatgatcaatcccagcttgcagagaaggaagaggcgagagcgaaagtggacaagggtgaaggctctggcgatcacgggccagacggcaaggcggcggcaccgtgctacgccgggggtgtccaccgcatcgtcaaggtcggcctatccgagcggctggccgaactcagacagaggatggcggcgctcgccggctgccgtgacgtgtgcattcgctacgcgctacccggagagggcctcggccgcctccgcgacgtggcgaacgacggcgacctgtggggcctcgtgtcgctgctgttctgccacgacgcgtccaagaccggccgcgtccgggtcttcctgttcgccgtcgaggcgccgctgctccggagcgcgtcggcgccgtcgtcgttaccggcgctggtggaggaggacgccacgacggcggtgtctggtggtgccgtcacactggggttgccacgcagcgcgtcttcaccgtcgctggcgacgtcggactcgggcaccgccgtgaggatgaaggtgagctacggcggggagatcatccagaagcagcgcggcggatcagcggcggcatcgtgctactacgccgggggagttcaccggatcgtcagggtcggcctgtcggagcgcctcgccagcctccggacgcggctggcggcgctcgccggcttctccggctccgacgacgtccgcatccggtacgcgctcccgggagaggagggcctccacctccacgacgtggagagcgacggcgacctgtggagcctcgtgtcgctgcttttcttccacgaggcggtgatggccacctccagcaagcccaagcaaggccgcatccgcgtgttcctcttcgccgccgacgacgccccggccgcgccgccgctccgtcgtcgcagcgcgtcgtcgccgtcgttggtcgacgtcgccaagcatcagggcgcgttacccgcactggcggaggaggaggaggatatggacatcgacacggcggctgcgacttcgccggcaggtgtcagcgtcacccgcaccggccaggggatgcggcggagcgcgtcctcgcctgcgctggcgccgccgccgccttcggagtcgggcaccgcggcggcgacgtcgacgtcgtcgtcgtcgtcaggagatggcgtgcagtttgctccggtggtgtggggtgccactgatccccgtgtggccgtgtacccgttgttcacctgttgtgttccacgtggcatagtgaaaactgataacgagtttggagaaaagatgaaccgaagagcaacgatgtgattgaggaaaccaaaagcaaactccttgaggagaggaagagcatggtgaaggctcttgta

SEQ ID NO: 21184 - DNA, 763 bp, Oryza sativa
  Clone ID: PAT_MRT4530_2647C.1
ttatttttgaaaaggaaaagaatgattattgcgtcagcggctagggtttgcggtggatcgggtgcacggcggcggttcacgggaacggacggccgagatcaaccctgtccaaaaaggacggccgagatcgaacggtccacgaccggctcacgggagagggcgacgatgacgtcggcggtgacgtcacctccggcggcggcggctcagacggctcggacggcgcacgctcgccggcgaatggcgaaggggcggacgaggacggcggcaacttggcgatcccgacgatggccttcccgagtgacgacggcgactggaacggcggcggcgcacggctggagcgacggcgacgacggcggcgctaggttacacggcgctagagcgcttccgacgacgagagacgaaggcgaaggtggcggcgggggctagcgagcggcgacggtggcccacggcgaccggcggcgagaaggaaaggtcggattggagggagaaaagtcgatccgaatcgaactcgaatccacggatttccaaaccgaaaaagacgatgattccaaaagagaaaaggaagaggagatcgagaagatcatttcccctcaaacgattcggccggagatggaaagacgcggcagaggagagcggcggctcggcggactgggctgcgggccgacttgagccgactgggccggggagagagagaagaaagagagaggttttgggccgactttcggcccaaagccaaaacagacttttaaaaacctttttcaat

SEQ ID NO: 21185 - DNA, 222 bp, Oryza sativa
  Clone ID: PAT_MRT4530_26480C.1
tttgttatcttatgaaaccaagcttaattttgagcaatcaactcatttcctttttcattttggttcttccatattatcaggttagagcttggattctctttttttttttatcttgggagtaggtgcgtcttttagttatacatacttttcaagtttctgtggtacatatccaggaagagattatgatccatgtaaagatgcacacttctactgtactaacag

SEQ ID NO: 21186 - DNA, 318 bp, Oryza sativa
  unsure (1)..(318): unsure at all n locations
  Clone ID: PAT_MRT4530_26481C.1
aagtggttggtgnctggatatgacgtgttttcggatggaagagtgtgtgttgtgaaaatagatgagtggtgtgnactggcggccttctgtagcgctgctgtataccaggaataaccccactgcccccctgcccgtatgatggatgagctaggtgccacgatgtgagcgcccactgagatagctggaaagtgtctgataacctgttgcgttgtgtgtggatggaagnctgcagancaccaccaccacatggcaacccaccactgtaccacgtgtcgcgtgggcccccgaatgtgccctcaaaaaaaaaaaaaaaaaaaa

SEQ ID NO: 21187 - DNA, 622 bp, Oryza sativa
  unsure (1)..(622): unsure at all n locations
  Clone ID: PAT_MRT4530_26482C.1
ccggccggattccacctcaacagacctgattaagagctagcagccaatctcttccccttctcttcgctggtgtcactgtgtttctactgcctaccggagatgaacagtggcgctggtggtgctgggggagcagcagtagggaggatgccggcggggagcctccagtgggcacagtggaggctagcggatgagcgatgtgaactccgggaggaggagatggagtacatgcgacggttccaccgccacgaaatcagtagcaaccagtgcaactccttcattgcgaagcacgttagggcgcccctccaaaatgtaagcagtgataataatagcaagcatcatctcgtttttcttgaaccattattaggtcattatctattttgtttttttaattatattgnggattggggttgtactatccattgatggagttagattttattgttaattgttttaaatggtngatatatatgattttatcanttgattgaatttangaaaataattataattnaaatatgggttgataatgggtgaattttagcctttggagattttaagactgnngagaaaattacccaaaataccatcttttcgccatccctccctacctcctctcccgcaa

SEQ ID NO: 21188 - DNA, 315 bp, Oryza sativa
  Clone ID: PAT_MRT4530_26483C.1
aaatttaattgatacgaatatgatcgtcgatcgtaaagggcctttcccaccccaaaagctagtcattgaggtgaggggctcccccacttatatcttaggtcatttgcccttccacaaccaatgtgggactattcaacaatctcccccttcacacattggtgtccctcagcccttcaccgccccttcaccgtatccgggcccccaccggcccacggtccatcaggtatacgggccccgcaggcacccacggtccatcaggccttcacacggggtcaacccacacataagattgacccggatcccaactcacaccaa

SEQ ID NO: 21189 - DNA, 1584 bp, Oryza sativa
  Clone ID: PAT_MRT4530_26484C.1
cgttcgccacacttgtgggactgggaggcttatcgcacgccctcgtctccccctcccgtcgcctctcctgctccagctccacctccgtctctcccccgccagttctacgtcccggtcgccgcggttcagcctccgcgcatggggtgccagcgatgcccggcgccctgggctccaacgcctgcacggcccactgagcgggagcacctgcactggagagagtaagtactgacgtggtcttgagtgatgatgacattgttaacgttggtatcgaggatgaaatcgcttccgatgctgtagatgatgaggatgctgaagcaaatggaaaggattcgtcaggcactgatgatgatgattaggtgtcctggacagatcaggatcctcttctttccccgttagaaaataaacctattccttatcgtggttatgcacagagtagttgcgacaactgtgagatgggaaatgtaggatgccctagagccatacatcagcaaggagacggtggaacagcactggggagttcatcagaacattcacgtcgagaggctcaatggcatgattggtggcagtgagtgggaggggatgtcgctggggcagatgatgctatcctccttcaatgagggcagggaggcaccccatccccccttcttccatgctgcacagggactttggatcctatgatggcatgattcgacaatttatggatgctgcatcaactcaatttggttctggatgggtttggctttgttacaaaacaagcaagttgcctcatgtgaaatcaagaagcccaatcccatctgataattatggtagactggtcatctcaaagtctccgaatgccatcaatcctcttgtctggggtcactctccactccttgcaattgatctttgggagcatgcatactacctggattatgaggatcggagatctgactatgtctccacatttctagagaagcttgtgtcatgggaaactgttgagtccaggcttaagaaggccgtacaacgggcagtagaaagagatgaatatgttagcacaaagcatataaggaagcaacttttagctcgggcaaagagccaaatcagagctatgcctcagcaggtcaatggggatgcaagagagcagaccagcggtcaagagaagtccctaggggtgtgacaacggagccaagtaagctacggcaggtgggtcatgttgccgagttgaaccatggggatgatggacttgtaacacaggaagctagagcagctgatcaatcttcaaggtagcagtatccgaagattgtatgcacatactgtgggcaaccctttgcttaatagcaaatgttgtcgtacaggcagcttcacagtttctgtcgctgtcgatgaatagatctgtagttcgtgacactgcagcaaatacaagtcacaaacccagagtcatgtgcgagctaaattttgataggagtaattaggtttgagtatcatagagatagacaagaattagtcacttggagcaaatgagcctgacatcttgtattcctgtgctgtccatgtttgaatcctgaacttctgattgacaaaccaaagaaaattgtagttccgaag

SEQ ID NO: 21190 - DNA, 2226 bp, Oryza sativa
  Clone ID: PAT_MRT4530_26485C.1
atggcggagaacaacggcgcggtgcctcccggctgcaagctcccggcgggaggattcttcgggaggctgcacgtgctcgtcgtcgacgacgacgccgcctacctcgaggagctcaagcttatgctgctcctcgccggctacgcagtgacgggcaagacgacggcggaggaagcgctgaaagaggtggaccagaatccggaggattacttccacatcgtcatgaccgacgtccacatgtcaggaatggacggcttcgatctcctccacaggatcaacggccgggtccctgtcatcatgttctccgagggcgaagatgtggtgatggtgatgaggacggtgatgaacggcgcatgcgactacatggtgaagccgatgacatcagaggcgatcaagttcatatggaagcacgtcctgcgctggaggctcagcgccctccccgcgaatgcctcatcatccctgcagccaagcgatcacctggcggcggctctagcggctgtggcgccgccgccgccgccggcggtgcagctgccggccgcaccggcgcaggctgggaacagggatggcgaagctcatgaggaggcagagttgtcgacacagcctcctgcgctggtgccatctggcgttcaagaggcggctgcagcggtatggagcagccgtggtgatggacaagaggcgccgccgccggcggtggctgcggcggcgaaggccccctcgaagaagaggggcgcgtcagaagtgtcggacaggggctccaacaatttggaggcgacgacggggaggaagaaggtgaggacaaggttcacatggacgacggtgtcgcacacatcgtttgtcagggcatacgagcagctgaaggaccaagaaggtccaaagaagataaagcaactgatggaacttgatggtatatttgtaactaaaactcaagtctcaagccatctacagaaatacagaagctggttagaaaatgaaagaaaaaaggaagaagcaacaagcagctcaccatgcaacccactgagttacaccaactgcctagatagaggcaactatgtgggagtgggagctaaagaaatcgagaatttcatttccagccatcagagatctctaggaactgcaattggtcaagaatcaactattgaacaggcaagccttcatagtgagattacatcagtcagtcgtgatgctcatgaaaatggaaacagccaggctagaggaagtgcgatgagcaatggtccaaagaagataaagcaactgatggaacttgatggtatatttgtaactaaaactcaagtctcaagccatctacagaaatacagaagctggttagaaaatgaaagaaaaaaggaagaagcaacaagcagctcaccatgcaacccactgagttacaccaactgcctagatagaggttatagtacttggaagcaaagttcagtcataactgaaggacagcaaagttcaagtttttctggacggcctattcattccatggccacatcaaatggttgtctaactacgactgatacccaagcaggcaactatgtgggagtgggagctaaagaaatcgagaatttcatttccagccatcagagatctctaggaactgcaattggtcaagaatcaactattgaacaggcaagccttcatagtgagattacatcagtcagtcgtgatgctcatgaaaatggaaacagccaggctagaggaagtgcgatgagcaatggtacttcaggtactcgtggtgtgcttgttacaaatgagaacctcctgcatgttgttagtgcatcgttgccatcaaacatgggacagccaacgcaaccaagtcaaagcttctgcaccaatgaattggcagctaactacagtattattagtgatcaaaaccctgggactagccatccaactagctctagtgctatcaataatcaaaactctaagacccaagaaatgtctgtttcacaaacagtagaacttgggtgtggcaacgatgtgatgttggattggccagaattagttggactggaagatcagctggataatgatgtgctaatgaacagcttctttgatggagacttactccagcagggtgtagttactgctatagatgggacgcaagagatgcttgcttttgattctaccggtgacttgggctcagtgccgccaagaggccttaacaacgaaattgccagccatgagaataccaatggaaagaacggcgcatctagtggaccttga

SEQ ID NO: 21191 - DNA, 1138 bp, Oryza sativa
  Clone ID: PAT_MRT4530_26486C.1
gcgccgacgcgtcatggcgttcgccacactggtgggagtgggaggcctatcgcctgccctcttctccccctcccgccccctctcctgctccagctccacctccgtctcggccccgttcatcctccgcgccggcggcggcggcgacgcccggcggcatggcctccgacgcctcgtcaccccactgagagggagcgcctgcaggggagagagtacgaactcacgtgtactccagtgtgccaatgaggctaatgtggtgaccgaggatgacattgtgaacgatggtatcgatgatgaaaccgcttccgatgctgaaatggatgaggatgctgaagcaaatggtgatgagtcgtcaggcactgatgaagatgcttctgtctcctggatagagcagcagcctcttccttatccttcagatgccctagagccatacatcagcaaggagacggtggaacagcactggggagttcatcagaacattcacgtcgagaggctcaatggcatgattggtggcagtgagtgggaggggatgtcgctggggcagatgatgctatcctccttcaatgagggcagggaggcaccccatccccccttcttccatgctgcacagatatggaaccatgatttctattggcgatctatgcaacctggtggcgggggaaaacccccagaacgccttttgaaatttatcaacagggactttggatcctatgatggcatgattcgacaatttatggatgctgcatcaactcaatttggttctggatgggtttggctttgttacaaaacaagcaagttgcctcatgtgaaatcaagaagcccaatcccatctgataattatggtagactggtcatctcaaagtctccgaatgccatcaatcctcttgtctggggtcactctgatcggagatctgactatgtctccacatttctagagaagcttgtgtcatgggaaactgttgagtccaggcttaagaaggccgtacaacgggcagtagaaagagatgaatatgttagcacaaagcatataaggaagcaacttttagctcgggcaaagagccaaatcagagctatgcctcagcaggtcaatggggatgcaagagagcagaccagcggtcaagagaagtccctaggggtgtga

SEQ ID NO: 21192 - DNA, 377 bp, Oryza sativa
  Clone ID: PAT_MRT4530_26487C.1
tgtagcttcaaatggcctcacacggtctatcatcaaattaatggcacttgaactttcaaaaatgatgggtaatgtggtttttataagcgaggacaaagactactaattctatattgagtatgctaagggtaagggttttattacctttaaaaactaggtgaagtggaaggattgtatggtcatatggagtcagtttgtatgctcaacttaaggctatatggatttgaaacactttgaaaagacaaaccagaaaagagatccgcaggccctcactcgttgtggttgcaaagctaagcttgacatagagctcaatgaggagagaggagtgtgttgtgttaaggagtttaaaaaccaacatacacgtgaacttgcaaatc

SEQ ID NO: 21193 - DNA, 523 bp, Oryza sativa
  Clone ID: PAT_MRT4530_26488C.1
ttttttttttttttttttttaatcaagaacaacactaacagtgactttctgtaaaacgggaaacaattttcaactcatacttcaaaaaacaacgttaacttacgagttgacactaagcagtgtcatttacttcagtgtaagtctggcaagaaccaccaccaaccatatcaacaagcaaccattacagagaaaggctaaggtcgctaaccagaaatcaattgcagatggaaattcaacactgaactaactctgatttccggagaaaaggcaatctcggcttggcatcatatgataacccacgcgtccgagagtcatgcgggatgcccgtaatgctggactttagtgctccaggtggaagacgcattcagttaatcgctgaagttgcttgcatcgagcttctggttagtcttaaccttggttttacgacagtaagcatcctggctgcgcatccaagctccaaccgtttggatggatctgtaatgattattaagacaactatgtatcaggttctgaagcaggaata

SEQ ID NO: 21194 - DNA, 343 bp, Oryza sativa
  Clone ID: PAT_MRT4530_26489C.1
accaaaaaaaaatccccccaccaataaatgaacaacacggggtccaagggagatttgaaaccagggccccattttgaacgggggaacatttttgggttccaagcaatagctgcttaaaatatgaatgtcccccgggggcccaaacagggtaaaaaccctctagggggggaaaaaaccccccgggggataaacccctcagccaattttccccaacaaagggtaaatccccccccgttaggggtaaaataatcccagcttttccatgtgaaggattttttggggggcgggtaaactttgataccccaggaggttttcctgatcaagtggggggggatcaactttt

SEQ ID NO: 21195 - DNA, 411 bp, Oryza sativa
  Clone ID: PAT_MRT4530_2648C.1
atggactggtcgtctctcccgttggacatgctcgtgctcgtcctagataggctcgggtggtcgagccacccgagcttcgcgtcgacgtgccggcactggcgctccgccgtgtcgcccttccgacggcggcggattgcggcggtgttcgtcggcggcggcaaaagagggaaagcacgacgtgacgacgaggcggtggagagtgaaaacaagagagattgggatggcgatgtcggtttgggaggggagaaccgaccttgggcagtcaaatggctcggctggcgctcggcgcacgcggccaaatcggcgacagaggatgacgccggcgaggggaggaaaaagaagaaaaagaagaaagaaagggggggcactccttgccaaaacgggaaaggaaggagggagaaggagcgatga

SEQ ID NO: 21196 - DNA, 375 bp, Oryza sativa
  Clone ID: PAT_MRT4530_26490C.1
atgtcctggtgctccccaacgtgtcctgaaaacaaccttctatgatcagtggaagaatctcccagaacaagaaacagaggaaaatcaacctatcataggccacactatcatccatggtgtgcacagggatattcgtcggttcgctggtactgttcctaatgcgacaacaacaggtgatattgatagcatggtcatgtatgctggtcagggtgttgggctaatcacagagatcataccagctagtgaagttgtcaaaaggttagtttctgaagcacagcacgtcatcagagaaaagcttttgtgaatttcctgtactgtccaaggagcagtaaatactatctggtttttgttagcaaggaccaatgaaaataaaag

SEQ ID NO: 21197 - DNA, 1128 bp, Oryza sativa
  Clone ID: PAT_MRT4530_26491C.1
atgggctcggcgaccaccatctgcagcgacaagaccggcacgctcacgaccaaccacatgaccgtcgtcaaggcatgcatctgcggcaagatcaaagacgtggagagcgcctcggacaccaagagcttgttctccgagctgccggagtccgccatgacgttgctctcgcagtccatcttcaacaacaccggcggcgacgtcgtcttcaacaagagcgggagtcgcgagatacttggcacaccaaccgagacggccatcctcgagttcgggcctctcactcggcgggcgacttcctggccggtgcgcaaggcggagcaccctcgtcaaggtggagccattcaactcggccaagaagagaatgggagtggcaacgtcgtgccactcgacgatgcaaccgttgctcacctgaacgccacgatcaacagctttgcaaacgaggcgctccgtaccttgtgccttgcctacgtcgatgtcggtgacgggttctcggcgaatgaccagattcctgaagatggctacacctgcattggcattgtggggatcaaagatccagttcgtcctggtgtgaaggaatcggttgccatctgcaggtcggcagggatcatggtgaggatggtcacaggtgacaacatcaatacagcgaaggcgattgcgcgggaatgcggcattttgactgaaggtggcattgccattgaaggaccggatttcagaaccaagagtgcagaggaactgaatgagttgataccaaaaatacaagtaaagttttcgttgcttttgctggtgatggctagatcttcaccacttgacaagcacaccttggtgaagcatctccggaccacttttgatgaagttgttgcggttactggtgatggcacaaatgatgctcctgctcttcatgaagctgatattggacttgcaatgggcattgctggaactgaggtggcaaaagaaagtgctgacgtgattattcttgacgacaacttctccactatagtcactgttgctaaatggggtcggtcagtgtacattaatattcagaagtttgtgcagtttcagctgacagtcaatgtggtcgctctgatagtgaacttctcctcagcttgcttgacaggtacagctaaatgttga

SEQ ID NO: 21198 - DNA, 402 bp, Oryza sativa
  Clone ID: PAT_MRT4530_26492C.1
atggctgcggtttgcaactcccagtttttgctatctactcccggcaagaactgcaaccttttattcagactgaaacagaagctacaaatacgtcgtctctcgcacgaacggcctcttcgatattcagaagactgcaagaagaagatgggcaattgcgccgccgcgccgtcagacgacggcgagcttgggtcgccggagagggaggagatgacgggcgtcgaggtgaggatcaggatcagcaagaggcagctgcaggagttgctggagatggcgtccatgaccgccgccggcgacgagaaggtgattgcgggtatcatcaacgccggcgaggtggttgatcaccaccaacaacggcactggcagcccacgctgcaaagcatcccggaggccggcgagccatga

SEQ ID NO: 21199 - DNA, 3258 bp, Oryza sativa
  Clone ID: PAT_MRT4530_26493C.1
tttttgcgcccttctttttttgtgttttttttttaaaaggagatatttttatgcttctgttcattaatccacataattttctcgtcaccgaattccaatacaaacaccaaccttgaaatcctgctacacaactgaaccagcaaaagtgccaaaacaaaatgcttcttacaatatgatgcgaaatatgacacattcatattctacaaaaaaacttgtcaaagtgcagctattgcctattcccactgcttgccccacatgcatttccaaaagactgcatggagagttcagctcctccaaacaatatggaatttggtcagtatggatactgtcactgcagatatcatctcattttaatcacgacgagccgacgggaagaagcttgataatggcagagatgggcatcccaatgaggccaaggagaacactggcaatccactgcagcctggtgagtggtatcgtgttcgcaaactcgccgaggaattgcaccatgatgaactggaagactaccgtgctggtgagaacacccaagaagacgtagttcttcagtatgcccctcagcacgttgatcttctccatctccctggagcttatctcattgaacacctggcagaagacaaacgagttgaaaataattgtatttagcacaacttcagcatcagggccatcaaggccaaacatgcttttcccttgcgtccaaagaagttgaacagctgtcagaggtgcatttcctgtaaagcaagctgaagagaagttgacaagtaaagccacaacgttaacagtcagctgaaactgcacaaacttttgaatgttgacgtaaacagagcgtccccatttggcaacagtaacaattgtggagaagttgtcgtccagaattatgacatcggcactctcttcaaatggttaaataatcgccacctcagtcccagcaatgcccattgcaagtccaatatctgcttcatgaagcgcaggcgcatcatttgtgccatcaccagttacagcaacaacttcattgaatgttgtgcgcaaatgctttacaagtgtatgcttgtcaagtggtgatgatcgggccattacctgaattttcggaatcaacttgagtagttcatcaagacttttctctctgaactccggtccctcaatagccaggccatcttcagtaagtatgccacattcacgagcgatcgcttttgctgtatttatgttgtcaccagtgaccattctcaccataattccagcagatcggcaggttgcaacagactccctcacgcctgggcgaacaggatctttaatacctacaatcccaatgcatgtatacccttgcagtggtatttgttcttcaacagaaaagccttcttccatttcccgataaccaaggcacaatgtcctaagagcttcattagcaaagctttcaataatcccattaagcttgtcagcagttgttttatcaagggggacaacagcacctgtctcgtccataaacttatcgcaggcagccaacactatttctgaagcacctttacaatgtgcacggcatcctcctccaggaagcttaagaacaacacacatcctcttttttgttgaattaaagggttccattttcacaatcttagtttcatcacgctttgccttaaaatttccaccaagtgacaatgcaaattccaacaaagctgtctctgttggggtacctagaatctgatatttcccatcttggtcaatcacaacctcaccaccagtattgttaaaaatagactccagaagggttttgacaacagtttctggaagctcagaacacaaatcagatgcattcttaggattgttaacttcctttatgtttccacaaatgcaggccttgacaacagtcatatgattggtcgtcagtgttcctgtcttgtcactgcagatggtcgtagctgagcccattgtttcacatgcggctaagtgacgaaccaatgccttgtcattcatcattttcttcattgcgaatgccagactcaaagtaactgctaagggtaacccctcaggaacagcaacaacaacaatggtaactgcaatagcaaaatgctctaacatttccagtgcatcgtctcctgaccagcttaaaagcagcccctcatggtacttcttgctgattaacccttgagaaaggacaatgaaagttatgactgcgaaaaatagaccaatcttgcctataatagttgcaacaccattaagcttgacctgtagtggggtttcatcatcgccaccttcactgagagtagccattagttttccccattgggttcgcatgccaactgttgtaatcagcatcttgcaggaaccatcttgaactttggtccccgacaaaagaaaaggattatcttcatttacaacaacaggttcactctcgccagtgagactggactcattaatcagtagagaaaacccagaaatgaatagcccatcagcaggaacctgatcaccaattgctaaatggacaacatctccaggaagaagatcatatattgatagcctttgtctaaaaccattccttgtgacttgcacttgtattttctttttctccttgtccaagtccttgaactgtaaggattgccgatagtcacttgttgcggtaacaaacacgaccaagaggatacttgcaacaattcccagaccatcatgagcaccttttggccatccttccatggcaatgccaacaaccaacgatacaaaggcacagacagcaagaattataagagttgtatcttgaagtgcttcccatacaaacacccaaaaactccggacctcgctttctgtgaatttgtttagtccatatacatcttgcctgcgcttaatgctttcctcagctgtacttaacccatccgctggtgatgtcgcaagcttgtctgctattccagtaactccaccgtgggtgatcaactttttactatcatgaccctcaacaatagagcccagttcatcagcgcaaatctgaaaccctgcagccttgacttcttcaggaacaacatactcacttcgaagtgaaagaccctgtataaactgtagtgcagctttcgataccagcaccgcaacccgcagtttctcgtggttggcgtgcttgatggcctgggcctcgccgcgcttgtcgaggttggcggtgaagcggaagcggcgcttggggttcttgacgacgccgcagagcttgcgccaccgccggagcgcctcctccgacgagttcttcgccttcaccccgccgaaattctcctccaggtagctctccat

SEQ ID NO: 21200 - DNA, 1000 bp, Oryza sativa
  Clone ID: PAT_MRT4530_26494C.1
tcacgacgagccgacgggaagaagcttgataatggcagagatgggcatcccaatgaggccaaggagaacactggcaatccactgcagcctggtgagtggtatcgtgttcgcaaactcgccgaggaattgcaccatgatgaactggaagactaccgtgctggtgagaacacccaagaagacgtagttcttcagtatgcccctcagcacgttgatcttctccatctccctggagcttatctcattgaacacctggcagaagacaaacgagttgaaaataattgtatttagcacaacttcagcatcagggccatcaaggccaaacatgcttttcccttgcgtctggagataccacataacaatgaattggtagaaagactgccccagaatgttcctccacataacatttgtgataaatttccctgttctgcccactggctctctcttcattaagtcatcgttaggtggctcggtagctaatgcaagggcgccaagggtgtccatgatcatgttcacccaaagaagttgaacagctgtcagaggtgcatttcctgtaaagcaagctgaagagaagttgacaagtaaagccacaacgttaacagtcagctgaaactgcacaaacttttgaatgttgacgtaaacagagcgtccccatttggcaacagtaacaattgtggagaagttgtcgtccagaattatcacatcggcactttcttttgccacctcagttccagcaatgcccattgcaagtccaatatcagcttcatgaagagcaggagcatcatttgtgccatcaccagtaaccgcaacaacttcatcaaaagtggtccggagatgcttcaccaaggtgtgcttgtcaagtggtgaagatctagccatcacttgtatttttggtatcaactcattcagttcctctgcactcttggttctgaaatccggtccttcaatggcaatgccaccttcagtcaaaatgccgcattcccgcgcaatcgcggacgcgtgg

SEQ ID NO: 21201 - DNA, 3676 bp, Oryza sativa
  Clone ID: PAT_MRT4530_26495C.1
gaaaagaacttatttgttccagaaggaaggagctcagacaattataataatgatgctgcatcaagcaatccacttatgtgtgatggtgttggtggaaaagaattggatgatgactcctccagttcgaagggtacacatactgtaaagtttgatggccagctcaccagctctaacgcaactacttcatcgagtaaacctgatcagcttttctggataaatggctacatttgttccatttgtggatttgaactacctccaggttttatggagagctacctgaaggagaatttcggcggggtgaaggcgaagcactcgtcggacgaggcgctggggcgatggcgcaggttggtcggcgtcgtcaagaaccccaagcggcggttccgcttcaccgccaacctcgacaagcgatccgaggccgccgccatgaagcgatccaaccaggagaagctgcgagttgctgtgctagtgtcaaaggctgcacttcagttcatccaaggacttgctccggcgagcgagtacacggtccccgacgacgtcaaggcggcgggctacggcatctgcgccgaggagctgagctccatcgtggagagccacgacatcaagaagctcaagtcccatggcggcgtggaggccatcgcggcgaagctgtgcacctcgccggaggacgggctcccgaagtcgaggcgccggcaagccgtccgggaggagctgttcggcatcaacaggttcgccgagacggagtcgcgcagcttctgggtgttcgtctgggaggcgctccaggacatgacgctgatgatcctcgcggcgtgcgccttcttctccctcgtcgtcggcatcgccaccgaggggtggcccaagggcgcgcacgacgggctcggcatcgtggccagcatccttctcgtcgtcttcgtcacggcgaccagcgactaccggcagtcgctgcagttcaaggacctcgacaaggagaagaagaagatcacggtgcaggtctcccggaacgggtacaggcagaagctgtccatctacgacctcctcgccggcgacatcgtgcacctctccatcggcgaccaggtgcccgccgatggcttgttcctgtccggattctcgctgctcatcaacgagtcgagcctgaccggggagagcgagcccgtcgccgtcaatgccgagaacccgttcctcctgtcggggaccaaggtgcaggatggttcttgcaagatgctcgtcacgacggtcgggatgaggacgcagtggggtaagctgatggccacgctgagcgagggcggcgacgatgagacgccgttgcaggtgaagctcaacggcgtcgccaccatcatcggcaagatcggcctcatcttcgcagtcgtcacgttcgccgtgctcaccgagggcctcttccggcgcaagatcatggacgcctcgtacctgagctggaccggagacgacgcgatggagctgctcgagttcttcgccatcgccgtcaccatcgtcgtcgtggccgtccccgaaggcctcccgctcgccgtgacgctcagcctcgcgttcgccatgaagaagatgatgaacgacaaggcgctcgtccggcacctcgccgcctgcgagaccatgggctcggcgaccaccatctgcagcgacaagaccggcacgctcacgaccaaccacatgaccgtcgtcaaggcctgcatctgcggcaagatcaaagacgtggagagcgcctcggacaccaagagcttgttctccgagctgccggagtccgccatgacgctgctctcgcagtccatcttcaacaacaccggcggcgacgtcgtcttcaacaagagcgggagtcgcgagatacttggcacaccaaccgagacggccatcctcgagttcggcctctcactcggcggcgacttcctggccgtgcgcaaggcgagcaccctcgtcaaggtggagccattcaactcggccaagaagagaatgggagtggtcatccagctccccggaggagcaatgcgtgcacacagcaagggcgcgtcagagatcatcttggcatcttgcagcaagtacctgaatgatcaaggcaacgtcgtgccactcgacgatgcaaccgttgctcacctgaacgccacgatcaacagctttgcaaacgaggcgctccgtaccttgtgccttgcctacgtcgatgtcggtgacgggttctcggcgaatgaccagattcctgaagatggctacacctgcattggcattgtggggatcaaagatccagttcgtcctggtgtgaaggaatcggttgccatctgcaggtcggcagggatcatggtgaggatggtcacaggtgacaacatcaatacagcgaaggcgattgcgcgggaatgcggcattttgactgaaggtggcattgccattgaaggaccggatttcagaaccaagagtgcagaggaactgaatgagttgataccaaaaatacaagtaaagttttcgttgcttttgctggtgatggctagatcttcaccacttgacaagcacaccttggtgaagcatctccggaccacttttgatgaagttgttgcggttactggtgatggcacaaatgatgctcctgctcttcatgaagctgatattggacttgcaatgggcattgctggaactgaggtggcaaaagaaagtgctgacgtgattattcttgacgacaacttctccactatagtcactgttgctaaatggggtcggtcagtgtacattaatattcagaagtttgtgcagtttcagctgacagtcaatgtggtcgctctgatagtgaacttctcctcagcttgcttgacagggagtgctcctcttactgctgtccaactgctctgggttaacatgatcatggacacactaggagcactggcattggcaactgaacctccaaacgatgaactgatgaagagaactcctgttggaaggaaagggaacttcatcagcaacattatgtggagaaacatcctgggacaggccttctaccaattcattgtaatatggtatctgcagacagaagggaagtggctatttggactaaagggagaaaattccgatctagtcttgaacacactcatcttcaattgctttgtgttctgccaggtgttcaatgaggtgagctcaagggagatggagaggataaatgtatttgaaggcattctagacaacaacgtgttcgtcgccgtcctcggcagcacagtcatcttccagttcataatagtacagttcctgggtgatttcgccaacacgactcctctcacattgaagcagtggttcaactgcattttcatcggtttcatagggatgccgatcgctgctgcggtcaagctgatcccagttgatttttaagtaggaaagcagaactaattcaagacacgggactgaagtcggtagggattaaaggcagtaccatgggcataacaaagttctctttatgcgcttgtttagatgtgaaccttgtcgccccccccccccccccccctttttttcttgcagagtatgatccaagattgtatggtgtttaatggactcgtgtagatctttccttcatgtcattttcctcatgttctttccattatgtggattaattgcaagaatatatggatcgcttgataagtttaacataaaaaaaaaaaaacaaaaaaaaaacaaaaacagggtctagaacaactcgtgt

SEQ ID NO: 21202 - DNA, 2942 bp, Oryza sativa
  Clone ID: PAT_MRT4530_26496C.1
ccgggctgcaggaattcggcacgccgcttccttccttcccttggtggtgtccgtggagactggagagtggaggcgaaaaaaagaaacgaatcgaatctctcgtccctcctcctcctcgatctccttcctctcaattccatccatcgtctagtcttcttcccaaacccaacaactccatcttcttctttgcttcgcccttgatttgtgtgctgcgtgaacaaggcctgtctagagggcagccatggccactgtttctgacatcggcctctccgcggctatcaacgtctcgatggccgttgcattcttgctggtctttgcttttctacgattacagcccatcaacgatagggtttactttccaaaatggtacctcagaggaatgagagacagccctgtttcctctggtgctgcagtgcaaaaggttgtcaatttaaacatgagatcatacttgaaatttttaagttggatgccggctgctctcaagatgccagaggatgagttgatcaatcatgcaggccttgattccgctgtctatctacggatatacctaacagggatcaagatattcgttccaatatcaattttagcttcgcttgttctgttccctgtgaactggacaaatgacaccctagacagcatgaaggtagtccacagtaaaattgacaaactttcaatatcaaacataccttatgggtcaaacaggtttgttactcacttggttatggcttatgctgtcacgttttggacctgctatgtactgttccgagagtatgagataattacaacgatgagattgcggtttcttgcttcagagaaacggcgaccagaccagtttacagttcttgtgcggaatatacctccagatcctgatgaatcaattagtgagctcgtggagcatttcttccttgttaatcatcctgatcattatctaagacaccaggtggtttacaatgcaaataaacttgctgatctggttgagaagaagaagaaactgcaaaattggcttgattactaccagctcaagtatgaaagaaatccatcaaaaaggcccaccactaagactggctttcttggctgttttggttccgaggtggatgccattgaatactacaaagcagagattgagaagattgggaaagaagaagctgatgagcgtcaaaagatcatgaaggatccccagtcagctgttccagcagcctttgtttcatttcgttcacggtggggggctgctgtttgtgctcagacacagcaaaccagtaatccaacagtctggataactgaatgggctccagaacctcgtgatgtctactggaataatctatccattccatttgtgtccctcacagttaggaggctgatagttgctgtggcattcttcttcctcaactttttttatgtcattccaatagcattcgtgcaatctcttgcaagccttgaaggaatagaaaaggcgcttccatttctgaaacccttaatcaaaattgatgtcatcaaatcattcatccaaggttttcttccaggaattgctttgaaggtcttccttatattgcttccaactatactgatgtttatgtctaagtttgaaggattaatatcacagtcatcactggagcgaagatctgcatctaaatattatatcttcttgttcttcaatgtatttttgggaagcatcgttacaggatctgctttagatcagcttaaggcatacattcatcagtcggcaaatgaaataccgagaaccatcggtgtagccattccaatgagggcgacttttttcataacatatgtaatggttgacggttggactggtgtagctggtgaaatattgagattgagggcacttataatcttccatttgaaaaactttttcttggtgaagactgaaaaggacagagaagaggcaatggatcctggtagtatctgttttgattggtgtgaaccacgtatacagctatatttcttacttggccttgtctatgctgtggtgacaccgttattgcttcctttcatattggtattcttcgggctggcatatgttgtctaccgccaccagataataaatgtctacaatcaacaatacgagagtggtgcacagttttggccgagtgtgcacgggcgcataatcattgcattgatcgtatcacagctacttcttattggactgttgagtacaaaaggtttcgaggagacgacaccagttcttgttgttcttcctgtgttgacgttttggttttacaagtactgcaagaaccggtttgagcctgcatttgtgaggaacccactacaggaagcgatgaggaaagacaccctggaacgggcaagggagccaaccttcgatctgaaagcgtacctggccaatgcgtacctgcacccggtgttcaaaggcagggaggaggaggacaatatgtcaatatccgaggatgtcgggatggaggaggtgatcgtgccgaccaagcgtcaatctcgccggaacactcccgcccagagcaagtacgaaggctccgacacgctctctcttcctgaaactgtacacgaacgatagagctacgggaatatcagggtgactactagcttgttgaattctttatagtctgtacagatagattgatacatacctactcctacggggatgttggcagatagctttgctgtacactttacagcacgagaggtatatggagggattgttcaacacccacagactgatgattggattgccaatattatgatttctttgttggtttccaaaaaaaaaaaaaaatagtagtaaattagtactaccactgtaataatataaaccagctagctagtagcaagtttttgtcagtgcaaaaaaaaaaaaaagcaaggctgttaacagcgaagaggaggcggaaggcggatgaggaaggtggaggaggaaagccgtcgaggcctccgcggaaagttgcggaggaggccga

SEQ ID NO: 21203 - DNA, 657 bp, Oryza sativa
  Clone ID: PAT_MRT4530_26497C.1
atgcccctagctagccccaatgatcagactctcttcctcgatctcctttttctccctcttgcaagcgcacagcttggaagagggcaaacaacgcctcggtaccatactaggcaattcggctgtgatggtgtgaggcatcgcgcagcaacaacgcattggggaggagctcgtcggctggccgcgttgcgccgcacgcgggggagcagcctggctcgagcacgcaaaggaggcgggagggcgtcggggcatcgtctgagaggggggaagaggggggtcgtggaggatgaggcagccaactacgcatggggaggtggtcatcagccggccgtgcgcaaggaagagctcgtccaccggccgcccgcagggaggatctcgtcggcctaccaagcgcggggaggggcacttcagcatggtggccacacagggaaattcgtcgatcttccacgtcggcccggctcgagcgcgcagaggaggtgggtgggcgccggggcattgtccaagagggggaaggagatggtcgtggaggacgaggcagaggccgcacaggcaaacccctccacgtcgacagcagcgacggtcggcgaggaggggaggcgtgaccctcgtgctccatcccgccgccgcctccgtcaacgccggtcggcgttatgcacctga

SEQ ID NO: 21204 - DNA, 231 bp, Oryza sativa
  Clone ID: PAT_MRT4530_26498C.1
atgacgtggcacgagcaattgaagccaaaaggctatcgaaaagcagtagcaattagcaaaaggccagcggcgggcgagctcggcggcggcaaggaggctggcacgacgacgtcgcgcgtcaccgatatgcacacggttatggcgtcgacaagctcgtcggctggcgcggccttcccgtggcagaccgggcacgaggcgtgggacgagagccacatgtcgatgcactcctag

SEQ ID NO: 21205 - DNA, 304 bp, Oryza sativa
  Clone ID: PAT_MRT4530_26499C.1
tttttttttttttttgaaatcataagaactttttcggccccaaagcctagatgcatcatcacagatgcaatggaatagcatgaaacaactgaagcctgctaccctggaaacactaattttatgactagttgttcacgatctgttggggattttacatccccagcctaagtaataacaagaaaaagcaaaacaaaagcaacacatttgtacgaactgccgagagggaaattttccaaaacatttccccactgcatcagcatctcaaggaaaaattctaccataattttgctcaacttaatttaat

SEQ ID NO: 21206 - DNA, 315 bp, Oryza sativa
  Clone ID: PAT_MRT4530_2649C.1
atgagctcctccctgaactacgccgtccacctccaccgcatcctccccgcaaacaacctcttccgccttctcctcctcatccccaccgcgcagacgtcgcctgggtttggacggggaaccgaccatgccatcggctccttccaactcctcttgatggacgacgccttcgacctcatcttcgtcgacaacagcacaggatccctggcaccctcttcccgtcacagatcgtcgtggaagtcgagaaagcaattcggcaagaagtggaggcgaaggtggcgccttgagctcaggctcggagtccatctccgcaggtag

SEQ ID NO: 21207 - DNA, 1991 bp, Oryza sativa
  Clone ID: PAT_MRT4530_264C.1
cccccccccccccccccccccaaatttccttctcccggatcattaaggtttggatttggatttgtggatttcggtgcttgctcgatcgttgcagggtggtgcccgtggtggtggtggcggaggcggcgccaaggcgccccctcccatggcggacaccggagcggcacagcctccgccgccgcccctgcgggcgcccgccgccgtgccggagaccctgcgccggctcctcgcgctggtcactgacgtcctggtgtgctgcttcctcgccgcgatgtgggtgacccccgccgccagcgccgccgccgtcttctcccgctgggcctgcggcgagggctcccctgccgcggacgtcgcggcgaaggtctccgtcgcctccttcctggccacggcggcgctcgcgccgttcgcctcgccggttgtgacgtggcgcctccttgggcgtccccgccgccgccgccgtcaggaaggaggccttggacgcgtcgttctgttcgcgctcttctctgtctgcttcgcagtcgtcggtttgctgctgcaagagctcgcgccggaggagaaggggtctatacaggagaaggttggctcccgccgccgcgggcctcgttgcggcccccaactccgcagcttctcgccggcacaccggcagcgcaacccgtcgatccacaccggtcgaagcccgtcgatgccgccgacaaggagagagggtgccgccgctgcttgatccgggtcgcgcggggctcgccggccgcgccactgctcgatatgcgctgaccacgcccctcccccctccccaggagagaggtgagaggcggagggggaaagaggcgccggcggcaggatcgccgaaggaggaggccggagtgaggacggttgcaatggcggcgccaccccgcgcccgcggccgccgccccctcgccgccagggccaccgccatcctccacgcggcgctccggcgggtgtcctgcagggtcgccgccacggctgcggcggcggcgcctcctccgcagggccgccgcctcacggcgctccacgccctcctcggcgcgctctgggtggccagcgccctctacatcgccaacgccgccgcgcgctgcgcacgcctgggtggcgcctccctgctgagcgacgaccggtgccgcgtctggcggcggcggagacggtggcggcgatgccctctccaagaagctctcgtcatccgtggaggcgccgcaccgcccgcagcctccaccgacagccgccgttgctcggttctcttctcctcttccctcccctcgccggcttctcccctcccctctccggcgtgagatcggcggcggggagcagcggtggcggcgtatctggcggtggggagctcgccggctgctcccctcccctctccggcgcgagctcggcggcggggagcagcggtggcggcgtatctggcggtggggagctcgccggctgctcccctcccctctccggcgcgagctcggcggtggggagcagcggtggcggcggatctagcggcggaggggaagcggcgcgagtccggcctccgcaccggcagcggcggggagcagcgacgacgaccacgacgagatggggatttggggcaggtgcaggggggaccggacgaggcgacgcgcagggctccgactcctccaacgcgaggccgcccacgccgccgccgccgccagagcgtggaggtaagccatggaggcgtctccccgcggccgcctcctcgccttcgcgcccacgctccacctcctcctccgcgcgctctgggtagccggcgtcctcaacatcgccaaggacgtcgtgcactgcgcccgcctgcagagcaccacctccgtcctggacgaccaccgctgcaacctctccctctcgttcgcgctcgccatgctcttcatctcgctgctcggccggagcatcctccgccgcagcgacgccaaggcggaggcggaggtaggtatacatgatacatcgcctcgcgccctgctcgatctgtttat

SEQ ID NO: 21208 - DNA, 289 bp, Oryza sativa
  Clone ID: PAT_MRT4530_26500C.1
ttgttctgagacacctgtctggattacctctaggttgtctgatttgaagaactggtttggatagcatttccaggaatgatgaactgcatgagatacacatgcatctcggacagcgttttggataggaacatgtgaaagtgtcataagcaggacatcctatggaacggaaggaatgtctacttgcgctgttgtggcacacggggaagaatcatcggccatggagagtaaactccgttctattggttgctaccttactttcaccttgtgaagtgctagacccgactactcc

SEQ ID NO: 21209 - DNA, 484 bp, Oryza sativa
  Clone ID: PAT_MRT4530_26501C.1
gccacgcgtccggtgagctcgtgaaatccggctacttgctggacttccaggactcggagggcgagttcttgctgaagtccaagaatctgcagctattccctgaggacgaagagtttttggattctgcaatgtggtcgtaggatcattctgcagaacgctgaagatttctcatcttatgactcctcttcagtgatatctagtttctgcattgtatatatcttccgtggtaggttcacagtggcaacatgagctgctagtgttcttcagaattcgctcttcagccggacaagttccagtgctgcattttggaggttctggatggaacagttcctgtggctccagatatatcagtaataattcagtagtgcattttgttgctcccaatgttagcttttgcttactactagtagcttcttagacaaaaatgtgtgtttccagttactttggaactgtgtcaagcgtgtggtatggtatcgttcaatct

SEQ ID NO: 21210 - DNA, 153 bp, Oryza sativa
  Clone ID: PAT_MRT4530_26502C.1
atgctcgtgccctcatgggagatgcaagctttggtgaaggagaacgtgagaatggtgacagaccaggaggcgtggagaagcagaggtatagcaatgcaggacgtggaggggtgcacggtggctggtggagtcgtcctctccttgcgaccatga

SEQ ID NO: 21211 - DNA, 1188 bp, Oryza sativa
  Clone ID: PAT_MRT4530_26503C.1
aagcgaagaaagagcgcgtccgcgtcgtcgtcgtcgtccgcctgcctgcctgcctacccacgtcgcgctcgcgtgcgcgctgccgcttagtcgcgccaaaaaggcggggggaggggaggcgcgtgcctgcccccgatcgcatatcgcattctccactcgcttgcgtttgccgttgcgtttgcgttttgcgtagcaagggaagggagagagctcgtgcttttggattggccgcgatgagctgcgggggcgccgggcagagcgggtggctgctcgagtacgggctggtggaggaggagatccagggctccgacttcatctacatggtcgacgaccccgcggccgtctccagcgtgctactgggcttcgacgttcccaggaaggaggacggcagcggcggccaggacaactctgcctccaagaaaagatctcgtccagaatcgagcgcaccgccgggcaccaaggcttgccgcgaaaagctccggcgagacaggctcaatgaaaggttcaacgagctcagcgcgatcttggagcccggcaagccgccgagggccgacaaggtctccatcctgagcgacgccgcccgtctcctgagccagctgcgcgccgaggcccagaagctcaagagctcgaacgagtcgctccaggactccatcaagagcctcaaggccgagaagtcggagctgcgtgacgagaagacgaggctcaaggccgagagggagaggctggagcaaatgctcaagggcgtcggcgccgccacaccggcggctccagcgccgttcgtcccgcaccacgccgcggcggtggcggccgcaccggcgtaccatccggcggcgttcgcgcaggccggcggcaagtacgtgccgtacgccaccagctacgcgccgccggccgcgttctggcagtggataccgccgacgtccctcgacacgtccaaggaccccgtgatgtggccgccggttgcatgatcagctgctgctgtcaccgaaaatgccgtagaaattgaccaaagagcacctgatgaaagcctcgggtgcagttatgtgattgtgttgtggataaatgatcaaggatcaagggatcaccagaagaaatttcctggtgatcattgctcgccggagcagtctatgtaacaacccaattgctaaagtaattaaggcaattattattacatcaagatggtgtttatgt

SEQ ID NO: 21212 - DNA, 199 bp, Oryza sativa
  Clone ID: PAT_MRT4530_26504C.1
ccacaaaaaggtacgggccaaaattttttttcgggtccataaacaaggggggaccccttcttgggcatgaacataaaacctttccaggggggcccccaccaggggtggggccgtccaattttttaaaccccccggggattttaaaaccccccgggaaaacagggggggtttacggggccctggaaacctttattttcat

SEQ ID NO: 21213 - DNA, 402 bp, Oryza sativa
  Clone ID: PAT_MRT4530_26505C.1
tttctttcttgtccggcaagaacttgtatcaacccatgggtataaatatgtacacccagggtattaatacaattcggcgcatcgccaccttttaccttttctactttattttatcgtccgacgggacttggcacctgacgtggggctatgtttgatctccggctaaggggtaagtccaatgttccgtcggcctaggcaatagtatcgtttacgtcggcgtcgttcaagtctgcatcagtacattcgatctcttggattgctctggtttggatgatatatttgcctacctatttatcatatgtctctgttaatatcgtcttagcatatcaatttagctctatcggctgcttctcgttttagggattctgccagtatcggctaaatcgcgttgctagattagat

SEQ ID NO: 21214 - DNA, 480 bp, Oryza sativa
  Clone ID: PAT_MRT4530_26506C.1
ctgttgggatggttttttggcgaggggagggggaatggggatacattggttcatatgtgctccgctctgcgccttattgagaatgtctttcaaaggtgaattagtttgattagacggaacggcaggaatcgcttagttcttacgcgcttaagaaaggttgtctacaggaggtttaagtcatatctgtccatcatggaatgcaatgttcaatttgaggagcagcctgtaccgataaatggaccctgctttctaattgccccacatagtgatgaatttgtttcatgcaccaagttgagttgatagagaatagagaccatgttttagattcttgaagaaacatatatagcgtgcttgaatatattatatatatcctatttgggtgagctgcaagtctgcaactaccaatgtatgttgttgatctgttgctgccttgctattctgaataaatgaacctttatgaactcagccaatccctgattg

SEQ ID NO: 21215 - DNA, 513 bp, Oryza sativa
  Clone ID: PAT_MRT4530_26507C.1
gtcgaaggcggcggtccacgcggtcgaagccggcggcgcagccgtgccggggtggaagagcgaggcggccacttggggccgctacgagctttcttgtctgacaaggacttgtatcaacccatgggtataaatatgtacacccggggtctatgtaatctatctccacgatcaatacaattcggcgcatcgccaccttttaccttttctactttattttatcgtccggtgggacttggcacttgacgcggggctgcatcggtgttcgatctccggcgaagggataagtccaatgttccgtcggtccaggcaattgtatcgtctacgtcggcgtcgttcaaggctgcatcagtacattcgacctcttggattactctggtttggataatatatttgcctagctatttatcatatgtctatgttaatctagtcctagcatctcaatttagctctatcggttgtctctcgctttagggtttccgccggtatcggctaaatcgccttgctatattagat

SEQ ID NO: 21216 - DNA, 311 bp, Oryza sativa
  Clone ID: PAT_MRT4530_26508C.1
tttctactttattttatcatccagcgggacttggcacctgacgcggggctgcatcggtcttcgatctccggagaagggataagtccaatgtttcgtcggcccaggcaattgtctcatctacgtcggcattgttcaaggctgcatcagtacattcgacctcttggattgctctggtttggatgatatatttgcctacctatttatcatatgtctctattaatctagtcttagcatatcaatttagctctatcggctgcttctcgttttagggtttctgccggtatcggctaaatcgcgttgctagattagat

SEQ ID NO: 21217 - DNA, 505 bp, Oryza sativa
  Clone ID: PAT_MRT4530_26509C.1
ttacagagttcattcgcaagcgcacggatataccattgtagcatttcacccgagagtattccaaggttatcggaaagtttctttcttgtcctacaaggactagtatctacccatgggtataaatatgtacacccggggtcattgtaatctatggctacgatcaatacaattcggcgtatcgccaccttttaccttttctattttatattatcatccggcgggacttggcacctgatgcagggctgcatcggtgttcgatctccggcgaaggggtaagtccaatgttccgccggtccaggcaattgtatcgtctacgttggtgtcgtttaaggctgcatcggtacattcgacctgttggattgctctagtttggatgatatatttgcctacctatttatcatatgtctctgttaatctagtcttagcatatcaatttagctctatcggctgcttctcgttttagggtttatgccggtatcagctaaatcgtgttgctagattagat

SEQ ID NO: 21218 - DNA, 837 bp, Oryza sativa
  Clone ID: PAT_MRT4530_2650C.1
cccccccggcgccggcgcggcggcgtgctgaagtaagcggatggacctcactcgccggcgccgccggaggcaacctgccccgggcgctatgccaaaatttgatgcaatcaacgacagtggtgctaatccggagtataatcttgacgaacccaccatggaggaaaagctggccaccctgaatctgctcaacggaggaggcgacgggacagcaggtgaagctacccaggagcagccactccccgtggtgatgccgccgagcgcggactcggttcacgtcttgctcaagcaggctctgcgggctgatgaccacgcatccttgctcaattgcttgtacaataaagaccacaaggtcattgttaattcaatatcacttcttacaccagcagacgctgtgaagcttctcaagttcttcatattgcttatgcaatcgaggggtgcagtgctggtttccttgctcccatggctgcaaagtttgctcagtcaacacatgagtagcatagtttctcaggagtcttctctgcttctgctcaactcactctatcatctaattgatgcaagaacatcgaccttcaaatcatcgctgcagttgtctacctgtctagattatcttttcagtgagattgacgatgatggatccggagaggaagaaggatccccgccgataatttatgaggacaaggatactgatgatgaagagtctgaagttgatgatatggaaaccagtggggagggtgaagatctggggggtgttactgatgcttctgagcattcagatggaagtgaggtcatgagcgactgatgaatcgatacctgatgagctcttgatcttcgtgatga

SEQ ID NO: 21219 - DNA, 642 bp, Oryza sativa
  Clone ID: PAT_MRT4530_26510C.1
atggcgatggcggcgccgttcatcgcgatggcgagcaacatgcagggcgtcgtcagcgtcgacggcaacgcggagaagcggcggaggacgtcctccgacgcgctgcagcgcacggtgtccgacgtctcctacgagctccaccaccacgtcggcgccaagggcaccaccatggtggacgacgccgccgccgccgagcagaagcagcagctcgacgacatcgcggaggtggaggacgcgcggtgcgagtgctgcggcatgtcggaggagtgcacgccggagtacatccgcggcgtgcgcgcccgtttcgcggggcggctggtgtgcgggctgtgcgcggaggcggtggcggaggaggcggcgaggcgcggcggcgccggcggcgtcgaggcggcgctccgcgcccacaccgccgtgtgcaagcgcttcaacggcttcgggcgcacgcacccggtgctcttccaggcggaggccatgcgcgagatcctccgcaagcgctccaagctcggcccccgctcccgctccagcatcaacccccgagaggcccgccaagccggcgccgccggcggcggcggcatcgcacgcagctccagctgcttgccgttcatcaccgacgagttcagccagcgcgtcaacatcaactag

SEQ ID NO: 21220 - DNA, 512 bp, Oryza sativa
  Clone ID: PAT_MRT4530_26511C.1
aaaacaaagccggctgcctccgctcgccacggccgacgcctacggccccgttggccgccggccgcctgcccgccgccgctgggcgtttctttcttatccgacaaggacttgtatcaacccatgggtataaatatgtacacccggggtctatgtaatctatctccacgatcaatacaattcggtgcatcgccaccttttaccttttctactttattttacgttccggcagaacttggcacccgacgcggggctgcatcgtcttcgatctccggcgaagggataagtctaatgttccgccggcccaggcaattgtatcgtttacgtcggcgtcgttcaaggctacatcagtacattcgacctcttggattgctctggtttggatgatatacttgcctacctatttatcatatgtctctgttaatctaatcttagcatatcaatttagctctattggctgcttctcgttttagggtttctgtcggtatcggttaaatcgcgttgctagattagat

SEQ ID NO: 21221 - DNA, 505 bp, Oryza sativa
  Clone ID: PAT_MRT4530_26512C.1
gcactggaaggggttcatgaggtatctcacaacagaagaaacaatgaagaagaaagaagaagagcaatggcttcatctcagtttcttgtccgatgaggacttgtatcaacccatgggtataaatatgtacacctaggatctgtgtaatttatcgctacgatcaatacaatttgacgcatcgccaccctttttacttctacttttgtttttacgttccggcggaacttggcacccgatgcagggctgcatcgtcttcgatctctggcgaagggataagtccaatgttccgccggcccaggcaattgtatcgtctacatcggcgtagttcaaggctgcatcagtacattcgacctcttggattgctttggtttggatgatatacttgcctacctatttatcatatgtctatgttaatctagtcttagcatatcaatttagctctatcggctgcttctcgttttagggtttctgccggtatcggctaaatctcatatgtctctgttaa

SEQ ID NO: 21222 - DNA, 492 bp, Oryza sativa
  Clone ID: PAT_MRT4530_26513C.1
ctttaggaaagtgtgtttagtgtccgattaggactttatgttttccttttatcttttaggaaagtttctttcttgtcctacaaggactagtatctacccatgggtataaatatgtacacccggggtcattgtaatctatcgctacgatcaatacaattcggttcatcgccacattttaccttttctactttattttatcgtccggcgggacttggcacctgacgcggggctgcatcggtgtttgatctccggctaaggggtaagtccaatgttccgccggcccaggcaattgtatcatttacgtcggtgtcgttcaatgctgcatcagtacattcgacctcttggattgctctgatttggatggtatatttgcctacctatttatcatatgtctctgttaatctagtcttagcatatcaatttagctctatcggctgcttctcgttttagggtttctgccggtatcagctaaattgtgttgctagattagat

SEQ ID NO: 21223 - DNA, 505 bp, Oryza sativa
  Clone ID: PAT_MRT4530_26514C.1
tggcaaggtgatattgtaatcattgtcggattgagttgacgtgcttcatgatgattgccacgtactgatcgagaaagtttctttcttgtcctacaaggactagtatctacccatgggtataaatatgtacactcagagtcattgtaaactatcttcacgatcattacaattcggcgcatcgccaccttttaccttttctactttattttatcgtccggcgggacttggcacctgacgcggggctgcatcggtgttcgatctccagctaagaggtaagtctaatgttccgtcggcccaggcaattgtatcgtttacgtcgtcgtcgttcaaggctgcatcagtacattcaacctcttggattgctctagtttggatgatatatttgcctacctatttatcatatgtctctgttaatctagtcttagcatatcaatttagctctatcggctgctcctcgttttagggtttctgccggtatcggctaaatcgcgttgctagattagat

SEQ ID NO: 21224 - DNA, 871 bp, Oryza sativa
  Clone ID: PAT_MRT4530_26515C.1
atggcagtgactcggggggggcggtctgcggtggaccgggtccacggaccggaaaaggggcggcgcaccatgtggagctgacgtggcgccgacgcggcggccacgcggcagccacgcgggcggccgaacggacggccccggtagatcggacggccgcggaagcgcgtggccggcgcgcatgggcggctctagccggcccggcggccatggcgcacggcggcgcggctcgacgcagcggcggcacaaggcggcgactggccggcggcggagggcggcggcgtcgcggcgacgcggacggcgatagcggcggctaagaggctaggcggcggcgcggcggctaagcggcacggggggagagggagaaaggggaggaggggcctcaccgatgacgatcgactacggcgagcgacggagggcgatggcgacggcgagacgagctctgggaccacctaagggatcaaaagggatgagttagagagggaaagggaaaccatggatggctaaggcgtcggccatggcgaagctcaccgacgcgcggtgcggacggggttccggcggcggattccgacggaggaagggtggacggcgtggccctcgggcttgcgaacccgacggcggcgacggcgcggctcggcgcggcggctagcgatggctagcggctaccggagcggcggcagcgacggcggagaggagggcgacggcgctagggcgatagaggccacgggagagctcggcgaaatggggaaaaagagagaggggatggcggtggtgcttaaataggggaggaggggtccggacgtggccgggagaggcgggaatcgccggccgacgtgggggagtgggagaggagagagaggcgggattcgtaatt

SEQ ID NO: 21225 - DNA, 421 bp, Oryza sativa
  Clone ID: PAT_MRT4530_26516C.1
ttctttcttatccgacaaggatttttatacccatgggtatatgtacacccggggtctatgtaatctatcgctacgatcaatacaatttggcgcatcgcgaccctttttacttctacttttgtttttacgttccggcggaatttggaacccgacgcggggctgcatcgtcttcgatctccggcgaagggataagtccaatgttccaccggtccaggcaattgtatcatctacgtcggcgtcgttcaaggctgcatcagtacattcgacctctcggattactctggtttggataatatatttgcctggctatttatcatatgtctatgttaatctagtcctagcatctcaatttagctctatcggctgtctctcgctttagggtttctaccggtatcggctaaatcaccttgctagattagat

SEQ ID NO: 21226 - DNA, 311 bp, Oryza sativa
  unsure (1)..(311): unsure at all n locations
  Clone ID: PAT_MRT4530_26517C.1
ccagctgctantacaaccatctgcaagcacaacgagaggaatccagagctagtaggcacacttgtgcattgtgtccgtcatggacatgagcaaggccaggcgccatggcgtcggcgtcggcgtccggctgaggcagcggctgtcgcagatcctactccactcttcctgcaccaccacatcggccacggcattcgtcaccaatgtngccgtggcggccgggaacgccgccgcggcgcgccaagcaccgcctcccgacgncgccaacgacgcncatcagccgaggcccaagatcgatggcagtgtccggcgtc

SEQ ID NO: 21227 - DNA, 180 bp, Oryza sativa
  Clone ID: PAT_MRT4530_26518C.1
atggccgtctgcaccgagatcgttgttacggttgtgttgctagttgttattgttatagtgatcatggggccacatcaccttattgccctggcaaacccgccccttgtcgtcattctcatggaagttgatgtcgcgtggaggactatgacggtggcacttgcagcgggaacacctagctaa

SEQ ID NO: 21228 - DNA, 196 bp, Oryza sativa
  Clone ID: PAT_MRT4530_26519C.1
tcccactcacttggaattcgaaatccacacgagcgcggcggcggcggcggcggcgatggcgagcaccattaacgtggcgtcggccacctcgaggttcctgctggccggcgggaacggcggcagcggcggcggcggggccagccattgaagaaaggcgagagctttgggatcgattccgggccatggcgaaggaggt

SEQ ID NO: 21229 - DNA, 168 bp, Oryza sativa
  Clone ID: PAT_MRT4530_2651C.1
atgggcgagggccccacactgtggtgccacggcgtggggcccagacgggtgtccttgggtcccaccaccacacacaacacaagtacagaacccaccccggccggccctgtgccgtgcccgtgccgtgccgtggcgttgcctcgcccagcccaacactccagtaatacg

SEQ ID NO: 21230 - DNA, 275 bp, Oryza sativa
  Clone ID: PAT_MRT4530_26520C.1
atagtaagtagctacgacgacgcatgcaggccgccgtcggctgggagcctccagagcttgtctgccctccttttttttttttttttggtcagcccatgatattatattcatttatattagattcaaataacaagtgtgctaagcccatataggcccaacaatcaaacacaataacaacccatatagcacaacccgacaaacatccaatacaacacaaatcttacaaccgaacggggtgtcaggcgggtgagcaaaaccataacagacaccaccat

SEQ ID NO: 21231 - DNA, 120 bp, Oryza sativa
  Clone ID: PAT_MRT4530_26521C.1
atggtcgtcaacctcgtctccaacggtagctttacaaaagctaaccatggttcttctgctcctgctgttgccgtgcgtgaggatccaaccatcgccgatgtggtcgttgcaagaacctga

SEQ ID NO: 21232 - DNA, 1179 bp, Oryza sativa
  Clone ID: PAT_MRT4530_26522C.1
atggtcggcagcgacagcggacgcggcaggcggcaagggctgcggccggctgcggctagggcagtggtggcacggcgcggtcaggcggcgcgacacggcaggcgcggcaaggcagcggcggcggaggcgacgctagggcagcggcgcagcaaggcggccgcagtggcgcggtggctcggcaagcgccggcaatggcggtaccgtgacggcgacacacaaaacaaagagttggccacgataggggcggatccggtggcggcggaggaggtcagcgacggtgacggcggatgggcctcgctgcctccctcgcggatccacagccggctggcctcgagaggggatgatcaggtggtgcaggtcgagagacttagtggcggcggtggggaggcttggtggcggcggatctggcactgtggagacttggcagcgacggatccagcccctatgatgtggcggtggcaacgtgaggagcggaactggcacccctttcttctcccgcgcggatcccgcccgccccgcctgtacgcaaaggcttgcgaaaatatatgactttcgcaggcggccaagcggtccgcctacgaaaatcattttggccggcggtagatacacccgccccccggcggcaccgccggcctccccctccggccgatggtggcctcccttcccaccctggatccaggcggcggtggcatcgtcgtcgtcgttgttgttgttgcggccggccgcggagggagagtaaagctcctgttcggcagcgccgccgccgacaccccctccggctgcgctgccgcctcccctccctgaatccaggcggcggcggatccagacagcgtcgtcgtcgcagtcggcttcgtcgtcatcgtggccggcggcggaggagagtagagttgagggagaggagagggaggggagccacacctcccatccggccgcgccaacgccgacgctaccgccaccgccccctcttcctgcgccactgccgacgcccctcccctccgccagatctgggaggggaggggaggtagccagagggaaatgagagagagagagaggagagtgagggcaatgagtggtggagaggataagatgctcccacgccgcacgcacgcgaaggccgacggcagcagcgccatcagcgctccgccgctccgccgaaccgccgctcctgcgcggcagcat

SEQ ID NO: 21233 - DNA, 300 bp, Oryza sativa
  unsure (1)..(300): unsure at all n locations
  Clone ID: PAT_MRT4530_26523C.1
ggtggccgtcgaccgcgcgccgtactctgcgcaaggtggacctcgaggcgtacccgggctactaccagatgttagcctccctacaggacaagatcttgtgccacttcaccatccccaagctcgggaacgaggagacgaagctccttnacacggcgagcggcgacgagtacatgccgacgtacgaggacaatgacagcaacttgatgctacccggagacgtcccctggaaaatgaaaggggagacccgcccacgtcttcgcctcaagaaaagctctgaagcagacaatttagcaccaagat

SEQ ID NO: 21234 - DNA, 223 bp, Oryza sativa
  Clone ID: PAT_MRT4530_26524C.1
aaacccgggggcgacccacacgcccgcgtcttctatttacaacaacagcagtcacacacggacaccaagacaagggaagaggaggagctcacataggcagccatggagaggagctctcctctgcctcggcgccgccatcgctcatgctgggagcggacacggaggggaccgcctccatcgatgatacgatggctgcagatccgaggctcgggcgcggcgcacg

SEQ ID NO: 21235 - DNA, 777 bp, Oryza sativa
  Clone ID: PAT_MRT4530_26525C.1
atgccagaactcttggcattgttctcggggcgaactgagcagatcgttcttgcagagtttcgtggtctaatcgatcgatcatcatctacggtgctccagttgttcatggagctaaacaacttgataaaatctcaacgactggtcatggttgatattggtgttcatcatattactcggcatatcacagaatatatgcgggtgctatttgaaaagaagagcacaatctatcaaatgttggatagtaagccaaatgcatttggtgaactagttatgggattggtctcgtctttggagtctatgttggagatgaactctagaagtttggtacttcaagggcagaaacaggtattccttctgaacaatcttcatttcatgattgagcaagtaaagagatgtatagattcgggactcattcttggagaaagttgtcttgttcaacgcgaggaccagcttgatcaattaatcacagcttatatagaagcttcttgggatccagttatttcatcgttcgaaaagcgaactcaagtcgcgataattttgtggccacatcaattgtttgacaagtttaattcttctttcgagaggatctacagtgtacaaaagacttggaaggtgactaatcctaatgtccgcctgaagttgcgtgaggcaatcatccagaaacttatcccagtttatcaaatgcagatgggaaaccaatcagagaagaaacaaatgtcagcgaggtacagtgtggagcagctggagtcacaacttctagaaatgtttgagggctga

SEQ ID NO: 21236 - DNA, 1622 bp, Oryza sativa
  Clone ID: PAT_MRT4530_26526C.1
tttttttttttttttttttttttttttttttttatttctttttcgttggagaagcgctaacattaacagcttaattaacaagaacaaactcgaaacgaactgtatggcctggtaattacagtaaatacaagtaggtgcactgccatttcagtaaatggagatgcgctatgttccttcaacgttgtaagaaagaagtgcaacgctatgcacactcaaaacagtaattcaactttcaaacagcttctaatttacaaactcaaattaacctcatgtgctcttcagaaaggctatactagaacacgaacagtcgaatcaaacatgtaaccacacaacgtacaaaatcgatcattttcatgctactggatgttccttgcacgcatcaatgcttctattttctcaacatcttcaggcgcatccacaccatgggcatcatgatcaactttgattaccttcatcctgtatccattttcaagaactttaagttgctcgagatcctcttctagctgtaatggagttggtggaagctctggatagatcttcaaaaacttggaatcaaagcccgcaatgcccagatgaagaagatatggaaactgaggattgactttccctgatttattaaatggaatcagccctcttgagaagtatattgcataaccctggttatctaaaacacacttcactcgatttgtatcagatgcatcttcaggtttcagtgcagtgacagctgtgctaaagactgcatcaggagctcgctgtagtgccataactacaccatctattatctctggttcaataagaggctcgtctccttgaatattgacaacaatatcataatgcttgtttagcttttgaagagcctcacagcaacgctcagatccatttctgcatgattctgatgtcattattacatcagctccgaatcctctacaacattcagctattctttcatcgtccgttgccacgacaacatcgcccaaaaaggaggcaaacatgactcgttcccatgatctctgaaacatgggcttaccgagaatgtgtgcgagcgtctgaccatgtcgcacgtaacgaaacgagcaattcccaataatggaatccaactgaaagctcagcaagtcactgctgctgctgctactgcctactactgtagtgaaattgcatcctgatgaagaggacgccacaggcacagcagcagcagcagcaaatcgcaacgagaaaacacgaatggaactcatctcgcgggttttcatcaccgattccatttcctcgcttgaattcctcagcacaagctttccactcgcactctcagatccagtctcaacacgcgaagcaaaagcgcaaatcaagcgggtggcgtaggcggtaggacgggagtcgggacctacctgtatcatgggcttgccgaggatgggggcgagcggcttcccctcgaagcgggaggaggcgaagcgcgccggtatgatgcccaccgcgcggccgcggaacccgcccggccgcctgtacaagtaggccgcggccgccgcagccgccgccgccgcgccgagggccaacccgtggaagatcaacgcgcgcccccccaaccccggcgccggcgaggattccgacgacggcgggcagatcggcat

SEQ ID NO: 21237 - DNA, 382 bp, Oryza sativa
  unsure (1)..(382): unsure at all n locations
  Clone ID: PAT_MRT4530_26527C.1
ctctctcacccctcttnctcattcgcccctcgcgccaccgcgccaggagctcgtgccgagcctcgcctccccgacgaagacgacgaggaggtctgtggtagtggtggtatggatcggtgtccatccatggcggggcagcagccgccgaccggaggagcctaggacgacttcttcaaccacttcttcagcatcccctccgccgccgcagacggcgccggcggcgttggaggatttggctcgggtgaccaccaccccttcccgctcgtgcttagcctagacgccgagggcgcctgtgccgtcaggcgccttctcgacgggggccacgacggcggtaggacggaccgggaccccgtgcagctcgcccgcctctttggcccagtgt

SEQ ID NO: 21238 - DNA, 672 bp, Oryza sativa
  Clone ID: PAT_MRT4530_26528C.1
atgaggatggaagaagcaacaatatatcggccgtcgatgacagcggcgtcgaccatcgacggcgcccctccctcctcactctgcgtgggcgacggctcctcactccgcgcgctgcagccgttgtcgtccaaccacgacgccgctcctccacacgcagatgccaccgccgaacctcgcccgctgtccggccagcgccggcgctcctctgcacatcgctgtggttgcctacatggagcggcggtggcatcctcaagcaagccatggatgcagaccctgatctggacgactcgtagatcatgcttcgtggtagtcaacgatgtgcttcagcaagcactacacccttctcatcctcttcaacctctttgccttcgacgtcaacatcatgagagggcaagtggccacttgaagtctgtcatcgtgctgatgggatgtggctatcaagagcttcaagttccttgcgcacatggcgatggagatgggggagacgagggatggcatgcctctttgagctcctatgtcttcgcagccttcctccatttggtgcagccttcctcaatcgagctcccatgggtgcagccgctggcgagccacaatgagagagagagagagagggggggtgaagataagaggaaggatgtcacgtcaaccaaaaccacaatcaatactattgaa

SEQ ID NO: 21239 - DNA, 231 bp, Oryza sativa
  unsure (1)..(231): unsure at all n locations
  Clone ID: PAT_MRT4530_26529C.1
ctgctttgtggtgggtgaatgttgattccaacctgttacctacgttttgccatgtcggttggccaatcaaaatgacgatcatgctgctnccaaagtggcctacaaatactacgatataaaccaacctgctggtgaaaatggttgggtgatgatataattgttacgtttgcgtgaatcatgataaatgaaaagaaaagaaaagaatcatttgttcaaaaaaaaaaaaaaaaa

SEQ ID NO: 21240 - DNA, 1951 bp, Oryza sativa
  unsure (1)..(1951): unsure at all n locations
  Clone ID: PAT_MRT4530_2652C.1
atggcgcccttcgcggcaagcggcagcccgggggcgcaggcgtggccactgggtagccgtgaagctgcagcagcttggcagccagctgggaaccaccgccgtcggggttgggaggcgatgctgcgaccccgatgcgcctccgctagtccgctgtcgctgtgcccgtgcgccgtcaggagtcgggaatcagggtcgggaggccgccagggagaagatcgattgggaaggagagaatcccactctcgaggtccatgctgcatggtggaggccattaatccactatggaggtggttcccgctttcgatgatatgtattcttcgaaatgatccaaaagcagctccacacgtgcatattggtcacaccaaaatcatatcagatgaaccttggcatttaggtactggtcactttgccataagcgaagagacaagaataaagatatccatgggagtgaggcgaggatggaacttgcgtttacagaaattaatgatccaggatggttgctttgtggagtggagagacatgatagcagatgctgctaggaagggctttgctggtggaatatccctacaatggaattcatataaaatcttgactgagcagatgcggcaggagtggttggaaaaagtccagaaaagaagatcaatgcctcggccaacaggtaatcgacgagcaccaaaatctccagagcagcggagaaaaattgcagaagccattgctgcgaagtggctagataaggaataccgtgaacgtgtatgcagtggaattgctagctaccatggaacatcttctggaactaaagtaccacgaaagccaagatctgccagagaacctggttcaaagagagatactgtgaaaaagaaacctattcaatccagatcagctggattggaggatgcatgtggaacgactcccacagttaagagaaagaaaagtgcaactccttacaaagatccaatggctggtgaaaaactagagatgataacaaagattcgagctcaaagggcagccctagaaatagaaaagaaagaagctattaaaagggctaggtcactgattgcagaagctgagaaggctgcaaatgctctggagactgttgcttccacaagcccttttgctcaagcatcacttatagaagctagaaagcttgttacagaggctagattatcacttcaacacgttgatgatgaagggcctgcagatagtgcttctgatgatgcatcacaagactcaggtgcgtctgatttgcacaatcacgacatggcaaatcaaaatgacgtgatcaagcaagagaataaaccagtcaatgggatggagcttcctccaagcaatgttaatggcagagatttctattttgacgtgtcgactctcactgaaacagatcaccttagagattatcagagaatagaaaattctatggaaagagcctatctgcttccttccgcttcttcagctattcaagacgtgaacgaaaatcacaggatgaaagattttaacgcacatcaattaatggttaatgatgaatcaataacaattgaccaaattgcatctgaagtagcagaaatttatcctgacgagccacaggaggatgacacgctacctgtgcagaagtctaaaatgaggtgggtacgtgggcgactagttgaagtggaagaataaacagttaccagaattatattggttgactaaactgttcaagatatcattatcttgcattccgcttctgctttgattactgttggtatggaccaaaatgggaaatgattgctgatcttggcacgtattcatggtgcattcaaccatgggaattagtcgggaatacgccatgacagagcctattatattctgaggtgagatgctngtaattagtagttgccaactttagatatttcctcttcttgatgtagtcaggtagccaaactgaaacctaaaatcacgggtggggatgcattat

SEQ ID NO: 21241 - DNA, 230 bp, Oryza sativa
  unsure (1)..(230): unsure at all n locations
  Clone ID: PAT_MRT4530_26530C.1
agacttctggangccaaccacgaggttagctcagagctcactctcccagggggcgggttcgttcagtacnggagcatgtgcgcggggcggggcaggggatctgcagggcggagcagggggtcgtcgggggggcactcctccgggatgtccatgggaagccgtgaactcctcgangacgcggggcacctcgttgacgctggcagctgtcgccgagatacgggggcgcgccg

SEQ ID NO: 21242 - DNA, 760 bp, Oryza sativa
  Clone ID: PAT_MRT4530_26531C.1
tttggtgtgtgtgtgttcttttttttttttttttagaaacgagcattcattcatatattccattccattccaacaagatttctcaagcaccaaacccatcacaccatcatccaaccgttcatcaaaacctaacctaacaacctacaaaggatggatattactaagatgggagggggaaaagaatcggatcaaagaacagggagcaacaaggttcttgattccgagtagcggacccaagaggggatcctagaactcctgggaggcggatccgatgtcggccttgtccttgccgcccttcttggggagcagcgtctggtggatgttgggcagcacgccgccggcggcgatggtgacggcgccgagcagcctgctcagctcctcgtcgttgcgcaccgccagctggatgtgcctcggcacgatccggttcttcttgttgtccctcgccgcgttccccgccagctccagcacctcggcggcgaggtactcgaggacggcggagaggtagacgggggcgccggcgccgacgcgctcggcgtacttgccggccttgaggtacctggcgatgcggccgacggggaactggaggccggccttggacgaccgcgacaccgacttggagcccttcgacttccccctcccgccgccgccgcccgcggaactcatctcctctacctgaatcgacggaaacggcgcccttgttcgcctggtcactcgccggagagatcgccggagcagtcgccgcggtggtggtgggaactac

SEQ ID NO: 21243 - DNA, 472 bp, Oryza sativa
  Clone ID: PAT_MRT4530_26532C.1
tttggtcagaatttatctggccaaaatggctttgcattgttgttgactggtccaaatatgggcgggaaatctacaataatgcgtgccacctgcctagctattgtgcttgcccagctcggctgttatgttccctgtcagtcatgcgagttgacacttgcagatgccatatttacacggattggtgcaatggatcggattatgtctggagaaagtacctttcttgtcgaatgcactgagactgcatctattcttgagaatgcaaccgaggattctctcgtcttgcttgatgagcttggcagaggaactagcacatttgatggatatgcaattgcatatgcagtattccgacaccttgtcgaagcggtccgatgccgtctgctctttgcaactgactaccatcctctcaccaaggagtttgcctctcacccccacgtcacccttcagcacatggcctgcatgctgaagccaagaa

SEQ ID NO: 21244 - DNA, 3735 bp, Oryza sativa
  Clone ID: PAT_MRT4530_26533C.1
atgcagccgcggcggcggcagcagcagcagcagtcgatcctctccttcctccagaagaagccggcggcggcggcgggggaggagggcgcgacgcccgagaggcccccgcggcctcccgccgcgtcggtcgcggggatcatggagaggctcgtgcggccgccgcggcagcagcagcaggggagagaccaggatgcttcccaggctagacatgtggagcagagagccttacctgtgaaaaatcaaactacttcaaatgagtgctcaagtgcattgttcttagaatcttgcaatgctggagataacaaagcagccatgttgattgcagaagaaggttcgaatatgactcctttgcaggagcccctgaagtccttatggccttccaaagatgactttgttagagcaagcacactgtccccggaacttggtttatatcaaaatcttccaccgcattgtccaaagaagttaccctttgagtcttccaataataactgcattggagctaattcatcatttgaagagtttgacgtacaaactcctcaggatacttcaaaaacagtcttctggagatcttctcgtggagctgatacacctttaacagaatctgattcagatcaaactcctttgcagcatccatcaaagttctcatttgtatctcctaatggtgaatatgtccggggcgctacactgtttgcacttgattccaattatactcctagacgagaatcctcagagaagcttagttctgggccttcagaccttccatacattaaagcaacaaaattatttacagaatttgattcaaatggaacaccatcacagaaccatctgaaaaagttatcctcagtgcctaagaatgacaaacgcattggagcaggtgctgaactattttcggaatttgatccgagtcccctgaaaccagaaacaccagtgatgcgagcagtaattcctcgtctgaagcgggttcaagaagatcaacgtgtgactaccaacgactcatgctctcctttctggggtccaaacaagaaggtgaaaccagctcagtgttctccagttgagaataaggtccatgatgaaatggctgaaagtgcacgcagcaagtttgagtggctgaatccttcgaatatcagagatgcaaatagaaggcggctggcagacccactttatgataagacaactctttttattccacctgatgcattgagaaagatgtctacatctcaaaagcaatattggaatattaagtgcaagtatatggatgttgttttgtttttcaaagtgggaaaattctatgagctctatgaggtggatgctgagattggccaaaaggaacttgactggaaaatgactatcagtggggtgggaaagtgccggcaggttggcatttcagaaagtgggatagatgttgccgttgaaaagcttttagctcgagggtataaagttggcagaattgaacaaatggaatctgcagaccaagccaaatctagaggatcaaattcggttattctaagaaaattggttcatgtatccacaccatcaacagtaggggacagcaacattggggctgatgctgttcaccttctttcactcaaagagattacactagcttcaaatggttcccgggtctatggatttgcatttttagattatgctgcacttaaaatttgggtgggttcagtccatgatgatgatacatttgcagctttgggggctctgctggtgcaggtctctccgaaagaaataatctatgaaacctcaggcctttcaaaagaaactcatagattaattaagaaatatgcttcagcaggttctgtgaaaatgcagctgaccccactatatgggttatatttctctgacgtttcagaaattcaaacgttaatagattctagaggatactttaaagcgtcaacaagttcatggttatctgcattgaattcttcagtgaataaagatgcagttatttgtgcactcggtggacttctagaggatgctctgaaaaacggggaggtcttagcctaccatgtatacagaacatgtctaagaatggatggtcagactcttgtgaaccttgagattttcagcaacaactttgatggtggttcatcaggtaccttatataagcacctcaatcactgcataactccatgcggtaagcggcttctaagaagatggatttgccacccactaaaagatattgatgctatcaatgaaaggctcgacattgttgagggcttcattcaaaattgtgggctaggatctgttacactagagcatctacgtaaagtccctgatctcgagaggttactaggacgagtaaaatccactgttggtttatcatctgcggttctgttgccctttgttggagaaaagatattaaaaagaaggataaaaacgtttggcatgcttgtcaagggcctccgtgttggaattgacttactagacatcctacaaagacaagatcatggcatctcagcattgtcaaaggctgtggatattccaacattgagctcccttggtgaattaattcatcattttgaagaggcaatagatgatgattttccaagataccaggatcatagtgtcaaagacgatgatgcaaacactttggctatgctagtggatcttttagttggaaaagcttctgaatggtctctagtgatcaatgctctgagcactatcgatgtgcttaggtcctttgcagccatggcattgtcgtcatttggcacaacgtgcagaccgaacattctgctgaaaggaaaagcgcctgtacttcagatgaagggtttatggcatccttatgcttttgcagaaagtgtaaatgggttggtaccaaatgatctatctcttggtcagaatttatctggccaaaatcgctttgcattgttgttgactggtccaaatatgggcgggaaatctacaataatgcgtgccacctgcctagctattgtgcttgcccaggcttccctattcgagtgtataattgaagttgcttctgatctgcagctcggctgttatgttccctgtcagtcatgcgagttgacacttgcagatgccatatttacacggattggtgcaatggatcggattatgtctggagaaagtacctttcttgtcgaatgcactgagactgcatctattcttgagaatgcaaccgaggattctctcgtcttgcttgatgagcttggcagaggaactagcacatttgatggatatgcaattgcatatgcactaatgggatttatgaccttattacacctatcgattaaggtattccgacaccttgtcgaagcggtccgatgccgtctgctcttcgcaactcactaccatcctctcaccaaggagttcgcctctcacccccacgtcacccttcagcacatggcctgcatgctgaagccaagaaacggcggcgacggcggcgagaaggagctcaccttcctctaccggctcacctcgggcgcctgcccggagagctacggcctgcaggtcgccaccatggcagggctcccgaggtcgatcgtggagagggcgtcggccgccggcgagatgatgaggtcgaagatcgccgggaacttcaggtcgagcgaggagcgtgcggagttctcgaccctccatgaggagtgggtgaggacgatcgtggcgatcggcggcgtgaaggacgcgcacctggacgaggacaccatggacacgctgttctgcgtcttccatgagctgaaggctcacttcaggaaacggaggtga

SEQ ID NO: 21245 - DNA, 206 bp, Oryza sativa
  Clone ID: PAT_MRT4530_26534C.1
ttcacgagagcgtacatgagttctgaaaagttcaaacatcatattgtggagcatagaaggtagaatgcagcaacaacgtagagcatctttcaaatttactctacttgctatggatgaatgcaatgcatatgcacgattcgatcctcttagtcatagatataggtagactcaactacacatacatttgctactacaggaacaagtga

SEQ ID NO: 21246 - DNA, 432 bp, Oryza sativa
  Clone ID: PAT_MRT4530_26535C.1
atggccgatggcggcggcgcgggcgccccgccgaatgttagagggaagtcgcggggatcggagcggaagcccggcggtggcgccgcctcggccgcgggagaggaggagggcgttgggccggagtcggttgcgggggaggctagttggagtggctacgaggatgattatccgatggctagggacagaggccatccgatgggagccgttttctcgctgccgcccgcgcccgccgcccctttgccgccccgccccatggagtgctcctccaccctccgcaggaacgcctcgtccttcccggccaagaacagctctgggcacacaggccccgacgccaccacgttcgcggttgtgctgctgtccagggtttacgatttcgacgaaattaggtcggatttcgcgaaatttcgacattccgacgaggctcgaaagtag

SEQ ID NO: 21247 - DNA, 756 bp, Oryza sativa
  Clone ID: PAT_MRT4530_26536C.1
atggaggttcaattcttactttctatgctctatgggaggcctccgtgtttgcaaagcactggctaccattctgcaaaaagttataacattgagccaaggccaccagctgctttcttcgtggagtcagaagggcatcacaatctgtgcaccccaaaagaatggtcatttatcaagatacttatagatgggaaaagccaaaatgtagtagatgatgacggaaatgtgctaccaagcctggtatacatggcacgtgagaagaggcctcagtaccaccataacttcaaatcttgggctatgaacgctttgatatgtaacaaccctattatcttgaatgtggactgcgacatgtattccaataacagtgactcaatcagagtaccctcagaactatacaacatgaccaagaacaatatatatggaaattccctccttgttctcaatgaggcttgtgaagggcacccctctattcccagaggggatacattgaaaggatgttggaatggacaaaggatgtggatggttagaagaattacctcatatctttacgacctcattgataccatccgtaagttgctaggactgtcgaagatgacatttgcggttacagcaaaggtcatcctctgtggaatgatagtgatcactagtatcccaatttatgaggcaatgttcctaaggaaggacaaagggagaataccatcatcagtcacactagcttcccttggctttgtaatgttggccttcctgataaaatactag

SEQ ID NO: 21248 - DNA, 565 bp, Oryza sativa
  Clone ID: PAT_MRT4530_26537C.1
atcagcttcatgagctagcatctgacctcttggcgttcaccttgttggtgttgttgtgtttctactgcctaccggaaatgaatgttggcacaagtggtgcggtaggagaagcggcagggaggctgccgacaggcgcagtgaagacttacggatgagcgttgtgagatcaggcagggggggggggagtacgtgcagcacttccgtagccacgagcccggtagcaaccagtgaaaatcctttgtcaccaagcacgacagagtgcccaccaaactgaaagaagattggatcaaagcgaggtcggaagcggaaatcgagtttggaaacagagcaggaatcggccggagtccagatcggctatggttaggatcggctaggtctgagttgggctaagtaagtcgatacagccgattccgacaatatgacttgtacacgacatcgggttcaagttaatgtacttcaagatgattgccatgcacggatagaggcccgggaaggcaattgtatctattaattaggatatcttatgtaaattccttatagattaatatgggcaaaagtctgccgc

SEQ ID NO: 21249 - DNA, 813 bp, Oryza sativa
  Clone ID: PAT_MRT4530_26538C.1
atggaggttcaattcttactttctatgctctatgggaggcctccgtgtttgcaaagcactggctaccattctgcaaaaagttataacattgagccaaggccaccagctgctttcttcgtggagtcagaagggcatcacaatctgtgcaccccaaaagaatggtcatttatcaagatacttatagatgggaaaagccaaaatgtagtagatgatgacggaaatgtgctaccaagcctggtatacatggcacgtgagaagaggcctcagtaccaccataacttcaaatcttgggctatgaacgctttgatatgtaacaaccctattatcttgaatgtggactgcgacatgtattccaataacagtgactcaatcagaggtacgttgtgcttcttccttgatgaagaaatgggccacaaaatcggatttgtacagtaccctcagaactataacaacatgaccaagaacaatatatatggaaattccctccttgttctcaatgaggcttgtgaagggcacccctctattcccagaggggatacattgaaaggatgttggaatggacaaaggatgtggatggttagaagaattacctcatatctttacgacctcattgataccatccgtaagttgctaggactgtcgaagatgacatttgcggttacagcaaaggtcatcctctgtggaatgatagtgatcactagtatcccaatttatgaggcaatgttcctaaggaaggacaaagggagaataccatcatcagtcacactagcttcccttggctttgtaatgttggccttcctgataaaatactag

SEQ ID NO: 21250 - DNA, 787 bp, Oryza sativa
  Clone ID: PAT_MRT4530_26539C.1
atggtcggcgcgtcggtcgctcgcctttctctactcgatgccacccttctcgcgcggctccgtgacggcgaggcgaggttcgagctcctcgaggactccgcggccgcggccgcggcctcgcccgctcctgctccagtttggcccggcctcagctgcttttctagggttgctacctccctgaggggcgggtggtcgggggcgctgaacaaggtggagcactacggggtccagagggtcacgggtgatggccggtgcatgtttcgggcgttggtgaaaggaatggcaaagaacaaggggattccattgacctcaagggaggaggtacaagatgcagatgatttacggatggcagtaaaagaagttatctgcgatgatgagactgaacgacaaaaatatgaagaggcagttatagcaattactgtggatgaatcattgaggcgctactgccatagaataaggcgatctgatttctggggtggagagtcagaactcttggttttgtctaaattgtgtcggcagccaatcattatttatattccagagcgtgagtaccatgggcgtggaaatggctttattcctatagcagagtatggactggaattctccaaggactcaaaacagtggaagaaaaaggtgccattttttgcttgcgtctctgcagacagcttcgatgctactccatccattccaaattgatctaatatagttttttggaagttattctccaacgatctaaaaaaaaaaaaaaaaaaaactcgagactagttctctctctctctccctcgtg

SEQ ID NO: 21251 - DNA, 178 bp, Oryza sativa
  Clone ID: PAT_MRT4530_2653C.1
attgctttactgactattagtccataatttcaaaggcttacccaccatcacatatatccgtgttcccctttcactccttccccgcggaatgataaagaatgtcatatgtaaatggactcctatcgttctacagaaaatggagataacatattgccagagtataaaaaaaaaaaaaaaa

SEQ ID NO: 21252 - DNA, 224 bp, Oryza sativa
  unsure (1)..(224): unsure at all n locations
  Clone ID: PAT_MRT4530_26540C.1
catatangccgtaatttaggnttttgntgcacacgcatgctactctcgcaatgccagtatatatcgtccatcatttggtctgcctaatataatgaatgtaaggtacaggtnganttttcgtnggtgtatttaattgtgtgtctgtgtactcctacgtactgtctannnatttttcacggngcanatccnnntnaacattagtgcaaaaaaaaaaaaaaaaaaaa

SEQ ID NO: 21253 - DNA, 10431 bp, Oryza sativa
  unsure (1)..(10431): unsure at all n locations
  Clone ID: PAT_MRT4530_26541C.1
gcccccgccgcctccctcgccctccctccccctccccccgccccgccccgcccggggccgcccgccgcgcccccccccgcctcgcctcgccgccgcccgcggccgccgcccccgcgggcgccccctcctccccccccgcgccccccggccgccgcgccgccgcgtccgcgcgcgcccgggcggcggggggcggcggggcggcccggcgggccctcctggcctgctcccgctcgccgtcgcggcgtcgcggcgcatcggtgcttggttcctcgtgctgctctccggccccctgccctcgctgtctccgtcccgcccgcgcgcgggggggcccgctctgcttcagtggtttagttggttgagctccccccccccatcttgcccttccgctttctcctgggtttcgttgatgcgtagtgtagtgctagtagcagcttgtgtttccataaatgtttgggggttctgcttatgccccatatgtgacgtcctgccaagctggattgcgttctgttttattactgtaattgtcaatggccgaatcatttttagggctgtgtggtttagttggccgagtatatgcaatagtggctagtaagctatcccattttatctgcaataagtaaggtcggaatatgcaagtagcnaagctatacaatttncctgttgcattgtnagcgggctagtggagctattcccttttttctgctggcagtaatgtcggtggttgcagtagcgagcggtaccatttcctgtgccttgtggcccctggggcgctttaccaggggttcggcagcaaggaccgtcggtatctgcagtagcacgcgatactgtgtcctgtccatggtgcaggcggtctgtattatgtccccgaaagtttctcttgtatgtttttattcaagcaatgttgcttggtaccattagcaggtgaacgggtgcctaccaacaatgtctacatctcgtgaagtagatgatgggcccgctgtgctacagttatatagatggaaaagctcccaaccgcatatgcccttagtcttcgtgtttccggcatgtcgaaatggtgatgggcctaatccacacgctgaaagtcccaaaggggatcttatcttgtcaatgaccaatgttgatcaatcacaagttgaatcaccttccctctcagatagctgtagtccagtcgtctttgattgcttctcttctattcctagagtgaagtctttagcatgggggcaatgttataatgcctctagccaacttgaggattcaatttttaatgaagttcttgttgtatctgatgatgattctatcacacttcatgggttttgtcattcttacaaaagcacactaacagacaattctaaattggacactggagatttgcatggggagtggaaagagtggcgtcctactcagtgttcagttccggaggatgatgaggcaggtacaaagaacagttttcgttcttttctgactacaatcagtggatctgtttctgatggaaaataccaagccaaatttcctctaaaatcttcacttccgcattcagcagaggtggtatcgtttagcatatacgacattactctatcttttattaagttctggtctagcaattatccttcaaagacctggatgcaaaacgatactaaatcccaacaaggttttcttggtcatgttcctacaactgaaacatcctgcaactgccagtgggaatgtttgaaggttttgcctagttcttcaggttatttgattggcttggtcttaattcgtaatgaaccagtgagctgtgaggtccatcaacgcaacatgaaggatattttggttgttgttattgagctaaatcagtggggtatacagtggaactttgtggcagaccttcagaatgtatatgatggtgctgttcctaatcaacaatgggttgatttccaattgtcagatgattttcttgcatgccttaactcgggagggtttgttgtcatttggaatgtgagaacttgtaacattgccgcctcctttagtgttcttgaacggtgcagaacagatatagatattcctatggggagcatcacccccaccgtaaaaacttctgatggagaaaatatctatattgggaatcatgcaagaagaatgtttaagaggttagttttggcatcatattctcttgttcttgctgtcgtagatgaggttggggtaatctatttgttctatgccaaggacatcttagatttcaaaaccagtatgcatggaaactttcatccgccttccatgttttatcgtggtgatagttttgctgcctgggaagctgctggtcatgatattgggagtgtaacattttgttgtcatcggtctgtacagcaattggtctatgacttctcagaaagagacaatcctggtgttgtcaggcctaggaaaagaagaaaacattgtagcagtaatgaaaatcaggtggatagctggccaagtggtttcagtactacaacaccgatgaaagatgggttagcttaccctgatacaatggcagtttccaatccattaagaagagtgatccttccaccatgcagattacaggagaatataattagcctctcaccatttgggttaacgagaatctttaaaagtcacaatgcggatggaaacaagcattttagaattgttcacacaaactttcttatggcttcattacaccttgatgagagggatattgatgctagtttccttaaaaggtcctcatttcagaaggactctacttttaccggagagtgtgtcctttgctcctttcagggatatgtgtatctgattacccaggatagcctttctgtggttcttccatcaatttctgtttcatccttttcatctcacaacaatggcatcaaattttggcaaccgacttctgctggtggtagtgcatgcgatgctctgaatttgtcctcagtaaacagacctgaaacaagatggaagccttggcaaatagaagttttggacagggcattattgtatgaaggacctgcatttgcagacaggctctgctgggagaatggatgggaccttaaattctctaggttacgttggctgcaattggccttgcactacacaaagatcagtgatcttgagcagctgatggttttagctgtgcgctttgcgacgagaatgatcaaatgctatgggctacttaagcaaaataaggatgcaccagataattcagtaaaacttcatgaaatggctttccttttgggggtaattagaagtatccagagccgaatctctgcaaagaaccagaattctattcggatgggtgatgacaaaaactcatcgaaaataggtgcagaagtatcactgaacacttcactgccaattgttgtagtggatggtgtttcagcaggacaatcaggtggtatagaatctcgtgataggcaagagtcaacacctgcgatgtttgagttagtttctggtagcaatggacaattagctttaactccagttgaatcctctattagtgctactatgcatcatgccattgatactgatcaagttgtaataccaagtactcaaggaaatatcaaagatatgatgaaccggtgggaaacgaataatctggacttgagaactgtagtaaaagaagcactgcagtctggtagactacctttggctgtccttcaactgcaactattgcgccagagggaatcattttccaacgatccagaagatgttttctctgaagttcatgaaataggaaggtccatcatatatgacctgttaatgaagggtgaaactggattggctgtcgcaaccctggaaagactaggagatgacatagagtcagacctcagacaacttatgcaaggtacagtcaggaggctacttaggcggcaaattgccgaggagatgaagaagcgtgggtacatgagttcaaatgagtggaagatgctggagataatatcattgattgagcaattttacccaagcagcagtttctgggacacgtatcttggcagggagaatgtcattcacgatgctgcaaaaattgttactctaccaggagaagataaaccagtactagttctcgatattcataaccactgtcctattgaatgtggtgatgttgatggagctgtgatcggttcttgggcgaatgtgaatgattacactaatttgaaggagttctctgaaagcattttatctgatggttattgggcctgtgctgccatatggtctgatgcttgggatcaaagaactgtggaccgtataatactggaccagccttgtcacgcacatgcgtatgctcatttctcatgggaatctcagtttgaatattttgttgctcataatgatgtgctggaagtctgcaaactcctggacagtattcctgacagtgtacttctagaagggattcttagagtgaatgtggacaattcacaagctacttacaacactctgtctgacgtagcaacccacggttataaaatgtacttatttgactcagaagagatagaacctgtttgtatggaaataccacatgtcaaagtgttcagatctttgtgtaatcatgaatcaacttcttggatgagaatgatcatgctacaggaattggcaaagaagcatatctttatgaaagagtactggcaaagcactactgaaattatacctatacttgcccgcgcgggcatgcttgttaatacttcagagctttgttcagatgttctacatggtgcataccaccaggattgtgacggagcattacacaaattagtcctacgcttctgtgtgcagtataacacaccaaacctactggacctctatctggactactgtaacttggctcttgaaaaggattctattcctttgctcaaggaagctactggtgattgcaagtgggcgcagtggttactcttctccagggtcaaaggttatgaatacgaggcatccttttgtaatgcactttggaatctgtcacaggaaatggttaggcataacaatcttgctgctattgagatagatgaaatactgtacactgttgatgatatggctgaacgaatcggggaaatgtctgctctagcaaccctgatgtatgcttcaacaccaattcagaagtccatatgtactggaagtgtgaacagaaatcgtggggtatcttctcagtgcacattagagaatctaagccctcaccttcagcaatttccaacactatggaagacccttctttcttcttgttttgggcaagatgggtatggttgtttaaactgttctccaactaatgctggaggagacacttcattgttgcaaatgctcccatgttggttcccaaagtctattagaagattagttcagctatttgaacagggcccttttggaatgcaactgctatcaaatgcaccatcatccgaagagttatttactcacagtgtcacagattatatatacaataccgcagggtatagcgaagctaatgctttgtccttagaagcatccatccaaaaaagtgttgaggaagaactatactcttcccttgaggagaaagacttgagggtggaacatcatttgcaccgtggtcgagcactagctgctttcaggcatcttcttggtaaaagagcttcacagttaaaatcagccaatgcaagccaagtgatctcagtgcagtctagtgttcaagcagatgtacaattgatactagctcctttaagtcaaactgaacgacctattcttctatcggtagctccacttgctatcacaaactttgaggactcaactcttgttgcttcgtgcacattcctgttggaactctgtggtctctgtgctaacatgcttcgtctagatattgctgcacttcaacgtatctcctcctactataagtcatttcagcaaaataaacaatgtgatctatcttcaccgaggagtcctgggctacatgtactctcccatggagctgaccttgctcctactcttgcccgaacattagcagaagattatatccagtctgatcatcttcatgttttggagcagaagcagccctctaaggctcccaagagggaacattcatcacaacctcttaaagctattctgcatcaccttgaaaaagcaagtttgccagtgttagaagaaggtagaacctgtggattttggctcttgaatggtattggtgatgcatctctttaccgaacacagcaaaatgaagccagccaacattggaatttggttacagaattctgtcaggcacaccatctgccattaagtacaaagtatcttgctttactggccaatgacaatgactgggttggttttttaacagaagctcaggtgtcaggttttccaattgaagttgtcattgaagtggcagccaaagagataagggattcaagattgagaactcatatactaacaattctgaagaacatgatgtcagctagaaggaaatcctctagtaatgtatcttcaggaagtgattcctctttctttgctgttgatggtgacaactctatggaacttttctctgttcttgctgtctgtgaaaaacaaaagaatcctggggaggccctcctgaataaagcaaaacaaatgcagtggtctttattggctatgattgcttcttgtttttcagatgtgactcctctctcatgcttaagtgtttggcttgacattacagcttcaagggagatgtcattaatcaaggtggatgatatttcctcgaaaatagcaaaaaatgtgggatccgctgttgaggccacaaataaattaccaagcatgagtaggaatgttgaatatcgttacaacaggaagaatccaaaacgaaggcgattcctagaggcttctcaagaaagcttcacatcaggtttctcatcatgtggaccaagccctactgcaactcctaattttccaaattttgatgttcagcagaaaatactgaagcccatatctgaagagactaaaattccagttgatattgatgaaagatttgcatctttgtcaagtatggtagcagtgctttgtgaacagcagttgttcctaccattgcttagagcttttgaaatgtttctgccttcgtgctcccttctccccttcattcgatctcttcaggcattttgtcaaatgcgtctgtccgaggcttctgcacatttggcatcattttctgcaagactgaaagacgaaacatcccatgctcaattaaactcttccaaagaagagtcagctatggcaggatgggtagctgttactgttgtaaaagccgcagatgcagtactctcgacatgtccatcaatttatgagaagagatgtttgctacagctccttgcagtggttgatttttctgatggtggctcctcagcagcttactttcgccgaggttattggaaaataattttggctgaaccttctgtatgcaaagatggtgatacctacaagtggaatgattccatggatgatgcttccctcttagcatcattagaaaaggatggtcgatgggaggaagcacgaacttgggcaagacaactggagtcgagtgatgtagcttgggagtctacttttgatcatgtgacagaatcacaggcagaagctatggttgctgaatggaaggagttcctctgggatatcccacaagaacgtgcagctttgtggagccactgtcaatcgcttttcatgaaatattctttacctcctttacaggctggatcttttttcctcaagcacgctgaagcggtaggagaagagataccggcacgggagcttcatgaaatacttctgctatctttgcaatggctaagcggaactatgactaactcctctccggtatatccacttcatcttctccgtgacattgagactagggtttggctcctggccgtggagtcagagagtcagtgtaaagctgacggagaatatgcaccttccagtgttactcaaaatctagctactggaaacaataccaatattatagaacaaacagctgatgttatcacaaaaatagacaatagtatgagttcaccacggatgagaataacagaaaggaatggtataagggacaacaccaccccatcattccatcaacatttgcaactctttgagtctaatggcgaaggcgtacataacacaagagcaaggcgaagatcaaagacaaatacgctacttagacgggttgccaaggatagtgttgaaagtagcataaatgattctggtgataattctaactcctttaatagctcaaagattgctggacaagcaagaagtttactgtcagaagaggagtttgcaaagatggaagtgtctttatccggttgggagcaaaatgttaggcctgttgatatggagaaggctgttctctccttactggaatttggacaaataactgctgccacgcaacttcaacaaaagctgtctccatcgtatgttcctgaggaacttgtccttgttgatattgctttaagagttgccaataacagcagtaatggagagatcagtttatcatgctttgacccagaagctctttcaatacttcagtcactaggaagcaatacgactgatccatcagagattcattcattttatgagtacaatagtgctccggttatggagaaactagccatgaaatgtggcgagggtcgtggacgagctcttgtcaggagaatagcagcagttgttcaaactgcaaaagtactgggactcccattttctgaagcatttgagaaacagccaattgaacttcttcagttgctttctctgaaagctcaggattcttttgatgaagctaaatttctggtggagacacacaccatgcctgcatctagcattgcaagaattcttgctgattcctttctaaaggggcttttagctgcacatcgtggaggttatctggattcccaaaaggaagaaggccctgcacccctgttgtggaggtctagtgacttcttgaagtgggcaaagctatgtccatcagaaccagaaattggccatgctttgatgcgtttggttatgactggccatgaagtaccacatgcttgcgaggttgttgaactcctaatactgtcctaccacttctacatgtcttcttcttgtctcgatggagtggatgttctagtcacatttgcagctaatagagtggagtcgtatgtgtcagagggggatttttcttgtttagctcgcttgatcactggagtgagcaattttcattccttgagcttcattctttccatccttatagaaaatggacaattggagttgttacttcaaaagtactctgcaactgactcagccactggggcacctgcatcagttagagggtttaggatggctgttatcacctcactgaaacattttatcccaagtgatgacgacgctctttctctggtatataagcactttgacatgaagcatgaggctgcttctctccttgagtcacgtgcagaacaatacatgaacagctggttatctcgatatgacaaagaaaggaggaatgatgagctccttgaggctatgcatcaccttgttgagatggctgaggttctttcaacaattgatgctggccaaaggacacaccgggcgtgtgcgcgagcttctctcctatcacttcagatccgtatacctgaccttctgtggattggtctttcggaaaccaatgctcggcggattttcgtagaacaatctaggttccaagaggccctcattgttgctgaagcatacaacataaatcagccgatggaatgggctccagttttttggaaccaaatgctgaaaccagatctaattgagcaatttgtggctgagtttgtgttggtgctgcccctgcagccaccaatgctactcgagcttgcaagattttaccgggcggaggttgcagccaggggggaccagtcacacttctcggtctggctttcgcccggaggcttgcctgcagagtgggtgaaacatcttggcagatcgttcaggagccttctccgtcgaacgagggatatgaggctgaggctgcagttggcaactcttgcaacgggatttagtgacgttcttgacgcatgcaatagtgttttggacaaggttccggagaacgctggccctctaatcctgaggaagggccatggtggtacatacctccctctcatgtaaatccttccattttgatccatcttgttcaactttcggcagactgaatcttacaggagttcagtatatagtgaggtgagaatttttcccgtcctttctttgggcctgcgttcagcattctagttttttgatacatatggatgaagccatgggagatattcggtttgtatatatacaagcattctgagtggataagatgaacatagccgattgagagtgagtttttgcggcttcagtcggtggaagttttcgtgtgggttgtagcgccgtactcgtggtgcctgatgtctgtagtttgttgtaaattccattgacccaaccatgaaattttgtacaattttcttcacgtcacttatgcttcac

SEQ ID NO: 21254 - DNA, 690 bp, Oryza sativa
  Clone ID: PAT_MRT4530_26542C.1
gaaaaaaaaaagaaagcattgccttctttcctgtatcttgtatttatcgtacttttgccttggggagtctctttctcttttaacaaatgtctggaactttggattaagaattggtggaataccaggcaatcccaaactctcttaactgctattcaagagaaaagagttctagaaagattcatggaattagaagacctttttatcttggacgaaatgataaaagagaaaccgaatacacatgtacaaaacccccctataggaatacgcaaggaaataatacaattggccaaaatagataatgagggtcatctccatatcattttgcatttctcgacaaatataatctgtttggctattctaagtggttctttttttctgggtaaagaggaacttgttattttgaattcttgggttcaggaattcttctataacttaaatgactcagtaaaagctttttttattcttttagttactgatttttttgttggatttcactccacccgcggttgggaactactaattcgttgggtctataacgatcttggatgggttcctaacgagctaattttcactatttttgtttgtagttttcctgtgattctagatacatgtttgaaattttgggtctttttttgtttaaaccgcctatctccttcgcttgtagtcatttatcattcaattagtgaagca

SEQ ID NO: 21255 - DNA, 159 bp, Oryza sativa
  Clone ID: PAT_MRT4530_26543C.1
atggagaacaactacacactcgttgatcatatcgtcctttacgctattctgacaaagcctccaagaaacctaaggggattccggctggggacgcccagagctgataaggccttgaaagtcagacttcagggttttgtcgcagactctacaactacttga

SEQ ID NO: 21256 - DNA, 251 bp, Oryza sativa
  Clone ID: PAT_MRT4530_26544C.1
gaatgaaaacatttcataagcttagccaccaagctaataatccacaagcatagattctttccatttttaggggaaaaatgtgccatccagattaagcagatgttacaggtggggcacatatagaccttccactcaaatttcagaaacagaaacacagggatctcagacagagacaggcaggccgagaaggccagggaacaacgtacaacggcagcattacttaatggacctttgcagaaacttacggtgga

SEQ ID NO: 21257 - DNA, 1032 bp, Oryza sativa
  Clone ID: PAT_MRT4530_26545C.1
atggcgacgtcgacaccgccgccgctgccgtgcctcgtcgtcgacaacggcgaaacggcggcgacgttgtacggcgtctccgacggcgagcaccggccgtgcgaggccgaggagctgcgccgcaaccggtgctgggccacctcgcacggctgggtgctgtgctgcgacccggcgaccctgtccaccttcctgtggaacccgaccggaggcgacgacgacggcggcggcggcggcggcaagatcgcgctgccgccgttcacgcagccgccgccgccgcccaattcccagtgcgcgctgtcacgcgagcccacggacgccggcgccggccgcttcacggtggtcatcgtcgagccgtcgggcagctacgtcctctggtactgccacgtcggcggcggcggcggcggatcatcgtcgtctccgtcaccggcggcggggtggacgaggcacgagtacgacgtgggtggcacaaacgtgagggtcgccggcggccaccgcttcgtgcggcggtccgtcgccggcctgacggcgtgccgcggcaggttctactgcttccacaccgccaccgactacggcgtgctggacttctcgccggcgccggtgttcggcacggtgccgatgagggcggtggacatggcggagaaggtggcggcgggggaggccatggccaaggcgtccgtccacacgctcgagatcggcggcgagctctacatggcgtacatcttcttccacggcgacgacggcagccgcgtcgtcgaagtcggcgtctaccggatggacttccggaggcgcagggcggtgagggtgcgcagcgtcggcgaccgcgccatcatcgccggctccaacatcggcgggtggtgccccgccggcggcgagacggggctgcgacccaactgcgtctactggacgagcccgtacgataaatgcttgcacgtgtgtgatattggcgccaacgccaggaaattgcgagagccttttaaaggactcgcgaagctgccgcatagatcgttttggatcatccctgtgcataagtga

SEQ ID NO: 21258 - DNA, 581 bp, Oryza sativa
  unsure (1)..(581): unsure at all n locations
  Clone ID: PAT_MRT4530_26546C.1
gaagcgtncaatgtccatagtcacctgctgggtatttgtctctgctatttgtagaagggatatagaatggggtagagtcatgactcataagtagaagttatgttggattgcccgtaagctgtgccgcatggactagaatccacagaggacccacgtggacctagaccacagtgatgtggtggtggattttactgcttgttagtttgattgatacatcttggggaggccttaagcaccacgtaggatgcttgcctggacacctggaataggatggccngtggctagcatgaaatggcaatatatgccccaagactgcctgcatccaatggcaactggcaagatgagatgtgtaacaaggagtgtgggatagctggatgagtgtctggtgaccaatgatntgatgcaagctgacctgaaaaggaatgctttnatggtgtgggtgcctgtgccacaatcacctgtggtggtggaattcttgttattgtgtgtataagggngtaaccagtgtaccagttgtgtgtgaaaaatcgaaggatacgttttcagaaaaaaanccncccaaanaaaaaaaaaaaaaaaaa

SEQ ID NO: 21259 - DNA, 325 bp, Oryza sativa
  Clone ID: PAT_MRT4530_26547C.1
atgacgaacaccggcgacaacagtaacactggagacaaggagaaggaggctcccgttaacaccaacggaggcaatactgcctcaaactccagcggagagccattctcggggtataacgatttactattaccgtttgttcttcgtttcctactactgtcagtcgcaatgttattgcgttgccttgtctatgttgatgcttattttatattaagcacactcatattgtacacatttagcactgccactagatcttctcaaattgcaaatattaaaatatgtcgaattatgaccaaatttccaacatattcatggactgtgtgggagt

SEQ ID NO: 21260 - DNA, 493 bp, Oryza sativa
  unsure (1)..(493): unsure at all n locations
  Clone ID: PAT_MRT4530_26548C.1
ngagcggngnccgaatnccgtgtgcngggcttgagaattatgcaatggtgccacttgagacgaggacagtgccaaatcaagtggctgcaatgaaggcattgaaggattccctgaaaattccagcaagcgtccggtggaatggggatccatgtgcaccaaggacatgggatgcatgggagggagtcacttgcctccgcaaggacaaagggcttgtgatcacccaactggatcttgcaagtcaaggactaaaaggttacatcactgatgaaataagtcatctgacagacttggaacttgagctataattctttgactggaagcttacctccgggcttagggcaaccttcacttgctacattggatctgtcatcaaaccagtttactggaggaattcctggcaccataggttcatcaaaattacaaacagctttactgaacaacaatcaactngatgggcaagttccagaaagactttactttattggcgtacatg

SEQ ID NO: 21261 - DNA, 618 bp, Oryza sativa
  Clone ID: PAT_MRT4530_26549C.1
atgtccgcaattgttcttgggttcgagatatcaatgcccgtaatgattgctcccagtgccatgcagaagatggctcaccctgacggagagtatgcaactgccatggcagcttcagcaggaggaactataatgatgcagccgtacaggtacaggaatgtggttgagcagttcgtcagaagagccgagagagctgggttcaaggcgattgcactgaccgtggacactccgtggctgggacgtagggaggctgacatcaagaacaggcggctagacttcaattatgggggcctcccggcggactcggtagcggcggaggaggaggctgcggtggtcgagcggcgccacggccggagggagatggagctcgggggcagatggcagtgggggagggggcaggacgaagaggaggagaagagaggggaagaggagtatacggccgcggcggcggcggcggccaacggcggcgccatgggaggaagggaggccaccttggtcgtgtgcatctccgccgaagccggcggcggcgacccctacgccgagctatggatccaggaagaagacgcgagacgcgagaagaagaagacgacggaaaaaggaaagagaggatggaaaaagtga

SEQ ID NO: 21262 - DNA, 1110 bp, Oryza sativa
  Clone ID: PAT_MRT4530_2654C.1
atggcgagcgcgaggccgccgcgggggacggcatggtgcggcggctgcggcgcgtacctggccgtgccgccgggggcgcgctcggtgcggtgcgcgctctgccgcgccgtgacgcgcgtcgagcgccgcggccaccacggcggccacggcggggccctgggcttcatcaagggcctcatcagcgcgttcgccccgccgccgccgctgacgccgtcggcgggtgcggcggcggcggcgagctactacccgcgcgtcagcggcaagaagcgcgcgctcctcgtcggcatcagctacgccgccaccgggtacgagctcaagggcaccgtcaacgacgtcaactgcatgtccttcctcctccgcgagcgcttcgccttccccgccgactgcatcctcgtcctcacgcaggagaacggcgacccgtacagggtgccgacgagggcgaacctgctggcggcgatgcggtggctggtggaagggtgcagcgccggcgactcgctggtgctccacttctccggccacggcgtgcagaagctggacgtcgacggcgacgaggcggacggctacgacgaggcgctgtgccccgtggacttcgagcgggcgggggtcatcctcgacgacgagatcaacgagaccatcgtccggccactcgtcgccggcgtgaagctccatgccatcgtggacacgtgccacagcggcaccatcctggacctccccttcctctgccgcctctcccggacaggctactggcagtgggagaaccactgccgccggccggagctggccaagggcaccagcggcggcctcgccatctccatcagcggctgcggcgacagccagacctcctccgacaccacggcgttctccggcggcgcggcgacgggggccatgacgtacagcttcatcaaggcggtggagacggagccagggacgacgtacgggcggctgctgagcgcgatgcgggcgaccatccgcggcggcggcggcgaggtcggcatcccggggccactgggcgccttcttccggagggtcatcaccttcagctgcgcgcaggagccccagctgtgcgcctcggagccgtttgacatctacaggaagcccttcctcttgtga

SEQ ID NO: 21263 - DNA, 459 bp, Oryza sativa
  unsure (1)..(459): unsure at all n locations
  Clone ID: PAT_MRT4530_26550C.1
tttgcctcgacgacggctgcgccgactccatctccctcttcatcgacgtcgccggcggcggcaacggcagcggcgtcgccggccatgcccggttcagcgtgctcgaccacgccggctcgccggcgcgccgcaccgacgacgcctcgtcggaggtggtggatttcaggacgcacttctccggccagaggagcctcatcacgagggaggagctcgagaggtcgccggacatcctcagggacgactgcttcgccgtccgctgcgacctcaccgtaatggacgaacacttgctcaccgtcgatctggatcacgaggcggntctcgccgccgatgccgacgccgccgccgtcgtgccgccgtccgacctgcaccggcaccttgccgagttcctctggagcaaggaaggcgccgacgtcggcatcgaggtaggcgacacgacgttccacgcgcaccggtgggtgc

SEQ ID NO: 21264 - DNA, 1822 bp, Oryza sativa
  Clone ID: PAT_MRT4530_26551C.1
atggcgaccgccacctccttcttccagccgctcacgacccccatcgccggcgccggcgccggcggtgccgcccggctccgtcgcgggaccctcgcactgcccttccccacccgcacgaggcctctccggcggccgacgcccctcctcgtcgcgcgggccaagcgccccggcagaagatgctgaagttgctgaaattttgaatgagatttcaagacgaattgttcgggaaaaaggaccagtagtcatggacttagctgggtttacagaacaaggttttaagcgtaactttgctgtgcaaacgttagttcggaaaaatcctgtacttatcagagctcccagagttctgctcacgcgatggctcactcgttgtcaaagaaattttcggagttacagatgaggatgcagacagcattaggattcacatacttgctgaaaccagtgatattgagtcattagagaagatggtcgatgattctgaactggggcatggcccctcgcctttatcatgaagggcattaatggtaaaacataactgagcaccttggtggatagctggtgctgctctgagttttgagtcatcgaagaagagttccaggatactcagctggaagttttgtaaatcctattaggattataacttgtggcagtatctccaacctttctattattacttgagttggcaaaagtgttgtttaagagcctggtagttatgagttatacaaagcgagaatgctgattggaataattatacatattttaagtttttgtttcaaaacaaagtattaagcgtaagcttgctgtgcaaacgttgttcggaaaaatcctgtacttatcagagctcccagagttctgctcacgcgatggctcactcgttgtcaaagaaattttcggagttacagactttccccgccgccgattttcggggcgccatccccgccacacgtgtccctcctcgctgaccacctgtcgtcctgtcccgctcagggctcctgccactcaactagcacttcacccggaggacgcaggagcaccaggtcgccacactccccgccgtgctgacgccgccgccgctgccgccgccatggagcccctggtgccgggcgccacccgcgcggcgctgtcggagttcgtagccaccgccgtgttcgtcttcgccgccgaaggctccgtctacggcctctggaagatgtacagggacacggggacgctgggcggcctgctggtggtggcggtggcgcacgcgctggcgctggcggccgcggtggcggtgtcgcgcaacgcgtcgggcgggcacgtcaacccggccgtcacgttcggcgtgctcgtcggccgccgcatctccttcgcccgcgccgcgctctactgggccgcccagctgctcggcgccgtgctcgccgtgcttctcctcaggctggcctccggaggcatgcgccccatgggcttcacgctcggccaccgcatccacgagcggcacgccctgctgctcgaggtcgtcatgacgttcgggctcgtgtacaccgtgtacgccaccgccgtcgaccggagaagcggcggcggcgacattgcgcccctcgccatcggcttggtcgcgggcgcgaacatcctcgccgggggcccgttcgacggcgcggccatgaacccggcgcgcgcgttcggcccggcgctcgtcggctggaactggcgccaccactgggtttactggctcgggccgctcatcggcgccgggatggccggcgcgctgtacgagtttgtcatggcggagcagcctgagccgccggcagctgcagatactcggcttcccgtggccgccgaggattactga

SEQ ID NO: 21265 - DNA, 252 bp, Oryza sativa
  Clone ID: PAT_MRT4530_26552C.1
atggcgaagatggagttgttgcaatgtccagcggcggcgttgttgcgccccgtggaggtcgagataccggcgtgctgcatctgttggaaatggagtcgccatgttcggcaatggcgccgacggttcccgacgaccgcgggcctagagccatttcgtctggcggcggtggcggcgatgctgtgtcctatggaggtgcagatactggcgtgccgtgtccgtcagagatggggtcgccatgtccgacggcactga

SEQ ID NO: 21266 - DNA, 308 bp, Oryza sativa
  Clone ID: PAT_MRT4530_26553C.1
ctgcgatagcactggcacacaaaagacgcggcggcagcggcggcgagaacgtaccatttcgccggagggggggcgctggagcttggtgttccgaacgggagacggcgaggcggggggtggagggggaggcggtggcggcggcgagaggtggtgacgcgaggcgaggtggtgattttatagaggaagagtcgggacgacgtgaatgcttccagctcgtcggatggcgcgagcttgaggggctcgggacatcttggccgtccataggattagggtttaggaggcgtcacttgggccgcggccgtccatag

SEQ ID NO: 21267 - DNA, 1160 bp, Oryza sativa
  Clone ID: PAT_MRT4530_26554C.1
atgaataaatatattttttccagaatttatcttctctgtttaggtctcctaaaaattcaaacagtttccattgagcccttcttcttttaatttctcctccttggcttgcccttcctctgtgcaacttctctagccgaccaaaactgagaaagagaccgagccaacagccctcaggcgcgtttgacacgtggccacgacgtgtcgacgatctaaaaacgccgagctccatctccgcctctcccagacgcgtcgtcactcctcacccaccattccagtgccgatccaaccgagggagagcatccttgctgcccttctccaccgtttctctatcgccggtcgcgaagaagatgatggccacattcgttgatgagccacggtcatttcctcttcttttgcattccaaaacctactctcgatgccatctctatttcatctaatttcgtcccattctatgcagcggttgagcgggaacgccaccgtgcccacaaacgccctggagcgcacaacgacgaccgctgtcgggttctcgtcgtcgttctaaccaaaccgaaccaccccaagccgaacccttgcgccaccagaatcgcctagacgtcctcttcaagattctccaagaacctcatggatcggtgaatcgaggagggatatcggcgtcatcttctccatctccggccgccgaatggtctttgagccgttccactctttttcttggcagcccggagtccggatggtggttgtcaccgttggcatgccgatttccgccgccgtcgggacatcctctgcatcgtcgtcgctgtccaggcctacccgtaccgcgtccgagctttggtgagcaccctgcagcctatagaacatacatgcatgcatccctttgggtacatccagactatagcatgacatgcaccaccacccgaaaacatcctctgctcggactcgccgctggcgctactccaatgtccgctatctgataaattgtacaaactctgcagagtaagaactaatcgattagccgtgctcacggtcataagcagcatgtggatatgtattgagtatagacttgtgtttattcttctaaatgttgaatttaccttcaaattatgttgagatttgagaatgatctccttgctgccatggatggcaatgaggtgcacatttataca

SEQ ID NO: 21268 - DNA, 427 bp, Oryza sativa
  unsure (1)..(427): unsure at all n locations
  Clone ID: PAT_MRT4530_26555C.1
aaacaaataagcgaagtttcaacaaagttttgacttttttggggttacaaagttcacctttgtacaactttacagtttgaaaaaggggtggggggaaacataaaacgggaaaacaaagcaatttttttaattttttttacctggggtttccagggggtttcctttcatgatcgggaaagccccaaatttttcattggggaaccaggcccccacaaaagggggggaattattcgttttcataggggttttcttttccgaacgaaaaaaccgaagcgtttgcagcaattgccttgaacccctttatgcgggggtcaccaccccctggggggggggggggcccttagggggnnctgatcttgatggtgcctccgtttttccggggggccgcggnggggggcccttgccctgccttggtggggggggtgtc

SEQ ID NO: 21269 - DNA, 333 bp, Oryza sativa
  Clone ID: PAT_MRT4530_26556C.1
cgtgcgaacaagactcaacggctatcggcggggtggggcagcgaccatcgagcttccggaggagggagagaagggcctagagaagaagagaagtgtgtctgacactagagtgctagacaacgtggacaaagatgacacatgtcccgagcccctcaagctcgcgccatccgacgagctggaagcattcacgtcgtcccgactcttcctctataaaatcaccacctcgcctcgcgtcaccacctctcgccgccgccaccgcctccccctccaccccccgcctcgccgtctcccgttcggaacaccaagctccagcgccccccctccggcgaaatg

SEQ ID NO: 21270 - DNA, 154 bp, Oryza sativa
  Clone ID: PAT_MRT4530_26557C.1
gcggttcttgacgtggttccggcggacatggtggtgaacgcaacgctggcgtacatggcgaagcacgggcgcaacagcccggaggagatcgcggcggtcggggaggtgatgcacttcttccacgtggactacacgaccgtgaacccatcgaggt

SEQ ID NO: 21271 - DNA, 1372 bp, Oryza sativa
  Clone ID: PAT_MRT4530_26558C.1
cgaaatccccgaatccaatccgaaccggcagcggcagccatgacgccctccgccctcgcccacctagcctccgcctcgccgctccccgccttctcccccaagcccagggcgaggcccggctcggcggcggggcccgcgctgcggcggctggcggtggcggcgccggcgccgcgggcgtacttctcgtcgtcgcccatgccgtaccagccgcagccgcagcagccggcggggtactcgtcgcaccaggcgttcggcctggtgccgatggtcatcgagaccacctcgcgcggggagagggcgtacgacatcttctcgcgcctgctcaaggagcggatcgtgctcatccacgggccaatcgccgacgagaccgcctcgctcgtcgtcgcgcagctgctcttcctcgagtcggagaacccgctcaagccggtccacctctacatcaactccccgggcggggtcgtcaccgcggggctcgcgatctacgacaccatgcagtacatccgctgccccgtcaccacgctctgcatcggccaggccgcgtccatgggctccctcctgctcgccgccggcgcgcgcggggagcgccgggcgctgcccaacgcgcgggtcatgattcaccagccatccgggggcgcgcagggccaggccaccgacatcgccatccaggccaaggagattctcaagctgcgcgaccgcctcaacaagatctaccagaagcacaccggccaggagatcgacaagatcgagcagtgcatggagcgcgacctcttcatggaccccgaggaggcgcgcgattgggggctcatcgacgaggtaattgagaaccgccccgcgtccctgatacccgagggcgccactggcgttgacctgccgcaccacagcgccgctggcgtcggcggaaggggcagagatgtcgaggagccctccgcggtgtgagctgtggccgcaaaggtgaaaccttttcgtgtcccatggccatgttgttgttgttattagatccaaggttcagttcttatactacataaacttaacttgttattattcaggttgccacttgttattcaggttgccgatgtgttcggctccttacatgttgtcttgattgcctgaattgagctactgctgatatttattgcaaatctaaggaaattttattccttccataataaaaaaaaaaaaaaatactttgtattgttgtatctcaactgcaaattcctccttgccaaggcatagttttgcgttctgcctaacattaggggttagagcgtatatgttcattcggttgtctcagtgaccaattagttttcattaagatgtccatgttgatcattcagtgtggtcttgtttgatttaagggagttgattgtctctt

SEQ ID NO: 21272 - DNA, 965 bp, Oryza sativa
  Clone ID: PAT_MRT4530_26559C.1
gcacgaggcctcgtgccgaattcggcacgagggcaaggccttcagcaagatgtccatccagctctacaactacggagaagggctgatgggaaaggtggcgtctgataaatgtcacaaatgggtcttcaaggaaccttctgaatgcgagcccaacatcgccaactactggcagagctcttttgatgcccttcctcccgaatggactgatcagttcgcctctggcatccagaccatagcagtgatccaagctggccatggccttcttcagcttggctcttgcaagatcataccggaggacctgcacttcgtgctgcggatgcggcacatgttcgagtcgctcggctaccagtcgggcttcttcctctcccagctcttctcctcctcgcgggggacctcgccgtcgccgtcgtcgttcccgcttaagcagcggcggcgcaggacgcggggcacggtggcgcggagaacgtgtaggagtacctgagcctggagagccactccaacaaggcgaggaggatggagagcgcccagagcaccaagttcaagaggagcttcacgttgccggcgaggatgagctcgtccaccacgtcgacgtccccgtcggtgtcggcgtcgacggcgccggcgccgccgcagcagcagcaagggatggagtacaggggcccacacgagggcggcgtctactcggacctaatggagacgttcttggagtagcctaagctagcttagctagcgaccacaccaagctagcaaacatggaagcatgatcatgatcaagtgtttgttcttgtcacctcttagttttttccttcttttctttctcccaaactatgtttaagcttttgagcggtctggtttggagtttgcttctgtttaattaattaattaattagatcatgtaaaaaaaaaaaaaaaaaaaaaaaaaaaaaaaaaaaaaaaaaaaaaaaaaaaaaaaactcgaggggggg

SEQ ID NO: 21273 - DNA, 864 bp, Oryza sativa
  Clone ID: PAT_MRT4530_2655C.1
ccggccggggagatgagataatccctttcctctcctctccgtgggggtgctgtgtccaccttcggccgccgccatggacaggaatggtgttagccactaaaaaaaactaaataaataaaagggcctccgctgggaacacacaaaggccaaggcggaggtggggaggtgcctgtagagcgattggattcgtatataaagaaaagcatcgtttgccttgcccaaatcctgccgcagatgccaaggttcataacaacatagatcctgcaagtcttgagacgctagtgcaggagaagaaagacgagctgttccgtctgctacttcagatggatcttcacaatggctcgtgtgaaaaaagtgccgaggagaacaaagccatactgaggctgcttcggcaattccgtgctgagacgcgagataatggtaccttgtccggtgctgatacgaaaaacttggccaatcgatacgtcctacctgtgtccattattttgagtggtatcatcatcgtcgctcagggccattttatatctcacctctgaaatgggggccctgctcgttcgaagaataagttatctaacggtgtggatccccatggtgcggaggctaaatatcaccatgttatcttttcctcttttttttttttcatattttaagaaaacgataccgatgtgttctctagtgctaatggttagcgagttcgcttgctgtcataaccaattctcttgttcgtctatgttcgaattgtcaatgtcttctttctctgaaactagcgaagtgcatgtgcctttgcaacaaatctaaataaattgttaaacacaacatgctcatcgtttttttggagaaaaggcataagcccagctttttaac

SEQ ID NO: 21274 - DNA, 598 bp, Oryza sativa
  Clone ID: PAT_MRT4530_26560C.1
ttttttttttgtgcggtttctgtgttgtgtgtttcgtggcgagatagttcattttttcaacgaaacaccaaactaaaaagatccacattcacaacacagtttcactcacactcacacacatacacaccaaaacaggaaactgccatgtcaattagcgccgccgctgcaattctcctatcgacggtggcagctgcatgccgccgtgccgccgttccggtgatgcatgccatctgcctccacgaatccatgtcactcatagcgatcctagctcatcgacagcatcatcagcgccggcttcgagttcgaggtagtacgccttgatctcgtcgtgcttgaacttgtgcctccctttaccacccgtcgtcgacgctgccggcccgccgctgcaggcgcccttgccgctggcgagctccctgaaggcgcggccgccggtgaacttggagtggttggttggcttccgcggcgccctgatgaacccgccgttggccaccgtcgccggcgccgccaccgcgcccaccacgcggcgcttcccctcggggtcgaccagggcgcggtcgtacacgcacacccacccgcgctgcctcccctcgcgacgcat

SEQ ID NO: 21275 - DNA, 1039 bp, Oryza sativa
  Clone ID: PAT_MRT4530_26561C.1
ttagtccttgtctcttgcatagatattgggaataacagaataagaggtcatcttcctgcctattatctcccacaaatccaccatgaaagaagggcaagatagcttcatcttctcgtacccttggctttccatgacgccttccatcttcttggaggtggccaagaactcgatgcacgcctccttgagcttctggcaatggtgctgatccgccattgccagcgtcgccgcgacggtgtccacggcgatgctcttgcagagcatgagctcgcagatcagcttcagcctctcgacgtcgtaccggtcggcggcctcgagaaggtgcatgatcatctgcgccttgtcgtcgtcgtcgtcgtcgaggtcgtccatggcggcggtcgtgtcggtgtagatgaagtggaggagagcccggaacaccgccggctcgacgctgtcgatggcgacgcggccggcgttcgcgtccgtggactccttcattggcccgtagagcgccgccttgaacaccggcgaacgcatggcgagcaccgcccggtgcgcggcgaactcctcgccccgcacgacgagcgtcacgtcggcggtgcccttgtcgccgaggagcccggcgaggtggccgaggatgttcgacggcggatggtcgagctccggcgcgtcgccggcggtgacgacggggtccaggacgacgttgacgacgcactcgatggtgaggcggtcgtcgcggacgaaccccatctcctccagctcgcgccgccgcatgaacctcaggtgcccccacgccgggaacgcctgggacgatctagggtttctagggttttgggttgcggcggcggcggcggcgagagggcgagggcgaggtcgagatggcgtcggagagggtgaaggggacggtgaagtggttcgacgccaccaaggggttcggcttcatcacccccgacgacggcggcgaggatctcttcgtccaccaatcctcggcaggcttccctgagcccgcggcagccatggcggtcggccaatgccaatgtgctcgccaccgtctgcgccg

SEQ ID NO: 21276 - DNA, 2022 bp, Oryza sativa
  Clone ID: PAT_MRT4530_26562C.1
ccggccgggaccaaccaaccactgctctcgccgcgccgtcctcttcatctgcacttgcactgcgccatggcggcctcgaccaccctcgccttatcccaccccaaaaccctagccgccgccgccgccgcggcccccaaggccccgacggcgccggccgccgtctccttcccggcctcacatgccgcctgcgcgccgctcgccgcccgacgccgcgcggtcaccgccatggtcgcggcgccgccggccgtcggggccgccatgccgtcgctcgacttcgacacatccgtcttcaacaaggagaaggtctccctcgccggccacgaggagtatatcgtgaggggtgggaggaacctgttcccgctgcttcccgaggcgttcaagggcatcaagcagatcggagtgattggatggggctctcaggggcctgcacaagcccagaacctgagggattcactagctgaagcgaagtctgacattgttgttaagattggtctccggaaaggctctaagtcatttgatgaagcacgtgctgctggctttactgaagagagtggaaccttgggtgatatttgggagactgtttctggcagcgacctcgtgttgctgttgatatcagacgctgcacaggcagacaactatgagaaaatcttctctcacatgaaaccaaacagtattcttggtttatcacatggatttttgcttggacatttgcaatctgctggccttgatttcccaaaaaatatcagcgtgattgctgtatgccccaagggaatgggtccatccgttcggaggttatacgtacaaggcaaagaaattaatggtgctggtatcaactctagttttgctgttcaccaggatgttgatggaagggcaactgatgttgctctaggatggtcagttgcgctgggatctcccttcacatttgctactaccttagaacaggagtacaagagcgatatctttggggagcgaggcattcttcttggagctgttcatggcatcgtggaggctctgtttaggagatacacagagcaaggaatggatgaagaaatggcatacaaaaacaccgtagagggcatcactggaattatctcgaaaactatctcaaagaagggaatgcttgaagtgtacaactccttgacagaggaggggaagaaggaattcaacaaggcctacagtgcatcattctatccttgcatggacatactctatgagtgctacgaagatgttgcctctggaagtgaaatccggagtgttgtgttggctggacggagattttacgagaaggaaggccttcctgctttccctatgggcaacatcgaccaaactcgtatgtggaaggttggtgaaaaggtgcggtcaacccgaccagaaaacgatcttggccccctgcatcccttcactgctggagtctacgttgcactgatgatggctcagatcgaggtccttagaaagaagggtcactcctactcagagatcatcaacgagagcgtcatcgagtccgtggactcactgaaccccttcatgcatgctcgtggagtggccttcatggttgacaactgctcaacgacggctcgtctgggatcaaggaaatgggcgccacgcttcgactacatcctgacccagcaagcattcgtgacagtggacaaggatgctcccatcaaccaggacctcatcagcaacttcatgtccgaccccgtccatggcgcaatcgaggtgtgcgctgagctgcggcccaccgtcgacatctccgtgcctgccaacgccgatttcgtgcgcccagagctccggcagtcatcgtagagtgagataagataatctcaagggagcttgcatcttgttacagtttgtccgagagtattgtatgtgtgtgcgtgactgtctgaacttgtgagcttgccatcaggtgacctggaactggcctgagcatctttttcccgaataaaatgaggcccggattctgaataaaaaaaaaaaaaaaaaaaaaaaaaaaaaaaaaaaaaaaaaaaaaaacaccccccc

SEQ ID NO: 21277 - DNA, 626 bp, Oryza sativa
  unsure (1)..(626): unsure at all n locations
  Clone ID: PAT_MRT4530_26563C.1
ggtcagtctggaagaagtttgaggacaagtttgtccagacactgctgaaatatggttacaaaggcgaatacatgtctgaagattggcttaaacagccattgttcattcaatccttcgcaccatcgtcactcatttacatgtcaaatatgacaaactctccaaaaatattcctaatcgacgataccacagttagaactcaagacactaatcaggtattctcagtacattttcctctttcctctcatgtaaagtttaattatcgatgcccctctaaaaatcaattttcattatgcagtcatactacgagataacttcggacgcttaccttgcgttcataaggaagtacatagttggcattggaccatggaaagatacaattgttcctcccataaataattacctaggtcccccaaccgatcttgtcgcgcgagcacacgctctgaatcttcaggttagtgatctttcatgagaacactacacttttttttctctgattgcacaattactgaaacatttcatcagatgatcttagatgacagtacaatcataaaccatgactcatttgatatgatttgcaggtgcatccatacactntcagaaacgagaacatgttcttgcacttcgac

SEQ ID NO: 21278 - DNA, 327 bp, Oryza sativa
  Clone ID: PAT_MRT4530_26564C.1
atggggacgaagcgccacggcagtaatggtggaactcgagctcaagtggtggtgccatcaccgggcgaggcggagctgggacctcaccaggagggacactgtcacgacctcactagcggcgaggcggagctaggacagcggcgtcgtggatcgacactgccatacgagatatggctcccgaggatgggggcggcatcatcgcaaccttacagggacaacggtgtcgggatcgatgttgttatccaggataggactctcgggggacgcaaggcggagtcgtcacaaaagatggagaaatgcgaccgtggcaccaaccgatgctactga

SEQ ID NO: 21279 - DNA, 718 bp, Oryza sativa
  Clone ID: PAT_MRT4530_26565C.1
ccggcgaggattcggcgagcaggggggcgatcgatcgagagcgtccgccgccggcccgggcggccgcaaggggttcgcgttggccgattcattaatgcagctggcacgacaggtttcccgactggaaagcgggcatgatgttatgtatgaatatgttgcaggcattttacatacgatcttcttccaccgaactcttactcttgttcggcctaaagatgttgactgcgatctctttgagatcacctatgttcaatgcggacttcctgacttagaaaaggaggtggatgaaaagatcaaccagttcattgcttgggtggagaagcatccaaatcgaagaagccaggtctgcctgtccttctttgacgaaaagaacaaaaacccaagctggttcaccagcaaaactgagaggatttactgggaacagtggttcatcaatttgcatgtcataagccctaaaggacatggaaaatcacgtagctccaaagcatcaacaagtattcgagggaaagcgttggaagaggccagctccaagcgtgctgcgctggggttgctgatccaggaagtccttttccagatcatcaacttcgccaatgagaaaaaagaccatattcctccaatctccgataggatattcaatcacgagatctcgatccccagctcttctgattctgtattcgggtggaacgccgacgtccttagaagagtgttgaatagttga

SEQ ID NO: 21280 - DNA, 2647 bp, Oryza sativa
  Clone ID: PAT_MRT4530_26566C.1
atgggggagttgctgatgtttcctcccgtcgcgctggcgtcggcggagtcggcggagccgacggcggaggcgcggagccgacggtttcccctcatcgcgccggcagttgcggtgggaagcgtaggctgcggcggaggaatgggaaaaagaaaaaccattgtacagaaaggcatgttaggcaaaccagagccaagtaaaaaaacaaggggggtttcgcaacgtgctaagaaaagaagtattggagatgatcatgcagatgacacagagcaacctcctccaaaaaggagcagatcaaaggcaactagatggaatgtatcatgctgtgtaactagggaatgtgaattcaagtttatctggaactggttgatggagcatttcaatccagcaaccaatcagcttgtattccctggacgtggagccatagatgtgaatgaggagtcagtgaagtctgtgcttggtatccctatgggtgacaaagatgtctcatatgatatggagtctgaagctacagaatttgtgctgaatttgcttggaatcaacgatggtatctcaccatcactgacttctcttgggattcaattggagaagttgaagttagcagatgacaagcacctgcgcatgtggatcatctacgccatttcttctgttttagcaccaacgacggcaacaacagtcagcccaagatgctatccttctgttgttgatgctggaaatatcaagaatcttaattggtgcaagtttgtcatatctattttgcaaaaagctgctaaagctgggaagactaccaactcagcatgtctcctgtatatgatgattctttatttggactcgctttcgtttaaaaatctcaatgttccagtggagggttatcgagctactgtttggacgaatgaattgataaatcaagcaatattagcagacacatcagcagacggctcctttggagctttaccagaaaaggacagaattgtgatcgctgtgcaaaatttgtgtgaagggttttcaggtttggtcacgaaatttgtgagacagatttccggccttgattttgtggatcctaggggtagccaaccaaggaaaatgcgaatgaaccggaagaaacttgcacaaaggcctaaacgagttcagcaagatgaagatctaggtttggtttttgcactatgtatcttctagtgatgatgaagattttgttgctgatgaagaagtggaagacactgaggaagatgaatatactgatgaagatggagattctgatgatgatgaggatgaaggagaagaagatgacaatgatgaaggagaagaagatgacgatgaggataggtcagaaaatgatgacgatgatggtgctgaaactggaagaagtggtgagcaggctgatgctgcaactaatgttattggttgcaaaggagatgatacaaatgaagggattggcagcggaggcaaagacgttgatgatgttactggatgcaaaggagatgacacaaatgaagggattggcagcggaggcaaaggcgctgatgatgttattggaaaagggaaacaagtagatgaagatattgggtttggtgacaaggaaaaacatgaagaaaagcaagcacccaatgctgtagcacaaaatgttccagaatcagagaagcaaccagtgcaaaaggcagaaaaatatcctttcctaacaacaaccattgattcacatgaagttccaaacttcaatcttggttttgatagctctcaggaagttgtgcaaacaccaaaggggcaagaagcagtaggaacatctcgaggtaaagaatttactggaattatcacaaatgaggactatggaagttttactactgaagactatgaaaaggaacctattgcttgtgaagtagaagaagaaacacctgtgccccatgagtacaataaaagggtggtgaaaccagcgaaattcaaaaggtcacccttcattgattatgagaacaagaagcagttcatggtttctcgagttataaacgaggtatatgatgacatttgcaagaatggagggagaactaagttaagaaggaatagccgaaagatcattgatacaggagaatattatatttatcttggcgatcttgcgaactctgtcaaacctatgggctcactggacaataatacatgtgaattggcattaattgttctgtctgctgatatcaaggacaattcgaagagaatttttcctgccataataggagcattttttcccattctccagaaattgggtaatgggaatgataaggctggtcactatttcatggtgtgccttaatctgaaagctgaaagattcgaggtttatgattcgctgagaggagaagatgacgaagagctgatttcagcatctcatcttgttgttgcatccatcaagaccatgtgggataggttttacatgagtcaaacttatccctgttttgtttttgctaacaaaaacagccgggattgtggtttttatatgctgaaatttgtggagttgtgggatggcaaacagttgccagcatttgaaccaagtgacatccccaacattaagaaactacttacacacaagatgctctcgtttcaagaaaatcgtgtgcaatggatgcaagtattatggggcaaagagcctgatcctacacttaaggtaaagtaa

SEQ ID NO: 21281 - DNA, 471 bp, Oryza sativa
  unsure (1)..(471): unsure at all n locations
  Clone ID: PAT_MRT4530_26567C.1
gaagcacggggcgaaagaacgnagcataggtagcaccagcggaggcatnagactagcgcactagcgcgcacacgggcaggggcagaggacggtataggaaccactagggtatgngnatagggtaggggtagggtacggtacggtagcggcagggggcagggcgtaggcgggtgtggcanagtagggggcagggtnacccgggtagcgtggggcggcgggcgggtgcccggtactacgggggcgcggnacgtaggcgtaaaccggtacgcaggtgaccgggccagtaggctacgcagggcgcnacccgagtacaccctactanacctaaggccagcccctactacgcccgcggcgcgccacggcacagaccaacccttaccccgcccactatagggtacgcggcggcgcgcccgctgatatgagcccgcagggcccaccnacctgaccccgggcgggactaggcccgagaga

SEQ ID NO: 21282 - DNA, 2318 bp, Oryza sativa
  Clone ID: PAT_MRT4530_26568C.1
atggcgatgaggagttcctcctctccctgcctgccgaggcccgacgcaggaatgggaaaaagaaaaaccattgtacagaaaggcatgttaggcaaaccagagccaagtgaaaaaacaagggggggttcgcaacgtgctaagaaaagaagtattggagatgatcatgcagatgacatagaggaacctcctccaaaaaggagcagatcaaagcaagaaagtagcagggcttcacctatgaaacttataaagttgtatccccatatgagtggcgaacaaaagcgactaatagagggggctggcttccatggcctcgtagatctcaagtgctcgaagctcagacctgatttgtgcagctggttgatggagcatttcaatccagcaaccaatcagcttgtattccctggacgtggagccatagatgtgaacgaggagtcagtgaagtctgtacttggtatcccaatgggcgacaaggatgtctcatatgagatggaatctgaagctacagaatttgtgctgaatttgcttggaatcaatgatggtatctcaccatcactgacttctcttgggattcaattggagaagttgaagttagcagatgacaagtacctgcgcatgtggatcatctacgccatttcttctgttttagcaccaacgacggcaacaacagtcagcccaagatgctatccttctgttgttgatgctggaaatgtcaagaatcttaattggtgcaagtttatcatatctattttgcaaaaagctgctaaagctgggaagaataccaactcagcatgtctcctgtatatgatgattctttatttggactcgctttcgtttaaaaatctcaatgttccagtggagggttatcgagctactgtttggacgaatgaaatgataaatcaagcaatattagctgacacatcagcagacggctcctttggagctttaccacttaggagcagttttcagcatgaagggaccaatttgtttgggagcaatgtagatttttcaaccttcataaattcaaatgtgcccaatactatgcagcagcaggaaaaggacagaattgtgatcgctgtgcaaaatttgtgtgaagggttttcaggtttggtcacgaaatttgtgagacagatttccggccttgattttgtggatcctaggggtagccaaccaaggaaaatgcgaatgaaccggaagaaacttgcacaatggacaaaaagagttcagcaagatgaagatctagatgtaacttcaagtgatgatgaagattttgttgctgatgaagaagaagtggaagacactgaggaagatgaatatactgatgaagatggagattctgatgatgatgaggatgaaggagacgaagacgacgatgatgaaggagaagaagatgacgatgaggataggtcagaaaatgatgacgatgatggtgctaaaactggaagaaatggaagttgtgcaacaccaaaggggcaagaagcagcaggaacatctcaaggtaaagaatttcctggaattatcacaaatgaggactatggaagttttactactgaagactatgaaaaggttgggagagaagcagatgaggccattgccagcaaatctgccacaaaatcacctgtcgctgaagtaatctccaaggaacctattgcttgtgaagtagaagaagaaacacctgtgccccatgagtacaataaaagggtggtgaaaccagcgaaattcaaaaggtcacccttaattgattatgagaacaagaagcagttcatggtttctcgagttataaacgaggtatatgatgacatttgcaagaatggagggagaaccaagtcaagaaggaatagccaaaagatcattgatacaggagaatattatatttatcttagcgatcttgcgaactctgtcaaacctatgggctcactggacaataacacatgtgaattggcattaattgttctgtctactgatatcaaggacaattcgaagagaatttttcctgccagaataggaggatatttgttggattcgcagttggacaggaatgagctcaagaaacacttcgatcaaacgagagcgaaccatcttgaccataaagaattagcattttttcccattctccaagaattgggtaatgggaatgataaggctagtcactatttcgtggtgtgccttaatctgaaagctgaaagattcgaggtttatgattcgctgaggggagaagatgacgaagcactgatttcagcatctcatcttgttgttgcatccatcaagaccatgtgggataggttttacatgagggttttttttcgaagaaaaccatctag

SEQ ID NO: 21283 - DNA, 2238 bp, Oryza sativa
  Clone ID: PAT_MRT4530_26569C.1
atggagcatttcgatccagcaaccaatcagcttgtatttcctggacgtggagccatagatgtgaacaaggagtcagtgaagtctgtgcttggtatccctatgggcgacaaagatgtctcatatgagatggagtctgaagctacagaatttgagttgaagttagcagatgacaagtacctgcgcatgtggatcatctacgccatttcttctgttttagcaccaacgacagcaacaacagtcagcccaagatgctatccttctgttgttgatgctggaaatatcaagaatcttaattcgtgcaagtttgtcatatctactttgcaaaaagctactaaagctgggaagaataccaactcagcatgtctcctgtacatgatgattctttatttggactcactttcgtttaaaaatctcaatgttccagtggagggttatcgagctactgtttggacgaatgaattgataaatctagcagacacatcagcagatggctcctttggagctttattacttaagagcagctttcagcatgaagggaccaatttgtttgggagcaatgtagatttttcaaccttcataaattcaaatgtgcccaatactatgcaggagcaggaaaatgacagaattgtgacctctgtgcaaaatttgtgtgaaggtttttcagaagaagtggaagacactgaggaagatgaatatattgatgaagatggagattctgatgatgatgaggatgaaggagaagaagatgacgatgatgaaggagaagaagatgacgatgagcataggtcagaaaatgatgacaatgatggtgctgaaactggaaggagtggtgagcaggctgatgctgcaactgatgttactggttgcaaaggagatgacacaaatgaagggattggcagcggaggcaaaggcgctgatggtgttactggatgcaatggagatgacacaaatgaagggactgccagcggtggcaaaggcgctgatgatgttattggaaaagggaaacaagtagatgaagggattgggtttggtgacaaggacaaacatgaagaaaagcaagcacccaatgctgcagcacaaaatgttccagaatcagagaagcaaccagtgcaaaaggcagaaaaatatcctttcctaacaacaaccattgattcacatgaagttccaaacttcaatcttggttttgatagctcccaggaagttgtgcaaacaccaaaggggcaagaagcagcaggaacatctcgaggtaaagaatttcctggaattatcacaaatgaggactatggaagttttactactgaagactatgaaaaggttgggagagaagcagacgaggccattgccagcaaatctgccacaaaatcacctgtcgctgaagtaatctccaaggaacctattgctgatgattgtgaagtagaagaagaaacacctgtgccccatgagtacaattaaagggtggtgaaaccagcaaaattcaaaagccaaaagatcattgatacaggagaatattatatttatcttagcgatcttgcgaactctgtcaaacctatgggctcactggacaataacacatgtgaattggcattaattgttctgtctgctgatatcaaggacaattcgaagagaatttttcctgccagaataggaggatatttgttggattcgcagttggacaggaatgagctcaagaaacacttcgatcaaacgagagcgaaccgtcttgaccataaagaattagaattgggtaatgggaatcataaggctggtcactatttcgtggtgtgccttaatctgaaagctgaaagattcgaggtttacgattcgctgaggggagaagatgacgaagcgctgatttcagcatctcatcttgttgttgcatccatcaagaccatgtgggataggttttacatgaggtcttcgaagaaaaccatccagaattacccactgattttcattgatggcccaaagcaagataacattcaaacttatccctgttttgtttttgcaaacaaaaacagccgggattgtggtttttatatgctgaaatttgtggagttgtgggatggcaaacagttgccagcatttgaaccaagtgacatccccaacattaagaaactacttacacacaagatgctctcgtttcaaggaaatcgtgtgcaatggatgcaagtattatggggcaaagagcctgatcctacacttaagaaccagcacataagttatagccacataaattag

SEQ ID NO: 21284 - DNA, 853 bp, Oryza sativa
  Clone ID: PAT_MRT4530_2656C.1
ctccgtgggggtgctgtgtccaccttcggccgccgccatggacaggaatggtgttagccactaaaaaaaactaaataaataaaagggcctccgctgggaacacacaaaggccaaggcggaggtggggaggtgcctgtagagcgattggattcgtatataaagaaaaggtactcgtatatactatatatgttgagtcgattttgacgagaagggagccccttcccgagagattaggtctggtctgaggagaaaatacgctccgctccgatccgatatactgtcagcgaagtagttgtcgatggctgcgcttcgctatgcggcgcggaagatctgcggtcgcgcactacagcgaccgcgggttgtatatccggcggtcacatcgccggctttggaggcggagcggaggctgttgcccatgcttatccgtggcgagatgcctcacatctcatatacccgccacttcagttcctccgctactcctcaaccaccccttgccaacaataataaatcgatttctggacatcgtttgccttgcccaaatcctgccgcagatgccaaggttcataacaacatagatcctgcaagtcttgagacgctagtgcaggagaagaaagacgagctgttccgtctgctacttcagatggatcttcacaatggctcgtgtgaaaaaagtgccgaggagaacaaagccatactgaggctgcttcggcaattccgtgctgagacgcgagataatggtaccttgtccggtgctgatacgaaaaacttggccaatcgatacgtcctacctgtgtccattattttgagtggtatcatcatcgtcgctcagggccattttatatctcacctctga

SEQ ID NO: 21285 - DNA, 2967 bp, Oryza sativa
  Clone ID: PAT_MRT4530_26570C.1
atggccccaggcgatcatctgacaacatgctgggacagcgaaccacggattcaaccattgatcaagcacagactgttggaattcatcaaagaagcctccagcaaaatctacatatttgagatggaagaaaacagagtgggtgtgctacctagtttgttacctgaagttggcatggaattcaatactgttgatgaggcttggatgttttgggttagctatggtggtcagaaaggtttcgaggttagagaaagccgagtaccgcagcctgacggcgagagcgagggcggtgaggaggacgagcacgacggtgagagcgagggcggcgaggaggacaagaatgacggcgatggcggtggccagacgaggagaatgggaaaaagaaaaaccattgtacagaaaggcatgttaggcaaaccagagccaagtgaaaaaacaagggggggttcgcaacgtgctaagaaaagaagtattggagatgatcatgcagatgacatagaggaacctcctccaaaaaggagcagatcaaagcaagaaagtagcagggcttcacctatgaaacttataaagttgtatccccatatgagtggcgaacaaaagcgactaatagagggggctggcttccatggcctcgtagatctcaagtgctcgaagctcagacctgatttgtgcagctggttgatggagcatttcgatccagcaaccaatcagcttgtattccctggacgtggagccatagatgtgaacgaggagtcagtgaagtctgtgcttggtatccctatgggcgacaaggatgtctcatatgagatggaatctgaagctacagaatttgtgctgaatttgcttggaatcaatgatggtatctcaccatcactgacttctcttgggattcaattggagaagttgaagttagcagatgacaagtacctgcgcatgtggatcatctacgccatttcttctgttttagcaccaacgacggcaacaacagtcagcccaagatgctatccttctgttgttgatgctggaaatgtcaagaatcttaattggtgcaagtttatcatatctattttgcaaaaagctgctaaagctgggaagaataccaactcagcatgtctcctgtatatgatgattctttatttggactcgctttcgtttaaaaatctcaatgttccagtggagggttatcgagctactgtttggacgaatgaaatgataaatcaagcaatattagctgacacatcagcagacggctcctttggagctttaccacttaggagcagttttcagcatgaagggaccaatttgtttgggagcaatgtagatttttcaaccttcataaattcaaatgtgcccaatactatgcagcagcaggaaaaggacagaattgtgatcgctgtgcaaaatttgtgtgaagggttttcaggtttggtcacgaaatttgtgagacagatttccggccttgattttgtggatcctaggggtagccaaccaaggaaaatgcgaatgaaccggaagaaacttgcacaatggacaaaaagagttcagcaagatgaagatctagatgtaacttcaagtgatgatgaagattttgttgctgatgaagaagaagtggaagacactgaggaagatgaatatactgatgaagatggagattctgatgatgatgaggatgaaggagacgaagacgacgatgatgaaggagaagaagatgacgatgaggataggtcagaaaatgatgacgatgatggtgctaaaactggaaggagtggtgagcaggctgatgctgcaactgatgttactggttgcaaaggagatgatacaaatgaagggattggcagtggaggcaaagatgttgatggtgttactgaatgcaaaggagatgacacaaatgaagggattggctgcggtggcaaaggcgctgatgatgttattggaaaagggaaacaagtagatgaaggtattgggtttggtgacaagaaaaaacatgaagaaaagcaagcacccaatgctgtagcacaaaatgttccagaatcagagaagcaaccagtgcaaaatgcagaaaaatatcctttcctaacaacaaccattgattcacatgaagttccaaacttcaatcttggttttgatagctctcaggaagttgtgcaacaccaaaggggcaagaagcagcaggaacatctcaaggactatggaagttttactactgaagactatgaaaaggttgggagagaagcagatgaggccattgccagcaaatctgccacaaaatcacctgtcgctgaagtaatctccaaggaacctattgcttgtgaagtagaagaagaaacacctgtgccccatgagtacaataaaagggtggtgaaaccagcgaaattcaaaaggtcacccttaattgattatgagaacaagaagcagttcatggtttctcgagttataaacgaggtatatgatgacatttgcaagaatggagggagaaccaagtcaagaaggaatagccaaaagatcattgatacaggagaatattatatttatcttagcgatcttgcgaactctgtcaaacctatgggctcactggacaataacacatgtgaattggcattaattgttctgtctactgatatcaaggacaattcgaagagaatttttcctgccagaataggaggatatttgttggattcgcagttggacaggaatgagctcaagaaacacttcgatcaaacgagagcgaaccatcttgaccataaagaattagcattttttcccattctccaagaattgggtaatgggaatgataaggctagtcactatttcgtggtgtgccttaatctgaaagctgaaagattcgaggtttatgattcgctgaggggagaagatgacgaagcactgatttcagcatctcatcttgttgttgcatccatcaagaccatgtgggataggttttacatgaggttttcgaagaaaaccatctag

SEQ ID NO: 21286 - DNA, 1485 bp, Oryza sativa
  Clone ID: PAT_MRT4530_26571C.1
atggccccaggcgatcatctgacaacatgctgggacagcgaaccacggattcaaccattgatcaagcacagactgttggaattcatcaaagaagcctccagcaaaatctacatatttgagatggaagaaaacagagtgggtgtgctacctagtttgttacctgaagttggcatggaattcaatactgttgatgaggcttggatgttttgggttagctatggtggtcagaaaggtttcgaggttagagaaagccgagtaccgcagcctgacggcgagagcgagggcggtgaggaggacgagcacgacggtgagagcgagggcggcgaggaggacaagaatgacggcgatggcggtggccagacgaggagaatgggaaaaagaaaaaccattgtacagaaaggcatgttaggcaaaccagagccaagtgaaaaaacaagggggggttcgcaacgtgctaagaaaagaagtattggagatgatcatgcagatgacatagaggaacctcctccaaaaaggagcagatcaaagcaagaaagtagcagggcttcacctatgaaacttataaagttgtatccccatatgagtggcgaacaaaagcgactaatagagggggctggcttccatggcctcgtagatctcaagtgctcgaagctcagacctgatttgtgcagctggttgatggagcatttcaatccagcaaccaatcagcttgtattccctggacgtggagccatagatgtgaacgaggagtcagtgaagtctgtacttggtatcccaatgggcgacaaggatgtctcatatgagatggaatctgaagctacagaatttgtgctgaatttgcttggaatcaatgatggtatctcaccatcactgacttctcttgggattcaattggagaagttgaagttagcagatgacaagtacctgcgcatgtggatcatctacgccatttcttctgttttagcaccaacgacggcaacaacagtcagcccaagatgctatccttctgttgttgatgctggaaatgtcaagaatcttaattggtgcaagtttatcatatctattttgcaaaaagctgctaaagctgggaagaataccaactcagcatgtctcctgtatatgatgattctttatttggactcgctttcgtttaaaaatctcaatgttccagtggagggttatcgagctactgtttggacgaatgaaatgataaatcaagcaatattagctgacacatcagcagacggctcctttggagctttaccagaaaaggacagaattgtgatcgctgtgcaaaatttgtgtgaagggttttcaggtttggtcacgaaatttgtgagacagatttccggccttgattttgtggatcctaggggtagccaaccaaggaaaatgcgaatgaaccggaagaaacttgcacaatggacaaaaagagttcagcaagatgaagatctaggtttggttttttcactatgtttctattaa

SEQ ID NO: 21287 - DNA, 393 bp, Oryza sativa
  Clone ID: PAT_MRT4530_26572C.1
gctcaccgagcccgcccgcacttcggccgccgtttcattgccgcgaatcaccgccggagcccttttctcctcgcgcgccgggtgccgccgccgcccgttcgcgcctcggcatcaccggtcgtcgccgccgtttcttccttcgcgccggccgccgtgttcgccgcgccgccgccctccgcgcgtgtgccgtcatcttcggccgccgccgcccgccttcgcactggccgccgccgtctcccgcgccgccggtcaccgccggtgaccgcgcgtgtcgccgccggtcgccatggccgccggtcggctttgagtggggcccacttgccagccgccccctccctctccccttgtgccgctgccagtggggcccgcatgtcggcgccgcccccccccctt

SEQ ID NO: 21288 - DNA, 1298 bp, Oryza sativa
  Clone ID: PAT_MRT4530_26573C.1
atggcatcagcagcaatgtctactctgaacctgagttcatctcctctgaccaagcagcagctccgatttggagccagcacactcagtgcagaacacgtcagtggcttcagctctgcaaggccagctccatcgttgtgctgctccagctctcactggcgagcggtcaagctgagaccgagacggcggccatggcggcgcgccgggaaccgggtcgtcgcgcaggccggcggctacaaggtcgccatcctcggcgccgccggtgggatcgggcagccgctctcgctcctcgtcaagatgtcgccgctcgtctcggcgctgcacctgtacgacattgcgaacgtcgatggtgtcaccgccgatcttggacactgcaacacgccggcgaaggtcgccgggttcaccggaaaggaggagctcgccggttgtcttgccggcgtggacgtcgtcgtcatccccgccggcgtgccgaggaagccagggatgacgcgggatgacctgttcggcatcaacgccggcatcgtgagggagctcgtcgaggccgtggcggaccacgcgccggcggcgctggtgcacgtcatctccaacccggtgaactccaccgtgccgatcgccgccgaggtgctgaagcggaagggcgtgtacgacccgcggaagctgttcggcgtcacgacgctggacgtcgtgcgcgccaacacgttcgtcgcggagatgaagggcctcccgctcgccgacgtcgacgtcccggtggtcggcggccacgcggcggccaccatcctcccgctgctgtccaaggcgaggcccaagacggcgttcaccgatgaggaggtggaggcgctgacgaggcggatccagaacgccgggaccgaggtggtggaggccaaggcgaaggccggcggcgggtccgcgacgctgtcgatggcgtacgcggcggcgaggttcctggaggcgtcgctgcgcgggctcgacggcgacgccgacgtgtacgagtgctcgtacgtgcagtgccaggcggtgccggagctgccgttcttcgcgtgccgggtgaagctgggcagggacggcgtcgaggaggtggcggcggcgggggcggagctccgggggctcacggagttcgaggcgcgcgcgctggaggcgctcaagccgcagctcaagaagagcatcgacaagggcgtcgcctacgcgcagcagcagccagcgacggtggcgatgggttgaaatttgacatacttttcgcagcattttgcgagtgattaccatttgctgaatgcatttccgtgccaaaaaaaaaaaaaaaaaaa

SEQ ID NO: 21289 - DNA, 1626 bp, Oryza sativa
  Clone ID: PAT_MRT4530_26574C.1
ttaatttccatcccagtatggtgacatcttgaatcagggctcgtggcatctcccacgcggccgcctccggaacatggaaacagacaagctccttgacataaaagcacccatccgtgctttccaccccgatggcctgccgctgctgccacaggaaaggtcagggccccctatccgatcatccaaatcgtccggcagggtgtcgctaccagcattctccaggacaccactctcatccacgctcctagcatcctgcaattcaccagcaccacctggcgtgtcaacattcacagcaagggctccgttgcggctagcccgaagccgctcagcacactctggcgtcactccctgacacttcttcaccttcaccttgacaagacgtgggcagccttgagcgagcttatccattcctgcatcagaaacagggcatgccttgatgcagagcttccgcaacgcagcacatttcgtcgcgacgcaagatatctcggcatccccgaacgtatcagacccgcacagtgcgaggcgctcaagggcagggcagttggcagcaatcagttcgagactggcggacgtcaaattcaccccgatgagaaccagttcttgcaaagcagcgcatttctgtgcaacagccgctaggccgcggtcaccaatcctgtttgctttccatccatcgacgtgcagcttgcgtaggcgtggcgatctggtggcgagcttacccaacccaacatctgtaacctctggcgccttggcgaggtagaggacctcgaggcccgacaaggcagagacaccgcggtcgctgacctgcagcttctcgagatggagctcggccagcatggcgtcctgagggaggtcctgaagcacgggatcccagtcgccggagcagcggatgatcttgagcgttttgaggttgggcgagttggtgatgagagaggagaagcactggccattgtagagctccttgaggcagagggaatggaggcagaggctggagacggcgacgggctcggattgggcgaggccgcggaggcgcttgatggagagctcctcgagatggaggcaggagcggaggacggcctcgatccccttggcgccaaaggtgcacgagccgacggagagcttgcgtaggttggtggcggcggcggcgagcgcggcgacgccgtcgtcggtgacgagacggatggagcggagcttgaggcggcggagggcggggccgaggcggtcggcgaggagggcgagcgtggggtcggcgacgctctcagcgcggcggtcgcacttgagggcgagcttggagacggcggggaagcgggcgaggatccccgggagggcggcgtggagcggcgcccgcgcgtcgagggcgaggcggaggcgcgaggcggcgtcgacggagagccagcggcggcagacgagggagcagcgcttgcggtcggcggagccgaggaggccgaagacgacggcgaggaggtcgtcggggaggtcagcggtgtggtcctccgccgcgggggcatcgtcgtcgggagtgggcagcggctgcggcggcgcatggtcggcggggggtggggagggaggaggagggttgcggggtgggtggcgatggtggtggtaacggggggcggaggggcactggcccat

SEQ ID NO: 21290 - DNA, 189 bp, Oryza sativa
  Clone ID: PAT_MRT4530_26575C.1
tttcttttcctgaggagtccgtgcacctcgatcacattcaccggtatatagacaatctgaaaatagcagctgatgagaggcgagggcactcatggatgatcttatttactataacccgcacttccattacattaggaggacttggaacatattcctcttgcgaatgggaagagaatgcaggctgaaagg

SEQ ID NO: 21291 - DNA, 668 bp, Oryza sativa
  Clone ID: PAT_MRT4530_26576C.1
ttcttttacatatatgggcagcatcagaaatcttcctaaaaatgaaaagaaaagaaagaaagaaatccacctatatatgctataagttggaactgtcaaactgcaaccataacttgttagtgtaaagctgaaggtatggcttgctggaagtgttctattttttgagagggtggagcccaccaggctttaggaaccccatttacacaaattgcttggtcaatcaacatcaggaatccttcatgaaatgccaatcagattcaatgggttatgcattatgcttgttcagaaactgtggtattatgcattgttgtcttggaaacttctaggctgcggtctatattttgaatttcatggtttgttttttattgcttttacagggaacgttgcgtgagcacaaagattctgatgaatatgtaattccttgtggtgactggtttaatcgagtctcttgccctcattaccttgctgaactagtaatatattttggcatgttggttgctagtggtggagaagacattccagtgtggttcctgttcgtatttgtgatcacaaacctgtcatttgcagcagtagaaactcacaagtggtatcttcaaaagtttggagactatcctcgctctcgctatgccatcattccatttgtatgctagtgtctacgaaatggctac

SEQ ID NO: 21292 - DNA, 242 bp, Oryza sativa
  Clone ID: PAT_MRT4530_26577C.1
gcgttggcattgtccataggggatatgtagcggatgccgacaaatgtgtaggtcaccgtcgaatattcggcggtctgcggatcgccccgagtgagacgggggtaacagaggaggaggctagagtggaggcaggcgggtggcccggctcgggttgtcggggaacggcggcgttccggcggtcggcgagctcggcgagacggtggacggggtcggcggcggtgcggcgaagccggaggagatga

SEQ ID NO: 21293 - DNA, 1719 bp, Oryza sativa
  Clone ID: PAT_MRT4530_26578C.1
cgcgccctagccaagccagccatggcgccgtcgtcgaggaaagagagggcggcggaggcgagggcgagcacctccaagccgtctcctgcgccggccccggcgccggcggtccaggtgcagcggcggccggtgggcgggggccggtggacgagccgccggatatcgttctacgcctcccgcgccttcttcctcctcatcatcctccagatcccgctcttcagggtcccttgtagagcaggcacatgcacaacgcccattcaagttacatcttcgcagttggtctcaaatgagatattcccaccatctgttgtgaaagcccttctcttccctggggctatagcaagcaaccttactaagagcatgacattccctaggtggaatgacctgtttgatatttacaatgagatagcctacgtgacgggatccgttgtaaattaactacatggtatagacaaagttcgcttcagcagttattgagctccagcgtctagagattgtttctggaagctacttctgtggagctggagcacttgccggtgtcataaaccctgggaagaggacccatggttggtaccgtaatggttatacggggatcagtgaaagtaacgttctttgggtccgaccatattaattgccctgcattgtgcgttcttgtcaataacttacattgtaatgaacacaaagggcaaaaatttatcaatcacttgcaaggtaaagatcaccgtacgaaatagtcagtttgtttcaatcattaagcctctgcaaagttctgccaagtagaaactgaagtagacacttcattgtctatttgccccttcatccttgtagttcatttccacttcttaaagactgctgtccagactacagtaccatggttctgatgtctatacagaccatttactggtgtttagtgtattcagttttcgagagctatggaaaaatgacttataaatgtttgcagggctgcaaccatttcacctcaatgttccttatccttgccatttgattgttgatagactatctccaaatgttttgaagaccaacagtgtcgtcgatccctctgaaccgaagattttggatgcgagttcttctgcttcaagaactggacaatatagtgcaactactcatctatcagacaatacattgaatgcaaagtgttatctaaataagctggagagccagggttttgaggtgctgcttccagataaagcttcattggagcacacggtattaccagccatcggcgcttttaggagaggggacatggaaggtgcaagaaatctgttgcgaatatcactacaggttatgttcgtgagggctgtcaatacaataatccttgcatctgatgactttgttggtatattacctgatgatgacccactgctcaagaaatgcatagacccaatggatgctttggttagagagaccatcataagttgtaacagagatgatgcttccattttgacttgggaaagccaatctgagtgggcctgttcactggtattccaagagaatctggtgattggtgtggaggaggagggggaggggcttgaatgttctgtgcacaggtgggattgcaaaaggggccttcaccaaacaagtggctaccctttctcccatgcaggaaccagggacaaaaagaaaggaagcacaggggacaatgcaacaccaattgggccttcctctctctgttcttcaggatgttctgatgcttcatga

SEQ ID NO: 21294 - DNA, 1003 bp, Oryza sativa
  Clone ID: PAT_MRT4530_26579C.1
agcaaagaatgcatctcgcgccctagccaagccagccatggcgccgtcgtcgaggaaagagagggcggcggaggcgagggcgagcacctccaagccgtctcctgcgccggccccggcgccggcggtccaggtgcagcggcggccggtgggcgggggccggtggacgagccgccggatatcgttctacgcctcccgcgccttcttcctcctcatcatcctccagatcccgctcttcagggtcccttgtagagcaggcacatgcacaacgcccattcaagttacatcttcgcagttggtctcaaatgggatattcccaccatctgttgtgaaagcccttctcttccctggggctatagcaagcaaccttactaagagcatgacatttcctaggtggaatgacctgtttgatatttacaatttgacagaagccaagaccgcttcagcagtaattgatctccagcgtctagagattcttgctggaagctacttctgtgctgctggagcacttgttggtgtcataaaccctgggaggatgaccttgtttggtacccttttggttatctggggtctagtgaaagaagcgctctttgggaaaccggtgaacagtgatccaacacaatcagttcatgtttatccgaccattttaattgcactgatttgtgcattcttgtcaataacttacaatgtaaagaagacagtaagaaatagtcagtctgtttcaatcactaagcctctgcaaagttctgccaagtcgaaactgaagtagacacttcattgtctatttgccccttcatccttgtagttcatttccacaaatttattgttgaagactggcccaaaggataacactactgtggttcttgtgtaccactttgaatactgtaaccttcagttttcacctttgtatcaaagacttatatctataacttttattgcaagcatattcactttaatttccctcgtatttatttatgaaaaaaaaaaaaaaaaaaataggaagaaa

SEQ ID NO: 21295 - DNA, 201 bp, Oryza sativa
  Clone ID: PAT_MRT4530_2657C.1
atgcatgggttccgcgtcgtcagcgacgatggggagggcgatgatgatgcgagccgcgtggaggtcgagcaggccggtgatgagctagtgttggtcaggagcaagcagcaggttgatatcattctggattgcttgaaggaaacaggtactaaatcaatggacatggcaacactggaccagactacctacttgtatgtatga

SEQ ID NO: 21296 - DNA, 231 bp, Oryza sativa
  Clone ID: PAT_MRT4530_26580C.1
atgccggtcagaccaccctgtctgtccggtcagaccggccatgcagagctggtcagaccgccggtcatcaccggtcagaccggccgtgcaatgccggtcagaccgcccctggccgccgatgttgacaataacggcgtcggcttcagttttctccgcttgtatagttttcgccgcatctccagtaggtacatgaacatcttgagattcttcattgatagcaacgacctttag

SEQ ID NO: 21297 - DNA, 427 bp, Oryza sativa
  Clone ID: PAT_MRT4530_26581C.1
cggacgcgtgggctccctcttgtcaaaaatatatccccatcagaaagaatgcagcctcatgctctggcaaacacttctacaaggcgtgttcagacttcagagcctgtatggtaacacagttatcagaaagttatcagtgtgttttttttttcagaagttgtaacagagatgatgcttccattttgacttgggaaagccaatctgagtgggcctgttcactggtattccaagagaatctggtgattggtgtggaggaggagggggaggggcttgaatgttctgtgcacaggtgggattgcaaaaggtgtgcacaatgagtgagcaatgattcaggctgtctgcaggggccttcaccaaacaagtggctaccctttgtcgcatgcatgaaccagggacaaaaagaaaggaagcacaggggacaatgcaa

SEQ ID NO: 21298 - DNA, 438 bp, Oryza sativa
  Clone ID: PAT_MRT4530_26582C.1
gtgttctctttttttaccaggaatgatatcgatttgttctgaacttgtaatacatggagagtcctcattcacaattaaatgttaccctatcttacatagttagatctaagatcagaccaaaggaacaaattataattgggtcagtctagttctattactccctggttccctctagtaaaaaaaatttgacgttccaacgtcaattaattttgactggagggagtatgatatattttgtaactaaataattacagattggtaacagatattctgagtaagggaaattgtgttcggttgttggcaccaaacctggtcaaatattgctgtagggatggcaagagttgccactgcattaggggagccttcttttccagatatcctacccttaaatgggcagcatgatagcaaagggtttacctgctccttggagtacccaaa

SEQ ID NO: 21299 - DNA, 372 bp, Oryza sativa
  unsure (1)..(372): unsure at all n locations
  Clone ID: PAT_MRT4530_26583C.1
ttatttttttaattaattaaatttattaaatactaaaacaaaaaacacttgccaaaatttnatggaagggggcccaaaacaaagttctaacattacctataaggcaaaaaaaaacggtaaaaggaatgatctacaaaaaaggnntacaaacaaaaagtaaaaaaaaaaagcccgttgcacatatttagtctaaagaacaaaaaggaaccaataagaagcggcctaataatattaccagtcaaaaattgactaattacgaatacaaaatgctcacactgaaaaataatgaactttatngactgaaattgaaaataaaaaaaaaaaacagaaaaaacncaaaccgagcattccattgaaaagcaaccttaaaat

SEQ ID NO: 21300 - DNA, 1152 bp, Oryza sativa
  Clone ID: PAT_MRT4530_26584C.1
atggctgaaaggaggagcaatatgatgatgatatatggttttaatttgttgatcgttgctgcggctgtacggtcgtcgtcgtcgagcattctcggcgacgcgacggtcgtcagcaccgacgaccgctgggtacggaggaggctcctgctcatcgatgggatggtggacggcaagcggatgaggaagaccgtggtcgtagcgaaggacggcacggccaatttcacgacgatcacccaagccttgggcgcagcgccgccgagaggcaggttcggcatctttgtgaaagcaggggtttacgaggaaacggtaaatattaccagaccaaatgttgtgctttggggagagggcatcggcaaaaccgtgattactggaagccgctcttgccccatagaaaataataagaccaagaccgacatgatgccttggacggccacagtcactgtgcaagggcatggatttatagctcaggacgtgacaatagagaacaaggcgggtccgaccggtactccagccgtcgctctgcgctgcgactccaacatgtcccttattcaccgctgccgcatcgacgggtaccaagacacactttgggcccaaaacaacctgcaggtgtatctgcggtgcgacatcgccggcacaattgattttgtgtacggtaatgcgaaggccattttccagtattgccgcttactggtgcgcaacccgggcaacggcaagcacaacgcaatcacggcgcaggggcgcaacgacccaaccagcgaggagtcggggtttatattccaaggttgcaacatcaccgccatggaaggagaaagcctcgcgggggtggatacctatctggggaggccctggaagaaccattccagggtggttttcatgggctgtttcatgagcgacatcatcaaccctgacggctgggttcactggaacaaggcaacacctgtggaggagacgaccaggacagtggagtacctggagtatggcaacaaaggcgctggggcagagacggccgaccgtgtgaagtggaagggcgtccgggtgatcaccgaggcggaggccaaccgtttcaccgttgatcacttcatcaacggtaaccagtggttgcccaacttggtcaacggcgagcagatcaactacacccacggtctcatctag

SEQ ID NO: 21301 - DNA, 510 bp, Oryza sativa
  Clone ID: PAT_MRT4530_26585C.1
aataatctgtgacaataatccgattaataagcagaaaagaacgggatctaaaaccatgtgtttgaatttatacttactctagtattgttaagagggtatatgcgtttcaagcatcttggaacttgctagtaaaacaacaacctgcataattgaagtttgtagccatgagttgtatatatgagctcaatcaattaccaagagcttttgcctccgtggttaggttgaaattcaggggcagttggagcatagaaatgaaggacaagaatcattgacaatttaacgtcaagccacatagttttgtgctatctagctccaccagccttagctagcaatttgctcgcaaattagttttgtgagagcactgtcacccctcagcttggctaccgtagtaggacctatgctgtgctgttctgggaatgacaaaatactcttggtcagccaaaatttgtattacaaatcaagatataaccatatatatgttggggttatggtggggtacttttttgggtt

SEQ ID NO: 21302 - DNA, 250 bp, Oryza sativa
  Clone ID: PAT_MRT4530_26586C.1
tgtgttttttaaattttgggggttttttttttttttttttaaaaacaaactttttttcctaataccaaccaacttttttattggcaaccaatctatcaaattttctctaaatacctaacttgagtgtatatagccccaacctttttttcacatatccccacccaaccataattgaaatactctcacaaaaaaacctgtcggaaagggagggaaaaaaccatcccatatgggggaagagcggacccctttt

SEQ ID NO: 21303 - DNA, 470 bp, Oryza sativa
  Clone ID: PAT_MRT4530_26587C.1
ttttaagaattttgcgattgcagattacatactgaacaaattacaagacttcagatgttagtttactctaaaatgggctacacatttgccttaagatctttgaaccgtttgaaaccccgataacaagcaaagatatcctaaaagaccacatttttacacacgtcagggtatgtgcatacatttttggtcccttcagaccctgaatattaaggccccagggtgtaatgaaattgtgaaacagaggctttatcagctggacccagaaaagggcaacatatgtgcactttgaaacgctgttactggcaccgaacaatgtggttaaagtttcttcaggcaaaacctttggctttgcagtaatgccatcggactagcgaactggtagtatttgtgtagcacgaaggagaaactaattttccttatgaataacccatcctgagagggactccaaattatttcatccaagagatcac

SEQ ID NO: 21304 - DNA, 3513 bp, Oryza sativa
  Clone ID: PAT_MRT4530_26588C.1
ttccatccgttcctccgatcagttccaacttccaacctccgatcccaacgagaaaaccaatactgacacctctgcctcgcaacgcggcgcgcggccgtgcagcgatcgatcgaccggccggagtccggcatgcaaatgggagctgcctggcgcgggcggcggcggcggtgatgggcgcggcgagctctaggctggagaaggcgctgggcgagcagttccccgagggcgagcgctacttcggcctcgagaacttcggcaacacctgctactgcaacagcgtcctgcaggcactttacttttgtgttcctttccgtgagcaattactggaatactatgcaaattacaaaagcaccggagattccgaggacaatttgttgacttgtctagctgatcttttttcacagataactctagcgaagaaaaaaactggtgttcttgcaccaaaacgttttgttcaaagagtgaggaaacagaatgaattgttcagaagttatatgcaccaggatgcccatgagttctggaatttcttagtgaatgatattattgatattcttgaagaagattgtagaactgcaaatagttctcctgagactactcctgaagaggtctcaaatggggcagccaatgctttagcaaatggagccagagaaaggccattagttacattggtgcacaggacttttcagggtattttgaccaatgaaaccaaatgcctaatgtgtgatactatcacagcaaaagatgagacgttttttgatttgagcattgacgtggaacagaatagttcgctcacaagctgcctgaagagcttcttttccactgagattttaaatggcgaggataagttcttttgtgacaaatgcagcagtttgcaagaagcacacaagagaatgaagataaagaaggcgccacacgtattggtgatccacctgaagcgcttcaagtacgttgagcagcttagccggcataagcctctcccaccaccaccaccaccaccaccactacacactttgctcatctcatctccctccttccctcctataggaatccaaacccgccgcatcccggttcatgtcctgccgctccccatgtcgccgcccctcgagctcgactacataggcctctcgcctccgccgccgccgccctcctcctcctccgccgccgccgcccgcgcggacgacgtcgacctgaagggcaccgagctccgcctcggcctccctggctccgagtcgccggaccgccgccctgcggctattgccgctgccgctgccactgccaccacccttgagctgctgcccgccaagggtgccaagcgcgtgttccccgacgaggccgcgctgacgccgcccactgccgccgccgggaagggcaaggcggcgagggagggggaggaggtgggggctgaggaggaggacaagaaggtcgccgcgccgccgcagccggctgcgaaggctcaggtggtgggatggccaccaatccgcagctaccgcaagaacacgatggcaaccaaccagataaagagcaacaaggaggatgttgatgctaagcagggtcagggtttcctgtacgtcaaggttagcatggatggtgcaccatatctgaggaaggtggacctcaaaacttacaagaactacaaggacatgtctttgggtctcgagaaaatgttcattggcttcagcaccggtaaggaaggtgctgagaaccagaaagatggtgaatatgtgttaacctacgaagacaaggatggtgactggatgctggttggtgatgttccatgggagatgttcaccgactcttgccggaggctcagaatcatgaaaggctcagatgcaattggacttgccccaagagcaggggaaaagtccaagaacaggaactagaatggttattgcccacagttgaaagcaaaacggagatattaattaactgcagggcagttcctcaaaaccataatttaatagttttacaggatcaccatatgatctgtattacatggtttgctattctgcaagtaaaaaaaaaaactcttttaagactctgttatgttaggtttgcaacatctcctagagatgtacgctctattcggttgcacgtgtctttgtatgtgtagtatttccatccatgtaaatggttggtatgcagtgcgctaccgctattattgagcactcctacctatcctgcaagtgttgtcctgaaacgtatgttcccgtcacgtaagtgtttaaatgtttttaagaggttcctgaagatgtattatttatatgacttcatttggagcacacttatgctagtttgtttttgcaccacacctcaataaaaaaacaaaatttcgttgaaatttttaattcgccacagcttcaaagctccacccgatcagggaacctcccccccggcgcgctgcctccggcgtccgccgcagaaccgttgctcaacttcctccttgactctggcatcaggctctccggcagattcccgccggcgctctccgggctacgaatcctctactatctcagtctgcccctcaacgcgctccacggggagattccacctgctatcgccggaatgcagagccttacagccgtcgacttctccgacaacagtccctccggcgaggtcccggcgaccggccacttcgcctacttctacgccacgtcgttccccggtaaccccggcctctgcggcgccttccgctccccgtgccgctcccacgccgtcgccacgacgtccaccttcggctcccgctcgtcggcctcgaagctgctcctcgtgctcggcttcagcgctccgtctatcttgaacaccggggtggcggtaaaaagctgtcgtatcgagttgttttccctctggagcttaaacttatcaatactgttgacaactcagacttggaatattccctttttgctgtgctagttcatgttggaagtggaccaaatcatggccactatatcagcttagtgaagagccacaaccactggttgttcttcgacgacgagaatgttgagatgactgatgagtccatggtacagacattctttggctcagcacaagagttcagtggtaacactgataacggctacatactcttctatgaaagccttgctgaaaaaagttgatgtctctctcacatttttcgatagttatacagttatcattttattaccacactgcctgcacctgataatatagaagattcagtaattagaataagttgaatgaaagaccattcaactttagatattatatggtggaatctgcggtaggcaataaaagaaaatgacgagttttgtggaaggtgctatagcggcataaatccacaggtttcttgttttctgtttatttttctgttctttggtttatgcgtacaggttgtaccaatcctgggataatgtttatttaaagtttaccatgtataaaaatatgcttgtactggaagccgtatggcaatgagtaattttttttttgtttagtcggggtagtgctactggagctcatcgctgggcggaagccggtggg

SEQ ID NO: 21305 - DNA, 222 bp, Oryza sativa
  Clone ID: PAT_MRT4530_26589C.1
atgctggcgtggagaggtggagtcgccgccggcggaaagcggccccccggtccggcccttccaagacgaagccacggacatggacggtggtcgggattggtggcggtggtcgcagtttggatcggcggcgcgaggaagagaggccgccgcgccatggggtgggagaggacgcgggcgctccagctccaaagcattgcgacctcaggcgaggttttcaggtag

SEQ ID NO: 21306 - DNA, 253 bp, Oryza sativa
  unsure (1)..(253): unsure at all n locations
  Clone ID: PAT_MRT4530_2658C.1
gtnccaggagtatgcaaggcagcggttcgatcagtactggaagacaaaagatcaaacgctgggatccaaatccaactagttgatcacacagacacacagagcattcttctttcatgtcttgtgatccttttcttttatatagctttgtctagtcttgtgaattctcaattgtgtgtgtctgtagcagcaanagcgtagctgccaagtttttactgtaaaaaaaaaaaaaaaaaaaaaaaaaaaaaaaaaaaaa

SEQ ID NO: 21307 - DNA, 230 bp, Oryza sativa
  Clone ID: PAT_MRT4530_26590C.1
gcacgaggccccccccctttattttttttgttttttttttttttttttttgaaaagtataagctctcccatttgcagccgatgcaactccatcacagatatgatctacaggtatctttcattgaaacaaggagggaaaatgtatgtacaattgcgtgctggcaaagctgaaagacgataaatttccagtgcagcgtctgcacgctgcagtaaaaaactgaaaagaggggg

SEQ ID NO: 21308 - DNA, 336 bp, Oryza sativa
  Clone ID: PAT_MRT4530_26591C.1
gtttttcatggtgagtagccaggattacccggactcggagttctggaaggcgtacctcatgtgcaaggccacgttcggggtggtctgcgacgagctagccgtcgtcgtcgccaaggaggacaccatgctccgtgccgacatacaaaagcgcaagcacgtggccggctgtgtgtggcacctagccacaggtggagcccttgaggctggagatcaagctgcttctgtcttggaagcttcacctgccacaagctcgtgctgcaagtctgcgcccagctcaaggccattgtgatgcccaccgtgaaagcactgatccgaggccggcaacagcgcaaaaca

SEQ ID NO: 21309 - DNA, 735 bp, Oryza sativa
  Clone ID: PAT_MRT4530_26592C.1
atggcggcaatcaaggaggctggggacgcagcggtgatcgaggaggccgaggtggtggcgaggcgacgacaagctcaacagcgcgtgactgagacggtttcggcagtagatcgggtcatctttgagcaggagaacggacataggatgatgttatcgggcgacgagcagatcaggtcgatgatctccaagtcggccagtgttcttccccatgtctccggaacctctgccttcgacgttctgcaccgggagaaggcggcaataaggagcagcatatcgccgtgtgaggccgagcgccattttgatcggcaggcgggggcagcggctaagggcggcagcctcggggcggcggctgaaggcggcagaggcgctgccggtggtggtgctgccgtcgcgtcgccgctcggcctagacgacaccatcgccaccgatatgaccaacgttggccggaagcggaagcgaggaggaggggatggggaggacggcggcaccctcccgaccaggaaggatgggcctagaaggatggaccgggatctccgcctccgccggctccgattacgggccgacgccgttgcgcttccgcgcctagggccgcacctgctcattcgtagttcctgcccggggccgttacctaccgcgcccttagaccggtgccttcttatgacccttaggagccccttccaactcccggaccaagtggcgtcggccgacggtgcgttgttgcgggtgttcgcgtag

SEQ ID NO: 21310 - DNA, 372 bp, Oryza sativa
  Clone ID: PAT_MRT4530_26593C.1
ctgggtttttttttttaaaggaaatggcattggtatgccttgcagcaaagcctgaagagtggaaaccgggctgctcagttcaactgctcggttataacagcgttgatactcacacttacttttagcctactgcagccgaaaatcaaaggctatactgtccccgactatatactatccttgactctagatagggaggcagagacttttgagtcagctgagcaaactctcttgttataccctcttaatggtcacagtatggataccagatcaagctaccataagctctgccggggaaaggaaaccaaggatcactcgctatgttcattagattggcctgatctaccaaaccgttgaaacatacttgccgatgcc

SEQ ID NO: 21311 - DNA, 858 bp, Oryza sativa
  Clone ID: PAT_MRT4530_26594C.1
atggccttcttggccatggtagcccctacgatgaagacgagcggaagggtgggaggagaccgagcacgggggctcctcaagcggcgtctccatggcaagctcttcccgccgctgtcctcgacgggataccaagggccgccatcttggacggtctcggcaggcaaactccgtgggggcggaggcggcgatgggaactccgcacgctctcctccggcgggtaggagcgatatgtctggcgacagccctcgaaaaagtcatcggaagccatggccagcatttttgtgtggtctgatcttctgcttcagtgtatgtgctcaacaggaggggggcactaacatgtgggtgatgggagagagcccaataggacggacgaaaattagacttattctgagaaaaagcacgatggcccatcgtgccttcgggccggcccggcacgacccgaggcgtgttgtgccgtgcctgggccgtagacgcgtcaatgaggaagcaatggaggggatggggcgctccgctccaatgtggcaccggggcactagaaaccagagtgggaactccggtgcaagcttggtgagcaagcagagggagcaaatcgatggggatgactgcgccatggcctccttggccatggtggcccctacgacgaagatgagaagaagtgtgggaggaggccgatcaagcgcaggagctcctcaagcagcggctgcacagcaagctcttcccgccgctgccctgacgggatacgaagggccgccatcttggcagtctccgcaggcaaactctgcgggggcagaggcagcgatgggaactctgcacgctctgcttcggtgggcaggagcgacgactagcggcagcccttga

SEQ ID NO: 21312 - DNA, 178 bp, Oryza sativa
  Clone ID: PAT_MRT4530_26595C.1
gggacttatcaatgaagcagtggcgcctagctcagtgacgccaccgcagtctcgacttccaatggcgttggactctcatgctggtaccggttcctttctcttccatgccactgctgtctacgatgagctccatcaactccagtgccgccacgggctcgccaagcttcggagcttctaa

SEQ ID NO: 21313 - DNA, 2058 bp, Oryza sativa
  Clone ID: PAT_MRT4530_26596C.1
atggcggaagagagagaaagcttcgagagtcagtgggcgccctccaatgtgacggaggagaatctgaaagaaatggtggcgcacggcgttcttctggcgaaggaaatcattgggtggcgaccagcgttcggcgaagctttcccgacccctgatacacacgaggtcgtgcctgcatcatttgaatccaaactccatagttcacatcgccaattttattcatgcctgcgaagcttttctggcattaggcctcattttgctttgttccgccgcatcttcttcctcaagccccaaccgaacaagagcaagccatgcgttgttgggggcgctggtttccaactcagaggaacattgagccaaaagtatttctccatgcccttcaagacctcaaacaaaggctggcatgcaaactggttttatgttcaaaaccctgaacccgcagtccctgagtactcttgtctccctctagtctatcaggacacttggaactcgctgcctatgggaaatgaagccgctcaggcagtagaactgatggaccgcatgataaagctgaaagaacaaggtcttcaaggagaacagatcacccggcatttcattaagagccggttagctccaattaaggagagatctcgcacagcttttgaatttgacggcaagcatgatccaaattgtgaagatccagattcccttgattttaaggttatgaaagaaagaatgtacaagattttctccaacgctatcgtagtcagctattcacacttgctgccagtggtgccatacaacgcattcaatcctcctccaccggagtttgctttgatgaagtcggatcccccaatcgctcagcgtcgatcacctcgccgtcaaactggtcaggggagcggtgaaccaaagatccggtctgaagcccagccgaacacctctaatccagccggccagtcggattcccgcaagaggaagttagttctgagtgacgacgaaggcgatgatgctggaaagcttggagataaagaaacaatcggaaaattgccgaagcatgccaatccaaagaagaaaacatccagtcgtcctatgccgaagatcaggaagttttccaggaaaccatctgatatagacccttttgggaaagactctgatccgactaacatggagacgagttcctccaaagaaactgggccgactgcaaaggatcatccgagtgacaatcagccggcaaccgacaatgtagaatctagctatcaacctccgactggaaaccagtcggccgaagctgaagtcagagttaaccaggagcccccgactggaaaccagtcggacatagggccaagccaagagattcctgaagttgaaactcaagcaaacagccctcgcggacaggatgccagcaatgacccaagatctggatctcctgcaaaggcacaagaatccactcgtcctcgtccggaaatcatcacgggaccaatgattggtgatgaagaagaaattctccgaatacgagtggctgaagattcgcaccctcccattctggtcaagtggcaaaaagaggatgaagaggtatgcctattgaaaaaggcactcggccaggcaactcgcattgtaaacagtcaatgtagtgcaagccgccaagatatctcaactggagagaagcagattcagactctggaaaatgacaaggcagaactggcaagacagagggactcggctttgaaggatgttgaagaccgtaagatcaagtcgcaggctcaattcgacgtcctagtcggcaaaatcaagaggctcgaaggggccagggatgaagttgctaacgatgctaccccactggtccaagcaatgttcttcaataacaacggtccgagtacattcgatgcttccgaaatcttcgacaagctgagagttgctccggatacatatttcaagaacatcaaagaggccgggagtatgggagcgagtctggcgttggcaatgaccaagttcctttacccaaaaatcgacattgatgccattgatggatttgcagacgggacgagcgaagaagctgctcttgaccttatcaatgatgcgtag

SEQ ID NO: 21314 - DNA, 348 bp, Oryza sativa
  Clone ID: PAT_MRT4530_26597C.1
atggcgattcatccagggaaccgagtcaactacacatctgaaactcaaagtcaaggtggatttttgctcgagccaggccgagcggtggggagcaggcaagcctcggacctggaagatgctgagctatacacgagacaaaggaagcgatgcggcggcggcggcggcgccatttctgtttgggggcacagagaggcggaggctaaggacggcatggtcagcgacggggaggccgaggatggcgcggcccatgacaaggacgaggagaagggagtgtgggagcaggcgggcacgggagaagctgaggatgagaacggcacaaccggtgaggttgaggcggacgacggctag

SEQ ID NO: 21315 - DNA, 1947 bp, Oryza sativa
  Clone ID: PAT_MRT4530_26598C.1
atggcggaagagagagaaagcttcgagagtcagtgggcgccctccggtgtgacggaggagaatctgaaagaaatggtggcgcacggtgtttttccggcgaaggaaatcatcgggtggcgaccagcgttcggcgaagtgttcccaacccctaatacacacgaagtcgtggtattttctcacttcttttgtggcagattttctcttccaacctcaagattcttccagggaattttgaacttctatgggattagcctgcatcatttgaatccaaagtccatagttcacatcgccaatttcattcatgcctgcgaagcttttctgggcattaggcctcatttcgctttgctctgccgcatcttctttctcaagccccaaccgaacaagagcaaaccatgcgttgttggggccgctggtttccaactcagaggaacactgagccaaaagtatttctccgtgcccttcaaaacctcaaacaaaggctggcacgcaaactggttttatgtccaaaaccctgaacccacactccccgagtactcctgtctccctccagtctatcaggatacttggaactcgctacctatgggaaatgaagccgctcaggcagtggaactgatggaccgcatgataaagctgaaagaacaagttgacaatggaagatattatgctcagcagtttgctttgatgaagtcggatcccccaatcgctcagcgccgatcacctcgccatcaaactggtcaggggagcgggggaccaaagatccgatctaaagcccaaccgaacacctctaatctagccggccagccggattcccgcaagaggaagttagtgctgagtgacgacgaaggcgatgatgctagaaagcctggagataaagaaacaatcggaaaattgccgaagcaagccaatccaaagaagaaaacatccagtcgtcctatgccgaaaatcaggaagtcttccaggaaaccatctgatatagacccttctgggaaagactctgatccgactaacatggagacgagttcctccaaagaaaccgggccaactgcaaaggatcatccgagaggcaatcagccggcaaccgacaatgatgccagcaatggcccaagatctggatctcctacaaaggcacaagagtccactcgtcctcgtccggaaatcatcataggaccaatgattggtgatgaagaggagattctccgaatacgagcagctgaagactcgcgccctcccattctggtcaagtggtgggatgacgacatgcaacctcaaggaatcgtaataaaccggaaaaaagaggatgaagaggtatgcctacagaaaaaggcacttagccaggcgactcgcatcgtaaacaggattcaccttaggaatgaagcaaaaaccgcaaccttagagaaattagttcctcatctcggaacccttgaagctatcagagatcaactgcacgaggcaaaagaacttgccaagaaaaccgagcatgatctaagggatcggatcgctgagctccaggagtctaattttgaactgactggctcatcaaaagaccgtaagatcaagtcgcaggctcaattcgacgtcctagtcggcaaaatcaagaggctcgaaggggccagggacgaagttgctaacgctgctaccccactcgtccaagcgatgttcttcaataacaacggtccgagtacattcgatgcttctgaaatcttcgacaagctgagagttgctccggatacatatttcaagaacatcaaagaggtcgggagtatgggagcgagcctagcgttggcaatgaccaagtccctttacccaaaaatcgacattgatgccgttgatggctttgcagacgggacgagcgaagaagctgctcttgaccttatcaatgatgcgcagaaagccgccgacaagacagtggttgatgtagtcgagaggttccaggacaccgatctttga

SEQ ID NO: 21316 - DNA, 388 bp, Oryza sativa
  unsure (1)..(388): unsure at all n locations
  Clone ID: PAT_MRT4530_26599C.1
ctttcttttttttttgtacatcacaaaacgtagggaattgtgatatgaacagcaatacanattctccattacaaatatgcaaggccagttccccgcaaaaattttttacaaagataaatatttaaaggccagtacaaacactaacaccaccgttatctcatcacgatgcacaaccaacgttgctccaaccaaaaatccactacatatcacatgcaatacagcatactaactacaggatttaaacacatatggccacacaaactaaccacaacgcgaaaagcacatttaaccatcattaaatggttaatactatatccgaatgtgactctactcaacaaacaatcctaggtcgacctcgtgcacgaaccatgattctgacctctacatt

SEQ ID NO: 21317 - DNA, 367 bp, Oryza sativa
  Clone ID: PAT_MRT4530_2659C.1
gttaccgggttccacaggaatgtcacccagggtcagacacctacagcagtcacgaagtgccagtcgaactgatcgggggacaacattcctatcgagcaagtacagggatcgcaggtatcgcataacaaattgacatcaggctactatacataaacaaccacgcatacaggcaaacagatgagcaaacaagcataacatgactgatgtgaaacaaaaccaaacccttcatgcacacatgcacaattgttgcaccacctgctctcttttgatccactggtttctttcctaatgatgattgagatttaccgctcgcgttgttcagcttgctcactgacctccagcagacagcctgtaacaaatagataac

SEQ ID NO: 21318 - DNA, 1551 bp, Oryza sativa
  Clone ID: PAT_MRT4530_265C.1
atgtcttccccttcctcggcccattggctgagcttggtaggaagtatctggctccagaccatcaacggccccaactccgacttcccggtgtactcgtcgcagctcaaggagctcaagagcatcagccaggtgcagctcaacttcctcgccttcgcgtccgacgcgggcaagctcttcggatggttctccggggtggcggcgctgtacctgccactttgggtcgtcgcgttcgtcggcgccgcgttcgggctcgtcggctatggcatccagtacatgttcttggacagctccggcctccggtactggcatctcttcctgctcaccgcgctggccgggaatggcatctgctggatcaacaccgtctcctacctcctctgcatcaacaacttcgcgtcgaacagccgcgtcgcggtgagcctcgccaccagctacctcggcctcagcgccaaggtgtacaccagcctggccgagacgttcccggggctggccaactccaagacgaagacgtacctcctcctcaatgccgtcgtgccgctgttcgtcaccgtcatggtggcgccgtccctcagggtgttcgacctcaagagcgcggcggcgagctcggacgcggcattcctcgtcatgttcgcgatcacgctcgccacgggcgcctgcgcggtggtcggcagcatcggctcgacggcgaacgggctgtcctccaaggagcacatgatcagcctcggcgtgctgctggccaccccgatcctcatcccggtggggctcaagatccgcgagaccctgaccaagatacgggagacgcagcgggagaacaggatccatgacctcggcaccgacgagtcggagtccgtggagagcgtcgtcgtcatcgacgtcgccgccgacgcaaacgccgaggttgccaaggaggaggacgccgtggtgaagaagccccaagaggaggtcggcggcctccggctgctgaaaagcccggacttctggctctattttttcagctacatgttcagtggcaccctcggcttggtcttcctcaacaacctcggtcagatcgccgagtcgcgaggaatcgggcagacttccactctgaagtggctactccatatcgaggacggggtccatggcgtcgctgatggcgcccatggcgggggccttcttcctgctgctcaaccagcgggacttctttctgtacctggccacggcggtgatcgggacgtgcacgggcgccatcacgtcggtggcggtgtcggcgacgcgcgagctgttcggcaccaagaacttcggcgtcaccacaacgtcgtggtggccaacatccccgtcggctccctgtgcttcggctacttcgccgcgttcctctaccagcgggaggccggcgcccgcggcacgctcacctgctccggcgccggctgctaccgcgagacgttcgccatctggggcacgacgtgcgccgtcgggacgctgctctgcgccgcgctctacgcgcggtcccgcaattttgccgggaggctacctgtaaggataccgtcgtgcctcgcccgcttagctaaccttgtgtag

SEQ ID NO: 21319 - DNA, 267 bp, Oryza sativa
  Clone ID: PAT_MRT4530_26600C.1
atggatttttgtgccaacaaaagggatggcaattttgcccatgggtccgggtatccgcagatacccgacccaatgggcacgggcgcgggtgtgattttttacccatgggcatgcccgcccgaaacccgtggacatcttattattcatgtgaggtccattgggtacccgccggatatacccgtgcccgtcgggcataggtacgggcacggacagtccaagcgagtgaacgagagtcgactatccattcaggattcagctctagtgggc

SEQ ID NO: 21320 - DNA, 417 bp, Oryza sativa
  Clone ID: PAT_MRT4530_26601C.1
atgcggcagatccagcagcacccgccgtactggagaccgccgctgtccggaacgggacaccaatgccacagatcatgcagctccctctccaaatcggttcaccgacctcctggatccagtgattccccgtctcctcgacgtcccacacgcacggcggccggatctgccggcgaggaggccggagtcaccggatccgacagtcccggcctcctcgttggcggatgcggcgcgggagcgagaggatggcgatggcaggacgacggcgcggcgacagcaacagctcgcagtagggagtgcgcgggggaggtcgccaactgcgggaagaagaggatgaggggacggcacgcggcggcggccgtcgcttgggcaggagagagagcggagcgagaggagaggaggcagaggaatggtggcggc

SEQ ID NO: 21321 - DNA, 393 bp, Oryza sativa
  Clone ID: PAT_MRT4530_26602C.1
cccacgcgaacagacggaggcacaccactgcaactgaagtgtatacataactcctcgcaagctagctagggctacctcggagatggctcaagaggccacctacggggctccgtttcacgggctcaagtccactgcgggccatgcgctgaaccgttgttacagcagcttgcgctatggcaacgtgagcaatggcagctggataaatgcatgcaggtgtggtcacatagagggcacttaagaagttggagactactagtcagacttgccggcagtgacaggctaagaccatgcgaagcataccgagttcctgctccgatctaagagcatgccacgcttggagtggagcaaggtcggacacatctaacgagagaaggacagaacacccatgcacta

SEQ ID NO: 21322 - DNA, 1627 bp, Oryza sativa
  Clone ID: PAT_MRT4530_26603C.1
tctaaactagttgatccccgggctgcagtgaattcggcgcgcggccctcgccgtccccctgcctgtcccccaattccccacttccccaacccaggcgatcctccgccgccgccgccggcggccggccgcctccctccgccgccacgcagccgcgccccctccgccggacactccagaccccggtgagcctcccctccttcgccggccgccttgcccgcgcccgaacgccacgccaagctcaggatcatttcgtcgatttcgtggattggatggccaaccttggcggtggcgcgatgccggcgggatcctcgggcggcgacggcgaggtggaggccgggttcgcgaagctccagggggaggatttcgagtactacatgcagacctactcgatcatgctggggcgcaacagcaagaagtcgacggtggacgtggacctctccagcctcggcggcgggatgaacatctcgcgccaccacgcccggatcttctacgacttccagcgccgccgcttcgcgctcgacgtgatcggcaagaacgggtgcctcgtcgagggcgtcctccacctccccgggaaccaccccgtgaagctggattcccaggatctgctccagattggggacaagaagttctacttcttgctgcccacccggtccatcttcgcgtccgccgccgctgctcgtcatccgcctatcatcccgcagcagatgcctccaccatcctatgtgcggacaggccgccctcgtctgtctgaatttcatgacaggtcctttgagggtgactatggccgggagggtgatgagattgggaatggtatcagtgagagtggtgggatgagggggaagttgattaagaggaacaagaagctgtccgcggagtcggagatgtatggcgggcaccggatcaatgttgaagcaatcgggacactcggtgaaggtgacagcagatcagaaataagatcaaggggtgacagggatatggataaccagcacatcctgcaagcagaagaaaaggatgtagtgtcatctgttgcaacagtgttatctgacctctgtggtcctggagaatggatgcctatggcaaaactccacacagagcttcttgaacagtttggcaatgtgtggcaccacagcagggtccggaagtacctttcaccagaggactggtcgccaactgaaacaaaaggtaggccatggtacggtctccttgcattgctgaggaagtatccggaacattttgtcatcaacacaagatcgaaaggcagggtaacatcggagttcgtctcgctggtctctttgctctcctagaggtaacctggaccgtggcataatctgttctcaccgttctggccctgctgaagaatgattcgcatcttcaatcgctgaactgaattgaagcctgttgtactttactggcctgtgtttacccttagctatgtaatccggagaaatacatagggaaacaggattttaacttatgttagtagctgggttcatgtctcactgttgtgtggggtgagaatgtatgtctagtgttgttgagactggaagcgcgaaagttcacagcattttgctgattggaagattttgaaactttgccgtactagaaaaagtgtagttgttcatccttc

SEQ ID NO: 21323 - DNA, 360 bp, Oryza sativa
  Clone ID: PAT_MRT4530_26604C.1
tgtgaaaaaagtaaaaaaacttaagaacactaaactaaacttgagagaatatgagagagctttgcttggagtgtgtgttgaaatggagaaagtgaggggtttatatagcctcccaatgacagttgtgacagttggaatggttggaaataccctccaaccgtcatttggagccaatctacaccgtccagaagaaaccctgcatccaaccgcgatgaggctatataaacccaaccaggggctggcccaaccaacctataatttggctggtggcctcctggacttctcctctccgcagacttttgaacttttgcccaattagtcatagaaaacgcttctcctttgtgcttacttccttctccc

SEQ ID NO: 21324 - DNA, 1497 bp, Oryza sativa
  Clone ID: PAT_MRT4530_26605C.1
atggcctttcaggtgatgaacgcttttgccctcgggtaccagataagttgcggtgcgacgtcggagaaggtggtcggcgacgtgacatgggttcccgacggccggttcgtcagcgtcggcaacgtctccgacgtgcggtcgccgggggtgctgccggtgctctcctcgctccggtacttccccgacacgtcggcgaggaagtactgctacgtggtgcccgcggagaggaagaggaagtacctcgtccgtacgacgtacttctacggcgggttcgacggcggcagcgcgccgccggtgttcgaccagatcatcgagggcacgcggtggagcgaggtggacacggcgggggactacgccaggggcctcgccacgtactatgaggccgtcgtgctcgccaccgagaaggaggtcagcgtgtgcctcgccaggaacgccgccaccaagtccagccccttcatctccgcgcttgaggtgtcgccattggaggactcggtgtacaactccaccgacttcgagtcctacgctctcagcaccattgcgcgccacagcttcggccacgacggctcagcggccgtcagctatccaggcgatcgtttcaaccggttctgggaggcgcacagcgacgggatgccggtggtggagagccaggcgagcgtgtcgcaggcggcgttctggaacaagccaccggaggacgtgttccgccgaggcgtcacgacggccggcggccgcggcgagagcctggagctccagtggccgccggcgccgctccccgccgcgagctactacctggcgctctacttccaggacaaccgcgcgccgggcccgctcagctggagagtgttcgacgtcgccgtcaacggcgagacgttcttcgccggcctgaacgtgtcgacggccgggtcgatgctctacggcgacaagtggccgctctccgggcggacaaagatcacgctgacgcctgcgccaggctcgccggtcgggccggtgatcaacgccgccgagctgatgatggttgtgccactcggagggaggacacatcccagagatgtgatcggcatgcaggcgctagccagaggtttcgacaacccaccggctgactgggccggcgatccatgtttgcctcaggggaactcatggactggtgtcacctgcacccaagaaccacttgctcgagtggtttctctgaatctcacgaattttaaagttgggggatcaatatctgacggcattgccaacctgacagcgatctcaagcatttggcttgtgggaaacaatctgaccggaccaattccagatatgagcctcctacatcatttggtttctctgcatctggagaacaaccgactgacagggcagattcctccatctctagggagcatgccaaggcttcgtgaattgtttgtgcagaacaatgcactgcaaggggcgattccgatcagcttcaagaacaaaacgggcttcatgttccaatatgcacctgggaataaccttagctaa

SEQ ID NO: 21325 - DNA, 1440 bp, Oryza sativa
  Clone ID: PAT_MRT4530_26606C.1
atggcctttcaggtgatgaacgcttttgccctcgggtaccagataagttgcggtgcgacgtcggagaaggtggtcggcgacgtgacatgggttcccgacggccggttcgtcagcgtcggcaacgtctccgacgtgcggtcgccgggggtgctgccggtgctctcctcgctccggtacttccccgacacgtcggcgaggaagtactgctacgtggtgcccgcggagaggaagaggaagtacctcgtccgtacgacgtacttctacggcgggttcgacggcggcagcgcgccgccggtgttcgaccagatcatcgagggcacgcggtggagcgaggtggacacggcgggggactacgccaggggcctcgccacgtactatgaggccgtcgtgctcgccaccgagaaggaggtcagcgtgtgcctcgccaggaacgccgccaccaagtccagccccttcatctccgcgcttgaggtgtcgccattggaggactcggtgtacaactccaccgacttcgagtcctacgctctcagcaccattgcgcgccacagcttcggccacgacggctcagcggccgtcagctatccaggcgatcgtttcaaccggttctgggaggcgcacagcgacgggatgccggtggtggagagccaggcgagcgtgtcgcaggcggcgttctggaacaagccaccggaggacgtgttccgccgaggcgtcacgacggccggcggccgcggcgagagcctggagctccagtggccgccggcgccgctccccgccgcgagctactacctggcgctctacttccaggacaaccgcgcgccgggcccgctcagctggagagtgttcgacgtcgccgtcaacggcgagacgttcttcgccggcctgaacgtgtcgacggccgggtcgatgctctacggcgacaagtggccgctctccgggcggacaaagatcacgctgacgcctgcgccaggctcgccggtcgggccggtgatcaacgccgccgagctgatgatggttgtgccactcggagggaggacacatcccagagatgtgatcggcatgcaggcgctagccagaggtttcgacaacccaccggctgactgggccggcgatccatgtttgcctcaggggaactcatggactggtgtcacctgcacccaagaaccacttgctcgagtggtttctctgaatctcacgaattttaaagttgggggatcaatatctgacggcattgccaacctgacagcgatctcaagcatattggaaaaagattgcagtggtaaattggcttgtgggaaacaatctgaccggaccaattccagatatgagcctcctacatcatttggtttctctgtttgtgcagaacaatgcactgcaaggggcgattccgatcagcttcaagaacaaaacgggcttcatgttccaatatgcacctgggaataa

SEQ ID NO: 21326 - DNA, 1385 bp, Oryza sativa
  Clone ID: PAT_MRT4530_26607C.1
aaatcagcacatgtccgtttattatattttactgtataatatagttcacagtcacaaccatgatgaaacatatcaagttaatagaggcagaaactgattagaaagagtatttctaacgccagttgaaacagcgatctcagcagtttctactactttgcagggggtgacggtgcagttgctgtgtagagggacttcaactgcctgtatataagcttgctgtcatacactgctagctgcagctccatgccatccgaccaccattgctccagcccatgcgcttcaagaaacttctgtgggcctttcgatgtcacaaaaagcttcgcgaccacatcaccagcgatctcacttgcctttcgttgctgctgctgctcatctgaagcaccatcagtggtggtagtggtggtggtggtggagcaattaggggcattgtagtgacagcagatgtagtcactgttgtttacatataaatgtggcacccatttcttgtcagcacgcaatttcttctttgcacttccctcctctttggtactgtcaggtaatgcttcttcagtcagtggtagactagccttaacttttttccacaggtagctggccttctcactcatactccttacacccatggcaagtgaaacagaaggtggattgaacagatgacactccacaaagactccttgcttagcgagctctttgcaaacctgaagagcaaatccagctcccaaggagtgcccagcaacactgacattagcgctaccaaacctctcaactgctgtcttcagtgcttctaaagcgccaatgtatctgactgatccttttaagctctcccacaccaggaagcgaagatcatcttgtaggtctctctttatggtgggcttctgaagcagtgttcctcggagagctaacacagcccttggcgcgccacttggtcttatgaggataaagtcagacaaagcagaagaacgatcccactcaaggacggcaccatagatggaaccatctctctcatcgaccaatgtctgtgtgaccttgtatttgaagggcttccaccattttggagcaaggccatcctcttctcctttctcatcttgcctgtccagttcaagcaggtagactgcttgaatgaagcaggccattaccatccttttgtaattgggatccttccagctcgaacggatgatctccctccagttgggcggcggcaggttccgcggcccggacacgtggaagtcgtaggggtggccctccacctccgcgtccgccgcggccaccaccacggcctccccgccgcacaccccgccctcctccccctccccctcctctttcttccctccaaccgccgcccccgcgacctccaactccccagccagcggcgccaggtcgatcgccat

SEQ ID NO: 21327 - DNA, 852 bp, Oryza sativa
  Clone ID: PAT_MRT4530_26608C.1
tcagaggagaaagaattgagcaggcccttcatgagcttcaccactgggctcttgctttttttttccaggacttgaagctgtggaaacatcacagctgctgctccctctcttcctgctgttggtgctcatgggactgttctcaaaaccatcccatgttgttgtttcccctcttcttgtttcccctgcttcctcttccccttcctcttcgtcttcatcaaaaccagggaaatatgctgtggatccatcaactgcaacaccttggaacagctctataagaaaatctaagtactcagggttgccattgcgaaatttcctggcgtctcccttctcctgtattgacactgaatcaacatcacagaaatctccaaaagcgtgtaaactacggcaatttttgacacaactacgtaccttgattctttttccaccaagcatcgtgggctgaccatcgggaccgatgtcctcttcgtcttcatcattggcgtcgtcctcagccactgatgtcccttgaaacaatgacgcaccaagtcgcccacctcctccaaagactccaaattcgaagaaggggggcccgtcatgcgacatggagggcgcacgagctcggacacctccattgccggacaccggttgaaggatctgctggtaggaggcgaaatcagggaaggcgtcggcctgagagttcagatccaggcccctggatcccctcccccccccccccccaaaatggatgccgacgctagatccagcatggcctaacgacccctgcgagaaatcgtactcggagccgttcatgtgggccgccggagcatcattgtatgattgggagaagaaatcgtgaggatcttcctctaccat

SEQ ID NO: 21328 - DNA, 288 bp, Oryza sativa
  Clone ID: PAT_MRT4530_26609C.1
atggttctggtaatctggttggtgccctgcggagcggcgcgcgccggcgcgcgtccgtgtgtgcgactgtgcggtgcgccgaaactgccaacgtgcaccgagtacgcgggacgagccaactgcagtgcatcacggactcgcgacgctgggctgggccgccggccggaaggtgcaactgcgcaaggagaaggatttcgttcttccgtcgcgtgtggtttgagcagttccaattacttgcgcaccaaagacagccacagaacgtacacaggcccctttgaatcacaggaa

SEQ ID NO: 21329 - DNA, 380 bp, Oryza sativa
  unsure (1)..(380): unsure at all n locations
  Clone ID: PAT_MRT4530_2660C.1
ggcggcggaggcgccgatcctgttggatctggcggagaaaactatctgagttcttgttgtgcttttgggggttgatcgattggagttaggtagctaacaatctggtatcagagccagaccaccaaaatttttctctcctcttgattcttgcggtaattcctgggcgaggtgggggttgattgcttcggcgatcggatcccacaaaagcttttgctccctcaactgggtccgcgagttctcgaggagtgcttcagccacggctgactatnacaagccccgctatgtgatgaagatggcggcaaaggtcctcgatcaggacagcaaactcgatttgctcctgaagaagatggaggacgttgatcgaaagcaaggaagcaagt

SEQ ID NO: 21330 - DNA, 248 bp, Oryza sativa
  Clone ID: PAT_MRT4530_26610C.1
gattcatggactccccagactcgctgtcgccgtcatcactggcgccggacctagaggtgtctccgtttcttagcctaccgccagcagccgcctccctaatatccccttcttctccacctccaccccaatccggcaacccggcctactcgccgccgccggaggtcctctcggacaaccatcctcttgctataactgctctaccgcagcggcctccactcaccgggatcgcggccatgttcacactctga

SEQ ID NO: 21331 - DNA, 488 bp, Oryza sativa
  unsure (1)..(488): unsure at all n locations
  Clone ID: PAT_MRT4530_26611C.1
gtgctaatgagttacttcgtttcacatgggtagggattagtcccaacaccaacgaaagaagacagctaataagcaaagcattggcttctgaaagtatgagccttggataaagatacaatggnctactccctcggatttttaaattaatagatgacacaacattcatcttaaaaataatattaatattaaaactgtaagtcatactaaaagatttttaataaaaaaccaagtcagaacaaaataaataataatcacgtaactttttagtaataaaacatatgatcaaacgtatggcaaaaaataatagcgtcatctgttaaaaatcggaggaagaacaatattcacccacgaatggacaaacatatgtgttcatccgtgatgtcgaggctgaaaaaaaacgcataaactttttcgacactaagtagaaattctcactataggggcatatttggtttcttttgcttaatcaccgatctagtatagcttat

SEQ ID NO: 21332 - DNA, 249 bp, Oryza sativa
  Clone ID: PAT_MRT4530_26612C.1
atgccgcgcggcgcgcgcgagatattgttgggcgcgcggacggccgccgccccgccgcggaggaaaggcgccgaggaggccggcaggtgcgcggtggctggtgggagcacggcgaaggtggcgagggtcccaatgccgaccacacgagctaatgtcgtcatcgccgccaccaccaccgttgtcgtgctctccatcatcctgcttgtcgcccgccgcaccgtgagagagggagccactggatccgcatga

SEQ ID NO: 21333 - DNA, 2109 bp, Oryza sativa
  Clone ID: PAT_MRT4530_26613C.1
atggcgagattggtccggatcgaagtcctggtgctgctgggcgttgcagcgctgtttgtgctcctcatcctcggctcctaccggcggcagtcgagccgcaatgccgtcagggtgagcatctgggtggcgtacgctgcttccatccccatggtgagctacaccctggggctgatgcagtcgtccccttacaagaacagcctcttctccgtctgggccatcatcctcttcatcttcctcggcagcgccgactccctgtccgcctataggctacaggacaacgacaactggaagagattctacttcgaacagctcatccactctttctgggtgggttggttgatggtctcctccggtgccggctcggatttccgctacgttctttggcccatatacgtcatcgtcgtattgaaatccggcacgcggatcctgtcattcaagctagccagtagacgatccatgctctccgagagcaccaaatgggtggccgactacatgacctacgagcgcgagctgtccaccgccggcgagtgggaccccgtcaccatgcgtggctaccgctacgtcgttgccggagaggagaagcagaggcgcaaggtggaagcccccgagtatgtgtccaagcttgacggcgatgatcgtgccaaggccaagctagtcaccgttgaacagatctggcgatgcaacgggagcttgctctgcggcgacggcgaccgcgccggtcagctcaaggacgtctgcctctccatggccctgtcaaagatgctcaaccgtaggttcgccggatttcacaagctcgtcgaatccgagctagacaagacccacgacttcctcttccgtggcctgctccatggccaaaagtacgtcgaacgagccttcagggtcatcgaggttgagttagccttcgtgcatgactacttctacacaaagtacttcgttatctacatgtatcgccatgacgacactgtcctgtcttgtgccatgatccccttctgcggctggcttgcctacatgctgttccagcgtgtccacgttcccaatgatgaactcaagctcatcgatgatcacaacaacaacttcgacgccctcatcactgctgtgctgataatcggagtcgcactggttgagggtttacaggtgtacatatacctggcttctgcatggtgcaaggtagccctgatttcaaaatacgttgctagagaatcatggagcagtcgccaatgggttgccaacttgattgggtgcatcacgagcttcaagtccttccggagctgggaagataagcttggtcagtacacactgctaaaaaatgtcgactacataccaataaactttatgtactatgccaccatgttcttggtcgataggacgaaaaaaggacgcaaggaagataagcgtgtcaggttgtccatgaaggtaaagaaagccgtcatagacacactgaggagtagcaacggccaattgacgaacggggtcaaatctttaaaagctaatgggatagaggtattccggaagctctcatggtcatgcaccactgttcgaacaacaacacacaccataatagcttggcacatcgccactactctttgtgaggtggaagacgaagagcgacaccgaatggacagtactactactaattataaggacgtagcttgtagcttgtcaaggtactgtgcctacctagtagcctttgctccggaattgttaccggatcatagcttcgtctcccaaaccatatttgatgccctggttgacgaggccacccaggaattactgaatttgaagacacttgagcagcgctgcgaaaagctaaaggagatcgggaaggtttcagacatggagcaaaatggtggcgacaatcgcctcatcgtgctgggcgctcggctgggatgccagttgctggagatagaaaatccgtcgcggagatggaaggtgctgagtgatttctgggcagagatggtgctgtacctcgcaccatcggatgatgctagggagcgccttgaaactttgacaaggggaggagaattcatcacacatctttgggctttgcttactcacggtggcatcctggagcgatccaccaccggtgcagggcagtgtcaaaacgtttaa

SEQ ID NO: 21334 - DNA, 787 bp, Oryza sativa
  Clone ID: PAT_MRT4530_26614C.1
ctagccgcctccccgcgagctccctctctctccacctccggtcgcctctccagccgccgtgcgccgtcgcctcggccgtcgccggtcagccccgtcacctccctcggcttcgcaagggtgagagctaccccggccacccgctccattgcgccaaaccctgccggaattcgccatcaccgtgaaggccgaaccatcgccatgttttgatctccggcgaagctttgccgcttcccccatggtcgccgaacctcgaagtttcctccgtgggcattgcagcgccaagccgaaggccgtccaccccttctccgccggtattcgccgtaaagttgccgccaccgtcatcccgatctcgtcgcccttcggagctcatcaccggccgctgttttcatcgcccgtcgccattatcgcgacgcatggtggacatgatgttgaggctgtgtcttgtgggtatagtgagaagccagatccagttggcaacgaggggtctgagccacggcagtccaatgaggtgacggtggcatgtagcttgagtagggatggcaacggggtgggttggggccgggtcgggcaagaacgcccccacccccaatgccgattccatcccccggccccggccccgaagaggaagtcgggtacaaaatgctacccgtccccgcaccctctaggtccccggaacccggccggggctccgcaggaggtcactctgccattggaagtgaagaagacgcagcgtgaggaggagcaggtggccagcggcgcgaggaggagcaggaagccgacggcgtga

SEQ ID NO: 21335 - DNA, 834 bp, Oryza sativa
  Clone ID: PAT_MRT4530_26615C.1
gcacgagggggaaagcgagagcgagagagagatgagcccggcggcggagatgggagcaccttggccggtggagttcatgggcgcggcggagggcgggttcggcggggaggcggtctactgcgccgtcatcctgtggctgtccgtcgtggcgtggatcatcttcacctccgtcggcgacgccgccgcccgcagcagcccggtgttcgtcggcgccgccggcatctgcgacggcaccggccccgggtgcagcggcgggttcggcccctgcggcacctgcgtcgactagcgtcgcgatgtcgcgaggcgagtactagtagccttttagctctagctgatgctgctgcgagccatggggattttgattaggtgtgtgtgagatcatcagctcccctttgtgaaggcaataagagggagctcgcgtccaatcctttgctttagccgctgcagtaatcaagctctaagctttctccttttttttctcccaaatcgatcgatcctatgtaaatttcttgaaatcttgatctttgatgctcttgctttgaactcgcgatcatatgtaaattgatcgatcaagctgatgtgctcttggtgttcttgagtattagcatggaagctcatcagttcctcttcgatcaatcctatgtaaattccttgaaaccttaatcttaatgttctcttcctcacttgatgctcgtgctttcaacttgcaattctatgtaaattgatcgatcaagtagatgttcttggtgttcttgagtattattatagcatgaaagttcatcagctctcctgcgcttgtgaacccatttgtgtttaaaaaaaaaaaaaaaaaaa

SEQ ID NO: 21336 - DNA, 413 bp, Oryza sativa
  Clone ID: PAT_MRT4530_26616C.1
ctgactctgaactaaaaattgacaccaaggctgctgatgagttcaggaacgaagggaagactgtccgtgtcgtgtcatttgtctgctacgagcttttcaatgaacaggctgctgagtacaatgagagcgttctcactgaggctggcactgtacgagtcagccttgaagcagagtctactatcgcatggaataagtacgtctgtagcataagcactgctattgacatcgacaaattctgtgcacgtgctgctgctagaaagatctaccatgagtattgcatcacactacgagaacggcatcacagcagcatagagcctgtgagaatcaaaccgcgcgtgctgagtatctggcatatgtgatgcctaggaacaatgtacatgaatccatgcatgtcttgtgcacaaagcttggaa

SEQ ID NO: 21337 - DNA, 2455 bp, Oryza sativa
  Clone ID: PAT_MRT4530_26617C.1
agaagctacacaaagcataaagcaagcctctcatatctttcctcatacagatgatgttctcaaagaggctgttaatcaaacacatcagcagtatgcactaacgactaacatgatggactgtctctcaagtttttgaggctgctaaaacctaacaccacagtatgtgcctataagccaccagcgtcaacattgactaattacttcgtgtcctttttttttttttttaacaagggcaagttctagtctttgtttgaaaatatagggttgaaattatcattctcaacataaaactcaaacataaggaaaatatacagattaatgtatagggtggcatctagttgacacagacaattgcatacatgaagagcctacaatacatgtattgtttcatctatgtatgataatatcgatgacttattccttctttatttttatgtgtaagttttatctgggttgtatcatcggttgttttttgttggtagtcgcctgcctgaaagaaaggaattgattaccaccagtgcctgttctggcttgtcttgtggcactgcatgtccagctcctcttactgtggccattgtcaatccttgatactcaacaaatctcccagcaacctgattgtttaggtaccatggttgccactgtgacttaacaggaaggccaagggcttctacgcagtaccgggatccaataactggaaccctgccatccacgtctccactgtagacccatattcgtaggccagccttgataagcttagagtaaataggaagaacagagaagaccgtgatgtcgtaattgtcgaatattgaataactgcagatactccattttctgtccttgatcaatccactcgtattcgcatgaagtgatttctgcacatccatcttgttcatgtaatcttcgatatgtgacgaatagcacggatcataccctgagtacatcctcgtgcctttaagcctcttcttagcattcatatcagctgtactgtaggaggtggaaaagagggatgagtcatcagtgttgcacttaggtgcatacacattgaaaatatcgatcatatcgtactgatcatatatgtatcccattacatggttacactcattgctacggggtgataacctgaagtcgcaaacattgttgacatgcttatagagttgatctgagatcactgagtgactccaagcgaactcaactagtcccttgtagtcatagtaatcatcagtctctgcattgccaacctgcaaaattttgttggcattggtctgcttgtttgcccggggaggaaggccaccctatcagcttcctgctgctcattgaaaacagcagcagcataggacctgcaaactctggagtgaagagaagtagaagagaaggaggagaccaccaaagatgagtcaccaagaaattgtaggtgtcctcagcgacaaaacggtcatacgatgctctctaggtcagacgaggtatttgtgtaggagaagccgactccaacaggagattccaagaacaacaaattggcctcgttattccatgcaaacttgttgaattccaaacctgttccatttccattgaccatgagaggacccaattcagaagctgctccatagcccacagatgagcaaccaggacctccattaagccagagcaggagaggcttcttggaaggcagtgcctgagcctcaaagaaccagtagaagagtgccctgccattctggctgttcacagtgatgtagcctgagaactgagacatctgtgggctccttggctgcccagggaggaaggcaaccctatcagcctcctgctcatcctcatcatcatcatcatcaccatcgtcatcatcatcgtcgtcatcttcatcgtcgccacccgacctcttcctcttcgacgaggattgcgccttcgcggaatcatcatcgccatcatcgtcctcatcaatctcttcatcctcggcaccctcaccgttttcatctggctcgaagtcactggaatgctcctcgtcctctgcatcaccaagtggcttgaccagatactcagttcctagctcctcctgctcgtcgccctcgacttcctcctcttcctcttcgtcatcgtcgtcgtcgtcgtcatcatcatcgtcgtcgtcatcgtcgtcgccgccatccccctcctcgccgtcctcctcatcctcctcgtcggagatctctacgacggtgtgccccgccgcgcccttctccccctcctcggcgtcctcctcctcgtcgtccccctcctcctctccatccccctcctcgtcgccgtcgccctcttccccatctaccgcctcctcctcgacctcctcctccccgttcaccacctcttcctcctccaccgccgcctcctccgccttcttggccgccgccgctgcagcagcagcggccttcttccgggcaagctccgccgcccgctcgtccccctcctccacctcgaccgccggcttcat

SEQ ID NO: 21338 - DNA, 378 bp, Oryza sativa
  Clone ID: PAT_MRT4530_26618C.1
atggcggggacggatccggtggtaggatgggaggagaccagcgacatcgaaagcggtatagggggcaccagcggcgctccccaactcccctcccgcttccagatctggctagtggggaggagggtactggcggcagcaaaaacggaggagaccgctggcttccctactcccctcccctaccttgcctctcccaaatctggccggaggggaggtggccggcagatgaccgcagcgtctcatccacggtggtttcagcggccttataaggtcatcagcaagatcgtccatggcagcagtccaagtccaagtccggtggagagctcgtccacggctgccggtgatgcacattcggcgcggctccagatctggccgagctaa

SEQ ID NO: 21339 - DNA, 150 bp, Oryza sativa
  Clone ID: PAT_MRT4530_26619C.1
ggcctgttcggctgcctgtgctacggctgtggcacagccagcaccaacagtgttgcacacgcacgacgcagcctcagctttagcaaccgcagccagcttgccgaccagacccataatttgctctgtttggcttaccttgctttttcttag

SEQ ID NO: 21340 - DNA, 551 bp, Oryza sativa
  Clone ID: PAT_MRT4530_2661C.1
gcccgcctcgcctcctcacgcgagccaaccgtgtcgccgcaccatcatactgtcgtcgccatcctcctctcgctccggtcgatgcatccgccaacgaggaggccgggaccgtcggatcccggtgaccccggcctcattgtcggtggatccggccgcccggaggcgaggggagaccggctatcaccctctctactcttctccttctacgtccggcaccgctacaacgacggccgcgcggatcgcgtgaggcaacggatcggcggaggcctgcaacaacaacggccgcgcgggcgagcaatcgaggaggccgggaatcaccagatccggaaggacggcggcccgattcggagagggagcaacccgatctgtgtcattgaggctcattatccagggtcgttgggtctgttgagctcggtatcgacggcagcagtagctcgggcaagatggaagaaacgtgttagacacggcctcctccgagagcatacaccagcgacgtgcaggaggccgaggccaaagccgatcttccccaaccccatctggcattataactt

SEQ ID NO: 21341 - DNA, 3115 bp, Oryza sativa
  Clone ID: PAT_MRT4530_26620C.1
tttttttttttttttttttttggataccatatgctatactaggagtactagggccaaaccgagagactattagtaataccagttccagcattccaatcccagaaatgttacagaacagaagaagctgtcttgagatttagtactagattcatggacacctcctaagttagacaaaaacgagataaaaaaaaaaggaagaagaaagaagtaggacgcattttttttacagtaaagaacaccagccacaacccttgagaattctcttgttaattttctgggcacccaacatgtggacaaagtcacaaaacgtgagttcacttcactaccttgattagcttcaccagctgcttgcctgaatcccaagatcggatgacgatttctgcagactattctactctgtgttctgagaaatgacctcgccaaacttgagaaacagctcagcatcggaagtacacgacgagttggcgcaggagagcacgctggtgcctcttaagctgacatactcgttgatgtagctcgggacagcaggccgctgcggcatggccagctgctgtgcggacttcggtggcgggtcgggacgaactaggcagtccaggacgcgcacaacctcgtgcattgtcggccgatccgatggttgtctcttggtgcaaaggagcgccagctggaacaccttcttgacctcaccaagatccttgcaagtgtctgcaatgtccgggtcgactgtctccatgacagcattgttagccgtctttgacaagatcaagtgatggagattgcactcgttgtccactggcttttttccggtcagcagctcaagcagaacaatgccatagctgtagacatcagacttttcattgagacgggaggtgcgagcatactcaggatcgatatagccaatagttcccatgacataggtggacgtgtgagtttttgaaacacacaaactcttagcaatgccaaagtctgtaagatgtgcctcataatctttatcaaggagtatattttttgatttcacatccctgtgtattatccgtgggctacagtcatgatgaagataagcaaggccttgggccgcacctagagcaattcgtagacgagtttcccaatcaagttttttcttcttagttggaccttcatgcaaaacatcccagaggcttccattttccatgtaatcgtagaagagaagatttccaacaggagatagggaatatccttgaagactgactagattccggtgtttgatgctaccaacagtctcaagctcagtttcaaattccttgaagctctgtggatagtgggcatatagcttttttactgccactggtttgcggttcttcgaaacacatttataaaccgtgctggatgctccgtacccaatgatgtacttctcactcaggttttcagtcatcgtcattatatcctcgtatacaagaagggaaaggttcatatgaaggataaccagcttggggggaacattgctcactggtttgctaacagagacatctttgaaaacaggtggactatgaggcctgcagaccgctactaagatcatcaggaggataacaagcccacccacggcaattccaagtattgcagcctttgagattagtggtttctgttgatggccagatgaacggcacgaagaaccaagccaatatccacaaagtcctggattacccaaaaagctgtcaggcgaaaaccgtgagaagttgttatcagtaggtacaacaccagccaaattattataggatacatttaagatattgaggctgaagcagttcatcagtgaagagacatccccagttatgttgttgtttttgagatttaacaacatcagattttgcagcattccgagttcttgaggaatcaaaccgccaagatgattgttggacatatcaatctccatgatactcctcaagttgccaatttctgcaggaatgaatcctactagaccattgttgctcaagttaaaggtgtccaaattgttgattctcgatagctcaataggaatagaaccacttagaaaatttgatgacaaattcaaataagtcatgctctcaagtttatgcaatgaaggaggaatggtcccatttaatctgttgccataagcattgaagctattgagattcacacatgagcttatgttatcagggattggaccttcaaagttgttgtttgcaaggtttaagtcaaataaccctgttagctttccgaactctggaggaatgaacccgctaagttgattatcgttaagttctaagtaatgaagggttgacatatttccaagctcaggtggtattggacctgttaacttattgccttgcatatacagcttctcagtgtatgttaaattgcctagtatcgatggaataggaccagacaattggttgtaactcagatccagtacagcgagagcctgcataagtccaataactgatggaataggaccagtaaacatgttcccttgcaaagatagtgtagcaacttgtaggaaaccaatgttgaaaggaattgatccagaaagtttattgtaagacaaatccaagtaccaaagcccagtcaactggcatatatctggggagatgctgccttctaaattattaccgcgtaatcccaagtattgaagaacctcgttccaatatatcagtcttggtatctctccactcagtttgttctgtgccaagtccaaaatcttcaaatttgggagctgtgagagcgttgatgggatcactccgatcagttggttgttcttcaatatcaagttactgcgagtccaagcaccagcaagccacatttccaaacaacaacaaagtacaccaccacgtcttccatacatcgagacgatgcccttcaacctgccgacggccggagagatctcgcctccgaggttgagcccggataggttgagcgcggcgacggcgaaggtgacgttgtcgcagaggacgccgcgccacgagcagtagtcgccgccggcccaatcgtacagtacgttgtccacattgcggaaggacttcttgatctccagcagcgtcgacccatcatcggcaacggcgacggcgacgagcaggagcgcgacgagagcgcggtaggaggcggccgccggcgccggcgtcat

SEQ ID NO: 21342 - DNA, 288 bp, Oryza sativa
  Clone ID: PAT_MRT4530_26621C.1
atgaccgtgaccggagttctgcgccgcttccgtactctttcctctaagattgggccgccggagttctggatgagaccatcgccgccctactcctgctccactttggatcatgtcacgggagcagtcaccacctcctctgacagcgaggcagatagggggagggacacttgcattggagatgggctgccggacttggagaagatgaggggtcgctcgctcacgctggtcaatctactagtcagggacagccctggactttttggtggctcagtgcggaacaaaaaatga

SEQ ID NO: 21343 - DNA, 431 bp, Oryza sativa
  Clone ID: PAT_MRT4530_26622C.1
acaagagaatccatttatttagatttttctaggaaaaacatttgctctttgtttaaggcgactagcaatccattgttgtgtgacaatcttaaagttattggcaatgacaggatcactgaaaatagagtacataggtacaatttcataatgtacaggcaccatattatccttaatcgacgcagcaaaagtatcccaatccaaaataggtccatcagtcacagcagataaatcaaattgataatttcccaataatcctgtcttctgcatatacttatatgcggatggatcccattcacctccattcacttggatattcactactgtatttgctttcaccacatcactcactgctttggtggaatagcctcaatccgattttgcctccaaataatcctaggaaacttcaacttgattgttcattgaattgttcg

SEQ ID NO: 21344 - DNA, 422 bp, Oryza sativa
  unsure (1)..(422): unsure at all n locations
  Clone ID: PAT_MRT4530_26623C.1
cggncgcgtggggnaaacttggtgtgggaagaaaaaaaaaaaaaaaaaaaaaaaaaaaaaaaaaaaaaaaaaaaaaaaaaaaaaaaaaaaaaaaaaaaaaaaaaaaaaaaaaaaaggtcaaaaagatataaaattggcgggcccccttttttttttttttttttgcggccgcgtgcttgatcgttttgtggtgggttttatcccagtcgcctccattttttttaacttggtcgactgttttacacctttcttgtttcgtgacttctttggctttgcgcccctttactctttttgtttgctatcctattttccccttgtgtcggtcttgtcaacttgcccttccctttgcttttttcctggggttgggggtgttgcctggcctttggccctttccttttgggggttctttgggcccgctcctt

SEQ ID NO: 21345 - DNA, 904 bp, Oryza sativa
  Clone ID: PAT_MRT4530_26624C.1
cccacgcgtccgcgaccaccggcggcggaggagcgggcgagctccggcgatcgccgccgtcgccgttgccgcggaggatgatggcgaggagcaccatctcaatccgttcttggacgccgccccgtcgtcgtcttcgtcgagagtccagttcaggtgctgtctttttttttttttcctttgcttcgtgttagctcatcgggttgtgtagcgggggagcaggaaggtggcgtcgcgcgcggtgtggctggaggaggctggtgcggcggaggttgtggacagcaagggcaagctctggctgaccaccggtgtcaaccgggacggcaagctgtactacaatgtcgaggagattgggttcttggcagaaagaggggcattggttcttcttgattacgagggtgaaacaattggaatggaggaaatctacggaaagattgctggagggaaatatgggtgctcctgggatgccttccaagcttacaagcacttgaagttgctcggctatattattggacgatatggcgttccctggacagttaagcgtagccatacttacagcgtcactgatgcctccacaagtgtggttgaaactgatcagattcagagcttaaatagagtcggtggtgcctccaatgacataactaaattgctcaaggaaatgtgcatagatgatatgcatccatcctttgaagtgtatctaccgaatagcaaatttaagaagacatccccaggagaccctagtttcgtcctatgcctattaagcaacaaaccaccatcaagggaagaactagaaaccgttgaaaacaagtttgagggcattcctctgaaattttgccatgttgacaacggacggaacccaagttcaagatacacttcgttccagactcctgaattttcgagttcttaa

SEQ ID NO: 21346 - DNA, 287 bp, Oryza sativa
  Clone ID: PAT_MRT4530_26625C.1
catccaaggatgaacagaggttttatcatcattagtcgaaagactggacagtacatatcagcaaaacatttgcttgcactttatttatttagttattctttatccgcaagccaacctaataggattctgccgcattataaacgttttggtacctcttgtatttgattggagtgaatgcaccgaactaatctcctgtattatgcttgagcctatgagcctttttttattgaaatgcgatatacatttgttagaacattatttgggatatcacggaaaatggaactctt

SEQ ID NO: 21347 - DNA, 2913 bp, Oryza sativa
  Clone ID: PAT_MRT4530_26626C.1
atggcgaagttcccaattgttatatgttttgtggtagagagatatactcaggccaccctggtcaggtgtgcaatcagactcgacaagaacctaatgtctgaggctgtgattcttctagttgtgaagaagattggtgttgccctagggaatgaggcaatcaaccaagccacttcatattttcagaagtacgtcacacaactgacagagcttcaaggtagcatggggcgcatcaagagggagctcaggctgatgcacgagtttctgtcccgaatggatatccgcaatcgcaacaacaagatatatgaaatctgggtggaggatgtgagaatgttagcacatcagatcgaggacattgtggatgactacttgcatcttgttagccacaaggacaaacatgatgacactggatggactacctatctaaagaaaggattcaagagaatgaagggaccaaatgctctgctctctttaaacaggatagctccgtctgttaaggaagcagaggccaatctagtgcacctgtttcaggcaaaagagcgatgggttcggatggttgccgatgagactagtggtgaaagctcatgttacattgttgaggcgtcacgtcatctagctagcatttcatgctccctcagtgaagaagatcttgtaggggtggatgaaaacagaaaaagactccgcgagtggctggcaggtgatgaattggaacgtgaggtgatagtgctgcatgggatgggaggtctcggcaaaacaaccttggcagcaaatgtgtataggaacgagagagagaagtttgaatgccatgcctgggtctccatctctcaaacatattccatcaagaacattctgaaatgtctgatcactgaacttttcagaaatgccaaacaaaatcctccggtaaaccttggggacatgaaagctgaaggccttcaagatgaattgaaggcattcctaagggaccggaagtatttggtcatattagatgatgtttgggcaccagaagccatcagtaacttgttcggagcacttgtttctaatctcagggggagtagagtacttgtcacaacacgcattgatgaggtaactcaccttgctttcccaaacaagaggattaggctagaacctctatcacaaaacgactcatgggaactcttctataaggcggcttttccaagagagaagaaacttgagtgccccacagaagtaacacagctagcatatcaaatagcaagcaagtgcaaaggtgtacctcttgcaattgtctctgtcggcagactcctctttgtgcgtgacaagactgaagaggaattcaggcgcatacataaccaacttgactgggagctcatcaacaacccgagcatggaacatgttaggaatattctttacctgagctacatctaccttccaacacaactaaaaagttgcttcctctattgcagcttgtttccagacgactatctttttacaagaaagaagcttgtaaggtggtggatagcagaagggtttgtagagaagaggggtggaagcacaatggaggaagtggcagaagggtatctcaaggaattggttcacatgaacatgctacagcttgttgaaaggaactcatttggcaggataaaagcattcagaatgcatgatatcgtacacgagttggcagttgatttgtgccggagagaatgttttggtgtttcatacagttgtgagaataagcgtttcgagtttcttgaggagaatgatgaacgacggatggtaatacacagattagacaaggatattaatcaagtaatttcaagtgaatgccgccttcgatctttcatcgcattggataaagccatgccatcatccactctgctacctctgctatccgagaagtgtagatatatgtcagtacttgagttaagcgggctacccatcgacaatgttccagatgccataggtgatctattcaacctccgacatcttggcctgcgggattccaatgtgaagctcctcccaaattctattgagaagctctccaacttgctaacactggacctctgtacatcggaaatacatgagctgccaagagggatcattaagctaaaaaagcttaggcacttgtttgctgagaaagcgaacgatcggtctgggcgacaactccggtgtcgcactggtgtatgcatccccagtggactagagaatctgagagagctacagacattgcaagcactgcaagctcaggatgagcctttgagctggttgggggagctgaggcagatgagaagcataaagatatgggacgtgaagggaagctgctgcgaatgcctctgcgcgtcattgcgtcacatggaatttctatcctacttaagcattgcagcaagtgatgagaatgatatcctcaatttgagtagtttgaacccactgcctccaaaccttgaaaagctaagattgcgcgggagattggcacaagcaaacatgctgttgggtgcagcagggggtcagaaccacttgtattcgatacatctatcttggtcccagctggtagatgacccactgccatctctgtctcggtggtcgaatctgacggaccttttgttgaacagagcgtacattggagatgagctcgtcttccaccatgggtggtttcctgccctcaaggagctatacataggagacatgcctcgcctgaaacggttggagattcagcaaggttccatggcaagcctgcagcaactatatctagtcaacctcagtagcatgatggaggtcccgcttggcatcgagttcctcatgtcaactctcaaatctttgggcttcgcggagatcacccggcaattcctcgctgcgttgcgccaatgctctagaattaattgcggtatccagtggtggtacacactacttggagaggataggactcaagaggcatcaatatag

SEQ ID NO: 21348 - DNA, 1617 bp, Oryza sativa
  Clone ID: PAT_MRT4530_26627C.1
atggaaggagaagaagagagtgaaagctggccgccgcagctcgcaccgccgtcgtcgccggcgagcgccgtgctctccgacgaggacctcctcggcgagatcctcctccgcctcgagtcccacgaccacctcgtcgccgtcgcgatcgtctgcaagcactggctccgcgtcgcctccggcgagctcttcctccgccgcttccgtgtcatccacccgccgcgcctcctcggcttctgcgtcgacgacggcggcggcggcgacgctgggcggcggccgcagttcaaggcactcccgcagcatccgggcgtcgccgctgccgccgcgcaccggacgcggcaccggttcttcggcgcgttcggccacctcgccggctaccaccgtccgtccatcgccgactgccgcgacggccgtgtcctcgtcgagtcccccgacagagcgccgcggcggctcggcatcaacacgccgtaccgctacaccgtgctccggccgccccacccgcgtgaatccgtgcaactcctccctccgctgccgccgccgccaggccgcggcgccgggaagcacgtcgtcgaacgcgtgttcctgcccgaggacggcggcggcggcggcggcgaccatggtatcacgctggtgtacgtgttgctggtcgagcggagagtgaccgcgcgagtgcacgttcttgactccggcggagcgtggggagcgccaaccaccgcggagacggagctcccggcgccgtcgtgcgacgacgccgtggacaccgttctgccgccgatcaacggcgatgtctacgtcgtgacgacctccggctacacgctaggtttgcgtctgggcaccacgcgcttcaccgtcgtcgagctcccggacgcggcgaggtcctccgccaacttcaggatggcatggtcacacgccgccgccgccgccgacgacgacgacgtcgctcgcggccggctctgcctcgtccacggcgacgggacgcggctcagcgtctggcaccggaaaacgacgaccacggaggacgacggcggcgcggccggagttgggtggcggctggccgacacgttctgcgtgcgcgaggcgtgcgagcggatcgagtggcttcccgacggctggtggaccggccgtgtcgcggtgatcgccgtcggcgacaacgccgagttcgcgctgctggacttggagaacgtcggcgtcgtgatctacgtgcacctgcagtggaggacggtgaagaaggtctacgagaggaaactcgccgacgccgacgatggcggcggcggcggcggtgaccgccagccgccggtgagggtgttcccgctgacgacagtctggccgccaacgttcccggagttggacaaaccacgacagaattgctgcgtcagaagcccggacggtctcgtcggaggcgtggtgatgacgtgccacgccggctggtcggcgacgtcgccgtcgtgctcccgccgggatggggacgacgacgacgacgacgacgaggacgtcggagcagtgctcccgggctgttcgtgggccggatggttcgatgacatggctgcaatggtggcccagctcgctgaatgggccgcgcagcccagaagcccaagaagatggcgttggtcttgtctctga

SEQ ID NO: 21349 - DNA, 1387 bp, Oryza sativa
  Clone ID: PAT_MRT4530_26628C.1
atgtgtaaagactgacagatcgttgctccacgaaattacaagtttttttcatgtcaacagaatcagaggttcaagaaacatctattacagcatattgacagctacaatagagtggaacgaaccacaatgaataaacgaaagtgtaagaagggtctcctaagacattttttccaatgtcatgcacctacagagtaccgatatttactgcactgcaagttcagctcaggctgccaccactggctgatgccatgagcatatttgaagtccggtgaagggcttacgttgacaattaagtctgcagatggaagaaggtgcagtggttccgattcccatcctaatgccttgtaaaacagatctcctatggaattttgggttgcgagcttctcgataaatccagcaccgagatcctccatgttcttccgatgctggaagtagccgatgtactctgaacagatatggtctcctggattgacaaacagatatggcgtccatgatgacaaaatgtggaaagaatcttctgcaacagacctctggctgctcccctcgccttttcctttcattgcaatggctaatccagcagtaattacacttcttgcaatgcggaaaccatgcttcactctctcatcacttatcctctcgattggggcggcaacaaaaggtgggttgaagagatagctttccaaaagcacaccctttttaaccatgtttcttccagtaaggatggccatacctgcgcccagtgagtgcccagctagccagatgtttgagccagggaaaaccgaggcgacgttttggacagcttgcattgcaattgtaaatcttgaggtccgatggagaccattttggacaaggtggaggtcaagggcgatatcccttgagatggtttccttctcagttatagtgcctctgaaggcaataacaaatctcggtgcattatcagcagaagattctttacttgaaggaggattgaattcaaatattgcaccgaaaatagacaagtcagcatcatcgacaagcttgcggatcaactcaaaatggaagaattcccaccaaggaggtcccaaggcttcaacagattgacgacctagttgccggtccctctccaaaacatatacagcctgaactaagcatgcagccacagatctccgattatgctcacagttccaattaacaggattcagatatgtcggacctgagataccaaagatatctctgtccacagccatctggctatgcagagtcactcttcactttattggactttatagtgatgaaaaacataacacctgacgacgaggaggaggagggcggcggcgaggcggggcgcactggcgcggcgacgcggaggaggcaaggcggggggcggtggatctgggcggacgcgtgg

SEQ ID NO: 21350 - DNA, 395 bp, Oryza sativa
  Clone ID: PAT_MRT4530_26629C.1
tttttagggtttttgccaatggcgttctctggtttatatcaaaaataattaattcttaacttacaccctacactaaggcaaagaaaaaagtgtgtacatcaaaacgactgccactatgaaaatgatattctatcagttgaaaacgctaaaaaaaatacaagagcaatgcaaaagaaaacaccttttattagttaaactgcctgaagatgaaagcccttaaaaatccattgattgaatcacttgaatgaaggccactcacatttaacatgcctggaacatgacagatctgactgaccatggatgtgtataccttaagttggacaccttactttgacaagtcaatgaaagttcattgccctgtactgaaccagactgcaatactggaaattgtgacc

SEQ ID NO: 21351 - DNA, 732 bp, Oryza sativa
  Clone ID: PAT_MRT4530_2662C.1
atggcgcagcgcagcaaggcccgggccactcatctactctctgctcaagctcaatcggccggccgtggccgctcggcgagcgcccccgtgaacccgggagcctacgacgatggcttccccaccacggaatacctggtgcacctggccgccggcacgccgcggcaggaggtgcagctgacgctcgacacgggcagcgacatcgcctggacccagtgcaagcgctgcccggcctccgcttgcttcaaccagacccttcctctcttcgacccctccgcttcgtcggcatcaccgttgggtcgtcgaagaggcagctaccggtgccggagcacgccgcgatcatcgaactccggcacgtccatcacttcgctgccgccgcgcacctaccgggccgtccgcgaagagttcgccgcgcaggtgaagcttcccgtggtgcccggcaacgccacggatcccttcacctgcttctccgcgccgctgcgggggccgaagccggacgtgccgacgatggcgctgcactttgagggcgcgacgatgcgcctgccccaggagaactacgtgttcgaggttgtcgacgacgacgacgcgggtaatagtagccgcatcatctgccttgctgttattgaaggcggcgagatcatattaggcaacttccagcagcagaacatgcacgtactctacgatctgcagaacagcaagctgtccttcgtccctgctcagtgcgaccaactttag

SEQ ID NO: 21352 - DNA, 313 bp, Oryza sativa
  unsure (1)..(313): unsure at all n locations
  Clone ID: PAT_MRT4530_26630C.1
gtcgaacctcgaaggggggggccccgggtaccccaaattcggccctatagtggagtcgtaattacgcggcgnctcacttgggccggtcggttttaacaacggtcggtggacttgggnaaaacccntgggcggttacccaacttaaatcgcctttggaagcacaatccccccttttcgccagctgggcgtaaataagcgaaagaggccccgcaaccgatcgcccnttcccaacaagttgcgcaagcctgaatgggcgaaatggggacgcgccccttgtaagcgggcgcattaagccgcgggcggggtgtgggtg

SEQ ID NO: 21353 - DNA, 386 bp, Oryza sativa
  Clone ID: PAT_MRT4530_26631C.1
cttcacctcaactccccctccccccttcactaacggcgacggcgacagcgagcggcggcctggcggcaggcgggcggcggcctcccctccagcggtggcagggccgcggccaccgaagcggcagagatggcgagatgggaggcagcggacggctggcggcctctcctccgccggggctaaaaggttgcaaatcgggagtaaaagagccatcggcaggcggtgcacggtcggtcggacggcagcggcgtgtctttgtgaattttttttatttttggaatgatttggaaattgtgttgggcattattgtacatgtggggataatgttgtgaatcacttgtgcattgctggctgattctcttgcatgggcgttgggggatgatggtgtg

SEQ ID NO: 21354 - DNA, 556 bp, Oryza sativa
  Clone ID: PAT_MRT4530_26632C.1
ggtcaccggtccatagcgcacggactctgtttttgacccgcgcgtggacccccgagagaaggaatccggtgctctgcttgggggcgagtcgctttgctagggcgcgataccatccgccacgtcggtgtttttcctagctggccgagtgaagcaccggtccactcaccgcactgagcctagggcagctaaggtgcctcagtttaaccttgcaaaccatctaaattaagttctaaagtttgtacacacgtttggtttttatcaagcctgtatgtagctctgttgatcaaaatatgcactttataatgttaacttccatcttgatgttatgagaggtctgttgaagcaaattctgccttctgcttctcacattaaactagtatatcttttggttggtagttattcttgagaattatttatgtagcttggattaccaaccatttgatgccctatgttcatttgatggtaacctctgtttgcttaggcagctagtattaattttcaagcctgaaacacattgcattgtttttaggcactgcctgctaaaaaaaaaaaaaaa

SEQ ID NO: 21355 - DNA, 528 bp, Oryza sativa
  Clone ID: PAT_MRT4530_26633C.1
atggcaacgtcgaatccatgcgtgcgaggcgacggtgatgacagatccactcttcgccagcctcgtcttcctcgacagccattcgccgtcgagccgctctcatttccttgctacttcctcgcgccgcacccttcctccctcaccgttgtgtcgtctcctccgctccgctcgctgcaccgcgtcgagcatgggcggagaatgcgagcgagcaacggcggacaacgacgaggcaacggacggcagcggcctcatcagcagttgacggcgcaacaagggacagtgccggcagaggggaggcgtcgacgtggtcaaactgggaggagggggagggcacttgatctagacttggagggagagagaatacgggaggggaaaaggagagggggaaaaggtattgggctgaccaagattggcaaggcaagtctgttagaatcccttgtcggcgcgaatccacacttcgtcccctaccaccgctacctcattgtctcccaccaccttcaaatgctgtcctcattgtcgcaaccctag

SEQ ID NO: 21356 - DNA, 142 bp, Oryza sativa
  Clone ID: PAT_MRT4530_26634C.1
atggcggagaggagctctggcgactcgccaggcgactcctcagcgctcacgcccctagttggatctccgaccaccccaccgcttattcttaccaccttgaatcaacaagctcctgctccgcctctgctgcatcaatcttcag

SEQ ID NO: 21357 - DNA, 2370 bp, Oryza sativa
  Clone ID: PAT_MRT4530_26635C.1
atggctgcgagaccgcgtggtgtcgtgcggcgaggctgcgagaccgagcggtctcgcattaccagcggagtaaggtttcaaggcattggcaggtattgcacaaccggtcttcctagtgatataaccgtcacagttggggagcaatcttttcatcttcacaagtttcctctattatcaaagagtggccttttggagcgttgtatccgagagaagattgagaatggagacaacagttgtgtcattgacctatcggatattcctgggggagcaaaggcttttgaactaactgctaagttctgctatggtgttaagttcgaaatgactgcctccaatgttgtgcatcttcgctgtgctgctgaatatctcgagatgactgaagagattgctgaggggaatttgattgcgcagacagagaacttccttacccaaacagtccttaggagttggaaagattcaatcaaggccctccatacctgtgatgacatcattgatcttgctgaaaaattgcaaatcgtaaagaggtgcatcgactcagttgcaactagatcatgtactgatcctgatttatttgggtggccagttgtccagtacggaggccccatgcagagtccaggaggaagcgtcttgtggaatggcattagcaccggagcaaggccaagacatagcagccctgattggtggtatgatgatgtttcatgcttaagccttccattatacaaaaaagtaatctcagctatggaataccgaggaatcaatcaggatattattgttggatccttgaaccactatgccaaaaggcgtttacctggcctgaatcggcgtaaaagcatcagtgatgtcagcagttgcctttcaatatcatctttaacatcaatcccttctgaagaggaacaaaagtacctacttgaggaaattgatagactgttacctttccaaaggggggtcacatcttgcaagctgttatttggtcttctgcggacagcaatcatcctaaaagccagcccttcttgcgtgtcaaacttggagagacggataggtatgcagcttgataaggctaccctggaagatcttctgattccaaacatctctgagtctgttgaaacgctctatgatgtggattgtgtccacaagattcttgaccatttcttggcaatggatcaagaaactggtggggcttcccctggccttggtgaagatgcacaaatgttagcttcaccatcacttatgcctataacaatggtcgctaagttgattgatggctacctagctgaagttgcaccagatgtcaacctaaagctgccaaagtttcggtctttggctgctgctataccagattatgcccgcccaatagatgacggactttaccgtgccattgacatctatctgaaggcgcatcctcacctgtctgaatcagagaaggaagaactttgccgggtgatggactgccagaagctctctctcgaggcctgcactcacgcggctcagaacgagcggctcccgctgcgcgtcatcgtgcaggtcctcttcttcgagcagctccagctacggagctccatcgccgagtgcctcatggtctccgagaacctcgaaggcggctcgaggcagctcatccccaccatctccggcgagcaataccgccccggctggcccctggcctcccgggagaaccaggccctccgggagggcatggacaacatgaagcagcgcgtcgccgacctggagaaggagtgctccaccatgagggatgagatcgagcggctgggccgcagccggagcaccggcaagggcagattctccctcaacatgaaaccacagatttgcagcaccaaggaggctattccgacgacagcgacgacaacggcgacggcgagcgaggagaagatggccgtggtgaagggtgacaccacgccacggctgaagctcagcaggcacaagaagaagctgtccatagaagcatgatgatgatgatccgctgatcactcacactaccaatccttttcacttttcttcttctctgaattcttgataatcgagtgccatcagctcagtagatgtgttgccgtgttggtgtcgtaactgcgaacttagtgagttgttgttagagtgttttacatccatccatccatccagcaggaggagaatctagtgaaagagctgttacctgttcattctctggtgctaagtttttgacattttcatcatcatagtaaaaattgccaaagtgttgttagcataaaaaaaaaaaaacgcaccacatcccaaaggcctgctgcccctgtgcgtcgacagtagataaatcggcacgtttggttcttcgccaatcctaacattatcttatttttgcaacagtaagagttatcattgccataa

SEQ ID NO: 21358 - DNA, 420 bp, Oryza sativa
  Clone ID: PAT_MRT4530_26636C.1
catggcaatcgaccaggtcgagctgggcgaaaacccggacgactggcgaacgcccttcgtcaaatatctcaaagagggatggctgccagatgatgaagcaaaggcgaaacagttgcaaatcagatctacaaagtacagcttagtctctgggcaattgaaccgaaccgggatgctgtagcccatgcttcgctgtgtctccttttccgagggtgaagaaatgataagggaaatacaccaaggaatgtgtggagcacaccaagcagcaagaactgtcgcatcaaaagtatttcgccagggcatatattggccaaccgtactaaaagtatgtgttgagcaaatcaagaagtgcgaaagctgtcagaaacatggtcgaagccaagctgcacctcagtacgacttgcagccaatcgcgcccatctg

SEQ ID NO: 21359 - DNA, 501 bp, Oryza sativa
  Clone ID: PAT_MRT4530_26637C.1
gattagatggttgcccttgtcagatacatcttaattatcttttcaaagtagatgagccaattatgaccgcatcaatatgtattgctgcattactgtaggtagggagggaataatatcgatcacctttaaaatttctttggatcgagaaaacgacaaataatttaatataaaattaaatcctagaacgacgacgatgagtaatatgaaacagaaggaagaacatgaataagcagtgcacattctagttgttcctgcctctgcttaaatccttccatggcctttctccatttgagttatgcatgtcccggcgacataggaggattgtgtcccccgtttgggccgcctgagggagaggggaccgacctgagaggtgacgagcagcaagagctccactggatttgtaccgtcatctaggtttggagccgccttccttgacgtctgttctgtcaccaccgccgtttcttcgatggcggcggcaacagagggcgcagcagcggccat

SEQ ID NO: 21360 - DNA, 4318 bp, Oryza sativa
  Clone ID: PAT_MRT4530_26638C.1
tggtttcttctggtctttttcttttttttttttttttttttttaaaggagcaagagaaatctgacattattcaggaagtgaaatgtctgcatctttacacaaaatgtttggtccaacacacaagctagctgacgaattgagtgcatgcttgtggctaggaataacctgaacagagaatcacatataaacagagttccagaagaacatatagacactagaatgcaagaaatatatactccttctgtcccacagaaaacaaacctagattggacgtgactccgtccaggttcgttgtactagaatatgtcacatataattctagatttgttttttatgggacggagaaagtacaatctatgcctactgatgacatcaactttcaatggtcacactgcataagcacagccctgatggcttgagcgtcgacgtgtgccattcagatcccgcaggcgcggtcggatcatacatcagagtctgatacccaggctcttcctcctgggaaaacagcagcagcttcccatcaagcaccccaaggctgaacagagtggctgagctaccggtaagcggcaccgggatcttctgccatgaactgtctgaagggttgaagatcgcgagtgaccgctggttcttccactcgatgcagaacagccttttgttgatgacagcatgagagggcgcttcggctcggcccttctggagctcgggccatggcctccgacgccaagcccgactccccgcccgccggcgtcgaccccccgccgcccaaggaggaggcgaaggcggagaaggagggggagggggaggagccgcagtcgggggggcggaagcgcgggcggcggaagaagggggaggcggagaaggagaaggagaagcccccgcccgccacccccaccatcgagaggccctccagggagaggaagaccgtcgagcgctactccgagctcgccccccgcgtcacccccgccaagaagtcccccgccattctccagggctctggatcgaagctgaaggacattcccaacattcaattcaaactatcaaaaagaaaggcagacgagaacctgcaaagtcttcatgttttaatgtatggaagaaaatcaaatgtccatttcttgaagagaaacatatcccaattttctggttttgtttggactgacaatcaggaaaaacaaaggaccaggataaaggaaaagcttgacaaatttaacaaggagaagttgctggatttttgtgaaatccttgatatacatgtttccagagcagccacaaagaaggaggaagtctctgccaaattactggaatttttggagtccccttgcatcactgagatgttgttctcactgatgataagaaagggaagaaactggaggagatcaaagaaatggccaggcgactgctgaaggcgcttctgagggaaggatttatgcaattattctttgctgtggaaaacagtaggtcatggtgggtgaaaaggagaaagagtcgaaagcaatcaactgaagctgctaaagagaatgacgatgaagacgatgagggtcctgctgattctgaggatgcatcaatgggtgaggaacatgatgaggattctgaagcaaaagataatgctgggagtgatgaagaacctgatgagcctccagcaaagaaaaaggcaacagatgataaacaaacaaaaaaggcaaaagaaaaggatgcgactgccaagaaggcttctacaagacctgcaaaaggtgtgtctaagccttctcaagacactgaagaagatgatgagccagaagttgagttagaaagcaaaaaggttgtcaaaaaagtctcaaagagttcaaaggagagtgatgttactgtagataaaaccaccaagaaggcttctaaatccaaaaaggatgaaggaaaagatggccagaacaataattctggtgcattgaagaactttctaccccaacattgccgtttgggctgtgttgggtctgtacaatgagggcaccgcaacaatgaactggtgacctgggggtagtacaaggttgttaaccatttgatagccacacacacctagatgtagtgctacatttttgtggggcttgtagtcgatttgcttcgcaagttaggtacttattttgtgatagacctgatgagttagaaatcaggggtgaaacatattattgaggaaataataaatagtatgccttatgataaggaaggtgaggaagacaaaaaaaaagataacaaagacaaaaatgctaaggaggaaaattcaaaggaagatgcagatggtgacgagaatgaaataggaattaaaggttcttgtgtcaactctcatctgcccaccttgccaggatgttcaggaggatttgttgaggaaatgatatcggtcatttcaggaaccaacatgggctctggagcaaaggggcatctgtatcgaggtgctgtgctgtttctctgtcttaatcttttctgtgtcaaatgccatccgatggtggaagaccttaaaatggattctcctgatctccttattaatgaagagacaacatgtgcctgtcttgcacatttggcattcaatatctaaataaaataatggataccatttatgctggatagaaataggatgttagcatccgtcatttaggttattattagtgtaccactggctatacgattttgatagccattaaccacctgtggtttccattttcatcacagccagttccccgtcgacgcgaatctcatcatggcctgcaccggcgagggcgccgtgttcgtcgacgccgtggccgacgccgccatggccgacctcggcgacatcacccgccccgaccccgccgtcctcggcgagctcgtctacagcgtccccggcgccaagaacgtgaccaagttcaagtgcggcgggttcgtgctgggcctcgccatcaaccactgcatgttcgacggcgtcggcgccatgcagttcgtcaactcgtggggcgagacggcgaggggcgtgccgctctccgtcccgccggcgctcgaccgcgccgtgctccgcgcgcgcgacccgccgcgggtcgcgttcccgcaccacgagttcgcgcagatcgacgacggcgatggcggcggctcgccggcgcaggacggcgccgagccgccgctcctgcacaggtcgttccggttcacgcccgagtccatcgcccgcgtcaaggcgctcgccgcgggcgacggcggcggcgtcggcggcgtcggcgggcgcgcgcccacgacgttcgaggcgctcgccgggttcgtgtggagcgcgcgcacggcggcgctggggatggggcgcgcgcggcggagcaagctcctcttcgccgtggacgggcggccgcggttcaccgcgccgccgctcccggcggggtacttcggcaacgccatcgtgctgaccagcgccgcgtgcgccgccggcgagctgtcgcccgcgcgcgccgtgcggctggtgcgcggcgccgcggaggcggtgacggacgcgtacatgcgctccgcggtggactacttcgaggcgacgcgggcgcggccgtcgctggcgtcgacgctgctgatcacggcgtggtcgcggctgccgttccgcgccgccgactttgggtggggcccgcccgcggcgtacggccccgcagcgctgccggagagggaggtggcgctgttcctgtcgtgcgccggcgagggcggtggcgtccgcgtgctgctcggcctccccgccgccgccatggccgagttcgagcgactcgtggacgaggtgatcttctgaatgacacaacctttcttgatctcggtccaggaatggagaatgggatcatacacgtcaatgaaacgggaattgccaatggtgaagcttgaccggccacccatgatgtagagcttgccgttgaagctgcaggcaaaggagccccaccttggtctgcgaaggctctctattattgtccatttgtttctttgtggatcatatacttcaacacttgacaagccatcgccatcagaaccaaatccaccagcaacatatactgcaccattgacctctgcacatgcgaagtcacgacgggccacgttcatcttggccagtgcagcccacctgttcagacgagcatcatactgataaacttcatcagaaacacattcttttccataatcaacaccatagccagccatgacaagcagctttccatcaagaacaaccacactaaatccagctttagtcagtccaggcataggaggaagcatcctattctgctgctccaggctccccagcacctcccaatagggtccctttcctccatctccagtgatcagggcataaaacagctaatcaagcctcccgacc

SEQ ID NO: 21361 - DNA, 1128 bp, Oryza sativa
  Clone ID: PAT_MRT4530_26639C.1
atgctaacacttgttggagcaagagagccatttgttaaagcacagaccaacctccctgctacaatgcagctgaagtttcctactagaacccaaggtgattcatacggagcactgatacctggtttgccagaagacttagcgaaagtatgccttgcccttgtccctcggagctacttccctgtcatgggtgcagtgtccaagagttggatgtcattcattgggagcaaggagttcattgctgttaggaaggaggtcgggaggcttgaagagcggatttatgccctgatcactggagatggaggaaagggaccctattgggaggtgctggggagcctggagcagcagaataggatgcttcctcctatgcctggactgactaaagctggatttagtgtggttgttcttgatggaaagctgcttgtcatggctggctatggtgttgattatggaaaagaatgtgtttctgatgaagtttatcagtatgatgctcgtctgaacaggtgggctgcactggccaagatgaacgtggcccgtcgtgacttcgcatgtgcagaggtcaatggtgcagtatatgttgctggtggatttggttctgatggcgatggcttgtcaagtgttgaagtatatgatccacaaagaaacaaatggacaataatagagagccttcgcagaccaaggtggggctcctttgcctgcagcttcaacggcaagctctacatcatgggtggccggtcaagcttcaccattggcaattcccgtttcattgacgtgtatgatcccattctccattcctggaccgagatcaagaagggttgtgtcatggtcacctctcatgctgtcatcaacaaaaggctgttctgcatcgagtggaagaaccagcggtcactcgcgatcttcaacccttcagacagttcatggcagaagatcccggtgccgcttaccggtagctcagccactctgttcagccttggggtgcttgatgggaagctgctgctgttttcccaggaggaagagcctgggtatcagactctgatgtatgatccgaccgcgcctgcgggatctgaatggcacacgtcgacgctcaagccatcagggctgtgcttatgcagtgtgaccattgaaagttga

SEQ ID NO: 21362 - DNA, 2821 bp, Oryza sativa
  Clone ID: PAT_MRT4530_2663C.1
tcaagcacactctacatttaaaaatggaatgtcagcttgcagagcagcaagctcactccacatctgaagctttatggagcaagggaataatatttcattatatttcaccttttcattttgctgaaaagcttggccatccatggacaataatccgtgaagagaccttggctgcttgttagtgagaagatattcaaccttctttgaccgattgagctcaaacatcaccttgacagcaatggaggtgatgctcagagagagacaggagaagatggtgggaggctgagagagggaacaactctgtactaacggcatcatcacaggctgtatcctacatatgctcaggtgagggcaaccaaaaatgaggccctcaaatgcaatattgttattgcccattgtagtttgagcaatcacatcaaggggctcaccgttgagctgagcgtagcagcaccgggttgaggccaaggtcaccgtgttgtggggacgtcgggaaaggagcttcccaactccaactgaggtggaggtcgccatgagcgggggaggcaacctcgaacaactgtcagtatgaaagggcggcgcgaggagggcacggcagagccaagacccgtcgaggaaaccctgcgccggcgtgctccaagcaagctgaagctgaagtgattctgatttctgccgatggcatgatcttcatggtacggcccacgggatgccgcatccggacctgaaacgctggcaaagcacacaatatcctaaatgatccatcatcagcacctttcattactgctgcagtctaacctaatgaaatattgttgttagatggttctcccagtcattcaagtaggcacctcccaagaagcttatgggagctttcctgccataaaatcctgaaggccatgaacacatctattactgaagaactcagctccatctaccaaagcaagcatcacaccaagcttaccatttgcttttagagtccatgacatggattagcgatcaactctgtactggttgactggttcacattgagatgtcagaataccatcaccatccatgtttgctcactcatctgtcaatagcaagaggcctgcaacctttgtgaaatatcaaccaataccaaaacggtacaacattaccaccggtttttttgatcagcaattcagcaccataacaccaggcataatcgagcctttctcatgtgcatctttaattaaccatttatgttctgatcaaggagcatgagcaacttggtgatcaagaagcatgagcagcttactgcccaccaactttcttagccaagtgcattaccgagacaggaaaagaatactcttttttcttgtatgcagggagccaggggcatgcagatgcaggtggaagcatcgccagatttgtgtgttgtggtggcaggatgatagtgttgtcggtgcatggagaaacactgaagcatgtcttcctcaagccagagttctgcaccatcaggctgaccttctcgctaccaactgtcgcctctcaccaaattttcagctagcttgctgacctgcgaatgaatctgctcccaatccctacacatcaccaatggaaatagagagcatgatacattgctggaagcaagcattcaacaaatcaagcttttgtacctggtcgatagtggatgcgttgttgggatctcgtatatctttgaatcaaaatagatgaatacatatgcaatatgatatagtatcaaacaattcaatagattagtacttaagaggtctcatagaagagaaaaacaatagcattctatctatccgcattcatgtgtatcactgtaaataactgaacatgcatctcagatttttgtcagtcagtaataaacaccaccacaaaacctgtaaagtgctcaagaacatgtattacatctacacacgcaaaagtgcatatgcattcatactcaatatacacatcatatcatccctaccttcatcaatttgcacgatagaccatcaccattttcattggtctaccaagaacaccaaaaagaacaaaaacttacaagttataatgccagatggggttggggaagatcggctttggcctcggcctcctgcacgtcgctggtgtatgctctcggaggaggccgtgtctaacacgtttcttccatcttgcccgagctactgctgccgtcgataccgagctcaacagacccaacgaccctggatcactgtgaaggaacggccgccgtcgacacttacaatgagcctcaatgacacagatcgggttgctccctctccgaatcgggccgccgtccttccggatctggtgattcccggcctcctcgattgctcgcccgcgcggccgttgttgttgcaggcctccgccgatctgcaaaggaatagtggagatagaagggagaagagaagggagcagccacccgttgcctcacgcgatccgcgcggccgtcgttgtagcggtgccggacgtagaaggagaagagtagagagggtgatagccggtctcccctcgcctccgggcggccggatccaccgacaatgaggccggggtcaccggatccgacggtcccggcctcctcgttggcggatgcatcgaccggagcgagaggaggatggcgacgacagtatgatggtgcggcgacagcggtggctcgcgtgaggaggcgaggcgggcctgggcatggagagagcagagcgagggaaggaggaggttttctgttattcagaccgtgctcctctttttcgatttttctcttctttgcatagaatattgcagtttgtagaggcccgttttgaatataaccttttctttcaaattctgaattatcatactccctttg

SEQ ID NO: 21363 - DNA, 1210 bp, Oryza sativa
  unsure (1)..(1210): unsure at all n locations
  Clone ID: PAT_MRT4530_26640C.1
gcacgaggctgcactgggtggagacgagcgacctgagagagagagagagagaaggcaagggaaggaggagaagaagggggacgaagccgacgaggcgcgcgcgcgccatctttgctttgcttcctctctcttccctctcctctcctctcctccggtcgtcggcctccccggccggccggcgcctgcccgtgcttgaggcgcggcggcggatacggggggtgacgacatggccgacgggggagagaagtgccgggacgcggccggcgagggcggcggcggcggcggcgacctgtacgccgtgctcgggctcaagaaggagtgctccgacgccgacctcaagctcgcgtaccggaagctcgccatgagatggcatccggacaaatgctcatcctccagcagtgcaaagcacatggaggaagccaaggagaagttccaggagatacagggcgcctattccgtcctctcagcctcaaacaagcggattcctctacgacgtgggggtataggatggtgagtacaatgacgattccatcagggtttggtttcggggacaagagtgatgctaaacaagcggcgaagacgcgaagcgggaacacggccagccggaggaggaacggccggaagcagaaggtgtcgtcgaagcacgacgtctcgtctgaggacgagatgccaggttcgcagtggcacggcgtggcctgaccttttgttcgtgactggtttggtcctttgatgtgccggagcaccgagctgctgccgctgccactctgccgtggcggtggcgctgctcggagtgagtgaccgggcgtgccaaaactcgtcgatgctgctgctactgcgcaattctttctctccatccgtgtcgcggctgtgttgtactacgtagacattgcattttacaattgattctcagtacctatctgtcttgctgttcaatttcaagaactgaagaagtcatgttggggaaatcaatgattgacgaagcttctatgataaacagaacaataggggtggggtgatcacggttctaagagttgaaaagggatgcaatggtatacataactgccaatctatagaagttttccattttatattttcgtcgaagcacgacgtcttcgtctgaggacgagatgccaggttcgcagtggcacggcgtggcctgaccttttgttcgtgacttgtttggtcctttnatgttccggagcaccgagct

SEQ ID NO: 21364 - DNA, 550 bp, Oryza sativa
  unsure (1)..(550): unsure at all n locations
  Clone ID: PAT_MRT4530_26641C.1
aatggtgagtatgctcactcatttaggcaccccaggcgttgtacaacgtgtatngccttccggcttcgtatgtttgtgtggnattgttgagcgggataaccaatttcacaccaggtaacagctatgacccatgtattactgccaaagctctaatacgactctactatatgggaatagctggtacgcctgcaggtaccgtccggaattcccgggtcgacccacgcgtccgcccacgcgtccgggaagagcctgggtatcagactctgatgtatgatccgaccgcgcctgcgggatctgaatggcacacgtcgacgctcaagccatcagggctgtgcttatgcagtgtgaccatgaaagttgatgtcatcagtaggcatagagttgtacgtttctccgtcccagtaaaaaacaaatcgtagaattatatgtgacagtattctagtacaacgaacctggacggagtcacggtccaatctaggtttgttttctgtgggacagaaggagtatatatttcttgcattctagtgtctaaaaaaaaaaaaaaaaaaaa

SEQ ID NO: 21365 - DNA, 350 bp, Oryza sativa
  Clone ID: PAT_MRT4530_26642C.1
gggggggaaacaaaaattggtccggtgggttgccccggggattccggggggggggggggggggggcccatttttcctttttgggggggggttaaaggctgggggtttttaggggcattgttgtttcctgggggaaatgggtttccggtccctttttctcaaaaaatacggcccgggggctttaaggggaaagccgggggggccttttgggggggcccccccactttttttgggggggggtcactggccgtttttcgggggggaaacctgtggggcccgctggttttttggattggcccccccgggggggggggggggtggggttttgggcccccggggggtttttttttt

SEQ ID NO: 21366 - DNA, 909 bp, Oryza sativa
  Clone ID: PAT_MRT4530_26643C.1
atggccgacgggggagagaagtgccgggacgcggccggcgagggcggcggcggcggcgacctgtacgccgtgctcgggctcaagaaggagtgctccgacgccgacctcaagctcgcgtaccggaagctcgccatgtgtgtcagagcaccgcctttacaacaaaaagcaaattacaaagtctgtgatctctctaaagctggcactgcagcaacattcaacgagagatggcatccggacaaatgctcatcctccagcagtgcaaagcacatggaggaagccaaggagaagttccaggagatccagggcgcctattccgtcctctcagactcaaacaagcggttcctctacgacgtgggggtatatgatgatgacgacaatgacgatgacaacctgcaggggatgggggacttcattggtgagatggcccagatgatgagccaggcacggccaacgaggcaggagagctttaaagaactgcagcagctattcgtagacatgttccaagctgatcttgattcgggtttctgcaatggaccctcaaagtgctaccatacccaggcccaaagccagactcgaacatcctcaacctccccttcgatgtcaccgtctccaccgcctccagtagctactgaggcagaatcgccatcatgtaatggtattaataagcgtggttcatcagcaatggactctgggaagcctccaagagccagcgaagtcggttctggacagagtcaatcagggttttgtttcgggcagaagagtgatgctaaacaagcggcgaagacgcgaagcgggaacacggccagccggaggaggaacggccggaagcagaaggtgtcgtcgaagcacgacgtctcgtctgaggacgagatgccaggtcacccttacactgttaaagctaaaaactaa

SEQ ID NO: 21367 - DNA, 1201 bp, Oryza sativa
  Clone ID: PAT_MRT4530_26644C.1
cccacgcgtccgcgactgctgaaggcgcttctgatgggaagaaaaggagaaagagtcgaaagcaatcaactgaagctgctaaagagaatgacgatgaagacgatgagggtcctgctgattctgaggatgcatcaatgggtgaggaagatgatgaggattctgaagcaaaagataatgctgggagtgatgaagaacctgatgagcctccagcaaagaaaaaggcaacagatgataaacaaacaaaaaaggcaaaagaaaaggatgcgactgccaagaaggcttctacaagacctgcaaaaggtgtgtctaagccttctcaagacactgaagaagatgatgagccagaagttgagttagaaagcaaaaaggttgtcaaaaaagtctcaaagagttcaaaggagagtgatgttactgtagataaaaccaccaagaaggcttctaaatccaaaaaggatgaaggaaaagatggccagaacaataattctggtgcattgaacaataaggcacgcaagaaggatgctgccaagacaaccaataaaaataaaggaaaaggaaaaggcagcacagaggctggggcagccccaaccactgaagagctgcatgctgttgttagtgacatattgaaggaagttgacttcaatacggcgacattggcagatattctttcggcaattaggtactcattttaagatggacctcatggataggaaatcagaggtgaaacacattattgaggaagtaataaatagtatgtctgatgatgaggaaggtgaggaagacaatgctgaagatgacaaagacaaaaatgctaaggaggaaaattcaaaggaagatgctgatggtgacgagaagtaattcagcggaccacatgtgatggtcgcttgtgttagtgttatggatgcaggactttctagcccaacattgccgtttgggctgtgttgggtctgtacaatgagggcaccgcaacaatgaactggtgacctgggggtagtacaaggttgttaacaatttgatagccacacacacctagttgttgtgcttgactttggtgtgacttgtagtctagttgctggtcatgtacaatagctgtgctgttataactttgcttaggtagctagcctgactgtaatatgcagaataattctttgcctgttccttccatttatccatgtaaaacagtgaatttggaatttttggttct

SEQ ID NO: 21368 - DNA, 610 bp, Oryza sativa
  Clone ID: PAT_MRT4530_26645C.1
ccccgcgtccgccccgcgtccggctttgcttcctctctcttccctctcctctcctctcctccggtcgtcggcctccccggccggccggcgcctgcccgtgcttgaggcgcggcggcggatacggggggtgacgacatggccgacgggggagagaagtgccgggacgcggccggcgagggcggcggcggcggcgacctgtacgccgtgctcgggctcaagaaggagtgctccgacgccgacctcaagctcgcgtaccggaagctcgccatgagatggcatccggacaaatgctcatcctccagcagtgcaaagcacatggaggaagccaaggagaagttccaggagatccagggcgcctattccgtcctctcagactcaaacaagcggttcctctacgacgtgggggtatatgatgatgacgacaatgacgatgacaacctgcaggggatgggggacttcattggtgagatggcccagatgatgagccaggcacggccaacggcttaaaaaaggaactgttatgaaaagctccatgcccctcaactgaaacttttagaggcaggagagctttaaagaactgcagcagctattcgtagacatgttccaagct

SEQ ID NO: 21369 - DNA, 535 bp, Oryza sativa
  unsure (1)..(535): unsure at all n locations
  Clone ID: PAT_MRT4530_26646C.1
actctccttccaaaaatttcccccccctaaaaccctagcttagctccccccgcgcgcccatggcctccgacgccaagcccgactccccgcccgccggcgtcgaccccccgccgcccaaggaggaggcgaaggcggagaaggagggggagggggaggagccgcagtcgggggggcggaagcgcgggcggcggaagaagggggtggcttgttaaggagaaggagaagcccccgcccgccacccccaccatcgagaggccctccagggagaggaagaccgtcgagcgctactccgagctcgccccccgcgtnacccccgccaagaagtcccccgccattctccagggctctggatcgaagctgaaggacattcccaacattcgatgcagactatcggggaggaaggcggacgagaacctgcggaggcttcatggtttaatgtatgggagaaaatcgggtggccctttgttggggagaaacgtgtcccacttttctgggttttgttgggcctggccgtcggggccgcgctggggccccg

SEQ ID NO: 21370 - DNA, 732 bp, Oryza sativa
  Clone ID: PAT_MRT4530_26647C.1
atgagctcacctggacagctgaacgtgcgtcctgcagcttgtgatgatgtccactggcaccccagatctcgtctgcttgcactgcactcgagcttgacgaagtgctgcgcccctcctgctcgtctctacagctgtgccatggaatggaactcaccttttggggaggatgaagaagatagacggggcaaggtgggggagataacgtcaatttggatagtgccaaaatcagtaacggaggctgacaaatacctagagaactatgaaagagcacttcgtggatttgaagctgcagctttaaaagatcctggtcttggtgctgatacagaagttcagaagatcatcagtctccttgataagctagatagtgcaatgaagtcaggcacatctctctcttctctcatccatggatcggcgctggtgaccacccctagccatgagatcagcgctggggagctcgaacactgcctccccaagcgccgcctcctcccgcggcgatgcagtgcagaggcaacggcggaggcagacgaggtgggcggcactgaggtcgtggagggtggagctcgccaccacctgcgtttcctatccccctcaagctcgtcggcgtccgtgccatctccaaccaccaagaccgcccaacttcctcggctccttgtgccacctccagatctgctatcggagcatggggtcgacgcaaccggtgttcgcgaccatcgctgctgccttgctcattga

SEQ ID NO: 21371 - DNA, 126 bp, Oryza sativa
  Clone ID: PAT_MRT4530_26648C.1
atggacgcgctgctgttcgagcacctgctgtggctgcaggcgccggtgcaattcttctccagctccagtgggctggcgccccttctgcatctcgatgtggatgggttcagtggcctcttaccctaa

SEQ ID NO: 21372 - DNA, 319 bp, Oryza sativa
  unsure (1)..(319): unsure at all n locations
  Clone ID: PAT_MRT4530_26649C.1
cgcgcagaagaagaccattcctcgcgccacctccaccaccgcctccgccgccgccgtggacgccgggatggatctgcggcggccgacgacgcgctcctcgtcggggggagtggagccgaggtaccggcaggtcggcttcgtcaccaccactgccgagcccgccgcggcggcggcgtcgtcttcctcctccccgcgtggctccgacgtctacccggggtcgctctcccccgtgatgatcccgcccccgcgcttccccgaccacctcaccgncctttctcccgcctccgtcttgctcctgcccttctccccgccgtcgcct

SEQ ID NO: 21373 - DNA, 269 bp, Oryza sativa
  unsure (1)..(269): unsure at all n locations
  Clone ID: PAT_MRT4530_2664C.1
ccggccgggtcttcctccccatgctccgacgacgaccatccctccgattccccggccatggaagcagacgagccggccgccgccgccgcctccacctccctcgactccgacgacnccttcttcgacgccctcgactccctcccttccccaccctctcctcctcacaccccttcctcctccaccctccgccgcgcgtctcggnnggcggggaagaggtggggcgcatggtggcgaggcttggcgnntggggggggtccgctcctcgggcg

SEQ ID NO: 21374 - DNA, 273 bp, Oryza sativa
  Clone ID: PAT_MRT4530_26650C.1
atggacgttggagaggagggagccggccggcggcgcgcggacgtggggagaggaggggagccggcgtcgcggtcgtcgttgtcgctggcgcgcggaggcggcgtcgcggtcgtcgtcgtcgccggcggcggaggtggggagccgaggatggagccaaccgcggcggaggtggggggccggccggcggcggaggcgttgcttaagtggtccgcctgcgaaaatgattttcgcaggcgccacttaagtggtctattttcgcaggcggacagctaa

SEQ ID NO: 21375 - DNA, 449 bp, Oryza sativa
  Clone ID: PAT_MRT4530_26651C.1
gacgctctcctactatatagtagatcattgggatttttccgtacttttatcagattaattgcattttcaatgatggaatagttatggagacacttctagagactcatccagtcttattttcaatgacggaatagtctactgctaccaggtctttgaaagttttcttgaaactgcacctttgtcaggctactgcattttttttgtgatggaataattatgaaaacactttcagaggcacatacactctgtttctctgttggacgaacctgagttggaaaccagtttagtttgagctcatttcaaccccttctttcaccagaagcaattgggctaaacccaagcaccaatcattctcctgtcagtccttaatgacaagcctgcaggacaaggaaatcaatgaagatcactgaggcaaaaatatatttatcctcccatcatgatagaaactg

SEQ ID NO: 21376 - DNA, 738 bp, Oryza sativa
  Clone ID: PAT_MRT4530_26652C.1
atgcaccggttcctttcctttgtaaacgaaagaattcactcactgaatggatcgacggagatcagcgagttgaagcagtgcagtcaatcgatgatgtcgagcggccgcgtgcgaatgcggcgaaggctcggagacaccgctcgccggaatgctcgttgcacgacgagcaccacggccggcttggatcgacggcgacgcaacacgacggcagtttaggaatttcagaagctaacactgaacggcagcccacgctcaatccgttgctcctccgcgtcaaagccggatcggctccgtgagaaacgcagccgccaaacggccacaagcgcacgttctctcttcactctcagagaaatggttgtgagtgatgaagaactggtggtcgtagatgatggacaggggtggatggagagacggcggcaaacaccgccggatcaacgaaggtggacaaggatggtagaggcccctactgatctcgtcaccaaatccagcgggagatacgccagtcgccagagagtgacgtacactgacacgatcgatgctgattgtctcaacaaggtagctagcctgctttttaccgtcgtcgtcgtcatcggcagctacatacggcctctacgacgtattccagctaaactggacattaatccatctgttgtagtatgtaaacagtcgctaaaagtcaaagtttatgaacgttgccaaaagcagtccaataggacaagtgcctataaccggagggag

SEQ ID NO: 21377 - DNA, 313 bp, Oryza sativa
  Clone ID: PAT_MRT4530_26653C.1
atgtggggccgcccggcactgcacggcctgggctgaggcttgtcgggccggcacggcccaaccgacacactgggccgtgccgtgccagcccactccctatactttgtgtgccgggcctggcctgccggcccattgtgccgggccggcccgacagcgtgccggcggggaggcccagacacggcccagcgatcgggccgggctggcacgggcccgacccaagtcgggccatgctgtgcttgggccgggccaaaaagtcatgccatgggccgggccttcgggcctcgggccttatggccatctatagagtatatag

SEQ ID NO: 21378 - DNA, 506 bp, Oryza sativa
  unsure (1)..(506): unsure at all n locations
  Clone ID: PAT_MRT4530_26654C.1
gcacgaggctgacggctgcgtttgcccgcagagggtccatctggacatccaggtgggcgaacacaccaacaattaccccgagatcgcagcgaaggacaaactgacggagctgcagctgcgcgcccgccaactgctggaccaggtggagcagatccagaaggagcagaactaccaacggtaccgggaggagcggttccggatgacaagtgagagcaccaaccaacgcgtgctgtggtggtccatcgctcagaccgtcatcctcatcctcaccggcatctggcagatgaggcacctcaagagcttcttcgaggccaagaagttggtgtgaacccccccccaaaatggggggacccacctccgcctcccccccacccccccacgtcgctgtgatgcttatgggggcagatggggggggcgccgcgcggccccgatgtggggtgtggggttggctgggggtcaataaagggtgtgggatccctnnnnnaaaaaaaaaaaaaaaaaaaaaa

SEQ ID NO: 21379 - DNA, 1078 bp, Oryza sativa
  Clone ID: PAT_MRT4530_26655C.1
gcagagggatttatttatttattatctcgtcgtctcggctcccgccctcctccgcctgatcgagatcgctccgggcccagccgccgccgccgccggccatttgcctccttagagctcaccaacacagcagctgatacttgtttagggtaagacaagatgaacaggaagccaggagactgggactgcagggcgtgccagcacctcaacttcagccgccgggacctatgccagcgctgcggcgagccgcgtggcgccgctgatcgcggcagcggtggtggcggtgactacgccaacttcggcggccgtggtggttcctccttcggtggaggctttggcactggctctgatgtccgcccaggtgactggtactgcaactgcggcgcgcacaacttcgccagccgctccagctgcttcaagtgcgctgctttcaaggacgatgctgccgtcaacagtggcggcgctggtgcctttgatggtggggacatgtcgcgctcgcggggctacggcttcggcagcggcgccgtccgcgccagccgccctggctggaagtctggcgactggatttgcaccaggtctggatgcaatgagcacaacttcgccagcaggatggagtgcttcaggtgcaacgcaccgcgggactccggtagcgctatgacatacgaaaattacttgcactgaggtgtaatttgccgtacgtgtccgatcgatctggatccgatgaggcttgcagcagtgacgacgagcagcagaagcagcgttaagagttgtgatgtctacataagaagaagaagaaagtagaatgcaaaagaaatctccccatggttttactagttttgtttcttcccgttttagatttggttctgattcccatttgggaggacccgtcgacccctgattatctatgttttacccgttttatttcctgtttctttcggcatgtttgctcttcgatcgagtcgtgtaacccgaaacgcttgcgcttgagaagtattattattattaactagtatgttgcttcttaaaaaaaaaaaaaaaaaaaacgtgttcacttcaaaaaaaaaaaaaaaaaaaaaaaaaa

SEQ ID NO: 21380 - DNA, 297 bp, Oryza sativa
  unsure (1)..(297): unsure at all n locations
  Clone ID: PAT_MRT4530_26656C.1
ccagctgccagtgcggcaacggctgcggcggatgcaagtactctgaggtggaacccacgaccacgaccaccttccttgccgatgcaaccaacaaggggtctggtgctgcttccggaggatcagagatgggggcggagaacggcagctgcggctgcaacaccttgcaagtgcggcaccagcttgcggctgctccttgcttgcaacttgcaacttagaagaacttatctccatccatttcatcacctnattcaacgagttaccagtaccattacatatgccatgtacttagctacctta

SEQ ID NO: 21381 - DNA, 741 bp, Oryza sativa
  unsure (1)..(741): unsure at all n locations
  Clone ID: PAT_MRT4530_26657C.1
aaaatctcaccccgtttcgtgcgatttatttatttattatctcgtcgtctcgtcttcctccctcccccgcctgatcgagatcgcttctgctccagccgccgccgccgccgccgccgaagtccgcaggtgcgaggacgccgacgagtctccagagagcagggtaagacaagatgaacaggaagccaggagactgggactgcagggcgtgccagcacctcaacttcagccgccgggacctatgccagcgctgcggcgagccgcgtggcgccgctgatcgcggcagcggtggtggcggtgactacgccaacttcggcggccgtggtggttcctccttcggtggaggctttggcactggctctgatgtccgcccaggtgactggtactgcaactgcggcgcgcacaacttcgccagccgctccagctgcttcaagtgcgctgctttcaaggacgatgctgccgtcaacagtgggcggcgctggtgccctttgacggtggggacatgtcgcgctcgcggggctacggcttcgnaaagcggcgccgtccgcgccagncgccctttgccttggaagtctggccgactggatttgcaccaggtctggatgcaatgagcacaacttcgccagcaggatggnagtgcttcaggtgcaacgcaccgcgngactccggcactggagtgtaatttgccgtacgtgtccgatcgatctggatccgatgaggcttgcagcagtgacgacgagcagc

SEQ ID NO: 21382 - DNA, 2011 bp, Oryza sativa
  Clone ID: PAT_MRT4530_26658C.1
atggaggagctggagtcggaggaggtgaaggggttcgtggacgcgcaggcggccgtggccgaggcggtgctctccacctgcgacgaccaccgcgtccgcctgcgcgggcagctcaccgcgctcttcgaccacccgcgctaccgcgccccgttcaagcgcgccggcagctacttctacctccacaaccccggcctccagcctcacagcgccctctacgtccagcacgggctggggggcggggaggaacctgacgtgttgctggacccaaacacgttcagcgacgacgccaccgtgtcgctcgccatgttcggcgtcagccacgacggcgagcacctggcgtacggcaccagcgcgagcggcagcgactgggtcaccatccgggtgatgcgcgtgcgcgacaggcggcacctgcacgacgagatatgctgggtgaaattctcggccatcgcgtggactcgcgacgggaaggggttcttctactctcgttttccagctccaaagaatgatggggcgccattgggtgctgggatcaagactagtgttaatctcaatcatgaagtctattaccattttcttggaaccgatcagtcagaggacctgttgtgctgggaggaccctgaccatcccaagtacatttacacccctgaagtttcagaagatggcaagtatgtgattctgtcagtcgcagaaacttcagaaccggtaaacaagttgtactactgtgacctctcggctctccctgacggcctggaaggcatgaagggaaaccatggcaatgccatgcttccttttgttaagcttgtggatgaatttgaagcatactacgcactcatcgccaatgacgacactcaattcacatttctcactaacaagaatgctccaaagtacaagctgtcgaggattgatgtcaacgagccacactcatggatggatattctccctgaagacgagaaggctgtcctagagtcggcttgtgcagtccatggtgataagcttctggtaaactacctgtcggatgtcaagtatgtcttgcagatgaggagcttggttaccggggagttgctccatgacatacccattgacattggcagcgtcaatgggatctctggcagacgtgacaattcagaggtgttcatcgagtttgctagcttccttactcccggaatcatctataggtgtgatgtcagcaaggagactcccgagatgaacatatacagagaaatctcggttggtggttttgatcgcacagattttgaagcaaagcaggtgttctaccctagcaaggatggaaccaagatcccaatgttcatcgtgtcgaagaaaagcatcgttcttgatggatctcacccgactctgctgtacggctacggtggcttcggcatgaacatgacgccccatttcagcgtcacccgcatcgtcctcatgcggaatctcgggttcgtgtcgtgcatcgccaacatccgaggcggcggggagtacggcgaggactggcacaaggccgggtcgctcgcgaacaagcagaactgcttcgacgatttcatcgcggctggtgagttcctcgtctctgcaggctacacgaacccgagcaggctgtgcgtcgagggtgcgagcaacgggggccttcttgtagctgcctgcatcaaccagcgtccggacctttttggttgtgctctggctcacgtgggtgtcatggacatgcttcgattccacaagttcaccataggccgtgcatggacctgtgatttcggctgctcggagaaggaagaggaattccactggctcatcaagtactctcccctccacaacgtcaggcggccatgggagaaaggtcaccggaggcagcagtacccttccaccatgctgctgacggcggaccacgacgaccgcgtcgtgccgtcgcacacgctcaaattcctcgcgacgatgcagcacgtactgtgcacgagcgtgaaggagagcccgcagacgaacccgatcgtcgcgcggatcgaccgcaagagcgggcacggat

SEQ ID NO: 21383 - DNA, 681 bp, Oryza sativa
  Clone ID: PAT_MRT4530_26659C.1
atgatgagtttcccgtacagctccggcgacctcggcgaggccaccaccgccgccgccgccgccgttgacatgatcacgctcgaccagatgttcagagactatgatgcctccaccggcgacgatctcttcgagttggtctgggaaagctgcggcggcggcgagatcgacagcggcgccggagaggtgcagcctgctggtgttccctgctgccgtcgattgctgccgggatcgtcgccggagccgacctccgaggacgagatggcggcgtggctctccacgattgtcaccggctctggcggcggcggcggcgacgacgtggctgccggcggagaccatcaagatccggcggtgaagaagcccgacggcgagccgttgacggagaagatggataagaagctcccaacaagaacggaagagaggcggcgcgtcaagcacaaagcaagaagaaatcctggatacgcagaaacacacggcttaacagagaagagacgaaggagcaggataaatgagaagttcaagatgcttcagcggctcgttccagggtgcgataagtgtagccaatcctcgacgctggaccggacaatccattacatgaagtcactgcagcagcaacttcaggttgacccccctgcggctatatataatcgtatttctgtggagagaattgatatgattatttaa

SEQ ID NO: 21384 - DNA, 234 bp, Oryza sativa
  Clone ID: PAT_MRT4530_2665C.1
cccacgcgtccgaaaaacccacgcgctgtcgcaggagaaacgaagccgaagctcccatttccattccacctgctctcccaactctccggccgccgccgccgccgccgccgccgccgcgctaacctcctccccgcgacgagcgccaccatgagcacggcctcggcgacggcgccgccgagccgccggacgcggagccgcccgccgtcggcgtcctcccgcaagtccgacgacccc

SEQ ID NO: 21385 - DNA, 124 bp, Oryza sativa
  Clone ID: PAT_MRT4530_26660C.1
gagtgtcatccatgggagctactccattggactcgggggcaaggagatcgctctgtggttccctcaaggtttagctgagtggtggagcatccttcaccctttggatccatgagtcttagagctt

SEQ ID NO: 21386 - DNA, 213 bp, Oryza sativa
  Clone ID: PAT_MRT4530_26661C.1
gtttcattctaaaggaacaggacttaccattgtcggggctggtggccgcgtgttgtaattgatgcacaacaaacctgctcctaagaaaaatgcttagcgaccaccattatatatagccatgccggacacgacgacacggggttcacagaagctaggtatatatcgtatgcatgtcggacgctcactacacaaacctgtacaagaacgtggcta

SEQ ID NO: 21387 - DNA, 640 bp, Oryza sativa
  unsure (1)..(640): unsure at all n locations
  Clone ID: PAT_MRT4530_26662C.1
ggcgtcggaggtggaggacgatgcggcggcggtgctcaccaacggcggtgccggcgccgcggaagtccggcggaggagggaccaagcgaaggagattctgtccaagcaggccgtcaagatcgccaccaaggccgaggagcacgagcgcttcatcttcaaggtcacacacttgctgggtgttcttggatttgggacattttgctacctcctgggtgccagaccacaggatgtgccgtatgtgtactgcctgttctatgtcatctttgttccgctccggtggatctactaccgctataagaaatggcattactatctcctggacttctgttactatgccaacacttttctccttgttatgattctcttctatccaaaggatgaaaagcttttcatggtttgcttctcatttgcagaggggccgcttgcttgggcattaattgtgtggcgctgcagcttggtttttagctcatttgataaacttgttagtgtcctgattcaccttttgcctggcatagttatattcactatccggtggtggaatccacanacttttgctgcgatgcatncagaaggaagagcagccagagtcacatggccttatgtggaggacaaatcatacctgtggacatggctgtttgct

SEQ ID NO: 21388 - DNA, 1512 bp, Oryza sativa
  unsure (1)..(1512): unsure at all n locations
  Clone ID: PAT_MRT4530_26663C.1
cccacgcgtccgggagaggaggaagggactggaaggttcgatggcgtcggaggtggaggacgatgcggcggcggtgctcaccaacggcggtgccggcgccgcggaagtccggcggaggagggaccaagcgaaggagattctgtccaagcaggccgtcaagatcgccaccaaggccgaggagcacgagcgcttcatcttcaaggtcacacacttgctgggtgttcttggatttgggacattttgctacctcctgggtgccagaccacaggatgtgccgtatgtgtactgcctgttctatgtcatctttgttccgctccggtggatctactaccgctataagaaatggcattactatctcctgtttagctatggttattacaacagggaagaagcattacagtttcaagccattgattgtttggacttctgttactatgccaacacttttctccttgttatgattctcttctatccaaaggatgaaaagcttttcatggtttgcttctcatttgcagaggggccgcttgcttgggcattaattgtgtggcgctgcagcttggtttttagctcatttgataaacttgttagtgtcctgattcaccttttgcctggcatagttatattcactatccggtggtggaatccacaaacttttgctgcgatgcatccagaaggaagagcagccagagtcacatggccttatgtggaggacaaatcatacctgtggacatggctgtttgctgttcctctagctgcttacaccctgtggcaacttatgtattttctcatagttaatgtgctgcgtcggcaaaggctgttaaaggatcctgaagtcatgacatcatacagggagctctcaaagaaagcacagaaagcaaacaacatctggtggagactcagcgggcttcttggcgacaggaaccggccactcatgtacatactactccaagcgctgttcacggtggcgacaatggcgcttaccgttcccatattcctgtccttccagatgcatgtggtcttccagatactcaaggtgtgcgcgtcgacatggaacggtggaagcttcatcctggaggtgatgcctaggcaagtcgtccagaaggagaagaagaagctagagatgaagcccatggaagaggctaattcgagccagaatgctgaagaatcacaaggggacctgtcagcaaacggccagcactcatccgagcatagctaagtcactgaaaaaccaaaccatcgcaaacggtagcatttttcagtttttcaccagttaatacactgtggatagcttctctgtgtgttgtgtgctcgaaacaaattatccatgttctgttgggttgagaattttgatgcgtgtgtgaggtttgatctattcagactccaggcagggagcatttctcaggtagaaaattatttttcttttcccagtcaacccatgatattaactgaaacttctgatattgaccatgacaaatttccgtgcgtgaaacaaaaaaaaaaaaaaaanaaaaa

SEQ ID NO: 21389 - DNA, 2575 bp, Oryza sativa
  unsure (1)..(2575): unsure at all n locations
  Clone ID: PAT_MRT4530_26664C.1
gtggcaaagctggaagttcattcattcaatacaacaaaccccaaagagttttacatgataggaccatgtcacccagtgatgatcagtagagctactggaaattaaacaaacacaatgactaacatcacatttctttcaagaaaaaaaagagtgagagaaggaatcacagcacagaatgaagaatgaataatgaagaagaagaatcactaaagaatgatcagaaaatcaaacagaaaaagattcactagacacattgctaccaacaaccttcaaggtagaaactattgaacctatttttgtctcagtggcatgttgttatttctgtgccatcaggtgatctggattgcttcctcctttagcttgtcctcgggggataacctcgtccccgaggaggagttcctgatctcctcaatcctccttaccacttcctccatccgaggccgctggtcgggaacaattgcaacgcatgccatggcgagctggagcatctgaaccatttcatcctcgctgttcggatgcctcaacaggtcggcatcgaaaacctcggaggtccattcttctcgaaccacggattgcacccatcttgggaggtgttcgatggaatcctcacggcctggggatctaagaggagcttttcctgttagcatctcaaggagtagcacaccgtagctgtagacatcggatttctgcgtttgccttttggtctcaaggacctccggtgcacggtatccaatgagccgtgctgggatatgagggatggccatgagctgcgcaaggccaaattcggagatacaagcactgagtccctgcgagagaagaatattacttgacttgatgtttccatggatgaactttccacccccctcagcatgaagatgagcaatcccacgtgcagcttccagagatatctttactctcgttgcccaatccaatgtagttcttccagcagttctattcccatgcaaagcagcacaaaggctaccaggtgtcatatagtcatacaccaaaagcttctcgtccttggagtaatagtaagcacgcaattgaacagcattttggtgctggccaactctgccgattatctccatttgctgttcaaattccctctttcctgcgaccacttccttcagtcttttaactaccacggttgtgccatcctcaagaacagctttataggtagtcccataacttccttttccaaggacttcagctgaggccctcaatagatcctccaggtcaaaattatacgaacagccattaaagaaaatcaatttattcctctctgcttcttgaataccactactgctgtactcctgctttgatttttcagctcttccacctgcagcagcctttcctttggatgaaaatgaagctatgccaggctcgccatctttctttcttttgaagatgcatatcaagagcacaacaatcaaaatcagaagtaataaccctcctccagcagctattgcaattatgacaccaaggctaagccttttccagaagcttttcttggtatttgggggcaatggcgacatcggagaaggagaaggtgctgttcctggacatggttccagtggaagtccacagagaaaagcattcccgaagaatgaactggctgggaatttctgcagggaaggcggtctgggcccactcaggttattgttgcttaaatttaaatgtctcaaattggggaggtgaaggtcagggatgggtccagaaagagagttattctggaggagcaatgcagtaagttgagtgatattttgcactttcaatgggatttctccatcgaaagagttgtacgacaggtctaggaatgttaggttggaagatagtgaagttggtataattccggacaagttgttgtgctgaaggtaaagagaatgcagggaaggaatggatgctacatcaggggggaggctaatggtgagacgattggatctaaggctcaacacctgtagcgcgtcaagcttgccaagtgtgtctgaggggatgggaccaaagagccctactgcaggtagacgcaattcacgaacacgcctcccatctggtgtgcatgtaatcccaacccacgatgtgcagacttgagtcgtgagagtccagttgagttttcgaccatggggcactgatgcagcaaatgcaagaagggcctgcctgtctgagtttaggtcagcacatctggcacaagggatgtgcagaaacaaaaacgaagcagaaagaaaggctatgagcacaaggtgctgcatgagccaaatccgcccttgcctccgcgaaggcgaaggagcgcgcatgcggaggggaatcggccgtcggcggaggagtcgaggagagtaggaaaggngagaccctccctcctcctcccctccaccaccattcgcctcaagaatcaaagatccagccttccggccgccgaaatcccgccgcgcgggggaggtcaggtcaccgatctgcttccgaacacgccggcatttcgtcccccgcgaccccggcggcggcgcggggagagcgcgccgggccgcctcgtcgtcctgccgcgtacaacctcgcgctggcctggcgactggtgatcccagaa

SEQ ID NO: 21390 - DNA, 390 bp, Oryza sativa
  Clone ID: PAT_MRT4530_26665C.1
tgttgtcacaataccaccaccgaattgagcgttggagaattgtgagtgacatatgcaacatttggagctagggtgcgctgtggttgcaggcgatagaggctcacaggaagggggcgaaggtgtaccaccatgcgggactgtgcgcggtgaacgcgggggagctactagcggagattcacatgccggtgagcctgctgccgatgtcggtgatggaggaggacgagttcatccgtgccacggcgaccatggggataattcaccatacggacatcgcccacactcttaaggctgatgctctggaggagcatggcacgcctttaatagatgaattcttgcccaaggacccgctgatgaaatacttattctgaaacggttctaatgtgttacgag

SEQ ID NO: 21391 - DNA, 670 bp, Oryza sativa
  Clone ID: PAT_MRT4530_26666C.1
ctaatggaacttgagtggcttcacttccatttacaaaaatatatacactaaatcatccctcctaactcatgatgattttgagaagatgcatggcaatacaaaagctgctcttgattactatgtttcagtcagcagtgatgcttatgttgccaccttctttggaaatatggataagatggtaactgcgatgagaacaatgcaagggcaccagaagactctggtcttgagtaggagggcctatgcaaactacacagctgttggactttcaggggagcaactagctatggccatgtgggatgcccatcgagaggaatatatcatggggaggggatcagcccttcctgagcagtgcttctgtgagttcaaattgtaacacgaaggccactttagatcgccatcaacgaaggccactttagattgccatcatttgatcaacagcaattaatatgtgacttcagaatcttcagatgtgcaaatatggatgagaattttactgcgatagagagcaatgctgacgataaagaagaaactgttcttggtgagatgggatttcacagtcagcatggtggctgggctctgtggagggaagctggctctcgtacagaaatgcatcttggcccgacttctgtttctcctgcgtactgttttgacttttcggacttcaagtcaa

SEQ ID NO: 21392 - DNA, 340 bp, Oryza sativa
  Clone ID: PAT_MRT4530_26667C.1
aaagttacaactaggtcacatccggtgggaaatgactcattcctaagaaatttatacatttcagttaagcttactgatgtagaaaagccaacaaaaaaaagactaacccctaatatgtgcaaaaattacgcctaattcggaatgaaatagcctatgctgattaaccttgctagtgagaaatgttactagagagaacagtacgcattgaacttagtcagaccatctagatataaactgagatgatggcatgacccaccatgaagctcaggtgtttggagttcttcacaaagatttgctggcctttagaaacaggtgatattccttgagcatcatctccccg

SEQ ID NO: 21393 - DNA, 221 bp, Oryza sativa
  unsure (1)..(221): unsure at all n locations
  Clone ID: PAT_MRT4530_26668C.1
caaagctcgagctcccgctatgttancgccgccgccatgccgcaggagatcacatagagcttcaccagaagcgccatggccggcgnctggactacgaggngcgcaacgtagaggttgtcggcgcgcgaggtncacaagcnatccagggatgcccggcagttncttngtgataagggtaagaggttcgncaagaagcggtatgccgagaaggacagatgaag

SEQ ID NO: 21394 - DNA, 654 bp, Oryza sativa
  Clone ID: PAT_MRT4530_26669C.1
atgaagacaacacataccgcagggacaaagagctacgctcgttgggctaaggacatgagacaagatgatcctcaaaagaagcagccgcatagagccatggtttacttagcaacccacaagaaaagggccgaagatagaaatgaacacctggctgagttggaaagcctcatggatgaacaacctgagctggatgaagatgatcaaggaagagttgcatggaaaggtgatgccttacatcaagttttaggtgaagagaaacctggacaaagagtccaatgcgacgcagctgatcgagaagacctcctgagtcagcaaagatatccattcaagatggctaaagaagggcagaaaatgttcgtaaagagcacggacaatgcacatgatcaagtgattcaaagccgtgtgcgttcaaagaagacgcgcccttcaccaatggaggccacaggagcgtcagatccgatagtggcgatcctcaggagtacctcagtaggtctgcagctatgggtctgtcagtggtggggcttggtgccgcacccggcagcagcgacggcactggagcgcgtgaggggcgttggtggtgacagtgttgggccagcgtcggaggtggagagcagtgtggcggcgccggcacagcccgtcggcggcaatggctga

SEQ ID NO: 21395 - DNA, 558 bp, Oryza sativa
  Clone ID: PAT_MRT4530_2666C.1
atggcggtgaagtattttggtcatagaactccagtaatagttgtcacgaagtcccacatgtacgaaagaggacaaatccatcaatcattatacattgtatggtatatcaaaattatcaaatacacggtcactagtgatactgtccattttcctcaacaacaattcaaagtaactctacaccaaaagtttgcaatgtcgtccccccatgtgcttgttgtggatgatacccatgttgatcgccatgttgtttccatggccttaatgcgccataatgtccgagtgactgcagtagaaagtgtcatgcaagcattgatgtttttggactcggaacatgatgtggacatgattgttagtgactactgtatgccagacatgaccggctataacctactcatggaagtgaagaaatcacctaaactggcacatctcccggttgtaattgcttcctctgataacatcccagaaaggatcagaaagtgcttggatggaggagcaaaggattatattctgaagccagtcaagattgttgatgtgcctcgtattatgaaatacatatga

SEQ ID NO: 21396 - DNA, 519 bp, Oryza sativa
  Clone ID: PAT_MRT4530_26670C.1
gggatccacaaaatccctctcatttaagggtcaaataagcccgattcccattcccatttctcttataaccgatcaagcgtgttcaaaaagggcttaaatgtctacaaggtaaactgcaaccttttataaagtaactcaaccattttcattaacctcacatgggacttgcataattcacttattagtcccttctgaccaacacaaaagtttgtttataagaacccgggccttgttttgacccaaaaaatttttccgtccaataaattaaacgattcggacaaactttaccctttttttaagaagaacagggacgtttggtaatttgaaaacaggctttaccacttcaagctgagccagggccatgttcagagccattgaatttggctggaaaaacaaccattttttcaagggaaaaaacttttcatttaacgttttattctccccttaatacatgagatcgttcataaaaccaagaataaggttgttagccaaaaaaataactgcaggggcaccattttt

SEQ ID NO: 21397 - DNA, 2537 bp, Oryza sativa
  Clone ID: PAT_MRT4530_26671C.1
tgctgcctctcccctctagcaaaacagccattgcatctctctctctctctctctctctctctctctcgtgttcgtgttcgcttgccatcgcgtcgtcgctcacagctagctagctgatcggtcgctgcgagctagagcgcgccatgagagcgggaggaggaggaggaggggacacgaggaggacggcggccgggcaggccatggtggagctgcaggcgaacgcgtcgtcggcgggcggcgggatggtggtggggctgagcccgctgagcgagacgctgtggcgggacagcaaggcgatgcccggggcggcggcggcgctcatcggcgacgtgtcggcgaggctgacgtggaaggacctctcggtcaccgtggcgctcggccccggcaagacgcagaccgtgctcgacgagctcaccggctacgccgagccgggctcgctcaccgccctcatggggccctccggctccggcaagtccaccctcctcgacgccctcgccggccgcctcgccgccaacgccttcctctccggcaacgtcctcctcaacggccgcaaggccaagctctccttcggcgccgcggcgtacgtgacgcaggacgacaacttgatcgggacgctgacggtgcgggagacgatcgggtactcggcgatgctgcggctgccggacaagatgccccgggaggacaagcgcgccctggtggagggcaccatcgtggagatgggcctccaggactgcgccgacaccgtcatcggcaactggcacctccgcggcgtcagcggcggcgagaagcgccgcgtcagcatcgccctcgagctcctcatgcgcccccgcctcctcttcctcgacgagcccaccagcggcctcgacagctcgtcggcgttcttcgtgacgcagacgctccgggggctggccagggacgggaggacggtgatcgcctccatccaccagcccagcagcgaggtgttcgagctcttcgacatgctcttcctcctctccagcggcaaaaccgtctacttcggccaagcatcgcaggcatgcgagttcttcgcccagaccggcttcccgtgcccgccactgagaaatccatcggatcatttcctgagatgcgtcaactccgacttcgacaaggtgaaggccaccctgaaaggttccatgaaggcaaggatcgagaggtcggacgatcctctggacaggatgaccacatctgaagccatcagaaagttggttgcatcctacagcaggtcccagtactactacgctgcaagggagagagttaatgacatctcacgactgaaaggaactgtgctggattcaggaggaagccaggctagcttcttgatgcaggcaggcacactgaccaagcgctccttcatcaacatgtcaagggacttcgggtattactggctgaggctcctcatctatctcctcgtgaccgtctgcattggcaccatctactatgacgtcggcaccaagtacacatccatcctggctagggctgcctgtaccgcattcgtcttcggattcgtcactttcatgtcaattggagggttcccttcatttgttgaagaaatgaaggttttccaaagggagcggctgaatgggcattacggtgtcgcggcttttgtcatcagcaacacaatctcggcgctgccattcttggtcctgatatgcttcttgtcagggaccatatgctacttcatggtgcgccttcacccaggtttctcccactacatcttcttcgttctcaacctctacgccagcgtcactgtggttgagagcttgatgatggccattgcaagtgtcatccctaatttcctcatggggatcattataggagctgggattcagggaatatttatgcttgtctctggatactttagacttccttacgacattccgaagcctgtttggagataccccatgcagtacatcagcttccattactgggcgctgcaggggcaatgccagaatgacatggatggtctcgtatttgacaaccagtacccagaccaaccgaagatccctggagacttcattctgaagtacatattccagatcaacgtgcaccggtcaaagtggattgatctctcagtaattttcagcatgatcttcatctaccgcattctgttcttcctcatgatcaaggtaaatgaggatgcactgccatggattcgggggtacattgcaaggaaaaggcttcaaaagaaggaacctcttggcaagacaccctccctcagaggctacgttgtggatccagagcttggtcctaacgaaagctagaatataaactgttagcagatataggcccatttcttgccggttcttggtggaatatgtatctaagatcagagaaactggtatttatacgttttgaaactgaagctcaagctgatcggaatacaggtatatacagacatgtaatgtgtgaaaaatggcatcagagatgcagagttgacacatagctggtggttcagaatttacctgtctcttcttttacagataatttacagttctacattcagtaaaaaaaaaaaaaaa

SEQ ID NO: 21398 - DNA, 460 bp, Oryza sativa
  Clone ID: PAT_MRT4530_26672C.1
ggacccagcatcaaaacgaattttgttacgagaatggttgaaaataagctgaaatttctcaagcttggtgggttataaaatggaagcaaaatcccccaatccatacaaaaggttacgcctaaaccagaccaaacgcaacaaataacttcgcaccaatcaccaaagctactggtttttccattggattcaaaaaaaaaaatcctcgtcagggttaggaccaccacccccattgccatccatggggaataggacgaggccgaggaggacctacaggggggaagggcgtccccccccccccccccgttggccgccgccttggggaacccctccatgtcccttttggacccccccatggcctccggggccttgccgttccacgcctggttttccccctccccgagcttttttcactttaccgacacaagcgcgggcaggggggagcttgccaccccggggcgct

SEQ ID NO: 21399 - DNA, 289 bp, Oryza sativa
  Clone ID: PAT_MRT4530_26673C.1
caaattcagactaaagattttctgcaaacaaaaagccatggctttcaacaaggatactgcttctcggcgtctgcttcgttatcagaggcatgcgagctcttctggacggctacaagctcttaccaccacttatagccggtgtcgtctacaatcgtatattctggtacaccagcaagtgcttagcctatgtactcactgcgacagggaacagcatagtataaccgtaaccgcgtgctccaaaccacctacgtttgaactgttgaataacaaattcatgcaggactggtga

SEQ ID NO: 21400 - DNA, 231 bp, Oryza sativa
  Clone ID: PAT_MRT4530_26674C.1
atgggtgtagcccaaccaaagcgttgggctcccaggcagcccaggattcccctccagggtcagggggacgcgaagcaggccgcgcagatggggcagtgcgtcctcaccgccgacctctgcaacggcgaggtcgcgtcgctccgtcgccgccgttcccttctgccccgccggcgccgggggtggacccggatgcattcccccaaggacatcgtcgccaagaacacgctctga

SEQ ID NO: 21401 - DNA, 338 bp, Oryza sativa
  unsure (1)..(338): unsure at all n locations
  Clone ID: PAT_MRT4530_26675C.1
ccaattcggttttgttagagagcgatnccaatacaancaagaaaangcattcgtctaccaaccatgacaatgatcaattgggtgtgactgagtgagcaacaagctatattctccaggcctccagacttcagcaaaacacagaccagggcttcctgatttccattagttaggttatcaaatgtgttaagagcagagaactacaaatgaattctggccttgtcagtncccttcttttgggccgattcttgtgcaatttcagtattcctgcacattgtccaaacagactattgatttttttcattaattttacagacagtttatgtgaaaaaaaaaaaaaa

SEQ ID NO: 21402 - DNA, 1999 bp, Oryza sativa
  Clone ID: PAT_MRT4530_26676C.1
gcaagtcacaaacagccctaccgcataacaaaaaaaggatcaatatcacaatatgttcttctggttacagatctcaccagaaaaaaaaaagataatatatgacatcacaaaacaattgccacaaaaaaaggcatatggcatagcgacagttagccacattgctttgacgatttatgccgcagctgtctcatggcagtacaaggacctaaaattttcacaagtttgtcagtttattttttaaaaaaatatatcacataaatcatggcagtacaaggacatcctcgcaaatatcagaaaatcccagagggaaggtaacacctctgatagtacctctaacaggatcatatatctcaagctctaaattgatcgtccagctcggatctgtactctcaagaaaaccccagccaagattgagaaggtactcctcaaacgtatgcagagtgaagtcacgaagtccattgtatgaaacaatgacatcacccctggaaataccaagtctcccagcagtggaatcatcgcacaccttggggttgggatggactagtgcaccatcaaagcacacggctgcagagcaagttacgattgttgccaacctgctggtcttgttccaatcgaccacgataccactgcattgcataatctccttcccatcgctcaccgattccactccctccaccgcgatttctgcctgcactccctccaccgcgtgtttactccgcccccgcgagatgattccgccgtccactactcgctcctcctcgcgtgtccccgccaccgctgcccccgccggagtcgaggccgtcaccagccgctgctgccccccgccggagccaaggtcgtcaccagccgctactgccccgcctgagccgaggtcatccccagccaccgccgcactccaccgctggtgttcccccttccgctggactaccgcccgggacccaccgcagccacgcgcgtacgcgctgaccctgccgtgatgcctcaccaccacatcgatcccccatccgcagtctgccgcacgcctcctctccccggaaatcgcattctcccgttgcaaatcacatcctccagccgcggaatcaccagaaatcgattcctctcgcagtctcgcccacggacgacacttctcgcattctctacagccgcggaatcgccggaaatcaactcctcccgccgcggacgacacttcttgcatccttcccagccgtggtggtctgcccttcagctggcggggctgctccatctccgtctccaccgtaatcgatggcccagtgttccccttgggccctccactgctgatgccgccgtcccggacctctctgccgccaatccttccatcctggtccgctctgctgccgacacatccacccttgccgctgccacttctcccagaggaggcgaacaatgaatctgagaagaagtcggtggccttttgtcctttttcctgcgcgacggagaagcaggaaaggtacaagaccggcaggtgcacgattccaggtatcctggaggaaatgccgacgacggaacgagaagccttccggatcatgctattgtctgctacgcttgcgacgcccgtgatgctgacggtgcgagggcccgtaggcttcctcctgacagtgcaagggatgacagtacctggaagagcgcagatcctcctgaactctttatcccacttgagaaaatccatgggatcgccggatttagggaacggcggcaatctaggacgcggcggcggggtagggggatccgctcgtgcggccttacccttggctcccttcgtcgccggctggaccttccccttcttccgagccggccccggatcatccgacgcgacatcccccccagcgcccgtcgtcgcctccagccctagctccctcgatcgaaggcgcgtaaccctcctccccgcagcagcacttgcatctcccgctggaccgacgccgactggagaagctcccgctgtgcccgcggctcccaccgccgccgccgccgtcgccttcat

SEQ ID NO: 21403 - DNA, 1176 bp, Oryza sativa
  Clone ID: PAT_MRT4530_26677C.1
atggagcagcaacctaagatggtgaccggatgggcggcaagagacgccaacgggctgctctctcctttctcttaccccctcagagctaagggagacgaagacgtcgttgtcaagatactgttctgtggcatttgccactctgatctttctactatcaagaacgagtggggcaacgccaagtatcccgtagtaccaggtcatgaaatcgttggggtcgtcgccgaggtcgggagcagcgtggcgaggttcgccgccggcgacactgtcggcgtcgggtacatcgccagcacatgccgcgcctgcgccaactgccgcgacggcttcgagaactactgcgcgggcctcgtgccgtccttcaacgccgcgctccccgacggcgctacggtgcacggcggcttctcggagctggccgtcgtcaaccagcggtacgtcgtccggatccccggcggcggcggcggcgcgtcgccggcgccgctcgaccgcttggcgccgctgctgtgcgccggcgtcacggtgtactgccccatgaggcggctcgggctggacaggccaggggtgcacctcggcgtggccgggctcggcggcctcggccatctcgctgtcaagttcggcaaggcgttcggcgtgaaggtgaccgtgatcagcaccagcccgtggaaggaagcggaggccgtggagaggcttggcgccgacgcgttcttgctcagcaccaacgccgaacagatgaaggcagctgcgggcaccatggatggcatcatcgacacggtctcggcggtgcacgacctgacgccactcatcacgctgctgcggactcacggccagctcgtcccggtcggatcgccgggaaagccggtgcaactagccctgtaccctctgcaatcaggcccatcaccagttggcccgcgaatagattgggctggaggcccaatcagagctagatgggccgtgctcatggtgtgcgatgtggcagatgggaagagcgtggccgggagcatgatcggcgggatgagggatacgcaggagatggtcgacttcgccgtcgagcacggcgtcgccgccgaggtggaggtcatcggcatggaggacgtcaacggcgcgatggagaggctgcagaagggagacgtgaggtacaggtttgtgatcgacgtagccaacacaatggcccgtgctcgttag

SEQ ID NO: 21404 - DNA, 1444 bp, Oryza sativa
  Clone ID: PAT_MRT4530_26678C.1
atggctacatgggaagttggcagaagtcgcaggctcatagcgaccagcgaagatttcgatcctgggtccgccactgtacagaggatagagatagagaggacatccggatttggcaaacgaccgaatgtcatccctgcaacatcgccacgctcatcaatcgcagagctgagagataaccagtatttgtacttcaaaaaaaatggtggatcctgcaacaggactgtcccagacctagcaaagaaggatgacttcttgtcccttgccaagatcaacggtgttgatatcttgggccagctccccatcaatgttttccattggcgcagccccacctcgcccacgctccatacccacagcggtccttgtggggacaccgattccactccctccaccgcgatttctgcctgcactccctccaccgcgtgtttactccgcccccgcgagatgattccgccgtccactactcgctcctcctcgcgtgtccccgccaccgctgcccccgccggagtcgaggccgtcaccagccgctgctgccccccgccggagccaaggtcgtcaccagccgctactgccccgcctgagccgaggtcatccccagccaccgccgcactccaccgctgctgcaagccgccgccgccgagcccctttccccgcgctatgccaccgccgccgctgtgctactcgctgccgcccctcctctcacgtgttcccccttccgctggactaccgcccgggacccaccgcagccacgcgcgtacgcgctgaccctgccgtgatgcctcaccaccacatcgctgcatcacgtagtcctctcacgataataacgctgccgcctattcctcccggacgacacatcctccaaccactgcgcacatcccccatccgcagtctgccgcacgcctcctctccccggaaatcctggcggggctgctccatctccgtctccaccgtaatcgatggcccagtgttccccttgggccctccactgctgatgccgccgtcccggacctctctgccgccaatccttccatcctggtccgctctgctgccgacacatccacccttgccgctgccacttctcccagcggaggtgaacaatgaatctgagaagaagtcggtggccttttgtcctttttccgtagcagcgatagcgtggataaattgagcgagggagattattttgtacagcttctcattgttgtttaatgtcatgtatagcatgctgcagatgatgggcacgatgtcccagatcggcatcggccttgggaaggacaatgatctgccaactgggcaatggcagatcacttgtgttctgggaagacagatggctggctgcatgcaaggaagatgcgccaaagagctggcgccggtggtcacgatcaagaacgggagaaacaaatctggtggaaccacgcatcgtcgtgacgcggaaacttctcatggctga

SEQ ID NO: 21405 - DNA, 1829 bp, Oryza sativa
  Clone ID: PAT_MRT4530_26679C.1
catctccctttgtccaaatcctgggctagggcctcctctggcaggcccctatcgggagcccacctcgcccgcccgcattgccgtccggttctgtctgtaccagaaaaacaatccccctcacgatgtagacctctcgccccaaacctcgccagactgaaggcacggagtccatcgcatcacacaacaatgccccccataaaagccctacggccccgcgccctggagccaccgcccaccgacgaactacaacccagctggatcatgccattctcagcaccgcctcccaactaccagaccctcaccgagcgaaggccccaaccctccctcctgccattcatggcagtaaaaggacatcctcgcaaataacagaaaatcccagagggaagctaacacctctgatagaacctctaacaggaacatatatctcaagcgtatgcagagtgaagtcacgaagtccattgtatgaaacaatgacatcacccctggaaataccaagtctcccagcagtggaatcatcgcacaccaagtccacgatgaaaccatcggtaatgccatgttccgattcaatctcctcctggtgtgaaatatccaacgtctcaaaggctatcaagtccatatcaagaaaggggcgagcaacacgactgaatctcctccacatgtcaatgcatgtctgcaggatagagatagagaggacatccggatttggcaaacgaccaaatgtcatccctgcaacatcgccacgctcatcaatcgcaggtcctccagtgccacacagttcaattgcagagctgagagataaccagtatttgtacttcaaaaaaaatggtggatcctgcaacaggactgtcccagacctagcaaagaaggatgacttcttgtcccttgccaaggtaaacaccttttgtccaaattttggactagagccaaaattagcaggctccaatggagagtccaccaaggcctccaacaatgcaatacggtagtgtgcattgaagaaaagcaattgtccttctgcggtagacctattaggcaaatgtacgagcaacttggggttgggatggactagtgcaccatcaaagcacacggctgcagagcaagttacgattgtcgccaacctgctggtcttgttccaatcgaccacgataccactgcattgcataatctccttcccatcaggtatcctggaggaaatgccgacgacggaacgagaagccttccggatcatgctattgtctgctacgcttgcgatgcccgtgacgctgacggtgcgagggcccgtaggcttcctcctgacagtgcaagggatgacagtacctgcaggttctggaagagcgcagatcctcctgaactctttatcccacttgagaaaatccatgggatcgccggatttagggaacggcggcaatctaggacgcggcggcggggtagggggatccgctcgtgcggccttacccttggctcccttcgtcgccggctggaccttccccttcttccgagccggccccggatcatccgacgcgacatcccccccagcgcccgtcgtcgcctccagccctagctccctcgatcgaaggcgggtaaccctcctccccgcagcagcacttgcatctcccgctggaccgccgccgactggagaggctcccgctgtgcccgcggctcccaccgccgccgccgccgtcgccttcatggtaccgctccgtttcggcggcatcctcgccggcgggacggatgatttgtgtgggggaggccggagcgaagcgcggagacgacaagggagccggtgggtgttttctcttctctctctcaactccagctcccgcagtcgccat

SEQ ID NO: 21406 - DNA, 453 bp, Oryza sativa
  Clone ID: PAT_MRT4530_2667C.1
atgagagtgagcaagcacacctgtgaagtcaggtatggtgagctgcaaggccttaataagcaggaaactgcagacaggtttggcaatgaacaagttcataaatggcgtcgtagttatgatattccacccccaaatggtgaaagtctagagatgtgtgcagagagagctgttgcttatttcaaggaacatgttgttcctcaactcacagctggaaagcatgtgatgattgctgcacatgggaattcactccgttcaattataatgcagcttgacaaattgacatctcaagaggtaatcagccttgagttgtcaacaggcattcctatgctttacattttcaaggaagggaagttcattagacggggaagcccagtaggaccttctgaggcaagcgtttgtgcctataccaggaaattggctcagtacagacagaagctagatagcatggtctag

SEQ ID NO: 21407 - DNA, 669 bp, Oryza sativa
  Clone ID: PAT_MRT4530_26680C.1
ccgggtcgacccaggcagccatacgtaacgatatttacacaggattaactgttccattgcttcagcatgtcgatcgatcgatcgatcattttcagtctacgccgggatgatgaaggaacaaggcgtagaatcccccaagaacagttgaggcggccatcacccaaataatcgcatccaccggccacggcatgagcgcggaaaccctccacgagaacaccgcggcgagcagcgccgtgacgacccatacgccggccttggcgccgcccctcgccggcgaattccgcggcgccgcctcgaagcggcggaggaacacgaagagcagcacaaggctgaggtacgacacgacgatgaacgacgtctcggtgatttctccgtgtgacgactgctcgtccaccatcgagcttgctgtgaggaggataaacccgatgcaggtcgtagcagcttctgatgccatgaaacggatcggagtaaagagtgacgtcgtctggacgtccgatatattatatagccggcgacaaatactggaaatgggatcatggtttgttagcatgcatttataggccgcgcttgcctgcgcgtcgggttgaagttaggtcggtgcatgtatggccgagtttagtttcaaactcccaacttctccatcatatcaaaacttttctacacacaccc

SEQ ID NO: 21408 - DNA, 912 bp, Oryza sativa
  Clone ID: PAT_MRT4530_26681C.1
tcaggtcggcagcgggcgcagcagcgatggccgagcgcggatgcgggcggcgggcgagcgcgggggcaggcgaagcggcggcgtcagcgggcgagcgcggctgcggcggcggcggtgagctcgcggcagacgaagcaggcagcggcgtgtcgggtgcgtccgggcggtggcgcgacgacggtggtggccatgcggggcgtaggcggcgcgcgggcacggctcggccgatgatgtgcggcgggacagcgcgcacgagcaaagcagacgggagatggggagcgcgacgccgcgacgggcgaagcaagcaggggcagcggttccaccccttccgcggccgcatggctgcctccggctggcgccggacagcaagaccatgcccatcgcggcgagctcgcggccccgtgctggagcatcgcgggtactttgccgccgcagcatcgcagcaagcatgcacgcgctggccggctcctctgctcgcctcgggcaagtccgtctccgccgggccgcgcgcagcctccgctcccgcggactccgccatctccggcgctggtctcgagacgccgccaccgcgccgggtttcggtcgagcgaagtgggctcgttcatgcgacgcgttgctcggcgtcctcgccagcccctgcagcgtggccgcgccctccgcacggggccccgccgccttcgccgcgcccactgcctccgccggccctgccgtctcaacacgcccgcgcatggccccgccgctgctccgtcgcctccgccggtcgcccaactccggcggcggccgccccctgctccgcttcgcgaggagaatcgcgtcgacctgctccgcttcgtggagcggcgtgagcgtcggccgtgcgtgtccaccaactcccgcgtcatcccatccgcctctcgccaccggcgatgtcat

SEQ ID NO: 21409 - DNA, 282 bp, Oryza sativa
  Clone ID: PAT_MRT4530_26682C.1
tcggaccacggacttctgaactgtggcgacgatgcctagagtgggaagcccacagccgccgctgcccccgggctgacgctcgccttcctcaccgctggcggcgacaggacgctcggctgcccacctcacttgcttgacaaggtgcacaccactgacctgtcccttgcacgcacgctgctgtacggactcacgcgacgtacggaacacggacttgaccttggccgtgtcaccgtttcctgacgacttgtgactttaccgacctgactacttacgcttgactgt

SEQ ID NO: 21410 - DNA, 429 bp, Oryza sativa
  unsure (1)..(429): unsure at all n locations
  Clone ID: PAT_MRT4530_26683C.1
tatttacggaaggaagcgccagatggacaggaggctgattttgatcaaaggccagacctatttatgagtacaataagagaatgctagtgtgcatgcccatttaggccgacactggtatcacaagggatgatctggaatcagcagcatatactttaatacttcctctaataggaagagctcattgacatgggtatcaggtgcgaaacactaattatccacgtgttgcaagcataaactggatacctgtatagaccttgtgtgctgttgctgatgccctcattctaaacttttactagctagcgcgccagacatgagactagatgaactaccaaactacgaacagcttattctcctttttgatgaattgattgagcaccagcatntgatgcactatcagaatctatggtgctctaaatgctggacaaaaac

SEQ ID NO: 21411 - DNA, 372 bp, Oryza sativa
  unsure (1)..(372): unsure at all n locations
  Clone ID: PAT_MRT4530_26684C.1
ngaagaaaggaagattgacggattcgggagaaagaagaaggagaagaaaaagaaaaagaaagactgacagtaaagactattgtcttttggatggcaacctatggtatttcgagaatcgtataatcaggttgcctatcttggattcatttgcgttggagcaagagtttaattggagtttttgccgaagctgggagttcaatcacataagttagttccctttaaacctaatcttcaagtctagtgtagttagatggtttaattctatagtaaaatggcagagttgagtcatcgtatagcctctgctgtaatagttagccacaaacttgtgaatgtcctattattttatataaagatatctcctttgaagtcttt

SEQ ID NO: 21412 - DNA, 532 bp, Oryza sativa
  Clone ID: PAT_MRT4530_26685C.1
cttctgaagatcagcagctgtgttaggatcacagttgcaggagtcaggaatgtgatcgaatcctgtatggcccttgagcacctagatgttcggtcatgccctcaggtcacaaggcagagctgtgagcaagctgggctgcaatttcctggtagctgcaaggtaaactttgaaggcagcttatctgagtctgatccatctgttgctatattcttttaggacgatcaatagcgtcccataattcttttctagatttcgccgaagaacttgagaactcatcatgtcaaaatgtacctgatattgtggttggttttgggcgtgtgttgcacaatttgaggtagaactggatgatgccgtggatgaaaaaatgtgcaggtgtgcactgttcaattctcatgtgctgtacctgtagtcctgtactatgtagaaagtagcccactacagattcttggaatctgttggttagtacttagtagttagcttttgagaatatagagaaactgagtttttcagctcccaaaaaaaaaaaaaaaca

SEQ ID NO: 21413 - DNA, 396 bp, Oryza sativa
  unsure (1)..(396): unsure at all n locations
  Clone ID: PAT_MRT4530_26686C.1
caagaattcagaacataccaggaggtcagctgctcaactatgccgatcagaagacagcaagttctgcctctagctctcattttcatgctgatcttcagcaccacaatcaccatcagtcatgcatccagattgctgggagcgagatcgcagccacgacagggaagcacggtgttcttaacttcagcaaagccaggtgcatctggatgcaccaatgatcctaacaatcctggaagaagatgccaaacaccatgagagctttgcaacatgtacatgtacaatattcattttttttttctttcttttctgttcttttcctgttcttctagaggttattcttaaggagcccttttaaccctncacagccaattcatttgttctttttgtacagaagttttg

SEQ ID NO: 21414 - DNA, 1470 bp, Oryza sativa
  Clone ID: PAT_MRT4530_26687C.1
atggacgacgatcctacctctgtcaactacgagttgaggactatggggatgcgcggtgatgacgatgatgatgtggaggaggatcgtgtggaggtgttcggcaatacctccgacatcccgatccatgtgaatgtcgatgacgacgacccgccggtcgacgacagtggcaatgggacgccgactggctctagtgcgacttgtaccaacaagaagaccaaaacctccaaggatcgtcgttctgttattattgatcgtctcaattctgctagctctattgctttgacatctgatatatggtctggtcatgctaaggaagattatttgagtgttgtagctcactttgttaattctgattggcaattagaaaagagggtcttgggtcttaggcttattgatgagtcacatactggtgctaatattgctgagcgtgtgattgctgttgctgaagaatatggtattactgataaggttttctctattacattagacaatgcttctgctaattctaaagctatgatcacccttactcctgctctgtttggttatattggcccttccactggtaagaaaaggactgcatgggggaagatttttggttctgttgttgctgttgggcttggtgctggtaatgcaggtgccagtccaggtgctggtaatgctggtgccagtccaggtgctgggcttggtgctggtaatgctggtgccagtccaggtgctgggcttggtgctggttcattatccaggatgacatctgctactgctttgcttcaggcagcttcttcaactgctaatctcaattcttctgaactgtctgcatatcttgacagtgacactgtcaaccaatatgatgatgacttcaatatccttagttggtggcaacagcacaaactaacttatcctgttctttcaatcttagctaaagatgttatgactgttcctgtttctactatatcgtccgagtctacttttagcttaactggcaggatcatcgaggaccgtcggcggcgtctaaaccctaggctggtggaaattctggcaatgatcaaggactgggagctagcagatgcaaaaagtcagcatactactgagaatgtggagcttcaaaatgcttatgagaatatgtatcttgatgatgaaattgatgggttttttgccagggcgtgcctgggccggcacgggcacgatgggcttgccgggccgtcgggccagcccggcacggcccgaggctacttgggccgtgcctgggccgtggttgtagcccgtgggctggcacggcacggcacggcttgttcgtcgggccgtgccggcccgactgacctcggcccaggcccggagagtgttgaagagaagcccttgtcgacggaccctgatgacgtcagcggtgacgtcatctccggcggcggctcggcggctcggacgcgcaagctcgccggcgaacgacggcgcttcggcacgaacggagggcactag

SEQ ID NO: 21415 - DNA, 1995 bp, Oryza sativa
  Clone ID: PAT_MRT4530_26688C.1
atggacgacgatcctacctctgtcaactacaagttgaggactatggggatgcgcggtgatgacgatgatgatgttgaggaggatcgtgtggaggtattcggcaatacctccgacatcccgatccatgtgaatgtcgatgacgacgacccgccggtcgacgatggtggcaatgggacgccgactggctctagtgcgacttgtaccaacaagaagaccaaaacctccaaggtatgggatgactttgaggaactttatgaaacgaccaatggtaatagggttcgagtctttgctaaatgcaattactgtcataaaactttgagtgctcgttcttctgctggcactggacatttgcttaggcatattaagtcatgcaaacctagaaagcttgggtctaatgctttgcctcagtccatgcttagatttagtgcagatggttctgttattccatgggaatatagtcctgaagttgctaggtttgaattgtgtagattgattgctagagaggatcttccaatcagttttggtcaatctcctgcttttgtgaactatattaaggctgctcataaccctagatttgttcctgtctctagacaaactactaccagagatttttataagttgtttaaggatcgtcgttctgttattattgatcgtctcaattctgctagctctattgctttgacatctgatacatggtctggtcatgctaaggaagattatttgagtgttgtagctcactttgttaattctgattggcaattagaaaagagggtcttgggtcttaggcttattgatgagtcacatactggtgctaatattgctgagcgtgtgattgctgttgctgaagaatatggtattactgataaggttttctctattacattagataatgcttctgctaattctaaagctatggacacccttactcctgctctgtctggttatattggtgatttatttttgcatcaacgctgtgcatgtcatatcatcaatttgattgttaaggctggacttgacaagttcaagcccatgctaaatgacattagagctgccatttcattcttgaatgcatctaatcagcgcattgctacatataaaaatgtttgcattgctgcgggttatcgtcctcagattgctggacatctaaacacatatggcaatgttcaaaacattgcaaatgttgttggtcccatgaaaactaagtttatgaactactggtctaaaattccaattctttattcatttgcatttatcttggaccctagggccaagattagggggtttagtaaagtgcttcagattatggctcaactcattggtgatgattactctgcttatttaacaactgttagagcttcattgtctgatacttttgctaagtatgaaagaaagtttggttctgttagattgcatagttccactattccaggcccttccactggtaagaaaaggactgcatgggggaagatttttggttctgttgttgctgctgggcttggtgctggtaatgcaggtgccagtccaggtgctggtaatgctggtgccagtccaggtgctgggcttggtgctggttcattatccaggatgacatctgctactgctttgcttcaggcagcttcttcaactgctaatctcaattcttctgaactgtctgcatatcttgacagtgacactgtcaaccaatatgatgatgacttcaatatccttagttggtggcaacagcacaaactaacttatcctgttctttcaatcttagctaaagatgttatgactgttcctgtttctactatatcgtccgagtctacttttagcttaactggcaggatcatcgaggaccgtcggcggcgtctaaaccctaggctggtggaaattctggcagtgatcaaggactgggagctagcatatgcaaaaagtcagcatactactgagaatgtggagcttcaaaatgcttatgagaatatgtatcttgatgatgaaattgatgtaaacccttga

SEQ ID NO: 21416 - DNA, 1947 bp, Oryza sativa
  Clone ID: PAT_MRT4530_26689C.1
atggacgacaatcctacctccgtcaactacgagttgaggactatggggatgcacagtgatgacgatgatgatgtggaggaggatcgtgtggaggtgttcggcaatacctccgacatcccgatccatgtgaatgtcgatgatgacgacccgccggtcgacgacagtggcaatgggatgccgactggctctagtgcgacttgtaccaacaagaagaccaaaacctccaaggtatgggatgactttgaggaactttatgaaacgaccattggaaatagggttcaagtctctgctaaatgcaattactatcataaaactttgagtgctcgttcttctgctggcactggacatttgcttaggcatattaagtcatgcaaacctagaaagcttgggtctaatgctttgcctcagtccatgcttagatttagtgcagatggttctgttattccatgggaatatagtcctgaagttgctagctctattgctttgacatctgatatatggtctggtcatgctaaggaagattatttgagtgttgtagctcactttgttaattctgattggcaattagaaaagagggtcttgggtcttaggctcattgatgagtcacatactggtgctaatattgctgagcgtgtgattgctgttgctgaagaatatggtattactgataaggctggacttgacaagttcaagcccatgctaaatgacattagagctgccatttcattcttgaatgcatctaatcagcgtattgctacatataaaaatgtttgcattgctgcgggttatcgtcctcgtatgtttggtttggacatggatgttagatggaattcaacttatctaatgcttaagcatctcataccacatagggaaccattcatagtatttattagtacacaacatccttttgttaatggccatccattactcacagacttacattgggcatgtgctgaatctgttttgtgtttccttgaacaattttatgattcaactgttgttttgtctggtgtttattatccaacatctccattaatcatgtatcacattttaaagattgctggacatctaaacacatatggcaatgttcaaaaccttgcaaatgttgttggtcccatgaaaactaagtttatgaactactggtctaaaattccaattctttattcatttgcatttatcttggaccctagggccaagattagggggtttagtaaagtgcttcagattatggctcaactcattggtgatgattactctgcttatttaacaactgttagggcttcattgtctgatacttttgctaagtatgaaagaaagtttggttctgttggattgcgtagttccactattctaggcccttccactagtaagaaaaggactgcatgggggaagatttttggttctggtaatgcaggtgccagtctaggtgctgggcttggtgctggtaatgcaggtgctagtccaggtgctgggcttggtgctggtaatgctggtgtcagtccaggtgctgggcttggtgctggttcattatttaggatgacatctgctactgctttgcttcaggcagcttcttcaactgctaatctcaattcttctgaactgtctgcatatcttgacagtgacactgtcaaccaatatgatgatgacttcaatatccttagctggtggcaacaacacaaactaacttatcctgttctttcaatcttagctaaagatgttatgactgttcctatttctactatatcgtccgagtctacttttagcttaactggcaggatcatcgaggaccgtcggcggcgtctaaaccctaggctggtggaaattctagcagtgatcaaggactgggagctagcagatgcaaaaggtcagcatactactgagaatgtggagcttcaaaatgcttatgagaatatgtatcttgatgatgaaattgatgtaaacccttga

SEQ ID NO: 21417 - DNA, 324 bp, Oryza sativa
  Clone ID: PAT_MRT4530_2668C.1
atggcaaacttaccacactcccttgtcaggaacatagtctcgactagcaccacattgcatcccgcgctgcaacaggaaagaggaagaggaggaggcgagggagcgcgttctcgtgtcagatatgctccatccgaggagcaagaggatgcagcggtggagcatgtgttcgtgctagagatggggctccagctaaggagaagaaaggaagggaaagatggggagtggagaggaaagataaggggaaattttgggcactggatcaatattaccgcaggtggagatgttactgtctgcctgaaagttggaggagggctcgtctgctaa

SEQ ID NO: 21418 - DNA, 2067 bp, Oryza sativa
  Clone ID: PAT_MRT4530_26690C.1
atggacgacgatcctacctctgtcaactacgagttgaggactatggggatgcgcggtgatgacgatgatgatgttgaggaggatcgtgtggaggtattcggcaatacctccgacatcccgatccatgtgaatgtcgatgacgacgacccgccggttgacgacaaaggcaatgggacgccgactggctctagtgcgacttgtaccaacaagaagaccaaaacctccaaggtatgggatgactttgaggaactttatgaaacgaccaatggtaatagggttcgagtctttgctaaatgcaattactgtcataaaactttgagtgctcgttcttctgctggcactggacatttgcttaggcatattaagtcatgcaaacctagaaagcttgggtctaatgctttgcctcagtccatgcttagatttagtgcagatggttctgttattccatgggaatatagtcctgaagttgctaggtttgaattgtgtagattgattgctagagaggatcttccaatcagttttggtcaatctcctgcttttgtgaactatattaaggctgctcataaccctagatttgttcctgtctctagacaaactactaccagagatttttataagttgtttaaggatcgtcgttctgttattattgatcgtctcaattctgctagctctattgctttgacatctgatatatggtctggtcatgctaaggaagattatttgagtgttgtagctcactttgttaattctgattggcaattagaaaagagggtcttgggtcttaggcttattgatgagtcacatactggtgctaatattgctgagcgtgtgattgctgttgctgaagaatatggtattactgataaggttttctctattacattagataatgcttatgctaattctaaagctatggacacccttactcctgctctgtctggttatattggtgatttatttttgcatcaacgctgtgcatgtcatatcatcaatttgattgttaaggctggacttgacaagttcaagcccatgctaaatgacattagagctgccatttcattcttgaatgcatctaatcagctcattgctacatataaaaatgtttgcattgctgctggttatcgtcctcgtatgtttggtttggacatggatgttagatggaattcaacttatctaatgcttaagcatctcataccacatagggaaccattcacagtatttattagtacacaacatccttttgttaatgaccatccattactcacagacttacattgggcatgtgctgaatctgttttgtgtttcctcgaacaattttatgattcaactgttgttttgtctggtgtttattatccaacatctccattaatcatgcatcacattttagagattgctagacatctaaacacatatggcaatgttcaaaacattgcaaatgttgttggtcccatgaaaactaagtttatgaactactggtctaaaattccaattctttattcatttgcatttatcttggaccctagggccaagattagggggtttagtaaagtgcttcagattatggctcaactcattggtgatgattactctgcttatttaacaactgttagagcttcattgtctgatacttttgctaagtatgaaagaaagtttggttctgttagattgcatagttccactattccaggcccttccactggtaagaaaaggactgcatgggggaagatttttggttctgttgttgctgctgggcttggtgctggtaatgcaggtgccagtccaggtgctggtaatgctggtgccagtccaggtgctgggcttggtgctgctaaagatgttatgactgttcctgtttctactatatcgtccgagtctacttttagcttaactggcaggatcatcgaggaccgtcggcggcgtctaaaccctaggctggtggaaattctggcagtgatcaaggactgggagctagcagatgcaaaaagtcagcatactactgagaatgtggagcttcaaaatgcttatgagaatatgtatcttgatgatgaaattgatgtaaacccttga

SEQ ID NO: 21419 - DNA, 606 bp, Oryza sativa
  unsure (1)..(606): unsure at all n locations
  Clone ID: PAT_MRT4530_26691C.1
gatccgaaaaattcccattaattaactacattaaatacacgcaagagatgaaccttcaacaaggccaatcttacactataattcagacccatggtgctgactggattgcgtacatataaaacattatgatttagattgcagtcaactgatcatgtagaggaacatccttattggaagcacttgatattgcaatctcgcatcccgaaaccctccatgacaagggctcggctaggtgaatctaaggacgcaatggaggcattctgtgactctgaatctgccgccccatgagaagggggcaaccgatgcaggcataggtaacgtgttggacagattgctgacaaactaggactgaaatatgcaggaactgctgtcatccgtcaagttaaccgagacaaggtcctgcttagcggatcaacgatggccttgacatcgncattagactcctacataattgcaggcttaagctgggcatacttggcgnggcttcttaagcctaacagaaagagcaacatcggaaacatcagactgcgggaacacggaaagtcattccagacaggtatacatttgaggtcatgaagcatcttggcgacagccttgttagtttca

SEQ ID NO: 21420 - DNA, 1728 bp, Oryza sativa
  Clone ID: PAT_MRT4530_26692C.1
tcaagggtttacatcaatttcatcatcaagatacatattctcataagcattttgaagctccacattctcagtagtatgctgactttttgcatctgctagctcccagtccttgatcactgccagaatttccaccagcctagggtttagacgccgccgacggtcctcgatgatcctgccagttaagctaaaagtagactcggacgatatagtagaaacaggaacagtcataacatctttagctaagattgaaagaacaggataagttagtttgtgctgttgccaccaactaaggatattgaagtcatcatcatattggttgacagtgtcactgtcaagatatgcagacagttcagaagaattgagattagcagttgaagaagctgcctgaagcaaagcggtagcagatgtcatcctggataatgaaccagcaccaagcccagcacctggaggtggcaccagcattaccagcacctggactggcacctgcattaccagcacctggactggcaccagtggaagggcctggaatagtggaactatgcaatctaacagaaccaaactttctttcatacttagcaaaagtatcaaacaatgaagctgaggacgataacccgcagcaatgcaaacatttttatatgtagcaatgcgctgattagatgcattcaagaatgaaatggcagctctaatgtcatttagcatgggcttgaacttgtcaagtccagccttaacaatcaaattgatgatatgacatgcacagcgttgatgcaaaaataaatcaccaatataaccagacagagcaggagtaagggtgatcatagctttagaattagcagaagcattgtctaatgtaatagagaaaaccttatcagtaataccatattcttcaacaacagcaatcacacgctcagcaatattagcaccagtatgtgactcatcaataagcctaagacccaagaccctcttttctaattgccaatcagaattaacaaagtgagctacaacactcaaataatcttccttagcatgaccagaccatatatcagatgtcaaagcaatagagctagcagaattgagacgatcaataataacagaacgacgatccttaaacaacttataaaaatctctggtagtagtttgtctagagacaggaacaaatctagggttatgagcagccttaatatagttcacaaaagcaggagattgaccaaaactgattggaagatcctctctagcaatcaatctacacaattcaaacctagcatcttcaggactatattcccatggaataacagaaccatctgcactaaatctaagcatggactgaggcaaagcattagacccaagctttctaggtttgcatgacttaatatgcctaagcaaatgtccagtgccagcagaagaacgagcactcaaagttttatgacagtaattgcatttagcagagactcgaaccctattaccattggtcgtttcataaagttcctcaaagtcatcccataccttggaggttttggtcttcttgttggtacaagtcgcactagagccagtcggcgtcccattgccactgtcgtcgaccggcgggtcgtcgtcatcgacattcacatggatcgggatgtcggaggtattgccgaacacctccacacgatcctcctccacatcatcatcgtcatcaccgcgcatccccatagtcctcaactcgtagttgacagaggtaggatcgtcgtccat

SEQ ID NO: 21421 - DNA, 1710 bp, Oryza sativa
  Clone ID: PAT_MRT4530_26693C.1
atggaagatgatcctagctctgtcaactacgagttgaagattatggggatgcgcagtgatgacgatgatgatgtggaggaggatcgtgtgaaggtgttcggcaatacctccgatagcccgatctgtgtgaatgtcgacgacgacgacctgccggttgatgacagtggcaatgggacgtcgactggctctagtgccactgctaccaacaagaagaccaaaacctccaaggtatgggatgactttgaggaactttatgacacgaccaatggtaataaggttcgagtctctgctaaatgcaattactgtcataaaactttgagtgttcgttcttctgctggcactggacatttgctcaggcatattaagtcatgcaaacctagaaggcttgggtctaatgctttgcctcagtccatgcttagatttaatgcagatggttttgttatttcatgggaatatagtcctgaagttgctaggtttgaattgtgtagattgattgctagagaggatcttccaatttgttttggtcaatctcctgcttttgtgaactatattaaggctgctcataaccctagatttgttcctgtctctagacaaactactgccaaagattttcataagttgtttaaggatcgttgttctgttattgttgagcgtctcaagtctactagctctattgctttgacatttgatatatggtctgaaaagagggtcttgggtcttaagctcattgatgtgtcacatactggtgctaatattgctgagcgtgtgattgttgttgctgaagaatatggtattactgataagttttatgattcaactgttgttttgtctggtgtttattatccaacatctctattaatcatgcatcacattttagaggttgctggacatctaaacacttatggcaatgttgaaaaccttgcaaatgttgttggtcccatgaaagataagttcatgacctactggtctaaaattccaattctttattcatttgtatttatcttggatcctagggccaagatcagggggtttagtaaagttcttcagattatggctcaactcattggtgatgattactctgcttatttaactactgttagggctgcattgtctgatacttttgctaagtatgaaagtaagtttggttctattagattgcatagttccagtattctaggcccttccactggtaaggaaaggactgcacgggggaagatttttggttctgttgctgctggtgccagtccaggtgctgggcttggtgctggtgaaagtccaggtgctagttcattatctaggatgacatctgctactactttgcttcaggcagcttcttcaactgctaatctcaatgcttctaaactgtctacatatcttgacagtgacacagtcaaccaatatgatgatgacttcaatatccttagctggtggcaacagcacaaactaacttatcatgttctttcaatcttagctaaagatgttatgactattcctgtttctactatatcgtccgagtctacttttagcttaactggcaggatcatcgaggaccgtcggcagcgtctaaaccctaggctggtggaaattctggcagtgctcaaggactgggagctagcagatgcaaaaggtcagcataccaccgagaatatggagcttcaaaatgcttatgagaatatgtatcttgatgatgaaattgatgtaaacccttga

SEQ ID NO: 21422 - DNA, 4950 bp, Oryza sativa
  Clone ID: PAT_MRT4530_26694C.1
atggatcaaattgttgcttcagcgaggaatgcgacccaggccgggaagcagttcgcctccagctcctccgggcagctggcgaggatcgaggtcctagtgacagtgggctacctcctctcgtccatccagaacgagctattcgtcgtctgggcctgcttcctcctcctcctcggcaccgccgacaccatgacggcgttcagcttcaacgacagcagccagcagacgaggtccatgatgaaccaggccctctatgtcgtctacctcctcttcctcatcctctactacaaaggccagctccgtggcaccttcctcgtcagcctcttcctcctctggagctatagttggccatatgggccgcccggcacggcacggcccaggcacggccgggcctgggccgaggtcagtcgggccggcacggcccgacgaacaagccgtgccgtgccgtgccagcccacgggctacaaccacggcccaggcacggcccaagtagcctcgggccgtgccgggctggcccgacggcccggctagcccattgtgcccgtgccggcctaggcacgccctcgtgagaaaaccatcaatttcatcatcaagatacatattctcataagcattttgaagctccacattctcagtagtatgctgactttttgcatctgctagctcccagtccttgatcactgccagaatttccaccagcctatggtttagacgccgccgacggtcctcgatgatcctgccagttaagctaaaagtagactcggacgatatagtagaaacaggaacagtcataacatctttagctaagattgaaagaacatgataagttagtttgtgctgttgccaccaactaaggatattgaagtcatcatcatattggttgacagtgtcactgtcaagatatgcagacagttcagaaggattgagattagcagttgaagaagctgcctgaagcaaagcagtagcagatgtcatcctggataatgaaccagcaccaagtccagatcctgcactggcaccagcatcaccaagtccagaacctggactggcactagcaccaaatccagaacctggactggcattaccagcaccaagcccagcacctgaactggcaccagcattaccagcacctggactggcacctgcattaccagcaccaagactggaaccacaagcagcagcaccaaaaattttcccccaagctgtctttttcttaccagtggaagggcctggaatagtggaactatgcaatctaacagaaccaaactttctttcatacttagcaaaagtatcagacaatgaagctctaacagttgttaaataagcagagtaatcatcaccaatgagttgagccataatctgaagcactttactaaaccccctaatcttggccctagggtccaagataaatgcaaatgaataaagaattggaattttagaccagtagttcataaacttagttttcatgggaccaacaacatttgcaaggttttgaacattgccatatgtgtttagatgtccagcaatctctaaaatgtgatgcatgattaatggagatgttggataataaacaccagacaaaacaacagttgaatcataaaattgttcaaggaaacacaaaacagattcagcacatgcccaatgtaagtctgtgagtaatggatggtcattaacaaaaggatgttgtgtactaataaatactgtgaatggttccctatgtggtatgagatgcttaagcattagataagttgaattccatctaacatccatgtccaaaccaaacatacgaggacgataacccgcagcaatgcaaacatttttatatgtagcaatgcgctgattagatgcattcaagaatgaaatggcagctctaatgtcatttagcatgggcttgaacttgtcaagtccagccttaacaatcaaattgatgatatgacatgcacagcgttgatgcaaaaataaatcaccaatataaccagacagagcaggagtaagggtgtccatagctttagaattagcagaagcattgtctaatgtaatagagaaaaccttatcagtaataccatattcttcagcaacagcaatcacacgctcagcaatattagcaccagtatgtgactcatcaataagcctaagacccaagaccctcttttctaattgccaatcagaactaacaaagtgatctacaacactcaaataatcttccttagcatgaccagaccatatatcagatgtcaaagcaatagagctagcagaattgagacgatcaataataacagaacgacgatccttaaacaacttataaaaatctctggtagtagtttgtctagagacaggaacaaatctagggttatgagcaaccttaatatagttcacaaaagcaggagattgaccaaaactgattggaagatcctctctagcaatcaatctacacaattcaaacctagcaacttcaggactatattcccatggaataacagaaccatctgcactaaatctaagcatggactgaggcaaagcattagacccaagctttctaggtttgcatgacttaatatgcctaagcaaatgtccagtgccagcagaagaacgagcactcaaagttttatgacagtaattgcatttagcagagactcgaaccctattaccattggtcgtttcataaagttcctcaaagtcatcccataccttggatgatcttggtcgcttgttagtagcactggagtcggtgccagacggcacgcctgagccaccatcaccgtcaccgccaccggtaccgtccacgtccggctccgtctccggctgcgacccatcgaagtgaggaggtgacgaagtgattccgaacacctgcacgcgttcctcctctaagtcatcttcgtcatcacccatccatcgcaggcactccggttcctcaacggtggctgccgcctgccgctcagcgacctgcgcatccggagcaccggagttgccgttgatgatagagatccacagatctacgagaagacaagaggagagactagatttggggggtggatgagtggatctgagtatcgtgccgacctctttcgtgctgggccgtgccggcccaccgtgccgagggagcggcccaagcacggcccggctgttgggccgggccggcacgggcacgaccccagtcgggccgtgccgtgcctgggccgggccaatttgtcgtgccttgggccgggccgtcgggccccgggccttatggccatctatagcacgtccccagaaagccacgcattcgccggcgcgcgccatctctttccatcccttcggctcgtactcgtagtcggcggattcttttcttggaacatcgtcgtcgtcgtcgtcggattcctcgacgtcgacgaaggcgtcgctgaaaccgaagaagtcgtcgtcgctgctgcggttggactgtacggaggcggcatcatcgcctttgttctccgcgtcgtcggagttggattcctcgacaagggcgtcgctgcggctgccatcttcgacgggaacggagtagccgtcggaatcgtcggcatcgtcgtcgtcgtcgtcgccgccgtcgctgaagctggagtcggcgccgtgcgcggcgacgtcgctgtgcaggtcgatgcggcgccacagcgcgggctcgttcgcgcgcggcgcggcgccacgaggagcacgccaggccggcgccccggaggatctcctcctagagttcagatcgagttctcctgatctgcgccagtcctcttgcatatcagagttcccattctcaggttcattttcatcattaaggaaatcttcagatggatcttcatcgtccctttgagcatttccccatccatcttcaccttgctcttgcatcatctcatgactagggccatcttcgccttgggacgctgcagcatgggccctcaaagggccatgacctatcatctccgagtgcgcttgggcctccgctcgagcttgttcagccattgccatacgcatcttagcttcagcagcctcacgacctgctttctcccttgattctatctctgctcttagccccatcatagcttgcttttcctccattaacaaagcctgctccagcatgagccgctcctctgatctgaactcgccgatggctcttttcttggtcattatattgtacgccaaaacttgtttctcaaaagtagttgtgaactcagcaattttgaccagaatgttatgatcccattgctgcaggcgcgaaggaatctgtccagttgtatcactgtcaaggattctgtcatcttcttcagcctcatagtcagcaaccacatggtagggtagtagcctgttcacggcatcctcgatggactggaagggtgtcttgatgtcggggttgcacacctgcatcacgtcctgcagagccatctcaacctcagggctctgcacccttgccacggctgccactgccgcctgctgctgctgctggagggacgcccacgactgcaacagcgacgggccccaggagtggatctgctgctgcggcggtggtggctgctggggcaggggttgctggaagcggatcgggccaggcaggggcaggtgggcatcgatgttggaggggaagaaggacatggcctgctgcgacagctgctgcggcgtcggtgtgtacccttgcccctgcgcctgcgcctgcgcctgggcctgctgcatgaggaagatctggcactggtgcagctggttctgagccacggtggatgccgaggaggtcggggtggagtccgggccaggcaggggcaggtgggcatcgatgttggaggggaagaaggacatggcctgctgcgacagctgctgcagcgtcggtgtgtgcccttgcccctgcgcctgcgcctgggcctgggcctgctgcatgaggaagatctggcgctggtgcagctggttctgcgccacggtggatgccgaggaggtcggggtggagttcgcggcggcgtccat

SEQ ID NO: 21423 - DNA, 2682 bp, Oryza sativa
  Clone ID: PAT_MRT4530_26695C.1
tcaagggtttacatcaatttcatcatcaagatacatattctcataagcattttgaagctccacattctcagtagtatgctgactttttgcatctgctagctcccagtccttgatcactgccagaatttccaccagcctagggtttagacgccgccgacggtcctcgatgatcctgccagttaagctaaaagtagactcggacgatatagtagaaacaggaacagtcataacatctttagctaagattgaaagaacaggataagttagtttgtgctgttgccaccaactaaggatattgaagtcatcatcatattggttgacagtgtcactgtcaagatatgcagacagttcagaagaattgagattagcagttgaagaagctgcctgaagcaaagcagtagcagatgtcatcctggataatgaaccaacaccaagcccagcacctggactggcaccagcattaccagcaccaagcccagcacctggactggcaccagcattaccagcacctggactggcacctgcattaccagcaccaagcccagcagcaacaacagaaccaaaaatcttcccccatgcagtccttttcttaccagtggaagggcctggaatagtggaactatgcaatctaacagaaccaaactttctttcatacttagcaaaagtatcaaacaatgaagctctaacagttgttaaataagcagaataatcatcaccaatgagttgagccataatctgaagcactttactaaaccccctaatcttggccctagggtccaagataaatgcaaatgaataaagaattggaattttagaccaatagttcataaacttagttttcatgggaccaacaacatttgcgatgttttgaacattgccatatgtgtttagatgtccagcaatctctaaaatgtgatgcatgattaatggagatgttggataataaacaccagacaaaacaacagttgaatcataaaattgttcaaggaaacacaaaacagattcagcacatgtccaatgtaagtctgtgagtaatggatggtcattaacaaaaggatgttgtgtactaataaatactgtgaatggttccctatgtggtatgagatgcttaagcattagataagttgaattccatctaacatccatgtccaaaccaaacatacgaggacgataacccgcagcaatgcaaacatttttatatgtagcaatgcgctgattagatgcattcaagaatgaaatggcagctctaatgtcatttagcatgggcttgaacttgtcaagtccagccttaacaatcaaattgatgatatgacatgcccagcgttgatgcaaaaataaatcaccaatataaccagacagagcaggagtaagggtgatcatagctttagaattagcagaagcattgtctaatgtaatagagaaaaccttatcagtaataccatattcttcagcaacagcaatcacacgctcagcaatattagcaccagtatgtgactcatcaataagcctaagacccaagaccctcttttctaattgccaatcagaattaacaaagtgagctacaacactcaaataatcttccttagcatgaccagaccatatatcagatgtcaaagcaatagagctagcagaattgagacgatcaataataacagaacgacgatccttaaacaacttataaaaatctctggtagtagtttgtctagagacaggaacaaatctagggttatgagcagccttaatatagttcacaaaagcaggagattgaccaaaactgattggaagatcctctctagcaatcaatctacacaattcaaacctagcatcttcaggactatattcccatggaataacagaaccatttgcactaaatctaagcatggactgaggcaaagcattagacccaagctttctaggtttgcatgacttaatatgcctaagcaaatgtccagtgccagcagaagaacgagcactcaaagttttatgacagtaattgcatttagtagagactcgaaccctattaccattggtcgtttcataaagttcctcaaagtcatcccataccttggaggttttggtcttcttgttggtacaagtcgcactagagccagtcgacgtcccattgccactgtcgtcgaccggcgggtcgtcgtcatcgacattcacatggatcgggatgtcggaggtattgccgaacacctccacacgatcctcctccacatcatcatcgtcatcaccgcgcatccccatagtcctcaactgcgcagccggagcaccggagttgccgttgaagacgataggctcacggatctcccacacttccatggccgatgccgtggcggtggccgggtcagtggagatgccggtgaatctgctcccggcgctccactccgcggacactagcgctgcagcagcgtccactacggcgccctgcagcagcgcgacgagcagcggcatccgtgtgtcgtcggcgagcagcggtcctccatgcccatcctcctccgccgccagcccaccaccacacgttgtcaggctgtcgtcatcgccggcgccgcggcggcgttgatgacggcgcccttcccgtacttcatactcgtcgcgctggaggtcgggggactcttccgcggacttctgctgctgctgctgtacagcctctaccccgtgctgctcctgctcggccat

SEQ ID NO: 21424 - DNA, 717 bp, Oryza sativa
  Clone ID: PAT_MRT4530_26696C.1
atggtggagaggaagatggagaggagctgccacgcctgggggctcacctcggcagggtgcgaggcgaggaagcgcacggcgaggccgaccgcgagggacacgaggagaggaacgagcttcgcaccggtgggggccaggctgtccgcctcaagtttgggtgttttcgaggcgaggagagaggtgggatgcgacggcggagaggcgttagcattgttctcggccgtcccttccttcccggaaaaaggaaatgatacgatgatgcgaggagagggagagagagagtgtgaggtgtggggtagggagaggggaacgacagcgatgtggcggcgccggagctggtgcagggataggagatcgagcgagctgtggaggctagagccgctggctttggcgaggaaggcgatgtggatgcggggagatggactggctgctctccatcgcaaactctatcgtcgagctgacgagatcaccctgtcgatccaagagctccccgacggcggggggcggttcgaggtcatagtgctgcgccgtagcgacatgtacatgaatctcgtggaggccgtgccgccgccgttgctccagcacccgtcggccgtcgacccgcctgcctccgccacagccgaagggaaaaagaaaagagaaggagagagagggaggaggaagaagggttggagtgagaggatgacatgtgggtcccataatattctttttgtgtga

SEQ ID NO: 21425 - DNA, 208 bp, Oryza sativa
  Clone ID: PAT_MRT4530_26697C.1
caacatcttacctgttctatatctcacgaaatgatgaatgatcctctgatgggagccggtggatacacctacgaagctaagaatatcagggattggttccgcagaggccacaacaccagagccattaccaatgctgaactcgaacacaagaaactcgctgcagatcgggcgctgcgttcaggtatcgaggagtgtcgcaccataacac

SEQ ID NO: 21426 - DNA, 386 bp, Oryza sativa
  Clone ID: PAT_MRT4530_26699C.1
ggttgttttagtaataaacatggttgtataatggaccaaactagcagtggcaaattatacttttgatgccctggagcacctggtgctacaaaccggctaatgtgctaacagatagttgttgagttacagtgatcgagagcacccattttatgggatcagtgctgtaacactttctactataccatagaccccgtagggtgcctgactgctgcaaaagaggatgacaccgggcatgaaggatggaaatggtctctcagctgaaccactggatacatgaaggaggaggtttttgcattgctgatatcctctgattcagaggctgaggcacctgcaccttatgccaggggagggttgcctccacaggggtggacttgagggtatgcgtg

SEQ ID NO: 21427 - DNA, 285 bp, Oryza sativa
  Clone ID: PAT_MRT4530_2669C.1
atggcgagggtgggcgtgatggagttggaaattctggttcgtgaatttctgggcgtgacaaaagaggtgcacggcacggcgtcggcttggcgtggtcggcaaggcggcagcggcggtggcaagattgtgggcggcggtgacaaagctgcttacggcagttgcggcggcgtcgagcgcgcgcccacaaaggaggaattggcggctgcctctgctcagctgggccgacatgggccaaggagggagatggaccaaagggagaaaagaggaattttcggcccaaactaa

SEQ ID NO: 21428 - DNA, 2052 bp, Oryza sativa
  Clone ID: PAT_MRT4530_266C.1
ccggcccgggagctcaagcaagtgcgcaccaccaccagcaacaatgtcttccccttcctcggcccattggctgagcttggtaggaagtatctggctccagaccatcaacggccccaactccgacttcccggtgtactcgtcgcagctcaaggagctcaagagcatcagccaggtgcagctcaacttcctcgccttcgcgtccgacgcgggcaagctcttcggatggttctccggggtggcggcgctgtacctgccactttgggtcgtcgcgttcgtcggcgccgcgttcgggctcgtcggctatggcatccagtacatgttcttggacagctccggcctccggtactggcatctcttcctgctcaccgcgctggccgggaatggcatctgctggatcaacaccgtctcctacctcctctgcatcaacaacttcgcgtcgaacagccgcgtcgcggtgagcctcgccaccagctacctcggcctcagcgccaaggtgtacaccagcctggccgagacgttcccggggctggccaactccaagacgaagacgtacctcctcctcaatgccgtcgtgccgctgttcgtcaccgtcatggtggcgccgtccctcagggtgttcgacctcaagagcgcggcggcgagctcggacgcggcattcctcgtcatgttcgcgatcacgctcgccacgggcgcctgcgcggtggtcggcagcatcggctcgacggcgaacgggctgtcctccaaggagcacatgatcagcctcggcgtgctgctggccaccccgatcctcatcccggtggggctcaagatccgcgagaccctgaccaagatacgggagacgcagcgggagaacaggatccatgacctcggcaccgacgagtcggagtccgtggagagcgtcgtcgtcatcgacgtcgccgccgacgcaaacgccgaggttgccaaggaggaggacgccgtggtgaagaagccccaagaggaggtcggcggcctccggctgctgaaaagcccggacttctggctctattttttcagctacatgttcagtggcaccctcggcttggtcttcctcaacaacctcggtcagatcgccgagtcgcgaggaatcgggcagacttccactctggtctcgctctcgtcttcgtttggattcttcggccgtcttctcccggcgttcatggactactactccgcgaaaagtggctactccatatcgaggacggggtccatggcgtcgctgatggcgcccatggcgggggccttcttcctgctgctcaaccagcgggacttctttctgtacctggccacggcggtgatcgggacgtgcacgggcgccatcacgtcggtggcggtgtcggcgacgcgcgagctgttcggcaccaagaacttcggcgtcaaccacaacgtcgtggtggccaacatccccgtcggctccctgtgcttcggctacttcgccgcgttcctctaccagcgggaggccggcgcccgcggcacgctcacctgctccggcgccggctgctaccgcgagacgttcgccatctggggcacgacgtgcgccgtcgggacgctgctctgcgccgcgctctacgcgcggtcccgcaattttgccgggaggctacctgtaaggataccgtcctgcctcgcccgcttagctaaccttgtgtagggtgctagaactttcttacacctctcagaggaggcctcttcttaatttaacgaccatacacgaaagcatcagccattaggcgatgtaattaattaggttttgtttctttccaccacctttttctttctttctttctttcctttggttttcttgactgattatcccacggggggatacagacaaaaggttggagcctgatcagtagatattgttgcaggctgatcaccttgttttctctgcatatattatatatgcaatcatatacgagtggttaaggggaattcaggtcttgatcatattggctaagttggccatgctactggtactagcatgttcatttttctttttgggtttcgatttataagctagtagtatttgatagcact

SEQ ID NO: 21429 - DNA, 1011 bp, Oryza sativa
  Clone ID: PAT_MRT4530_26700C.1
atgaacgccacgtcgccgtggtgcaacccgacacgggagcataagacaccgacgagtgcacacacccgcgacgacctcgctagtgacggcgtcaacaagcgcaaagtgtgtgggggagtagggatgacgacaaccgcaacaacgagaatgcgaacgccgggatggagaacaggacgaccagaggaggtgcgcaccacgtggagtggagatgcagggtgtgggtatgcacgccagcggaggccgaggaggaggcgtgcactggtggaggtcgaggagatttggcgcaaccatgcaggaggtgccctgatggagcccaaggaggagcagcctccgccgctcgccgtccctagtagccttcgcctccgccttgtcatcgcctatgcggaatgggacgacgccaatatctttggcatcgaggacctaattgtaaatttttcattacaaatagtgagcaggggcggggaggtgggcgacggcgcgaggacgggcggcgttgggctggagaaggcatgcgccgacacctacggccggtggtgtcggcggtggagggcgccgccgggcggcagctgcatgccgtggagcttgacggacctgccagaacgcgaagctcgacggacccgccagaacacggagcttgacgaacccgcgggaacgcggagctcgacgaacccgcaggaacgcggatgcggcgggacagacctcgtctcctcgcccgccgccggcagccgcctctgcccccgccaaaagccagcctcgtttcctcgcccgtcacccgcagtcgctgacctcggctccttgcccgccgctgcggcggcggcacggagctgcgagggtgacggctacggcggcggcgtcgaactgcgagggccgcggcggctgcggcgtcgacgacggcgtggagctgcgagggctgcggctgccgcgtcggtgtggagctgcgaggcggcggcggcggggagctactgtgagggcggcggcgctgtcccgattgcgcggacggtcgccagttga

SEQ ID NO: 21430 - DNA, 435 bp, Oryza sativa
  Clone ID: PAT_MRT4530_26701C.1
tcggtaccacccgcactcgggccaaatcgcggtgccggacatagagacgatcgtgggtgggaacctggctactggagtggatgcaagtgcatgccggcgagcgaatgaagacaatgatcatcaacaagtgacggactcactgctacatgacgacttgcaaagagaaggtccaatagaacgcagcaagtttatcaagatggaaatgttaaccaacaggtaacttgactatgatgaccggagatcaactacaattgcaattgaataactcaacgctagacacttggaggggcagacaataaaagttaatggggcatatgccagcactaagagagaggatacctgaggccattttaatactaatgatgtcaatgtacgctcagaagaaacagatgctgctaaggttgctgtacgtgcatgattgaccagaggctcaca

SEQ ID NO: 21431 - DNA, 1039 bp, Oryza sativa
  Clone ID: PAT_MRT4530_26702C.1
atggggagcggcagcgtcctccatgtcgcgtgggcgagcggaccggcgacggcggcgagcgggagacggagccccgaaggcgcctcgccgccgttcaagaggcagccctgtgaagctccaatggctcctaaagctgctcctgccaagaagggtgatgccaaggcccaagccttgaaggcagccaaggctgttaagtctgggacagccaagaagacgaccaagaagatccgcacatccgtgacatttcaccgccccaagaccttgaagaagtctagggaccccaagtacccaagagtcagtacccctgggaggaacaagcttgatcagtaccagatccttaagtatccccttaccactgaatccgcaatgaagaagatcgaagacaacaacactctggtcttcattgttgaccttaaggctgacaagaagaagatcaaggctgctgtcaagaagatgtacgacatccaggcaaagaaagtgaacactctgatcaggcctgatgggaagaagaaggcttacgtgaagctgacaccagactacgatgctctcgacgtggccaacaagattggcatcatctaagttagggtgctgcagtagtcttttgtgtcctggtctctatgtgattggagttttgtagctattacttagcgaatgcctcagtggctaagttatcactattttgctgcacacttccatgaatttgatataatgcaagtgacttatcgtgagctattaaataaaaaaaaaatgatcaaaaaaaaaaaaaaaaaaaaaaaaaacgagccagctagtattttctttgcatgcccaaaatttaaaaaaaaaaacccggctggtcaagttagtactataatgatctgatcaagcattcttacattatgatctggtaccttagcttggtttccatgttgctgtttgtgttaagagatcaattgttgacctcactatgtaactgacatgattcttgatttgttggtgaagctagaactacatctgtcaaggctttataatacagccacctgaaaaaaaaaaaaaaaaa

SEQ ID NO: 21432 - DNA, 358 bp, Oryza sativa
  Clone ID: PAT_MRT4530_26703C.1
gctggaggattgcctccaccacctcsaaagaagccgaagaactgaacctgcagttgactttgctgagtagaattaggttggttttagttcattttctactgttgggtttgagcagattttgagggaccttcaccagcagattcccaccgacccattaagcggcccgaatttaggttaccttctgtcctaacaagagtgcaccacaatatggtgtgagaactagagagtgtgtatttaatatgtgtgttgtgtctccacaaatctatataggtgtgtttagctggatatacagtacgatagctgagtgctgacaacttatgtgtttaacgcgattgtctataaaaacaaccagtttttg

SEQ ID NO: 21433 - DNA, 456 bp, Oryza sativa
  Clone ID: PAT_MRT4530_26704C.1
atggcaaggaatgaacgagaatgtttatcatcctcaacacccgtgcagatgtatgaggcaggttgggagcaaactgggaatgcacccggatggacccaagctccacgccatagcatcggagtctcaagctgggcaagtgctagtgaggaccagtggcatgcgcctcatgacatacaatggggggataaccaacggcccagatcaagtggtgtgcctccatctccaagtggatggcgctcaagttcctctcattgggaatttggtgaaatcacttggagaatggatacccttgatatgcagacagaagagatccagtacaacctcacggaacacatagcccagatgcaagaatggcaacagaatgctgatgctcaattcgccaacttcaataacatgatgcagcaacagcatgatgaccttcaagcgtacttccgcttccaggggttcactccttag

SEQ ID NO: 21434 - DNA, 351 bp, Oryza sativa
  Clone ID: PAT_MRT4530_26705C.1
ttagctcgccgccgctgtgggctttctcaagccgcgccgccgcgccgcttcaaatgtcgccgccgtttcccgtcccccccgttaggtgcgccgtggtgaggggaacctcggccgcccgtcccccttcgccgccaaccaccggagctccaccgtcgccgtcaagccgagccgccgccgccgtcctcttcgtcgccggccatcatcgttcgtcgtttgtcgttgtggtgagtaccgttgggttcgcctcgtcgtcctctacgtgtacatgccctccaaatccccggccaaggtctctatctccggcgagctcgcaaaccctagccagctgccgtggggtgacgtcatgctgac

SEQ ID NO: 21435 - DNA, 398 bp, Oryza sativa
  Clone ID: PAT_MRT4530_26706C.1
aaaaaaaaggccggttttttttttttaaaaggcctaaaaaagggccctttttttacccacccttccggggaccggggggttaccccggaattttcggacgggtccttgggggggaaccattttttcttttggggggttgttttaaaggtgggggaaaaaaggggaaaaggtgtttcctggggaaaatttttttccgttaaaaattccaaaaaaattacgacccggaaaaataaagggaaaacccgggggggcctaatggggggcctaactcaatttatttgggtggggctaactgccccttttaaagggggaaaacctgttgggccaatttttttaaataattggccaacccccgggggggggggttttgttttttgggccccagggggttttttttt

SEQ ID NO: 21436 - DNA, 189 bp, Oryza sativa
  Clone ID: PAT_MRT4530_26707C.1
atgcagctgctgtttactgcagcaagcaagcaacagagatgcccatgcctctactactctctgcagtttcttctgcgggcaaaccgatctagctcgctcgaacggtgcaccggtgaacgcaccgcggcttcgttttcctcgccggtgaaacgcaacgacgacgactgcgacggcgacgcctcgctgtga

SEQ ID NO: 21437 - DNA, 701 bp, Oryza sativa
  Clone ID: PAT_MRT4530_26708C.1
gttttcttggctaggagacattggagggtgagcggaaggtatacatgagctgttacaagctgtaggaagaaatcaccgaagcttggatagcagcggtttcggttggaaaggttcgacggcggcgctcctcctcaggtgaacggcgacggctcgaacaactcaaggacctgccatgcatgcgtgtccaagaggttcgtgaggttatggagatggtgtatgcgcgaggaatcgaacaatggctcaccgaggcagcggtaatcgacgatgatggcggaggcgatcctagatcgacgccgggaagaaaagatgcgttctccaagtccttcacgtctccggctggggttctcgaggcgtcttgaagaggtagtcgaggcgagattcttggcacagcggcttgcttcgagatggacgagaatggccggtcgacaatgatgtcgaagcggtggcgctccagtgcgtgcttcagggcgttgttggcgtggtcacgttccggtggctgtgatgcacaaaacgggaggtggtcaacagagaagtggttcggcattgtgtggagagataggaacgcgaaagagatagaggtgaccttgactcaaacggagatggcgatggtcttcacctccatggccggtggtgaggtcactggtgacggagaggcagaggacctgctcccctcggcttcttcgtctctgagtgatgagtga

SEQ ID NO: 21438 - DNA, 276 bp, Oryza sativa
  Clone ID: PAT_MRT4530_26709C.1
atggccaaccccgacccaaaattctcgacgcggtcccgcaccaaaacccctgcgtcgcgtcgcgtcggagtcagccaaccaccggcggcggcggcgactacctcgcgcacggcggacggcggcgagcggcgatctgcctccgccgcgctcgtgcctcgtcccgccgtgggtttagggttggtgagcggtgaaatcgcgctccgtgttgaggaattttggtttcctcactccgtgttgaggctagaatttcgtattttgatcaccggagatggctag

SEQ ID NO: 21439 - DNA, 303 bp, Oryza sativa
  Clone ID: PAT_MRT4530_2670C.1
ccaaggcgagtttttggccctacattaaagccttcctttacaaaaaatactgggggttacaacagacaaagggggaatttgtccattttcccttggattttactccttccaatagggggcactgccaagcaacgcgacattgtatacaagggctttttgctaatccgtttaggggtagtcctttctagctgttacaggggggaactaccggaccctataattgtttgcacccacaaagaatgcattggcatttggcaaacccctaaacaaataggggcacatcagcagcttttcacatgcaaa

SEQ ID NO: 21440 - DNA, 618 bp, Oryza sativa
  Clone ID: PAT_MRT4530_26710C.1
atgaaaaaaaagactggcgctacacctttagtcccggttggtgggactaaagattctcctctttactcccggttgtataaccgggactataggggttcccaaccgggagtaaagcctctttctccaccagtgaattcaaatactcgagcaattgagggctgtggtgttattctagactatcgtcaacatgagagatacgcccgggaggacacatatgagaggggtgacacaaagctcacggtgaggggggaaagaatcccctacgggcgtggagacaaggtggacggcgacatcgatctcgtgggcacagaggaggaggagaagcccaccaagccaccacaatcagcccaactagcaccgacctggaatccctatggtcccaaatccccgatccaagtctccagccgcaatctcttggacgcctacacggcggaaggtcacgactctcagctagcgtacattctggacgcggggaggtcggaccgtcggagcatcgtcctcaacagcacaaacatggcgtcgacacagggaggtcacggcctagaaccacatcctgagctacacggctgcaccactgttacccgctcttcccgtggccagtcgtcaaactcccactaa

SEQ ID NO: 21441 - DNA, 264 bp, Oryza sativa
  unsure (1)..(264): unsure at all n locations
  Clone ID: PAT_MRT4530_26711C.1
atagaatccccccaaatcccccaacgcgagcnccaaaccctagcgccgcaaaggggtgcgacggtttccctctcctcgatccgccgcgcggtgctccggtgttgaagcccgcaccctccccgcggcggcggttgcngcgcgggcnagagggagggggagagaggggcgcctctactctctcggcgggagggtttctcgatctggaaggctcanacctggcggctcctcggtgcnccgcgcccggatctgcagcnatctgggagg

SEQ ID NO: 21442 - DNA, 2194 bp, Oryza sativa
  Clone ID: PAT_MRT4530_26712C.1
atggctgccgcggcggccacctcccgcctcctccgccgccacccgcctcccctccccctcctcctccgctcctccatctcctcctcccgccctctcctccagcagcccgagctctcccccgccgccgcggccgatgcggcccccgccaccgatgccgcgccgctcccgccgaagccgagcacggggagccccttctacggcgagaactggcggaaccccgccgcggcggccaacccgtcctcatcctccctcctccccgcggtcgtcggcggcggcgcgcacgcccgcgcggcggcgtactcggcgtccccgggcgcggcggagctgaaggagacgttcgcggagtggatggcggagcagcggtgggaggagatgaagcagctgttcgagttctgggtgaggtcgctcgacccggcgtccgggaagcccaaccgccccgacgtcgacctcttcaaccactacctccgcgcgcagctcatgtccggggcgctcccgatcgagatgctggatctcgccgagcagatgcgcgagttcgagatcacgcccaacacggcctcccacaacctcatcctcaagagcatggtccaggcccaggaggctgatggcgccgagaagctcattgagcggatgttgcaaacaggaactcaaccagatgacgaatcctacaatttggttgtaaatcttctgattaaactgaaccgggtggactctactttgaaatatttggatttgatgcttaaatcaggctacacaatatcttcctctgtttttgttgagtatgtccgggcatgtgtaagatctggtagattggatacattggcatcagtcatagagaagtgcaaggctacagatcagaacaaagtcttgtgtccaccatggtcctggtgtgttgaaatagcagaagctgcttttgaagctaacaacagcaagctgggtctttttgctttggaatatcttgcaagatggattgctcgttctgagcgtgttattcctcctcttcatctttcagttgatgaaggtttagtactctcagctctaagtgctgctgccagaacttgtagcactgatctcctgaatgctgcttggtcaatattacgtaagtccttgcaccagaaaagggcaccgacgccagaggcatatcttgccaagatttatgctcattcatccattggtcatcttcagcgggcttttggtaccctacgtgaatttgaaaatacctatgggaactttgaggatattgattcagagctcttctcaccgttcacttcattgcgaccactcgttgttgcttgctgtaaggatgggtacaccacactggactcggtctatgtgcaattggagaatttaagttctgcagattcgccatacaaatctgttgctgctcttaactgtgttatattggggtgtgcaaacatttgggatcttgagcgagcatatgaaacttttgaggcaataaaagaaaagtttggacttacacctgacatacattcttacaatgcgcttttgcatgcatttggaaagcggaaaaagactgaagaagcttgcaacgtctttcagcatctagtaagccttggtgttaagccaaatgcaacaacttatggccttcttgttgacactcatcttgtaaatcgggacgcaaaagctgctcttgctgtaattgctgagatggttgatgcgggctttactccttcaaaggagacacttaagaaggtccgaagacgctgctcccgtgaatcagattttgatagtgacgagaaagtgcaatccctggctaagcagtttaactaccgaatgggtggtgaaaaccgcagggagatgctctttaacattgaatacagcgctgagttcacaagtactcctagtccaagttgattttgatgatgccggtgcgctctagtagacgtaacgtgtaccctcgctcactttgctggtacctgaagggcacggaagctgtagtctgtaaattatacttctttgtaccaacttccctaattatttcaagcatctcaagctatcatttttgttggcagaaccctcaacaggatttatgttaggatttcagaataagggtcctaatagatttttttttttgcctgctcaaagcaccatgttttacaatcaatggatgtttgctcaacttatctctcagttccagccttttttacggctctcgtgttatttattcctataccgc

SEQ ID NO: 21443 - DNA, 1225 bp, Oryza sativa
  Clone ID: PAT_MRT4530_26713C.1
gcacgagaactgttccacgcagaagcaaagcaacgccggtaatctctctccgccgcccccgccgccgccgcaccgttcgccggggatctagggaaggatggagagcggaagctacgagggcgtcctcctgggcatgggaaaccccctcctcgacatctccgccgtcgtcgacgaggccttcctcgcaaaatatgatatcaagccagggaatgcaattctagcagaggagaagcatttgcctatgtacaatgaattggctagcaaggtcaatgttgaatatatcgctggaggatccactcaaaattctattagggttgctcagtggatgctccagattcctggtgcaacaagttacatgggttgcattgggaaggacaagttcggtgaggagatgaagaaagacgcacaaaccgctggtttgcaccactgcacatactgccttgaccttaccatctttaaacaggcccattattatgaggatgataatgctcctactggcacatgtgctgtctgcattgttggtggtgaaaggtcacttgttgcaaacttgtctgcagcgaactgctacaggtctgaacatctgaagaggccagagaactggacacttgtttatgtgtttcatttgattgcttttctcacaataataaggtcattgattgtagttgagaaggcaaaatatatttacattgctggctttttcctcacggtatccccggattccattcaacttgttgctgagcatgctgctgcaactaacaaggtgtttatgatgaacctttctgctccctttatatgtgaattcttccgtgatgcccaagagaaggctcttccgtatgctgactatatttttggaaatgaaactgaagcaaggacctttgctaaagttcgtggttgggagactgagaatactgaggagattgctttgaagatctcgcaattgcctaaggcttcaggagcacacaagaggattactgtcattactcaaggctgtgacccagtagttgtggctgatgatggaaaggtcaaaacattccctgttatcgttttgcccaaggaaaagcttgttgacaccaatggtgcaggcgatgcctttgttgggggttttctctctcaattggttcaggagaagagcattgatgaatgtgtcagagctgcttgttatgctgcaaacgttatcatccaacgctcaggctgcacttaccctgagaagcctgacttcaactag

SEQ ID NO: 21444 - DNA, 404 bp, Oryza sativa
  Clone ID: PAT_MRT4530_26714C.1
aaaaagtaaagcatgtttaaaggaagaaatattatataaaaaaattaattttctgcttcaacaaaaatgtatcaaaattgatactccattacacatcaacagagtatctcttatccttggtggagagtgaaacaggttgcatattatatcctccaacttgcggttgtggagtcaataaaaagctttgttgggctggagcagctgctggtgtcatcattggtgctgcatatgatcctattggcatttgaggcattgcagaggagacagcaccggtcatattagccattggtgctgcaaatggttcaagtgctcttctaacgatgaatccgtatagacctgtcatttggcctggagatattggaatctttcttttcattgctcgttcacgatcaactaacgcagct

SEQ ID NO: 21445 - DNA, 281 bp, Oryza sativa
  Clone ID: PAT_MRT4530_26715C.1
acgaggagtaggaaagaagctagaaggagaaagaactacgaggtaggaggccatgaacaggaagagcaaggaactagaacgaacagatacaggcaggtagcataggaagtccagtcataggcagtacggaagcactagcacaaccagtactagtacgctaaacagcatagaaaagcaagctacatagcagataggtaagcccataagcaagcaatactacaccagggaaggctactaggcgacagcgaagtaggacaacacagctatccagtacagaatag

SEQ ID NO: 21446 - DNA, 394 bp, Oryza sativa
  Clone ID: PAT_MRT4530_26716C.1
ataggatctttcctttagctctttgtggaggatttagctaagtaaaacatgataaggtcacacaaccttatctgaagcgatgtcaagggagaagctaccttattgtgtgacggcatggttttaccaattgagatactattcacaacctacaccgattgagttctttgggcataagaattgaccggttgaatgtttgagatgccttttgaccttacatgacactggggattttattatgacacaaggaaataatattttccttagaagcatcaaattccagcccctggatgtatagttattaactacatgttctgaaccatggagagaggttaattttgtttttgggttgagctgcagttacaagggtatgagctaatcttaagaaatggttggc

SEQ ID NO: 21447 - DNA, 126 bp, Oryza sativa
  Clone ID: PAT_MRT4530_26717C.1
gtacccgtgcccgtgcacatcggttcgccggacgacgtcttcgtttgcgtcgcctcgcacggtatgccgtgccggggtggccgacctcataagccgtgttaccctcacttcgccgtccaatattcc

SEQ ID NO: 21448 - DNA, 762 bp, Oryza sativa
  Clone ID: PAT_MRT4530_26718C.1
gggaattgttgccaaggaaagtgaatggtccttgggaagggaagatatcacacattgctacccgtggagcacatactgcggcaatcactgactcaggtgagctctacaattggggttgtgatgaaggcgatcgtaggttggggcttggaagtagaggtggtcctggtgcagctggttctctgagtgttccttccaagccaccatgggacttggaaattggtgatgcatttatcatacattatacttataggtgtgactatgatatgaagggtaaactcactcatggcaaagttgcagaatcgagatttgacaaaagatcctatgatagtaaacctccccctaaaaatttgccattgcctcaaaatggtttacctcaaagcgtgagggaaagggaagcttactttgttttctgaaagcgaaaggttgggcaagctcattgagtgtcggtggttgcacttatgggacacaacgctcctcatatgcctatatctttgaaatgtctatccgccttactgattcaggactgaaaaatgaaaaccagctgccattcaatatggcaatggttcagttgctgggtttttcaacgaggatagtgttacaataggtgatctggttgtgaaagatcagaaattcattggagttacaaagggccaaggcatataacttcatggttggcaaatttggtgacaatcttggtctcggatttcaagaaataactgtttggagatgcaatgcctgtgtggtgaatatttggcttttgct

SEQ ID NO: 21449 - DNA, 1516 bp, Oryza sativa
  Clone ID: PAT_MRT4530_26719C.1
atgaactgcaagaagaatgcattgcaaatttatgaatttggctgctgcatcattcagtttactgtagtctgcacctgggccgctcaccccctgcccagcgcctgcccttgcaccacgccggaccctggccccacccgtccgtctcccccccgccccgccgcccattgccgcccggcctcctcccctcccccgccctccccggctggtcctccctcctctccccgccccacgaccccaacctcggaaacctcatcctcctggcgctcctctggccccatcctctggcttgaccgattgaggggcaggactgacgtgggaagacactgctctagtgggtctcggatattgcgtcggcgtgacgggagtcttacccagccactcgagggctcccggggtagccctcggcggtaccctaacgacctccatggcacgttcccctcatgacctggtctggggctatggtggatttggagcttttgggcattaagtttgtcatagggaattgttgccagggaaagtgaatggtccttgggaagggaagatatcacacattgctacccgtggagcacatactgcggcaatcactgactcaggtgagctctacaattggggttgtgatgaaggcgatcgtaggttggggcttggaagtagaggtggtcctggtgcagctggttctctgagtgttccttccaagccaccatgggacttggaaattggtgatgcatttatcatacattatacttataggtgtgactatgatatgaagggtaaactcactcatggcaaagttgcagaatcgagatttgacaaaagatcctatgatagtaaacctccccctaaaaatttgccattgcctcaaaatggtttacctcaaagcgtgctcagctatgcactcaactgtgagggaaagggaagcttactttgttttctgaaagcgaaaggttgggcaagctcattgagtgtcggtggttgcacttatgggacacaacgctcctcatatgcctatatctttgaaatgtctatccgccttactgattcaggactgaaaaatcccaaggagaattgtatgtttgacgtccctgttttatgccatttgatccctccaggaaaaccagctgccattcaatatggcaatggttcagttgctgggtttttcaacgaggatagtgttacaataggtgatctggttgtgaaagatcaggaaatagctgtttggagatgcagtgcctgtgtgaattactttacaaaaggcattggcattgtccttatagggacttgggagatgatcatcgttttaatcttctacttgaaattcttttacaagtatctctttaaattgaaagattttgataaagggtcttacaaaagaatagttttcagtgaggtagctgtcgatgtcagagcaccaagtgcttatggatcttacctaaatgtttgccggaggttgttcatcggtcacaacaatcctcatcatgttttcatgtcaactattttagcccttgttcccatcaattag

SEQ ID NO: 21450 - DNA, 267 bp, Oryza sativa
  Clone ID: PAT_MRT4530_2671C.1
gagatccgtcttaggacaatgacggtaccactattggaggataatcctacgaacatggagatccttttcgcattttctcctcttgctactggtacatgcaactctccttggcggtttgatgctcctaatctgactttaaaaccatatatcatgtactcgtgtatctctgataacacaaacatggtctcaccctatgcagggattctcgtaagccaacactataaaatagggccaccccctttgtggaaccggtatacttttcatttg

SEQ ID NO: 21451 - DNA, 1871 bp, Oryza sativa
  unsure (1)..(1871): unsure at all n locations
  Clone ID: PAT_MRT4530_26720C.1
ttaccgcgccgcggccgcggcacgtgacgccgtcctgtagcgcgcgcgcgacggccgggggcgcgggcgcggccgtaccagcatgtgcacgtggtggtcgtggtcgcgcgcgcgcgccctctcgaacggtggcccgggccccaccggctgcagctcaaaaaggggaagggagagggaggcgccggccgggctcggcttggcctcaaggccgaccggccgaccaaagcgaggcggcagcgaggcacggccaccgacggcgatgaccggcggcgcgggaagcggcggcgacggccgaaaggcggcggcgcatggccggagcagcggcgtggctcggcactcacgggaagggggaggaaaggatgggagggaggccccaccagtgacacggcggccgaagcggaaggcgaaggcggcgacgacgacccggcgagaggaggggcggacgagcggtggcgacaccttagggttcgcccctgtccccagcaggcaacgggcagcccccctttcatgctgcggtgaatccggaagccgatcaaccggacaccccggccgacccaactccatcacgcccaccctcgcctgggtacgtcggctagaggaaagctacactataagcccagccgttgcccacgctggcttgtggtaagtacggtaagttcttccagggcatcccgcgaaccggtccttaatcgccatgggcacgactaacaaaaccatgcacccacagcccaccatcatgacttgccttgctctcgtactgatgagaccacagcaacgacttcgaggaaccgcggatcgacgaaacggccgaaatctacgcgacaaacaaagcacacaagcaaaacatgttataagactactgaaacaggaaacaaaaccatttttaatggattctatacatttttatgaatttactaagacttgaatggacttaatcggagctcggatgaattagttatgatttttagaagattatctatgtttttactataaaagaaaaactcttaatcaatttattgcgcaataactcatcccaggactgacgtcagcacaagggggcggcgccgacatgcgggccccacgggtcagcggctcgagagagagtgagggagggacgcaggcacgtgggccccactggcagtggcacaaggcgggaggggttgcggctggcaggcgggccccaccggccgggctccaaaagggggggggggggtggcacctggctcggctcggctccgagccgaccggccggccatggggtggcggcgcgcgcggagctggcggcgggacatggttaccggcggcggagcgggagtcggaggcgacggctggaagcggcggcgggggaggcggcggcggccgacgcggaaggcggcggcgtcggccgaaggcgacggcgagtgcgtggagaggggcggcgcaaacgagagagatgggaaaagggaggagaggggatcctcaccggcgagcacggcggccggcgcgaaggacgaaggcggcggcgatgacccgacgagcgtangggcagacgggcggcgagagagaggtgttccggcggcgggattggatggggatgcggctgccggggtagctttggcggcggcgaagctaacggcggcggcggattggctcggcggcggctctagcggtggcggcgtgcggccagagcacggcggcgagcggcggcgctagaggagatcggcgcgagcgcggtagagggcgtgcgagagcgtggcgaaaaggggaaaagggagagggggacgcggggaagctttataggggctcgggagggggtgtcgccggccgaccggggctttttcctttcctccgggtcacgtgcggcctcgtcaaccggtcaaaccccgccatta

SEQ ID NO: 21452 - DNA, 1206 bp, Oryza sativa
  Clone ID: PAT_MRT4530_26721C.1
atgtgggtccggaccaaggtgaacctggacgaccacatcatcgtcccggacctgggccccaccgacacgtcggccgacccggagaaggccgtggaggactacgtgtcgtcgctctccacgccgtccatgcccatggaccgctcccgcccgctctgggagctccacgtcctcggcttccccaccgccgaggccgccgccaccgtcgcgctccgcatgcaccactccctcggcgacggcgtctcgttgctctccctcctcatcgcctgcacccgccgcgccgacgacccggacgcgatcccggcgctcccgtcctccgccgccggccgccgccgccgcgagggcccgctgcacgcgctgccgccccgcccgccgctcgccgcgggcgcgctcgcgctcgccgcgtgggcgctgtcctacctcgtgctcgcgtggcacacggtggtggacgtggtctgcttcaccctcacggcggcgtcgctcatgggcgacgcccgcacggtgctcaagggcgacgagggcgccgagttccggcccaggcgcttcgtgaatcgcacgatcagcctcgacgacgtcaagaacatcaagaacgccgtgggatgcgtacgtgaaagtgaaggaaagaagaacatcaaggtgcgaactgctctcatggtcaacttaaggccgactcctgggctacatgaactggcaaaaatgatggagtctggcaagaacaacggcgtgaaatgggggaatcggtttggctacatgatactgccattccacctagccaagcacgatgaccctctggagtacgtccggaaagcgaccaaggttacccgcaggaagaagagctccatggaggcgatcttcacctactggagcgccgacatggtagtcaaactttttggcatcaaggcggcagcttctctctgctacggaatgttctcgaacaccacactgtctttctccaacctggcagggccaagcgagcagatcttgttctgcggcaacccgatcgtgtacatctccccaaccagctatggccacccgcatgccttgacaatgcattggcagagctacatgaacactataaagctagcccttgctgtagatgagacacagtttccagatgctcatgagctactggatgacttcaccgagtccatgaggctcatccgggaggcagcttcaagagggacagacaaagcacaggatggtccttaa

SEQ ID NO: 21453 - DNA, 255 bp, Oryza sativa
  Clone ID: PAT_MRT4530_26722C.1
atggcgggtgggcccaacggtctcatagtttcgcagcgcgagaccgagagagttttgggatccacgttgtcgcattaccgggacacagagggaggtgggtgggcctgcggtatcacacgcgtagagcgcgataccgtatcagtgttgcactcccgatgcgcgagaccgaggagcacggagattggagagtgggcccgcggtatcgcacactcaaaggtgaaatacctctgtgcactcttttatcattttcgttag

SEQ ID NO: 21454 - DNA, 135 bp, Oryza sativa
  Clone ID: PAT_MRT4530_26723C.1
cttttggctgtggcgccctggagggagaggccaggttacacgctggctgcttacatgtatatatgcactgagcaacttcatctggggatgaggagatcaaaagaacattccccactcaaaaaaaaaaaaaaaaaa

SEQ ID NO: 21455 - DNA, 1389 bp, Oryza sativa
  Clone ID: PAT_MRT4530_26724C.1
ccggccgggacgcagccaccgggagacaccaatgcacgcagctttccgttgcgagtttgcgacccatctccatctccatccatccccttcccccttccgctgccaacatctcatcggcgattcgattcgggtcaattagggtttactcgagactcgagagaggagagctcgcccgctagggtttcgcgggagatggcgcaggcggtggaggagtggtaccggcagatgcccatcatcacgcgctcctacctcaccgccgccgtcgtcaccaccgtcggctgcaccctcgagatcatttcgccctaccacctgtatctgaaccccaagctggtggtgcagcactacgagatctggcgcctcgtcaccaacttcctctacttccgtaagatggatttggactttctgttccacatgttttttcttgcacgatactgcaagcttcttgaggagaactcattcagaggaagaactgctgactttttctacatgctcttgtttggcgctactgtcctgactggcattgttctgattggtgggatgataccttatatttctgagacatttgccagaatcctgttcttgagcaattcattgacatttatgatggtttatgtatggagcaagcacaatcccttcattcatatgagcttcttgggtttgttcacctttactgctgcttatttaccttgggtccttctggggttctctattcttgtgggaagcagtacatgggttgatttgctgggtatgattgctgggcatgtgtactacttcctggaagatgtatacccgcggatgactgggaggcgtcccctgaagactccttcgttcatcaaggcgctatttgctgatgacaatgttgttgtggcaaggccacccaatgctgggcttggcgctggagcaaggtttggtgctatgggtgcagacccccaggcccaatgatcaattgccattcgaaggcagttactgattcgagagttcttttttttttttcatctgttcaaattgcgaaattgtacaagcaatgttcccgtgtatttatacaggctatagatcagagaattattgtgcataagaaagcatttagtagtatctggggcagctaaatttcttaactggacacgaagggtgaaggaaatggtttacgagtttcaaccggctggacaatgccgccatccttggttgcagaaactgatcctttttgcgacgattgacatctgaccgggatacttttcaatatggtagtctattggtaacgataactgtatcaatcgttgtgatgtttgtccttgcgatttatggtatcagaaatgttagaatgttttatatactgtttgggtttgaagaatattggtcgaagatgaccctcgaaatgtacagctatccgtc

SEQ ID NO: 21456 - DNA, 123 bp, Oryza sativa
  Clone ID: PAT_MRT4530_26725C.1
atggcaatagaacttggtgctatagctgttgcagatgcttcacttggaggaaaattaaatctcaaacttgagaaatttggagtagattgtggcggcatgaagaagccaaaattgtcggtgtaa

SEQ ID NO: 21457 - DNA, 211 bp, Oryza sativa
  Clone ID: PAT_MRT4530_26726C.1
ggaaaactgtctctgtcgatgagaaaacaaatattgttgtccctgaggatagatatggactatacgctattgacactctggaccccgacatgatcattggcgatgatagtgtttgctactatcacgacatgatagtgcaaatgatcaaatggggataccaagaggggaaaacattatttggatttggttatgatttccgccagagtaacag

SEQ ID NO: 21458 - DNA, 306 bp, Oryza sativa
  Clone ID: PAT_MRT4530_26727C.1
atgcagtgcacggcgcgctgcagcgcccgcgcccgcgccgcctccctccgccccgccgccgactgcgggtcgcacgtcggcagccccactccttcgatctctccgccgccgccgctgccgccctccgacgacacgcgcgccccgctcgacgaccgccgcatcacccccgcctcggcgcctcctgcttctcgctctatgctccatgacaggacacaacgcggcaccgacaccggtgaccacctagactccgacgaggatggtggtgatagtggcgaagcacgggtgcgtccctcggacattggataa

SEQ ID NO: 21459 - DNA, 340 bp, Oryza sativa
  Clone ID: PAT_MRT4530_26728C.1
accgaaaaaaaaaggccgtacttttatttatgataaaaaccatatttatagatacaaataatgactacggacttttttattcagcatatattggacgtaatatatgtatcttaggggcattcatgcatatagaaacggatcctttaacttagtacgctttttaactaaaatggaggtttttaattataccgaacccatatagtattagctagtaacccacgttagagggcagtttattagaggagacttgatcggcttaacgtagctaggaggggcgctccccgtaaatgttgccacccgggttgtagttgcaggcgatcagcgggctgttgcgaccgtt

SEQ ID NO: 21460 - DNA, 261 bp, Oryza sativa
  Clone ID: PAT_MRT4530_26729C.1
atggggaaagtggcgagagtttcggcggggaagacgaagcgacgtttggcctttggtgttattagggtatcggaagcactaatgggcctgggcctaaaacacccttcacagtctttgattttggtgctcgggagatcaaggcagaaggagtcgaagtactcggattatcgttttggattacgagagaagactatttcgtcgactgtaaaggtctctgtaaaggtctcaggggttactgtggagattatggataccccataa

SEQ ID NO: 21461 - DNA, 1679 bp, Oryza sativa
  unsure (1)..(1679): unsure at all n locations
  Clone ID: PAT_MRT4530_2672C.1
ccacgcgtccgggttatcaactttgggtcagctggtgtcatccgttgccgaagatgtagaacatatataaacccttacgcaacattcgcggatgctggaaggaaatggcgctngaatctttgcacgctgctcaatgatgttcctggagagtatttttgtggcattgatgatccccagcggcagaagatatgatgcagatcaaagacctgagctttctaagggaacagtagagtttgttgctcccactgaatatatggtgcggccaccaatgccaccctcctatttctttcttattgatgtgtccgtatctgcagttcgaagcgggctgcttgaggttgttgcaaagaccatcaaatcatgccttgatgacctcccaaggtttccacgaacacagattggattcttaacttttgatagcacattgcactttcataatttcaagtcgtctttgtcacaacctcaaatgatggtggtcgctgatttggatgatgttttcctgccgttgactgatgaccacttggttaatttggttgactctagacatgttgtagcatcatttgtcgatagattgtcaaatatgtttcaggacaatgtaaatgtaaaatctgctcttaatcaacccccaaactgtgtattcccaggtgtgattgatatttacatgctgttacgtggaacggcatcacagggtgcatacagcagctgcacctgtggtcacagatcttggtgaaatgtatcgtcaagcagatactggtgccatatgtgtcattgttgagtagaatcgctgttgaaaattcactgtctgataagctggacagtgttcggcaacaattacaattaaagcttgtgagaagtttgaaggaataccggaacctatatgttgtacagcaccggataggagggagacttatatatccagaatctttaagattcttgccgttgtacattctgtccatatgcaagtctcttgctcttcgtggtggttacgcagatgtttctcttgatgaacgttgtgctgctggtttcagcatgatgatactgcctgcaaaaaagctgctcaattttatttatccttcattgcaccgggttgatgaagtatcgtcaatggtacagcgatagcacctgtggtcacagatcttggtgaaatgtatcgtcaagcagatactggtgccattgtgtcattgttgagtagaatcgctgttgaaaattcactgtctgataagctggacagtgttcggcaacaattacaattaaagcttgtgagaagtttgaaggaataccggaacctatatgttgtacagcaccggataggagggagacttatatatccagaatctttaagattcttgccgttgtacattctgtccatatgcaagtctcttgctcttcgtggtggttacgcagatgtttctcttgatgaacgttgtgctgctggtttcagcatgatgatactgcctgcaaaaaagcagctcaattttatttatccttcattgtacagggttgatgaagtattgtcaatggaaccagataggatcggtggatccttgaagtggttgccactaaccatgcagtgcttagacactggtggtctttaccttcttgatgatgggtttaccttcctagtatggttaggtaggatgctcccacctgaacttgtgaacaacattcttggagtcagcttg

SEQ ID NO: 21462 - DNA, 452 bp, Oryza sativa
  Clone ID: PAT_MRT4530_26730C.1
aaaacggaaacaagtcccagggaatcaaaacacaaaagcgggaaacaaggggaaaacacacaaacccaggcggggcggaaatttggaggaaaaaaaagaaaccaaaggctttgtatttacagtttggacctaaaaccccccagcaacaataaatttcattttgagcaaccccccccccgcccaggaaaaaggcaaaaccacccacccacgggggggggagaaaaaacaaaacccaatcaagaaccgccccaaaaacaagggagccggaccccagggcacccccccttcggcaaattgagcaaaaaacgggtcaaacccaggaaaaagcatccgtgcgggggaggaaaaacgggaaatcccccttggccccccgggcggggccgaaaaaggcacacacggactcgaggcgacggggaaaaaaaaaccaaccggccacccatgaccagcatcct

SEQ ID NO: 21463 - DNA, 441 bp, Oryza sativa
  Clone ID: PAT_MRT4530_26731C.1
atgccgggtgcagagaggaagggaaacgccgccgggggcggaaaggagaaggcgacggcgtgggactcggggtggatgggaaggctgttaacagcgaaatttggtaaagcccaaagtcatcatcggcttagagttaatatcggctggaatcagccgattgggggaatcagtcgatgggagtcgtcaaattgccacgatgttgtgttctcgatggaatcggatcaatcaaaggaagcttatctagaagagtccgagttcaagaaggatgcggcatggcaggctgcatcggttcagttcgatctccggcgaaggggtaagtcctacgttccgtcgggccctggtgaatttgtcatctacgtcggcatcgctcaaggctgcattagggctaagcagatctcccaggccgccgtgttcgatttttacgtcaacaaaggcagatga

SEQ ID NO: 21464 - DNA, 219 bp, Oryza sativa
  Clone ID: PAT_MRT4530_26732C.1
atggctgcagccaagtcagcagggatgggtggtgggactggcccctcatcctgctcgcagggcagggccgagccctgccccacgtttgtttcactaccgccggttgcgctgtcgtcgttgtggagcgacttcaccaaagctgagggcctcctccgacagagcctcctcgaggaagaggccacccagctggcctccatcgtttctggaggccccttctaa

SEQ ID NO: 21465 - DNA, 186 bp, Oryza sativa
  Clone ID: PAT_MRT4530_26733C.1
atggagcaggcctcctgtgactatcccacgagcgctggagcaaggggccacgggactcgcgagcatgtatatctaggggctacacgcgtcgccctgccattggctgccgccgacgcgttcggcgcaaccgcgacgccctcgctgggtccatcgccggcgctcggttcagcctcaggtagcccatag

SEQ ID NO: 21466 - DNA, 313 bp, Oryza sativa
  unsure (1)..(313): unsure at all n locations
  Clone ID: PAT_MRT4530_26734C.1
tgcagggatgaacacaatgtgtgctaccnactaggatatactacggctggatggacnctatgggatctgacagcacatgagctgctgaatgacggactgcactatagggaaagctgggtacgcctgcagggtaccggtgccggaattgcccgggtgcgaccacacgcgtgccggtgttgtgatgatgatgttggcatgtggtggaaatgttgctgtgtgtgctgtgggatgagtgcagcaatgtaacctcttttgcaagctgtagaatatgactcatatattgtcctccttcgcaaaaaaaaaaaaaaaaaaa

SEQ ID NO: 21467 - DNA, 589 bp, Oryza sativa
  unsure (1)..(589): unsure at all n locations
  Clone ID: PAT_MRT4530_26735C.1
tccaaataaagcgtgactggcctggcctctctgcgtttcttcaagagcaacagtcagtaacagttctactgggactggaagacacagnctgtcaatgcacagacgaagcttactcagttatgcgtgtagctgtacatatcacatggctggcacagagaggcccacaggagctataaaatgatgttccgattgctgttaattacctggaaactgaactgtactgggcgagtgatgaaggtaggatggaagcgccaagctgctgtgaacactgagggaaaattcaggtgtaatttcctctctagtctctagaattacaaggcaaggtatatatttttaacgtttttgtttatgaatagaagatgagctatgcttagattatggattgtatagtacccgccccttgaggctgggctgggtcctccagaatatatacccctgcatgtgtcactgacatcatttggtcgacatgatagaaatatttgggagcaaccctagtaagtgcactcatagtagggtataactaatactctatttgtataactataaagcnatgcaaataccacccgctaactgaaaaaaaaaaaaaaaa

SEQ ID NO: 21468 - DNA, 986 bp, Oryza sativa
  Clone ID: PAT_MRT4530_26736C.1
cgccacgtcgccgggtctctcaccggcgccgctgagggcgccgccggcacctccacccactctctcacccccccccccaacgcccccgccaccaccccgacccaacccaaacttcttttccacgccgccgccgccgccgccgccgccccacgcccgatgccacccgccgccgccggctgccaccgctgccggcggcttcctccccaccgccgttgacctccccccacgccctcgccatgccccgcctccccctcctcccctcccgctccccccgccgccgccccctcctcctcgccattctctcgaacaccttctccgcgtccacccgcgcccctcccccgcctctccccccgctctccccgcttctcccgcgccgagccgacgccgccaccgccctcacccccgtcgcctccgccatcgccgactccttccgcgactggttcctcctgtcccgccgcggggccgcgggggccgccgcgccgcccgcggcgctcgacgcgatctacagcgccgtcgcggccgaggaggccgcggcgctcgacgcgctcccgctctccgagcagctcgtgctggccgtgctccgccaccgcccgcgccacctccccgacgacgacgcgctgctgctgctccgcctcaggttcttcgactggtcggggagccgcgggcggtactcccacacgcgcgccgtgtaccactccgtcttccgcctcctctcccgctcccgccgctccgccgtggtggtggactggctccgcctcttctccaacgccaacgcgacccccgccaggtcgcgcttccacgacacgctcgtcgtcggctacgccgtcgccggcgatccccagcgcgggctcagcatcctcggtcgcatgcgattccgcggcctcgacctcgacgccttctcctcccacatcctcctcaattccctcgtcgaggcgtcgctccatgagtatgctgattccttcgctcgccaccttgctgcaagtcct

SEQ ID NO: 21469 - DNA, 882 bp, Oryza sativa
  Clone ID: PAT_MRT4530_26737C.1
cccacgcgtccgcccacgcgtccgcttggtcgtctcgtcgtcatcgcctcgtcgcctcatctcgatctcgtcgattctatccgagcagtagactagggtttttgctgctcgagcggagagcagatggggaaggactccaagccgaaggacaaggggaagggcaagcaggctgccggctcgtccggcggcgatgacgccggcggcggcggcaagggaggcaagggcaagggcggcaagtccgccgacggcctcggcacctgcacctacgtcaaagctaggcacgtactgtgcgagaagcaagggaagatcaatgaagcttacaagaagttgcaggatggctggttggacaacggggacaaggtccctcctgccgagtttgcaaagatagcccaagaatactctgaatgtccatctggaaagaaaggtggagatcttggatggttcccgcgtggaaaaatggctggcccttttcaggatgttgcatttagcacacctgtgggagctactagcgcaccatttaagtcaacgcatgggtaccacttcatcctctgtgaaggaaggaagaactgatcagtctgcttcaggttggaacagaagcacctcagtctatacaagatgcagatgcctcgtgtctctgtcaacttaataagcactgaatgacgggcatccatattctatgtttagcctttctaatgctctctgaaagagtcttgaaaaactgtgctttctgtaagtaacctgtggtgtcaagcatgacatctatttgggatatgctgagatttagcatttgtctgtgtctcttatctaattggcatcttgttagctattgttatgtctctaaaaaaaaaaaaaaaaaaaaaaaaaaaaaaaaagtcttgcctg

SEQ ID NO: 21470 - DNA, 569 bp, Oryza sativa
  Clone ID: PAT_MRT4530_26738C.1
acatcgccgcgaccgcggctccagacggagcggcactacgcgtacgcgggcagcagggcgcagtgccgcagccggcgggttcaccgcagccgaactcggcaggcaaccagtcgcaggcagcccaggtgggcgcgcctgtacggcgacgagggcgcgctgcaggcagctcccaccaggcagccggtgtcgtgtcgtggaggcctccgagccaggacttccggcactacaggagcgggttctacgccgggagcccgcagtgcggcgcaggctcaaccaccccgtcacgtggtgggctacggcgcgcggcggacggcggcggggagtactggctggtgaagaaccagtgggggacagtggtggggcgaggcgcaggcatacatgcagcagtcgcagcagcggcaggcagccagcacaggcaggcaactgcaggcatcgccaacactacgccttctacccgaccatggacagctagctcaactgagcactggacagtgaacactagactgatgcaaatatgtactaatattgataagaatgttacgcctaatgcaaataaaaaaaaaaaaaaa

SEQ ID NO: 21471 - DNA, 844 bp, Oryza sativa
  Clone ID: PAT_MRT4530_26739C.1
atggggaaggactccaagccgaaggacaaggggaagggcaagcaggctgccggctcgtccggcggcgatgacgccggcggcggcggcaagggaggcaagggcaagggcggcaagtccgccgacggcctcggcacctgcacctacgtcaaagctaggcacgtactgtgcgagaagcaagggaagatcaatgaagcttacaagaagttgcaggatggctggttggacaacggggacaaggtccctcctgccgagtttgcaaagctgaatgctgcagttccagttatctcctatgaatcacagatgatagcccaagaatactctgaatgtccatctggaaagaaaggtggagatcttggatggttcccgcgtggaaaaatggctggcccttttcaggatgttgcatttagcacacctgtgggagctactagcgcaccatttaagtcaacgcatgggtaccacttcatcctctgtgaaggaaggaagaactgatcagtctgcttcaggttggaacaaaagcacctcagtctatacaagatgcagatgcctcgtgtctctgtcaacttaataagcactgaatgacgggcatccatattctatgtttagcctttctaatgctctttgaaagagtcttgaaaaactgtgctttctgtaagtaacctgtggtgtcaagcatgacatctatttgggatatgctgagatttagcatttgtctgtgtctcttatctaattggcatcttgttagctattgttatgtctctaattggatggttcctcctcttacgacaaggcgggtcttgcctgaaaattagaaaatgcgtaaaccttgtgcgccatataagcaatt

SEQ ID NO: 21472 - DNA, 1639 bp, Oryza sativa
  Clone ID: PAT_MRT4530_2673C.1
ctaaccaaaaactttccccaatcttccacctcgagttctccggcaacacccttcaagctttccggcgatccgcagacgcttccggcgactccaatctccgccaatgacaatgtcaacctccgccagtccaccgagctcgttggccaccgaatacatcgaggtaagtatccatcggctaaatcccttcttttcctcgtagatttggttcttcttccgctcaatcctcgattttcttcctctgtagcacctcacccaccaggttgcaattcctagcgtagccgatgaattccagtttttccttggcccaatcggcaacttagaccccatagagttcatcaatggagaaaccaaccgaatcccctttagatttgccaatccagatcttagcccttggaaaggcaccttcaaatcctggccatcaaccgaagtcagctggcttgcctggtacaagaggatgttggctagcaaattagcccactgggacgaaatcgacatatcgcaagctttggccttaactgcagcaaaagcagcatcggttagcgccgtgtccaagctatcgaccgaacctttcaaggagtggttcaacaatttctatgatgggttccccaagaatgataggatctggtttgcatatgaaggatctgctagctttgaactaacatgtgattttcgattcgatgaaatcaactctgaaaaatatgataaatccagagaagtattctcaacagctatcagcccctgtatcatccctgttggcatctatcaagataagaatatccagatgacctacgaattctatcatccaacaagcgctgcaaggcaattcggcatgggtcaactgccaattagcctattctttgccgacaggattcaaagtagaggagagatttcatcattccatatgatggattggctgctgaatctaccaggaccacctcttggcaatattgacaacatcaaactaaggacattcaggagcatggcctttgaccgatggtggatagaatggaaaaaacacctgttccatcaatcaccgtccatgtatttgacaaaccttttccctgacgatgtcccactgcgaccgaaggcggcggctgagacggcggcgcggtgtggctggatcgacgatgatggtggagagcttcgagtcgacggtgccggcggcgctccgatgatctgcggcggaaacggaggacgggacgaggacggcgacgacatcgcgatgctgatgaaggagacggcgaccgacggcgatgaccgaagcgacagcgggaccgactggagacccgccggcggcggcgatacaaagaaccacgcggaggcgacgctagagaaggcggcagtcgaaggtggagatggtgatgcagagaggaggtcccggaggtccttctataggggtctaggtgtgtcgatggaggcccacggcgatcggcgccgagaaggaaagctatggttggaggaagaaaaatcgatccgaatcgagctcaaatccgtcggtttccaaacgaaattagccgaagtttccaaaagagaaaaggaagaggagatcgaggagattatttcccctcaattgatttggccggggaaggaaggtggcggccggattttggaaggaggcggcggcttgcaacgcggctag

SEQ ID NO: 21473 - DNA, 324 bp, Oryza sativa
  unsure (1)..(324): unsure at all n locations
  Clone ID: PAT_MRT4530_26740C.1
gcgtgctcgggcagtttcctaccgataatgctcctgccgctgctcctcgccggcgccgcggtggcgngcggcgcccgcggggctntgggctggcgcagggctggccgacgcgtggggcagcagcagcagcagtgctgggaggttctgatggagatcaagtcgtgcacgggggagatcctcctcttcttcatcaacggcgaggcgtacctggggcccggctgntgcgcgccatccgcgtcatcgagcagagctgctgggccaccgacgccatgctgtccgtcatcgggttcaccccgtaggagngggacatgctcaagggctact

SEQ ID NO: 21474 - DNA, 316 bp, Oryza sativa
  Clone ID: PAT_MRT4530_26741C.1
atagggagaggacatactcttattcattcatccattgctcaagcgtacaatacatgagttttcaaccctctatttataagcataatgcctatataaaaagtaaggcgaagggccttataagtatagcgggctcgttcttgatggtgcaagcccaaatgcctcctaataagagaaacccattgcctgaatgaaatatataatggtcgggagcccaagaccagctcatgcactgcccgacttaactctgaaaaaataaaactcctgtacatctccccgagaaaatatttaaatgttagacaaaacatctgggagctaa

SEQ ID NO: 21475 - DNA, 235 bp, Oryza sativa
  Clone ID: PAT_MRT4530_26742C.1
cctctattaagctcattcaggcttctgccgttttggatttaaccgaagatgatttcgattttctgacgagtaacaaagtttggattgctactgaccgctctcgtgctcgtcgctgcgttgaggcttgcgtttatggtacgctggactttgtgggataccctcgctttcctgctcctgttgagtttattgctgccgtcattgcttattatgttcatcccgtcaacattcaaacggg

SEQ ID NO: 21476 - DNA, 420 bp, Oryza sativa
  Clone ID: PAT_MRT4530_26743C.1
atgggcgccgcggtgggcattgcggtggtggacgcagagacaaaggcgggcccgggcgctgcggcggtgagtgcagaggcgggcaccgcggcggttggcacagaggcgtgcgtcgcagcggtggatgcggaggcgggcgccgcggcgattggcacggaggcgcgtgtcgcagcgatgggtgtggaggcggcctggctatggggacgactgcttccccgttttcttcaccaagaccaagtgcacgtcggcgccgacgtggtcctagcactcctcgatgggttcctcttcgccgctgcaccgacgggctttgcttcgacccttcgctcctccacgctcggccgccgcgtcctcgaccttggtggctcacggcgtggccggtggtcagcaggggagaagaacggcggcggcgttcggtggtga

SEQ ID NO: 21477 - DNA, 372 bp, Oryza sativa
  unsure (1)..(372): unsure at all n locations
  Clone ID: PAT_MRT4530_26744C.1
ctgatcttgaatagcccgtttcagacccatagccgaaattctagaggatcacaaccncagcatcgcgttcttgactccngagttccccttgcttgtgcacccaaaacatccaaatttcttgnncacanattgtggtagtttaccataacatgaactccttgtgctctaggaaaaattagtccttgtctgaagttgccctccacctganccacctcgtattgttgtattctgaagacatccctttcccaaaggagaacacncccaatgtaccataaaaatattggttatatcttaacaaaccatttttatcatatgagaaaaggattttattccttgattacttttggatcccaaaaaaaaaaaaaaaaaaaa

SEQ ID NO: 21478 - DNA, 456 bp, Oryza sativa
  Clone ID: PAT_MRT4530_26745C.1
atggcgaaggcgcggaagcatccgcagggcccgttcgtcgccgccgaggagaggtcgttactcgggttccaccaccgccgcggcggctccgtggcgtcggcctacggcgacgacgacgacctgcccgatttggcggaggctgatgtctggtacacgcagtcattcggaggggagtgcggatcatcgaggcggcggaggacgagggctggaaatcggcgcggcggcggcggagggaagcacaagtcttcgagtcaaggttcggtgtggcgtccggcgaggtcctcatcccccgcgcccaactctgtcgccgacgtcgagcgcccgccgaccgccgtcatccggcggcgagttggttctaggtcagggcaagtaccacgccagcgttctatgcacgcctggctgggcgtgagctactccaacactttcaagtcggcgtccgagatcgacttcacctga

SEQ ID NO: 21479 - DNA, 635 bp, Oryza sativa
  Clone ID: PAT_MRT4530_26746C.1
aaaaccgcccaaagccggcctttttttcaccattaaaaatcccaaagggcaaaacatatttccttggacctgggccaagggggggggcccaatttggaacaaaccccccgcccaaaatccagccttttggaaccaacccccccccaaggctaaaaaaaattaggggaaaaaaaaccacggggcccaccttgggaaaaaacacccccccccggtccctggagggaaaaccaaaacaaaggggggggggggaaacccccaaaaagggggattaaggcaaaaaaaaccttacggggggggatttcctataaaacaaaaagggggccaaccccccccgggttggaaaaacacccggcccaccccaggggctaaacatatcactaagggcccccggcccttgggtggacccatggtcgccctttttcaaccccccaaaaagggggaaaaacgggccagggtttttctcgaaaggagggcccccagggccccgtgaggcttggagggtggaaaacaaaaaaggggccggggctggaacctccctccccgtgtgaaaacccccccggaaaaacccaaggcccaagggggggggggcccccaaaaagggggaagggggttgggggtgccctcgccccccccca

SEQ ID NO: 21480 - DNA, 193 bp, Oryza sativa
  Clone ID: PAT_MRT4530_26747C.1
gaaaggaaattaaactgatatattacttgttccagtgaaaccattacactagggtgcgtggtgaaaccgttaaagttaaaaaacataaacagtattagtagagtgaggccctgcttgctgtatcatgaaaggtgcacgaagaaccatcacactagcagaacatccatcctacacgcattaaggaaacgttagg

SEQ ID NO: 21481 - DNA, 198 bp, Oryza sativa
  Clone ID: PAT_MRT4530_26748C.1
atgtttcctggagggaatccggacgcgctggcggggaggcggctaggtttggcgcggttctggtgcggcacggaggggatggcgcaccggcacggacacgatgcggtgcacgggggcgacacgagatgcggagatggcgcgattgatcacgtgcgcggctcagtagtgaccgggaaggagcggactcgcagcatgtga

SEQ ID NO: 21482 - DNA, 407 bp, Oryza sativa
  Clone ID: PAT_MRT4530_26749C.1
aaagaagaagaaaggctttcaaagccaggtcctttaaagttttccagaaataacaaaaggcaaaccatccaaagaggggaaaatccccagcaggaaaaatagcaatcccagggacaaaactataaaagcatttttaaaatggtcccattcagaaaaggctagaagggcctaaacccacccagggggttttgttattgggcttcggaaaaaaaaaccaccgggggttctccctcctccgggcgaatggggccctgtcattgaaccaaggcctatcggaggcttttgggggaacaggtttaacccgcctttgcctttcgggggacctttaaaaaatctctccattgacaaaaagctaagctccatagcccttgaactcagggccgacataggaatcggggaggacaaac

SEQ ID NO: 21483 - DNA, 4154 bp, Oryza sativa
  Clone ID: PAT_MRT4530_2674C.1
ctatgcgcggcggcaggcgacgatggtgacggcgcgcggcggctcggggcgcgaggcggcgatgggacgcgcgagcggcgacgggacgtcgacggcgacggcgacagcggcgacgcgacgggcggcgacggcgcgcggcggctcggggcgcgaggggacggcggcgcggcgcagcggcggcggcagagaggaggcggagcggcgcgcggcgcgcggggcgcgaggcagcgtggcagaggaggggctagggctaggggaaccacgtcgagcacggtgaccaactatgtcggcaagatgcaggcattggtggacgagctcacggtctctggcaaggtggtcgacgattacgatctcatcagctacatcatcgcgggcctcgacgacgactatgagcccatgatccaatccattgtcgggcaaccagatcaagtcacggtcggtgaggccttcgctcagctcttgaattttgagcataggctcttgctgcaccgtggtggagaagatggccaagtctcggtaaacagtgcaagccatgggtgaggacaacagcgcggcaacacaagcagtggcagcggcggcaacaacaactttagcaacaaccgtggtggaaggggtcgcggcaaccctagttcaggtcgcggcaatccagctcctggaggggttgataataggcccaaatgtcaactatgctacaagcgtggacacacggtaaaagaatgtcgttatgatgaaaattttgttgccgatgaaagatttgcaggaccggcatcctcgtatggtgtagataccaactggtatcttgacaccgatgaaacagatcacgtcaccggtgacatgaagaagttgactgttcgtgaaaagtatcatagacatgatcagattcacaccgcaagcggtgcaggtatggaaattactcacattggcaattctgttgttaagacccctagtcgcaatatctatttaaacaacatcctttatgctcctaaggcaaataaaaatctagtttaagcctatcgtcttacttgtgatatttttgccttcatagaattatatcgtaaatttttctgtatcaaggatctggccacgaagagaactctgcttaggggtcggtgtcataatggactgtatgctcgccctcttgcatcgccaagtcatcatccaataaaacaagtctatggaattttcacaccatcctttgagcggtggcatagtcgtcttggtcatctttcctacaatgttgtagagaaggttattaaaagtcataggttaccttgtctagatatgtctagtaaaggctcagtttgtgatacatgtcagagagcaattacctttttctagatcatctagtgagtctgaatatcctttggaactcatttattctgatgtctggggtgctgcccctcaatctgttggtggttttaaatattatgtgagttttattgatgactatagcaagtttacgtggatttacttgcttaagtataaatcagatgtgtttcagaaatttcatgagtttcaacagttggttgaacgactgtttgataggaaaattatagctatgcaaactgattgggatggggaatatcagaaactccacaccttctttcaacagactggtattactcatcacatctccaatccccatacccgccaacagaatggctctgctgaaaggaaacatagacacatagttgaagtggggctctctttgttagctcactcatctatgccattgaaattttgggatgaggcttttctttctgcagtttatttgattaatcgcacccctagtagagttctcaaagatatctcaccccttgaaaaactttttaccaagcaacctgactataccactcttcgtatcattggttgctcatgttggcctaatttacgaccctataacaaacataaactttaattccgtccaaagagtacactttccttagctgtagcatttttcataaaggttttaagtgtttagatccttccaatggccgggactatatttctcgtgaagttgtgtttgatgaaaacaagtttccctttttcaaggtccacccaaacgctggtgcacgtcttcgtgcagaaatttctcttcttcctgatgctccagcaccagtgggtcagcaacataattgtcatgtgaataattctcctgaaaatcctgaagttttgcagcaaaattcaacggaaagtgcagcatatcataatacagctcaggcgggcaccgatgcgacatcctcgtctgctgcaccgcagcagccctcgggatggccgttgcagcaggcgtcctccactgcgccgtcttcgccatcttcatctcccggccaaccaaccggcgccacgtcctcgccagtacagaagagcccgcgcggctctgcacctggagtcgtccccgctgtcaggatcttctgcggcaaggggcacggcatccagtcatgcgacaaccacaaaagatccgacgtcagctcctgatgctgcaggtaatgatgatgctgcaggtcatgatggtgctggtgatgatgccccgcgacctcgtcggttgtagagtggcataagaaaagagaaagtatacagagatggtacagtaaaatggggtctgttgacctccactgataagccacaaaatttacaagaagctttaaataattctaattggaaagaagcaatggatactgagtatatggcattaattaaaaataaaacatggcacttagttcctcctataaaaggtaggaacattattgattgtaaatgtgcttacaagattaagaggaaataagatggcagtctagatagatacaaagcttgccttgtcgcaaaaggttttaaacaactatatggtatagattatgtggatatctttagtcctgttgttaaagcagctactatcagaattattttgttctgttgcagtctcaagaggttggagtctcagaccacttgatgttcacaatgcctttcttcatggagtcttagaagaagaggtctacatgaaacaaccaccagggtatgaaaatccctctaatccccgttatgtttgcaagttggacaaggctctttatggcttgaagcagacaccaagggcttggtactcaaggttaagtaataaattatgtgatcttggttttagaggttctaaggcagacacatccttgttctactttaataaaggggatttaactatgtttttgctcatgtatgttgatgatattattgttgtaagttcaaaggaagatgtagtttcagtcttgttgcagaatctccagaaggattttgctcttaaggatcgtggagagctgcactactttcttggtataaaggtaacaaaagcttccaatggaattttgttgacacaataaaaatatatctctgatttactgaaaagaactggcatgagtgattgtaaatcagttaatacacctttgtctcctagtgagaaattaactgctaatgaagggacagtattgggggtaaatgatgctactcacttataggagtatagttggggttttgtatttaactctgacaagaccagatattgcttattctgtaaataaggaatgtcagtttttacattctccgaccactctacattgggcatcgggcagcagttaaaaggattttaagatatttcaagcaatgtacaagtctcggacttaagatatgttagtctaagtcattgttagtcagtgcttactctgatgcaaactgggcaggttgcctttgatgacagaaggtctactggtggttttgctatatatttgggggataatttagtatctttgaatgctaagaaacaagctacagtatctagatacagtactgaagcagagtataaagcattagccaatgctacaacagagattatgtgggtgcaaacactcttacaggaattacacataagtagtccgtctacagcacatttatggtgtgataatatgggagcaaggtatctatcttttaacccagtttttcatgctagaactaaacatatcgaagttgattaccattttgtgcgagagagagtggcacaaaaacttttgcaggtagattatgtttctacaagagatcaggtagcatatagttttactaaagctatttctgttaaacagttagaaaattttagatacaatctcaacttgggaaagttg

SEQ ID NO: 21484 - DNA, 681 bp, Oryza sativa
  Clone ID: PAT_MRT4530_26750C.1
cccgggctgcaggaattccggcacgaggaaaacaacggcggcgaggagcagaggggagctcagctttcaccgaagcctctcgctcgcgcgcccgccgcatcctctcctctccactccctctcgaccacccaacccgcaaagctacgacgaagcatacaccgccccgcgaatcccgtctctttcatgggcttcttctccccccacagcagattcgattccgccatctgcttgcttggatgactaattcatatgaccgtagtcgtcattaagccattacaactaggagttacctgggaaatgttgagaagctccaaggttctaggtggttcctttgccaaacaactataatatagattttatgaggggaggaaactcagatgaattttgccagtgccaggcctgccttggcaggtacacactacttgcagatggaaggaaatccaagattgggcaatggtttgagagacgacttcccttctttggttgtggaattggttggtgctggcagtcatatttacagcagcaactattgttaccctttctgttttgctgattatgtgtacacagaaacgattgaatagctgtgcttgtctgggctgactgaactgcaagacattgttgcagatccttgtgaccaaattcttatactgattcttttgttcgtctaaaaaaaaaaaaaaa

SEQ ID NO: 21485 - DNA, 393 bp, Oryza sativa
  Clone ID: PAT_MRT4530_26751C.1
acatctcttctttatacacaacacaacacatcacaatgtcgtctaagtgcccacgctgcggaaagaccgtctacttcgccgaaagacaaactgcggaaggacgtgactggcatggaatctgtttgatggaagccatcaaggaaaagaaggccagcgccgccaagcacatgttctgcattgacgctcaccccaacattgacccaacaaagcaacccgctgccggagcctcaggaaagtccttctgcacgggctgcggtgctgcacaagcacccggcgacaagttctgccccggatgcggcaacaaggtcgcgtaagctcatctcaaataaaccaaaaaagaacatccaaaaaaaaaaaaaaaaaaaaaaaaaaaaaaaaaaaaaaaaaaaaaaa

SEQ ID NO: 21486 - DNA, 399 bp, Oryza sativa
  Clone ID: PAT_MRT4530_26752C.1
atggcgccatcccccagctcactcaccaacatgttcgccaccaagggcctcgacctcaaggacctcaccgtcctctctggcacacacacaccatcggcattgtgcactgcccatactatgcctaccgtctctacaacttcaccactgtcggcgacgccgacccctcactcgacctcaactatgccgccaagcttaggacgcgcgctcgccgccgcgcgacctatgcccacgcccgagagagagggagtctcattgagctctgcgttccgccctaacttggcctccacggcgtgcagccgccacgcggcggcgtcctccaccgctgacaccactgccctccagcccacctaccgtccccgcgccgccgtccacctccctgcccctgcccgctgcccgtga

SEQ ID NO: 21487 - DNA, 282 bp, Oryza sativa
  Clone ID: PAT_MRT4530_26753C.1
gcacgaggtcccccgccggcccactctgctattccatctgcgtgagagagagaaagaggggaggggagagagatttgtggcgtcgtgggtgctcggttgcggcggttaccgcggggaggaggagggagttgtgctgttgggggtttggatctagagcgagcataggatgggagctgctggctcctgagctgcgccgcgcgttgccctccgggagatgaaattcgataagaatcaaagcttcacaacatctactggcgaaattggataggaatcaaagcttca

SEQ ID NO: 21488 - DNA, 235 bp, Oryza sativa
  Clone ID: PAT_MRT4530_26754C.1
cactttcacacatccacactgagggtacactctactcgcgcgagaggagggaggataggcgacggcctactactatcaggctcccgcctccgtcggcctaccatggacaacccgctctgcaccgacatcgacgactagtacttctccgacagcttctcggatgcgtatagcgtgcacgacctcatcggacgtgagctcgacgagaccagggccgacgagcacgacgacgtcacca

SEQ ID NO: 21489 - DNA, 776 bp, Oryza sativa
  Clone ID: PAT_MRT4530_26755C.1
agacaatattaaattctccagtgttcattgtcatttgcccaatataatcaggcttgcttcaaaaaattgttctatgacctttgtgtaccttagatcaagttcagtcacgatgcatgtttggatttggattgctttgacatttatgcatttatatttgaacagatggggctcgtggcaataccggccttgcgtgcgctcctcttttggtgtctgtttgcgcacgctctgctccccccctgccggttcactctctgctgccgcctcctatgccccggcgggtctgggaccgcgggtcctggctccccgccggggttctcctctgaccctctcttcgccttgctctattgcgactctcttgagggattgcgcgttcgcctgcagggtccggtccggatttcccggggcgtccctcgcgcccgggagtattcaagacgataatagagtcgcgggtttgtacttgtccaagaagcagcgatagattcagtggaagcattaatatttgtatgttctcacaagagattagtgccatggacatgccttttcttctcttataaaattgtcagtttgtttgtccttggacaggaagcgtttgatggtactaggcatgtgatctctattgcctgctgtgctagattgtcattatgcatgtctcaattttttttcgacttcttgttcttctctcaggacagcgtacgatatttaaattgctggtgttaaaagtttttatgggctacatctgaatatctgatcattggtcaaaaaaaaaaaaaaaaaaa

SEQ ID NO: 21490 - DNA, 155 bp, Oryza sativa
  Clone ID: PAT_MRT4530_26756C.1
gactttgatcgtcttgctgcaagacagaagcagcccttacaatccggaaacaaacatagcaggtaacgagttggagatcattccatatttcagcactctgtataaagtagatatagtgggagcagtagtgtagcacttagcgagggctttgtaat

SEQ ID NO: 21491 - DNA, 241 bp, Oryza sativa
  unsure (1)..(241): unsure at all n locations
  Clone ID: PAT_MRT4530_26757C.1
ggaggnccggcantcggaagcccangagtngcaaaagtctcctccgcaanttgccgacttcccgncaacgtcaagccgnagcagatcaaggggtccatgtgagaacggcgtnctcaccgtcacggttcccaaggaggaggccaagaagcccgacgtcaagtccatccagatctcngggctaggcatagccggcgttnccatgttgcgcaacggtngagggagcacgggcggtggttttttn

SEQ ID NO: 21492 - DNA, 1713 bp, Oryza sativa
  Clone ID: PAT_MRT4530_26758C.1
atgtcggaagaaagagaaagcttcgagagtcagtgggcaccctccgatgtgacggaagacaatctgaaggagatggtggcacacggcgttcttccagcaaaagagatcatcgggtggcgaccggcatttggtgaggcattcccgacccccgatacacacgaaatcgtggtattcgctcatttcttctatgacggattttctcttccaacctcgagatttttccggggtattctgaacttctacgggattagcttgcatcacttgaatccaaactccatagtacatattgccaattttatccacgcctgcgaagcttttctaggcattaggcctcatttcgccttgttccgccgcatcttcttcctcaagccccagccaaacaaaagcaagccgtgcgttgttgggggagctagtttccaactcagaggaaccttgagccaaaaatatttctccatgcccttcaagaccttgaacaaaggctggcatgcgaactggttctatattcagaatcctgagcccgcactccccgagtactgctgtcttcctccggtttaccaggacacatggaactcattgcctataggagatgaagctgctcaggcagtagaactgatggagaggatgataaagctgaaagaacagggtctccaaggagagcagatcacccggcactttatcaagtgtcggttagctccgatcaaagaaagatcctgcacagcttttgagtttgatggcaagcatgatccaaatcgggaagatccagattctcttgactttagggtcatgaaagaaagaatgtacaagatcttctcaaacgctattgttgtcagctattcacatctgctgcccgttgtgccattcaacgcattcaaccctcctccactggaggcctggagaccgagggacaaccaagaaactaccaaaacaggctactccaaggaagaaaacatccagtcgccctgcgccaaagatcaggaagtcttccagatccgtctgggaaagactctgacccgactagcgtgggcgcaagggatcgtgataaataagcaaaaagaggacgaagagttatgcctactgaagaaggcacttggtcaggcaacccgcattgtaaatgaatccaattttgaactgagtggctcatcaaaagttaatgtagtgcaagctgccaagatatctcaactagagaagcagacccaaattctggaaaatgacaaggcagaactggcaagacaaagagacctagcttcaaaggaagttgaagaccgcaagatcaaatctcaagctcaattcgacgtcctggctggcaagatcaaaaaacttgaaggagcccgggatgaggttgctaacgctgctgccccaattgttcaagcgatgttcctcaataacaacggcccgagtgcacttgatgcttctgaaatttttgacaagctgagagttgctccggatatatatttcaagaacatcaaagaagctggaagtatgggagcaagtatggcgttcgtgatgactaaatccctttatccgagagttgatattgacgccattgatggctttgcagacgggacgagcgaagaagctgctcttgacctcatcagtgatgcgaaaaaagcggctgacaaaattgctgctgatgtagttgagagatttcaggacaacgatcttcgaccggctggtcctgaaaattctgatgatgaaaagactgatactgattaa

SEQ ID NO: 21493 - DNA, 378 bp, Oryza sativa
  Clone ID: PAT_MRT4530_26759C.1
ctttttctttttccttttctattgtttctgccgcccagaccgcacaaaatcatatatagtactttatcaccagctattttgtttccaaaacatttcattatacatgatgcgctttgaacactagcgcaatccaggcaacacaccaacggcgtgaccctactacctatgaggcaagccacataagcctaccactgcccggcggaaaccacccagccctggtggcccaaaacccggcacattgacggaagctgcgccgcgtactgcctccccctggccagcctcacgcggggcataccccgatgcagcggcacactcgcccaaagccgcacacagcgacacccctccccgaagtacccctgctccgaccaccaccccctg

SEQ ID NO: 21494 - DNA, 1683 bp, Oryza sativa
  Clone ID: PAT_MRT4530_26760C.1
atggcggaagaaagagaaagcttcgagagtcagtgggcgccctccaatgtgacggaagacaatctgaaggaaatggtggcgcacggtgttcttccagcaaaagagatcattgggtggcgaccggcatttggtgaggcattcccgacccccgatacacacgaaatcgtagtatttgctcatttcttctatggcggattttctcttccaacctcaagatttttccggggcattctgaacttctacgggattagcttgcatcatctgaatccaaacttcatagtgcatattgccaattttattcatgcatgcgaagcttttctgggcattaggcctcatttcgccttgttccgccgcatcttcttcctcaagccccagccaaataagagcaaaccatgcgtcgttgggggtgctggtttccaactcaggggaacactaagccaaaaatacttctccatgcccttcaagacctcaaataaaggctggcacgcaaactggttttatgttcaaaaccccgagcctgttcttcccgagtactcctgtcttcctccagtttatcgggatacttggaactcactgccaacgggagatgaagctgcacaagcactactcacacttgctgccagtcgtaccgttcaatgcattcaatcctcctccaccgttaacaatgaaggatattacacccaggagtttgctttgatgaagttggatcccccaatcgctcaacgccgatctccccgccatcaaactgggcaagggagcggaggaccaagaattcggtctgaaactcaaccaatgaatacattaggaccaatgattggtgatgaagaagaaatcccccgtatacgagcaaccgaagattcgtgccctcccattctggtcaagtggtgggatgacaacttgcaacctcaaggaattgtaataaaccggcaaaaagaagacgaagaggtctgcctactgaaaaaggcactcaaccaagcgactcgcattgtaaatgaacgaggcgaaaaccgcgaccctagagagaatagtcctcatcttggaaccctcgaagccaccaggagtcaactgcacgaggccagagaacttgccaagaagaatgaacacgatctgagggatcttaatgtagtgcaagctgccaagatatctcaactagagaagcagatccaaactctggaaaatgacaaggctgagctggcaagacagagggattcggctttaaaggaggttgaagaccgcaagatcaaatctcaagcacagtttgatgtcttagttgacaagatcaacaagcttgaaggagccagggataaagtcgctaatgccgctactccactcatccaggccatgttcttcaataacgccggttcgagtacacttgatgctaccgaaatcttcgacaagctaagagtcgctccagatacttatttcaagaacatcaaagaagctggaagtatgggagcaagtctggcgttggtgataaccaaatccctttatccaagggttgatatggatgccattgatggctttgcagacaggacgagcgaagaagctgcgcttgacctcatcagtaatgcgcagaaagccgctgacaagattgctgctgatgtagttgagagattccaagatgtcgaccttcagccgactgggtttgataagtccaacgatgaaaaaactgatactgattga

SEQ ID NO: 21495 - DNA, 1971 bp, Oryza sativa
  Clone ID: PAT_MRT4530_26761C.1
atggcggaagagagagaaagtttcgagagtcagtgggcgccctccgatgtgacggaggagaatctgaaggaaatggtggcgcacggcattcttccggcgaaggaaatcatcgggtggcgaccagcgttcggggaagcattcccgacccccgacacacgcgaggtcgtggtattttctcacttcttttatggcagattttccctcccaacttcaagattcttccgagggattctgaacttttatggaattagcctgcatcatctgaatccaaactccatagtgcatattgcgaacttcattcatgcctgcgaagcctttctgggaattaggcctcattttgctttattccgccgcatctttttcctcaagccccagccgaacaagagcaaaccatgcgttgttgggggcgccggcttccaactcagaggaacactgagccagaaatatttctctatgcctttcaagacctcaaacaaagggtggcacgcaaattggttttacgttcaaaaccctgagccagctcttcccgagtactcttgtctccctccggtctaccaggacacatggaactcattgcctatgggagatgaggctgctgaaggagtggagctaatggagcgcatgataaagctgaaggaacaaggcttgcaaggagagcaaatcactcggcacttcataaaaagtcgctattcgcacttgctgccagtggtgccgtacaacgccttcaaccctcctccaccggaaacagctggaaaacaaccaaggcaggctaatccaaagaagaaaacatctagtcgtcccatgccgaaaatccgaaagtcttccagatccttctggaaaagactcaggccgactggcatggaaacaggttcttcaaaagagactgggccaactgcagggaatcacccgagtgatgaacagccggcgaccgacaatatagatcccagcagtgagcccccggctgggagccaatcagccgaagctggggttggtgcaagtcaggagctcccgactagaaaccagtcggatacggagcaaaacaaggacatccctgaagtagaagctcaagctgacagccctcctaaaaaagatgtcaacgtcgatccagggtccagctctcctgctaaagtacaagggcctacccatccccgaccggaaataatcacaggcccgatgatcggcgatgaagaagaaatcctgaggatccagtcagctgaggattcacacccacccactttaatcaagtggtgggacgatgataagcaacctcagggaatcataataaacaggcaaaaagaagatgaggaagtgtgcttgctgaaaaaggcactcaaccaagccactcgcattgtaaacaatccatctcaggaacgaggcgaagaccgcaactcttgcaaagttagttcctcatcttggaagctcgaggccaccagaaaccagttgcacgaaattaaggaactcgccaggaaaactgagcatggtctgagagatcgagttgctgagctccaagagtccaacttcgaactaatcggttcatcaaaagtgcaagctgccaggatttctgaattagagaagcaggtccagaatctggagaagggcaaagccgaattggcaaagcagagagactcggctctaaaagacgttgaagacggcaaagtcaagtcccaagcccaaattgacgtcctgctgagaattgctccagatatttattttaagaacatcaaagaggctggaagtatgggagcaagcctggcgttggcgatgaccaagtccttgtactcgaagattgatattgacgccgttgacggctttgcagacgggacaagtgaagaagctgctctcgacctcatcaatgacgcgcagaaagccgccgacaagatagctggtgacatagttgaaagattccaggacaacgacctccggccggctggatctaataattctgatgatgaaaaaactgacactgattga

SEQ ID NO: 21496 - DNA, 1569 bp, Oryza sativa
  Clone ID: PAT_MRT4530_26762C.1
atgggggatgaagtcgctcaggcaatagaactaatggaccgtatgataaagttgaaagaacaaggtctacaaggagaacagatcacccgacatttcatcaagagccggctggccccaatcaaagaaagatctcgcacggcctttgaattcgacggcaagcatgaccccaaccgtgaagatcctgaatctcttgatttcaaggtcatgaaggagagaatgtacaaaattttctcaaatgcaattgtcgtcagctattcacatctgctgccagtcgtgccattcaatgcattccaccctcctccaccggaattcgctttgatgaagtcggatcccccaatcgctcagcgccgatcacctcgccgtcaaactggtcaagggagcgggggaccaaagatccggtccgaagctcagcctaacacctctaatccagccagccagtcagattcccgcaagaggaaattagtgctgagtgacgacgaaggcgatgacgctgaaaagcctggagatagagaaaccaccagaaaattgccgaagcaggctactccaaagaagaaaacatctggtcgtcctgtgccgaaaatcagtaaatcttccaggaagccgtctgacatagatccttctggaaaagaccccgagccgactgacatggaggcaagcccttcaaaagaaaccgggccaactgcagaggatcgtccgagtgacaaacaatcagcaaccgacaatgtagaacccaggaacgagcccccgactgggaaccagtcggccgaagctgaagtcggtgctaaccaggagcccccgactagaaaccagtcgggcccgatgatcggcgatgaagaagaaatcctgaggatccgatcacctgaggattcacacccacccactttaatcaagtggtgggatgatgataagcaacctcagggaatcataataaataggcaaaaagaagacgaggaagtgtgcttgttgaaaaaggcactcagccaagccactcgcattgtaaacaacaatacagtgcaagctgccaggatttctgaattagagaagcaggtcgaagctctggagaaggacaaggccgaactagcaaagcagagggacttggccttaaaagatgttgaagaccgcaaaatcaagtcccaagcccaatttgatgtcttagttggcaagatcaacaggcttgaaggggctagggataaagtcgctaatgccgctactccactcatccaagctatgttcttcaataacgccggtccgagtacacttgatgcttccgaaatcttcgagaagctaagagtcgctccggatacttacttcaagaacatcaaagaagttggaagcatgggagcaagcctggcattagcaatgactaaatccctttatccaagagttgacattgatgccgtcgatggctttgcagacgggatgagcgaagaagctgctcttgacctcatcagcgatgcgcaaaaagccaccgacaagatagctgttgatgtagttgagagattccaagacaacgacctccggccgactggatctaataactccgatgatgagaaaactgatactgattga

SEQ ID NO: 21497 - DNA, 386 bp, Oryza sativa
  Clone ID: PAT_MRT4530_26763C.1
gcagctaaaaagcctattatgggggaggagaggcggatgagccggtgcctgcactgacacacaacgatgacctacaaccgtgctgatgggagacatgggctaccgggatcctggggcggctgcctgtcaagcacctactgcagtacaagccctcgtgcggaggatgactagccatcattgactacccggtggaaacgcgaacttacctgcactcgtataggtgcaggcggtagcagagacacagtttaccaataaacggtcacagcagggtcaaagctcgtcgggtccggtgtgcatggcgatcctattgccacccattacattagtggcaacttgaacagagtatcgacacgacgtctaccagaaacaataatgtggcggggctg

SEQ ID NO: 21498 - DNA, 2082 bp, Oryza sativa
  Clone ID: PAT_MRT4530_26764C.1
atggcggaagaaaaaaaaagcttgaagagtcaatgggcgccctccgatgtgacggaagacaatctgaaggagatggtggcacacgacgttcttccagcaaaagagatcatcgggtggcgaccggcatttggtgaggcattcccgaccctcgatacacacgaaatcgtggtatttgctcatttcttctacggcggattttctcttccaacctcaagattcttccgggggattctgaacttctacgggattagcttgcatcatctgaatccaaactccatagtgcatatcgccaattttgttcatgcttgcgaagcttttctgggcattaggcctcatttcgccttattccgccgaatcttcttcctcaagccccaacataataagagcaaaccatgcgtggttgggggcgctggtttccaactcagaggaacactaagccaaaagtatttctctatgcccttcaagacctcaaacaaaggctggcacgcaaactggttttacgtccaaaatcctgaacccgcacttcccgaatattcctgtcttcctccggtttaccaggacacatggaactcattgcctatgggagatgaagctgctcaggcagtggaattgatggaacgcatgctaaaactgaaggaacaaggtttgcagggagaacaaatcactcggcactttatcaaaagtcgattagctccaatcaaagagagatcccgcacggcttttgagtttgacggcaagcatgagccaaatcgggaagatccagattctcttgactttaaggtcatgaaagaaagaatgtacaagatcttctcaaacgctattgttgtcagctattcacacctgctacccgttgtgccattcaatgcattcaatcctcctccaccggaatttgctttgatgaagtcggatcccccaattgctcaacgccgatcgccccgccaccaaactgggcaagggagcagaggaccaagaattcggtctgaaactcaaccaagtgcttctgatccaatcggccagccagattctcgaaagaggaagctggttctaagtgacgacgaagccgatgatgccgccaggaggcctggagaccgagagacaaccaagaaactaccaaaacaggctactccaaggaagaaaacatccagtcgccctgtgccaaagatcaggaagtcttctaggatcatgatcggtgatgaagaagaaattccccgtatacaagcagccgaagattcatgccctcctattctggtcaagtggtgggatgacaacttgcaacctcaaggaattgtaataaaccggcaaaaagaagacgaagaggtatgcctactgaaaaaggcactcaaccaagcgactcgcattgtaaataggattcatcttagggacgaggtgaaaaccgcaaccctagagagactagttcctcatcttggaaccctcgaagccactaggagtcaactgtacgaggccagagaacttgccaagaagaatgaacacgatctgagggatcggattgctgagctccaggagtccaatttcgaactgagtggctcgtcaaaagtgcaagctgccaagatatctcaactagagaagcagatccaaactctggaaaatgacaaggcagagctagcaagacagagggattcggctttaaaggaggttgaagatcgcaagatcaagtctcaagcacaatttgatgtcttagttggcaagatcaacaagcttgaaggagccagggataaagccatgttcttcaataacgccgggtcgagtacacttgatgctgccgaaatcttcgacaagctgagagtcgctccatatacttacttcaagaacatcaaagaagctgaaagtatgggagcaagtctggcgttggcgatgaccaaatccctttatccaagagttgatattgatgccattgatggctttgcagacgggacgagcgaagaagctgctcttgacctcatcagtgatgtgcagaaagcggctgacaagattgctgctgatgtagttgagagattccaagatgtcgaccttcggccgactgggtctgataagtctgatgatgaaaaaactgatactgattga

SEQ ID NO: 21499 - DNA, 780 bp, Oryza sativa
  unsure (1)..(780): unsure at all n locations
  Clone ID: PAT_MRT4530_26765C.1
cattatataaactaaaactcagagaacagtagtaatcaatttgctagctagcccaaattaagaaaatcatatatatatataatnccattcttgcataaatgctagtaattaatttagctgatcgatgaacatttcacatgccagagccagcatggtacctcctagctagctagctagctagccgaggtacatgtggacgttgacggcgaggaggaagatggcgatgagcgcgaagtagatgatggagtggacgaggatggagaggccgctggtctggaagttgccgaactccacgatcctccccttccccgggatctggaacagcagccccggcgacagcaggatgaacagcaccagccctatgaacaccggcccccaatccgccatcgatcgcctactctctctctagctacctacctttctctctctagttcttgatctctctctctctctctctctctctactgacagaagagaagaatgagttgtgatccttcttcacacggttgcagggaagatatgcagatgtgattcttgtactaagtaggtctctctctttcacacacacactcagcttggaagacttggagtctccggacgcgtggggttgctggtgaaaatgcctgaggcatttttatttgattgtgtgagcctgcagaattcaggctggtgaaaattgtagataaataacagctcaggtccaatggttgatggtggtggtggtggtggtggttgtgcagattatctcatcaactaattgtgccacgtcagtattctttt

SEQ ID NO: 21500 - DNA, 204 bp, Oryza sativa
  Clone ID: PAT_MRT4530_26766C.1
atggcgtttgagaagatcttatacatcctttccttcatgaccttgaagtcaagagaatctggatcttcacgctttatcatcctctccatcagttctactgcttgtgcagcttcatctcccgttggcacacccccaacgacgcatggtttgctcttatttggctggggcttgaggaagaagatgcggcggaacaaggcgaaatga

SEQ ID NO: 21501 - DNA, 1638 bp, Oryza sativa
  Clone ID: PAT_MRT4530_26767C.1
atggcggaagaaagagaaagcttcgagagtcagtgggcgccctccgatgtgacggaagacaatctgaaggagatggtggcgcacggcgttcttccagcaaaagagatcatcgggtggcgaccggcatttgtttatcgggatacttggaactcactgccaatgggagacgaagctgcacaagcagtagaactgatggagaggatgataaagctgaaagaacagggccttcaaggagaacagatcacccggcactttatccaatgtcggttagctccaatcaaagaaagatctcgcacagccttcgaatttgacggcaagcatgacccaaaccgtgaagatccagattctcttgacttcaaggtcatgaaggaaaggatgtataagatcttctcaaacgccatcgttgtcagctactcacacttgctgccagtcgtaccattcaatgcattcaatcctcctccaccggaatttgctttgatgaagtcggatcccccaatcgctcaacgccgatctccccgtcaccaaactgggcaagggagcggaggaccaagaattcggtctgaaactcaaccaagtgcttctgatctagtcggccagtccgattatcgaaagaggaagctggttttaagtgacgacgaagccgatgataccaccaggaggcctgaagaccgagagacaaccaagaaactaccaaaacaggctactccaaggaagaaaacatccaatcgccctgtgccaaagatcaggaagtcttctaggaaaccatttgatatggatccgtctgggaaagactctgacccgactaacatgaacacaagttcgtccaaagaaaccgggccaactgctggggatcatctgagtgacaatcagccggcaaccgataatgtagaatccgtgaatacattaggaccaatgattggtgatgaagaagaaatcccccgtatacgagcagccgaagattcgtgccctcccattctggtcaagtggtgggatgacaacttgcaacctcaaggaattgtaataaaccggcaaaaagaagacgaagaggtctgcctactgaaaaaggcactcaaccaagcgactcgcattgtaaatatatctcaactagagaagcagatccaaactctggaaaatgacaaggctgagctggcaagacagagggattcggttttaaaagaggttgaagaccgcaagatcaagtctcaagcacagtttgatgtcttagttgacaagatcaacaagcttgaaggagccagggataaagtcgctaatgccgctactccactcatccaggccatgttcttcaataacgccggttcgagtacacttgatgctaccgaaatctttgacaagctgagagtcgctccagatacttatttcaagaacatcaaagaagctggaagtatgggagcaagtctggcgttggcgatgaccaaatccctttatccaagggttgatatggatgccattgatggctttgcaaacgggacgagcgaagaagctgctcttgacctcatcagtgatgcgcagaaagccgctgacaagattgctgctgatgtagttgagagattccaagatatcgaccttcggctgactgggtctgataagtctgatgatgaaaaaactgatacttattga

SEQ ID NO: 21502 - DNA, 2163 bp, Oryza sativa
  Clone ID: PAT_MRT4530_26768C.1
atggcggaagaaagagaaagcttcgagagtcagtgggcgccctccgatgtgacggaagataatctgaaggagatggtggtgcacggcgttcttccggcgaaggagatcatcgggtggcgaccagcatttggcgaagcattcccgacccccgatacgcatgaagtcgtggtatttgctcatttcttctatggcggtttctcccttccaacctcaagatttttccggggaattctgaatttctatggaatcagcctgcatcatctgaacccgaactccatagttcacatcgccaattttattcatgcctgcgaagcctttttagtttatcgggatacttggaactcactgccaatgggagatgaagccgcgcaagcagtggaactgatggagaggatgataaagctaaaagaacaaggccttcaaggggaacagatcacccggcactttatcaggtgtcggttagctccaatcaaagagagatctcgtacagccttcgaatttgacggcaggcacgacccaaaccgtgaagatccagattctcttgacttcaaggtcatgaaggaaaggatgtataagatcttctccaatgctatcattgtcagctattcacacttgctgccagtcataccgttcaatgcattcaatcctcctccaccggagttcgcattgatgaagtcaagtcctccaatcgcccagcaccaatcacctcgccgccaaactagtcagggaagcgggggaccaagaattcggtctgaaacccaaccaagtgcttctgatccagtcggccagtcagattctcgcaagaggaagctggttccaagtgacgacgaaggcgatgatatcggaaagctcaaagataaaggagcgaccggaaaacctccgaagccaactaatccgaagaagaaaacctctagtcgtcctttgccaaaaatcagaaagtcttccaggaaaccatctgatatagatccttctgagaaagactctgatctaactaacatggaaacggattcctcaaaagaaaccgagccgactgcaaaagatcacccgagtgataatctgcaggccagcggcaatgtagaacccagcgacaaacccatgactgcaagccaatcgactaaagctggagtcggagttaaccaggagcccccgattggaaaccagtcggatacagggccaagccaaaaaattcctgaggttgaagctcaaacaaacagtcctcccgaaaaggatgccgaccatgactctgaaactagatctcgtgcgaaaacacaagagtccactcgtccccgaccggggatcatcacagggccaataattggtgatgaagaagaaatcctccggatacgagcagctgaggactcgcgccctcctattctggtcaagtggtgggatgacaacatgcagcctcaaggaatcgtgataaataagcaaaaagaggacgaagagttatgcctactgaaagaggcgcttggtcaagcaacccgcattgtaaataggattcatcttaggaacgaagccaaaacggcaaccttagagagattagtccctcatctgggaaccctcgaagccaccaggaatcaactgcgcgaaacagaaaaacttgctaggaagaatgaacatgatctgagggatcgaattgctgagctccaggaatccaattttgaactgagtggctcatcaaaagtacaagctgccaaaatatcccaactagagaagcagatccaaactctagaaaatgacaaggcagagctggcaagacagagagacttggctttaaaggctcaattcgacgtcctggttggcaagatcaaaaaacttgaagaagcccgggataaagtcgctaatgccgctaccccactcatccaagccatgttcttcaataacaccggtccgagtacacttgatgcttctgaaatcttcgacaagctgagagttgctccggatacatatttcaaggacatcaaagaagctgggagtatgggagcgagtctggcgttggcgatgaccaaatccctttatccaagggttgacgttgatgccattgatggctttgtagacaggacgagcgaagaagctgctcttgacctcattagcgatgcgcaaaaatctgccgataagatagcagttgatgtagttgagagatttcaggacaccgatctttga

SEQ ID NO: 21503 - DNA, 2168 bp, Oryza sativa
  Clone ID: PAT_MRT4530_26769C.1
ctagctccctggttttgtgtaaccgagaacagagtagaccgcctggatgacggtgcagacgaggccaacggtggcggccacgaggccggcgatgagccacgggttggcgaagtacttcttcttcagccacgccatccaccgccgcggccggctctggaaccgccgctcgagcacctggcacaccggcctcaggtagttcatgtcggcgtcgtccgcgtcgaacaccgcccccttgcacaggtccgcgaagtgcttggccacctcgccgtggtgccccagcccgtgcacgatcacgccccgccgcgacagcagctccacgtccgccgccgtgcacgccagctgcgacatgaacacgcagtacgccgtcacgtggctccccgccgccgccgggttcgactgctccagcgccatcaggttgcggagcagcggccacgtctccgcgtccacggtcagctgcggcatctccagcgtcccgccgccgcacccgctcaccttcacgtcgaggacgcaccgcgcgccgccgcgccgatcgaggggccgcttcttgaacgttacgccggcgaagtagtactccatcgccgtgcgccaccgccccacgggcctaccgccgccgcggcggcggctaccggtggtggcggcggacgtcagtactgtaggcgtgaagtgcatgtgcagcaggtggaggaggttggctggctccggcggccgctccggctcctccaccttggtcggcgtcgcgacggagtacccgttcacccgcaggagctcgtgcgcgtacctcgcgatggcgtgcaccgccggagtctggccgtcgaggaacgtcagctggtggatcttgtcgacgacgaagaagggaatctggttctccgcgaggtagaacacgtcgcggaccaccgccacggcctcctgctggtcgacggcggattcttcttccctctcctccaccgacggcacgacgcggttagcctctgccgccacgggcgccttgctgcggcgcccgacgacgacgtcgcggaggcggacgagcacgtagcacgcgtcgagcagccgccggcgcaggaaccccttgcagctcgggacatgaaaccatctcctcacgcggcggagcacgatgccatccgccgtggtctcctcctcctcctccacctcctcgtcctcaggtcggcgcctcatcacgacgtcgccgaagcggacgaggatgtagcagccgtcgagcagcagccagcgcaggaaatccttgctctggacgtgatcgaacgacagcttgtagcatttccgcgcgcgagcctccatgcgcgcgagctcggtgatgaagtcctccagctgcagcggcgcggtggtgtgcgccgccgccgccgacaggacctcctggagcctacccaccttgtcggagtccctggcgagcttggacttgcagtcgcagctgcggttgtacggcccgatggagacgaagtgcggctcgtactcctgcttgtcgacgttgcgggtgagctcggcgaccttgtcgatcatgatcgacggcggagatgactcgccgccggcccgccccgtcgtcggcgagttcaggcttgcgagttcatgcttcagttcttgcgccagtagtgaggccatctcaatgacatgttgatctgcaggaaaacagagcagctgccctagcactccatggatggcaaagaatatatatatagggagtttaaagaacagtactttactacgagttggtagcgtacccccgcggtaagcgcggtaaccgcggtaaccgcgcggtttaccgcggtaaatgaaaccctgctagcaactgaagcttgaagcttgagcgcctggacggtgggaaggaggatcccgccgctcgcagccgccttcgtccatgaaagagggaagacggtaatgcccacaaataaaacatccgccttgaccgattgcttcacgacctgcccgttgtttttccttttaatcgtcaagttatcagatgtcccatcaacagccaccactctgctccactcgctgtagggctgtaggccgcagccaagaagggagttacgaattgcaagacataactggagactggagaagtagatcagcttcccgtctccaaggtcttgcctcctagcttgcccaacggcccccaattcgtcgcgtatctccgtcacatatggcgtgacgcccat

SEQ ID NO: 21504 - DNA, 2133 bp, Oryza sativa
  Clone ID: PAT_MRT4530_2676C.1
atggatcttgagaagtcttcctcgaacaccgcgttcatgaagaagctgcagtatgatggtgccctccctggtcgcgggaccatgcagagggaggctggaggtatccgactgtgtcagattccgacttcgggatggcctgaaatcaagatacatccccttccaatgccctcttctcgcagcaaatggcgggcgggatggttctatcttcagatagagaactcggatcctgttcttgtagtccctgaagaacaaccagacaaaatcccagagtggaccgctaagcccgccctgactccctcccttcaatcattcatcggcatcatcgatgaccttcgaactcgagggttgtcggggtatgaagtcgctgccgacttcatatgtagatggatccaaccgctccaggcccgcgcccatttggcctttgattactcggggccagaggacacgacccgggtctctcgtcggggtttggacagcaacaccgtggagcgccgcgtcggccaagctctccctctgacggatatcatcgggccactcgcggaccatcaggcggcggcgtcgttgaaggagggcgtcaccaaggaggcgtccgacgtcgcggttactgccactacaagcggccgcaacgttctgaagaaggggagaaagttctcctccatactcgggacccgtcggaaagcatcaaccccggcggcctcggacgcatctcctccacctcagcgaaggcagaggttggtgacgatcggcatgaaggcggcgcgcgcgaaggcgacgcaggacggggccggcgcgacttccagcgcgtcccctgcagcgacctcaacagatgttgtggtcatcacaagggaccgggaggcgacaccaagcagccccgccgtcggcctggtgcctattcggagcccggctgctgatgcccttacctggggggagctccaaaccgagatggagcgtatcatccaggtagatgcccgcggcgtaggccgcgagatcaaggaggccagggcagcggcatcttcggcgactcagcgtgccgacaagctggcgtgcgacctggcggaggcccgcgaggacctcctcaagatgagggagctgctcgctggggaatacggtgtcatgaccaccatccccgttaacccggacaagttctcgctgacgtcgtcactcgcggagctggcgacggcgatgggggcgatcccctccaaacatgcagccaggatcggcgaggagacgtccaacgggatctacaccggggcgtgccacgtcctcgcgtgcatgaggttggcgcaccctgatcttgaccttaagaaggttttcgatcagggggccgccgatgacgcgcgtcggggcgtgatggaggagacgaagctcgaggtggccgaactcgagaagaccatggtggaggtgaagaaagaccaggccgtggaagccctcagaggtcgcgaggtgtggttcaactcgtacctcaagagctgctgcacggcaatggctggagtctgcagggagcttcgagttcctcgcgggaatcctgaggagttgacggccggatacatctcgtggttgaatggggcctgcacacagctcgaaggggtcggcaagcgcaaagacgaggccctgaagcaggagttccgtcgatcgagccgctatgccggagggcatgtgctggcatttatccgagatcatcgccgcaactgcacctcgagttcctccacgaagggttcttatgttctcgaatttgctaactctcgaccctcgccgtctgcaatcttgaatgcacctggccgtaagacttgcgtgatcgtctccgtggggagcatagcctctgaaccatacacgaggaagaagggtgtctccttgttggacgttgtcggtgtgtactatgtcgtttgccctctcgacctatccattgctctgagggtgagaaaccgaggcaaagcagatcttgactcccaatccgatgcagtaatcctggaaatcggcactgatgaactaggagccgttgtctgttatgatgcggtgaggcaatccatatctgcaaaatatccctttgataaatttgatggcgttgtcggccttgatttcccccatgggcgtcgcttcaatccacttggtgaacttgtcgatcgccacgaatag

SEQ ID NO: 21505 - DNA, 1971 bp, Oryza sativa
  Clone ID: PAT_MRT4530_26770C.1
atggaggcgcacggtgttctcccagcgaaggagattatcgggtggcgaccggcgttcagcgaagcattcccgaccctcgacacacacgaaatcgtgattcttccgggggattcccgaccctcaagattcttgcagggagaacagatcactcggcacttcatcaaaagtcgattagctccgatcaaagagagatcccgcacagcttttgagtttgatggcaagcatgatccaaatcgagaagatccagattctcttgactttaaggtcatgaaagaaagaatgtacaagatcttctcaaacgctattgttgtcagctattcaaatctgctgcccgttgtgccattcaatgcattcaaccctcctccaccggaatttgctttgatgaaatcggatcctccaattgctcaacgccgatcacctcgccagcagactggtcaggcgagtggaggaccaaaaattcgatctgacactcgaccaagtgcttccaatccagtcggccagtcagatgctcgcaagaggaagctggttctaagcgacgaggaaggcgatgataccggaaggctcggagacaaaggagcgaccgaaaaacccccgaagccaactaatccgaagaagaaaacctccagtcgtcctttgccaaaaatcagaaagtcttccagcataactcaaactcgtaggaagccgtctgacatagaaccttctgaaaaagaccccgagccggctgacatagaggcaaacccttcaaaagaaaccgggccaactgcagaggatcgtccgagtgacaaacaaccggcaaccgacaatgtagaacccagcaacgagcccccgactgggaaccagtcggccgaagctgaagtcggtgctaaccaggagtccccgactggaaaccagtcggatgcagggccaaaccaaaagattcccgaggttgaagctcaaacgaacagtcctctcgggaaggatgctgacagtgaatcagaaaccagatctcctgtgaagacaccaaagtccactcgtccccgaccgggaatcatcacagggccaataattggtgatgaagaagaaatcctccggatacaagtagctgaggattcatgccctccgattctggtcaagtggtgggatgacaacatgcagcctcaagggatcgtgataaataagcaaaaagaggatgaagagttatgcctactgaagaaggcacttggtcaggcaacccgcattgtaaataggattcatcttaggaacgaagccaaaacggtaaccttagagaagttagttcctcatctcggaaccctcgaagccaccaggaatcaactgcacgaagcgaaagaacttgccaggaagaatgaacatgatctgagggatcggatcgctgagctccaggaatcaaattttgaattgagtggctcatcaaaagtgcaagctgccaagatatctcagttggagaagcagattcaaattctagaaaatgacaaggcagaactggcaagacaaagagacctggctttaaaggaagttgaagaccgcaagatgaaatctcaagctcaattcgacgtcctggttggcaagatcaaaaaagttgaaggagctcgggataaggttgctaacgctgctgccccaattgttcaagcgatgttcttcaataacaacggcccgagtgcacttgatgcttctgaaattttcgacaagctgagagttgctccggatacatatttcaagagcatcaaagaagctggaagtatgggagcaagtctggtgttcgcggtgaccaaaactctttatccgagggttgacgttgatgccgttgatgactttgcagacgggacgagcgaaggagctgctcttgacctcatcagcgatgcacaaaaatctgctgataagatagcagttgatgtagttgagagatttcaggacaccgatcttcgaccgactggtcctgataattctgatgatgaaaagactaatactgattaa

SEQ ID NO: 21506 - DNA, 459 bp, Oryza sativa
  Clone ID: PAT_MRT4530_26771C.1
atcaaaacgttataagagttctctagcatccatcacatagccatgaagatctttgtcatcctctctctcctcgcccttgcagcgagcagcgcctcggcacagtttgatgcttgcacctatgggcaatgccagcagcagccgtttatgcaaccgatcatgaacccgtgcaatgagttcgtgaggcaacagtgcagcccgataagcttacttgggaagcagtcacccaggctacaactgaccagttgccaggggatgcggcaccaatgttgccacaaaataaggttgatggcccaccataataatggccagctaattgcgcccatggggcagctatatatgcacaagggccagttggagcttgctttggttggcaagcccaaagttaaggccaaggccaagtgggtcttaaattggccttcatgtggggaggctaccctagggactggagccactccatgc

SEQ ID NO: 21507 - DNA, 339 bp, Oryza sativa
  unsure (1)..(339): unsure at all n locations
  Clone ID: PAT_MRT4530_26772C.1
cggaattttcggtttgactcacgcgncataggtacgtaccccgccccaagcccgcgccggcggcgggttgattaaaaccctgcgcgctgtcgccacgcgccgngctagcgctgnggaggcggctttctcccgaggccggcgcggtgtcgtcggaggaggaggaggaggagggaggcgcggagcccgagggggaagacgacgaggacctcaaggagtacgtaggaaaccctcacgcaagcgacgacagcgcgcaaaatcgcgaggatcatcgagcaagacgaaaccgctgagaaggacgaggctgtatatgacagacagaccggaagaagccagggataa

SEQ ID NO: 21508 - DNA, 816 bp, Oryza sativa
  Clone ID: PAT_MRT4530_26773C.1
atgccattgctgagctcgtggctgttccacaagctgcggcggaggagaagcgcggcgagaggagaacccgacgtcgtcgaagcggcgagcaagaagcagcaacctcccatggcggcggcggcggcagcggcgccgtgctcgccgtcgccgaacagggcgtcgtactacttcgcgagcagagaacgctgtctccctccggctcgcgccgccacggacaaccacaagctccgggacacccggttcccgcggagcccgcagccgaacgacgacatcgtgttcgacgtcgtcgccgtctcggcgtcgccggcgcgcggccagttcgacgggatgaaggcgatgccggagctcaagctgcggcccatcctcaccaagcgcgccaccgccaagaacgacggcgacgaaggtgacgcgctggacagcggcacgagcgcggccgcgtcgccgacgtcaagggtgcggcggttcgtccaccacgcgaagccgagcagcgggaggcggaaggggcgggtggcggcgctgccggccgacgctaccagccggaggcggcggcggcggcggcggtgccggtggctgtacgagagcctggtggtggtgaaggagtcggccgacccggaggaggacttcctggagagcatggcggagatgatcgccgcgaacgacgtgcgctcgccgcgggacctcgaggagcttctcgcttgctacctcgccctcaacgccgccgagcaccaccgcgccatcgtcggcgcgttccgccgcgcgtggctgcacgccgccgccgccacggcggcgccgccatcacctagcccgatcaagtga

SEQ ID NO: 21509 - DNA, 885 bp, Oryza sativa
  Clone ID: PAT_MRT4530_26774C.1
atgccgtgtaaacctgattatcgtaaggatgagagtggtcttacaactgaggatggacagtatgatggatgggatgatcaacaatctgcaggtgggagcagtaactggaattctcgtgcaaatcgctcttttggtctggcagatattccagaatggactgggaagccttcattaccttatgaagatccagatatgctgagatttcttggagagcctattttaactccaaaaaacaatgaggtctttgatgatactattggtaagggcaggccagacaagtgcaactgtgaagtcccaggttccacttcttgtgtcagatttcatgtggcagagaaaaagaccgagctgaagcgtgaaatgggctcatcatactatgcaatgaagtttgatgaaattggacaggatgcagcattaacatggcaaaaggatgaagaaaagaagtttgagaccattgtccagcagaatctgccttcatctaagtacaatttctgggacaagctgcgtgccgccttccgttacaaaggtgaacgtgcccttgtgagttactacaacaatgttttccagccgcgcagaagagccttccagaatcgagtagctcaacatgctaatggtgtagatagtgatgatgactcaattgaacctgccttcctacgccttcgtcaagacggtgttcagcttcacctggagctcaagactcaaaaggttcatttatttttatcttcaccaattggttactggactggagacgactatcttaaaaggttgttttaccattacctcggtgtcctgggtggaatgagcggttgtttcatgttgatattgtcacagcgatccgggcaaatgttcctgaggatcttctcatgcaaagtgacaactgaaacatga

SEQ ID NO: 21510 - DNA, 723 bp, Oryza sativa
  Clone ID: PAT_MRT4530_26775C.1
atgacggtcgtcggcgctggcaggggtcggtcccgccggagcggcgctggcggtggtggcgatggcacgggcagcagtggtgcgaccgcaggtggcggtcggaatggcggctccagcgggggcgacggctccagggcgcccggtcctaatcgtgggcccgggggagattcggccagcgacccgaaagggaagcgaaaaatgtccgagtttgggccgccttctccaccgcatggagggggcgccgagcgaacggcggaccgaccaccggcgggccacaaatgccctgccgcgtccggggtcggacggaagaagaagcggctccggaagatagggcaaacggagccgtgccgggggagtttcatcgagcccccaaagtggaccttcaaacggccccctcgcagcatcctggcggggcccacgggccacacgccgggtccggctctgaatccgccacagccgaggtacaaccggccgcggggagcgtcagcggcagtgcccctcccgggggcgattccgagggctgcggtggaattagttctcgcaagccaccaagcccgtgaccccgacttagtcccatggcgtgcgcttgaggatttccccccagggaccgaggcgagggcttgggagcaggtccgggaggcggccgacgcgatcatctccagcttcgagggatcggcccctcggttcaccttcgggtacctcggacgaggagagcggaagtga

SEQ ID NO: 21511 - DNA, 519 bp, Oryza sativa
  Clone ID: PAT_MRT4530_26776C.1
atggacgccgccgtctccctccacctccacggggcgctcccgctccccgcctcgcgcgcgctccaccatctcaacccggcctcctccgccgccgccgccgcctcggccaagcagcatcagcagccgcgcgcgcgcctagctgtcacgaccgcgcggcccagcagcaggacacgcgcgcgcgccgcggcggcgtcggcgccgccagttccccctgtcgttcatcagcagcaccgcctgtcgtccagccgcgcggcgacggggtacgcggcggcgctggccgacgcgtcgctccgagccgggacgctggccagtgccgcccgccacgcgcgcgcgctgctcgtctcggacgccgccgccgccgtcgacgttgctgaggattcgcgggtggtcgcgctggtgaggatgctcgtcggcaagggcaaggccgccatggtcgccgacgtcatggccgagttcgtcgccatctgcgaccgcctcctcctcctccccgcgcgcccccacgccgccacctcttactaa

SEQ ID NO: 21512 - DNA, 146 bp, Oryza sativa
  Clone ID: PAT_MRT4530_26777C.1
gttttggccgtttcgtcgatccgcggtttctcgaagacgttgctgaggtctcatcagttcgagagcaaggcaagtcatgcaatacttaaggaccggttcacgggaaaccctgggagacttaccgtgcttaccacaagcgggagtgg

SEQ ID NO: 21513 - DNA, 448 bp, Oryza sativa
  Clone ID: PAT_MRT4530_26778C.1
cacgggcaaaaacagaacacatcttttgtctctagaacttgtatgccgcggcaaaaccccttgaaacaactttccttacacaactacaggcctcggggggggcctaaaacaaaaaaaaaatctatgggggaaaaggaccccccccctttttatgcccgggggggccgaaattaatttcccccgtggaccctaaatgtaaaggccccgcctttttttatacccggaccacagatttactagggggaaaaacaaagctggggaactgagatgcatccaccacaaaaccctggaaaaaaaaaaaaacggtgattctgccctaatttgggaagtccttgtgctctcggagccccttcaggatgcgcgctttactccccaggaggagttatttgatgcccaacaaactgtggcgggaaaaaaagcaccccgggggacacaaaaacgggggggg

SEQ ID NO: 21514 - DNA, 516 bp, Oryza sativa
  unsure (1)..(516): unsure at all n locations
  Clone ID: PAT_MRT4530_26779C.1
ttttggtatggatattaatcaccaacatcaagtgcccaaccaaccgaggatgctcccaagcaattttctgcaggcccaggcagattcccagggttatggaaatcaatgggctttcccaacattgcaggataattcaatgctaagaactgcagcccgaagaggagtgtagaccctattttttggctctaattacagcagtagaattctagataccatgactcctccggcgctcgtaattactaccttaactaacctgaggatactgaggcggcagcacattataagacaggttggattacttggtagatgaatccaaaggatatccattgtaacttttttgttgtttcctgactgttagctgccgttactggtcatatattttgaccccaagttgtacatagcattagacatagtcaatgtgtacattactcattgcggcagattggtgaatcacatgatatcgagtgctgccnaacnatattgatcgatgttttcctaaaaaaaaaaaaaaaaaaa

SEQ ID NO: 21515 - DNA, 4333 bp, Oryza sativa
  Clone ID: PAT_MRT4530_2677C.1
atggataatactggtaacaaaggctatgggaatgatggatccgatgactcaagaacccaagccaatgggaatgagagaagcaccaacgaaacctcaccagagctaatccaagttgtggttaaccaaaccaacatgttggcaacagcctttcaactattacagaattggagcagcccagcaggggcaaccaacgttcaagtgcctacagtccagcaacagtgcaagttatcagaatttctcaaaactgagcctccaacctttgccattgccgtcgatcctatggaagccagtgattggttgcgcacaatcgagaagaagctagggttgattcagtgcaccgaccaggagcgggttggcttcgcaactcatcagctggttggaccggcttcagagtggtggggaagctacgaagcatcacggccagaaggacataccatcacctggaacgagttttcatctgtattcaagagatcacatgttcccgcaggaatgatcacactaagaaaacgagagttccgctacctgaagcaaggagatttgaccgtcacagagtacctgcacgagttctatcgtttggctcactatgcaccagaagatgtggaaacggatgaagacaaacaagagaagtttctccaggggttaaaagatgagcttgcagtgcaactactcctagaggattatgaagattttgagaaacttgtggacaaagccatgcaactcgaaagtgagcataatcggatgacgaactgcaagagaaggattgtcaacatcccagtaattccatgtggtaaccaaagacagcgcactgagccacttcagatcaccggatcttctgttgtgcatcaagagttcctgccccaagaagacggacgcaatgcagacaacaacagtagcaatactaacgatgatgataccaccaacaaccatggttcttgccccattagtgaccactcgaataaagcgtgcaatgtcagtagcattcaccaagatgtcaacgatagtatcaatgttggaacccagaatgacaaccttagcaattttgacactgagaaagactccaatggtgatagcaactatggtaccactgatgccaatgttagcaaggatttccaaccaccaattccaactccaagtcaaaatgatcgtccccagatgggcagctcagtaaagaagacgttgatttgttacaactgcaaagaaccaggtcatttctctagagattgtccacagccgaagcgtaacctgcgccatcactccggccattatgcaagaagaagacaagtcactcgccttgtggtcactggagcaaacgccgtacctgcgggcccgcccgccactctcgctgacgggtgggacccacctgtcatcgccttcctcccgccgcgcccgccgcccgcccgtgccctagcgccgccgccgccgctgaatccgccgcatcccgccttccccgcgcgccttaatgaggggggaatcactccccgtgattccctctcccgtttccccctcttttccctctctctctccctcggattcgtccggattcatcccgcgaagttcgccggcgtcttcaatggcgcccgagatctccgcgcgcggtttcctctctccccggccgcgctctccccctcccgttgctatatattcgatccccgtgcttcgctcttccgtttccgccgctcgccgctcgctctcgccgtcggtttcgtgcccgcgccgtgctcctctctctccgccgtcgccgccgaccttcggttcgccgccgacgtcgctccggtcctccgcccgactcggcgccacctccttcggcttcgccgagtggttgccgaccccgtccgccgctccgcttcgcccgccgactgccggagcaccgtcgccctcggcatcccgaaccgcgccgtcgccttcctccgctccggttcgccgccgccgtcgctccggtcttcctcccggctcggcgccacctccctcggcatcgccgcatcgccgtcgacctcgtccgcgccttcgtttcgctcgccgaccgtcggagcgccgccgtcatcgtcatcccgagccgtgccgccgccttcttccgctccggccgccgttctcgtcgtcgtcgttgtcccggggtgagccgtggaccgtcccttccgtttccccctcctctccgctctctcgggcgctgctccgccgcgccgatggtcgccggcggtgaccatcggggcgcgggcgcgttccctcccgtcggccgtgccggcgaggccgccttcgggcgcgccctcgcgggcgtgggacccacggcgccgaccgccgccagccgcgtgcgcccggtccaccgtggaccgagcggctgacgcgtgggcccccacccccgtggacccgggcaaatgaaggctacacgggctgcggcccgatggctgacaatgagaaaggcaataaggtcagaagtcaggacattggtacctcaagctcccgagtgaatgaagcaccagacaccagttgtgtggcagtggtccaacacctgattaaccagaaccaattgcttatagagatactacagcagcatcggatgccaattttgaacccgagtcagatgcaacctcaagtgcagttggaggcagtccaagcactcacaccacaagtcagcgcaccgccaacatcccagaaggcccctcatgccatgccacatgttgacccaaaagaagcaagtatcatctgttttatgtgtgatgagcaagggcactatgcaaggaactgtcctcagcagaaaagaaaagcaccaatgcgaaccgaagatgaagtccgtaagatgatcattaccagcacagaatggcctccaccaggaatgacaaaacatcagagaagagattccttccgaggtgcacaacagttgacagagcatcttttagctagtggaggtagagtgtctgatagtgaagattcagatcaagtctcctcagatgatgaagatgagaagtctccccaaggttttaaccagaataaaatagaacttaaggcatgctctcgttgtggagaaatcggtcatgttgccagctcgtgtgcctctacatgcgttcattgtaaggaagaccatccacccgacaggtgtccaacgagcaggatcacttgtttcttttgtgaaggaactgatcatgtaccaaaagattgtcaattcagttttctgctgacgaagaagatggccaaccaacccgccagttccaacggagagaagcatcaaggcaatacaaatccccgccaagatcaccgtttcagcctaactccagtgccaggacagaggaatcgaaatgagaaaagaaaatgccgagtccgggaagacatctgttgcttcaattgtcaaggaatgggtcatttcgccgacaagtgcccaaaaccgagaaacatagctgccggcacgtcagtccacgcaactccctgcaatcagaagcttgctcctcaacgaattgtcatccatgcatcccgaagcagtcctatagcccgcgttgcaacaactccaattccaatgagtgcactaacacaaggtgtcaatgctcaatttcagccccagccaccagctgacaagacagaggccagtatctgcgttgtacctttggaagttccaatacagcagctgagaaatcaagtacaagatgaagaacccgagtgtaagaaagttattgtttgttacaactgcagtgaagaagggcattactccaaaaactgtccccaaccaaggcaaaatcgacctccacattaccgccaatttacacgaagcagacattccaatcgtattgtggtcactggagcaaacgccgtacccgccgagccaagggcaatcaacctccggagggcgataccaagcagaagaccgtcatccgcttcaaccagcaatcagaaggaagcttctcctgtgaatgatagcagtatgcagtcctatcacatcatcacagaaccaatcgaggatgcagtcactggaacaatgccagctatatctctccagaatcaaaatgagcagccatgtttgtggttttcagtccgctacttatcatggtgtaatcgaaagtttgcagcaatcatattcatgtctataaacattgataacttgtccgaggttgactccgaagatatgaatcatgagaagttctggaacggaagcatcacagaactaccgcaacctagtctgagtcagccaaaaggtgcaccctggtccaagtcaggtgaagagaagattccatccgcaacaggaggtcaagccaagcagttccgagtggtaaagttttgctggaagttcgtcaagacgcaacggaagaagtcagacaagaagagaagcccgcccaacctatcttcttgctag

SEQ ID NO: 21516 - DNA, 702 bp, Oryza sativa
  Clone ID: PAT_MRT4530_26780C.1
gtataggaaaacatcgatcaatatatttggcagcactcgatatcatgtgattcaccaatctgccgcaatgagtaatgtacacattgactatgtctaatgctatgtacaacttggggtcaaaatatatgaccagtaacagcagctaacagtcaggaaacaacaaaaaagttacaatggatatcctttggattcatctaccaagtaatccaacctgtcttataatgtgctgccgcctcagtatcctcaggttagttaaggtagtaattacgagcgccggaggagtcatggtatccaaggctctaggatttaatgacgatcagaatggtggagtaatcttgactaccattaattagagagaacaccgtattgaagggcgtaatcaggtcccagatgaaagaattaaccacaccttggtctttgtgatttggcctaaaatggcaggcaattccaaatggagggagaaccacatgcatttttgtaaagaaatgtactgtaacaagcatatataaaattgaaaagtaacaaagcttcgcccagtaaatgataaggattatttcttgaactagaattctactgctgtaattagagccaaaaaatagggtctacactcctcttcgggctgcagttcttagcattgaattatcctgcaatgttgggaaagcccattgatttccataaccctgggaatctgcctgggcctgc

SEQ ID NO: 21517 - DNA, 242 bp, Oryza sativa
  Clone ID: PAT_MRT4530_26781C.1
tcgctatttccgtccccttgccctcccacactttcgccgagtgtccgagacgcagccgccgccgccgccgccgcgcacccatcgcctcctcctcacatcgcacccccgagcagccgaatcctccgtcgcgcggccgcccttcctccccgctctccgccgttgccgtgccgcaagggccggcggaccttttcgaatgggagggttgctggttaccaatggagccttggcctggctttggtggt

SEQ ID NO: 21518 - DNA, 250 bp, Oryza sativa
  unsure (1)..(250): unsure at all n locations
  Clone ID: PAT_MRT4530_26782C.1
attcnggagcncaatggcggcggcgggcgtggcgccctcagcgtcctcntcntcggctgggcggaagcagccgtcncgggtngngattgcggtcggcgccaccaaggggaagccggcgccggcggangaagaaaaaacctcgccgacttcatcttcggcttcatcttcaanaaagaccanctcntccaaaccgacccgctgctcaacaaggtctacagcgcgccgccctccggctccactgtctcccgga

SEQ ID NO: 21519 - DNA, 446 bp, Oryza sativa
  Clone ID: PAT_MRT4530_26783C.1
cccaccccccccccccccccccccctcccccccccaccttggaccactgatgaacaattcactctgtgtaatttatacactttgttgtttcggggttagtccattgatcgatcgatccaggcacgaatagatagataggttctttttttttaggtaatggaaatgatgatttacatcccttgctttttccttaaaatatacaaccataagtttgttcttgatcgatcgttaattagtttgcatgatctggattttggtgaaggtcaaaagagagatcacggccatgaagctcctcaaccaccccaacattgtcaagatatatgaggtgattaagcttggttactaattacccgtatcagcatcagggtttcagccgtatcagcatcagggtttcaggaggaatggaggattatattataccttttcttcctgtgcaggtgatcgcg

SEQ ID NO: 21520 - DNA, 517 bp, Oryza sativa
  unsure (1)..(517): unsure at all n locations
  Clone ID: PAT_MRT4530_26784C.1
tncagagcttgattttnggggggatgggctcccatggcctgctatntgagtgaagcccatcgtccaatgatctctaatgaattttcattagtattccccacnaaaaaacttgaggtgtttgtnccgtcagtgtcctacctagatagtgntttgttgttttccatacacgcatggggatgtgntccgctatatcagttacgccagcatgaccttttggtgtgtatgcctgaacagtttgtggggcttcggatttggatcctagcttgcacttaatttgcttttaaacatttgacccccccctaaatgtgagcagatagatatccataatcgaatggaagagttaaaattagtaaagaaatttagtattgaaagtattcgtttttatttagctctgtggatgcatccaatccatatatattatgattgccgggcaactgctttttggctagaatatttctgtgactacttcaatagctaaaaaaaaaaaaaaaaaaaaaaaaaaaaaaaaaaaaaaaaa

SEQ ID NO: 21521 - DNA, 1935 bp, Oryza sativa
  Clone ID: PAT_MRT4530_26785C.1
attcttaagtgtcagctattgctactaatacccctgtgagcaatacagaggatgctccaggtcctttagagatttcagagtcagcatcacgagcctatataattacacttcctaatcaaagtttccctgattccaaagaaattccagacagtaaggcagaagatgcacccatagattctcctgagaaattggaaccaggaccttcaagctatacacctacaattcccattaaagagtcctctattgtcagtcaaaatactaatgcagaaaatgtttccggagactgtagtgaaggcactgcttgtgctatatcctattcccagcatatcatttctgataagccaactaatgaggtatctgctactaatagctcacctgatgatacctctagcgatgaagatacagttgaaagtggtggcattgttgaaagtgtctaattcacagcccatgccactgaatgactcattggagaacggatgtgcaactcaaggcctcccagcaaatgcccctactaattctactggagtatcttctgttaagctctggactaatgctgggctctttggacttgagccatctaaacctccagtattcggtgcccatgatggtccaaaggaggatactacacctggacacacacaacctcagctttgccattcaactgggtgccccgaagttcatttttcaaagcccactgaatcagcacaagtatatgttccaaatggcaattcgccaattaccagcagttttgtggggaaacttgttggtatctgtcctggttctacaagccacagctcagagactaatcaatcaacagtaagaacacctgatactgttattggtcaaacagaggggtccacaggttgttccacatcttttgagcacagtgatcacaaaaatattattggtaagcaaacttcaataagtgagctcctagaatctgaagacagtgctgaaaatggcgctgaaatgttctctaaaactgacatgactggaaggaataacatgaatcaggtgtctgcatcaagcttttcaagcattgcacaaagatttcttgctaatacacttcagcgaagaactcccaaatacactgatcttcctatgtcatctgttatagttaacactgatgcaaacgggactgatgaatctacccaaatatcttctctagcccccaatgaaacaacattcgaggcatctcaatttgagaagaaaacagaaaatgacacaaatggactgcccaaatcgtcactcttctctagtagccattactctgagaaatcatctccgccgcttgagtacatgaaaatatctttccaccctatgagtgcatttgaaatgtcaaaattggacctagatttctctgatgaaaatcttcatgagaatgccgatgatatgatgttaccaacgtttcagttacttccagggtcttccgttccacagcttggtagtggttctgaatcggaagatgatacttttggcagatcttatagttattcttcgtatgatgatctaagtccacggttatattcaaactctgagttgtgggatcaagaagacgcaaatggattggaggatcatgatatgcataacaatccaaatcagataggatccttcggagcaccaatctctagctttgtggaatttgagcagatggacttatctggtgcgaagatccactgtatcacttacagatcttggggatgataatggacttggcacgttagattctcatcctgctggagaacttcctaacttcgatactttgatggctcatcaaaatgaggccttcattccgcacaatccagtaagtttatcaccagatgaaggtcagttgcctccacctcctcctcttcccccaatgcaatggaggacaatgagacaagtagcttctgtagaagaaggaagaggttctgcagctaacgaagatatgcttga

SEQ ID NO: 21522 - DNA, 136 bp, Oryza sativa
  unsure (1)..(136): unsure at all n locations
  Clone ID: PAT_MRT4530_26786C.1
gccagtccgccattctcggaaagaagcatcgaacgcgatgcggagatcaaggttcagaactcgtgctcaacatctccgtcgcgagactncnacccctaacccgctcctccaagtctgagcactcacggcagacccc

SEQ ID NO: 21523 - DNA, 178 bp, Oryza sativa
  Clone ID: PAT_MRT4530_26787C.1
tcgcaggacgcgtggtacgcggatagctattcactaggttttggatggtcagtgcattatggtgacacaggcaataacgtaatatggtgcacgagacaaagaggaagtgctataaccaaatggactatgcactcaataagcagactgcagtctaactgctaatactgatggatcgatc

SEQ ID NO: 21524 - DNA, 1230 bp, Oryza sativa
  Clone ID: PAT_MRT4530_26788C.1
gtttggacggtggttttgcatattttgatgcttaaacagacagttttaagtaaagaatatacatatgtactacctccggcgaaaaaaaagaagggttatatagcaagctacaagtcgtcgctgcctcctggccgggccagtgggccgttgctgccgtcaaccctggccgggccaccgccatcgattcctctccaagttgagttgccaccgccgcctcctccccacgttgagctgccgccgtcgccccctggccgggccgccaccgtcaccttctccccatgccgagtcgccaccgccgcctcctcccagcgtcgagctgccaccgtcgtcacccgctccctgcccgccaccaccttcaagcctcctctcagccgccacctaaccccctccccatcgtcgcctccaagcctcctcacccacgccgccacgccctctccccatgcagggcaggaggggtctgcgccgaggcgccacctgctgatgcctgctcaccgccacccgccgacgcccgctcatcaccgcctgctgcgccccccggatcatcgcacgggcctccaccacgccaaccgtccagtgctccgtgatctccgcgaaggcgagcaccacgccaccgtcgcagccgcggatcacgccgccgatgccccatccgcgccagccgcagccgccgccatcgccaccggagcccagacgcggcggcggtcgtcctccgcttctccctccacagcttctgccgccgtcctcttcctaccaccaccgccgccgccgccttccccgcgcagtagatctccacccgcgtgttgcccccctccttcctttccacctcgcccgctgccgccactatggacgccgccgccgttgtcgccgccgctgccgccggcgaccccagcttgtgatcgaccggtgcccgcgttaactccgaaccaccctttcggctcgccgtaccccgatcacccccttccacctcagcctcctcctttgaccctctccactactccacacaccacactcgccaccaccaccaccgctatatatatatgagccaacgcgcgccatctccacccaaccaaaccatctgctcgaactcctcctcctcctcctcctgggccccgtgacgccgtccggccccagcggcggcaccaacggcgacggcaactgaggaatggaagccatggaaaagcgcccgattggagatcgaggtgcagagggagatctgctggttcaattcataaa

SEQ ID NO: 21525 - DNA, 300 bp, Oryza sativa
  Clone ID: PAT_MRT4530_26789C.1
atggcgtctgctgggtacgaccgttgggtggcgtggcactatgcgggggcgtggctggttaagcgcacctgcttagtgtggttggcgctgcagcacatggccgaccggtgcagtggccagctcagccgctatgcgcggcatggcgatctcagtcgatccggtgcattacagcggcgtatgtcatacgggatgtggctggcacgtgcgcatgtagtgagggttgttggttatggaggttggtgcctggactaccccaatcggcttgcgccattgactcaaaagaaggtgttggtggtatga

SEQ ID NO: 21526 - DNA, 4293 bp, Oryza sativa
  Clone ID: PAT_MRT4530_2678C.1
atgtcgtattacgtagatcctcgtaccagcgtaccccaataccctctatatccggtctacgggtatcccccgtcaacagtggtgcgccaggtagggggacttggtgctcaaggttctactactatgacatccagcttcatcgataacagcgtcaacaccagcctcaaccaaggagttcctacttcaacaatgctggtgtggactcaagtcggcgaaatcgtcttcccagtttacaccacggtgccgatctcagctggtccatcaatggccggaaacgagaacgcagtggctacaacccaagacgactccatgtcgaaggatcctcccgccgaagcggagatcggaacatcgacgacatccgagcccgagaaggatcctagtgcggccaaaccttgtcttcccgacaagaatcacgagccgacgaggatgacttccgaggtgacaaggtcctgttttcctattcacaaaaccagaaaacacaccttacaagcctgctgggtttttctcaacgtccacgctgagattcgtgcctgcaaagagcgtggaatccaacgtacttctccaactcgtgatatctattgtcctattcacaagacaaagaatcacgacctctcaagctgcaaggtctttctcagcgccatgaaaacatcacctcctaaggtccagcagtcacgcatccccctcagggatgaggacaaggaacaaggagcgacgctgatctcagatcgatttgttggggtaatcgacatcgatccccacgaaccatcagtcttgcacctgctcgaagactatggatcatcatcaatgagtacgccgcgcgaggtattggctatcgacgagaccggcacgtcagcgcgcgccaatgcggaagcagagaatcaagtgactacaccggcccagcacatcagggccgtcaacgcaatactgagggaaacccccctacgatcccaacggttacgggaatcagggaccaacctcagcaacgcgttcgaagaggccgctgctgcagcgcacccggaacagccaccaactggcgatgctaatggtgaaaaccctgaacagcgggaatcgcctcatcgagccacccctccacctcgcggcaccggcgatctccgcgatcacctgaatggtcgccgagaggcgcgacgcacacgagataacgagaaccattcccgacgtcgcgtctcttcacggcttcacgataacaaagaacgaggaggccgttcgagagaagaccgagaccgtgataaccgccacaaccgctgcgatcacgacgatcgcgaacggcggatgctgggcgatactggtcgaggacgttgccataatgacgacgatgatggagatcggcgccgagacaacaacgggctctacgcgttcatggctaatgcatcttccccctactcgatttctctgtgggcagacctgtggcagcagttcgtcgccaacttccaaggaacttacaagcgccacgcgattgaagacgacctacttgcgttgacacagaacccgggtgaatccttgagggattatgttcggcgctttaacgagtgcagaaatacaatccctgaaattaccgacgcttctgtaattcgtgctttcaagtccggtgtcagagatcgctatactactcaggagttggcaacaaagcgcgtcacgactactcggagattattcgaaattgtcgatcgatacactcatgcggacaacgcactgagacgcaagaacgacaaaccaaagaccggagaagagaataaactagccaaggacgcacttgagtcaagcaagaagaaaaatcgtaagaatgggaaaaggaaagctcaagcggaagttctcgcaatagaatacgcggaccctcccaagcgcccagacccacaaggcagcgacgcgaagaaaacatggtgccctatacacaagtcagacagacactctctagaagattgcctcatctttaaaaagtcgctcgcaaaacacatggcattgaaaaaaggcaagcgagtacgtgtggtcgagaaggacgctgaggcggctactcaggaatcagactcaacatatccagattccgatctccatgtcttgcacatcttcgggggttccacggcatactcctcaaagcgagaatacaagaaggtggaacgtgaagactgttcgatgtggcagggggctgcgcccaagatgaagtggtccgagcagaagatagaattcttagaagaggaccaccccaagactgctgttatcctagggcgatatccgatcgtggtcgaacccactattcggaatatcaagaactgcactcgcgaaattcatggccgcatctcactacgcgtatcaggttctcaagatgccgggaccgaagggaacaatcactattcaagggatgctaagctggcagtgcaatgcgacaagcggatcctcgacatggtcgagcacacgcccagcccacctgccacagctgagccacccaagaaaccgtccgacatgccgggggtacccagggaggtgattgagcataaactcatggtgcgacccgatgccaagccactaaagcaaaaactgcgaagatttgcaccagatcgaaaacaagccatacgagaagaactcgacaagcttctcaaagccggtttcattagagaggtactccatccagaatggatagccaacccagtcatggtacggaaggccaacgggaaatggagaatatgtgtcgatttcaccgacctcaacaaggcgtgtcccaaggatcacttccctcttcctcgaatagaccaactggtggactcaacagccggttgtaagttgttgagctttctcgacgcttactccggctaccaccaaatcagcatggcgaaagaagatgaggagaagatagcattcatcatgccgttcggggtattctgctacgttaagatgccgttcggactaataaccgcaggaaacactttccagcgcacggtccaaggtgcacttagtgaccaactcggaaacaatgtcgaggcctacatcgatgacattgttgttaagatcaagacaagcgactcattgattgacgatctgcgggaaacgttcgacaacctccgacgatatcgcctcatgctcaatccagagaagtgcacgttcggagtaccatcgggcaagctgctcggtttcctcgtctctggcagaggaatagaagcaaaccccgagaagatcaaggcaatcgagaacatgaagtcgcctacaagactcaaggaggtacagaagttaaccggatgcatggcggcactaagcaggttcgtcgctaggatgggagagcgaggacaacctttcttcgctctgctaaagaagcaagacaaatttgtatggacacaggaagccgaagaggcattcattgcactcaagcgctacctatcaaatcctcctgtacttgttgtcccccaacctaatgaagaattatttctctatattgccgccacgccatattccgttagcactgtcattgttgtcgagagagagaaggtgcaacgactagtctactacatcagcgaagctctccacaacacaaagacaagatatccacagatccaaaaactgctctacgcggtaatcatgacatcaagaaagctacgccactacttccaagcccacagggtcacagttgtatcctccttccctcttggtgaagtagtgagaaacatagacgttgtcggccgcattgcgaaatgggtagtcgagctaagccaatttgatttccgctttgtgccacgaatagccatcaagtccgaggtacttgttgacttcgtagccgattgcctgataacaggtcagacaaccaaatcgacaacgaaacatggacaatggcgttcgacggcgcactcaacagccaaggagcagggggcgaccaataacacaaccgagtacgaaggactactcgccgggataagagctgcagctgcattcggagttaggcgactaattgtgaaaggggattccgaactagtcacgaaccaggtgcataaagattacaagtgctctagccccgagttatccaagtatctcgcagaagttaggaagctggaaaaaaggttcgatgggatcgaggtccgacatgtataccacaaagacaacatcgaactggataatctagcacagtgtgcgtccagacgagagccacttgaacctggcacctttctggacgtcctgaataggccatcagtgaaagaggcaagcggcgaagatagcccggtcgcccccaacatcagctcgggggttatagaggcagagcgcgccgttgccgatatcgagaccacagacgactag

SEQ ID NO: 21527 - DNA, 668 bp, Oryza sativa
  Clone ID: PAT_MRT4530_26790C.1
ctaggcaagaccatttcattctagagtcattgtccatgctagtttcataaaaaaaagtaccgacacgattaaaaaaatacataataatggatcttctctaagttggcaccagcttaggatcttcacctctcatcttggcagaaaatctttaacttgaaggaagctggagtccaactacatctcagtagtgcatatcatcctcaatcagatggtcaatctgagcgtgtgaatcagtggctgaaaacctatttgcgatgtctaacagttacaaaaccaaagaaatagcattctctaccttgatcaggttgagtgctggtataatactacttttcatacatctttgaacatatctacttatcaagctctttatggtcaaaaaccaccaatggtgggtgaagcactcataccagccaattttgttggaaggcttcagaaacagagcgcaagcaagagctgcattaattgattcagtaaaggccggtctagataaagctcaagcttttacgaagtattttgcagatgtcaaacgaagtgaaagaacattacaagttggggacatggcctatctcaaagtgcagccttatagacacaatgcattaggcctgcacagctcatttaaacttcattctcgttactatggtccatttatagtgattgacaaaattagc

SEQ ID NO: 21528 - DNA, 741 bp, Oryza sativa
  Clone ID: PAT_MRT4530_26791C.1
atgagtagagtgtccactagttggggttttgtttattctagggtgaacaagccgggagagagggcgcgcggaccgggtccacgggagtggggcccacgcgccagcctctcggtccacggtggaccgggtgcacgcggctgccgccgaccggcgccgtgggtcccacgcgtcagccgcacccgcgggcgcgggcggctgacggccgggcccacctggcaggcgcggggcgcgccctaaggcggcctcaccggggcgggcgacgggaggcggcgcgccctggccccgatggtcggcgggggctacctccggctcgacggaccggcgtgcgagaggaggtggggaatggggagagggagcggtgtcctgggctcgccgctgggtacgatggcggggggggtgaggccggaggcgggggatgcggggggccgtgggggtgcgcgaggacgggggttctgcggcccggggggtcgggggcggtgtggcggcgaggtgggtgtggggggggggtttttgtgcagggtggcggtgttgtggaggtgggggggggcggcggtgttcggggcgtggtgtcggcgcgggtggggttgtgtcggtctgcggggccgcggggctgtggcggggggggtcgtgtgcggggggggtgtgggtcgcggtgtcggtgtgcggggggcgcgggtggccgcggccgggtggtgcccgcgttgggtgtgtggggtcgcggtttggggcgggtgtgggtcg

SEQ ID NO: 21529 - DNA, 3133 bp, Oryza sativa
  Clone ID: PAT_MRT4530_26792C.1
atgtgggcaaccttgctgtgtaagcatctccaaatcaagataaggattggcatcgtccatcagttagtactcttactcatgtcatcctctctgttcctggtagtttctgctcagtcagttccagccgataatatggatcaagaggccctccttggtctcaaatctctggtcaccagtgatccatcaggcatgctattatcttggggtaatggctccgcttgcacatggagtggggtccgatgcaatcgtcatggtagagtcttggtgttagatctccagggcctcaatttggttggcaagattagccctagcattggcaatctatcagcccttcatggtttatatttacaaaagaaccagttttctggtgaaatacctgaccaaattggttggctaggacagcttcaaacactaaatgctagtgctaacattctcacgggcaatatccctgcagctctaataaactgcacaaatcttgagatcattgatttgtcacagaataccttctttggtactatacctgcaagcattagctcgtttcagaaactccgagtcctgaagattggagggaaccaactaagtggtagtgttccgcgatatattggtaacctctcgttgttgagcacacttgatcttagcaccaacaacctgaccggcacaattccttacgagtttggtcatctaagacagctcaagtacctccagctctcgataaataacctgaaaggcacagttcctgagccactttacaatctctcttccctttctttctttgcaattgcaaataatgacctacatgggaagataccaagtgatgttgggtttcgactcccacggctccttgttttccatatttgcatcaataggttcactggtccaatcccaccatctctccataacgtgacaaacatccaaagtataaggatgtcccacaatcactttagcggctctgtgccgccgggacttagcggtcttcacaatcttgtcttgtataatattggattcaatcaaattgttggtaacacaagtgtccttgttgaccttatgaactgcactaagctacagctgattgcctttgatgagaatctcattgagggtatactccctgattccattggcaacttgtcaagttctctcacaaggctatatgttggtggcaacagaataactgggtacataccagcttccattgggcgtttatcttccctgactttgctcaatatgagctacaacctactttttggaagtatcccaccagaaatcggactattgaaagagctgaccatgctaagccttgctaggaacaaactgtcaggcataattccagcagaaattggggatcttgcacaactaacgaggctcgagatgaaccataatgagttagttggtgaaatcccagtagagattggtaacctccaacatgtgctttcactggacatatcaagcaacagtctgaaggggggcatccctgcttccatcttttcactcaacagccttagcactctccttaatctatcacataatttactaactggttcaataagagagaatattggtcaactagggcaaataaccgccattgacttgtcctataatttcctcaacggtagtatcccagtgtcaatcgggaaatgccagagtcttcagagtctatcattgagcagaaattctttgtcaggtgtgatccctggtactattgggaatctgaaaggtttgcaaaccttggacctgtctagcaaccagttatcgggtattatacctgcaacgttggtgaagatgcaagcccttaggctactgaacctctcaatgaatgaccttgatggattggtgccaaacaacggcatctttaaggaccactctgttgtttaccttgacggcaacccaaaattatgctactcaaacatgctatgctactacatccattcctcacatcgtcgaaagatggccgttgctattgcagttggcacagcagcaatggctgctattaccatcgttgtcatcataagcatgctgctgttgccaaggaaatggttaagaaataggaagcctaaaaaactaggcagcttcatcaagaaaagtcacccacttgtttcatatgaagagctaaaccaggtgaccagctcctttgacaatagaaacctcatcggcacaggtggctttggttcagtgtacaaggcagtgttgcgcagcagaacagctgtggccatcaaggtgttggatctgcataagatgggagcactgaagagctggaccgcagagtgtgaggcccttagaaatgttcggcaccgctacttagtaaagctagtcaccatgtgtgcgagtatcgatttttcaggcaatgagttcagggcattggtttatgagctaatgagctgcggaagtgttgaggatttgatccacaaaggcaggcagggtgagaatgttgcaggggtgaacgccgatatgatacttagcatcgccattgatgttgcgagtgcactagattacctacacaatgattgtggagaacaagtggtgcactgtgatatcaaaccgagcaatgtgcttctcgatgaagacatgacagctaaggttggagactttggaatatgggtatggggagtaaaccatcagcaaaggccgatgtctacagctacgggaatgttgctcctcgagatgatcactggaaagaggcctgttgatccgcagtttggaggggacatgaatcttgagaaatgggtgcgagatggattcccgcatcgagctcatgaagtagttgacgagcgccttaggggaacaatcgttgatatctgccatgaagggcagcagcaggctagtgctgagcagaagcggcagcagctgatgcttaacaacataatacttcctgtcatggaggttgcgttgtcttgtgctctggagtctcctgatgaacgaagcaccatgcgcgatgctctctgtagattgaaacgaatcaaggaggctttcttgaagaatcatagcttttaatatgataaccgaagaggttacaagctgcccatttctaaagtacctttttgtatttgtatgtttagatattttccctgaaaaatgaggtcggatcagacaccagattaattaaactcctctattttttgtcatgtagctattattaatg

SEQ ID NO: 21530 - DNA, 1218 bp, Oryza sativa
  unsure (1)..(1218): unsure at all n locations
  Clone ID: PAT_MRT4530_26793C.1
agctcaccagttctgacaacggcgtganagccagcacctgatctcaccaagaacatggccgccggcgagaggccggcgaccatgcgcgccatggagaccggcgaggcgtggccggcgtgtctaggtggcgacagaggtcggggaggagcggccggcgcatgcaaggggaggcggaagccggcgaggcacgactggcacgtgcaggcggcggtggaggccaacaaggcagcagtggaggctgcaggccatggcacagcggccctgaggatctgcacgacacaaggaggtgcggttggcaacggtagaagccagtacgacgcaaggaggcacggcgggtggtggcagcggcttgtcggctgtccgacagcagggggccttgctgagtacgtggccacatcggacaagctcaccgtcgctcgccctgccggaatctccgccgctgacgcggcgggtgtgcccgtcgccggcctgacagcgctccaggcgctcaaggccatcggcaccaagttcgacggctcgggcaccagcggcggcgccgacgttctgatcaccgcggcctccagcggcgtgggcacgtacgccgtccagctcgccaagctcggcaaccaccgcgtcaccgccacatgcggcgcgcgcaacctcggcctcgtcgctggcctcggcgccgacgaggtcctcgactacaagaccccggagggggccgcgctgtcgagcccctccggcaagaagtacgactacatcgtcaacatcagtaacaagaacaagtggtcggtgttcaagccgcgcctgagcagccatggcagggtcgtcgacgtcgcccccaacttcggcaacttcgtggcgtcggtggtgacgctgttctcccggaggaagaagctgtcgctggtgagcctgaagatgagcaaggaggacctggggttgctgctcgagctgatgcgggaagggaagctcaggacggtggtcgactcgcggcatccgttcgagaaggcggcggacgcatgggcgaggagcctcagcggccatgccactggaaaggtcatcgtggagatgtgagattaagattcagcgatggctctaagctttgctgtcatttaaatgtatgtgctattaccatatttgatcatgccatcggtacacaacaatcaatccgtacccctcatctgcgctggttaaaaaaatactatatatgattactattatattaataaaattttttgc

SEQ ID NO: 21531 - DNA, 332 bp, Oryza sativa
  unsure (1)..(332): unsure at all n locations
  Clone ID: PAT_MRT4530_26794C.1
aaaattaagaacaacgataccagtagtgcaccacagcttcatcgcaacaatggagaatagccaggtgtggctgctatggggngctctctccgtcgctgtcctcttctacctctccaccctgcgacgacgncacgcgggaggcaagccccttcccccgggcccgacggcgntnccgntcatcggcaaccttcanttngccggcggcangtngttncaccacaagntnagggaccttgcgcgcgttcacggccccgtnatnacgntnaagctngggctnggcancaacgtggtcatcttcttccgtgaggccgccatttnaggggtacaaccaa

SEQ ID NO: 21532 - DNA, 201 bp, Oryza sativa
  Clone ID: PAT_MRT4530_26795C.1
atgcccccacacaatgtagatcgttgtcacgggccgtcgatccccggcccctcgcgccgccaccgggactgctcacccacgcacccccttctatactgcgacgccgccgtcgactccctcgtgccatctgctctccgttgcgccgccaccttagccctctccaccgtgacgcgaacaaggcctaatcttttgtcaagctag

SEQ ID NO: 21533 - DNA, 349 bp, Oryza sativa
  Clone ID: PAT_MRT4530_26796C.1
aaacacaacgacgggtcaaaccctttttttattcgccggggaaaaacctttcaaaaaaaaaaaagggggggagagaaaagacatgggggcccactaatcctagagggccttaaaaaaaaaaaaaagttggtggggggggggtagcaaaatcatcccccctccccctttttatagggggtttagatcctcgggaaaaaccaatttaccaacatacaaaaagggggccaccccgtgacaaagggtcataccctttatttattggaggccccacacccggaaaaaacttttgggtaattaaattcaactcgaaaatttttatgcaatattgtaagcgggtgggaaaagcctt

SEQ ID NO: 21534 - DNA, 293 bp, Oryza sativa
  unsure (1)..(293): unsure at all n locations
  Clone ID: PAT_MRT4530_26797C.1
ttttttttactatccnaaatttattaaaacgaataaatatgaggctttcttctgactgatctatttcaaggtcgcataatatctagaagatgaacgtatgcgggcaacaatttccattaaaaagaccttgggcagtttctttaacacatagaacaaggcacaagaagggatgagcacactgaccatccaactccctgctccctttgagttgggggcgcccgaggaaatgaaagatcctgcactccccccttgtggtgaacttggtttaaacaaaccggggggagctggctctt

SEQ ID NO: 21535 - DNA, 551 bp, Oryza sativa
  Clone ID: PAT_MRT4530_26798C.1
agcatacttcctgagatgctaaattatgcagaggcggcaaagctcggggcccacagcagcgacggagcacatcgatggagtggttttggggatgattggatttcacaggtgatcgcatgatttgtcattttatgtggccggttagaccgggctctggtagccggtcagaccggtagtatatgcgcggtcagaccagcacagcccgcggtctgaccggccgacactgtgtcggtttcggtttcgggttgtttatttggatatctgagtttatttcatgattatgacttctagatggatactatacagttcttcgatttgtgtttaccgggtttcggcggtctaaccggcgatctaccggcggtcagaccggcggcaagcggcggtcagactggcggcatacgggcggtcagaccgacggcggcgacaggcacggcgagcagcttcggcggttagaccggttgatctataccggtcagaccgacggcatccgagcggtcagaccagcaaggcaacttcggtcagaccgatctccgtcgatttcgagggtaact

SEQ ID NO: 21536 - DNA, 1874 bp, Oryza sativa
  Clone ID: PAT_MRT4530_26799C.1
cgcaaaacggccaccaccacaccacagagagcccgagagccctactccccttctctcctcttcttcctctcccgcaagcaaagcgcacgccgcctttgccttagatctcctcgactccgccgccgccgccggcgcctccccacggtccctccctcgccatggagggtaacagtaccaacctcgatgcggcgatagagtcgctcctcaacgtggagaagcagatgaggctggccggcgatgtcgccggcacgaggaaggccgccatcgacatcgtcgagctctgctacaaggccggcgcctggaagacgctcaacgatcagatcgtggtcctctccaagaggaggggccagcttaagcaggctatcactgccatggttcagaaagcaatggagtacattgacttaacgccagacatggacacacgtattgagctaatcaagacgttgagcagtgtatctgctggaaaaatatatgtggagatagagagagcaagattgatcaaaagacttgcaaaaatcaaagaggagcagggacagattgatgaggctgctgatttaatgcaagaagttgctgttgaaacatttggctccatggcaaagacagaaaagattgcattcattctagagcaggtccggctgtgcttggatcgtcaagattatgtacgcgcacagattttatccaggaaaatcagtcctagggtatttgatgcagacccgtcaaaggaaaaaaagaaaccgaaagaaggtgataatattgttcaggaagccccagcagagataccttccctcctggaactgaagcgcatctactatgaactgatgattcgctattactcgcacaacaatgattacctggaaatctgccgttgctacaagtcgatttatgaaattccatcaataaaagaggatccatcaaagtggataccggttcttagaaagatctgttggtatttggtgttggcgcctcatgatccgatgcaatcaagccttctcaatgccacactcgaagacaaaaatctctccgagataccaaatttccggttactgctgaagcaacttgtaaccatggaggtgattcagtggacaagcttgtgggaattctttaaagatgaatatgcgaatgagaagaattttctcggaggagctttgggtgacaaagctgcagaggatctgaaattgaggatcattgaacataatatcttggttgtttcgaagtactattcaaggattaccctgaagaggctcgcagatcttctttgcttgagcttgcaggaggcagagaaacacctttcggacatggtaaactcaaagtcgctgattgcgaagattgacaggccaatgggtgttgtatgcttccgcacagcacaagacagtaatggtatactcaattcctgggcggcgaacctcgagaaactcctcgatcttgttgagaagagctgtcaccaaatacacaaggagacgatgatccataaggcggtgttgaaagcttaatctgtaaaccattttgcattggctggcttgcttaggttctctgcctggccttctatggtcaaattttacaatcacaggacgtcaagcttttctcagctcaagcatcacctgtttgctttgggaactcgtgcgtgaatgatcttaaatactgtgaccacagaatgatgacatattatttgttgttggggttcaatcgctgtcctccaatttgcttaacatgtgtatcttcccgaatattatttgaattctagattattcaatcagatgcctggcttgttttaggttctgcagaaaaaaaaaaactcaatatgatctgatctgtaacgcgttcgttgtgattttaagtttctgaagatgcatcatatgtggagaagattgcacggc

SEQ ID NO: 21537 - DNA, 1207 bp, Oryza sativa
  Clone ID: PAT_MRT4530_2679C.1
tcgggaaaggaagaggcaccgccatcagaatcaacatgagaactgtaccataggggacagataaaacatgaatatctctatgttatgtaatgttatgttgtttctagtttggacaagtggagcatacattggtacaagagtacaaactccactcagaccaggtccggaaataagcgccggacatggcggtgtttgtgatacgcctctcacaagctaaaagcctaagccggtttattcctcgtccaatgcatcggaagagccatccttgagatggaggtgcttctcccttctctggaactcggtaaggcctttcccgctcccagtgacaccgaccttacctctgtgatcatccggtgacttgaagatgctctcctttttgcgaccggaaaagaacccaacctttttggctttccctttggtcgtttggaactgctgccatgcattctgcctcttattttgtgcaaattctagctgctcaaagcgggcttttgacttgaatgcatggatcttcttacgctttgtggctttcacatcctccggatcatttggatcgatacggagtttggtgggtaagctacgcatctgaaagtcagatgttgctgcctgttcaattttcctctttattgccattttggtagcttcagcttccttttcagcttgacgcaaagcatcagcagcttcttcctcaagcgatcttacattagcagggtcaacctcctctttgtttccccagccctcaaagcttacataatagccgttttctgtcagttcttcaattgttgcattgtaccactccccatcttcactccacacagcttgcactttagtcccaactgcaaacttctcatgggattgcgaagggtcatccagtgcctctgactgcagtccgcttgaataatttggcggtgatagacctacatcattctgggtgttcccactttgatttgcagttgccaaaagctcttctgttaatgtaataacctcttgaagttccttttccatatcaaggtattcagaaattccaggatcatcgtttttctccttgataatcttcctaacctcgcggagctgctccttgtaggtggagagattggaggcgagctcctccacgctcagatcctccatggccgcctcgcctcgccgccgatgccctcgcctccgccgccgccgccgcctcgatttgattcctcaattcagcggacgcggg

SEQ ID NO: 21538 - DNA, 330 bp, Oryza sativa
  Clone ID: PAT_MRT4530_267C.1
atgcagacaatctacaacaaagagcctgattcaaaacagaatgccattgtaaaattaacagaggacggaggcaaagaatccaaagccccacggcacactttgcattgttctgctactagtaaactttgtttggagcgaattttattgctacttaagttaccaaattttgataatacatgttttcgcctcaatcaagaagaagaagaagaagaagaagaagaagaagaagaagaagaagaagaagaagaagctatatatgtgcattcaaatactagaatctacaatctggattatattcaaatggatgcaaattcgagttcatctccagtt

SEQ ID NO: 21539 - DNA, 744 bp, Oryza sativa
  Clone ID: PAT_MRT4530_26800C.1
tctctttttcccgaaaagcggcggcggcaggctggcgatctcgcagcaacggcgagagcgcacggcggaggcgcttgcgaggcgacggcgcgacggcgcgacaggcgcaggcacgcactaaaggaggctgattgcgcgtaaagggcggcgttggcaggacgcaacgacatcggagggggggcggagcggtgaccactcgcggttttaagggccggggttctcctacgagcgcagacagggccacggatgagagcctagacctacagcggtccatgtaaggcagatctagcgtgaggacggtcctatacgactgtaaggacgtcatagaccgcgcgtgctacctgatggcacacgcgataactactgcatgcgcatatatgccacacatgattatacatgtatagagatctacctaaaactcaacaccgagacataccttgagacccgataagattattatcccatgtatgttcgcgcaagtttaatagacacttattcacgatatagcctacaagcaacattaacaagcggacgatcgaatagaaggtgttacatcactcgacgaggtcaaaagaagcaggaggcacctgaccatcataacatgccaggataaaatagatacgtattgaatgaactaacctgcatgtggtggaatgcttgcagtcgatgttagtatccagatgcacattagcgtcttcatatacagagcacctacctggtatatgcacgtgcatcttagttacc

SEQ ID NO: 21540 - DNA, 481 bp, Oryza sativa
  Clone ID: PAT_MRT4530_26801C.1
aagcaagccagccaatgcaaaatggtttacagattaagctttcaacaccgccttatggatcatcgtctccttgtgtatttggtgacagctcttctcaacaagatcgaggagtttctcgaggttcgccgcccaggaattgagtataccattactgtcttgtgctgtgcggaagcatacaacacccattggcctgtcaatcttcgcaatcagcgactttgagtttaccatgtccgaaaggtgtttctctgcctcctgcaagctcaagcaaagaagatctgcgagcctcttcagggtaatccttgaatagtacttcgaaacaaccaagatattctgaacaaaagcaaagaactggaaatcaactgacaaatacaaagcaaggaaccaaaagagaaatacgataaagtcaagtaagcaatacatgttcaatgatcctcatttcagatcctctgcagctttgtcacccaaagctcctccgagaaaa

SEQ ID NO: 21541 - DNA, 291 bp, Oryza sativa
  Clone ID: PAT_MRT4530_26802C.1
atggtatggaccaaaatacctccgcttactacatcgcaagcattgtggttccccatcctggatcagctcacgctagacctgctagcacaactccggtctgacttaacttcggctacacaagcacatgcccttgctttcaaaggcgagctaggacggggtcttgctatcaagccgattgccagagaggtggagcgactggagatggcccagccggccgaggaactccaagttctagtcgaagcaggagttgccagagagcttgagctagttgaggaattagcagttggctaa

SEQ ID NO: 21542 - DNA, 339 bp, Oryza sativa
  Clone ID: PAT_MRT4530_26803C.1
atggtggaaagtgtgggcaaagggggatggagcgacagcggaaagcatggaggggcaatggcaacaacggatgccgcatcttggcgtaggcgatggcgtggagggcacaacatcttggtgcgggcgatgacgtgcaagggtgatgataggagcttccgacgccgctgggtggcgcagatgggtgcatggcttccgctgccacctatgctaccggtggcacaactgctacagcggtccacctccagatctagtgcgcccctccctctctaccctcactcctccatagttacaccctccctctcctccctctccacccgccgtcatggccagcgacgatga

SEQ ID NO: 21543 - DNA, 1023 bp, Oryza sativa
  Clone ID: PAT_MRT4530_26804C.1
atggatgaggagtataatgcacttgttaaaaacaagtcctggcatttagtggaaatgccacaaggtaagaatataatagattgcaagtgggtatataaaattaagagaaaagcagatggaacaatagacagatacaaggcaaggttagtagctaaggggttcaggcaaaggtatggaatatactatgaagatacatttagtccagtagtaaaaattgctacagttagactagtccttggcattgcagtctctagaggatggtcacttagacaattagatgtgcaaaatgcttttttgcatggtatactagaagaagaggtttatatgaagcaacccccagggtatgaaggtgatttacactacttcttgggcatagaagtcaagaaggttccggatggtataatattgaatcaagcaaagtatgcctcagatctgttagtcaaggttaacatggaaaattgtaaaacagctcctacaccgctagccatttctgaaaagttgatggtgcatactggtgatcctcttggtgtagaagacagcacgagttctactttagtcagtgctttctttgatgctgattgggctggtagtctagatgatagaagatccacaggagggtttgtgatttactttggtccaaatcttgtatcatggagtgctagaaaacaacgaacagtttcaagatcaagtactgaagctgaatacaaagccatggccaatgctactgctgaattaatttgggttcggtctgtcttggaagagttaggagtaaagatagatcagtctccagttctgtggtgtgacaatttaggagcaacctacctatcatccaatccggtcttccatgctagaacaaaacacatagagattgactaccactttgtgcaagaaagggtagccaataaaatgttggatatcagatttattggtaccaaggatcagatagcagatggatttacaaaagcattgtctacacagaatcttcggcatttcatgtacaatcttaacttggccaagttatga

SEQ ID NO: 21544 - DNA, 2221 bp, Oryza sativa
  Clone ID: PAT_MRT4530_26805C.1
atgccgcaccaaaccaaagccacagtccagcagcagcgaccaccagcagcagcttccgtcgtccgcgccggcgcccaagaagaggatgcctctgctgcaggctctctccgtgccatcctcgcccagatccccctccagattcgccctcctcaaggcctccatcctgcccaacaagtgacaatgcgagtgagaagcagaatggaacccatgaaattaacggtgaagagccggtgcggcgtgtgctcccacggcgtgaagaccggcgcggcggcggtgttcacggcggagtgctcccactccttccacttcccctgcatcgccgcccacgcccacgccctcgccgccgccaccgctctctcctgccccgtctgcgccgcgccatggcgccaggcccccttcatcaacaagcgcaccaccaccaccgacgaccacaagcgcaagtcctacgacgacgacgagcccctcctcgcgcccaaggccgccgccggcgccttcaaccctatccccgaggacgacgaggacgacgccaccgagttcaggggcttcttcccggcgcgccccaggagcgggctggccgtcaccctcgccccggacgccgccctcgtgtccgctgggcggaggcacggcaagtacgtggtggccgtgagggtgaaggcgcccgccctgcgctcctcgccctccacgcgcgcccccatcgacctcgtcaccgtcctcgacgtcagccagggcatgatgggcgacaagcttcacatgctcaagagaggcatgcgcctcgtcatcgcctctctcggccccgccgaccgcctcgccatcgtcgccttctccggcgccgccaagcgcctcctcccgctgcgccggatgacgcgccagggccagcgctccgcccgccagatcgtcgatcgccttgtcgtctgcgccgccgcccagggccaggaacagccgcaggccgtctgcgttggcgacgcgctgcgcaaggccaccaaggtgctcgaggaccgccgcgaccgcaaccccgtcgccaccgtcatgctcctctccgacacgcagcagcagcagcagcagcagcaggatgcgatccggcgcccgccagccgcccctccggccacgcgattcacgcacgtcgagatccccatcgggccaggggaggagccggcccggtcggcgctggtggcggaggaggacgacgaccagttctcggagcacgccttcgcgaaatgcctgggcggcctcgtcagcgtggtgatgcaggaggtgcagctggagctggcgttcccgacgggcgagatcacggcggtgtactcgtgcggccacgggcagcaggcggtggcccttgggggcggtggcggcggcgcggcggtgagtgtctccctgggcgagatgtacgcggaggaagagcgggagctgctggtggagctgcgcgcgccgctgagccagagccacccacactcgctgtccgtgcggtgcagctaccgtgagccggcgtcgcaggagacggtgcgcggcgcggagcagcagctggtggtgccggccctccacggcgggagctcgtcgcggcggctgcacgacctgttcgtggcgacacgggcggtggccgagtcgcggcggctggcggagctgaacgactacgcgacggccatccacctgctgtcgtcggcgcgggcggtggtggtgcagtcggcggagcaggggctggttggcagcctggacacggagctgagcgacatgcggtggcggcgcgggcagtcggcaggcaggcggcgtggcggcgagtcggaggagactccggtggggacgccgcgggcgcgggggggagagccgctgacgccgacgtcggcgtggcgcgcggcggagcagctggccaaggtggccatcatgcgcaagtccatgaaccgtgtcagcgatctccacggtttcgagaacgccagattctgattctcatcatctatcaatctcagctcagcttgtaatcaatgataattttcttttctttttcattttcattttcattttcttcttatgtgaaatgaatcaacaaacacaagatatgtctccacgacgaagaagaaagaagaaaggcagaattaagaagagggaggagtccctgccggagcgcggcggacgtaaattacatctactccctccattactgttttctttttctcttctctttttgtactcctattcaaaaatttgaactagtttagacagtctcatcctctct

SEQ ID NO: 21545 - DNA, 1218 bp, Oryza sativa
  Clone ID: PAT_MRT4530_26807C.1
ccggccgcgggggccatcccaagtgcaccggtgccaccttctcccagcgccaccacactctccatctcttgtcaccttgctctactctccccttcttaacctcttcacgccaccgccggccaccaccaccactctctactccggcgacatcatgttcatcaacacggccagcttcgtcgccggcgccgtcgtcgcttcgccggagcagccggccaagcttgtccgggatcagaggagggtggtgcctggctcctgcagggcaagaagaggtgcagcatccaatggcttcagaacttactgcatgcagacatggaaccctttcaccaacaggaggtacgaggcgatgtcttacctgcctcccctgagcgcgaagtccatctccaaggagatcgagttcatcatgtccaaaggatgggtcccttgcctcgagtttgacaaggagggggagatccaccggagcaacagccggatgccggggtactacgacgggaggtactggacgctgtggaagctgccgatgttcggatgctctgacgcggcggcggtgctccgggaggtggaggaatgccggagggagtacccggacgccttcatccgcctcatcgccttcgacagcagccgccagtgccagtgcatgtccttcgtcgtccacaagccgccgtcggccgccgcttctccggccacggtcgccggagctgaatgaaccaaggtgttcagttcatgttcatcctcgcttcgatgatcatcagtcacagcatccatccaaccagtttccttcctcttcttcggtctcttgctcacttgcatgtgctgtaccacttctttcagttcaacttcaacctcatctttgatgactactgtgatgtactaatgttgcttcgagtataatgagcacaatgatgatcatagcatccatccaaaaaaaaaaaaacatcttcttcagcatcatcttcatttgcagaagttaaatgtacctcttcttccagttcaacttcctaaactaatcttggagcgatgtgatcaactggtgttgctatgagtatcatgtgcacaatgatgaccagcttatccctatgagtagcttcagaagtttacttgttccttcccatcaactctcttcacaaatcgagaaaacaatgggtcacgggagtatcgaccaacctgatctgcacatggctttctgctgaccccatgaccaactgccgtctgccgcctcgt

SEQ ID NO: 21546 - DNA, 1472 bp, Oryza sativa
  Clone ID: PAT_MRT4530_26808C.1
gcacgaggcccatctgcaacccgtcgagtccaacccgccgccggtccgccgccatcccgccgtctctctccccaccaccgcgccgccatgtccgccgccgccgccgccctccggccgaccgagccgctccccctcccgagcggcctctccctcgcgccgcgcctcaagctgctcctcaccttcttccgcgccgacctctccgtccgccccgtcgacgagtggcagctcaagaccgcgctcctcgccttcctccgcgacccgcccctctccctccccgtcctccccgactccgacctctccgtgcgcaccctccccgacctgcataagcgccgccgcgacgagcccgtcgcctcgggcgtcctccacgtccgcgacctctccttcctccgcccacgccgccgcaacggggatgatgaggaggaggaggccgaggagatgacccgtgagcaggaggaggagaagtacttccagtggaggagctccctggtcgagaagctggccgggatcgagctcaacctcgagggggttaagtttcggatgagcgtcgagatcccgccctccgatgacttcagggcaatgaagaagtcttgggagaatttctacgcctccgagctcctcagtagcaggaatcctgtgaggaagatagcgaaaaggccagacaccattcttgtccggggtgtgccatccaggtggtttgcggagacgaggatatcatcgaaagcctccacgctggttatgaactgcccttcacattttggggaacttactccgcatacccttttctttggcattcttctgccaattttcaggaaccttaatatttctagtgatgatgaatggggagcaaaacaagacggaaccaataaggagattatatctggactaaattgcaaagtgtgggtgcaatttgagaactacgacgatttcaacagtgcaatgcaggcattatgtggacgttcattagaaaaagaaggatcacggttgaaggtagactatgaagtaacttgggatcatgaaggtttcttccgcaatgcacaatacgagcctgttcgcagcaatttagaagagagaaattcatcggctcatggaaggaagaaacattacacatcgcgaattgagtcagatcatagaaagagatttagggattgatggatatagggcatggcatgatggtgggattacttggttccaaggacagggaaaatgattgtactgtatcattctgttgtttcatcattagtctaacagtaaagtctttttgaattaggtattgggtagttattactataagcctatgtccgggttgattcccagagatcatcccaacccagtcttgcttgtgatttgtaaaagaatttgccctgttggcatcccaaggtatgctcattcattgttcaatccccaactcccaattttgctgaatgagaaattgcaatggttaagatcagcttaagcctgcaaatttttggctt

SEQ ID NO: 21547 - DNA, 1647 bp, Oryza sativa
  Clone ID: PAT_MRT4530_26809C.1
tcaaggcgcatcattaggctgagcatcagaatcctgttgcttctggtgggtgccattggtgtcgttctgttcattcatataaggtattgaatcactgttcccctctagtttttccttgagtgaagcattgtgtgaaagaagtgcctcgtactcctttttgatccgttcaagctcagccctaagagaggagttttctgcccttaaattgtcagcgcgtacagaaagctcttcacactcaggctgggacaaatagtttggtgcctcaataagcctatccatgatgttctgcttgcgcagccgggatctacgtgctaatgcaggattagactacttacgtgtctgcttcttcagctctgtttcatcccattgctctcctcggacagaagcagatgttgctttacattgcatggcaggaaaaggcgcagatccagctgcacctgattactccgtcggtatgttcgagtttgttgtgggagcaactccccccattactgcttccggttgacttggagccatcaatattttcttagtaaatgctgtatggattatttgatattgagaacaggcatcttcctttacatcattttcctttgaatgtgaatcattttgagagttggcatcacttccttcactttcactctcacttccactctcactgtgggaggtaatcccgttggcagatggaccagatgttctgccaagctcatttttcccgttaatttctgaagcacctggtgcagttccagcagtttcaacatttccatttgccagcatagggtagtgattaaatggatgcacaccctgagctccccacatgtagggatgagcctggggacttgcagcaacaggaggtggaaagaacccatgcggtggaattgccgagtaggcctgaaaaccaggccattcagggtaaactggagctgtagtgccagatgtagtggctggagactgctccggttctgatgcctttgttgccttggacggcgtgccaggatcattagtacccatcaggcatcccaaaacactcaaatttaagaatgacgcatcaaccaagaactccacagatccacactcctgggaggctccaaggcagacgcgcatatcaaattcttgcaatcctttggccaagagtgattggcagttccaacgcaggcgcccttggtactccaaggaatgacagatgtcaccatcaatgacggatatttgctttctcattgctagagcagctgattttgtattatatttcacttgatatcttccagctggagttgagtcgttgttgatcgagatttctggaacaacttcatccaagaactcatctgcgacatcaccatcctcatcaatccttagcttccttgtataccacctaaagccctgaacgccgccgtcgccctggggacagggcacgagcaccggcccgggcccgggccgctcgacggggacggggacctggacgctgaacccgcgcctctgcacgttcccggcagccgccgcggcggccgcggcggcgacgaccttatcctgcgggacttcggcggcggcggcggagtcccccgcggcgccgtcgtggtggtggtggtgggggtggtggtcggcgtcgtccctggagattccaaacatgccggcgatccggcggaagaaacccat

SEQ ID NO: 21548 - DNA, 3681 bp, Oryza sativa
  Clone ID: PAT_MRT4530_2680C.1
atggtgctcactcgcagcaacgggaatggccccaacaacaacaacaacaacaacaatggagagaatcccacacttgcccaagtcctggctcaacaggcacagcttatgaacatgatgatgcagcaactccagaaccagcagaaccagggaaataaccatgcacctccccagaacaagttagcagaatttcttcgtgtgaggccgcccactttctctagtaccactaatcctgttgaagctggtgattggctgcatgccatagaaaagaagttggatttgcttcagtgcaccgatcaggagaaggtctcatttgcatcacatcagttgcatggccctgcctctgaatggtgggatcacttccgccttaacaggacaactgctgaacctatcacttggcttgaattcaccgctgctttccggaagacgcatataccatcgggagtggtgtctctcaaaaagaaggaattcaggtcgctcactcaggggtctcgctctgttaccgagtatctgcacgagttcaatcgtctggctcgttatgctccggaagatgtgcgcactgatgaagagcgtcaggagaagttcttggaaggacttaatgatgagctttcttacccactcatgactggggaacagaagaaatgccggattgctcacttcaaggcacaacaggggaatacttcgacaccgcaacaacctgccaagagggagcaaggcagcaagcccggggtgtgcttcaattgtggagacccaggacattacgctgacaagtgtccgaagccccgacgtgtgaaggttgtccctgaccagagcaactctaccgtaccagcatcaaaggcccgtgtcaatcatgttgttgctgcagaagctcaagatgctccagatgtgattttggaaaagaaagatcatacccagaggatgtgtgtggactatcgtgcactaaatgatgtgactatcaagaataagtatccgctgcccagaattgatgatttgtttgatcagcttaaagccgaggggagggggcgcgcggaccgggtccacgggagtggggcccacgcggcagcctcacggtccacggtggaccggccactcggcgcgcccgagggcggccaagccggcgcagccggcgggaggcggcgcgcctgtgccccgatggtcgccgccggctaccaccagcgcgacggagcggcgcccgagagaggggagggaaagggggaaacgaagcggcggtccacggctcaccacgggtcgacggcgacgatggaaacggcgaccggagcggaggaaggcggtggcgcggctcgggtcgacggggtcgacggcgttccggcggtcggcgagcgaaacggaggggtggacgaggtcggtgaggatgcggcgaagccgaaggaggcggcgtcgaggtgggaggtggtccggggcgacaacggcggcggaccggagctcggcagcgacggcggagagagagagcgacggcgcgagctcgattccggcggggagagagggcggcgagtggcggaaacggtggtggggagctcggggagggtttatatagggttgggagtgagagagggtggccggaggagggggaaatgggcgcgggagacccggccgccattaatggcgccggcgagcaagtgtgaattttggttgtctgaagtgaagttccttggtcacgtcatctcagcaggaggagttgccgtcgatcctagtaatgtggaatccgtaaccaactggaaacaaccaaagacagtttcagagattcgccgtttcctaggcctcgcaggatattatcggaggtttatagagaatttttccaagattgctaagcccatgacacgactgcttcagaaagatgtgaagtacaagtgcctcgcgacgccgtcgtcaccgttgctccagccgtgctccgccatcgctccagtcatcgccgtcgctcggggaggtcgccatcgtggtcgccgttgcgtcgccgtcctcgtccgccccttcgccgttgctgtcgaccgccggaacaccgccgccgtcgtcaagccgaaggtcgccgccgcttcttccttgacgccgtcgccgtccgttgatcttccgccgccgttttggtcaccggtgagttcgccgcgtcaccctctacgtgctggtgccctccgttcgcgtcgtcgcgccgtcgttcgccggcgagtttgcaagcccgagccgccgccggtggtgacgtcaccgctgacgtcatcgtcgtcgtctctcgtggtccggccgtggaccggagaagattttgaagagttccaaggccagcaaggcaatttgttattatgtgcctcggctgatttctggacgaggatttacacacatatgccgcgcttcaagcctgagtacttgttcggtactgagggatttgtccaggagttgcgtacgttgtcctttgccataggattcgggactgcccctttgtatgcccagattcctcatgatcatgatgaagagaagtgccatgtcaaagtcaccttgaacagtaatcgtgaagatatcccatcggtgatgttcgaggctggagggggaagctacattcatgcttgtcaggaggtggcaaggatcaccataggagagctccgcgaaagctacaatgatcagttggccgacactgagtatcgctatcatcctcgccaaccccagggaagtgaccgtggcagctaccttgaacctgcagggattgagaatgatgctaccaccaggcatttggttgagatgctgtgggccatggatgagacctgcgctgagattatgttagcagctcaagatcgcgaaggccggaatcgtggtaagatttgcaagctggaagacaaggtggatcgtttggagaaggaactagccgcattgaagggagaagcaccaccacaaaaagctagggttcgtcttaccgcaaggaagagagctctatttgtccctcgctaccagttggcgccaaaggttcgtgtggtggaaaaagaagccgcctcagccccagcggatcctccgatcgtcaacatggtgtttactcgcagcaatgggaatggccccaacaacaacaacaccaccaacaacaataatggagagaatcccacgcttgcccaagtcctggctcaacaggcacaggttatgaatatgatgatgcagcaactccagaaccaacagaaccagggaaacaaccatgcacctccccagaacaagttagcagaatttcttcgtgtgaggccgcccactttttctagcactaccaatccagttgaggctggtgattggctgcatgccatagaaaagaagttggacctgcttcagtgcaccgatcaagaaaaagtctccttcgcgtcacatcagcttcatggccctacctctgagtggtgggatcatttccgtctaaataggactaccgtggaaccaatcacttggcttgagttcactgctgctttccggaagacgcacataccatcgggagtggtgtctctcaagaagaaggaattcagggcactcactcagggatctcgctctgtcaccgaatacttgcatgaattcaatcgtctggctcgctatgcttcggaagatgtgtgcaccgatgaagagcgtcaagagaagttcttggaaggactgaatgatgagctctcttacccattaatgactggggattatcatgattttccagaagttggtggataa

SEQ ID NO: 21549 - DNA, 161 bp, Oryza sativa
  Clone ID: PAT_MRT4530_26810C.1
gaccagtaaatcctagtgcactatatttatggagctataacattacaaaatcatttttccgagatccttcaaccatcccatgcagctgatacctctaacaagctgtatatagctctatgctgcacattcaaacgtgcgatgacacacaagtgcatcatata

SEQ ID NO: 21550 - DNA, 470 bp, Oryza sativa
  Clone ID: PAT_MRT4530_26811C.1
ccaggggtgactcaatcaaaaccgaaatttatcttttacccatccattcgatccataaacttatgcggggaccgatcgatcagttggcgagaacgttctagtgacgggttcataaaaactaatccgcaaggcaagcctcaatgataccggtacccaatttaatttttttcacaacaacttacaccggccgagcatttactgcacttaatagaagtacctgtgatcagggtgggtgatgttctgccacagcttttgacatgatatctactccgccaagttggatccacggatgataggttgatcatacttaatatacctcgcctaataggggctcttcttggcgattgctatctacaggcatggtttaatgttacggttgtaatgaacaaccagagctttatctcatttttgaccgaaaatgcttgggttggttcctaatgcaaggacatggtattaaattgtaaagggga

SEQ ID NO: 21551 - DNA, 306 bp, Oryza sativa
  Clone ID: PAT_MRT4530_26812C.1
atggagacagggatttttatacaggttcgggctcctgaattgtcagtcgacaacagggtagcctttctcctcgaatccgtgcccggcgagatcagagatagctctttcgtctctcctgacagtatccggaaacaccgtaggggactagccgtgcttatccctgaagtcgatatccggcggtgtgtcttggcgtatgtaggcttctatgttgtggcttctatgtcgattgtgttgggtgttgatcctgttgggtgtcgatcctctcctcctaggggagcttgtatttatacccataggtgtcccctt

SEQ ID NO: 21552 - DNA, 719 bp, Oryza sativa
  Clone ID: PAT_MRT4530_26813C.1
tcgcgatctagccgccgcatcccacaacacctcgctctaaaccctcgcggcggcggcggcggcggcggcgcctactccccctccccaccatctcgccgcagccggaccttcgcctcgcgctctcctccccccatcgtcgattcgcgtccaatcgagccaaggtgtaggtgttctcgtgcggtgagagagatgctggtgctgttcgagacgcccgcggggttcgccctcttcaaggtgctcgacgaagggaagctcgacaaggtcgaggatttatggaaggagttcacgacgtctgactcggcgagaaaggtggtcgagctgaaggctttcaacaagtttgagaacacctccgatgccctttcagctgcaaccctcattattgacagcaagcctaccaagggtttgcgcaaattcttgcagaagcactgtgagggtgaaacgttagctgtagctgactctaaacttggaaatgctataaaggagaagctgaaaattgattgccttcataacagtgctgtgatggagctcatgagagggttaaggaaccagctcactgaacttatatctggtttgggtgcacaagaccttggtccaatgagccttggattggcccacagcctgtctagatataagctgaagttcagtcctgaaaaggttgatactatgatcattcaggccattggattattggatgatcttgataaggagctcaacactta

SEQ ID NO: 21553 - DNA, 411 bp, Oryza sativa
  Clone ID: PAT_MRT4530_26814C.1
ggggggaggcgcctttacacactagggaaaacaggggatcttcttactacaaacgctccacgctgggcgagagaaaaaccacacttaccctggccaaccaaacagcacaaggggctcaacatacactccaactggtttggtgggacacagcacagcacaaacagggcgacagctttgaactatggcagggcattagcacacaaacacaggaacaagcaccacaggtgtactcaaaaaagtaccccactggatgatgcaatgttgcaaacaactcttccagggggacccagggcaaggggggcccctaacccctgaaccctgggcaccccaaaccttccaggaggaaaattgagacccgggccagcagggactggccgtaggtgtaaatcacagatgagggggggaagaact

SEQ ID NO: 21554 - DNA, 119 bp, Oryza sativa
  Clone ID: PAT_MRT4530_26815C.1
atgtgtgcagactattgggcactagatgatgggactatcaagataagtttctccaagatagatcttcgatcagggtctcaccagttgaggatccaagaagaagatatacctaagacagc

SEQ ID NO: 21555 - DNA, 165 bp, Oryza sativa
  Clone ID: PAT_MRT4530_26816C.1
atgtcgagaatatttggcgacgcctgcgagatctggcgcgaccggcaggtcgagtggcgagcgcgcggccgcgacgtcgccgtgaaagcggcgtgcacccacctgcacctgcaggggttcggagtcgccgtcggcgaagctgtggctacaactgttgcccgctag

SEQ ID NO: 21556 - DNA, 867 bp, Oryza sativa
  Clone ID: PAT_MRT4530_26817C.1
atgtctggggagttgccatcagctctaggcaactgtactagtctcaaaatcatcggcatcaagcataacaacttcatcggtgatattccgggttccataggtcagcttaatagattggaggagctccagttggataacaacaggatgtccagagtgtttccatcatctctaagcaactttacaagtctcaagatcatcaacctcaagcacaacaacttcacaggagagctttcgaaggttaacttctccagactgcccaatctgaaacttttggatcttatgtcgaacaagttcactggagaaattctagatagcatctacagatgcagcaatctaaccacattacagctatcttcaaacaaattctatggccagttgtcaccaagaatagacaacctgaagtccctcgtttttgccggggtatttgaacttcctgtttatgctgattatgaagagccatcacttacatatggtatgaccaatgctctccctgcaatgctaaatcttggaaacaataagcttactggtgcaattccttcagaggtcggccagctgaaatcactcacagtgctcttcttgagcttcaacagctcttcagggcatattccaccgaaacttttcaacctgacaaatctgcaagtgttagaattgtctaacctccatctcacaggttcaatcccaccaggactgaacaatgtgcactcactttcaatatttgatgtttctaacaacgacttagaggggtcagttccaattggatatgagtattggggttttgatgggaacccaaagctgtgtggttttcctatgaaaggcggaaaatacaaaaataaagaaaaggacattggagggaactcgtttttttga

SEQ ID NO: 21557 - DNA, 1382 bp, Oryza sativa
  Clone ID: PAT_MRT4530_26818C.1
cccaaattcacttcagttatgtccgaaaaggcatcagggccttctgcatcttatattgtgcaagtcgtgtatctcagttagattgataattacctttactacatatagaataaatcgctcaagatccaaacagcgaagtagaaagtgagccccaacaacccccataacagaacgcccttcactatcaactccaccgcggtaaattattttcatctcagcaatctctgagagactgagagaatttgctttagcaaggtgtcatgaatgaagtgaataatcttcagcagcagataatggaggaccaccaaggtcgccaaatccaaccaatttagcccaattaaatcccttgtttgcctgaacagacttttccaactgctccttgcgtcggagatctggatctttaattagtgacataaaggcaggatccaaatatgaatctaacttgaaagaattcctactacgtgacacgtagtagatctccgacgcctcctgcagttggaaaagtctgttcaggcaaacaagggatttaattgggctaaattggttggatttggcgaccttggtggtcctccattatctgctgctgaagattattcacttcattcatgacaccttgctaaagcaaattctctcagtctctcagagattgctgagatgaaaataatttaccgcggtggagttgatagtgaagggcgtcctgttatggtggttgttggtgctcactttctacttcgctgtttggatcttgagcgatttattctatatgtagtaaaggagtttgaaccattgattcaaaagccttactcaattgtctatttccactcagcagcatctttacaagtgcgaccagatttaggattcatgaagcggttgcaacaaatattaggtcggaagcatcagcgcaatcttcatgctatatatgtacttcacccaactttgggattgagaacagctatattggctttgcagcttttcgttgatggggaggtctggaagaaagttatctatgtcgacagacttgtgcagctgttcagatacgtaccacgtgaacaactgacaattcctgattttgtcttccagcatgatctcgaagtgaatggtggaaagggcataataattgaccctagaacaaagcatgtctaccaaagaccatcaggttgataaatatagcctgctatatgcagagatcctccaataccacactgtacaatctctttgccctctatagaagattttccttcttgatctgtgcattttgtatctagttgagttggcagtgttttgtagccttctagtcttttctttctgttctgtcagggaagcgtagattattatgtatatgtatcgctctatataataataaaaaatgctgtggccgtctc

SEQ ID NO: 21558 - DNA, 351 bp, Oryza sativa
  Clone ID: PAT_MRT4530_26819C.1
atgggaggacaggagatgatcgtggaggcgggagacagcgtcacgctgcaattcccggtcacggagattgttggcggcgacgaatctaaggtgaacaacgccatcgaggttgcgatcgatcatggcgacgtgctcaccatctcgctgagggatcgtgagcagcagaagaagcaacagccgagccttctcgatgtgcgcctcttgatgacaccgggctatgatgagaagaaggtggagtggcggtccaagaaggtcgatgacaaagtgtggttagaggtgaccatcaagaagaaggctcctacggaagatggaacgaggattgttgacatcagcgccatcgaagagaattag

SEQ ID NO: 21559 - DNA, 232 bp, Oryza sativa
  Clone ID: PAT_MRT4530_2681C.1
gacaaggaaagctccgagtgtaaacaccaaaaaattattgcccagctcataggatcagcactgagacgggatggtgaccacacggcacgcatgaatcacgcacgccagggacctgcgcagaaagcccatacctattggcatggatgctgaaactcgaatgtaagagccttgcaagcaaacgtgtccggagctcaagcctaacgagcaccggctgttggcgaaagccacttat

SEQ ID NO: 21560 - DNA, 295 bp, Oryza sativa
  Clone ID: PAT_MRT4530_26820C.1
ggacagggtgaagctttcacaaatttggatcgaacggggccttggttttccttccaagctggtcatggatgattcaatgcctctgcacgcttggtcccgctcagccgtagcgtccgagtccgacctcgctgctgttgctgcaactacgtgtctcagtgcctgcagggaggcaggcggtccgtggacgtggagagaaagccctgcttcccgtgcaatgcaaaagtgtccagcgtgcaagcgtacacacaccggtgatgggcgtacggtcaaaccggctcacttcaacgtgccataa

SEQ ID NO: 21561 - DNA, 375 bp, Oryza sativa
  Clone ID: PAT_MRT4530_26821C.1
atgagctcggaacttgcaccctggctgaactctgaagggagggtaccttgccttcccattagaggagcttcttgctctgatcgttggcatgccaggaagatcatggtagggggtcaatatcagggtgactccgaccccgatgcggcggtggagctaccagcggaggagtttggcgacctcactcagactccgcctcaccatccacagtctccgtcgaggcgcactgctcgcaattgacgggcggatcttcaccaccatcgaacagaccgacttgtagtctcaggaatgttccccaccagctctccatcgcatcccttccacctcccgtccaccggctctccgccgcatcccctccccatgcctccacaggtttct

SEQ ID NO: 21562 - DNA, 2182 bp, Oryza sativa
  unsure (1)..(2182): unsure at all n locations
  Clone ID: PAT_MRT4530_26822C.1
tttttttttttttttattatttttctaagatgatttttgcaggcaggccacgggcccagttgcgaaaatggtcttttttcacagttgacgtgttagcngcggtcctcctccccgcctgcgaaaatggttttgggccgcctggaaaaatcatttttctagtagtgaatgtagatcgcaagagatgtagtacatttttctttcaaattaacaaaaattccatctcccattttcataccaccatcttggcatacttgttagatatatatgtcagggtttatctctttgtaacagaaaagtagaggatagaggagttggttatcattttatgtgatctataccggtatacaatggattgatctatgtactgccacggtgaaaggctgttttcacgtcatattaaaaaaaatgtacggggggcctcatccgggaggggaaaacccttcctatttccccatatatagcacttacctttttttttttttttttttaatggctaaactacactcaccttcctatctttctctattgacgatagaagaatcaacatatacctcatcaataaacaagcgacttaattctagtctatagtaatccaaatacaatcctttgttatatctagcgatctctacaatctacattgtctatgtatccaacataattcgcacctcaccattacttttaggataagtgattttgctctgatctgcctctgtattcgtgggaacttgctgctgctgctcttttatctccttcccttttccccagaggaaggaatagaggccaatgattatcataaatgcccctagcaagctcccgacagagatgtcgcttccaagcagcatcgagtcaaggacgacggtgatgatcagcgcaagcgagttgaacatggaggggtaggttggccctcgccgtgacaccgcccacgtgatcaagcagaaggtggcagccgtgttgaaaacccccgaatagatgatggtgatcagctgcagatcccagtggagtgcccatgccgaccggtcccggtcgacggcgatcccgatcaccaccgcctggattgtccccatcaagcatgcgagcatcgtcgagaagtacttagatgggaactccttgttcactttggcctgaacgatgaaccagaaggcgtagctgaggcaactgccgcaaaggaagagcgtcccgatgagcatgttgtggtgggtagggaaggtggagtcgtcgctgccgccgatcgcccgcagctgcgccggcttcagcaggtgggtaggccacaaatgcagcagcttgcccctgtacaggctcaccaccatggtgcccacaacacagatcaccgtgccaatcacctttatcatgccagaccgcgtcttcagcttcagcttctccaatccgaacaaagcgttgaaaaatatccagcccagtaccttgtagttaacctttttcatcatttgcctctcgaaccagaaggcgaagggtaacatggtgacggtgccaatgaggttgcggtatgcgaggaggacgaaaggtgccatcccactattgaatgatagcttcgcgaggaggagggcacctatggtgaatagctggaccagtaccatgctcaatgggagcagtaaccgctccgccatccctggcttcgtcttcgtggtcatcgtctctgccatcatgttggtacccttagagctttttcaagagagaagataagtgttcattccatcactctggcactcagcatcagttgggaataagagcgatttgcaaggtcatcagcatcagtggggaacaattgagcaatttttcaggagaatcactcgggccatatccacaccaaagatgatgaggagatgtccacagcgacaacttcagttgagcttaaatctacatgccaccaattcctcaaatactactacttctaagccaggggcattcaactccctatggaatcaaagtgagaaccaagttcaaaacagaaagaggtagcggtggtgcagcaaggaatccaaggaggtagtatttatacacacatggcaatgaatggattatggtacgagacagtaagcaaatcagtactaattacatcagaatgcatatacgtgcacgcatactctctgtctcataaaaaacgaatcagactaagatataacatatcctagcaccatgaatctggaccgatggatgttcagaccga

SEQ ID NO: 21563 - DNA, 495 bp, Oryza sativa
  unsure (1)..(495): unsure at all n locations
  Clone ID: PAT_MRT4530_26823C.1
gattgtgtttagagagagggggagagagagaagggagctgcagtctgcattgcaatgccccacccaacccaacccatgaaatgaaatgaattcaatgaacccatatcgatcgattgatatgtgcctccgcctccgccgatctgcctcctcctgggccgccgacgtcgctgaccacgctcgctccggtcgccacgacgccgcgctcactgtcttccgccgcgttctcgccgtccacccgaccaccgccgccgacgacgagctcgcctgctccgccctcctccgctgctgcgatgcccgcttggcctaccagatacacgcccaggcatgccggcgcggcttggtggcctccaatcccgtcctggcctgctccctgctcgccttctacgctgacgccgactactatgccaccgtcgtaataccgnctgcctgcaacctgttcgacgaaatggcacacaaggatgccgtctcctacacaagcatgatctttgctctcgt

SEQ ID NO: 21564 - DNA, 139 bp, Oryza sativa
  Clone ID: PAT_MRT4530_26824C.1
ggatccccgggctgcaggctcacccctgcatagagcacaagacacctcggtgtttgcatgcgcaatggcgaccagcaccatggccctctcctccacggcgttctgccggcaaggcctgtcaacgtgccatctgtctctc

SEQ ID NO: 21565 - DNA, 390 bp, Oryza sativa
  Clone ID: PAT_MRT4530_26825C.1
tcaaaatcttttactcatcagcccagccaccaccgtatcgccatgctgcccatcaaggtctgtactacgtgaaaacgtgagagccgcgtttccctctggatttttctccgccttggcacgtccgcggtgggctggcgcggctttcgtcgtgatccgcaacggagggcggggacgcggccaccgtggacgccgccgcacgtacgtgggcgtggcgctcccactcccacggcaccaccacggcaccacctccctccgcctcttgcgtcgtcgtttccacagtactactacagtagcgcgtctccctggcgttcgttcgctggcccccagctcgcgcgcgtgacggctcccgtatcgcacggccacggccccaccacgcccgccgcccctaat

SEQ ID NO: 21566 - DNA, 622 bp, Oryza sativa
  unsure (1)..(622): unsure at all n locations
  Clone ID: PAT_MRT4530_26826C.1
attcggctcgagctgcagcttcggnnccaaaagtttccttttctggngaaagagagaaggcagctgcaacagctagtgctgtgttaaatgggtttggaccccacttcttgcgtggaggaaagaggagccatgcccttcttgctgctggcattggaggcaaagtcggagctgttgttagtccttgaagagttattgaggcagttgctgctgcaccaaagaagtcatggatcccagctgtaaaaggtggtgggaatttcattgacccagaatggcttgatggctcgctaccaggtgactacggtttcgacccattaggactaggaaaggacccagcattcctcaaatggtatagagaagctgaactcattcatgggaggtgggcaatggctgcagttgtaggcatctttatagggcaggcttggagaggagttccatggtttgaggctggagctgatcctaatgcaattgctcctttctcctttggttctcttctgggtacccagctactcctaatggggtgggttgagagcaagagatgggtggacttcttcaacccagattctcagtcagtggagggggccactccatggtcaagaactgctgagaactttggcaactctac

SEQ ID NO: 21567 - DNA, 381 bp, Oryza sativa
  Clone ID: PAT_MRT4530_26827C.1
atggcgagtcggcgaaacgcggcgtcgcggtggggaggcggtaaggaagcagaggatgccgacggcggcgagcgcacaggcgttcgacagcaggtcctcgggctccagcggcacccggcgttgatcgaaggcatcagcagcaacagaggcggcccgagccacggttcccgcggcgcttgtggtgacgcggcctttgtgcgggatttcggcggctcggtcggtcggcggtcccacgcgggcgtggcacggcacacggcgcggcgcacggtgcaaggtgaccaggagggcgcaccggtcgtgcgcgacacgttcgcggctcggaggtgtggcgttgtgtgtgcggcttgggctagggctctggtcgagcacctggcggcctag

SEQ ID NO: 21568 - DNA, 583 bp, Oryza sativa
  Clone ID: PAT_MRT4530_26828C.1
cggccgctgctggtattggacggccgcgatggcggcggcggcggtcacgtgggagcgacgagactccatcgtgaccgtccagtccggtcccagtccaattccgtcgctgggtttggatattccatcgagatattcccagcggcgacgggatttttcgccgggtttctccagattttccaatgggaaaagccctcctcgccgaacgaatgctcctctccggtgttgtgttggccgcgccgccacgggccccggcgtcctgggggctaaaccattagagttggaatgtgcgatacgcccgaaggcgctctcgctttcttctcgcacatcgacatctgtgtactttcttctcgctctccatgagacgggtactccagtgttcatcacgggcggcacggtggcagtcggtcagatttggcgcttgggctctggccagcctaccttgctactactttgggccggccggtacatcctgggcctggtagggagcaatgtcggccatgcggcccatgtctggttggctgggatggaaataagtttacttgttgtccttatgctttacgtcgagtataatcgacatccctaa

SEQ ID NO: 21569 - DNA, 282 bp, Oryza sativa
  Clone ID: PAT_MRT4530_26829C.1
atggccgccgccgacgaccataggggcgcgggcgccgcctttcgccggccgcgccggcatggccgccttcgggcccgccgagtggctgccgcgtggggcccggccgtgagccgcccgcgccctcgggtgcggctgacgcgtggggcccgcggcgccggccagtgcgagcccgggtgcgcccggtccaccgtggaccacgctgcagcttcgaaagatccgctcttcgtggaggttgaagccgacgtttgggaaagcgagcaaggcaagtcacatcatccttga

SEQ ID NO: 21570 - DNA, 921 bp, Oryza sativa
  Clone ID: PAT_MRT4530_2682C.1
atgcgaaccgaagatgaagtccgtaagatgatcattaccagcacagaatggcctccaccaggaatgacaaaacgtcagagaagaaataccttccgaggtgcaccacagttgacagagcatcttttagctaatggaggtagagtgtctgatagtgaagattcagatcaagtctcctcagatgatgaagatgagaagtctccccaaggtttcaaccagaataaaatggaacgaatgatcacactgagaaaacgagagttccgctacctgaagcaagaagatttgaccgtcacagagtacctgcacgagttccatcgtttggctcactatgcaccagaagatgtggaaaatgatgaagacaaacaagagaagtatctccaggggttaaaagatgagatcacagtgcaactactcctagaggaatatgaagattttgagaaacttgtggacaaagccatacaactcgaaagtgagcataatcggatgaagaactgtaagagaaggattgtcagcatcccagtattcccatgtggtaaccaaagacagcgcacggagccacttcagatcaccggatcttctgttgcgcatcaagagtttcgccccaagaagatggacacaatgcagacaacaacattagcaatactaatgatgatgataccaccaacaaccatgcttcttgccccattagtgaccactcaaatcaagcgtgcaatgtcaacatcattcaccaaggtgtcgacgatagtatcaatgatggcacccaaaatgacaaccctagcaattgtgactctgagaaagactccaatggtgatagcaactatggtaccactgatgccaatgttagcaaggatttccaaccaccaattccaactccaagtcagaatgatcgtccccagacggatagctcagcaaagaagacgttga

SEQ ID NO: 21571 - DNA, 1464 bp, Oryza sativa
  Clone ID: PAT_MRT4530_26830C.1
cctcgtgggagagtgagtgacctagccgcgtgtttttctttttaattttttgcagacataaaaattgtgcttaagcaagttttatatgtttcgtgaagctctcaaaggcgagtggaagtgcagtaatttgttattggcagtacattattagaaccgcagagagcattcacaaggcatacatttaacaccatccagcacatacgcagggagaatagcaatcaggcaatatctttgatatactaatatttttttagctttacttctttggcgtgtcagcatacttccaggtgtaatgtgcaaatgaggtatactgtcttccaccagcgacatcttcttcgcgtacctggctagagatctctttcaggtcatcatccgtgaggttcacctttaaggagtcaatgttggcatctaggttttttatcttggttgttcctggtattgggaccacatcatccccttgatgaagaacccaagctaaagctagctgagcagggctgcactggtgcttcttggccagctcttccgttttcagataaagctgtttattcttctccaaattttcagcagaaaatcgtggatgtccttgcaaattagattcagcagacaattggtctgtcactcctctccctccgaaaaacccgcgggcgatagggctgtagggggacaattccaatgcccgtgtcgccgaaggtgccgccacgacttaaggcgtgcacgatgacggcgccgccggcgtcgtcgtcgagcggcgagttgtacgcgcccgtgagccccatgcacccgaaccccagcttggacacctctaggccccgggtgccgagcttgactcgaggcatcggcgccagtggagcttgctccgccatggcctctcggcggcggtcgcagggggagtgagagtgagaggaggaaggcagtggggaagggagtggaagtgaatcgcagtctcccagcaggcgcgcacgtactccggccggccgcacacggcgcgcacgccgtcggcgccccgccgaatcccgaacttggtggccacctgcacctgctcccgcggcagctgcttcagcgccttgccgaggaggatctcgttggcgagggggccgtagacgtcggaggtgtcgaagaaggtgacgccgcggcggaaggcgtgcgcgatgacggcggcgccggcgtcgtcgtcgagcggcgagttgtacgcgcccgtgagccccatgcacccgaaccccagcttggacactgtcactggccgattcagcgcaaaccgaacgaacggaaatacggggaagtaggaattgacgatcgagcaagcgggcatgttcacctctaggccccgggtgccgagcttgactcgaggcatcggcgccagtggagcttgctccgccatggcctctcggcggcggtcgcagggggagtgagagtgagaggaggaaggcagtggggaagggagtggaagtgaatcgcagtaaccac

SEQ ID NO: 21572 - DNA, 484 bp, Oryza sativa
  Clone ID: PAT_MRT4530_26831C.1
tggattccgctgtatggccacgtacactgatgccaacgcttgggccactgggtaggctccaccacgcccactgttcatgtcgcagccacatggcgctcctgcagcagcacatgttgcactgcacgctatactaggcactgatgcctcacgtggcccctgtgggcacaccacagttgccacagatggatgcacgaggcatgcacacacaagttatttgtgctggatactcgggcacagcacgcagatgatggatagatggcgatgcagatgccatagacactgtggcacacatggcccctggtgcaacttccaacttcttcttcctagtgggtgtgttgtgtgatgccaaccgttgggttacatggacttctgagtgaataaagggtggttggcatactattcgtggtggccaacactagaaataagaacccttgaataaaatatccatcattttcaaacttcccaaaaaaaaaaaaaaaaaaaa

SEQ ID NO: 21573 - DNA, 209 bp, Oryza sativa
  Clone ID: PAT_MRT4530_26832C.1
agcgggcgaagccagaggaactctggtggagctcgaacgatactgacgtcaaatcgttcgttctgacttgggttatagggccgaaagacttaatcgaaccatcttagtactggttccctcccggaaagtttccctccagaataacttgaaccccattacgaattctattcgggtaaaccaatgattagaagccatccggggccgccaac

SEQ ID NO: 21574 - DNA, 2688 bp, Oryza sativa
  Clone ID: PAT_MRT4530_26833C.1
ggctaggatgaagctggaacaaagggaggcggagaagctggcgctgcacaatgcagggtttttggcccagaagcgcctcgcacgggggctccgcctcaactacacggaggccgtcgcgctcatcgccgcccagattcttgagtttgttcgtgatggagacagaactgtgacagacttgatggacttaggaaaacaactgctgggaaggaggcaagttcttccagctgttccacaccttttagaaactgtacaggttgaaggaacatttatggatggaacaaaactaattactgtacatgatcctatttcttctgatgatggaaatttggagctagcactgcatggttctttcctcccagtaccttcacttgaaaagttttcttcggttggtgtggacgactttcctggcgaagtacgtttttgctctggtcacatagtcctcaatcttcatcgcagggctttaactctgaaggttgttaacaaggcagacagacctattcagattgggagtcattaccacttcatagaggccaatccataccttgtttttgatagacaaagagcttatggcatgagactgaacataccagctggtacagctgtccgttttgagccaggggatgcaaaaacggttacacttgtaagcattggtggtcgtaaagtgatcaggggtggaaatggaattgctgatggtgctgtcaacagatctcagcttaatgaggtaatggaaaaggttattgcaaatggttttgggcatgaagattatccagattcaagtgaaggtattattggtgatggcacacatgactacagtgttgatcatgagaaatatgcaagcatgtatgggcctacaactggtgacaagattagacttggtgacactgacctttttgcggagattgaaaaggactatgccatctatggtgatgagtgcatatttggaggcggaaaggttctacgtgatggaatgggacagtcggcagggtatccagcctcagattgcctggacacagttgtaacaaatgctgttgtgattgactatacaggaatatacaaagctgacattggtataaatggtggacttatcgttgctattgggaaggctggaaaccctgatgtcatggacatggatggtgttaatgaagagatgattgtgggggttaatactgaagttattgctgctgaaggcatgattgttactgctggtggaattgattgccatgttcacttcatatgccctcagttggcagaagaggcaattgcaagtggcatcacaacattggtgggaggtggaactggaccagcacatggaacttgtgccacaacttgcaccccttcaccatctcacatgaaactaatgctacagtccactgatgaattaccaatcaatatgggattcacaggcaagggaaatactacaaaacctgatggattggctgagatcattaaggcaggagcaatgggcttgaagttgcatgaagattggggaagcaccccagctgcgatagataactgtttatctgtcgcagaagcttttgatatccaggtaaatatccacacagacaccttaaatgagtcaggctgtgtggagcatacaattgccgcatttaaagataggacaatacatacatatcatagtgaaggagcaggtggtggtcatgctccagacattatcaaagtatgtggagtgaaaaatgtgttaccctcttcaacaaatccaactcggccatttactttgaacactgtagatgagcaccttgatatgctgatggtctgccatcacctcgatagaaatatcccagaagatgtagcatttgccgagtctagaattcgagctgaaacaatagctgctgaggatatcttgcatgacatgggagcaatcagtatcatatcatccgattcgcaggctatggggcgcattggagaggtgattactcggacatggcaaactgcaaataagatgaagagacagagaggtagattacctatatccagttcccccgatgctgcagaggacaatgacaatttccggataagaagatacatagctaaatacaccataaatcctgctatagtgaatggcttttctgattttgttggctctgttgaggtgggaaaattagctgaccttgttatttggaaaccttctttctttggagcaaaaccagaaatggttataaagggtggtgctattgcatgcgctaatatgggtgatccaaatgctagcattccaacacctgaaccggttatgatgcgacctatgtttggtgcatttggaggggctggaagtgccaactctatagcatttgtgagcaaggctgctaaagaagctggcgttgcagtgcagtacaagctgggaaagagggtggaagctgtaggtcgcgttcgtggtttgacaaagctgaatatgaagctaaacgatgcacttccgaaaattgatgtcgatcctgaaacctacacggttactgctgatggagaggttttgagatgtcaaccaacacccacagtaccactatctcggaattacttcctcttttagacaactttagtgaaccagcctttcttaattagggttaatgcatgcatttggtctctctcttgaatccttttcaataatatggcttgtaaacttaaagctttttatgtgagttttccttcacaggtgcaataaggataacttttggccgt

SEQ ID NO: 21575 - DNA, 565 bp, Oryza sativa
  Clone ID: PAT_MRT4530_26834C.1
ccaatacacaccgatagaccgcgccgcacgtacgtcggaaccatgcgccatggcccagcagacgcggcccctcgctgcggcaaggctgttcctggccacccggcacgccgacagcggccatcacctgcggcctggccaactccgtccctgcgccctgcctcacctacgcccgccgctgcgcccacaccgctggctgcctggctgaagcgccatgagtagcctgagggccgccgccagcagccaccagtacactggcgcaccgcgtgcagctggctgagcaccgcggcccgtatcctccaggggctcagcgccggcacccaccgcaccatccactgtgactgcggcgacatgggccgctacaccatgcatgcttccatcgactaggaccagggtgaggtgagctctccatcggatggatcatctatatccatacagaagcgccaccgtgcttcgatgcgtgtagccgatcgaactctgtctccaatattagcagcatatgtacaccttctgcgatataaagatgagctatctcaagtccgtcaatcaccatgcatgcatgtgcgag

SEQ ID NO: 21576 - DNA, 1212 bp, Oryza sativa
  Clone ID: PAT_MRT4530_26835C.1
atggtggcggcgccgggaatcaaggagaggagggaggccgacagcggaacgcaactgcgcgcggcggcggcgagaaaggcgggtggcgagggagaaagaggaaggggaggcggccatggcggcgcggcgcgtaagcgagtgggaaggccggcggcggaaacagagcaacggcgacgacccaactccataatctccggtgtaaatgagcatgcccagagaatttatgctgtttacaggggagaaggggagcggagctcaccgggaagggaggaacgcgccggcggcagggatgtccttggcggtttcgacgctgaggcggggcggatggcgttgtctgctcacggcgagacggtcgccgcgacgggggcggttcggcgccaagacggcgtggccggggaagaagagagggagcgcgaggatggggcggtctggtggcggtgcatcgacgtctcggtcgcggcggcggcggccggcgacaatgaggcgacggcactccgttcccaggagcacgggaccaaggggatagatagggggcgcggggtggtgcggcggttttgtgggtggtgcgaaagcggcgacggcgtggatgtgttgggcggcgaaggcggtggatcgagcggcggaaatcgaaccgcgagcgcgggctggcgcggcttggcgtggtcaaggtgggggcggcgaggcgctgcggcggcgtcagaggctctgtctccgctcgcgcaccaggacaagagggagagcaagacggccgtgcccgcgagggaaaagctaaagaaggaggaggaaaaggagccctgctccataccgatttgggtgagcagagggaagagaggaggcgagctctggctctgtgttttggacgcgtgcgcactggggtggggcgacgcggcaacagggcatgggcggcgaccgggcggcatggcgcgcgcgcgcgcggagcagctggcgcggcagaaatcaaatggcgcgagcgggagatttggcgccggagtgacgaaggcggtggaggtaaggatggcggcgacgggaaacagggaggagtcaaggaatggattcaaggtggactcggatattggtggaatcatgacaagtatttggcgaggattcaaggaggcgattgaatttcaggatttgatttcgaaacttgtgtttacacccaaattcggcacctatggacgaaataggggaaaattgccaaagtttggaaagtga

SEQ ID NO: 21577 - DNA, 506 bp, Oryza sativa
  unsure (1)..(506): unsure at all n locations
  Clone ID: PAT_MRT4530_26836C.1
gagctgcaaagctcttcctgaataaaggagacacggnaattttttacttgcttccatattttgtcaacttctagcacaatatctgttacctgaaaaatctgtccatagaagttaacccaaccttttttttctacataacttcttttaaaatccatcaacctttttgtgcccacctcagctaaaagttactgttcatggatactacatcaaaatgaaggtacttcctggctaaaatggttctagtttaggtttgaacttggaaaaatcaagccatgctagttttttttatgttttctcgaaaacagttattttttatgttagacatgggtttggaattataaattaagagcttgtagttacaattcttgatatgcatttggatagaatcttcgttgaaattcatatacttgtcctgtgcatattaaaaagtttgagggctttcagccaggcatatgattgactaaactgttgttaattatcctttatatcgtgaactgaacttttga

SEQ ID NO: 21578 - DNA, 457 bp, Oryza sativa
  Clone ID: PAT_MRT4530_26837C.1
tttttgagaggcaattacttaaattgaagaaatagatggtcaccgaaaatgtgagtcaaaatctgggtacaatgtgacagcaccaagtgccaaaattttgtaccttcctgacagttaacacattcaccaaacctgcaagacatccaaccaatccaaccttattgtcctacactgtgggggcaaatcgctcacatgcctgcataattgcaaaccatattgattgcaacagcccatgtcaaggaaagatagcccctatgcctttattattgttccatacacttgtaagtgacagccatgacatgatcaccaaaaaagggaaagcaagtcaataacaccaggtacctatcctctctgttcttggcatgcctccattcttgtgccattcccattcatcgtctttcttgcaggtcttcagaagcaggcagcaagaacagctgcaaccatgagtggaggttca

SEQ ID NO: 21579 - DNA, 792 bp, Oryza sativa
  Clone ID: PAT_MRT4530_26838C.1
atggaggagaagaagaaggacctgctccggcggctgaccatcatctcgatcccgttcgtgttcatcgccatcccgtcgatcgtgatcatcgtcgggatgctgtcgccgcacgcggcggagccccgcgaccagtcgtcgccggcggcgccggggcggaaccactcggtgtccatgctgagcaccatgaccggcggccagatgatcctcagctgccgcaccgccttctccggcaactgggagtacttccactacttcatcctcgacccctacaagccccagcgcgccttcttccagccaccgccgccgccgccgaactccgccgccgccgtgccgtacgccatcctctgcaagtgggggtacatgggcaacttcctccaggacgtcgtcgtcttcaacagcagcgccgcctacgcgctgcggtgccgcgtcgaggaaggcgggtgccactacctgttcgaggacgggaagatgttcctcgtcaccgggcggcgcgccaccagggcggcgccggcgcggcggagggagaagaggctcgtcggcgacgtggtgctcagggagtgcgcccacgtgctcggcgtgttccccaccgtgtgcaggtacaagccccatgaacacaactacgtcggcaagatcatcggacgctggcgatggtggttcaactactaattaattgttattatgatgatgattattgatagcattgttaattagatgattagttactactagattaactagctattgttttactagcctattatagccggttaatttaactgttgatcttctggc

SEQ ID NO: 21580 - DNA, 894 bp, Oryza sativa
  Clone ID: PAT_MRT4530_26839C.1
atggcgtccccatcggcggcggcgacggctaggaagctcggtagtcatctgccgaggctgcgggacatcatcgaccacgacgacgaggacgatgacttcgtcgaggaggaggaagaggaggaggaggagtgggaggacatgagcaagcggatgtctcgcttgtccgtcgagggctccgacggcggtgacgccgacgacgaggacgacgggtacctgcgcggcgaggaggaggaggaggaggaggatggggacgaggtgagatcggatgtcaacggtgagtatggggacggcggcggcggcggaggccagtggcatccgtacggcgacgacgacccaagaaacccgcaggccccgtcgtcggcgtcgctcccgggcacgccggaccgcggggcgccggcgccgtcgccgtggatgtactcgaaggagtacgcgagcgagacggaggcggcgcggtggccgggcggcgacaagcggcggatgcgccaccggcgggagcggatgatgcgggaggtgtggctggaccgggcttggcagatgcggaagcagcggcggcagatgctgatgcagggccagggcctgggcgccgacgcggtgacggtggtggtgagcgccgccgccgccggcggcgagtccccggcgcgtggcgtggcgatggacatggaggagatgcgcgcgtgcagggacctcggcctcgacctcccctgcgactggaccgtggagatcccctgctacgcgctctccggcgtcgacaccgccagcagcggcggcaactcgccggcgtccggcagctggcgcatctccagccccggtgacgaccccaaggacgtgaaggcgaggctcaaggtgtgggcgcaggcggtggcgctcgcgtcggcctcccggctgggttcttga

SEQ ID NO: 21581 - DNA, 1711 bp, Oryza sativa
  Clone ID: PAT_MRT4530_2683C.1
atggcgaggcggtggtgcggcggcggcggaggggggaggggaggtggcggagcgggcggagggggagtaaattctgggccaatgggaggcgccggttcgtcgtcgtcggcatgtggccttccgtgcgctggtgcgttgaggtgcctgtggctgccggcgctgcggccacatgcgaagctatgcgcctacgcttccagtggcaatggcatggcactctctatggcagcacgcggcgcgcttaacggcgggagaactgaagagcgcggcgacggccggtcggcctatcgttgctcgctgccgaccgaagccccctcctcgtcgctcccgccgccgcctggagcaccctcccacctgctgtacgcgctgtcgggtggggtggcacggttcgggctgcaccactgtgtcatttacgccaccaacgccttcctcgactcggacctcggctccttggccgagtagctcgcctcatagtggtgcctcctagaggggagggagaggacgcctggacccgacgcgctgccgactggagcaccctcccatccgcgcccaccgccgctcgccaccaactggttccccttttgccgcggcgcctgccgccaaccggagcacccacctgtcacgcccagaaattcataaatgcagcggaaaaacgaaagataactggagctaagccttgacttgaactgcagcgggaacaccactccacaggcatcctcgacggcacggacgaagcctactcctcggagaaaccaccatctgacacatacttgtactctggggttggggaaaatagagcaagactgagtactacccacggaaagaggccgtgacaggacccttcgcataaccccctctaaccaagcacaccacacctcaggtttcacccccactcctcgcaaggcagcgggcagtcccctctcttgcctaggtgaatccggaagccgcataggccgtcgcagggcccatccaaactccatcacgcccacccttgcctggatgcgtcggctagaggaaagctacgctacaagcccagccgttgcccacgctggcttgtggaccacgcaggtggtccatcgccggtccacgagaccgacggcccagatcgccccgggacgatcggacgggcggcgatagaggcggccgcccagggctagcggcggcggcacgcgcgcgtcgcgttgccggcgacggcatccggcggtggaggcgacggcgcaaaagcgacgcgaaagcggcggcagcggacggcggcaacgaccgaaggcgacggcgagcgcgagcggcggcgacgcacggggaattggggaagaaaaggaaaggggagggagtcctcaccggaggggacggcggcgtccggcgacgaggagcgacggagggaggtcgacatgcggcggacggcgaccgggacgacatggcgaccctcaccaacgcacgatgggaatggcgctccggcgacgaacctcgacgaaggaggggtggacggggtggatctcggccacgcgaacccgacggcggcgacggcgcggtgcggcggcgagcgcgcgggcgtggtcgacgtggcccgaaggaggcggagacgtgggcgcggcggcggttgcgggcgcggcgggaggttggggaaggacccgacaggtgggccccacctgtcggcgaccccgggagaggagggcggcggggcggcctggctgggcctcggcccgatctcagccat

SEQ ID NO: 21582 - DNA, 382 bp, Oryza sativa
  Clone ID: PAT_MRT4530_26840C.1
tttttaaactgattaaacacttcggaaaaggtatcaaaccgtgctatacatcggccacttaatgaaccaggttcacactctacaaggactcctgggctgactccacagtcccttcttagtacacctgcatcatcacaagcctactcaatacataaacaagagaggtaaggtgtgttacagaacattctaatgattccaaatacatgtcagacattgttacactataacagcctgaaaagaatatcactggttgcagagagcagaattatacatacaagagcataacactcatagaagcatttttgaggcacctagagaatgcatctctctgaaaagataattgaacaacattccaatcatttcttgaccttacttactccct

SEQ ID NO: 21583 - DNA, 177 bp, Oryza sativa
  unsure (1)..(177): unsure at all n locations
  Clone ID: PAT_MRT4530_26841C.1
gtaggtatgatatttgtcaatgatatatggtgtcaatgtgtanatatgtactagtagacaagggttaggatagtatagtcttcgtcccatgtcaggaatgcctctggtactcaacatatgcccctttggccctaactcaatacatcaagtctattcctcaaaaaaaaaaaaaaaaaa

SEQ ID NO: 21584 - DNA, 426 bp, Oryza sativa
  unsure (1)..(426): unsure at all n locations
  Clone ID: PAT_MRT4530_26842C.1
ttgtccctgcccctcttggattgcactgaggcttatggtggatgttattgaattgagtcgcactcacagtactgcctgagacaccgcttgccacggtaatgttgaggaatgtaccacgtattgtgctggaactggaaaatgccacacctgtacccttgaacaccgagtacctgggaggttacctcacttctatgtaaacgatttctaggtactcacagtttaaatcccagtaattaaggccactggtatctcaacgcccattttttcatgcnatcaactaggccggagctatatattttttttggatgatttgttaatccatctacctgccatctaccatgtaaccatttacctgaaagaaaaatgtaccagtacttgtgggccntgctctgtatggcctggaatgaaaaaaaaaaaaaaaaaaaa

SEQ ID NO: 21585 - DNA, 235 bp, Oryza sativa
  Clone ID: PAT_MRT4530_26843C.1
tttgtgtttttaaacaatcaagggaaaaagcccactataataaaatagacaattatatatatggggtcccttggacgaaaaaaaataacatacaataacagatattctagacacaatttctctcagaaggggaacagccttactaagttagaataaatatcaccattatttactttgtatctctaatattactccaagcaaaacaactacaggccccggtactccaaaaagccct

SEQ ID NO: 21586 - DNA, 252 bp, Oryza sativa
  Clone ID: PAT_MRT4530_26844C.1
caatcacatcggcccacggtcgttgccgagctgccccttgtgactactgttgcatgggctcgaactgaccgtattgagacgcaaactgaggttgagccaatccccctggctgatattgggcttgcggggaaggaggctgatattgataattcaagttacccccttggggctgctgccttggtggtgtttgttgaactggttgagatggcagaaacatggcagcaacctgatcttgggtcagccgactcgtaa

SEQ ID NO: 21587 - DNA, 1254 bp, Oryza sativa
  Clone ID: PAT_MRT4530_26845C.1
ccggccggggaggctgagctgaccaccaccggagatggcactcgcagcgcctctgctccgcctccggctgctgcctctcgccgccttcgtctccgtcgtctccctcaccgcggcgcctcggcgtgcggaggcgtggggcaagcagggccacatcatcgtctgcaagatcgccgagaagtacctgtcggagaaggcggcggcggcggtggaggagctgctgccggagtcggccggcggggagctgtcgacggtgtgcccgtgggccgacgaggtgcgattccactactactggtctcgtcctctccactacgccaacaccccccaagtctgcaacttcaagtactcacgggactgccataattctcgtcaccagcaagggatgtgcgttgtcggggctatcaacaactacaccgatcagctctacagctatggcgattcaaagagttcatacaacctgacggagagcctgatgttcctggcccacttcgtcggcgacgtgcaccagccgctgcacgtcggcttcgaggaagacgaagggggcaacaccatcaaagtgcactagtaccggaggaaggaaaaccttcaccatgtgtgggacaacagcatcatagagacggccatgaaggacttctataacagaagcttggataccatggtggaggctctcaagatgaacctcacagatggatggtctgaagatatcagtcactgggaaaattgtggcaacaaaaaggaaacctgtgcaaatgactatgcaattgagagcatacatctgtcctgcaattatgcctacaaagatgttgagcaagacattactctaggagatgactatttctactctcggtacccaatcgtggagaagaggctagcacaggccggcatcagattggcgttgatactgaaccggatatttggtgaggataaaccagatggtaatgtcataccattacaagttcatgtaccacttgaataagggttatgatcaccagaaatattcaggagaaatgttatttgttgctgccactctaattagtggttgtgcacatattttataaaaagcacacatacctatagtatagaattcaaaaatgtaattgttgtaattgcttattggaaagcacatttatttgtaagaagcacataggcctagtacagcattcaaaactgtaaatgctgtcattcatgtacaattgaaagtagtctgtgacaagaaacacataagcctagtatagcattcataaatgtaattgttgt

SEQ ID NO: 21588 - DNA, 768 bp, Oryza sativa
  Clone ID: PAT_MRT4530_26846C.1
cacccctttttccaactcttttcccttattttccgccgaaaatgccggactcgccgccgccatcactaccgccgccggtgaacaccggcaagaagaagtggaagaaggacaagcgcaaggaaattccgccgccgccgccgctggctgagacgccaccgccgatgaatgagcgaccgccgacgccgccgccagtacagccgcctcctgacagggagacatcggcgatggtgccggcgatcgtcgaggaggagaagccgagggatagggtggccgagctggagccgccgtcaccgcacaaggagatgccgctgccgcagccgacgacgatggagatgccaccgccgccggtcacgtgcacgccggtggtggagaagccgaggccgccgccgtgcgcgaggccgttctacccggtggacatggcgacgccgacgatggtggagatcccgtcgtggccggcggcgcccgcgccgccgtcgtgctgcgcgccgccgccgccgccgccgctgctgccgccgcccccacccaactcgatcccgatcccccttcacacgcggcggttgacgtctccgacgccggcgatctcctccgccccctcccctcccccgccgccgccgccgaccctcctcagctcggccgccacctcctccgccagagggagagccccctccacctcggctcctgctcctccaacgccgccatgcccaatcccctcctctcccccaattccgccgccgccccctgctcggatcctcccccacccccgccgcc

SEQ ID NO: 21589 - DNA, 439 bp, Oryza sativa
  Clone ID: PAT_MRT4530_26847C.1
gtgacactatagaatactcaagcttttaaaggggctcggaggcggcggcgaaggcccacgacgaccggcgacgagaaggaaaggtcgggctcggagagagaaaagccgatccgattcgacctcgaatcaaacactttccaagctgatttggccgatgattccaaaagagaaaaggtagaggagatcccggagatcatttcccctcttttgattcggccggagaaggaaaggaacggccggatttggaagggaacggcggcggcgcgaaactagggtttcgggcggcggcggccggaggtagacgacgggcctgacaggtgggccccacctgtcagcgggcggacgcgcgcgcgcgcggcggcggactgggccgacttgggccgaggagagagagagcggttttgggccgactttcggcccaaagccaaaagagactttt

SEQ ID NO: 21590 - DNA, 1017 bp, Oryza sativa
  Clone ID: PAT_MRT4530_26848C.1
tcacagcgacaggcggcgggggaaccagcgactggcgacgagcaggggcagcgggatccacacgcgacggagaggcgcggggtcggcggcggcaccagcgagacgcaggtcggggcagcaaacggcgacggcgacggtgatactcggggccgcttggctccctcccagatccggccgaggggagaggggggaggacctgtggcggcagcggtggttcgcctccctcccagatccagctagagggagtctgggggagggcggcagcggttcccctccctcccagatccgcccccaccccggcgggggcagcggcgccccatcagacaagactttcgcctggcaccaaccttccctcaaccttgatgttgcagctccatcgcctgcgttgctgtaggccaccacactgtgcccaccattatcgttgagagccacctcaactagtctcccttggtggagaggccccagatcttgtcgggaggatgtcagatctgcaagatcaggatgtgtacgggtcagcttaagccaatccatttggctatagcccttctcgaaaggaacttttgcacgcgcagcatcaccaggtgtacttgccacagggatagctttagggaactccagaccaccatctccctcaaaatcgatcttgcaaaaggtgaagtcagacgactcttcatccgccatcgcgaatccgcccaaagcgaagccgtcgctgcagccgcttcctaggtcgcggcagtcaagcccgctgccgccgcccgccgccgccgccgccgcccccttcgtcaaggggtggacaaggcgggagcagcaccgggccttctccacaaacttctcggagaggtcaccgggcaacgggggcctagatgcttcacccgccacgcggtgcaccgcccttggccggccaccactcgccccgccctgcgcccgcatcgctccgactcctctcctctcccgcatctcccctctcgcgccgccgggcaagggaatcgccgccactccccacctcccaccccccat

SEQ ID NO: 21591 - DNA, 372 bp, Oryza sativa
  Clone ID: PAT_MRT4530_26849C.1
cagggttttcccagtcacgacgttgtaaaacgacggccagtgaattgtaatacgactcactatagggcgaattcgagctcggtacccggggatcctctagagtcgacctgcaggctgggtaacttgtatgaggttgactccgaagatatgaatcatgagaagttctggaacggaagcatcattaaactaccgcaacctagtctgagtcagctaaaaggtgcaccctggttcaagtcaggtgaagagaagattccatccgcaacaggaggtcaagccaagcagttccgagtcgtgaagttttgctgaaagtttgtgaagacggagcggaagaagtcaaacaagaagagaagaccacccaacctatcttcttgc

SEQ ID NO: 21592 - DNA, 1443 bp, Oryza sativa
  Clone ID: PAT_MRT4530_2684C.1
atggagtccctcctcgccgcctcttcctctctccccgcggccgccttctcgccgccgtcgtccctctcttcgacctcctcgtcgccgcacgccctacggtcggccgtcgccggagccgcccgcgcggattcgatcctgtacgcgctggagcacgacgagatgtttaactcggcggaggtgatccagtgggagagcggcaagtccatcaactccatcgccgccgcgcagggcatccgcatccgccgccgctgccgcccacgctacccctccgagggctccggcgccgacaaagccgtcccccgcaacatgctcgagcagatcatctgggacaaagaggtcgaggtgtcccagaggaaggcgaagaagccgctgcagaaggtgatcgagtcgagccagcacgcgccaccggccagggacttcgtcggcgcgctaacggcggcctacagccgcaacgtcgcgccggcgctgatcgccgaggtgaagaaggcgtcgccgagcagaggcgtgctccgggaggacttcaatccggttgagatcgcgcaatcctatgagaagaacggcgcggcttgcctcagtatcctgaccgacgaaaaacactttcagggtagctttgagaatctcgagaccgttcgcaattccggagtaaagtgccctcttctttgcaaggagtttgtgatagatatctggcaaatctattacgctcggtcaaagggtgcggatgcaattctgttgattgctgccgtgttacctgatctcgacatcaagtacatgcttcgcatctgcaagaacctcggaatgacagctctcatagaggttcatgatgagagggagctggatcgtgtgctcaaaatagatggcgttcagcttatcggcatcaataaccgaagtttaggtatggtcattatcatttcttgcaaatgtctccaatcatttgagacgttaagaatcatagttgacattgatgtatactggaatttcgttattatagagacgtttaaggttgatacttcaaacacaaagaccctgttggagaaacgtggtgacctcataagggataaagggattctggttgttggtgaatctggtcttttcacgcctgatgatgttgcatacgtgcagaatgctggtgtttctgcaattttggtaggagagtccctggtgaaacaggaaaatcccgggcaagccattgctggactatatggaaaggatcttttgcactgaataattgatacgcgcggtagttactgtgtgtaccaatatgggctggagaaaaaaaaaaagtaaagcctacaagcctcaaatgtaattatgaataagggccatgctttctacaagtgtaatttcttttgttcacatttgtggatttttttttatttttttatactttttttaaaaaaatgaaaataaaccatctagaataatattatctatattttcagaagg

SEQ ID NO: 21593 - DNA, 269 bp, Oryza sativa
  Clone ID: PAT_MRT4530_26850C.1
agctagcgaatcatcaagatataaaggacggctctttttatattaatatcaaccaaagatacacatgctacatatgatgatgtctgagcttatttttaacttccgaaccactatactggtaaaactaattacaggacaccggctagggtggaaatggtactgggcgcaccataacacctagggtggataccatatttagatggcacgttaaaagccaacggatcttgagcttgagccacattccgatcataggagagatcaccaacact

SEQ ID NO: 21594 - DNA, 510 bp, Oryza sativa
  Clone ID: PAT_MRT4530_26851C.1
gaggccatggacaaacatactccgcatgcaccgtctgcttctccgcccgcccgtgcgacgcgagcgcggtccggccgtgcgccgccgaggggagggcaagggcgcgggcggcggcgggggagagcacaaagtagtgggcgcggggtctggtgggggcaccaaaggcctactacatctaggccccagcgccagcggtggtggcggcagcagatgagagctaggctacttagaccacactcaagctcaagctcaagctatgataacctcaaactcgccatccatatgtggtatctatcctaactactacattgctccggggggcattcccaccgttggtggtgtttggtactgaattgtaatagtataatggttcaaatgttaaaaataaaggcatgcatcatcatgcgtgacagttgaaacttgatgtcatataaaaaataaataaaatcacccttccataaatactatattaaatagtaaaaaaaaaaaaaaaagggcgggccccttttt

SEQ ID NO: 21595 - DNA, 219 bp, Oryza sativa
  Clone ID: PAT_MRT4530_26852C.1
atgagccctggagctcacccacacatatggttgtacatcttaagtacagctgagagcttggatgagatcaaaatggcgcttggccttctaggccttgttgctgctgtaagcggttggcaggcactcgactacgcaatcgtggcttggttccacaaagaacgcaatctgtttgaagaattggaaaaggaatttatgtatgagaagaaacttacagaatga

SEQ ID NO: 21596 - DNA, 292 bp, Oryza sativa
  Clone ID: PAT_MRT4530_26853C.1
cggacgcgtgggcggacgcgtgggaaaaaaaaaaaaaaaaaaaaaaaaaaaataaaaaaaaaaaaaaaaaaaaaaatggggggacgttttgggggtcctatcttacgggggcgtgctttctaacggattaattcttctataagtgttactttataggagttaacttgttctattttttacaccgattttactgaactgaccgtgtggttaaacattttagtttgctaaattaatgtccttatataacatgctggtttagtaggttataggtctttacaaaggggccttacta

SEQ ID NO: 21597 - DNA, 1323 bp, Oryza sativa
  Clone ID: PAT_MRT4530_26854C.1
gacaaatcctcgtcctcatcgagtcaaaacaacccatgaaaccctaaaaccccaatccccccagcccaatccgccattgcctccccgatgcaagcgtccgcgcgcctctacaccgccgccgcatccaagcgggtgattgcgggcgtctctagcacgatctcgcgctcgtgccaccggacttgccgatggaagtcacatgccgcgccgctgtccgctcaggaggcgcccaaagggccaaagaggatgaccaagcaggagaggagggttaaaatagagaaatttgttgaggagtataaggcatcgaatgatggtaaattccccacgatgacgactgttcgtcaacatgttggagggggtcactacacggtgagggagatagttcaggaacttgagtacaaccagagaatgttacaactggaccagtctaaggcagctgagctgcccgaaacagctgaacattctgagcatttaaagcccaaggatgtccatggaaatgctcaatttaattctgaaagcttcagtggaaaccaaaatacagatgaccttcacctctcccagaaagttgctgctaccagcactgaaatcatagataagactgaaacatggagattggaagaatcacagatgacatcaggcacttctcattacactggagaaacagaagctgtcaagcaagaccttcacactgcagatagtttacagggtgcaaatgaatcaatcaagtcatgtcaaacagaaagtgacagcataaagaatgaagattccatatctctgggactagatactaaatcagatccaactgacctagaactaggggaaagcaaatctgacaagatagagctgaatagtacagcaaggtttaagaatgtcagtgaaccacctgtatcagatccaattgaaggtgataagacggtcaaggcaaatgtactggacagtgtttttgtatgagaggttgagccgaagacaggtctttttgggagcctgaaatcttttgcttctgggatcagaaatatttggagaaaactgtgaatttcttgttaggtctggagcttccacgcctcgtccctctccatgtccggcgccaacgagttctgcttctacagccctagctccacccccaccacctggaaggcccctcctcttccccatgacgccgcagccgccgttcaacagatggctaaccttctccatgaaaggcggcgaacccgacggcccctccctttccgtcatcctcctgccgtacgccgtcgcgcggccgccctcctcctcctcctgcggccgccgccccgcgaggcgaaggggggatctagttctagatcgcga

SEQ ID NO: 21598 - DNA, 960 bp, Oryza sativa
  Clone ID: PAT_MRT4530_26855C.1
ccccgcatatttggtattgcggttcgaggacatgaattgaatgctcgccattctttcactaatatagtgctgatatttaactgaagcattttgtgaacacacaattccttccagattgtgttacaagatcaatacttatttcaatcaatgccagcttgttgatgtgaatgccctgagagcctgtccttttacagtttgtggagatttatggtcggatatttttgatcttttaaatatgtttgagctcaatgggcttcagaaaacccttactttttcaatggagactctggacagaggatcattttctcctgaagtcatttttacacattttgcattctggtggctcaatccaacatgtatctacctagcatgaggataccatgaaagcaagagcatgaacaaaactatatatggttttgaggaataactgagtccaaactgagcgatacatttgttgagctgttttctgaggtatttgtcacctgcctcgcgctcatgtaataagtaaggagtttgtagcttttgggagtttatttagtgttcatggagtgaagttatatcttttatgtcattaaggccatcggttatttatgtgagcctcctgtataaggcatatacgtagttctctagttatcatttgccaagcctcagcttcagagaggttcacgcaaaagaggtgcagttctttcctttggtgttgatgcgataaagaggtttttggatggaaacaatctggaccttgttatccgatgccacaaagtgaaggatatgaaatcaaacatgatggaaagtttattcagtttttctgctcctagttgtttctaccagatgggcaacacaggtgcatttattccgttcacttctccagatctaaagcaggatactgcaaaattctatatggtatgccacccgaggaatcctgcctttttgtttcgtaataattttctttttaattattac

SEQ ID NO: 21599 - DNA, 165 bp, Oryza sativa
  Clone ID: PAT_MRT4530_26856C.1
ctgttagtatttcttaacgacattactagaaatataattcccagcaatgacgcaaaaatactcctggtttattatggttacagagttcatccgcaagcgcacggatataacattgtagcatttcacccgagagtattccaatggtatcgtatttattttatcccg

SEQ ID NO: 21600 - DNA, 2788 bp, Oryza sativa
  Clone ID: PAT_MRT4530_26857C.1
ctaatctacacaagacaatacctttgtaatagcagagaaaaggggaaaaaaagaacaaccaagctgttaatgattttcacaatgttgtccctgctaagctatcttccatgcaattgtgtcattgacacagtaccgatggagtggctctgatccttctcacttgatttgctcgtctcagccgaacgaccatggagcatcagggtaggcggtcttggcatgggaaggctggagctgtcgctgctcaacatcagtatgaccgcagggatatcaggacgttcttgcgcatgatcttgaacacatagcaatgcaatgtggatgcatctcaagacttgtcgaagtgagcacgatgctcttatcaatggatcaatcagttcctcgcccttgtcttcattccattgtcgccatgcaaatcctgcaatgtttagggagtcttgttgaccatgaaagctcaaagccctctttcctgtgatgatctccaacattagaactccaaagctataaatatcggactttactgagaaaatgccttccatagcatattccggcgacatatagccaaatgttccaaccacacgattcgtgttgaattggttttgatcccctccaaacatcctggccattccaaaatctgaaatcttggggttcatgtctttgtccaggagaatgttgctggccttgagatcacgatgaacaactcgcaaccttgagtcccggtggagatataacagccctcgagcaatcccttcaattatatcaaaccgtttcctccagtctaggagcccttgcttctcaggattgaagaggaatgcatctagacttttgttaggcatgtactcgtacaccaagatcttctcttctccctgtatgcagcatcctaatagtctcacaagattgcgatgctgcagttttgcgataagtatgacctcattcttgaactcctcaaggccttgacctgatttcctacaaagcctcttaacggctacttcttctcccccaggtaattttcccatatatacaggaccaaatcctcctgctccaagcttgttggagtcactgaaattacaagtggcagcttttatccggtcaaaggagtatactttgagttcatgactttttccatcctctgtgtcgtcttcaaaaggaatcgactgcgagatgtccagcataccactattctgctgagatcgtgtagacgtatgcattgacctccaacttttgtgcatcacatctttgatattcctcccacgcttccaccacaggaagaggcaagctagcaaaacaaatagcaccactgcagacactattgtggctattttccaaactgcatgatgtgagcgtaactcagaagcaggaagtttgaggtttagggtatatcccccactctgaaactggtacatgtcgatcaggtcgctaccccacagtagacatcctattgtagtcatgtagacataggcaccacatgagcagttgctgaggcaagcattcatgcatccattctcatcttgcaccgtagatggccagtatgagaaatccggccacttgatgtttgggatagaaagaaatccatccccagtttggttcacctgacaacccaaaggtgggctcctgacacaaccttgactccaatttcccatattccactgatcaagcaactttggctgaaatccttttaggcaggtacattttgccttgccatcttgcatggcagtgcatttagcatttgcgccacacgtagcatagtactcacactcatttgatggttgcatccagacagtctcccactcttgtgctgacttcttaaccatgtaacagatgtctgtaccatttggcataacaacaaacctttgcagagatgtgtttgatgcagtgtaagtgtagtatgcacctaagtttgcatcatttgctggcttgaacccatacaagtacagtggtctccaaggaatgcccacaaaattctgcccagtccattgtcctgacctccaaatggtgacattgccatctctccagatgtaggcctggccggagttggccgggtcgaggccgagcgcgtaccgccccggcgaggggtccgtctcgctggtccacgacgtgaagcgcatcggctcggaggggcccctcccgggcgtgcgcacggtgatgcgcatcccggacagcatggtgtccgacgggtgccagaagctgtcccacagcgtgccgtcgtcgctgcgcacctcgaggctgccggtgtcctggatgacggccttgtacccgccgcgtggcgcggactgcgtggacgcgttcgacctccacaagagcggcgcgtccgcgtccgcggcggagccgtcgagcacgcggagctcgccgttggccgcgagcgtgagcgacggcgacggcgcggtggccggcgcggcgcggttggcgacccagacgacggttctcggcgagatgctgcggtaccagatgccgaggtagagccgcgacggcagcttcgggtccggcgcgaagaaccccacctcgaacacccccgacggcgacgacaccagcgtcgccgcccccgtcagcgactccccctgcctcaacgtatccgtcgccgccgccgccgcaaccaccacgccccaaacgagcagcaacgggagaagcagcagcaggggacgaggaggaggaggaggagaagccgccatggatggaggcggcggcagcagcagcagcagccagcctccctcctccgccaacaaccacctcactgctgtgatgtggtgtcgagaggagagagagagtttaatggcggaggattgtgtcgccctcgtgc

SEQ ID NO: 21601 - DNA, 234 bp, Oryza sativa
  Clone ID: PAT_MRT4530_26858C.1
actgtgccctgaagcccaggaaacattttcgacagtagagtacccatgacctagtcaccccacactttggggaaatcctttgacatgcttttgaaagctatgttgtttgtaaatatcacgtggtaacaccactattgttgttatgtaagtggatgatccatgctcttgaaaactatgctgttaacgatcaatcgacaacatcctttggatttggaaaaaaaaaaaaaaaaaaaa

SEQ ID NO: 21602 - DNA, 456 bp, Oryza sativa
  unsure (1)..(456): unsure at all n locations
  Clone ID: PAT_MRT4530_26859C.1
cccacgcgtccgcccacgcgtccgcccacgcgtccgctgagtactatctgatcgctctggttcagatagttgaatggcacagctaagctgcttgttctctgggaaactgagtgtattggaataagctggtgaaatgttatatggacaatgtttctgcngcanaaaaaaaaaaaaaaaaacaaaaaaaaaaacaaaaccaaaaaaaaaaagaaaaaaaaaaacacaaaaaaaaccaaccaaaaaaaataaaaaaaaaaataaagggggcggggggtagggtataaaggttccaatcttccttcgtggaagttaataactctttttttttgtagggtaaacccaatttactggccgtgggcctacattttacaacgtggaaaatggtaaaactttgccatctcaaaccttttggggcttgccccattttcccttttgggcgtgttggtaaaaaggaaa

SEQ ID NO: 21603 - DNA, 333 bp, Oryza sativa
  Clone ID: PAT_MRT4530_2685C.1
atgttcggccggtctggcatcacggcggcggtgaaggtggaggaggaggacgacgggaagacgccggcggccaagcgtgccggagagtacgtcacgctgaaggtgcaggacaccgacggccgcgccgtctaccgcaccatgcggtggacggagcagctgcagggcctgatggacttctactacgaccgcgcgcatggccgggtgcagcgcggcacgggtcggttcctctacgacggccgccggctgagcggctggcagacgccggcggagctcgacatggaggacggtgatgaggtcgacttcttcgaggagctgatcggtggcgccgcttga

SEQ ID NO: 21604 - DNA, 910 bp, Oryza sativa
  Clone ID: PAT_MRT4530_26860C.1
attaaaaaaggtttttaaaagtctcttttggctttgggccgaaagccggcccaaaacctctctctctctccctcggcccagtccggcagcagccgcccgcgcgcgcgttcgcccgctgacaggtggggcccaccgcccctttcccgatccggtgaaatcaatagaggggaaatgatcttcgcgatgtcctctaccttttctcttttggaatcatcgcctaattcggtttggaaactcgtggattcgatctcgaatcggattcgtctctctctccgaaccctaacctttccttcgcgtcgccggtcgccgtgggccttcgccgccgcctccttgcccccgcagccactctcgccttcgcccgccgccgtctgtagcgccctagccccgtgagcttttgcgccgtcgtttgtccagccgtgcgccgccgtcgctccggtcgtcgtcgtcgctcgggaaagccgccgtcgggatcaccaagccgtcgccgatctcgtccgcccctccgccgtcgctgtcgaccgctggaacaccatcgccgtcgtcaagccgaaggtcgtcgccgccgttgttttggtcaccggtgagttcgctgcgtcacccgcatcgttttggtgctctcctttcgcgccgccgcgccgtcgttcgccggcgggcatgcgtgcccaagtcgtcgctggtgatgacgtcaccgctgacgtcatcgtcgtcgtctcccgtggtccggccgtggactgatagatctcggccgttcgtttccgtgagccgccgccgtgcacccggtccaccatgaacccgacccgctgacgcaataatcctctattccttttcaaaaataattcattattacgtcataattcaattaaaatctatataaaggatttaatccgatttaatctttgaaaattcataa

SEQ ID NO: 21605 - DNA, 1553 bp, Oryza sativa
  Clone ID: PAT_MRT4530_26861C.1
atggtggaccgggtgcatggcggcggctcacggaaacgaacggccgagatcgatccaaccaaaacgaacggccgagatctatcggtccacggccggaccacgggagacgacgacgatgacgtcagcggtgacgtcatcaccggcgacgactcgggcacgcatgcccgccggcaaacgacggcgcggcggcgcgaaaggagagcaccaaaacgatgcgggcgacgcggcgaactcaccggtgaccaaaacaacggcggaagatcaacggacagcaacggcgacgaggaagaagcggcgacgaccttcggcttgacgacggcgatggtgttccagcggtcgacagcgacggcggaggggcggacgagatcggcgacggcttggcgatcccgatggcggctttcccgagcgacgacgacgaccggagcgacagcggcgcacggctggacgaacggcggcgacggcggcgcaaaagctcacggggctagggcgctacagacggcggcgggctaaggcgagagtggctgcgggtagaggggagctcgggggtccttttataggggcaaggaggcggcggcgaaggcccacggcaaccggcgatgcgaaggaaaggttagggttcagagagagagacgaatccgattcgagatcgaatccacgagtttccaaaccgaattaggtgatgattctaaaagagaaaagcttttggctttgggcagaaagccggcccaaaacctctctctccctcggcccagtcggcccagtccggcagcagccacccgcgcgcgcatccgcccgctgacaggtggggcccaccgcctatttcccgatccggtgaaatcaatagaggggaaatgatcttctcgatctcctctaccttttctcttttggaatcatcgcctaattcagtttggaaactcgtggattcgatctcgaatcagattcgtctctctctccgaaccataaactttccttcgcgtcgccggtcgccgtgggccttcgccgctgcctccttgcccccgcagccactctcgccttcgcccgccgccgtctgtagtgccctagccccgtgagcttttgcgccgccgtcgccgccgttcgtctagccgtgcgccgccgtcgctccggtcgtcgtcgtcgctcgggaaagccgccatcgggatcgccaagctgtcgccgatctcgtccgcccctctgccgtcgctgtcgaccgctggaacaccatcgccgtcgtcaagccgaaggtcttcgccgcttcttctttggtcaccggtgagttcgccgcgtcgcccgcatcgttttggtgctctcctttcgcgccaccgcgccgtcgttcgccggcgggcatgcgtgcccgagtcgtcgccggtgatgacgtcaccgctgacgtcatcgtcgtcgtctcccgtgctctggccgtggaccgatagatctcggccgttcgttttggttggatcgatctcggccgttcgtttccgtgagccgccgccatgcacccggtccaccatgaacccgacccgctgacgcaataatcctcttttccttttcaaaaataa

SEQ ID NO: 21606 - DNA, 423 bp, Oryza sativa
  Clone ID: PAT_MRT4530_26862C.1
agtatagtttctagagtataatggaatcgaaatagaatagaatcttcagtcctcggagtcttcggaagaattcggaggacttggtatcggttccgtcatctagtccgtggcacttggaaagaaaaacttcgccggaagttcaaatttgcatgtgcaaagcaggaagagggaactaacttgtgcggatactacgtatgcgagtattgccactgccttacaacccaaatcatcaccacaagagagctcgatgttattcacatgagggataacctcacacacaaggaatttatcgcggcggttcaagaacaactcatgggattcatcaacgaacaagtccttgatcccgagggtgaattctactacgacgaaaatacaattcataagtcgttagcttctaagataacgactactacgtcgaagtca

SEQ ID NO: 21607 - DNA, 303 bp, Oryza sativa
  Clone ID: PAT_MRT4530_26863C.1
gtgttttctgcgacgaggcgcggccgttgccagtgggggccatccccgtccacacgctcttgatgggaaagaaatcggcgggcaccaaacaatatgatgatgcgactatggaggtgcagaaggtcctactcgctgcaagcgctgttacgttaaaggatataatgacgtggcggcctacaaggctaaggtacagtacaatcatgataagatgtaactaggtcacaagtcttaaatcggaggctacagcgagatagtgacgggcatccgtgttcactaaggcaacgactgctagttgctactagc

SEQ ID NO: 21608 - DNA, 2453 bp, Oryza sativa
  Clone ID: PAT_MRT4530_26864C.1
ccaatgctgctaagaagcagtactttcaccagctagggtcgggcggctactggaagggagtgcccaagtagcagacaatggaaacagcattagaagaaagatctatcattctggccacagttgattggcctgaacgatcaaaggtactgtactacgctcatggggtgaacactgaatcccggtgatggctccctaatctttgtgatgacatacgacaaacagcacaccatctcgtcgatgccctagaggcctttgctcagggaactttctagcccgacagagagaaggacgagctaccgctcgcactgcagaatgctgagcactcaggatgaacacgtggaaaaggcgtggttccatggaaaggaaatatggatttcaagaggacgtccacacgtaccggagtcacatgagaagcaagagagatcaacatgagaagttgacatctcttgaattgaaggtcgcgtcttacgatgcacggatgcaagaggagctggcacgacgggtggacaaatgcttaagtgagtcacgccaacagacacagctgtccattcctcaccccatggtaagcccctcaggcagagaaaacagatgcacttctatagggtaagtaggagatcagagcatcgaagctgtatcagggccagatgtcgacgaaccaccctgcctcgtggatgaaatcacatagcaaacattgtgtgagctgtacatacccttcaggaacatatcaatcaaggtggcggatggcatggccaaaccagtgcagcaagacgagacataccattgtaggtcggttccaactcggtactcaaaggtcgaagttgagcgggtggtcccaagcttcgaggatctcgagttggacatccccggaagagacggggagataaaactaggagataccgatcattcaatcggacgatgtcgagaatcagacttatcaatgaatgggccaagaacgcagaaatgacacaaccaattatgccaaaattcacaagtctgaagtgagcaacagaagaggaggccgccagccgaaaatgggccggattgggccagcccctggttcagccgaacccatcctggtgctgttggatgcagggttgcggctagatggtgtggattagcccccaatgacggttggagggtatttccgactattccaaccatcacaaccgtcattgggaggctatataaggagctcactctctccatttcaagacacacctcaagcaagaagttcatttcatctctcaagcttagtatagtttctagagtataatggaatcgaaatagaatagaatcttcagtcctcggagtcttcggaagaattcgggtatggataatagtatttggtaatttaagcgtggtgttcagattactggatatcattatttggggttatatgctgcggaaatgaggtgggccgctgatggtgacagttcagtacgggtattcctccgcgcgtgtatatagtcctaaattaatttcctggggagggtattcctccgtatttagccccagttgtatggtcacgacggattgtcgtaaggaactcgacaatcaagggtggcttctcgaagcactaggagggcatcggaaagaggttagtatacggttctctctattataatcttcccacgggattaaacaaatacgatacccttggaatactctcgggtgaaatactacaatggtatatccatgcgcttgtggatgaactctgtaaccataatataccagaattatttctacgccattgctgggaattatatttctagtaatgacgttaagaaatatcaacacatctcacgccatagtactatggtgcaagtgctgcatcgtttttcccgggcgagcagtggtgtccattcctacatctcctccgctgcatcctcggtctcctcgatctcttacgcaaactcggtctctgccgtgtccacaatttcctccgcaacctcggtctccgccgtttccacgatctcttccgcatcctccaacaaagcaaccagcttcaagtaccatgtctattccatctcatcctgcgtcgtcaaagtccacacaacaaatgaagaagccaagacttgtacgaatcatatctttaaactccatgtaggacttggtatcggttccgtcatctagtccgtggcacttggaaagaaaaacttcgccggaagttcaaatttgcatgtgcaaagcaggaagagggaactaacttgtgcggatactacgtatgcgagtattgccactgccttacaacccaaatcatcaccacaagagagctcgatgttattcacatgagggataacctcacacacaaggaatttatcgcggcggttcaagaacaactcatgggattcatcaacgaacaagtccttgatcccgagggtgaattctactacgacgaaaatacaattcataagtcgttagcttctaagataacgactactacgtcgaagtca

SEQ ID NO: 21609 - DNA, 443 bp, Oryza sativa
  Clone ID: PAT_MRT4530_26865C.1
gtgaaatgctagcatatactgtaatttcttggagtcattttacacattacagtacatctccataggaaggtgacaacagaaatatataatagatccgaggagtaccaactccccgtgaggaaaaagtttccaggataacaaccattccttctatctgaatctttgcatcgaccaaaaaacattaattgacaacatttaaagaaaatacaatctatgaaaatgccattcgatgaattcatttgaacaatgcatagtttactctacatcttcctccttatgaacaagaagcttcccttcggtgaattcacatggcttgatgggtacagctaattgcttgcgcattttccttacaacaaatgtttcggtttcttcacatattgtgaccacagttcctttccgccctagacggccagttcggccagctttgtgggcatagtgtgttg

SEQ ID NO: 21610 - DNA, 324 bp, Oryza sativa
  Clone ID: PAT_MRT4530_26866C.1
atgaggaaggagcgaaggcggtggcggccgggcgcagcggcggcggcagccccacgtagccgtgctaccagtggcccgcgcggccgcgttgtcggctctggcgctggtggcggagcgggagagggaaggtacctggcgcggaatggcaaccgcaccgtgatcaagcggaggggaacagcggatgccgtggagctaacgagggccatcggcttcaccaaccccgtctggccgacaagacgtccttccgtccaacaaagggggatggacacgatgaggtccgccggcaccatgctaccgattgcccctagccttttatccgcatag

SEQ ID NO: 21611 - DNA, 106 bp, Oryza sativa
  Clone ID: PAT_MRT4530_26867C.1
ccttaccttgctagctagcaaagaggaggaggaactcgatcttgtatagagacaacaatggcgggtcacgctcttatttctgagaggcaactgctggtgaggccat

SEQ ID NO: 21612 - DNA, 391 bp, Oryza sativa
  Clone ID: PAT_MRT4530_26868C.1
tcccccttttttttttttttttttttttttttttttttttcaatcaagtaagaatttacattctaatgatgttgtggtcccatagaagatcccaaggggcaagggcattgcactagcattgttagctgttacacttacatctcatgagttctgacatcagttcacgaaacaccagaattgtgcataaaatagcttctatcaactaatctcagaacaataccatcaaaataagttggaaggagaaacgacagaaacacacaacctgtagaaataggttcaggtggtggaagtatcatgagatcgccatctttcttgcttaaaattccgatcacgctcaatcgcataccttcagcgatatacccttcttcgagacggataagctgacattctt

SEQ ID NO: 21613 - DNA, 384 bp, Oryza sativa
  unsure (1)..(384): unsure at all n locations
  Clone ID: PAT_MRT4530_26869C.1
cgttttcaccgccgcgtgggcggccaccgcgctggcgttcggggtggcgtgcagggngnatccacgacgccgccgcggcggggcccgccggcgccgcgcgcgggtggcggatgcgcgcgctggaggggctcaccgtgacgctggcgttcacgcagctcctctacgtgctgctgctgcacgcggggtttgccggggagcnctgcggcctcncctgcgccgccgtcgcatacttctctcgntcgngctcaccggntcnnntttcttnatttccnnntntttttttccgggcgtgtttgtgttttgtctccgggntttgtgttttgctgttgtgttcgcgttggggttctttgcgcgtcttttgttgtcttgcttttttgctgcttt

SEQ ID NO: 21614 - DNA, 275 bp, Oryza sativa
  Clone ID: PAT_MRT4530_2686C.1
ctctttctctatgcaggggagggaggggaggcgcggataaaacatcgagagcggcctgttgccagctacctaccgtccatctgtgcagatccattgctgtacggcttcttgattttttttttatttttgtttctccggtgatcggagaggtggtgtgttttggaacgggaggggagagaagtttgtaacttctaatgttattttaacttgtgttcatgaagttcacctagcctgtattttatctgaattttgatttctagctgtaatgattattc

SEQ ID NO: 21615 - DNA, 400 bp, Oryza sativa
  Clone ID: PAT_MRT4530_26870C.1
gttgcatgagaataaatgattcataaatcacgggtgtaacacgaacaacccatactaatttgtccgttcgctgggacaccggctaaacgaagcaaaggctctaaacgcggagacccctctgattactacaggggccggacatgcaatattacgcggggccgttgacgcgggccttggtgacgccggctcaggcctaccctaggtggccgtgcgtgaagccggatggagaacacctggagcttgtcgccgaggcccttggtgaagacctaggggatgaaaaggcggtcgtagccttggatccggcgcgtgaccgggcggacgcagagatccgggttgttgggctggggcgtaaccgggttttccacccggtagaagaacctcagggcggtcaccggcggct

SEQ ID NO: 21616 - DNA, 349 bp, Oryza sativa
  Clone ID: PAT_MRT4530_26871C.1
tctttaaaaccgcccgccttttttttttttttttaacttttttttttgagttacgggtaaaataaagattgggatttttcctttatttaccaattttttcttcctaccctaatttttttcgcccgttcatattttttttacggatcccattttgttcggtttttcacttttttctaacgcccccccaatatgccagcccaaaagttcaacccacaagcccataaatttacaatttcaagtgcccccacaaattcatttgtttcacaaacccacaagttcaagtccaagccacaagcctcattattccaagttcaggtgccccttcacaaattcaggtgtttcacaaacc

SEQ ID NO: 21617 - DNA, 643 bp, Oryza sativa
  Clone ID: PAT_MRT4530_26872C.1
ccacgcgtccgccatagtaaagctccttcacccaccgtatgattcgttctgaccgtgcccgtcgtacgggacgcaggatgaggaggacgatcatcactgccatgtgttcggcgtattgcctggcgtcgtgctgtacctcgtgcgcgtgcgaggcgtgccgtacggtggtcggcagcatcggccgccgtgtccgcccgcttcggctactgcggcctttttgtactctccctcttccattgctgtgcgctccacgaggtcgccgcgccccttctctgatccattctatggattaaccatttacacaggactcccaaccgcgagtgaactcagaccgatgccttgcttatggctagactggataacttcggattctttaccatctctctcatcataaatgtgtggcattaaggaccagaacgacccattgccactagatacaccatggcgtatggatggtcaagatattctgctgacttgtcatcgctttccttatgttatttgagcccaacggccacatatgctattactaatcaatatccaatgtcgcatctgaactgtttctggttgcacaggtagacattggtggaacataggcattgatggaacgagaatggggttgtcaaagatgatcagatatgggaca

SEQ ID NO: 21618 - DNA, 687 bp, Oryza sativa
  Clone ID: PAT_MRT4530_26873C.1
atgacaataaagagaggaggcaacgggcaagccgtagagtaatacggtggcaaagccgctgacggtttggcgggactttgtaatccgagccctagtgtatcttctgtggttcctttgatcattctgaaaaccagaggctttggaagatactgtatcaacaggaactaccggtgaatcagcacagggtggaggaaccgtttttggtcctgaaactcggtcaaaaccatacagctcgtcgctgcaaacgaagaacatgtagaatcctgcaagaattgtgaagacggacatagcccacacgacaacggcgactgggaaaggcataagcgcagctactctgtaggtgaacaagattgtgagcaccgtggaaaggacccaaacaccggctttgacatgggatctgcggggggagctgcgaggcaagctctcgaacaagcggagcgcgcagaagagcgagatgagcatgaggaaggcggccaacacaaacgcgactgaccaggggtcacgccgcgaatggtagatagctgcgccgcagttgatggcaaggatggtgaaggcgaaggccgatgtacacgacgagctgtctttgctaggatccgaggagcatgatggttcgtcggtgcatttgccggaaccatctagtgcctcgtagtcagagatcggtggagcttccctgcggagactcgacat

SEQ ID NO: 21619 - DNA, 317 bp, Oryza sativa
  unsure (1)..(317): unsure at all n locations
  Clone ID: PAT_MRT4530_26874C.1
gcagatccattccgtggcggcagcggcggcgcggatcagttccgnggngggggagacgacgaggttgcagcccgatgtgacggcggaggagcggatccagtccgcagtggcagaggcggcgcggatcaggtccgcggcggcggcgacgatgtggttgcggcccgacgtgacgggggcggagcggacgcggcccgtggcgacggcgggagcacggatacagtcctcagcggcggctgaagagcggaggcggaccgagacgacggaggcggggagagggccaattcctgggtagatgcttgcagatgcaggtaaccctt

SEQ ID NO: 21620 - DNA, 1887 bp, Oryza sativa
  Clone ID: PAT_MRT4530_26875C.1
atgtcgccgtcaatgccgcagccgctgccgctgccgtcgccgccgtcgagcccccgttctggcgccaccaccaccaccaccacctcggtgcgggcgcgtccgagaccaccgacggcgccgcccgacgccccctggctcgccctctccggcggtggcgccgggtcatcagacgtcgccgggagcagcagcggcagcggcagcaacgtcgacgagaccctcgccgcgatgagggacgccgcctgggcaagattctacgcggtcatggggaaggggaaggggaaggccggggagcgcgggagcttctcgttccccgacctcggggcgccgcacgacgtcgtcgacgcggcggcggtggtcgaccacttcgccaccgtggaggcggagaggagggcgggggcgagggcccagttcctggacgcgacgatggaggcgacggcgagcgcgcggctggggagggtcaagagggagctcctcgtcgaccggagggtgctcgacctcgccgggctggagcggtggctgcggcgaggcgaggccgtcgcggagctcgcgtggttcgcggagctctgcgccggcgagggcggcgagccggtgcccccgctcgagctcttcgagtccgcgttccgggcgctgcaggcggcgcgctccgacgagctccaccgcggcgccggtttcaggaagcgctgggttggcccggccgccgtgccggagttcttcctctgccctatctccaacaaggtcatggtgaatccagtcgtcatctcctctggaaagactgttgaggttttagcattggagaaatggtggagtgaaaatagacgcctctgtccagtaactgatgagattctcgacaacagcatattcatccccaatatcctcattatgctgtgcacagcactatggcgtacaagaaacggcattacagatgtgacaacaattgcagaaccaccaaagatttcttctgaggaggaagccctgttcagggaaatcaacctcttggcactctcccctagcttgtctgacaaaacatttgatgccatattacgcctacatgaactcatcagcaatgcgcagtcctcgctcctgcatctgcttggccaaagcccagggatgattgcaaaacttgcatgcctcttgccagagacatgcctggaccctgatcccggattggacgacattatcctcaagatcatcgcgaagacagcttcctacaaccccaataaggtgatattaggagatgatcaatatgccatacctgtgctgattgcaagggcattgctagggcctgtggacacaagagtcaagagtgctcaaatccttgggttactggctgacaactactacaacaagatcaagatcggtgaacttggaggcttcgctgcgctgatggagctgctgctcttggtaggagacagagaagtcaagaggacggtggcgatggcgatcgccagtctctgcgaggcccaggagaactggagcagatttgtcagagagggagtagcagatgctgctatatccttgttgcgcgacgacaacctagtggatgaagcccgcagcatcttcttgaaggctactggttttgagctggccatgacacaggttctggataagctgatgtcatttggcgatgatgccaactgcttaaagatggttgagagcatctggaataccttcatccggacgaaattaagacgaaggcgccccaacgttactcatgcatcttcctcaacaagggccagtgacgtattttctgatacatcttctgacgggagtgtagaactgcctatgcacgttgaattgacagacaaggccgaggacgatgttaggaccattgtttcatggctgcagaagaggacgtgctacccgcggacgtacaaatacgaagattga

SEQ ID NO: 21621 - DNA, 639 bp, Oryza sativa
  unsure (1)..(639): unsure at all n locations
  Clone ID: PAT_MRT4530_26876C.1
ggccgcttttttttttttttttttcggagtacaaataattcttagcattcattaactgtaagtgacatctcttccaaataatataaatacagagataacttcaatggacaagtgatatctttattaggtctgtttctgggacaagtgatatctttagcaggtcttcattcaaaaataatttcagcaaaaaatcttcaatggacaatttcagggacaagttacacctttagcagaacaatttcagtagcccttccggttatgacctattgtgttttttatatctcctgctgggtagatggtcaacaacgtaggttgattgtagaaaaatcgatagtggaccactaaacctcgacttttaagcaactaatggctacaagttcccctccaaatccatcacgaaagcacctgaataaggggacttccttaatgtcagaagaggaggtggaggcaggcaccggaggtggaggcgatggggagtcggcggaggagatgggaaggcattgggtcgagtcggaggtggggaggagggngatggtctgngtgggcggccggctggtggaggtgcggcgaccgatttgggtggacggcggcgtgcggtggtgtgggtgagaccgagggggctgcgcgcggtgggagagg

SEQ ID NO: 21622 - DNA, 657 bp, Oryza sativa
  Clone ID: PAT_MRT4530_26877C.1
atgtgggggaaaaagaggggacctcgtcgtccttttataggctggggagcctcactgaccggtggagcggggcgatggacggggcggagcggggcggccggcgcggtgactgggcatcggcggcgcgcgggaacacaaggcaacagcggcgtggaggagggtggtgccattggcgcggcaagggaggtgctggctacgatgggggcggtgggagaggaggagagcgtcggcagcgcgggaaagggcgacgggcggcgcggcaagggaggagttgagcgggcggcggaagagaagctgcgcggcggtggtgaccgccgccgaggagggcgtcgcgacgggcagcagagagatgggcggctgccagttgccgttagggagaaggtgcagctccacgcttctcgctccgaccgccgccgctccgcctgccccgctccgctccgcccgcggcccgccgccgccctactttgctccggccgccccgctccgccggcccgctccggccgctgccgctccgcctgccccgctccgctccgcccgcggcccgccgccgccccggccaccccgtccttcgcccgctctagtcgccgccgccctgctctaccgttgagggacccgttgtatctggttttgtggttgaaggacgaaaatcggattcgt

SEQ ID NO: 21623 - DNA, 276 bp, Oryza sativa
  Clone ID: PAT_MRT4530_26878C.1
atggaggcgacggaggcggagacgaagggcgaggtttcgtggtggggtgggtggaatcgggtcgaccgcaccgtgccttacaagccgaagggattggatcgcttggtgaccatgcgttctgggctggaaaaatatttgtcaggccattcccctgcgccgcagcccattgaaatcagcccgctttgcacgtccgctctacgattgtacatggcagcgccccgctgctctggctacaaagttttgctctactcctacctgacactgatgatggagtag

SEQ ID NO: 21624 - DNA, 208 bp, Oryza sativa
  Clone ID: PAT_MRT4530_26879C.1
attcctgggcgccactggaacagtcaccagccagccggtcaagtctcccgtcctggccagctccgaatgggtgaaaagaccgggcacattttcctcagatttgctgttccaaccgcacaaacactatgctgtgctcaacagcgaggtcatctcatgggtctcgtcgtcgtcgtcyttcccagatcacatcagctacccgtcgtcctag

SEQ ID NO: 21625 - DNA, 4122 bp, Oryza sativa
  Clone ID: PAT_MRT4530_2687C.1
atgtcatccagcttcgtcgacaacagcgtcaacaccaacctcaaccaaggagttcctacttcaacaatgctggtgtggactcaagtcggcgaaatcatcttcccggtttacaccacggtgccgatctcggctggtccatcaatgaccggaagggagaacgcagtggctacaacccaggacgactccatgtcgaaagatcctcccgccgaagtggagaacggaacgtcgacgacatccgatcccgagaaggatcccaatgcggccaaatcttgtctttccgacaagaatcatgagtcgacgaggatgacttccgaggtgacaaggtcctggtgtcctatccacaaaaccagaaaacacaccttgcaagcctgttgggtttttctcaacgtacacgctgaaattcgtgcttgcaaagagcgtggaattcagcgtacttctccaactcttgatgtctattgtcctattcacaagacaaagaatcacgacctctcaagctgcaaggtctttctcagcgccatgaagacgtcacctcctaaggtccaacagtcacgtatccccctcagggatgaggacaaggaacaaggagcgacgctgatcacagatcgattcgttggggtaatcgacatcgatccccatgaaccatcagtcttgcacctgctcgaagactatggctcatcgtcaacgagtacgccatgcgaggtattgactatcggctggaccagcacgtcagcgcgcgctaattcggaagcggaaaatcaagtgactacattggcccagcacatcagggccgtcaacgcaatactgagggaaacccccaacgatcccgttctgaacgacgatgtcgcacggtggacagaacgactacgggaatcagtgaccaacctcagcaatgcgttcgaagaggccgctgctgcagcgcactcggaacagccaccaactggcgaacgaggaggccgttcgagcgaagaccgagaccgtgataaccgccacaaccgccacgatcacgatgatcgcgaacggcaggtgctgggcgatactggtcgaggacgccgccataatgacgacgatgatggagatcggcgccgggacaacaacaggagacgacgacaggattctcgagaacctggccgacgccctcgtaatcgtacaccagaaccaagtgacccgtcgtcatcatcgtcatcttcctcatcctcatcatcagatagacatccacgaaggacgtacgatcgccgacaacccaccgcccccagcgctgggtgtagagctttcagtcgttcgctgcgtgatgtccgatggcctgagagattccgaccaggagcaatagagaagtacgatgggagtaccgacccagaagaattccttcaggtctactccacagtactctacgctgccggagtggacgacaacgcgttggtgaattatttgccaactgcattgaaaggttctacgcgttcatggatgatgcatctcccgccctactcgatttcttcatgggcagacctgtggcagcagttcatcgccaactttcagggaacttacaagcgccacgcgatcgaagacgacctacatgtgttgacacagaacccgggtgaatccttgagggattatgttcggcgctttaatgagtgtagaaatacaatccccgaaatcaccgacgcttctgtaatccgcaccttcaagtccagtgtcagagatcgctatactacccaggagttggcaacgaagcgcgtcacgacaactcggagattattcgaaattgtcgatcgatgcgctcacgcggacgacgcactgagacgcaagaacgacaaaccgaagaccgaaggagagaagaaactagccaaggaagcacctgagtcaagcaagaagaaaaatcgcaacagtgggaaaaggaaagctcaagcggagacactccatccagagtggctagccaacccagtcatggtgcggaaggccaatgggaaatggagaatgtgtgtcgatttcaccgacctcaacaaggcgtgtcccaaggattacttccctcttcctcgaatagaccaactggtggactcgatagccggttgtgagttgttgagctttctcgacgcttactccggctaccaccaaatcagcatggcgaaagaggacgaggagaagacaacattcatcacgccgttcggggtattttactacgttaagatgccgttcggactaataaccacaggaaacactttccagcgtacggtccagggcgcacttagcgaccaaatcagaaacaatgtcgaggcctacattgatgacattgttttcaagaccaagacaagcgactcattgattgacgatctgcgggaaacgttcgacaacctccgacgatatcgcctcatgctcaatctagagaagtgcacgttcggagtaccatcgggcaagctgctcggtttcctcgtatctggcagaggaataaaagcaaatcttgagaagatcaaggcaatcgagaacatgaagtcagacaaccaaatcgacaacgaaacgtggataatggcgttcgacagcgcgcttaacagccaaggagcaggggcaggatttatcttgacatcaccttcgggaaatcaattcaagcatgcaattcatctcaacttcagggcaaccaataacacagccgagtacgaaggactactcgccgggatgagagctgcagctgcactcggagtcaagcgactggtcgtgaaaggggattccaaactagttgtgaaccaggtgcataaagattacaagtgctctagccccgagttatccaagtatctcgtagaagtcaagaagctggaaaaaaggttcgatgggatcgagatccgacatgtataccgcaaggacaacatcgagccggatgatctagcatggcgtgcgtccagacgagagccactcgaacctggcacctttctagacgtcctgacaaggccatcagtgaaagaggcaagcggcaaagatagcctgatcgtcctcaacatcagctcttgggctatagaggcagagcgcgccgttgccgatatcgagaccacagacgactggcacaccccactcattaaattcataggcagcgaagagttgcccgaggacgacgcagaagccgagaaaataacccgtaaagcaaaaatctactgtatgatcggcaacgatctatacaagaagacgcctaacgggatactcctaaaatgcgtctcgtccgatgacggcagacatctcctcctcgacatacatgaagggatctgtgagtcacacgccgtcggtcggacattagtcagaaaagcttttcgacaagggtttttctggccaatcgccctcaaagacgcctgcgacatggggctggacatactcgggccattcccacgagagcagggcggctacaggttcctattcgtggcgatcgacaaattcactaagtggatagaagcaacacccacgggggaaatcaaggccgaccataccatcaaattcatcaaagggatattttgcagattcggattgcctcaccgtatcataacggacaacggctcccagttcatcagtgccgatttccaggattactgcatcaggctgagagtcaagatctgcttcgcctcggtttctcaccctcagagcaatggacaggctcatatcacatacaagaagtgggtcgaagaactcccatcagtactatgggccgtgcataccataccgacaacgtctaacaaggagacacccttcttccttgtgtacggctcagaggacatgctccccaccgagctacgacatcaaagtacacgagtacagaagtattccgatgaggatcaggaggagcagggaaatgacgctgtgaatctactcgaggaacatcgcgaacgagttgccgttcgagcagccagctaccaacaggccattcgccgttaccacgagaagcgcatccgagcacgcacgctttcgatcggcgactacgtcctccgacgggttcaaagccaagcagggcgaaacaagctctcacccaaatgggaaggactgtacacgatcacacaggtcttgcggccaggcgcattcaagattgcagacagcgatggtcgcgagttggcaaattcctggaacattgatcaattacataaattctatgtataa

SEQ ID NO: 21626 - DNA, 557 bp, Oryza sativa
  Clone ID: PAT_MRT4530_26880C.1
ttttttttttttttttttttatcatactaaattcccgcagcaatgtgcggggtttcacctagtttataaaaggtaaaggtacatatgttttgtggtcttctcctcgaagggtaaaaaaccacttcccatgtcaaacattagatacacaaacaaacctaaaatgatactatattacatataccttcttagcaaaactcaattacctactatatacagaccaagcactcaattagctactatgatcaaacatatggtgatatggcatctttgtttctctgaagtctgaacaagatgaagctctcacacttcagtgccactaaccaaactgatactgggatcctcctccatctgctgaagaggctccaaggtggcgacaatgtcgcgcatcaacggcctagccttggggttgcggttgaggcaatggtaggccagcatcgccgtcttctggactgccttcaccgggtagtcctcggcgagcctggggtctacctatgccaagaaccttcttcttcttgtgatcagcatgtgggaatgcccagtctgccacggtgtctgtc

SEQ ID NO: 21627 - DNA, 333 bp, Oryza sativa
  Clone ID: PAT_MRT4530_26881C.1
atggcgagggggtcgcagagtgacggggccggcggtggagagctgaacgccagtgaagccggtggagcggcgtcacgcggtcacccgtcatcgtggagctggcttccattgacgccgctgcaagaaaacgctaccgtcattgttaccggccaccgccttgacgtttctagccagggccgccgccgctccaagccggggctgccgttgctgccgtcgctgagcggctccaccaagccgccatcgtggccaatcaactgctcccctgagcaccgcagccatcagcccatcacctctctccagatccgaaaaatggggaaaactgaatgggtggtg

SEQ ID NO: 21628 - DNA, 156 bp, Oryza sativa
  Clone ID: PAT_MRT4530_26882C.1
atgaagttcgatcaaaaattaaaagcaaagccatgtaacactgccaaggacatgcaaaagatggcatgggcagggatggttcaaagggcggcggccatggagcacacagctggtgttcatgtgcccggcggcatgcagcctgtcagaaaattttag

SEQ ID NO: 21629 - DNA, 3919 bp, Oryza sativa
  Clone ID: PAT_MRT4530_26883C.1
atgaggcagcgcacgccggctgacgggagggagggagaggagcagtggtgcgcgagcgttggcagccggtgggagggcgggagaggagcggcggcgcacggggaccagtgggagggagcggcgtgcggcgacccgcagcgctgcttcgtcgcgccgctccgcgccgcatcggggatggcgcttccgggggccagcgcgaggttccacgagtacgaagccgccatcacggcgtgcatcgagaggagggcgctctgggaggggcggcaggtgcacgcgcgcatgatcacggcgaggtaccggcctgcggtgttcctggggacccggctggttaccatgtacgtgcggtgcggcgcgctggacgacgcgcgcaacgtgctcgatagaatgccggagcggagtgtggtctcgtggacgacgatgatttcaggctattctcaaacagaacgacatgtcgaggccttggatctgttcatcaagatgcttagagctgtcgtcagttggaatgcaatgcttatgggatatggaaggcatggattggggcatgaagttattagtctcttcaaagatttgcataaagaggtgaagcctgacagtgtgactttgttggctgttttatctggttgtagccatggtgggctggttgatgagggccttgatatatttgatactgtggtcaaagagcaaagtgcacttctccacactggacactatggatgcattattgatcttcttggacgttctggacgactagagaaagctttaaatttgatagaaaatatgccatttgagtcaactccatcaatttggggttcactgctcggtgcttgcagagtccatgctaacgttcatgttggtgagcttgttgctcagaagcttctggaaatggagccagaaaatgctggcaattatgtaatactttctaacatttatgctgctgctgggatgtggaaagatgttttcaaagtgaggaagctaatgttggagaagacagtgaccaaggaaccagggcagagctggataattcttgacaaggttattcacaccttccattcaagtgagcggttccatcccagtaagaaagacataaatgccaagataaaagagatatttgtcgatatcaaagcagctggctttgttccagacttgagttgtgtgctgcatgatgttgatgatgagcaaaaagaacgcatgcttcttggtcacagtgagaagctggcaataacttttggattgatgaacactcctccaggattgactatccgggtcatcccactagaggggaggcactctgacgggctgccgcacctgaaccaggcggaggaggcgacgtggatgggcctcctgccccgccgcgccgggccccgggacgagctcgactggctcgcgctctaccggagcatcacccgcggcggcggcgacgtcggcggcgagccggcggggttcctctcgccggcgtcgctccacgacgtccgtgtcgacccgtacggcgccaacatgtactggcaggggcagcagaccaacctcgagtacctcctctacctcgaccccgaccgcctgacatggacgttccggcagcaggccaagctccctaccgtcggcgagccctacggcggctgggaggcgccggacggccagctccgcggccattgcacaggtcactacttgagcgcggcggcgcacatgtgggcgagcacgcacaacgacgcgttgagggagaagatgaccaaagtggtggacatcctctactgctgccagaagaagatgaacacgggttacctctcagcctaccctgaatccatgttcgacgcgtatgatgagctggccgaggcatggtcgccctattacaccatccacaagatcatgcaaggccttcttgatcagtatacattggctggaaacccgaaaggtcttgagattgtggtgtggatgactgattacttcagtactcgtgtgaagaagttgatacaggagtacagcattcagaggcactgggaagcgataaacgaggaaaccggtggattcaatgatgttatgtatcagctttatgccataacgaaaaaccagaagcatttgacgatggcacatcttttcgacaaaccgtgcttccttggaccacttgggctgcatgatgacgacatatcgggattgcatgttaacacacatgttcctgttattgttggtgcacaaaagagatatgaagtagttggggatcaactttacaaggtctcacgaaacctgttcagatggacgaaggaaggtaaatacaccgatcactacgagaggctacttatcaatgggatcatgggcaaccagaggggaaaagagcctggtgtgatgatctattttcttcccatgggcccgggacgatccaagagcatcagtggcatgcccacctctggcctaccccccaagaacccagggggctggggtaatgcaaatgctacattttggtgctgctatgggacagggatagagtcattctcaaagttaggggattccatctacttcttggaagagggagaaatccctgggctttacatcattcagtacataccaagcacctttgattggaaagcggcaggcctgactgttaagcagcaggccaaaccactgtcctcaacagattctcactttgaggtttcaatcttcatttcttcaaagggagatgcccgaccggcaaatgtgaatgtgaggataccgtcatggacatccgtggatggagcaatagcaactctaaatggccaaaaactcaacttgacatctgcaggcgatttcctctcggtgacgaaactttggggcgatgacaccttatctctcaaattccccatcaccttaagaaccgagccgatcaaagatgatcggccggagtattcgtccatccaagcggtgctgttcgggcctcacctcctcgccggcctgacgcacggcaaccagaccgtgaaaaccagcaacgactccaacagcggcctcacccccggcgtctgggaggtgaacgccacccacgccgccgccgctgtcgccgtctgggtcaccccggtgtcgcagtcgctcaattcgcagctcgtcaccctcacgcagcgcgacggcgacgcgcaggcggcggcggcgttcgtcctgtcggtgtcgatcgccgacggcgcgctaacgatgcaggagtcccccgtcgccgggagcgacgcgtgcgtgcacgccactttccgggcctaccactccccctccggcgccagcgccatcgacgccgccaccggcaggcttcagggccgcgacgtggcgctcgagccgttcgaccggccgggcatggccgtcaccgacgcgctcagcgtcggccggccggggccggccacgcggttcaacgccgtcgccgggctggacggcctccccggcacggtgtccctggagctcgccaccaggccgggatgcttcgtgcagcccccaccacggcctacctcgccggcgccaaggtcaggtcagctgccggaaacccaccgccgccggcggcggcgaagacgacgacgacacggcgttccgccgcgccgcaagcttcacccaggcggcacctctccgtctctaccacccgctgagcttctcggcgacgggcaccgacaggaacttcctcctggagccattgcagagcctccaggacgagttctacaccgtctacttcaacgtcctcaccaagtgatccaccgccatgtgacagcgagcccagccttgccatggacagaatgacagatcaccaagcttgtccatggcttacactacctgtaatggatatgaaattaaacatagttagtacctaagacctgattacctaattaacaatcttcaccatggccgtgatgattcaatcaatgcgtgcatgtgtgtgctcgtgatccagaaagaaagggaaaggcgatccataaatattgtgccgttc

SEQ ID NO: 21630 - DNA, 2268 bp, Oryza sativa
  Clone ID: PAT_MRT4530_26884C.1
atgacgcggaggaggagcctcgccgggggtgcggcggcggctgtggtggtgctcgcggcggcggcggcggcggcgttcctgtccctgctcgacggcgcggcggcgctgcacctgtgcacggacaggctgttcaacgacacgcaggggaggcactctgacgggctgccgcacctgaaccaggcggaggaggcgacgtggatgggcctcctgccccgccgcgccgggccccgggacgagctcgactggctcgcgctctaccggagcatcacccgcggcggcggcgacgtcggcggcgagccggcggggttcctctcgccggcgtcgctccacgacgtccgtgtcgacccgtacggcgccaacatgtactggcaggggcagcagaccaacctcgagtacctcctctacctcgaccccgaccgcctgacatggacgttccggcagcaggccaagctccccaccgtcggcgagccctacggcggctgggaggcgccggacggccagctccgcggccatttcacaggtcactacttgagcgcggcggcgcacatgtgggcgagcacgcacaacgacgcgctgagggagaagatgaccaaagtggtggacatcctctactcttgccagaagaagatgaacacgggttacctctcagcctaccctgaatccatgttcgacgcgtatgatgagctggccgaggcatggtcgccctattacaccatccacaagatcatgcaaggccttcttgatcagtatacattggctggaaacccgaaaggtcttgagattgtggtgtggatgactgattacttcagtactcgtgtgaagaagttgatacaggagtacagcattcagaggcactgggaagcgataaacgaggaaaccggtggattcaatgatgttatgtatcagctttatgccataacgaaaaaccagaagcatttgacgatggcacatcttttcgacaaaccgtgcttccttggaccacttgggctgcatgatgacgacatatcgggattgcatgttaacacacatgttcctgttattgttggtgcacaaaagagatatgaagtagttggggatcaactttacaaggaaattgcaacattcttctttgatgttgtaaactcctctcatacatttgcaacaggaggcacatctaccatggaacactggcacgatccgaagcggctagtagatgagatcaaaatcagctcaaatgaggagacttgcgccacatacaacctgcttaaggtctcacgaaacctgttcagatggacgaaggaaggtaaatacaccgatcactacgagaggctacttatcaatgggatcatgggcaaccagaggggaaaagagcctggtgtgatgatctattttcttcccatgggcccgggacgatccaagagcatcagtggcatgcccacctctggcctaccccccaagaacccagggggctggggtaatgcaaatgctacattttggtgctgctatgggacagggatagagtcattctcaaagttaggggattccatctacttcttggaagagggagaaatccctgggctttacatcattcagtacataccaagcacctttgattggaaagcggcaggcctgactgttaagcagcaggccaaaccactgtcctcaacagattctcactttgaggtttcaatcttcatttcttcaaagggagatgcccgaccggcaaatgtgaatgtgaggataccgtcatggacatccgtggatggagcaatagcaactctaaatggccaaaaactcaacttgacatctgcaggcgatttcctctcggtgacgaaactttggggcgatgacaccttatctctcaaattccccatcaccttaagaaccgagccgatcaaagatgatcggccggagtattcgtccatccaagcggtgctgttcgggcctcacctcctcgccggcctgacgcacggcaaccagaccgtgaaaaccagcaacgactccaacagcggcctcacccccggcgtctgggaggtgaacgccacccacgccgccgccgccgtcgccgtctgggtcaccccggtgtcgcagtcgctcaattcgcagctcgtcaccctcacgcagcgcgacggcgacgcgcaggcggcggcggcgttcgtcctgtcggtgtcgatcgccgacggcgcgctaacgatgcaggaagtcccccgtcgccgggagcgacgcgtgcgtgcacgccactttccgggcctaccactccccctccggcgccagcgccatcgacgctga

SEQ ID NO: 21631 - DNA, 622 bp, Oryza sativa
  Clone ID: PAT_MRT4530_26885C.1
ccacgcgtccgcactatccacctcgccgccgccgccgccgccggaaatggccgccgccgcgcgccccctggtgtccgtgaaggccctggagggcgacatggcgacggactcggccggcatccagatgccgcaggtgctccgcgcgccgatccgccccgacgtggtcaccttcacccacaagctcctctcctgcaaccgccgccagccgtacgccgtgtcgcgccgcgcggggcaccagacctccgcggagtcgtggggcacgggccgcgccgtgtcccgcatcccgcgcgtccccggcggcggcacgcaccgcgctcgccgccaccgccgtcccgtccctcgtcctcgcccgcggccaccgcatcgagggcgtccccgagttcccgctcgtcgtctcggactccatcgagtccatcgagaagactgcgcagtccatcaaggtcctcaagcagattggtgcctacgctgatgccgagaagaccaaggattcggtggccatccgcgctggcaaggggaagatgcgcaaccgccggtacatcaatcgcaagggccccctcatcgtctacggcaccgagggttccaaggtcgtcaaggctttccgcaacctccccggcgttgatgt

SEQ ID NO: 21632 - DNA, 1879 bp, Oryza sativa
  Clone ID: PAT_MRT4530_26886C.1
aaatagagggacctaaagtgaacttattcctaatttaatttgagaccaacgaatttggtacaattttaaatctggcccatccatttcctgtcgaggaattcagcccataatcgcgccgcatcggggatggcgcttccgggggccagcgcgaggttccacgagtacgaagccgccatcacggcgtgcatcgagaggagggcgctctgggagggggcggcaggtgcacgcgcgcatgatcacggcgaggtaccggcctgcggtgttcctggggacccggctggttaccatgtacgtgcggtgcggcgcgctggacgacgcgcgcaacgtgctcgatagaatgccggagcggagtgtggtctcgtggacgacgatgatttcaggctattctcaaacagaacgacatgtcgaggccttggatctgttcatcaagatgcttagagctggatgcatccctaatgaatacactttagcaactgttcttacatcctgttctggtcctcaaagtatataccagggcaagcaagtccattctctcttagtcaagacaaattttgagtcacacatgtttgttgggagttccctgcttgacatgtatgccaagtcagaaaacatccaagaagctcgaagagtatttgacacgcttccagaaagggacgtcgtttcgtgtactgcaattatatctggctatgctcaaaagggtcttgatgaggaagccttggacttgttcagacaattgtatagtgagggaatgcaatgcaatcatgttaccttcaccacccttgttactgcattgtctggcctggcttctttggattatggcaaacaagtccatgccttaatacttcgtaaagaattgcctttcttcgttgctctacagaattctttgatcgatatgtactccaaatgtggtaaactgttatactcaaggagagtatttgacaacatgctagagagatcagtcgtcagttggaatgcaatgcttatgggatatggaaggcatggattggggcatgaagttattagtctcttcaaagatttgcataaagaggtgaagcctgacagtgtgactttgttggctgttttatctggttgtagccatggtgggctggttgatgagggccttgatatatttgatactgtggtcaaagagcaaagtgcacttctccacactggacactatggatgcattattgatcttcttggacgttctggacgactagagaaagctttaaatttgatagaaaatatgccatttgagtcaactccatcaatttggggttcactgctcggtgcttgcagagtccatgctaacgttcatgttggtgagcttgttgctcagaagcttctggaaatggagccagaaaatgctggcaattatgtaatactttctaacatttatgctgctgctgggatgtggaaagatgttttcaaagtgaggaagctaatgttggagaagacagtgaccaaggaaccagggcagagctggataattcttgacaaggttattcacaccttccattcaagtgagcggttccatcccagtaagaaagacataaatgccaagataaaagagatatttgtcgatatcaaagcagctggctttgttccagacttgagttgtgtgctgcatgatgttgatgatgagcaaaaagaacgcatgcttcttggtcacagtgagaagctggcaataacttttggattgatgaacactcctccaggattgactatccgggttatgaagaatcttcgcatatgtgttgattgccataattttgccaaatttgtttcaaaagtttatgaaagggagatatcccttagggacaaaaatcgatttcatctacttacacacggaaactgcacctgtggagattattggtga

SEQ ID NO: 21633 - DNA, 576 bp, Oryza sativa
  Clone ID: PAT_MRT4530_26887C.1
aagaagggcttcgtgctcccgaggccgaagatggcgaatgccgacctgtccaggctgatcaactccgatgaggtccagtcggtggtgaagcccatcaacaaggaggtgaagctcagggaggcgagaaggaaccctctgaagaatgtggccgctgtgctcaagctgaacccctacttcggcactgcgcgcaagatggcagctctcgctgaggctgcgcgtgtcaaggccaggactgagaagctcgactccaagaggaccaagctcagcccggaggagtcttctaagatcaaggctgctggaaaggcatggtacaaaaccatgatttctgacagtgactacacagagtttgagaatttctcgaagtggcttggtgtgacgcagtgaatttatgattgatgaagttttagtagattacattaagttctggaattatgattttggttattattgtcatatgacacttgttatgtggagttcagagatgatatgtcgttttggtagctctctttgccccgagacttatacacctggatacctttcatgagacataatatatggcatattttggcggtccag

SEQ ID NO: 21634 - DNA, 1563 bp, Oryza sativa
  Clone ID: PAT_MRT4530_26888C.1
ccacgtggccggccgatgattgctcgcccggcgaggacgcacgcaagccggtgatcgcgcacgggcgcatggaggcgtcgacccctcttctgaccccttacaagatgggccagtttgatctcgctcacagggtcgttcttgcgccggtgccccgacgcctgtcccacgggaacgtgccaggggcgcccaacgccgggtactacccgcagtgcggggcgcggggcgcacggatgctggtggaagcatgcgtggcgtcagcgacgtcgatacctttccccgaggtgcccgcgatacggaccgcgcattactggatgactcgagaattccacgaagtagccgacctccgttgagttcgtccatcccaaattaaagaccgacccagatgcctcgtgctaccgactgcttggggcacttgcatgcatctagcggacaagcaagtgaccccacaggtcagccatgatggccaagttctggaattcgctcctcctcgaagactgaaaacagaggagatcccaaacatcgtcgacgactttcgtattgctgccagaaatgccatcgaggccggtttcgacggggttgagatccacggcgccaatggttacctgatcgaccagttcatgaaggacagcgtcaacgaccggaccgacgcgtacggcggcggcatagagaaccggtgccgcttcgccgcggaggtgatcacggcggtggccggcgagatcggcgcgcaccgcctgggggtgcgcctctccccgttcgccgactacatggactgccacgactccgacccggaggtcctcgcgctgcgcgtgatcggcctcatgaacaacctcggcgtcctctactgccacatgatcgagccgagaatgtgcgtcggcgccggcgaggacggcagcaagccggtgatcgcgcacggccgcctgcttccgttcaggaaggcgttccggggcacgttcatggtgaacggtgggtacgaccgggacgaaggcgacaaggcggtcgccgacggctacgccgacctggtggcgtacgggcggctgttcctggccaaccctgacctgccggagaggttcaggaggaaggcaggtctgaacaagtatgacaggagcacgttctatacctctgatcctgtggtgggctacacggactacccgtttctggatgatcagaattcagaactagcaactcgttgagttcttccgtcccaaagaccgaccagatgctcgtgctaccatgctgggcacttgcatgcatctagcttggacatttgtggtgtgaacctcagcttgtaccgtgtgtactatactagtataaaaacgaacttactcaaaataagtacttgattttattatgaatttttttagttttcaggtgtccaaaaatatcataaatttgagccaaattttttacgtctaagacatgcatcgggattcatgcgcaatagtaagcattaggccatttccaacccaatgactaggatagtgttcatagtattaaataagttgccacctagaatgaaaaatgatgtggcaagtgaataaatgaggaaataaaaggaatctatat

SEQ ID NO: 21635 - DNA, 2679 bp, Oryza sativa
  unsure (1)..(2679): unsure at all n locations
  Clone ID: PAT_MRT4530_26889C.1
ccgggnncgacccacgctgcccgccgagccactacactatccacctcgccgccgccgccgccgccggaaatggccgccgccgcgcgccccctggtgtccgtgaaggccctggagggcgacatggcgacggactcggccggcatccagatgccgcaggtgctccgcgcgccgatccgccccgacgtggtcaccttcacccacaagctcctctcctgcaaccgccgccagccgtacgccgtgtcgcgccgcgcggggcaccagacctccgcggagtcgtggggcacgggccgcgccgtgtcccgcatcccgcgcgtccccggcggcggcacgcaccgcgcggggcagggcgcgttcggcaacatgtgccgcggcgggcgcatgttcgcgcccaccaagatctggcgccgctggcaccgccgcgtcaacatccgcctccgccgcatagccgtcgcgtccgcgctcgccgccaccgccgtcccgtccctcgtcctcgcccgcggccaccgcatcgagggcgtccccgagttcccgctcgtcgtctcggactccatcgagtccatcgagaagactgcgcagtccatcaaggtcctcaagcagattggtgcctacgctgatgccgagaagaccaaggattcggtggccatccgcgctggcaaggggaagatgcgcaaccgccggtacatcaatcgcaagggccccctcatcgtctacggcaccgagggttccaaggtcgtcaaggctttccgcaacctccccggcgttgatgttgccaatgtggagcgcctcaacctgctcgaccttgcccctggtggccaccttggccgcttcgtgatctggaccgagtgcgcgttcaagaagctcgacgaggtgtatggtggcttcgacacaccggcgctgaagaagaagggcttcgtgctcccgaggccgaagatggcgaatgccgacctgtccaggctgatcaactccgatgaggtccagtcggtggtgaagcccatcaacaaggaggtgaagctcagggaggcgagaaggaaccctctgaagaatgtggccgctgtgctcaagctgaacccctacttcggcactgcgcgcaagatggcagctctcgctgaggctgcgcgtgtcaaggccaggactgagaagctcgactccaagaggaccaagctcagcccggaggagtcttctaagatcaaggctgctggaaaggcatggtacaaaaccatgatttctgacagtgactacacagagtttgagaatttctcgaagtggcttggtgtgacgcagtgagttccatcttgtcaagactcaaggcgtaaagaagcttgtcaactattacctccgtctaaaataactgctgtccctggccttcacctcttcggtgaatcccaattgggttcgagcaacccaattgggagaacaaaatcggaatccacaatactcagaggttgcctgcttcgttcgtgttcgtcgattgggaagggcgaatttgactgcctcggttgcagacttagtcaatcgggtgtcttgctttcaaattcctttgttcttttcaatagtatggtccaagttggatcttcaggactcaggagtagaatcatgaagctgaaaaatagagctgaagaaatctttagggacggcgacctgatattcacatccgaaagaaatcttggggcaagaaacgtgcaaatggattatgatattgttagagcaaatcagccagctgttgttcagacaagatgcagatggatcattggagatgtaactgaggtgctggatcgcaacacatggaagctcggcaaaatcgcaaagatgctgaagaacaactacttcgtcatcaggcttgctgactgcattcaactgaaggagtttcacatttctagcttgagggttcctgcatcacctcatagcaacaaccagtattctgtggcagataagaaatctgaagctaagcttgcgcagagaggccagattccatctgatgctctgcctggaagaacaaacaagaagagaaaatcaactgcagacacatccttcaatccaagaaggagaacatcacggcctgaaaatgcatccagggcctgtgtgctcgatggctcaacgactcaaaatcgcttccagttcatcagagaagaggccgaatgttcagtggccagctgcagcatcaacgacccggacaccaccttcaccaacgccaagaagctccaatctctcggcttccctgacgacgccatgtccgcgtgcccatgcacctccggcatggaggatgacgatgccgccgccgccgccgccgacgaagacgatgacgacgagccggcggccattgccgtccacgagctggagctggaggcgtaccagtcgacgatgcgagcgctgtacgcgtcggggccactgacgtgggagcaggagtcgctgctgacgaatcttcgactgtctctgaacatctccaacgaggaacacttgctgcagctcaggcgtctcctgtcctcgcgatgaatttatgattgatgaagttttagtagattacattaagttctggaattatgattttggttattattgtcatatgacacttgttatgtggagttcagagatgatatgtcgttttggtagctctctttgccccgagacttatacacctggatacctttcatgagccataatatatggcatattttggcggtc

SEQ ID NO: 21636 - DNA, 350 bp, Oryza sativa
  Clone ID: PAT_MRT4530_2688C.1
tggcggctcgtgcacagaggggattagcggcgtgtggcggtggtggcggcgtccgtgcggtgaggggagggagcgccaacgccggctcatggggggaggaagcggcggtgctgggggaggagcggcggcaccggcgcggtgaggggaggggtcaaaggcgccgtgaggggagggagtggcggcgctggggtgacgccggtggcaacgccgacgcacgagaggatgatatagcggcgtcggctggtggagggagcaccagcggcagcggaggtgttagacctctaataattctactagatcacaagttgagaagagagtacagtgatctaggaggcgtgttcgacctttaa

SEQ ID NO: 21637 - DNA, 153 bp, Oryza sativa
  Clone ID: PAT_MRT4530_26890C.1
atgcagtcatgcatgatgctcgccataccaagccaaagctttggaacggcagttcagttcacttcgctggacacactgaggccacgcactctgcatgcagactgcacaaagtcagacgttcaggttccattcggcaggataagtcataagtga

SEQ ID NO: 21638 - DNA, 290 bp, Oryza sativa
  Clone ID: PAT_MRT4530_26891C.1
aaacacaaaattccatctttatttgaactggggcaatgtttaacgagacagcttaaatgaccacatcgaaaacctcaactatgccagctatcacatgccatacttactcaccagaatgacatagaaactgaggccgaaaacagcataagcaaaaacactacaccgcacattacaaatgccatcgctcctctcaagaggtatatacaggaaggcgcatcatgctaagttgctacttcggacctcttctatgccacacagactccaagtttttctggtctttaccaatataa

SEQ ID NO: 21639 - DNA, 413 bp, Oryza sativa
  Clone ID: PAT_MRT4530_26892C.1
atcagacctgaggaccaaaacaatctgttatcttattatatgtaataggaggattagaagtttgcttcctagctacaagcaaaatatatgtagtaaattgaaattctgcatacgaaagacagcattattacaaactgtttcagacatttgtgccacagatataaaaaaaaaaaaaaaaaaaaaaaaaaaaaaaaaaaaaaaaaaaaaaaaaaaaaaaaaaaaaaaaaaaaaaaaaaagtaaaaaataaaaaaaaaaaaaaataaaaaaaaaaaatatattaaaaaaaaaaaaattatataaaaataaatattaaataaaattaaatggggggggttttttaaaggttttaatttttaatatcgttgtggggtataaaatattttttttttggggacataaaattttagtaagg

SEQ ID NO: 21640 - DNA, 2784 bp, Oryza sativa
  Clone ID: PAT_MRT4530_26893C.1
tcaccctctctcctctttctttcccctcatctcgcccttcatcggttcctcctctttctcactcttctcagcggcggcgccggctgcgaggtaggaggaaggaggacgtcgacgtcggcggcggcaagacgcgggagaaggggagggcgtcgacgccgcgcgagtgaggtcgaggatggagaccacggcggcgaggtgagcgacctcacggcatcgtgcaagcacggcagtggcccggtggagttccgcggccgccgccgtatcgccgggcgccagatgtcctctcccacctcgcagccgccgccgtgtcgtcgggtgccggatgtcctctcccgattcgtagccgccaccgcgtcgccgggccccggatctcctctcccgcctcgcagccgttgccgccgccgcctcgtcgcccggcgccgcgtcgcccaccgccggatctcctttcccacctaggcacggcgacctcctcccctcccaccggccaccgtgcagagagaagcaaagtgacagagagaggggatgaagggagaggagggaaagagatggtgatgatgtggcatattgacatgtgggacctatgtgggtcccacgctgactcagccgccacgtcggacaaacctctggtgtactttttccttccatttttacctcattgctgtcaaacgtcgcttctaaccattccttctgctttctctccaagccggccatggccatcgcggcagccgacacgacgggagcgaagaacgacgccgcggcgaacgcggatcccgccgccgctccggtgtcgtagtccgtcgacggcgccggcgctgctgccggcggcacggcggcgaggacgttgatcatgagcctctggccctcgttgcagcggccgaggtcggggctggcgaagtaggcgaagccggggaccttgatcaccgagtcgttcctgtactcgaactcgatggagtcgccgacgtagaaggcgatggacgacgcccaccgggagtagtacaactcctcctcctccggcggcggggcgatccacccgtcggggccaccgacgcggtactgctcccctgccgccgccgccgccgcgccggcggcgaggacagccacgggaggagacggagacgagacgaagccgcgacagccgccatgccggagcaggcgaggggcaaggcggcgctccacgcactccctcttcttcatcatcgcgccgcggcgccgcctcacagccggcggagcggcggcggagcggagggccaggcggagtggcggggcggcggcatgccgcggccacgagacgagcttgtagatgacacggctccccgtacccatcgccacgaccgccgcggtggcgattgccatgtccatcctggcgctcctcccaaccccagcagcgctccccaccacctcccccgccgccgcgcacctcgccgccgcatcctccctagggtcaccctcctcgtccccaaccacaccgccacctcgatgcaccgcacgtgcgccacctgcatcacctccctctgcctcatggtagggaggagctccatcgccgccgccgccggcggtccgttcgtcagggatgcagattttgagaaaatggatcctgaagatcttactgactctgaggaagatgaagatgatgacatgatgttttttatcttgcctacactatatcttgtttctactggaagcgaagagccatgtcatacatcgaagttcagtggtgcagagtggatttgtgaagtgcttgaagatgaccgtggtgaaggctatgccaaatttcgaatggagcctcaaattcttcagaaattttcagaccttcttaggtcaaagaatcttttgcggaatacaagaggcgtttctgtggaagagcaaattggcatgtttatttatatgctctctcgaaatgccagctttcagaaaatgagtgatagatttgagcacagtagggagactatccatagacatatcaaggcatgctttgatgcaatcacctcattgacagatgagtttgtcaagcatccttcaactgagactcattggaaaatatcatctgatccgcaatatgggccttattttaagaactgtataggggcaatcgatggagttcatgtacctatcacaatatcagactatgaagcagctccatatcgaaatatagaagattccctttctcaaaatgtgatgctggcttgtgactttgatttgaattttgtccatgtgtgcagtggccacgaagggtctgcatccgacgcggcagtcctatatgctgctgtggagtctggatttgaagtcccaagtaacaagtattatttggttgataggggttatgcaaacacaccatcttttcttgctccttatagagaagctgcataccatattgaagaggaggagcagagcaattgtcagccaagtgactacaaggagttgttcaaccttcgtcactcaaagctgcgcaacaacataaagcgtgccacagcgctattgaagatgaggttcccaattttaaatgtcgcaacattctatcagatagaaactcaagcgaaaatcccagcagcagcagtggtgctgcacaatataatgcagggccaaaaagatgatgatgatgatgatgggtgggcatttaaccaggcaatgccagtttcatcccgtagaactgtagttttacccagtggggatgatgcttatggcaatgatgtcgaagaactgaacaaccaatgtagcatgggtgatgctttgagagattatattgcgaagaagatgtggacagattatgaaaggaacaggaggtag

SEQ ID NO: 21641 - DNA, 320 bp, Oryza sativa
  unsure (1)..(320): unsure at all n locations
  Clone ID: PAT_MRT4530_26894C.1
tnaccatccgcgtcgtgagcgcccnaggcctccgacgccaccatccagccgcacgtcgccaccgtctccaaccttgacctctacttcaacaactaccaggcctccatgggtctgcctctaccccagcaacctccccgtggccgggggtcgccggcagcttcgacnccgtcgtcgccgccttcgangncgggctcccgtcgctgctcaaccacttctaccccctccnccnggccgggatcgtcctccaacctngtcttcccgnctccccnganctgcactgncacaaccangggngcggnnctcntcntcngggnaaagtc

SEQ ID NO: 21642 - DNA, 1077 bp, Oryza sativa
  Clone ID: PAT_MRT4530_26895C.1
tcagtatgagggggccagaaagacagaaacaagtgtatcaatgtacacttccaagaagattatttcacttgccaaaaacattgaagaagcgtcgtcttcatcttcatcagttagtaccaacacatgcctcaacactaacagagccattaaaataagcgcagcagagcggcaaaaggcagcagagctcgcatttgttactgaataatcatcatagtcagcttccattatgtgattttgtgccattgcaataatccttggatcatgcaaatcaaatgctgtgccggtaatggtccaaccaccaatagttatggggacaggtaaatagttaaaataaataaaaaaatgactatagtaaagtatggatgcctgccttatatcaatggttgtctcatcaggatgagctctaggaagtgcagtgtacccgtgtttgtatggctcatggcaaatttcacatgtcaaatctcctttctcatcgcaccatctctgcacgcaagcccgatgagcatactttagacttccagtgcaagcacatggactctcaaggttgctgatgttatcctcctcttggcaaatacgacattctactgtctgaataagaggctcttcctcagcacccatgctttcccgaactgacaaaagtgtatgagttgtagacaacggtggtagagaaactcccccggaaggcagattcatggctgcctcggtcgcctcaacagactcgggaaggttgctaacattaagcattagatgatccttcatttgttacttaaaacaaagaaccttgccaacagagtaattctatccacaagcagtattgaataataaaattgacgtactctgctaagatccctcctgaaatgggctgttctcaggaaagaaggaacttgagttattagtggaaccgtggaagcttcaagacaaaaacaagcactgattttttgccaggccggcgatgcaacgtcagccaactttattaggattgagaacaggcaccgagaacatgagctccaccgtgcttgggtgggaggaggagctctcgtgcgtgcctcccggttctctcgtcctccggacgcgtgg

SEQ ID NO: 21643 - DNA, 204 bp, Oryza sativa
  Clone ID: PAT_MRT4530_26896C.1
atggggatgggttggccgaggccgaggccgagagaatcctcacccgcttcacctggctcgccgtggaagtcgtcccgggccggcggagacgatcaccgtgtggtcatctacaggggatatcccgccgccgcgggcggcggcgtgctcgccgaggagaggggccgtggccgcgacggcgaggtggccgtacaccagaaggcctaa

SEQ ID NO: 21644 - DNA, 518 bp, Oryza sativa
  Clone ID: PAT_MRT4530_26897C.1
ccaacatcaaaatggtgcggccgatctaacatcaaaatggccgctccaacgtaggactggttaccattctgatgctggagggaacacaaatggcccattatctgggcgaaccgggccaagatatgtatatggaacaacactaatggcgaattggtgtggttgctgaatcctgtatcctaatgcaatactgctcccacttggctctacatcccaaacaaggaccttaaattgatgtggctggagggcctaatgaaagacctatccatcattatgggctttatgctcactgccggatttcgaaacttaatgggaagccagctccatagcttgatcatttatacaactcgcgaagggatgggaaaagggtgaagtgcgcatgtcgcctacctcgcttactaacggcctaccttctgtgcttactttgaagcagagaccgtttctactgactcaaacgcggagctccggttatacccagagtcttgcgattacacaaggggaatcatgtgagcgtagcgcct

SEQ ID NO: 21645 - DNA, 269 bp, Oryza sativa
  unsure (1)..(269): unsure at all n locations
  Clone ID: PAT_MRT4530_26898C.1
gcagcagcaaaattacgcanacaggtagatgcagtcatctgtatgcatctnacatcagtatcatatctaattagacattagatcactcanagtgatgcgacaccatcttcatctcatcaaaggatcgtcatgatancagccgttagtatctnnagctcgcgccgacgagaggggatctctagagtgcctctggcctcggacggtgcatcagtttccttagtggtgattattgctattgcgtatatggcatagctgttcttctcaatgta

SEQ ID NO: 21646 - DNA, 276 bp, Oryza sativa
  Clone ID: PAT_MRT4530_26899C.1
atggaaggaaaggattttaaatcactaaagataagctatcatactctgaaggataaatggtcgattagagaattaataagtcatgatgttaatgaggaagagcaacaaaatgccgaaaggcgtaataagcaagctttccccactaaagctctaaagaccaatgagaatatcactgatgagcccaatgagtcaagtgccaccatcgtgtccaagcttcgccataagtctaggcatgagcaagaggactgcgaaggctttagaaaatggcttccttag

SEQ ID NO: 21647 - DNA, 207 bp, Oryza sativa
  Clone ID: PAT_MRT4530_2689C.1
atggcggacggctatcggcggcgggcgctcacggcggcttcaaccctcgtcccggccgcgtgcggtagcgcgggaggcatgccgtgcgtaccggcggcgaggggaggcatgcgagagatcgagatatatatcatcagtcggcagcagcgcacgctggaaggcagcttcggcaaagcaaagccgcggcgcaggcgcgtcctccggtag

SEQ ID NO: 21648 - DNA, 493 bp, Oryza sativa
  Clone ID: PAT_MRT4530_268C.1
ctctattctctccctccacaccccactccgacgaccaccaccacctcgcccgcggtaacgccgccgccgtcgctcgccgcggtaaaaccagcgcgcgcgagagagtgggtgtccgtgtggcctactacttgcttcctcggcgcgcgcggcgcgtgtgtgcctcgcatcctccaccaccactagtgcagccaagtgcgtgcgtgtgtgtgtgtgcggacaccgttgctgccgccgccgccgccgccgcgcgcagggtggtgacaagatgacggcgacgccggcggtgatcgggctgagcgcggggaacaggctgctgagcgcgtcgttcgggccgaccgacgccgtcgcccgtctggcgcgccgcccacgcccatgacctcgagtcctccctcgaggccatcgtgctgctgcagaggtccatgctcgagaagcagtgggagctccccttcgacgacgacaaccacgccatggccatcggcttggccgaggatga

SEQ ID NO: 21649 - DNA, 751 bp, Oryza sativa
  Clone ID: PAT_MRT4530_26900C.1
caacaagagggtcaatcaattctttgtagttcatctcaacaaaaaaaaatcgttgtacttaattttctaacacagcacaatactggataagtcatccaaatcgttgaacatatctattctttatttctattttctgaaccccacaagacaaacgggatgcccccatttctgaaatctgaacaactacagtagtactcctcggtaatgctaatttgcgtgccgagcagtgtggcaccgtatcactctcgtgcgatggcgacgagctgttttccgacattgcggccggtgaagagcttaatgagtgctgccggtgccgcatcgagcccctcaacgacgtcctccacgtatgccaccttcccttcctttaggtacctagccatttcatcctcgaactggtagtacctgtcatagaagtcaaacacaaggaacccctccatacgcagacgcttggtgacgatatagaacaagtttttcaccccctctggccgctctaggttgtactgcgagatcatcccacatgccgcgatccgaccacctaggcgcatgttaggtagcactgcatctagcgtcttaccgcccacattctcaaagtagatgtcgataccctctggaaaatacctccttagggctgcctcgaggtctggctccttcttatagttgaaagcgtcattaaagccaaacttggtcttcaataagctgaccttttcgtcagaaccagcactgccaaccacatagaagcctatgatcttag

SEQ ID NO: 21650 - DNA, 552 bp, Oryza sativa
  Clone ID: PAT_MRT4530_26901C.1
acggggcttctccataagccgagcacctattttagcaaaacaaggaaagctaggcaccaagggcttcaacgttatgcgtggtagagcaaaaacatgcaaatcaataacctgtgcagttgcttttagcccaaatgctttgacaacaacagtgatattcggatttccagcccacttgatggaaggttccattataagttcttgctcatctgtggtgtagaccttcatcccttgaaatgttggtggtaatgaacctaatgttaatgtctcaaattcaaccgaatcaatcttatacttggcagtgttctcagcaataattggcttagcgatttcctttgcagttttacatattgccttgtcaagataaggccaaatgttttcgacaaacttgttaagccaatcaatccggtcaaagtctggattcttcacccaatgaggaacctcaggaagcatgctttctagagattttgtatcaagttcaacaagtggcctgattacagggtccttgacgtcggtgggctggaagtagatgaagaggtagtacccaatcaccga

SEQ ID NO: 21651 - DNA, 358 bp, Oryza sativa
  Clone ID: PAT_MRT4530_26902C.1
aaagatcaacacgtgtccaaggacaccaccccaccaggcctcaggggtatggacactacccccgtcgacagcccttcaccacaaggtaggacgatggcaaggcgcaaaggtcccccagcacagcactagcatccatgcaggcccaaacagccaaaggtagacacagcacagtcaaacaggcaaggcacaagtgagggtcaacagcagggtttcttgcaggggtttaaggttaactaccctcttaattgatatacttagtcttctaaataaaatcacggctctgtattactactactactctgctccagttttttcaccgagagcgttatactcagtgtgtcacctatcctaaaaaaaa

SEQ ID NO: 21652 - DNA, 2403 bp, Oryza sativa
  Clone ID: PAT_MRT4530_26903C.1
atctagtagcctacaatttctaataggcactgacaagcaccgttaaaactcggtgttatgctgtagtacaaataacacaaattcatcgattctcatacagaataccaattccataattagttcaggcttcctggtttctgttcataatcatatataccaaccagtgagaatctgggggaaacaatgaaaagcatagttttaaaagtggaataattcagaaggtaagatatgtctgccaaatgatacatacaagtgtagaaagcattctaaacaagaaactttacaagatttcagcccgtgagttctaagatgttctccactgcaattccaactggatgcggccatttttcgagtcaattagatgatatttctcattgatcctcttattgtttataacatctgcaagacttatgacaacatagccaagattttccttggaatgtataccgatgcttggtggtctgctaatgacttcaatttgcattttatcatttatgggtggttcctcgcagacaaactgaaattcttgctcccaacgtggatcacgattcttcttaatatgcttggtcttcctttcttcacctctaaacacaattcttacatatggattagtgtggtgctttccttcaacgtcttgtgcttcatgaacgataactaccagcaaaccaccaccttccggtgtgccatcaggggctttttcaatggtgccagattcatcacttgtatcaacatcagaatcaccttccttgaaaggcttatatgttacatcaacagtgagctgcccccggaacttgtcatttgctgggtcattagcatccatagtcttgtgtaagtcaagtgtaagtgactttgcctcatcaggaataagctctttcaatgggataacactcattccaatcttgtcgtgcttcccaacctgctcccaatcgtaaacagtaagctcaagagcctgagattctgggtctttgacaactaatttgaaatcttcattccattcagggttcaagttgcttcgcttcactgacgttttctttgatgggagtttttcctctgttagctttaacttcacatatggatccgattttcccagaaaatcctttttggtgagtttgacagcccgtacgatgttaacatgcaaaattccaacaggcttcttttgtgcttttgctggatccatgattggcacctcaagtacttttggccacaagtacatgtttgctacctgagtcttgataatctcctgaacaaatacatagagacctggaattgccatgagatctgctcctaagagtttcagaccaaaatcaacatgtggcttctccataagtgaaacaactattttagcaaaacaaggaaagctaggcaccaagggcttcaacgttatgcgtggtagagcaaaaacatgcaaatcaataacctgtgcagttgcttttagcccaaatgctttgacaacaacagtgatattcggatttccagcccacttgatggaaggttccattataagttcttgctcatctgtggtgtagaccttcatccatgggaagcgttgggacatttcgcgttggggtctggcacatgagttcatggtcgacaactctgggataaattgggcctggtcatttggggcttccttcttcctcttccttccagaagtttctggcatcttccaccagttgaattcccttagttcatcctcctctccacctctatttactggagtttggttgctattgcactggatgcttgcatatttgagtggaattgagattggaagtctcggttgatttggcacataagcttgaaatgttggtggtaatgaacctaatgttaatgtctcaaattcaaccgaatcaatcttatacttggcagtgttctcagcaataattggcttagcgatttcctttgcagttttacatattgccttgtcaagataaggccaaatgttttcgacaaacttgttaagccaatcaatccggtcaaagtctggattcttcacccaatgaggaacctcaggaagcatgctttctagagattttgtatcaagttcaacaagtggcctgattacagggtccttgacgtcggtgggctggaagtagatgaagaggtagtacccaatcacaagccccatggtgactcccaccccaaacccgaagaaacccagcacagtgcggaaaaaccccatctcctccccaccaccgctcccccaacgcgagccgccgagaagagcaagaatccgaaagcgagcgcctcagatcacatcaagaggagacgtgaagcaagcaacaggggcaatgtcaaacgaggaagaagatgcggatgggatctaggagaggagaggatgcgttgcagcgcgcacagtaacagccaggatggcattgatagcagcatccctcgccctcgtgc

SEQ ID NO: 21653 - DNA, 387 bp, Oryza sativa
  Clone ID: PAT_MRT4530_26904C.1
gggggggtgttcttctttttttttttttttttctttgcacccaaaaggcccccccgagcctggccggccagggggatttgggggggccggacccaaggacccattgcttgggtcccactggccccccgggcaaggatggccgcgtcaccatcgggccccctccgccccccgttgggtggctatatatggcccccccgggggggcagccccccgatttcccggggcccgggaccctggccccggagggacccaggaggggggcccgtttccctttaacaaccccacccgtaaggggagtttcccaattttccctccccccgggccctttaaagcttaatgagcccctcccctttccctggcggaattgggccggcccggggggccccc

SEQ ID NO: 21654 - DNA, 416 bp, Oryza sativa
  Clone ID: PAT_MRT4530_26905C.1
ggaaacaaaaggttttttttttttaattccccactgccatccccaaatgggttgttcctcgtttaccctggtttacagggtcctttttgtttgctgggaacttgggatctactgggaacactttatttttttacgaagtacaaaaacccaattgttcgtcccaaacaacccgtacaaacccaaacttttgggttgcttagtttcccttaccttcccaattgccccttaagttttttcaaatgattttttgccctttttttgggcccctttcaatcccccggtttttaaacggacaattcctttttgggggaaaatttttttttttttttaaccccgcttgccttcccctttgaaaacgtggacggggggcccaccaccgggaaaaccccccccggcgagttcccgagctttttttt

SEQ ID NO: 21655 - DNA, 256 bp, Oryza sativa
  Clone ID: PAT_MRT4530_26906C.1
atgaagttaaacatgaaacgacccccgtacaaccgtacttctcgaatggacttctcttttccgggagcgctagaactcctctcactgctagaaacatggacgcctagagtgcatgaggatttaagttcatggagcgggtactgccaatgcgaggttatcaaaaggctttgccatggcgcgtctcatgtgttgggacgaggctcatgtgttgggcagtcgcagagtgcgggtaaagtgtacatccactacagtgtga

SEQ ID NO: 21656 - DNA, 1872 bp, Oryza sativa
  Clone ID: PAT_MRT4530_26907C.1
atggcgcgtatggcggcggcggcgacattgctgctcgccgtctccgggttggcgtcgggtctggtcgtcccggccgacgagcggtgtcactcaacggacaacgccgtgctcggcatcgacatcggcgcgacctactcctgtgtcgccgtgtactgcaagggccgcgtcgagatcatccccaacgaccagggcagccgcttgaccccatcctgggtcgccttcaccgacggcggcgggcggctcgtcgtcggcgaggccgcgaaggagcaggcggtgggtagccctgggcgcgccgtccatgacttcatgaggctcctcggaaagaagctcggcgacgacgatgtgcagcgggagatgacgcggctgccgtacgccgtcgtggacatggaggggaagccgcatgtcctggttgaggcggccgacggcgacgtgcgggtgctcagccccgaggagatcgccgccgccgtgctcgcgaagatgaagaagacggcggaggcgcacctcgggagaacggtctcgtctgccgtggtcgccgtcccggtctacttcaacgacgcgcagcgccgggctatcagcgacgccggcgacatcgccgggctcgacgtaatgcgcattgtcagtgagccgatcgccgccgccgtggcgtacggtctggacaacgtgaggagcaatggcaagcgcgtcgtggtgttcgacctcggcggcgagaatttggacgtcaccgcgctcgtggccgacgacggcttcttcgacgtcctcgccaccaacggcgacgggtacctcggcggcgagggcttcgaccagcgcgtcgtgaaccacttcgtcgacctcatcaagcggaagcacggccgggacatcaccggcgacggccgcgcgatgcacaggctgcgacgggaggcgcagttcgaggagctcaacgacgacctgttcgcgaggactatggcgccgttgaggaagaccatggcggacgccgggctggagaagggcgacatcaacgagatcatccacgtcggcggcagcaccaggatccccaaggtgcagcagctcatcagggactacttcgacgggaagaaggagatcgtcaaggtgaacaaccccgacgagaccgtcgcctacggcgccgccgtgataggaagacacgtcgccggagacgacgacgacaaaccaactatgttgggtccattagatctcccctcattcttgtcagacacaatcagcatcgagacggccggcggcgcagtgacgccgatgatcccgaggcggagccgcttgccggcggagaggacgcacgtcttcaccacgtacctgggcaggcagacggccgtggccatcaacgtgttccagggcgagggcagcacggcgaaggacaatacgctcttcggccggctcgtgctcaccggaatcccgccggcgagcgtatggaactgggggtggcggtggcggccgatccaggtgaccgtcaaggtggacgagctcggcgacatccacgtggaggcgacggacaagggcggctccggcaagtcggagaggctctccatcgtctccggtgaaggccacgagcacggccgcctaagcaaggaggagatcgaccggatgatccgcgaggtggcggaggatctcgtcgaggaggagaggatcgtgaaggagagagtcgacgccctgaacatgctggagacttacatagtcaagaacacggcggtgaccggcggcgagacggattgcgaggcgaaggcgagggcggcgagcgagtggctcgacggcaatccggccgccgagaaagaggactacgaggagaagctcaaggagttggaggacgcgtgtggccccgttcatggcggccgtgcacgagacatctggacttggccacgatga

SEQ ID NO: 21657 - DNA, 1146 bp, Oryza sativa
  Clone ID: PAT_MRT4530_26908C.1
cggacgcgtgggcggacgcgtgggcggacgcgtgggcagggggcaaggtatctcaggggaaacttcttgcagcaaactgcacacggtttggcttccatgtgctgccacattttctcactggctgcaagcagcttagctagcttgtactcactactcccctatctatatatacaggcaccaactcttgtaaggttcagagttcaggtccattccaaagttgcaatcaatctgtctcgattattgcctctctgctctgagtgtgactgtcaatctgtgagcttagctagtgactggccattgcacgagaaaagaacaggttgatcgatcattagtaggtgaagtgttcttgccctgttcttttcttggtttcttgggtaaaccaactggttgggttcggtgagtttgagaacttcagaaactgtaacaacaatgggaggcaccatggattacctgtctgatcttctcggcggcggcgggagcagcagccgtcggaggtacaagaagaggaagcagttccagacggtggagctcaaggtgaggatggactgcgacggctgcgagctcaaagtcaggaacgccctctccagcatgaaaggggtgcagtcggtggagataaacaggaagcagtacaaggtgacggtgcaggggttcgtggagccgcacaaggtggtgaagcgggtgcaggcgacggggaagaaggcggagatctggccctacgtgccctacaccctcgtcgcccacccctacgccgccccggcctacgacaagagggctccccccggccacgtccgccgcgtcgacgccgtcatgcccgtcgccagctacggctccgccgccgctgccgccgcgccggaggagcgcctcaccaccatgttcagcgacgagaaccccaacgcctgctccatcatgcactccaagagaaagaaccgcacagttcaggaagccatgcggcaaggaagatggatcagcgacatccgccacagcctcacgatcgcccttctcactgaattcttccacatttgggggttctagtcagagttcagatgaatgtacgaaatgtatgtgcagatatgaaagattgtactccctccatcccaaaatataaaaaaatttagaatttggatagttgtttagattcatagtatt

SEQ ID NO: 21658 - DNA, 349 bp, Oryza sativa
  unsure (1)..(349): unsure at all n locations
  Clone ID: PAT_MRT4530_26909C.1
ttcggcacgagacttntcnacanctncaaangcccatatcacacgcagcaaatccgcatcaacaagcgcagccagccatggcgtccacgctgaccaacgtcngnctgtctaccccggnggnggaggggtcgtccctcgttaggccggtcgccgganctggacgcgtggtgtttccccgtgttggccgcggcgggttcgcggnggtgagggcgagngggccggcnacnccgccggacatctcggacaagatntctgagancatccacaaggcgaangangcgtgcgcngatgannctgcgagcggcaagtgtccngcggcntgggacnangtggaagagctgagcgcggc

SEQ ID NO: 21659 - DNA, 3384 bp, Oryza sativa
  Clone ID: PAT_MRT4530_2690C.1
atggcgcccccaatcgccgggaacggacgcgccaactccggccaccttccatggccgccggccgccattcccgtcgccgttccgccctctcccatgcccggcttgcttccctccgctataaaatgggatcctcatcctccgttctatcgttttaaccccatcccgagcctccccgtgccggctgctgtccctcgtcagagcgtcggccgacgtcgccgtctccttcgtcgacaccgcggcatcgcctccttccccggcatcacctcctcctcgcccgaagctcgccagagtggcctcctcgtcggcgtccagtacctcccggtctccggtcggctcctgtacgtcgccggtacgccgatcgacgtcgccatctcctccgtcgacgtcgcagcgttgtcctcaccgccagctgctcctctgtttcgccggaacgccgtcgcccgcgccggcctctccttcctcctcgtcgacgtcgccttcggcagcctcctccgccgtgcctgtgcgccggccgacgtcgccatcttcccctccggcatcgcagcggcaagcggcgcgttccacggcatcctcgcctccgtgcagccactgccggctgccctcgtcgtctcctcgccagccccggtcgtcgtcgtcgtcgtcgtcctcccgtcgttcccggtcgtcgtggcgttcgtccctccgccaagccgatcgcgttcgccgcccgtggttcgtcaagcgagctgctgcagccccgtcgtcgtcttcgtcctcgcttccgcgtcgtcaagcctcgtgccggccgtgtctcgccttcgttcaaggatcgccgccgaagtcgttccctcgccgtccgcctccgccgcgccctctggttataaacaaaagtacacggatggagatggacgaagtcgggggtcgatggacatctctaggacaaatgaaggctacacgagctgcggcccggtagtcgagatgtcgtggcacagggccggtgtcctgctgctgggggctcagtcctgcctacctgtcccgggggttccggccgtaggtgggattgggtcgccgtccgacatgccgggggtccctagggaggtgattgagcacaaactcatggtgcgacccgatgccaaaccagtaaagcaaaaactgcagagatttgctctagaccgaaaacaagccatacgagaagagctcgacaaacttctcaaagctggctttatcagagaggtacttcatccaaagtggctagccaacccagtcatggtgcggaaggccaacgagaaatggagaatgtgcgtcgatttcaccgacctcaacaaggcgtgtcccaagcatcacttctctcttcctcgaatagatcaactagtggactcaacagccggttgtgagctgttgagtttcctcgacgcttactctagctaccaccaaatcagcatggcgaaagaggacgaagagaagacaacattcataacgccgttcggggtattttgctatgttaagatgccattcggactgataaccgcagggaatactttccagcgcacggtccagggcgcacttagtgaccagctcggcaataatgtcgaggcatacgtcgacgacatcgttgtcaagaccaaaacaagcgactcattgattgacgatctacgggaaacgttcgacaacctcagacgatatcgcctcatgctcaatccagaaaagtgcacgttcggagtaccatcgggcaaactgctcggtttcctcgtctctggcagaggaatagaagcaaatcccgagaagatcaaggcaatcgagaacatgaacgaagctctccatgacgcaaagacaagatatccacagatccaaaagctgctttacgcggtaatcatgacatcaaaaaaactacgccactactttcaagcccacagagtcacagctgtctcctccttccctcttggtaaagttgtgagaaacaaagacgttgtcggtcgcattgtgaaatgggtagtcgagctaagccagtttgatgtccactttgtgccacgaatagccatcaagtcccaggtactcgccgacttcgtagctgattggacaatgcctgataataaatcagataaccaaatcgacaacgaaacgtggataatggcgttcgatggtgcgctcaacagccaaggagcaggggcaggattcatcttgacatccccttccggagatcaattcaagcacgcaatccacctcaacttcagggcaaccaataacacagccgaatacgaaggactactcggcgggataagagctgcagccgcacttggggtcaagcggctgatcgtgaaaggggactccgagctagtcacgaaccaggtgcacaaatattataaatgctctaaccacaagttatctaagtatctcgcaaaagtcaggaagctggagaaaaggttcgatgggatcgaggtccgacacgtatactgcaaggacaacatcgagccagatgacctagcacgacccgcccccgacattagctcggaggccacagaggcagaacatgccgttgccgatatcgagaccacagatgactggcgcaccccactgatcaaattcatcaacagcgaagagttgcccgaggacgacgcagaggccgagaaaataacccgtaatgcaaaaatctactgcatgatcggcaacgatctatacaagaaagcgccaaacgggggcggctacaggttcatattcgtggcgatcgacaaattcactaaatggatcgaagcattacccacgggggaaatcaaggccgacaacgccatcaaattcatcaagaggatattttgcagatacggactaccgcaccgcatcataaccgacaacggctcccagttcatcagcgccgatttccaggattactgcatcgggctggaagtcaagatatgctttgcctcggtctctcaccctcaaagcaacggacaagtcgagagggcaaacggcattgtactacaagggatcaagacccgcgtctacgacaggctcatgcctccgaggaacctaagggatcttcggctggggacgcccagagccgataaagcctcgtcagatcctgtaaagacgaaagaccatataagacctggtcgtgtcaaaggtcgaagagccttatcctccgagaaaaatcctccgacgacaaggctgggggctagggagaggtacaaagactaccaggaaggccaataccagtccatagactggaagaccttctctgccaatggcgccatcgacttcgccaggctgcccacgctgctgtacatcctcgacatcaacatctctacaagggacaacaaagtactcaagatcaaaatgctaaggaaaactaaggtgttgactgcacacgcaaaggcggttggaaccaattggagtttcatacagcacgactaa

SEQ ID NO: 21660 - DNA, 436 bp, Oryza sativa
  Clone ID: PAT_MRT4530_26910C.1
agtgaaacgataaaattatctaatgaagttggagattgaatcgatgaaatcgctgagattaatcccttcggctgaattgaatccaagacgaaaaagacatgcttcacgaatccggcgatgccgaagattgattccatcgcactcgttgataggaaactcgacgcaacccctacctggcgcgccaactgtcgaaacatgaattcggcaataataaaagggggtagcgtacgagacctaaagtggatggatgcagagacaaaggatttagacaggttcaggccctctcaatgagaggtaagcgcgaacgtgctgctgccgctgaagcggaactttccaaagctcagctcctgctccgcgctttcgtggtcgccgtcgtcgtcgtcctcctcctcctcctcgtccgtggaagcgccgccgcgttgcgtgaacgactgga

SEQ ID NO: 21661 - DNA, 232 bp, Oryza sativa
  unsure (1)..(232): unsure at all n locations
  Clone ID: PAT_MRT4530_26911C.1
ctgcttcacactgttgctctcttccctctctgcacctgcaaccaccaccacaaccatataccagtacccattcgagggagggttgccttctctttccngtcggaaagcttagctttcctttttctttctttctttctttttcagatcccaagggttaaatttcaagcccgacacacaccagggaatttggaaccctggtgcctctttccccagggttttcttggtctngtct

SEQ ID NO: 21662 - DNA, 2451 bp, Oryza sativa
  Clone ID: PAT_MRT4530_26912C.1
atgactggcttcgtcttggagttgcgaggcatgtgcgtggccctggggtatccacacggagtggactaccaggccaggccgcttccagagcaggagggtgaggacgcggagccccacgctggttgggaggtcactgcagtgatcctcgctggctcttctgagcggacttcgctgacagtcaccgcgggtggcgactccttccccgccgcttgccagagcgccgctctcctcgccatcggcactcttcaccagcgctacccggacgagttgcagcactcgccctaccgctaccaccctcgtcgcggaggagcccgcgactacgccaccttccgggatgctagctcggaggatgacgctaccatcgtgcacctggcacgcatggtggaggcgtacgacgcggctcgtatcgacttccaccagatggtacgccgcgggatggtcgagaacaacatgaagatcctggagctgcgtcaggagaacctgcagctcaagaaggacctcgacgcagtggaggcgcagctgcatcagctcaaggtcgcccagggagagatctgccgccccaagcgtcgccgcgtctgccgcagccagaagatcaccgcccgcaagagcacctccaggcccgagcttgttcgtcagtccctggcgtggacttgcttcgtcgagacccctcgtgccgagcctgcgcccgtggttccccaggagggggaagcctccggcgttggtagctcggaggctccttctctgtttgctggttctgtgtggggttttcagatggtgacgaccaggagaaatgttagcaccggtgaaggcaaccaacccgaaggcagcgaccacaaccaccagggcaacccacctccacctcctcctccacctccacctccaccaccaccaccagacaccaacgccattctcacccaaatcctcgcccaacaagccaacatgatgactgctttcctccaccacctccaaaatccgccacaacagaatgctccaccaccacctccccaacactctaaactcgccgagttcctccgcatccgcccacctaccttctccagctccaacaaccccgtggatgctttggattggttgcatgccgtggggaaaaagctagacacggtgcagtgcagtgatgaggagaaagtcgtcttcgccgcccatcagctgcagggacccgcatctctctggtgggaccacttccaggctacgcagccagagggacagccgattacttggactcgcttcaccgccgctttccggagaacccatgtgcccgctggagtcgtggctcttaagaaaagggaattccgagagttgaagcaaggcaaccgctccgtgatggagtatttgcatgagttcaacaacctggcccgttacgctccggaggatgtgcgggaagatgaggagaagcaagagaagttcttggcaggaatggaccctgagctgtccgtccgtctagtctctggggactatccggattttcaacgactggtggacaagagcatccgcttggaagccaagcacaaggagctggaatcgcacaagcgccgcttggcgaatttccgcaatcaacagggtgctaaccagagggttcgctacaccaatccctatccagggggatcctcctcgcagcagcagcagcaacctcgcccagcgccccgacctcaattcgtggtgcgcgtcccacagccgcagcagcagcagaatcagcaagggactcgtgcgccccgtcctcctacgccagctgtgcagcccgttcaaggccgcagggacgctcaaggtcagcagcgtctgtgcttcaactgtttcgagcccgggcactttgcggataaatgcccgaagccaaggcgtcagcaaggccaagcgcctccccgctccaacaacggcgggaaggatgtcattcggggccgtgtgaatcacgtgacggccgaggacgtgctgacaactccagacgtcatcgttgttgtggatcgactaaccaaggtagctcgatttattcctgtgaagaccacctatggagggaacaagctagcggagctctacttcgccaggatctttcgccggcgtcttcaatggagccgagatctccgcggccggtttcctttctctccggccgccctctctctctcccgtcgctataaaatcgtcccccgtgcttcgctcttccgtttccgccgctcgccgctcgctctcgccgtcggattcgtgctcacgccgtgcacctctctctccgccgtcgccgtcgagctccggtccgccgccgtcgtcgctccggtcttcctcccgactcggcgtcacctccatccgcgtcgccgcgtcgtcgtcgaccccgtccgcatctccgtttcgcccgccgaccgtcggagcaccgtcgtcatcgtcatcccgaaccgcgccgccgccttcttccgcttcggccgccgttcccgtcgtcgccgtcgaccggggtga

SEQ ID NO: 21663 - DNA, 171 bp, Oryza sativa
  Clone ID: PAT_MRT4530_26913C.1
atggcgccggccggtgcgagcccgggtgcgcccgatccaccgtggaccgtgaggctgccgcgtgggccccacgcccgtggacccgacgttgcagctttggaagatccgctcttcgtggaggttgaagccgacgtttgggaaagtgagcaaggcaagtcacatcatccttga

SEQ ID NO: 21664 - DNA, 199 bp, Oryza sativa
  Clone ID: PAT_MRT4530_26914C.1
gcgtgggtgatctctgtgagcaccgtgacctcatggagtggtgattgtgtttgtgacgtgtgatgctgatgactgtctgatgtctgagcgcacaccccctatgactgatgtgatggggtgaaaagacgtgtctgatgtctgttgtgcacatgtctatgtctgatgacacgtaccatactaaaaaaaaaaaaaaaaaaaa

SEQ ID NO: 21665 - DNA, 1929 bp, Oryza sativa
  Clone ID: PAT_MRT4530_26915C.1
atgactggcttcgtcttggagctgcggggcatgtgcgtggtcttggggtatccacatggagtggattaccaggccaggccgctcccggagcaggagggtgaggatgcagagcctcacgctggttgggaggtcactgcagtgatcctctccggctctcccgagcggacttcgctggcagtcaccgcgggtggggactccttccccgccgcttgccagaacgccgctctcctcgccatcggcacccttcaccagcgctacccggacgagttgcagcactcgccctaccgctaccaccctcgtcgcggaggagcccgcgacttcgccaccttccgagacgccagctcggaggatgacgctaccgtcgtgcacctggcacgcatggtggaggcatacgacgcagctcgtatcgacttccatcagatggtgcgtcgtggcatggtggagaacaacatgaagatcctggagctgcgtcaggagaacctgcagctcaagaaggacctcgacgcgttggaggcgcagctgcaccagctcaagatcgcccagggagaggtcagccgtcccaagcgtcgccgcgtctgccgcagccagaagatcaccgcccgcaagagcacctccaggccagagcttgtccgtcagtccctggcgtggacctgcttcgtcgagacccctcgtgccgagcctgcgcccgtggttccccaggagggggaagcctccggcgttggtagctcggagggtgcgctgttgctcaccttccgtcctggcccgtcgcagcggagaaatgttaacaccggtgaaggcaaccaacccgagggcagcaaccccaacccccaaggcaacccacctccaccaccaccaccagacaccaacgccattctcacccagatcctcgcccaacaagccaacatgatgaatgctttcctccaccacctccaaaacccgccacaacagaatgctccaccaccccctccccaacactccaaactcgccgagttcctccgcatccgcccacctaccttctctagctccaacaaccctgtggatgctttggattggttgcatgccgtggggaagaagctagacacggtgcagtgcagtgatgaggagaaagtcgtcttcgccgcccatcagctgcagggacccgcatctctctggtgggaccacttccaggctacgcagccagagggacagccgattacttgggcccgcttcaccgccgccttccggagaacccatgccccggaggatgtgcgggaagatgaggagaagcaggagaagttcttggcaggaatggaccctgagctgtctgttcgtctagtctctggggactatcctgattttcaacgactggtggacaagagcatccgcttggaggccaagcacaaggaactggaatcgcacaagcgccgcttggcgaacttccgcaatcagcagggtgctaaccagagggtccgctacaccaatccctatccagggggatcctcctcgcagcagcagcagcagcagcaacctcgcccagcgccccgacctcaattcgtggtgcgcgtcccacagccgcagcagcagcagaatcagcaagggactcgtgcgccccgtcctcctacgccaactgtgcagcccgttcaaggccgcagggacgctcaaggtcagcagcgtctgtgcttcaactgtttcgagcccgggcactttgcggataaatgcccgaagccaaggcgtcagcaaggccaagcgcctccccgctccaacaacggcgggaaggatgtcatccgtggtcgtgtgaatcacgtgacggccgaggacgtgctgacaactccagacgtcatcgttgagaagaaagacaagacgaagaggatgtgcgttgatgtcacgaccggaaataacccaacgggcattccttacgtgcgtgcattaatccttgtcccaggaggcaag

SEQ ID NO: 21666 - DNA, 2427 bp, Oryza sativa
  Clone ID: PAT_MRT4530_26916C.1
atggccggcagcgttacccgtcgtggtttgcacatgactggcttcgtcttggagctgcgaggcatgtgcgtggtcttggggtatccacatggagtggattaccaggccaggccgcttccggatcaggagggtgaggatgcagagcctcacgctggttgggaggtcactgcagtgatcctctccggctctcccgagcggacttcactggcagtcaccgcgggtggggattccttccccgccgcttgccagaacgccgctctcctcgccatcggcacccttcaccagcgctacccggacgagttgcagcactcgccctaccgctaccaccctcgtcgcggaggagcccgcgactacgccaccttccgggacgccagctcggaggatgacgctaccgtcgtgcatctggcacgcatggtggaggcgtacgacgcggctcgtatcgacttccatcagatggtgcgtcgtggcatggtggagaacaacatgaagatcctggagctgcgtcaggagaacctgcagctcaagaaggacctcgacgcgttggaggcgcagctgcatcagctcaagatcgcccagggagagatctgccgccccaagcgtcgccgcgtctgccgcagccagaagatcaccgcccgcaagagcacctccaggcctgagcttgtccgtcagtccctggcgtggacttgcttcgtcgagacccctcgtgccgagcctgcgcccgtggttccccaggagggggaagcctccggcgttggtagctcggagggtgcgctgttgctcaccttccgccctggcccgtcgcagcggagaaatgttaacaccggtgaaggcaaccaacccgaaggcagcaaccccaacccccaaggcaatccacctccaccaccaccaccagacaccaacgccattctcacccaaatcctcgcccagcaagccaacatgatgaatgctttcctccaccacctccaaaacccgccacaacagaatgctccaccaccacctccccaacactccaaactcgccgaattcctccgcatccgcccacccaccttctctagctccaacaatccagtagatgcgttggattggttgcatgccgtggggaagaagctggacactgtgcagtgcagtgatgaagagaaagtcatcttcgccgcccatcagctgcagggacccgcatctctatggtgggaccatttccaggccacgcagccagagggacagcctattacttgggcccgcttcaccgccgctttccggagaacccatgtgcccgctggagtcgtggctcttaagaaaagggaattccgagagttgaagcaaggcaaccgctccgtgatggagtatttgcatgagttcaacaatctagcccgttatgccccggaggatgtgcgggaagatgaggagaagcaagagaagttcttggcaggaatggaccctgagctgtccgttcgtctagtctctggggactatcctgattttcaacgactggtggacaagagcatccgcttggaagccaagcacaaggagctggaatcgcacaagcgccgcttggcgaatttccgcaatcagcagggtgctaaccagagggtccgctacaccaatccctacccagggggatcctcctcgcagcagcagcaacagcagcagaatcagcaagggactcgtgcgccacgtcctcctacgccaactgtgcagcccgttcaaggccgcagggacgcttcaggtccgcagcggctgtgcttcaactgcttcgagcccgggcactttgcggataaatgcccgaagccaaggcgtcagcaaggccaagcgcctccccgctccaacaacggtggcaaggacgtcattcggggtcgtgtgaatcacgtgacggccgaggacgtgctgacaactccagacgtcatcgttgctccgcccttccgtttccgccgctcaccgctcgctctcgccgtcggaatcgtgctcgcaccgtgctcctctctctccgccgtcgccgccgagctccgttccgtcgccgccgtgcttcggttagccgccgccgccgctccgctcttcctcccgactcggcgacacctccctcggcatcgccgcatcgccgtcgaccccgtccgcgcctccacttcgcccgccgaccgccggagcaccgtcgtcatcgtcttcccgaaccgcgccgccgccttcttccgcttcggccgccattctcgtcgtcgtcgttgtcccggggtgagccgaagaccgccgttcgccttccccctttcctcctctttctcgggtgccactccgccgcgccgttggtcgccggcggcgaccatcggggcgcgggtgcgcgccgttcccgtcggccgcgccggcgaggccgccctcgggcgcgccctcgcggctaccaagtgggcccggcagtcagccgcccgcgcccgcgggttcggctga

SEQ ID NO: 21667 - DNA, 2013 bp, Oryza sativa
  Clone ID: PAT_MRT4530_26917C.1
atgactggcttcgttttggagctgcggggcatgtgcgtggtcttgggatatccacatggagtggactaccaggccaggccgctcccggagcaggagggtgaggatgcagagcctcacgctggttgggaggtcaccgcagtgatcctctccggctctcccgagcggacttcgctggcagtcaccgcgggtggagattcctttcccgccgcttgccagaacgccgctctcctcgccatcggcacccttcaccagcgctacccggacgagttgcagcactcgccctatcgctaccaccctcgtcgcggagaagcccgtgacttcgccaccttccgagatgctagctcggaggatgacgctaccgtcgtgcatctggcacgcatggtggaggcatacgacgcggctcgtatcgacttccatcagatggtgcgtcgtggcatggtggagaacaacatgaagattctggagctgcggcaggagaacctgcagctcaagaaggacctcgacgcgttggaggcgcagctgcaccagctcaagatcgcccaaggagaggacagccgccccaagcgccgccgcgtctgccgcagccagaagatcaccgcccgcaagagcacctccagacccgagcttgttcgtcagtccctggcgtggacttgcttcgtcgagacccctcgcgccgagcccgcgcccgtggttccccaggagggggaagcctccggcgttggtagcacggaggatgcgctgttgctcgccttccgtcctggcccgtcgcagcggagaaatgttagcaccggtgaaggcaaccaacccgaaggcagcaaccccaacccccaaggcaatccacctccaccaccaccaccagacaccaacgccattctcacccaaatcctcgcccagcaggccaacatgatgactgctttcctccaccacctccaaaatccgccacagcagaatgctccaccaccacctccacaacactctaaactcgccgagttcctccgtatccgcccacctaccttctctagctccaacaaccctgtggatgcgttggattggttgcatgccgtggggaagaagctggacactgtgcagtgcagtgatgaagagaaagtcatcttcgccgcccaccagctgcaagggccagcatctctctggtgggaccacttccaggctacgcagccagaggggcaacctatcacttgggctcgctttaccgccgctttccggagaacccatgtgcccgccggagtcgtggctcttaagaagagggagttccgggagttgaagcaaggcaaccgctccgtgatggagtatttgcatgagttcaacaatctggcccgttacgctccggaggatgtgcgggaagatgaggagaagcaggagaagttcctggcaggaatggaccctgagctgtccgttcgtctagtctctggggactacccggacttccaacgtctggtggacaagagcatccgcttggaagccaagcacaaggagctggagtcgcacaagcgccgcttggcgaacttccgcaatcagcagggtgctaaccaaagggtccgctacaccaatccctatccagggggatcctcctcgcagcagcaacaacagcagcagcaatctcgctccgcgcctcgacctcaattcgtggtgcgcgtcccacagccgcagcagcagcagaatcaacaagggactcgtgcgccccgtcctcctacgccaactgtgcagcccgttcaaagccgcagggacgctcaaggtcagcagcgtctgtgcttcaactgcttcgagcccgggcactttgcggataaatgcccgaagccaaggcgtcagcaaggccaagcgcctccccgctccaacaacggtgggaaggacgtcattcggggtcgtgtgaaccacgtgacggccgaggacgtgctgacaactccggacgtcatcgttgtcagaagaagaccatcagcaccatctccgtctggtgttgggaaagttgcgggaacatcaattgtatgccaagcttag

SEQ ID NO: 21668 - DNA, 244 bp, Oryza sativa
  Clone ID: PAT_MRT4530_26918C.1
acacaaacgcaatgacctggcacggcatggtgccatggtctgatgaaggcagaaagaacaagaaaccaaaattccacaaaggcgacaacacgcatgggcggctatccaagattcctgcagtgctgccgtggtcgacccgattaaacatcgcggttggcgccgcgaagggtttggcgttcctccacacgcagagaagccggtcatctaccgtgacttcaaggcctccaacatcctgctcgattcg

SEQ ID NO: 21669 - DNA, 933 bp, Oryza sativa
  Clone ID: PAT_MRT4530_26919C.1
atggctcttaagaaaagggaattccgggagttgaagcaaggcaaccgctccgtgatggagtatttgcatgagttcaacaacctggcccgttacgccccagaggatgtgcgggaagatgaggagaagcaggagaagttcttggcaggaatggaccctgagctgtctgttcgtctagtctctggggactacccggactttcaacggctggtggacaagagcatccgcttggaagccaagcacaaggagctggaatcgcacaagcgccgcttggcaaacttccgcaatcaacagggtgctaaccagagggtccgctacaccaatccctatccagggggatcctcctcgcagcagcagcaacagcagcagcaacctcgcccagcgccccgacctcaattcgtggtgcgcgtcccaccgccgcagcagcagcagaatcagcaagggactcgtgcaccccgtcctcctacgccaactgtgcagcccgttcaaggccgcagggacgctcaaggtcagcagcgtctgtgcttcaactgtttcgagcccgggcactttgcggacaaatgcccgaagccaaggcgtcagcaaggccaagcgcctccccgctccaacaacggtggcaaggatgtcatccgtggtcgagtgaatcacgtgacggccgaggacgtgctgacaactccagacgtcatcgttggagttgctgtggaccccgaaacagtaaccgccgtcaccgaatggaagcaacccaagacagttactcagattcgcagtttcttaggtttggcaggatactaccgaagcgtgtcaaggcagaacaccaacgaccggctggacttctccagcctctccaagtgccggaatggaaatgggatgaaattgggatggatttcatcaccggccttccaaaaacccaaggtggatatgactctatatgggtaa

SEQ ID NO: 21670 - DNA, 315 bp, Oryza sativa
  Clone ID: PAT_MRT4530_2691C.1
atggggggaggaagcggcggtgctgcggcgttgactcgcagggggaggagcggcggcaccggcgcggtgaggggaggggtcagaggcgcggtgaggggagggagtggcggcgctgggagaggaacggtggcgtcggttcgccgagggagcaggggtgacggcggtggcaacgccgacgcacgagaggatgatatagcggcgtcggctggtggagggagcaccagcggcagcggaggtgttagacctctaataattctactagatcacaagttgagaagagagtacagtgatctaggaggcgtgttcgacctttaa

SEQ ID NO: 21671 - DNA, 306 bp, Oryza sativa
  Clone ID: PAT_MRT4530_26920C.1
atgactttctcctcattgttgcaccgcacggtgtctaactttttccccacggcatgcaaccaatccaacgcatccacggggttattggagctagagaaggaaagcggccatcatgttggcctgctgggcgaggatttgggtgaggatggagttggtgtctggtggtggtggtggaggcaggggaggaggtggaggtggcctgccatggttgttgtgattgctgccttcggggtgactgccttcaccggtagcagcacttctcctggttgtcaccatctgaaaatcccacacaggaccggcaaatag

SEQ ID NO: 21672 - DNA, 1959 bp, Oryza sativa
  Clone ID: PAT_MRT4530_26921C.1
atgactggcttcgtcttggagctgcgaggcatgtgcgtggtcttggggtatccacatggagtggattaccaggccaggccactcccggagcaggagggtgaggatgcagagcctcacgctggttgggaggtcactgcagtgatcctctccggctctcccgagcggacttcgctggcagtcaccgcgggtggggattccttccccgccgcttgccagaacgccgctctcctcgccatcggcacccttcaccagcgctacccggacgagttgcagcactcgccctaccgctaccaccctcgtcgcggaggagcttgcgactacgccaccttccgagacgccagctcggaggatgacgctaccgtcgtgcatctggcacgcatggtggaggcgtacgacgcggctcgtatcgacttccatcagatggtgcgccgtggcatggtggagaacaacctgaagatcctggagctgcgacaggagaatctgcagctcaagaaggacctcgacgcgttggaggcgcagctgcaccagctcaagatcgcccagggagagatcagccgtcccaagcgtcgccgcgtctgccgcagccagaagatcaccgcccgtaagagcacctccaggcccgagcttgttcgtcagtccctggcgtggacttgcttcgtcgagacccctcgcgccgagcctgcgcccgtggttccccaggagggggaagcctccggcgttggtagctcggagggtgcgctgttgctcaccttccgtcctggcccgtcgcagcggagaaatgttaacaccggtgaaggcaaccaacccgagggcagcaaccccaacccccaaggcaacccaccttcaccaccaccaccagacaccaatgccattctcacccagatcctcgcccagcaagccaacatgatgaatgctttcctccaccacctccaaaacccgccacaacagaatgctccaccaccccctccccaacactccaaactcgccgaattcctccgcatccgcccacctaccttctccagctccaacaaccccgtggatgctttggattggttgcatgccgtggggaagaagctggacacggtgcagtgcagcgacgaagagaaagtcatcttcgccgcccaccagctgcaggggcccgcatctctctggtgggaccatttccaggccacgcagccagaagggcaaccgattacttgggctcgcttcaccgccgctttccggagaacccatgtgcccgctggagtcgtggctcttaagaaaagggaatttcgggagttgaagcaaggcaaccgctccgtgatggagtatttgcatgagttcaacaatctagcccgttatgccccggaggatgtgcgggaagatgaggagaagcaggagaagttcttggcgggaatggaccctgagctgtccgttcgtctagtctctggggactatccggattttcaacgactggtggacaagagcatccgcttggaagccaagcacaaggagctggaatcgcacaagcgccgcttggcgaatttccgcaatcaacagggtgctaaccagagggttcgctacaccaatccctacccagggggatcctcctcgcagcagcaacaacagcagcagcaacctcgcccagcgccccgacctcagttcgtggtgcgcgtcccacagccgcagcagcagcagaatcagcaagggactcgtgcgccccgtcctcctacgccagctgtgccgcctgttcaaggccgcagggacgctcaaggtcagcagcgtctgtgcttcaactgcttcgagcccgggcactttgcggataaatgcccaaagccaaggcgtcagcaaggccaagcgcctccccgctccaacaacggtggcaaggacgtcatccgtggtcgtgtgaatcacgtgacggccgaggacgtgctgacaactcccgacgtcatcgttgaagttcagaactgcatcagatag

SEQ ID NO: 21673 - DNA, 939 bp, Oryza sativa
  Clone ID: PAT_MRT4530_26922C.1
atggtgataaccaggagaactgctgctaccggtgatggcaaccaacccgaaggtagcaacaccaacatccaaggcggcccacctccacctcctcccccgccaccaccaccaccaccagacaccaaccccatcctcactcaaatcctcgcccagcaggccaacatgatggctgctttcctccaccacatccaaaatccaccacagcataatgctccacctccaccaccacccccgcagcattctaagctcgccgagttccttcacatccgcccgcctaccttctccagctccaataaccccgtggatgccttggattgcttgcatgccgtggggaagaagttagacaccgtgcagtgcaacgatgaggagaaagtcatctttgccacccaccagctgcaggggcccgcatctctttggtgggaccacttccaggctacacagcccgaggggcagcctattacctgggcccgcttcaccgccgctttccggaggacccatgtgcccgccggagtcatggcccttaagaaaagggaattccgggagttgaagcaaggcaaccgctctgtgatggagtatttgcatgagtttaacaacctggcccggtacgccccagaggatgttcgggaagatgaggaaaagcaggagaagttcttggcaggaatggaccctgagctatctgtgcgtctggtctccgtggattatccggatttccagcgtctggtggacaagagcatccgcttggaagccaagcacaaggaactggagtcgcacaagcgtcgcttggtgaatttccgcaatcaacagggggctaaccaaagggtctgctacaccaatccctatccaggtggatcctcctcgctgcagcagcagcaacctcgctccgcgccccgaccccaattcgtggtgcgcgtcccacagccgcagcaacagcagagttag

SEQ ID NO: 21674 - DNA, 933 bp, Oryza sativa
  Clone ID: PAT_MRT4530_26923C.1
atggaccacgaaaggcaagcaaaccttctccgcgttggaacctcttcctcctcccccaagttgaactccccgagcacgtccgcgatttcgctggagttgctgggccatcggctgcacatttctcaggatcctaactcgaagcacctcggaaccacggtctgggatgcatccatggtgttcgtcaagttcttggaaaagaatagcagaaaaggtagattttctccatctaaactgaaaggaaaaagggtgattgagctaggagctggttgtggtctagctgggcttgaccaagttgaggtgctcccgctgcttttgaggaatgttgaacgcaacaaatcttggatttcacagtcaaactctgactcaggctccatcggctctgtcaccgttgcagaattggactggggtaacaaagatcatataagagctgttgatcctccattcgattacatcattggaactgatgttgtttattcagaacatctgttgcaacctctaatggagacaatcattgcattatctggtcctaaaacaaaaataatggtaattgctttcaccaccattcaaacagttctgtttttgttattgacaatatatgagatgatgcaaatgtggaaaagcaattttaatgtgaaaaccgtctcgaaatcgaagatggatgtgaaataccaacatcctagtattcatctttacataatggaccccaaagcgacattgatccctgaggtcagcgataacggcaacaacgaggaggaggaggttgtctccaatccaggagatgatgaagatcctggagctgagagtggtggaccttgtactggctcagtggattcagcagaagccaaaactgcaggctacttggacgacgactgggaaatcagaagatgcggggctatggctgcaagacttcttaaggatgtcaaacttgcatga

SEQ ID NO: 21675 - DNA, 1203 bp, Oryza sativa
  Clone ID: PAT_MRT4530_26924C.1
atggtgacgaccaggagaaatgttaacaccggtgaaggcaaccaacccgaaggcagcaaccccaacccccaaggcaacccacctccaccaccaccaccagacaccaacgccattctcacccagatcctcgcccagcaagccaacatgatgaatgctttcctccaccacctccaaaatccaccacaacagaatgctccaccaccacctccccaacactccaaactcgccgagtttctccgcatccgcccacccaccttctctagctccaacaatcccgtagatgcgttggattggttgcatgccgtggggaagaagctagacacggtgcagtgcagtgacgaggagaaagtcgtcttcgccgcccatcagttgcagggacccgcatctctatggtgggaccatttccaggctgcgcagccagaggggcagccgattacttgggcccgcttcaccgccgctttccggagaacccatgtgcccgctggagtcgtggctcttaagaaaagggaattccgggagttgaagcaaggcaaccgctccgtgatggagtatttgcatgagttcaacaatctagcccgttacgctccggaggatgtgcgggaagatgaggagaaacaagagaagttcctggcaggaatggaccccgagctgtccgttcgtctagtctctggggactacccggacttccaacgactggtggacaagagcatccgcttggaagccaagcacaaggagctggaatcgcacaagcgccgcttggcgaatttccgcaatcaacagggtgctaaccagagggttcgctacaccaatccctacccagggggatcctcctcgcagcagcaacaacagcagcagcaacctcgcccagcgccccgacctcagttcgtggtgcgcgtcccacagccgcagcagcagcagaatcagcaagggactcgtgcgccccgtcctcctacgccagctgtgccgcctgttcaaggccgcagggacgctcaaggtcagcagcgtctgtgcttcaactgtttcgagcccgggcactttgcggataaatgcccaaagccaaggcgtcagcaaggccaagcgcctccccgctccaacaacggtggcaaggacgtcatccgtggtcgtgtgaatcacgtgacggccgaggacgtgctgacaactcccgacgtcatcgttgtggttgggctcaatttcaaggagtag

SEQ ID NO: 21676 - DNA, 802 bp, Oryza sativa
  unsure (1)..(802): unsure at all n locations
  Clone ID: PAT_MRT4530_26925C.1
ggcaaaaaagttttaaagacatttatcttttttgggtctcacaaaaacttggataagactttcggggctttataaccaattttgcataaacccttcccttcttaataaattttggccggctcagctatagaaccaattttgccaaaaggaaaatcggtttcattacaacaaaagatcaagacaacgtcgcagcgggcctgggcctgcggtgtagccgccaggcaatgcttcgccatggaagaacgacgcttggttgcagaaccaccactacaggggtttcgtacaatatcacagcgcccccgtctcaagaaatggggtatagtaataatatggagaacaaggacgggctacaagaatgaacaagtttatataaacttacacttatcattgtcatctgtcagcacctgaaacaagcacggtcccgctgggtacgtctgaataacagcattctctttggactcaaatattcaatgttgctagaccacataaaatctccacaatgaagatcagatacaatatatgccctctcgaagtactaatctagaattagatccttctgtttccaaaagttcccttgtaatactggaggatctttggcccattctgcagtagatgcttcagtgagttgcatagactgtgtcatttcgtcttggaggtctatcaggaactgagcctggcttaaatttggatgcttcatgccttgcaagttcaggtggcacaggactgttgctctgtataagcatctgtttcagatcaannagaacaatgtccagtgttntnccagaagttaaaaacgnnnaag

SEQ ID NO: 21677 - DNA, 275 bp, Oryza sativa
  Clone ID: PAT_MRT4530_26926C.1
cgatcgatcggtttgtcgatcgatttttttccgcttggaattaattcagcaagctgggccgcttaattatattatttcgcatgtgagatataaaatggctgtttgtcgatggatatgcatgttaaatcagatgtgttcttcgtttgcgatcattaatatatactatcaagttagagtgaaaaaaataaaataaaaaaaaaaaaaaaaaaaaaaaaaaataaaaaaaaaaataaataaaataaaataaaaaaaattaataattttaataaaattaa

SEQ ID NO: 21678 - DNA, 426 bp, Oryza sativa
  Clone ID: PAT_MRT4530_26927C.1
atggatgacagtggcggtgccgagcggcggatctctccgtcacaactccggaccaccacgagcccctctccgtcgcctccctctccctctcttgaagacggctgggtgtcgaagccgcggatgacggcagcgcgggaggctcctctccctcttaatcgtctcactcttctgctccggatcaacctcgagctgctctccctcgaccacctctcggggattggcccggtgataggccgcaaatcgccgtcggtggtagactgcggtggcagggagttcagacttcagacgacgacttcagacgacttgcgagtgcgtggctggcacgagtcctggtcgacgcttgacgtcaagaaatctcgcttgtggaattgtggtgctctcgacataggccctcaccctgttgatgcgcgtcggcttgtccgctaa

SEQ ID NO: 21679 - DNA, 753 bp, Oryza sativa
  Clone ID: PAT_MRT4530_26928C.1
atgtggattgtgtcatgtggcctggtcagtggcaaagcaaggccgagcagggcggttgccgtggggcggtgggtgtgtgttgtcgacgagctttggtggccgaatgactttggaaataggagaaaaattaaggacaaacactttggcccttttgactccgacgacggcgatttcggcggcgaaggaaatggaagagaatgtgtgcgctgccgctaccaagaagggggagagaaagagcagctcgaggttgatctggagccggcgagggaggtgacggagagggagaggagcctcccgagatccgtcgctcggcgccaccgtcgtccgtggctccatgccgctgctaccgagaggtggtcgagggagagcagctcgaggttgatccggagcagaagagtgagacgattaagagggagaggagcctcccgcgctgccgtcatccgcggcttcgacacccagccgtcttcaagagagggagagggaggcgacggagaggggctcgtggtggtccggagttgtgacggagagatccgccgctcggcaccgccactgtcatccatcgtgcagctcgacgccaatgtagctccgctcatggctgccgacgacgagatctgcctcttcctcgctgagatccttgcactagcactcaggtcattgctgtcatgggccgccaccctcttctgtccaaactcccaggccgccgctgcacctagggccgttgctgcatacggaaccacctccgttggatcttag

SEQ ID NO: 21680 - DNA, 203 bp, Oryza sativa
  unsure (1)..(203): unsure at all n locations
  Clone ID: PAT_MRT4530_26929C.1
anatattacttgnatgtaattacaaaattgttgttaagagggagaaatttcacaggatttgatagctttcacctgaaaatcaggtaggggtacatgccaacattttcagcctttctggtgtgtaaaccccacgtttaacactaaaacaccatgtaattaattaggctttccaaattagcgagaaacaacatatgctttcccag

SEQ ID NO: 21681 - DNA, 3431 bp, Oryza sativa
  unsure (1)..(3431): unsure at all n locations
  Clone ID: PAT_MRT4530_2692C.1
gacgagggaactagtctctagttttttgcattttttttttaattgtaaagaactcaatataaattagctacatataaggatgatacagataatgctgtcaaacaatgaatcaaatgtcatcctccacattgccacaacattacaagtaaacgaaaagcatcactagttttttccctactagacgatttctgttaaccaggttaacaagcaagaaatcacaagctgcagttaacctgtcacaagatttaccctcatattcccccatattgcaccgatgcacttctgccacgccgatgcttcctacttagccttgggataagtattcaaatggaaagaacatggcaggtcagctatgaacataagaatcttcgtagcagcgactggtagtaaatgccgccgtaacaaaacgcataatgaggctatttgggagctactcaaactgtaatctctttccggacttcagaatatttgcagctacatgttttaatcccttaccctcatcttcaccaaaatgaatcatgaacccaagaattcgacttccttgccctgtagcatctttaatcttgcagtgtttcatcttgcttaacactccctcactcagttccaacagaactttttcggcgagaaaagcaacgcagaaacaccagactaagatccttctgtccttaaattactaaaagataccactctgtcacttatttctattgatgagactgatgtggccaagtcatcttccaagtctgccataaggtctggttctgaagcatccgccagtgaactcaacatggtgacgacttcaaatgtatcatccaggtaaaacctagctttgcttggcttctggcccacagtacatgcaaacagtggagtttttggtgcaacaatgctccttttcatgacatcggcaatattttcaaacatatcctcatctgacctgtcatcaccaatgcataatacaaaatctgccagttgccccttctccttcattgatgtgagtactttctcagctatgagccctttggtaacaccctgaggtttgacttcaacaatgaattggccactcttgactgagactggttcatttgctaatacactttccaagtgatcaagcatttcctttgcctgggaagagccaaaaccttggtcagcatcctgatggtgccacaccagtgcagtttctttagtctcaatggtggatccgtcagttgattcagtataaagatccatcactggcttcgccatttgcatccatccaaaatctgaggtctgtgcagtggtttgccattcttcatctctagtccaccttaagaagtagccatgctctgcggcaatgcctagctttggacatgagataagctttttgctcaagtcatccttgcttctcccgctgacaatgaacacggtgttatttctatctgcgcatagggtattaatgatcctcagtaattcttcacttggattcttgttgagcgaagcctgtggcaccaatgtgccatcatagtcgagaaatatagccctactctttgatctctcataggacattataattgaatcgaaattaagctttgtgaaatgtgggtctagggctaccaccctgaagccaaatcccaatccaatgccccagcatggtttcctaaagtgatccttgcaagccctctccaggtcctgtacaaagctcttagaccaatatgcaacatcatgggtgctgacataacggtaatgtttttcgtgcctcagctgcttttcacgctctgacattgagatggcctcattcagtgcctctgcagttgcctcgatattccacgggttaacacgaatggctccactcagtgaaggtgagcaaccaataaactccgacacaaccaacatgctcttctttggtccactcacctctggtgcacactcagagccaggtatcccctcccggcagacaatgtattcatatggggtcaaattcatcccatccctcacagccgtcaccacaacacactcagcaaccgtataatatgcaagcctcaccgcacttggcacgctctggtcaatgaaaatcactggactgtaacctgactggccaaactccttgttaattctatcacaactctcccgaatctcagcctggacagcctccagatcctttcccttccctcgtgctgggtttgcaatctgcaccaacacagctcttcccttccacttgggatgcgtcctcagcatattctcaaacgcaagaagttttaagttgattcccttgaagatatccatatcatccacaccaagtaacacggacttgccctcgaattgctgccgcagctcagcaaccttcttttctttctcggacaatcgcaacactgattgcaattgacccatatggattcccactggcatgatcttgattccaacagtgcggccaaagtaatccaatccaatgtatccacgctttgactggtactctatccccagcatcctactacagcaagataggaagtgcctcgcataatcgaatgtgtggaatccaatgagatcgcaattaagcagcgttcttaggatctcctctcggacgggcagcgagcggtagatctccgatgagggaaaggggctgtggaggaagaacccgatgcggaggcgattgaagcggcggcggaggaaggtgggcagcgccatgaggtggtaatcgtggacccaaacgtagtcgtcctccgggttgatgacctcgaccaccttctcgaagaagtatttgttggcgagcacgtaggcctcccacgcgccgcggtcaaaccggccatcgccggatgcggccgccggcaaggcggaggcgaaggggagcatgtagtggaacagcggccataggtaacccttgcagaagtgctggtagaatcggtcgtagagccccgcggggaggaacacgggtgcgcatccgaatccatcgatgaggctctgcgacacctcgtcctgctcgcaggcgggcacgtcggcgcggagcgtgccgatgaagagcacctccatctcgtcggggacgccgtcgcggaggcggaggaggagcgagtcgtcgtcccacgagaacgcccacccccccgccgcggcgcccggcctccgccgcgccaccacggggagctggttcgccacgacgatgaggcgctcgcacgccgccgacgagggcacgtcggaggcgacgctgctcgtcgccgccggctcgtcgtcctcgtcgtccagctccgacagcgtcccgggcaccgtcatcacccgcgtcatccgcttcgccccgaacgacctcctcctccctccccccgccggccccagcgcctcgaagttccccgccgcgaggtccagcaggttcgtgtacgacctcgacatcatggctgaaaccctagccctctctcccgatccaaaccctagctctcctcctccggangcgtgggcggacgcgtnggtcgaacttc

SEQ ID NO: 21682 - DNA, 378 bp, Oryza sativa
  Clone ID: PAT_MRT4530_26930C.1
atggccactttcttggcatctggcatgcgacaaagcaccgcatcgcaggcgcagcatcctttgggttctctcctacgcctccccctcgcacatgctgccctggcgctctccccgcacggagcacagacacacaatgcgcatcgaggccaaaacccggtgtgctgcgtcgaagcaaccgggccgttcggctcccgcgcgctcgcggaaggagcgggacacgcgcgggcgacaacaacggcgagctgggcaaaaggacccgcgtggcgccgtgggcagtgtcgcgtagcccagggcatggacgtggcgcaaaacggcacgctctggagacccatgctgctcaccgacgtttgcctgctccacagtgctgtagttttgtga

SEQ ID NO: 21683 - DNA, 1045 bp, Oryza sativa
  Clone ID: PAT_MRT4530_26931C.1
ccggccgggacccaccacttcttatcaacctacccatccttatcctctcattcctcctcctccctcctccctcctccctccagatccaccagatccaacaaatagcaccctctcctcctccctccctcggtggcggctctaacggtggttctggtcctcgggtggcggcgcgcggcggctccagcagctgtgtgtggcggcgatggcgacggaaggagagtgcgcagcggcgacaatagcaatgcatgcggcggtgatggcgacgaaaggcgagcatcggttctcgggcggtgacgcgcagtccctttgcctccctcctcttgccgcctctttccctcctcccttctctctccaccgccaccagcctcccttccctctccaccgctgtgtgggggaagagggcagtggcacggggaaggaggtgtggcagcggcgtggcgtatggcgcggcggaggttcttgacagcaagcgggcggcgccggagctgaggacaggcaactacgacgacgacaaccacgaacgcggcggcgacgacgacgacaacgacgctaccggccgggagcgtggatccgccatcgactatcctcaggagcatggctctggcggcggagaggctcccaggcggtggatctaaggtggccgggctcggcgaccttgaccacgcacggttactccccaacctctatctcttctggatctggcttggggccgaggggaggagaccggcggcggcggcaacagctgctcctccagtcccaaatctggcagcggcttctttatgcatttgatttgaatttggggagcgcttgggaactacggttgctagatgtggatttttctcaatgcactatcttcccattctattgcagatttatttgatgtagatgatttatgtattacgtaatagagatgatgtagatgctttgatttgtatgtcatgtttgatcagtggaaataagcagcaaaggaaatgctttgatttgtatgtcatgtttgaatgtttgatttgtggaaataagcaggaaaggaaaaaaaaaaaaaaaa

SEQ ID NO: 21684 - DNA, 1014 bp, Oryza sativa
  Clone ID: PAT_MRT4530_26932C.1
gtctgacggtctgaccagtgccgggtgggaagcgtaattttgaggagagactccgacccgcgccgccgccgccgcagccaagccatggagggatccgccggggcgccgctccgcacgcgcgtgtgcatcatcgggagcgggccgtcggcgcacacggcggcgatctacgccgcccgcgcggagctcaagcccgtgctcttcgagggctggctcgccaacgacatcgcggcggggggccagctcaccaccaccaccgacgtcgagaacttcccggggttccccgaggggatcctcggcggcgagctcatggatcggtgccgcgcccagtccctccggttcggcaccagcatcatctccgagaccgtcaccgcggtcgacttctccgcccgccccttccgcgtcgcctccgactccaccaccgtgctcgccgacgccgtcgtcgtcgccaccggcgccgtcgcccggcgactccacttcgccggctccgacgcctactggaaccgcggcatctccgcctgcgccatgcttctaccggattttcctgccccttattagcgtcgtattatttgatgtgctggagatttatctgtatttacgctgaagacgacgtattgcttgcgggtatccgcattttctgcatttgcttatgattgagttattgtgacatatggcgtatttagtggcgtaaaggtaaagaacttggttactgggaagatctccgaccttcaggtgtccggtctcttcttcgccatcggacatgaaccggcgacgaagtttctcggcgggcagcttgagctcgatgctgatgggtatgtggccaccaagccaggctccacgcacaccagtgtgaagggggtctttgctgctggggatgtgcaggacaagaagtatcgccaggctattactgccgctggatcaggaggaagcgaccaccagcgtttcaagaagtccaacgttgtcgctgctgaaagctacactctgaacgtttatgccatgggctgttctgacttctga

SEQ ID NO: 21685 - DNA, 462 bp, Oryza sativa
  Clone ID: PAT_MRT4530_26933C.1
gatatccaccatatcagtagcattgatcggaatggtcttcagaatacacaattccttgctagtttggtactaaaaacgccaaatgtcacaataactcaatcataagcaaatgcagaaaatgcggatacccgcaagcaatacgtcgtcttcagcgtaaatacagataaatctccagcacatcaaataatacgacgctaataaggggcaggaaaatccggtagaagcattcagaagtcagaacagcccatggcataaacgttcagagtgtagctttcagcagcgacaacgttggacttcttgaaacgctggtggtcgcttcctcctgagatagtcaatcggccttgccctcctgtgcaccgacctcctgcagatagtgctccgcgtccaaagcagccatgcaccctgatccagcggcagtaatagcctggcgatacttcttgtcctgcacatccccagcagcaa

SEQ ID NO: 21686 - DNA, 279 bp, Oryza sativa
  Clone ID: PAT_MRT4530_26934C.1
cccgctctggcctccgtcgccgccgactcaccgctgcgcggcccgcgatggccgaagcggcggagggggcactcgccggagcgctgctcaggaggatggcgcgcgccgcccgcctgcgggctctggtcgccattgaggctgcgctgcaggaactaccatttgttaggagcatatccagaaacttaactaggataatagctccaggaacgacccacccgatgggttcaagaaagggtacatggctgggaagggaggtcccgaagaaaccaaatttactta

SEQ ID NO: 21687 - DNA, 1085 bp, Oryza sativa
  Clone ID: PAT_MRT4530_26935C.1
ggattcccgggtcgacccacgcgtccgcaagtatctgtcgcctcgcaaaggagaagggaaaaaaaaaaacctagtatctcgtgatatctgtctcctccaaacaaaaaagaatctgtgcaagatctctctccctcgatcgatctatcagcttgcagcagtgtgcacatggatcctaatgccgtgcacgtccaaatgcccgccgttgacaccgaagcgtgctgtgacgatgagaagaatccgcagcctgcacgggagatcatcagcgaccacgtcgccgttcggccgacaccggcggtggacaagacgctgtcgggcgcgtcggacctgttgaagctcctgccgacgggcacggtgctggcgttccaggcgctggcgccgtccttcagcaaccacggcgtctgccacgccgtcgccaaccggtacctggtcctggcgctcatcggcgcctgcgcggcatcctgcatgctcctctccttcacggacagcctcatcggccacgatggcaagctctactacggcgttgccaccctccgcgggttccgacccttcaacttcgccggcacgcgggaggagcacggcaccgtgttcaaggacctgtccaggttcaggatcactgcgctcgactttgtccacgccttcttctcggcggtggtgttcctggccgtcgccttcgccgacgcagccgtgcagacgtgcctcttcccggaagcagaagcggacatgagggagctgctggtgaacctgccgcttggcgccgggttcctgtccagcatggtgttcatgatcttccccaccaccaggaagagcataggctacacagacatgacgccccactcgcagtgatgacatttcattcaaatgcatgcagccatggagtgtacaccatccgtcccaaaataaattaaatcctatgtacaaatctagatgtagtaatattatctagaatcgtaattaggatttaattcttttttgagatggagggagtatatataggataatatttctctcccaagtactacagaatgttctaattaacaagctaacaagctatatgcatgcaatacatctaacaagcccttcaagct

SEQ ID NO: 21688 - DNA, 447 bp, Oryza sativa
  unsure (1)..(447): unsure at all n locations
  Clone ID: PAT_MRT4530_26936C.1
acaaaggcgtatttctttatttcaaaacattaaatcttgtgtacatggaaacctgtgtttttttaaaattataagagcaggtacaatagcaggctataagccaactgcaaacatatttttaagaagataaattannggagagagaaaagtagcgaactacagatttgtagttagctgtagcacagactccaagatacagtgtgtctattacatgtgggactagatattaatagtgtagtatataactgttgtatgaatgagctanttcattggttatagatgaaccgtaggttgtagttgcagcaattgaattctgatccaaaagatcgatttgaatccagagcagaaacttcgagtctgcctctttatcagtactagtgcagaaaacattgctgcacatcgccataaccataatggatggcagcagtagctattttacgagttgta

SEQ ID NO: 21689 - DNA, 420 bp, Oryza sativa
  Clone ID: PAT_MRT4530_26937C.1
atggcgtgggcatcggcggcctggggagaaaggaagatggcggcagcggtggaagaggaggcggaatcaacgttttttctcggtgcaaaggcacaccagccactggacaaggaggtagggtcggcctcatctgcaactgatcaccggtcaccaccaccgttgggtgacattaacactatagtctgctatcgctcgtcaccgtcgttgccacagaggccccgcagctcatactcatcgtcgtcgccctgcccccatgccttcaccacctccaccgttgccccttctcaccccggtagcagcggcagcgtggatccgcctgtcacggggatgctcgacagcggaacccattgcggcgccacccgacggcggatcccgcctagaggggagttagctgccgaatcctcgtgggagaggagttga

SEQ ID NO: 21690 - DNA, 1836 bp, Oryza sativa
  Clone ID: PAT_MRT4530_26938C.1
atgaagaggtcatcgccatggcgtaagctcaccgaggccgaggacgccgtcaaccgcgccgtggcggcgacacgcgtcggcaggtacttcaagctggaggcgcgcaagagctcattcaccaaggagctccgcgccggcgccgccacgttcctcaccatggcgtacatcatctccgtcaacgccgccatcctcaccgactccggcgggccgtgcaccgtgagcgactgcacgccggtggtcgtcggtaactccacggccgtgcccggccccgagtgcacggttgggtctaaccccgggtacgagcagtgccttgggcgcaccaagagcgacctgatcgtcgcgacggcggtcgccgccatggctggatccttcgccatgggcgcgctcgctaacctcccgcttggtctagctcccgggatgggcgccaacgcctacttcgcctacaacatggtcggcttccatggctcgggttcaatcccttacagcacggcgctcgccggcgtgatggtggagggcattgtgttcttcatcctgtccgccgtcgggctccggtcgaggctcgctcggatgatcccgcgcaacatccgcctcgccacggcggtcggcatcggcttgttcctggcgttcacggggctgcaggcgcaccagggcgtcggcctcgtcggcgccagcccgtcgacgctggtgacgctcaccgcgtgctccgagaccgaccctgccaccggcgcctgcctcggcggctccatgcggagcccgacattctggctcggcgccgtcggcttcctcatcacggccacctgcctcgccagggacgtcaagggcggcatgatctacggcatcgtgttcgtcaccgtcgtgtcgtggatcaggggcaccgccgtgacggtgttcccggacaccgcggcgggcaatgccggcttcgactacttcaagaaggtggtggacttccacacgatcacgaccaccgccgggcggctcagcttcggcggcctccgccacggcaacgcgctgctcgccgtgttcacgctcctctacgtcgacgtcctcgccacgacggggacaatgtactccatggccgagtacggcggattcacggacggcgccgtcgaggggttcgacggcgagtaccgtgcgttcctggtcgacgctgggtcgacggtgctgagcgccgcgctcgggagcaccacggtgacgacctacgtcgagtcgacggcggggatacgggagggcggccggacgggggtcaccgccatcaccgtcgcggcgtgcttcctggcgtcgctcttcttcggtcccgtgctgacgagcgtgccgccgtgggccgtcggaccgtcgctggtgctcgtcggcgccatgatgatgcgcgtggccaaggacatcgagtgggcggacatgaaggaggccatcccggcgttcgtcaccatggtgctcatgccgctcaccttctccatcgccaacggcatcatcgccggcttgggagtatacatcgcgctgcactgctacgactgggcaaggatcgcttacctcaaggcgagtaaggtgctcgacgagcgccggaaccaggtcgctgcttcctcggccggcgaggccagcggcatcacggcgacgaccgcgacggcggcggcggcggacgagatccctgatgaatttggacagggcataattctgtgcttggaaaaagaaatgggaacgggctctggccgattcttgatatgtaggatgatgcatcttagtgatcattacactaactccaaggatgctcgtgatcttgtcagggcacgatcaaccaaaccccaatggcatttgttcctacaagcaattgagaactaccaataa

SEQ ID NO: 21691 - DNA, 354 bp, Oryza sativa
  Clone ID: PAT_MRT4530_26939C.1
atggcgcatgcgctattcccagagttctctctcctcatgccatcccgcaaccaccgctcccatccgttctcccatcccatccgaatcgagatcgaggcagagggtgaagtaatgaaggtggtcctcaggagcatctgcaggttgcaggaagtcttcggcatggcgatggagctcggccacatcaaggacgacgacgacaacgtccggccgccctcctgtgcgtcgatggaagccaaggtcgcgtcccatcttgccgccctcgtttcgcacaccattgccgcctgccgcactgccaagcgtctcccgccgccgacccgtttccaccccgggaacgctgccgccgccctagcctag

SEQ ID NO: 21692 - DNA, 3738 bp, Oryza sativa
  Clone ID: PAT_MRT4530_2693C.1
atggcgcagacgtgccagccctgcaccagctcgcttgctagcgcgcacgccgtgcgggctggcgcattaacacccccgtccaaaacggaaagagaaatattggttaaagacaagtttgcccatgggcccacttgtcaatccctctttctctctctctttctctgctcatcttcctcccgcgtccccggggtgtggcgctgcgacgaggcgtggaagctgtacgaggctgaggacgagaacgacccgttcgacgtcatacactcggagagcgtgccgtgttccaccgctgggacctcacccggcccgcggcgacgacgagcgcatgtcgccggcgtccaaccacaacctggcccagtcggtgaactggtgctgtctgaggtgcgcttcttccggagctatgcgcaccacgtggccatcagcgacgtcgcgagggagatgttgcgcgacatgtaccagatccccaaccgcgtgcacgtcatcctcaacagcgtcgacgaggcgcagttcgagcccgacggcgctgggccgcgcgttccgggaggacctcacgctgctcaagggcgccaacctggtgctcgcgccctagcgtcgtgtgcccttgcgccgccgtcgccgccgtcgctccagccgtgcgccgccgccgttccagacgtcgccgtcgctcgggaagaccgtcgtcgtggtcgccaagtcgtcgccgtcctcgtccgccccttcgccgtcgctgtagaccgccggagcaccgtcgccgtcgtcaagccgaagagcgccgccgcttcttcttcgtcgccgtcgccgttcgttcctcttccgccgtcgctttggtcgccgatgcggcgttacaagcctgagtacttgtttggtgttgagggatttatccaggagttgcgtacgatgtcctttgtcattggatttgggactgcccctttttatgcccagattcctcatgatcgtcacgaagagaagtgccgagtcaaagtcaccttgaacagtaatagtgaagatatcccctcagtgatgttcgaagctggaggaagaaactacatccatgcatgtcaggaggtggcaaggatcgccataagagagctccgcgatcgctacagtgatcagttggccgacactgagtatcgctaccatcctcgccaatcccaaggaagtgaccgtggcagctaccttgagactgaaggaattgagaatgatgctaccacaaggcatttggttgagatgctgtgggctatggatgaaagtcgtgcggagactgtgttagcggctcaagatcgtgaagaccggaatcgtggtaagatttgcaagctagaagacaaagtggatcgtttggagaaggagctagctacgttgaagggagaagcaccgccgcagaaggccaggattcgtcttaccgcaaggaagagagctctatttgtccctcgctaccaattggcgccaaaggtccgtgtggtggagaaagaagttgccccaaccctagcagatcctccggtcatcatcataagtgatgatgaagaagaagaatccaagcgcaaccattccaagattgagtgggtagctacccaagatgatgaagacgagccgaacgagccttcaatcgacctccgatgctcggaagaactagagactactgctgaacctatcacttggcttgagtttaccgttgctttccggaagacgcatataccatcgggagtggtgtctctcaagaagaaggagttcaggtcgctcacccagggatctcgctctgttacggagtatctgcacgagttcaatcgtctggctcgttatgctccggaagataagttagtggataaggctattcgtcaggaagacaagtacaaccgcatggagcagaagaaacgtcggattgctcaattcaagacacaacaggggaataatcagaagccgcgtcttactttaggaccccagtccatgccacagggaggttctttgtctgttgttcgtccgcagcgccagttcttcaacaacaatgctggcaacaacatccgcaatcaagctccacgtcctgttgcagcctcgacacagcaacaacctgccaagagggagcacggaagtaagcccgtggtgtgtttcaactgtggagacccaggacattacgctgacaagtgtccgaagccccgacgtgtgaaggttgtccctacccagagcaactctaccgtaccagcgtcaaaggctcgtgtcaatcatgtcgctgctgcagaagctcaagatgctccagatgtgattttggtccgggagtatcccgatgtgttcccagatgatttacctgccaatgagttggcagaagtcaagaggcaagtagacgatttgcttcagaaaggatacatcagaccgagttcatcaccatggggagctccagttatttttgtggaaaagaaagaccatacccagaggatgtgtgtggactatcgtgccctaaatgatgtgactatcaagaataagtatctgctacccagaattgatgatttgtttgatcagcttaaaggtgccactgttttctccaagatagatcttcgatcaggatatcaccagttgagaatcaaagaggaagatatacctaagacagcttttaccactaggtatggattgttcaaatgtactgttatgtcttttggacttaccaatgcccctgctttcttcatgaacttgatgaataaggtgtttatggaatacctagacaagttcgtggtggtctttattgatgatattcttatctactcccgaaccaaagaagagcatgaagaacatcttcgccttgcattagagaagctacgagaacatcaactgtatgctaagtttagcaagtgtgaattttggttgtctgaagtgaagttccttggtcacgtcatctcagccggaggagttgccgtcgatcctagtaatgtggaatccgtaaccaactggaagcaaccaaagacagtttcagagattcgcagtttcctaggcctcgcagctttagaagcgaagcccactctaattgatcaagttagagaagcccaaattaatgatcctgatattcaagagatcaagaagaatatgagaagaggaaaagctattggtttcttggaggatgagcaaggaactgtatggttaggtgagagaagctgtgtccccgacaacaaagatttaaaggatgcaattctgaaagaagctcatgatactttatactccattcaccctggtagtactaagatgtaccaggatctcaaggaaagattttggtgggcaaccgtcgccgttgctcgggaaggacgtcatcgtggtcgccaagtcgtcgccgtcctcgtccgtcccttcgccgtcgccggagatcgccggagcatcgtcgccgtcgtcaacccgaaggtttccgccgtttcctcctcgtcgccgtcgtcgtccgttgttcttccgccgccgttttggtcaccggtgtgttcgccgcgtcgtcctctacgtgctggtgtcctccgtttgcgtccttgtgccgccgttcgccggcgagcgtgcgccgcccgagccgttcgctctgccgagccgccgccgctgtcggtgacgtcaccgctgaagtcatcggggtcgtccgccggggcgattacgatccaggaaggtgcgctgcagtggattgtgttatgcgaggggtattgtcacaactcctttccgaggtaccgtggtggtattgaggcacatgaggaagagttctacaatgaggctgatggtgtggaggattag

SEQ ID NO: 21693 - DNA, 258 bp, Oryza sativa
  Clone ID: PAT_MRT4530_26940C.1
atgggcggccgggcagtgggcgtcggggcgacggcgcctcggtggttcagcgctccactcgttcgccattcatggtctgccaatctcgtggcctcgcgggtggagtcaaggggtcaggccatcaagctgtcgggtgaggcgatcgttgtgcagcggcggtgcggcgtagggctcctcgatcggctcctcgcggcggatgttgtaaggaactcggcagtcaggggtgacttctcgaagtaccaggagggcatcagatag

SEQ ID NO: 21694 - DNA, 421 bp, Oryza sativa
  Clone ID: PAT_MRT4530_26941C.1
atgactgctgcacgagctcggtgcggcacaccccggggtgtggatggcggaggacacggtcgcaagcgacgagctccggcgtggccgccggcgacgagctcccaacgtggcatggctgtggacggcggaggatgcaacctccgacaacgagctccggcgcatggctatggacggcggaagatgcagcctccagtgacgagcttcggtgtggccgccggcgacgagctccgacgtggtgcagcgcgtggacagcggaggacgtggccaccggcgacgagcccggcgtggcgcgtggcggcagaggatgctaccgccagcaacaagcctggtgtggggcgtggtagcgaaggacgcggctaccggcgacgagctccgacgtggggcgtggatgacgaaggacacggctgccggcgacgacctc

SEQ ID NO: 21695 - DNA, 199 bp, Oryza sativa
  unsure (1)..(199): unsure at all n locations
  Clone ID: PAT_MRT4530_26942C.1
aaaaaccaacccaaccgccgccgcatcgccctcnttagaacgatggccgcttcggcgctgcaccagaccaccagcttcctcggcaccgnccctcgncgggntgagctcgtccgangngtcgggnactccggtggccgcntcancatnngacgcaccgtcaagagcgcnaccaanagnatctggtatggacctgancgta

SEQ ID NO: 21696 - DNA, 219 bp, Oryza sativa
  Clone ID: PAT_MRT4530_26943C.1
atggacaggctagccggagtggaggtggagggggccgacgagcctccgtgcatcacttcccccaagctcgccgacaccgccggcgcccaacgcgccgccgtccaacaccccgccgccgacgcccccggcaccaccggcgccgaccacccctcgtcccgctcccaccacgcccttgctcttggtttggacttgctcagttgctcttggagtcttcgttga

SEQ ID NO: 21697 - DNA, 3705 bp, Oryza sativa
  Clone ID: PAT_MRT4530_26944C.1
atggcaggtccagaggataaagatgaggaggctgcatctcattccccacgcaccaaaggcatcatccaatactttacaaggcaagtgaagcagcacacagaaggacttgatacagatttgcaggtgacaaatgagaagattggacaattggagtccacgcagatctccaccaacactaagcttacagggctggagacagcggtcgcccgcattgacactagccttgctgctcttgtgaggcattttgatgctctcaatgctggaggcaatggtgggggtaatgacgatgacattgacggagagtacgtcgaggataatttggaggatgaatatattgctgacactgaacaagatgatcgagatgctcgagatcgtcgacggctacacaacaatcgacgaggtatgggtggtcgccgccgacgcgaggtacgcaacaatgatgatgctttttctaaaattaaatttaagattcctccttttgatggaaaatatgatcctgatgcgtacctctcttgggagattgctgttgaccaaaaatttgcatgccatgagtttcctgagagcactagagttagagctgctacgagtgagttcaccgattttgcttcggtttggtggatagaacatggcaagaaaaatcctaataacatgccacaaacttgggatgctttgaaacgggtcatgcgggctagatttgttccttcttactatgcacgtgacttgctgaataggttgcaacaattgagacagggtgcgaaaagtgtagaggaatattatcaggagttacaaatgggcttgcttcgttgtaatttagaggaaactgaggacgctgccatggctagatttttgggtgggttaaaccgcgagatttatgatatcgtagactataaagattacactaatatgacccgattgtttcatcttgcttgtaaggctgaaagggaagtgcagggacgacgtgctagtgccaaggctaatttttctgcaggccgaatgagagatgttcagtgccaccgttgcaagggctttgggcatgtgcagcgtgactgccctagcaagcgagttttggtagtcaaaaacgatggtgagtactcctctgctagtgatttcgatgatgatacacttgctttgcttgcggctgaccatgcagataatgagccaccggaagagcacattggggctgcatttgcggatcactatgagagcctcattgtgcagcgtgtccttagcgcacaaatggagaaggcggagcaaaatcagcgacacacgttgttccaaacaaagtgtgtcgtcaaagagcgttgttgccgcatgatcattgatggaggtagctgcaaaaacttggctagcagcgagatggtggagaagcttgcacttagcaccaaaccgcacccacatccatactacatccaatggctgaacaacagtggtaaggcgaaggtaacaaaactggtgcacattaattttgcaattggaaattaccatgatgttgttgaatgtgatgttgtgcccatgcaagcatgtaatattctgctaggtagaccatggcaatttgatagggattctatgcatcatggtaggtccaaccagtactcttttctgtaccatgataagaaaattgtgttgcatcccatgtctcctgaagatattttgcgtgatgatgttgctaaggctgccaaatccaaatgtgagagtgataaaaaagcccaatctgatggcaagaaacctgagacaatcaatttgaaacccaaatgcttacttgctactaaatctgatattaatgagttgattgcatcaccttcagttgcctatgctttggagtactctgatgtgtttcccaaggaagtgccaccggggctgccaccggtgcgcggcattgagcatcaaatcgacttgatcccaggtgcttccctaccgaaccgtgcgccataccgaaccaaccctgaggaaaccaaggagattcagcgtcaagttcatgagttgcttgataaaggcactttcatgaggttgatgaatgaggttttgcgtcctttcattggaaaatttgtggtggtctactttgatgatatcttgatttacagcaagtctatgggtgaacattttaatcatttacgtgctgtttttaatgctcttcgtgatgcacgtttatttggtaaccttgagaagtgcaccttttgcacagatcgagtttcttttcttggctatgttgtaactccgcaggggattgaggttgatcaagccaaggttgaggcaattcagagttggccgactcctaaaacggtctcacaagtgcggagctttctaggactcgcggggttctatcgccgctttgtgcaggatttcagcaccattgctgcaccattgaatgcgcttacaaagaagggagtgcctttcacttggggcacatcacaagagaacgccttccacatgttgaaagataagttgacccatgcacctctcctccaacttcccgattttaataagacttttgaacttgaatgtgatgctagtgggattggattgggtggtgttttgctacaagaaggaaaacctgttgcatattttagtgaaaagttgagtgggcctgttctgaattattctacttatgataaggaattgtatgctcttgtgcgaactttagaaacatggcagcattatttgtggcccaaggaatttgtcatacattctgatcatgagtctttgaagcatattcgtagtcaagggaagctgaaccgtagacatgctaaatgggttgaatttattgaatcttttccttatgttatcaaacacaagaaagggaaggagaacatcattgctgatgctttgtctaggagatacactttgttgacacaacttgactacaagatttttggcctggaaacaatcaaagaccaatatgcgcatgatgctgattttaatgatgtgttgctgcattgtaaggatggaagaacatggaacaaattcgtcatcaatgatggatgcgaagagatgttggcaggttcgttgctcgctgcgctacatgtcaaaaggctaagtcacgcttacatccacatgattgtgtatggtttgttgcctcgtgctccaattgatttgatgcctttaccatcttctgaaaaactgaattttgatgctaagcaacgtgctgagttgatgttaaaactgcatgagacaactaaagaaaacatagagcgcatgaatgctaagtataagtttgctggtgacaaaggtagaagggaattgaattttgaacctagagatttggtttggttgcatttgcgaaaagaacgatttcctgatttgagaaagtctaaattgatgcctagagctgatggaccatttaaagtgttagcaaagattaatgagaatgcatataagattgatttgcctgcagatttcggggttagtcccacatttaacgttgcagatttgaagccgtatttgggagaagaagatgagcttgagtcgaggacgactcaaatgcaagaaggggaggatgatgaggacatcaacaccatcgatacatccatgtccccccatgtacagcatgatggtcctattacccgcgctcgtgcacgtcaactaaattatcaggacgagtgccctcgtggccgggttgacgcgcaccacaagttcgcggcgaccattggagacggtgtatcggttgctaaggcgcagcgtctttggacagttgtagtcgggccgtga

SEQ ID NO: 21698 - DNA, 390 bp, Oryza sativa
  Clone ID: PAT_MRT4530_26945C.1
atggcgacggcgacaacgaggacaaggacggctgttgaggcttcgagcgacgtcgacagcgacgaggatggcgtcgccggcgcccatgggatgccctaccagatccaatgcctgggcgttgccctctacacccttggtagtggcaaaaatgtcatgcgccacaactgcaccagccagcccagctgccgcttgctaacgccaagtctgaccgcatctaccaccactgtcctgagccgtggagatgggattgaggccctctttggatgggtccctggatccaaacaccaccagaaagagcccatcaccaccgtctttgcactcacttggaacttcggcagcggcaaggtcaaggaaggcaggtattcaaatgttcgatgtgacaggatgtaa

SEQ ID NO: 21699 - DNA, 4185 bp, Oryza sativa
  Clone ID: PAT_MRT4530_26946C.1
atgggcaacttaagaggtcatgagttcaaggattggaatggtgtcgtacaatataggggcattcatgcaagtaaatttgttagttttgaagggggcattcatgcaagttcaggttttaaagtgtgggcactccaacagctactagcctggaagactcaaagtcttaaaggtgccatttctattttgggccccacaaccaataactctaatgggacgcacatttctccgatagtctcaaaggtgctcatgtggttgaaaaacactgtaggcgccggttttagctatttcaacacctatagtgctgtcctctgcgcgtctttctgcagaagtgaagcaagcagcacagtggctgccccgctgcagtgcagatcgactaggctacaaatattcccaggcagctatagtttgcaagcctttgggcgcatgatgaggagcttgatcgagctacttcgactcttcatcctgtatacatgtgacttaatgcctcaggatagtattgccggtgatggatcgggagtcgacttggtggacgagtgcccttgtggccaggttgacgcgcaccacaagttcgcggtgaccattggagacggtgtatcggttgctaaggcgcagcgtctttggacggtgacaaatgagaagattggacaattgaagtccacgcagatctccaccaacactaagcttacagtgctggagacagcggtcgcccgcattgacacttgccttgctgctcttgtgaggcattttgatgctctcaatgctggaggcaatggtgggggtaatgacgatgacattgacggaaagtacgtcgaggataatttggaggatgaatatattgctgacactgaacaagatgatcgagatgctcgagatcgtcgacggctacacaacaatcgacgagaacatggcaagaaaaatcctaataacatgccacaaacttgggatgctttgaaacgggtcatgcgggctagatttgttccttcttactatacacgtgacttgctgaataggttacaacaattgagacaaggtgcaaaaagtgtagaggaatattatcaggagttacaaatgggcttgcttcgttgtaatttagaggaaactgaggacgctgccatggctagatttttgggtgggttaaaccgcgagatttttgacatcgtagactataaagattacactaatatgacccgattgtttcatcttacttgtaaggctgaaagggaagtgcagggacgacgtgctagtgccaaggctaatttttctgcaggtaaaacttcatcatggcagacacgcaccactcctccggccggccgtactgcttctccatcttccacacccacaatcagtcgagcagcacctcctccatctagtgacaagtcagcgacaaaggctgctcagccagcactgagtgcttcttcaatggcatccacaggccgaacgagagatgttcagtgccaccgttgcaagggctttgggcatgtgcagcgtgactgccctagcaagcgagttttggtagtcaaaaaagatggtgagtactcctctgctagtgatttcgatgatgatacacttgctttgcttgcggctgaccatgcagataatgagccaccggaagagcacattggggctgcatttgcggatcactatgagagcctcattgtgcagcgtgtccttggcgcacaaatggagaaggcggagcaaaatcagcaacacacgttgttccaaacaaagtgtgtcgtcaaagagcgttgttgccgcatgatcattgatggaggtagctgcaacaacttggctagcagcgagatggtggagaagcttgcacttagcaccaaaccgtacccacatccatactacattcaatggctgaacaatagtggtagaccatggcaatttgatagggattctatgcatcatggtaggtcaaaccagtacttttttctgtaccatgataagaaaattgtgttgcatcccatgtctcctgaagatattttgcgtgatgatgttgctaaggctaccaaatccaaatgtgagagtgataaaaaagcccaatctgatggcaagaaacctgagacaatcaatttgaaacccaaatgcttaattgctactaaatctgatattaatgagttgattgcatcaccttcagttgcctatgctttggagtactctgatgtgtttcccaaggaagtgccaccggggctgccaccggtgcttccctacccaaccgtgcgccataccggaccaaccctgaggaaaccaaggagattcagcgttaagttcatgagttgcttgataaagggtatgtacgcgagtctcttagtccatgtgcggttccggtttgatgatatgcttgatgaattgagtggctctattgtgttctccaaagttgatttgcgtagtggttaccaccagattcgtatgaagttgggtgatgaatggaaaattgcatttaaaacgaagtttaggttgtatgagtggttagtgatgccttttggtttaactaatgcacccagcactttcatgaggttgatgaatgaggttttgcgtcctttcattggaaaatttgtggtggtctactttgatgatatcttgatttacagcaagtctatgggtgaacattttaatcatttacgtgctgtttttaatgctcttcgtgatgcacgtttatttggtaaccttgagaagtgcagcttttgcacagatcgagtttcttttcttggctatgttgtaactccgcaggggattgaggatttcagcaccattgctgcactattgaatgcgcttacaaagaagggagtgcctttcacttggggcacatcacaagagaacgccttccacatgttgaaagataagttgacccatacacctctcctccaacttcccgattttaataagacttttgaacttgaatgtgatgctagtgggattggattgggtggtgttttgctacaagaaggaaaacctgttgcatattttagtgaaaagttgagtgggcctgttctgaattattctacttatgataaggaattgtatgctcttgtgcgaactttagaaacatggcagcattatttgtggcccaaggaatttgtcatacattctgatcatgagtctttgaagcatattcgtagtcaagggaaactgaacagtagacatgctaaatgggttgaatttattgaatcttttccttatgttatcaaacacaagaaagggaaggagaacatcattgctgatgctttgtctaggagatacactttgttgacacaacttgactacaagatttttggcctggaaacaatcaaagaccaatatgcgcatgatgctgattttaatgaagcgcatggaggtggtttgatgggacattttggtgccaagaagacacatgacatccttgctagtcatttcttttggccacagatgcgaagagatgttggcagggctgttttgaagaaaaatatcaagatgtgggaagaatgcttgcctcatattgaatttgcttataatcgttccttgcattctactacaaaaatgtgcccatttcagattgtgtatggtttgttgcctcgtgctccaattgatttgatgcctttaccatcttctgaaaaactgaattttgatgctaagcaatgtgctgagttgatgttaaaactgcatgagacaactaaagaaaacatagagcgcatgaatgctaagtataagtttgctggtgacaaaggtagaagggaattgaattttgaacctagagatttggtttggttgcatttgcgaaaagaacgatttcctgatttaagaaagtctaaattgatgcctagagctgatggaccatttaaagtgttagcaaagattaatgagaatgcgtataagcttgatttgcctgcagatttcggggttagtcccacatttaacgttgcagatttgaagccgtatttgggagaagaagatgagcatgagtcgaggacgactcaaatgcaagaaggggaggatgatgaggacatcaacaccatcgatacatccacgtccccccatgtacaacatgatggttctattacccgcgctcgtgcacgtcaactaaattatcaggacgagtgccctcgtggccgggttgacgcgcaccacaagttcgcgtcgaccattggagacggtgtatcggttgctaaggcgcagcgtctttggacggttgtagtcgggccgtga

SEQ ID NO: 21700 - DNA, 2385 bp, Oryza sativa
  Clone ID: PAT_MRT4530_26947C.1
atggcggcggaggccgggagcggcggcgtggtgaagcacatcctgctggcgcggttcaaggaggacgtggcgccggagcggctggaccagctcatccgcggctatgccggcctcgtcgacctcgtcccttccatgaaggccttccactggggaactgacgtgagcatagagaacatgcaccaaggattcacacacgtatttgagtccacttttgaaagcacagaaggagtcaaggagtacattgaacacccagcacatgttgaatttgcaaacgagttcctgcctgtgttggagaagaccctcataatcgactacaagccaactatcgacgagtgccctcgtggccgggttgacgcgcaccacaagttcgtggcgaccattggagacgcccaccaacagctccaccacaaacccgactacagcttgacaggtcttgttgctacagcaccgatacacctcgttccacggttgctaacttgtgggttgttgtccccctcctgtgggcaaggtttagaggataaagatgaggagggtgcatctcattccccacgcaccaaaggcatcatccaatactttacaaggcaagtgaagcagcacacagaaggacttgatacagatttgcaggtgataaatgagaagattggacaattggagtccacgcagatctccaccaacactaagcttacagggctggagacagcggtcgcccgcattgacactagccttgctgctcttgtgaggcattttgatgctctcaatgctggaggcaatggtgggggtaatgacgatgacattgacggagagtacgtcgaggataatttggaggatgaatatattgctgacactgaacaagatgatcgagatgctcgagatcgtcgacggctacacaacaatcgacgagataatgagccaccggaagagcacattggggctgcatttgcggatcactatgagagcctcattgtgcagcgtgtccttagcgcacaaatggagaaggcggagcaaaatcagcgacacacgttgttccaaacaaagtgtgtcgtcaaagagcgttgttgccgcatgatcattgatggaggtagctgcaacaacttggctagcagcgagatggtggagaagcttgcacttagcaccaaaccgcacccacatccatactacatccaatggctgaacaacagtggtaaggcgaaggagtactctgatgtgtttcccaaggaagtgccaccggggctgccaccggtgcgcggcattgagcatcaaatcgacttgatcccaggtgcttccctaccgaatcgtgcgccataccgaaccaaccctgaggaaaccaaggagattcagcgtcaagttcatgagttgcttgataaaggagctattaataacattaccattcgatatcgtcatcctattcctaggttagataatatgcttgatgaattgagtggctctattgtgttctccaaagggattgaggttgatcaagccaaggttgaggcaattcagagttggccgactcctaaaacggtctcacaagtgcggagctttctaggactcgcggggttctatcgccgctttgtgcaggatttcagcaccattgctgcaccattgaatgcgcttacaaagaagggagtgcctttcacttggggcacatcacaagagaacgccttccacatgttgaaagataagttgactcatgcacctctcctccaacttcctgattttaataagacttttgaacttgaatgtgatgctagtgggattggattgggtggtgttttgctacaagaaggaaaacctgttgcatattttagtgaaaagttgagtgggcctgttctgaattattctacttatgataaggaattgtatgctcttgtgcgaactttagaaacatggcagcattatttgtggcccaaggaatttgtcatacattctgatcatgagtctttgaagcatattcgtagtcaagggaagctgaaccgtagacatgctaaatgggttgaatttattgaatcttttccttatgttatcaaacacaagaaagggaaggagaacatcattgctgatgctttgtctaggagatacactttgttgacacaacttgactacaagatttttggcctggaaacaatcaaagaccaatatgcgcatgatgctgattttaatgatgtgttgctgtattgtaaggatggaagaacatggaacaaattcgtcatcaatgatgggaagcgcatggaggcggacgagtgccctcgtggccgggttgacgcgcaccacaagttcgcggcgaccattggagacgacataagtggcggcgaggacgcggccaaggaagaggaaaacggcaacgacgcgatagcgagaactcgccacctactgggcgcggcttag

SEQ ID NO: 21701 - DNA, 756 bp, Oryza sativa
  Clone ID: PAT_MRT4530_26948C.1
aaaacactggctgatgttgctattttaggctacctttcagaaagagttatgattaaagcaattatgtcaagaaagacatgtcaaaggatctaaccctatatctgattccctgtgaatgggtgttaagctatacatagggattcgatgtgaactgaagcgacagttgatgatgaatgttgtgcacagctgcacatcccattgatttgtgctagattgggaccttcatctgcgccgcctctggggaaacccaaccacgcagtataatagaggagtgatcatccaaatgtagggctgaagagttgtacatgatgaggcaccaaatagatgaatttattggaagcctaagctcagtttattgttctttcagtgaacacattgaccatctcgataaactgcaagacattgagcttatcttctgctgtcaaaagacagtgtgacatcaaaatggagtaacggtagacccagctaccagtgaattcggttcagtatatttccggtggtaggtggttcaaccatctggcaatctacttcacacagtacttagcatttagtagcagtgaaaccatcgcattccattttttttacctatgtaagaatcatgattcatgacgaatcgatttgcacgtctcttgtctttgcataagtttggaatgggtgtctgttggcatactgtataagttgtcagtttcttcttacatctgtttgcaacggattcatgtgcctcgatgcaactgattatgttcatatgatctgtgc

SEQ ID NO: 21702 - DNA, 684 bp, Oryza sativa
  Clone ID: PAT_MRT4530_26949C.1
atggggatagcggattcttatgattacggtgagcctgctgaaggcttgtcggggcgactcatcatgacagcgaacggatcaactcaagttcaagcgggggacacggagctgcggcggcgggggacgagaaggcggcggcggccgcggccacgacgagtagccgtccctcggcgcggggatggatggaggcgggtgcgggcggtggtgcgggacgcggagacggacaagcacaccggcggcatgctccgcctccccatcatcgccggtgtcctgcgccagcccttctacgccaccgacctgctctccatcgagcatcagcggcgtcggcgcacgcaggaggaggaggatggcgctactgttgatgatcatcatcttgttggtggcggggcgggggtgccgtcagtcacgtgagaagaaggcggcggcagcggtggtgaggagctgaggatggtggtgaggcgccgtagccttgcggaggtcacggcttggttggaggagtacttcctcaaggccagcgtcaccggcgacgctgtgtcgaaccacctcgaggccagcaacgacgggttcaagcgtggaccgcacagcatcttgggcgcactttgctgcctgtcggcgccatcggttgcgcacgaccgcgtcgacagcatcaatggcgagcagaggcatagctccaccttgcgttga

SEQ ID NO: 21703 - DNA, 1671 bp, Oryza sativa
  unsure (1)..(1671): unsure at all n locations
  Clone ID: PAT_MRT4530_2694C.1
gacttgcgacacacgcagccgagctangcgctaccaccctcccatccatggcggcctccacctccgccacctccttctccactcccaccaagcccgcctcctcctcctcctcctcctcaagtcccaactccgtctgcttcgccagggcgtcggggaggtgcaggatggcgtcggtggtggtgagggcggaggcggtggacgcgaccatcagcccgacggtgagcgcgctgcggccgtccaagaccatggccatcaccgaccaggccacggcgctgcggcaggctggcgtcccggtcatcggcctcgccgccggggagcccgacttcgacacgccgcacgtgattgctgaggctgggatgaatgcaattaaggatggttatacaaggtacactcctaatgctgggactttggagctgagaaaggctatctgcaataaactccaagaggaaaatgggatatcctacagtccagatcaggtgctggtgagcaatggagctaagcaatgcattacgcaagccgtacttgccgtttgctcacctggtgatgaggttttgataccagcaccatactgggtcagttatcctgagatggctacattggctggtgcaactccagtgatccttcctacaagcatatcagagaatttcttgctaaggccagagctgcttgcttcaaagatcaacgagaaatcgaggcttttgattctctgctctccttctaatccaactggatcagtatatccaaaggagctgcttgaagaaatagctgacatagtcaagaagtatcctaggcttcttgttttgtctgatgagatttatgagcatatcatctatcagccagcaaaacacacaagctttgcttcattgcctggaatgtgggatagaacattaactgtaaatggtttttctaaggcttttgcaatgacgggctggcgacttggataccttgcagccccaaaacattttgttgcagcctgtggaaagatccaaagccagtttacttcaggtgctagtagcatatcacagaaggcagggctcgctgctttgaaccttggctacgctggtggtgaagcagtctcaactatggtcaaagcattccaggaacgtcgtgattaccttgtaaaaagtttcaaggaactgccaggtgtgaagatatcagagcctcagggtgccttttatttgttcatcgacttcagctcctactatggatctgaagtagagggttttggcactatcaaggactctgagtccctctgcatgttcctcttggagaaagcacaggttgcacttgtcccgggcgatgcatttggggacgacaaatgcatccgcatgtcatatgctgcagcactatctacgcttcaaactgctatggagaaaatcaaagaagctgttgcgctgatcaaaccccgtgttgctgctaagtgaaaatgtgaggttatacaatggcagtggggagtgaccaaaggcgccttcaactgccacttcggtaccatttgaaatacaaacgatgtgtcattgtctgacaagtaagaatttttgttgtttgattgtgtctgctgtgataaagaacttgaatgtaactccgggaaaatggataatacttcttgatttctttttctaaaaaaaaaaaacaaaaaaaaaaaaaaaaaaaaaaaaaaaaaaaaaaaaaaaa

SEQ ID NO: 21704 - DNA, 4704 bp, Oryza sativa
  Clone ID: PAT_MRT4530_26950C.1
atggcaggtctagaggataaagatgaggagggtgcatctcattccccacgcaccaaaggcatcatccaatactttacaaggcaagtgaagcagcacacagaaggacttgatacagatttgcaggtgacaaatgagaagattggacaattggagtccacgcagatctccaccaacactaagcttacagggctggagacagcggtcgcccgcattgacactagccttgctgctcttgtgaggcattttgatgctctcaatgctggaggcaatggtgggggtaatgacgatgacattgacggagagtacgtcgaggataatttggaggatgaatatattgctgacactgaacaagatgatcgagatgctcgagatcgtcgacggctacacaacaatcgacgaggtatgggtggtcgccgccgacgcgaggtacgcaacaatgatgatgctttttctaaaattaaatttaaaattcctccttttgatggaaaatatgatcctgatgcgtacctctcttgggagattgctgttgaccaaaaatttgcatgccatgagtttcctgagaacactagagttagagctgctacgagtgagttcaccgattttgcttcggtttggtggatagaacatggcaagaaaaatcctaataacatgccacaaacttgggatgctttgaaacgggtcatgcgggctagatttgttccttcttactatgcacgtgacttgctgaataggttgcaacaattgagacagggtgcgaaaagtgtagaggaatattatcaggagttacaaatgggcttgcttcgttgtaatttagaggaaactgaggacgctgccatggctagatttttgggtgggttaaaccgcgagatttatgacatcgtagactataaagattacactaatatgacccgattgtttcatcttgcttgtaaggctaaaagggaagtgcagggacgacgtgctagtgccaaggctaatttttctgctggtaaaacttcatcatggcagacacgcaccactcctccggccggccgtactacttctccatcttccacacccacaaccagtcgagcagcacctcctccatctggtgacaagtcagcgataaaggctgctcagccagcaccgagtgcttcttcaatggcatccacaggccgaatgagagatgttcagtgccaccgttgcaagggctttgggcatgtgcagcgtgactgccctagcaagcgagttttggtagtaaaaaacgatggtgagtactcctctgctagtgatttcgatgatgatacacttgctttgcttgcggctgaccatgcagataatgagccaccggaagagcacattggggctgcatttgcggatcactatgagagtctcattgtgcagcgtgtccttagcgcacaaatggagaaggcggagcaaaatcagcgacacacgttgttccaaacaaagtgtgtcgtcaaagagcgttgttgccgcatgatcattgatggaggtagctgcaacaacttggctaacagcgagatggtggagaagcttgcacttagcaccaaaccgcatccacatccatactacatccaatggctgaacaacagtggtaaggcgaaggtaacaaaactggtgcacattaattttgcaattggaaattaccatgatgttgttgaatgtgatgttgtgcccatgcaagcttgtaatattctgctaggtagaccatggcaatttgatagggattctatgcattatggtaggtcaaaccagtactcttttctgtaccatgataagaaaattgtgttgcatcccatgtctcctgaagatattttgcgtgatgatgttgctaaggctgccaaatccaaatgtgagagtgataaaaaagcccaatctgatggcaagaaacctgagacaatcaatttgaaacccagatgcttacttgctactaaatctgatattaatgagttgattgcatcaccttcagttgcctatgctttggtatgcaaagatgctttgatttcacttcacgatatgcagcattctttggcccctgctgttgctaacattttgcaggagtactctgatgtgtttcccaaggaagtgccaccggggctgccaccggtgcgcggcattcagcatcaaatcgacttgatcccaggtgcttccctaccgaatcgtgcgccataccgaaccaaccctgaggaaaccaaggagattcagcgtcaagttcatgagttgcttgataaagggtatgtacgcgagtctcttagtccatgtgcggttccggtaattttggtaccaaagaaagatggttcatggcgtatgtgtgttgattgtagagctattaataacattaccattcgatatcgtcatcctattcctaggttagatgatatgcttgatgaattgagtggctctattgtgttctccaaagttgatttgcgtagtggttaccaccagattcgtatgaagttgggtgatgaatggaaaacagcatttaaaacaaagtttgggttgtatgagtggttagtgatgccttttggtttaactaatgcacccagcactttcatgaggttgatgaatgaggttttgcgtcctttcattggaaaatttgtggtggtctactttgatgatatcttgatttacagcaagtctatgggtgaacattttaatcatttacgtgctgtttttaatgctcttcgtgatgcacgtttatttggatttcagcaccattgctgcaccattgaatgcgcttcaaagaagggagtgcctttcacttggggcacatcacaagagaacgccttccacatgttgaaagataagttgactcatgcacctctcctccaacttcccgattttaataagacttttgaacttgaatgtgatgctagtgggattggattgggtggtgttttgctacaagaaggaaaacctgttgcatattttagtgaaaagttgagtgggcctgttctgaattattctacttatgataaggaattgtatgctcttgtgcgaactttagaaacatggcagcattatttgtggcccaaggaatttgtcatacattctgatcatgagtctttgaagcatattcgtagtcaagggaagctgaaccgtagacatgctaaatgggttgaatttattgaatcttttccttatgttatcaaacacaagaaagggaaggagaacatcattgctgatgctttgtctaggagatacactttgttgacacaacttgactacaagatttttggcctggaaacaatcaaagaccaatatgcgcatgatgctgattttaatgatgtgttgctgcattgtaaggatggaagaacatggaacaaattcgtcatcaatgatgggtttgttttcagagctaacaagctatgcattccagctagctccgttcgcctgttgttgttgcaggaagcgcatggaggcggtttgatgggacattttggcgccaagaagacacatgacatccttgctagtcatttcttttggccacagatgcgaagagatgttggcaggttcgttgctcgctgcgctacatgtcaaaaggctaagtcacgcttacatccacatggtttgtatatgcctcttcctgttcctactgttccttgggaagatatttcaatggactttgtgttaggattgcctaggaccaagagggggcgtgatagcatttttgtggttgtggatagattttctaaaatggcacatttcataccatgtcataaaactgatgatgcttctcatatcgctgatttgttctttcgagaaattgttcgcttgcatggtgtgccaaacacaattgtttctgatcgtgacacaaaatttcttagccatttttggagaactttgtgggctaaattggggactaaacttttgttttctactacttgtcatccccaaactgatggacaaactgaagtggtgaatagaaccttgtctactatgcttagggctgttttgaagaaaaatatcaagatgtgggaagaatgcttgcctcatattgaatttgcttataatcgttccttgcattctactacaaaaatgtgcccttttcagattgtgtatggtttgttgcctcgtgctccaattgatttgatgcctttaccatcttctgaaaaactgaattttgatgctaagcaacgtgctgagttgatgttaaaactgcatgagacaactaaagaaaacatagagcgcatgaatgctaagtataagtttgctggtgacaaaggtagaagggaattgaattttgaacctggagatttggtttggttgcatttgcgaaaagaacgatttcctgatttgagaaagtctaaattgatgcctagagctgatggaccatttaaagtgttagcaaagattaatgagaatgcatataagattgatttgcctgcagatttcggggttagtcccacatttaacgttgcagatttgaagccgtatttgggagaagaagatgagcttgagtcgaggacgactcaaatgcaagaaggggaggatgatgaggacatcaacaccatcgatacatccacgtccccccatatacagcatgatggtcctattacccgcgctcgtgcacgtcaactaaattatcaggacgagtgccctcgtggccgggttgacgcgcaccacaagttcgcggcgaccattggagacggtgtatcggttgctaaggcgcagcgtctttggacagttgtagtcgggccgtga

SEQ ID NO: 21705 - DNA, 126 bp, Oryza sativa
  Clone ID: PAT_MRT4530_26951C.1
ccgataagctttagagcgtacagaggtgatgctgatttgtgtgagttacagccaaacgtttccatcagtgcaggtgcagtgcagtgtaatgcaatgcacggtgttgtccccagctaaaaaaaaaaa

SEQ ID NO: 21706 - DNA, 5800 bp, Oryza sativa
  Clone ID: PAT_MRT4530_26952C.1
atggcaggtctagaggataaagatgaggagggtgcatctcattccccacgcaccaaaggcatcatccaatactttacaaggcaagtgaagcagcacacagaaggacttgatacagatttgcaggtgacaaatgagaagattggacaattggagtccacgcagatctccaccaacactaagcttacagggctggagacagcggtcgcccgcattgacactagccttgctgctcttgtgaggcattttgatgctctcaatgctggaggcaatggtgggggtaatgacgatgacattgacggagagtacgtcgaggataatttggaggatgaatatattgctgacactgaacaagatgatcgagatgctcgagatcgtcgacggctacacaacaatcgacgaggtatgggtggtcgccgccgacgcgaggtacgcaacaatgatgatgctttttctaaaattaaatttaagattcctccttttgatggaaaatatgatcctgatgcgtacctctcttgggagattgctgttgaccaaaaatttgcatgccatgagtttcctgagaacactagagttagagctgctacaagtgagttcaccgattttgcttcggtttggtggatagaacatggcaagaaaaatcctaataacatgccacaaacttgggatgctttgaaacgggtcatgcgggctagatttgttccttcttactatgcacgtgacttgctgaataggttgcaacaattgagacaggatgcgaaaagtgtagaggaatattatcaggagttacaaatgggcttgcttcgttgtaatttagaggaaactgaggacgctgccatggctagatttttgggtgggttaaaccgcgagatttatgacatcgtagactataaagattacactaatatgacccgattgtttcatcttgcttgtaaggctgaaagggaagtgcagggacgacgtgctagtgccaaggctaatttttctgcaagtaaaacttcatcatggcagacacgcaccactcctccggccggccgtactacttctccatcttccacacccacaaccagtcgagcagcacctcctccatctggtgacaagtcagcgataaaggctgctcagccagcaccgagtgcttcttcaatggcatccacaggccgaatgagagatgttcagtgccaccgttgcaagggctttgggcatgtgcagcgtgactgccctagcaagcgagttttggtagtaaaaaacgatggtgagtactcctctgctagtgatttcgatgatgatacacttgctttgcttgcggctgaccatgcagataatgagccaccggaagagcacattggggctgcatttgcggatcactatgagagcctcattgtgcagcgtgtccttagcgcacaaatggagaaggcggagcaaaatcagcgacacacgttgttccaaacaaagtgtgtcgtcaaagagcgttgttgccgcatgatcattgatggaggtagctgcaacaacttggctagcagcgagatggtggagaagcttgcacttagcaccaaaccgcacccacatccatactacatccaatggctgaacaacagtggtaaggcgaaggtaacaaaactggtgcacattaattttgcaattggaaattaccatgatgttgttgaatgtgatgttgtgcccatgcaagcttgtaatattctgctaggtagaccatggcaatttgatagggattctatgcatcatggtaggtcaaaccagtactcttttctgtaccatgataagaaaattgtgttgcatcccatgtctcctgaagatattttgcgtgatgatgttgctaaggctgccaaatccaaatgtgagagtgataaaaaagcccaatctgatggcaagaaacctgagacaatcaatttgaaacccagatgcttacttgctactaaatctgatattaatgagttgattgcatcaccttcagttgcctatgctttggtatgcaaagatgctttgatttcacttcacgatatgcagcattctttgccccctgctgttgctaacattttgcaggagtactctgatgtgtttcccaaggaagtgccaccggggctgccaccggtgcgcggcattgagcatcaaatcgacttgatcccaggtgcttccctaccgaatcgtgcgccataccgaaccaaccctgaggaaaccaaggagattcagcgtcaagttcatgaattgcttgataaagggtatgtacgcgagtctcttagtccatgtgcggttccggtaattttggtaccaaagaaagatggttcatggcgtatgtgtgttgattgtagagctattaataacattaccattcgatatcgtcatcctattcctaggttagatgatatgcttgatgaattgagtggctctattgtgttctccaaagttgatttgcgtagtggttaccaccagattcgtatgaagttgggtgatgaatggaaaacagcatttaaaacaaagtttgggttgtatgagtggttagtgatgccttttggtttaactaatgcacccagcactttcatgaggttgatgaatgaggttttgcgtcctttcattggaaaatttgtggtggtctactttgatgatatcttgatttacagcaagtctatgggtgaacattttaatcatttacgtgctgtttttaatgctcttcgtgatgcacgtttatttggtaaccttgagaagtgcaccttttgcacagatcgagtttcttttcttggctatgttgtaactccgcaggggattgaggttgatcaagccaaggttgaggcaattcagagttggccgactcctaaaacggtctcacaagtgcggagctttctaggactcgcggggttctatcgccgctttgtgcaggatttcagcaccattgctgcaccattgaatgcgcttacaaagaagggagtgcctttcacttggggcacatcacaagagaacgccttccacatgttgaaagataagttgactcatgcacctctcctccaacttcccgattttaataagacttttgaacttgaatgtgatgctagtgggattggattgggtggtgttttgctacaagaaggaaaacctgttgcatattttagtgaaaagttgagtgggcctgttcagaattattctacttatgataaggaattgtatgctcttgtgcgaactttagaaacatggcagcattatttgtggcccaaggaatttgtcatacattctgatcatgagtctttgaagcatattcgtagtcaagggaagctgaaccgtagacatgctaaatgggttgaatttattgaatcttttccttatgttatcaaacacaagaaagggaaggagaacatcattgctgatgctttatctaggagatacactttgttgacacaacttgactacaagatttttggcctggaaacaatcaaagaccaatatgcgcatgatgctgattttaatgatgtgttgctgcattgtaaggatggaagaacatggaacaaattcgtcatcaatgatgggtttgttttcagagctaacaagctatgcattccagctagctccgttcgcctgttgttgttgcaggaagcgcatggaggcggtttgatgggacattttggcgccaagaagacacatgacatccttgctagtcatttcttttggccacagatgcgaagagatgttggcaggttcgttgctcgctgcgctacatgtcaaaaggctaagtcacgcttacatccacatggtttgtatatgcctcttcctgttcctactgttccttgggaagatatttcaatggactttgtgttaggattgcctaggaccaagagggggcgtgatagcatttttgtggttgtggatagattttctaaaatggcacatttcataccatgtcataaaactgatgatgcttctcatatcgctgatttgttctttcgagaaattgttcgcttgcatggtgtgccaaacacaattgtttctgatcgtgacacaaaatttcttagccatttttggagaactttgtgggctaaattggggactaaacttttattttctactacttgtcatccccaaactgatggacaaactgaagtggtgaatagaaccttgtctactatgcttagggctgttttgaagaaaaatatcaagatgtgggaagaatgcttgcctcatattgaatttgcttataatcgttccttgcattctactacaaaaatgtgcccttttcagattgtgtatggtttgttgcctcgtgctccaattgatttgatgcctttaccatcttctgaaaaactgaattttgatgctaagcaacgtgctgagttgatgttaaaactgcatgagacaactaaagaaaacatagagcgcgtgaatgctaagtataagtttgctggtgacaaaggtagaagggaattgaattttgaacctggagatttggtttggttgcatttgcgaaaagaacgatttcctgatttgagaaagtctaaattgatgcctagagctgatggaccatttaaagtgttagcaaagattaatgagaatgcatataagattgatttgcctgcagatttcggggttagttccacatttaacgttgcagatttgaagccgtatttgggagaagaagatgagcttgagtcgaggacgactcaaatgcaagaaggggaggatgatgaggacatcaacaccatcgatacatccacgtccccccatgtacagcatgatggtcctattacccgcgctcgtgcacgtcaactaaattatcaggaacgatggagaggatccaaagggaagaggattcgcgcggggtggattcggattgcagggcagcgccaacttctgacggccgccacgacttcatgcgaactccgatttgggacgagtgccctcgtggccgggttgacgcgccccacaagttcgcggcgaccattggagacgcccaccaacagctccaccacaaacccgactacagcttgacaggtcttgttgctacagcaccgatacacctcgttccacggttgctaacttgtggtgttgctgtccccctcctgtgggcaaggtccagaggataaagatgaggagggtgcatctcattccccacgcaccaaaggcatcatccaatactttacaaggcaagtgaagcagcacacagaaggacttgatacagatttgcaggtgacaaatgagaagattggacaattggagtccacgcagatctccaccaacactaagcttacagggctggagacagcggtcgcccgcattgacactagccttgctgctcttgtgaggcattttgatgctctcaatgctggaggcaatggtgggggtaatgacgatgacattgacggagagtacgtcgaggataatttggaggatgaatatattgctgacactgaacaagatgatcgagatgctcgagatcgtcgacggctacacaacaatcgacgaggccgaatgagagatgttcagtgccaccgttgcaagggctttgggcatgtgcagcgtgactgccctagcaagcgagttttggtagtcaaaaacgatggtgagtactcctctgctattgatttcgatgatgatacacttgctttgcttgcggctgaccatgcagataatgagccaccggaagagcacattggggctgcatttgcggatcactatgagagcctcattatgcagcatgtccttagcgcacaaatggagaaggcggagcaaaatcagcgacacacgttgttccaaacaaagtgtgtcgtcaaagagcgttgttgccgcatgatcattgatggag

SEQ ID NO: 21707 - DNA, 317 bp, Oryza sativa
  Clone ID: PAT_MRT4530_26953C.1
gcacgaggctactaaacctgaagtttcgactttggaatacatgaattaatagaattcatgatttagttcaaacctacctataaaattctttcattaaagccttattcagttaatcccttgtccaaggaggttgagagggactggaattaatactcccttatccactccaatcacttggtcattgggactaaacaaacaagcctagagtaagcctaagcgattgtggaaaatccaaataactccatataagttgctggtcgtttcattctctccctacaacttaatttcatacaagatattcttcataagttcttttt

SEQ ID NO: 21708 - DNA, 2253 bp, Oryza sativa
  Clone ID: PAT_MRT4530_26954C.1
atgagagggagaggaggagggggcgagggaggcgagacgggacagagggcgccgccacagccgctcgttggggggagggtgccgccgccgctcgcggggagcggggtttttgatgaggacatcaacaccatcgatacatccacgtccccccatgtacagcatgatggtcctattacccgcgctcgtgcacgtcaactaaattatcaggacgagtgccctcgtggccgggttgacgcgcaccacaagttcgcggcgaccattggagacgcccaccaacagctccaccacaaacccgactacagcttgacaggtcttgttgctacagcaccgatacacctcgttccacggttgctaacttgtgggttgctgtccccctcctgtgggcaaggtctagaggataaagatgaggagggtgcatctcattccccacgcaccaaaggcatcatccaatactttacaaggcaagtgaagcagcacacagaaggacttgatacagatttgcaggtgacaaatgagaagattggacaattggagtccacgcagatctccaccaacactaagcttacagggctggagacagcggtcgcccgcattgacactagccttgctgctcttgtgaggcattttgatgctctcaatgctggaggcaatggtgggggtaatgacgatgacattgacggagagtacgtcgaggataatttggaggatgaatatattgctgacactgaacaagatgatcgagatgctcgagatcgtcgacggctacacaacaatcgacgaggtatgggtggtcgccgccgacgcgagcgtgactgccctagcaagcgagttttggtagtaaaaaacgatggtgagtactcctctgctagtgatttcgatgatgatacacttgctttgcttgcggctgaccatgcagataatgagccaccggaagagcacattggggctgcatttgcggatcactatgagagtctcattgtgcagcgtgtccttagcgcacaaatggagaaggcggagcaaaatcagcgacacacgttgttccaaacaaagtgtgtcgtcaaagagcgttgttgccgcatgatcattgatggaggtagctgcaacaacttggctaacagcgagatggtggagaagcttgcacttagcaccaaaccgcatccacatccatactacatccaatggctgaacaacagtggtaaggcgaaggagtactctgatgtgtttcccaaggaagtgccaccggggctgccaccggtgcgcggcattcagcatcaaatcgacttgatcccaggatttcagcaccattgctgcaccattgaatgcgcttcaaagaagggagtgcctttcacttggggcacatcacaagagaacgccttccacatgttgaaagataagttgactcatgcacctctcctccaacttcccgattttaataagacttttgaacttgaatgtgatgctagtgggattggattgggtggtgttttgctacaagaaggaaaacctgttgcatattttagtgaaaagttgagtgggcctgttctgaattattctacttatgataaggaattgtatgctcttgtgcgaactttagaaacatggcagcattatttgtggcccaaggaatttgtcatacattctgatcatgagtctttgaagcatattcgtagtcaagggaagctgaaccgtagacatgctaaatgggttgaatttattgaatcttttccttatgttatcaaacacaagaaagggaaggagaacatcattgctgatgctttgtctaggagatacactttgttgacacaacttgactacaagatttttggcctggaaacaatcaaagaccaatatgcgcatgatgctgattttaatgatgaagcgcatggaggcggtttgatgggacattttggcgccaagaagacacatgacatccttgctaatttcggggttagttccacatttaacgttgcagatttgaagccgtatttgggagaagaagatgagcttgagtcgaggacgactcaaatgcaagaaggggaggatgatgaggacatcaacaccatcgatacatccacgtccccccatgtacagcatgatggtcctattacccgcgctcgtgcacgtcaactaaattatcaggacgagtgccctcgtggccgggttgacgcgcaccacaagttcgcggcgaccattggagacggtgtatcggttgctaaggcgcagcgtctttggacagttgtagtcgggccgtga

SEQ ID NO: 21709 - DNA, 1436 bp, Oryza sativa
  Clone ID: PAT_MRT4530_26955C.1
atggccggagcggagtggtcgccgttcgacggggacgccgccttcgcggagtactcgtcggcggtgctggccgagctcggcgggtgggcggcgccgggcgaggaaggcggcgcggggatgatggtaccggcggcgctggatctgccggtggatgtggtgggggcggcggcgcgggaggaggaggaggaggaggaggaggcgccggcgagatcgggcgacggcgccgccgccgccgcgtcgtcgagctctagcggggagcccgccgcccccgacaagcgaccggccgccgccgaggcagcgccggcggcggcggcgacggcgacggcgacggcgaagaaggggcagaagagggcgaggcagccgcggttcgcgttcatgaccaagagcgagattgaccacctcgaggatggctacaggtggaggaagtatgggcaaaaggcggtcaagaacagcccattcccaaggagctactacaggtgcaccaacagcaagtgcactgtgaagaagcgcgtggagcggtcttccgacgacccttccgtcgtgatcaccacctacgagggccagcactgccaccacaccgcctccttccagcgcggcgtcggcggcgccgccgtcgcggcgcacatccacggcgcggcggccgtcgccctcgccgagcaaatgtcggcgttcgtctcgccgccgccacagccgcatatgctgtacggtttaccccggttgcacccgccgtcctccgagaccgccgtcagctgctcgatgccgacgacgacgtctttgcaggagctgaacaatagcgaggggctacaacgccctggctataataatagcccccaggcggcggtgaccatcgcgcagcggccgccgtcgccgtcggtgcctccggctgtttcgtttgacaaggggctacttgatgatattgtgcctcctggagttagacttggatgacaatactcaaatatacatgcatgacttatctccctacactagatatttgaagtgtcatctcatctcttggcatggaggcagctggcaggaaggcaaatcacgcagctagggttctttgattagctcctgctgaaatccaccgtctcagtcattacctaccaattaatggcttggaaattaggagtatatattaattaagcttgctccagcgatggagagctgacttacaagtgattgcaaacctcattggtcagccggtggagtatttttcatggcaaacttttatgtgcccgattaaccgtagtctgtgtatgcagttggcagcactaggcattccctgactgtatcttcttggcagaagaatctctacctatgttaactacttctgcattataatgtgtatgtaggttggtgtagatatatactactagctatatctatgtacacttatgctaaattaatgttgtgctgtagtaaaaacctgcagcccg

SEQ ID NO: 21710 - DNA, 1953 bp, Oryza sativa
  Clone ID: PAT_MRT4530_26956C.1
atggccaaactcaacaagagtttggagggatgcttcaaggataagaacactcttgacaagattttgagtgagcaacggtgcatcgttaacaaggagggacttagattcattccaaagaagggtaaaaaaccttctcaccgtgccactcgttttgtcaagagtaatgcaagtctatgggtgaacattttaatcatttacgtgctgtttttaatgctcttcgtgatgcacgtttatttggggattgaggttgatcaagccaaggttaaggcaattcagagttggccgactcctaaaacggtctcacaggtgcggagctttctaggactcgcggggttctatcgccgctttgtgcaggatttcagcaccattgctgcaccattgaatgcgcttacaaagaaggaagtgcctttcacttggggcacatcacaagagaacgcattccacatgttgaaagataagttgacccatgcacctctcctccaacttctcgattttaataagacttttgaacttgaatgtgatgctagtgggattggattgggtggtgttttgctacaagaaggaaaacctgttgcatattttagtgaaaagttgagtgggcctgttctgaattattctacttatgataaggaattgtatgctcttgtgcgaactttagaaacatggcagcattatttgtggcccaaggaatttgtcatacattctgatcatgagtctttgaagcatattcgtagtcaagggaaactgaaccgtagacatgctaaatgggttgaatttattgaatcttttccttatgttatcaaacacaagaaagggaaggagaacatcattgctgatgcattgtctaggagatacactttgttgacacaacttgactacaagatttttggcctggaaacaatcaaagaccaatatgcgcatgatgctgattttaatgatgtgttgctgcattgtaaggatggaagaacatggaacaaattcgtcatcaatgatgggtttgttttcagagctaacaagctatgcattccagctagctccgttcgcttgttgttgttgcagaaagcgcatggaggcggtttgatgggacattttggtgccaagaagacacaggacatccttgctggtcatttcttttggccacagatgcgaagagatgttggcagggctgttttgaagaaaaatatcaagatgtgggaagaatgcttgcctcatattgaatttgcttataatcgttccttgcattctactacaaaaatgtgcccatttcagattgtgtatggtttgttgcctcgtgctccaattgatttgatgcctttaccatcttttgaaaaactgaattttgatgctaagcaacgtgctgagttgatgttaaaactgcatgagacaactaaagaaaacatagagcgcatgaatgctaagtataagtttgctggtgacaaaggtagaagggaattgaattttgaacctggagatttggtttggttgcatttgcgaaaagaacgatttcctgatatgagaaagtctaaattgatgcctagagctgatggaccatttaaagtgttagcaaagattaatgagaatgcatataagcttgatttgcctgcagatttcggggttagtcccacatttaacgttacagatttgaagccgtatttgggagaagatgatgagcttgagtcgaggacgactcaaatgcaagaaggagaggatgatgaggacataaacaccatcaatacatccacgtccccccaagtacagcatgatggtcctattacccatgctcgtgcacgccaactaaattatcaggtgagttctttcttgagttcatattcctcttctttataccccggagacgcgtgcactcgtgttttactcaggaacaatggagaggattcaaaggggagaggattcgcgcggggtggattcggactgcagggcagcgccaatttctga

SEQ ID NO: 21711 - DNA, 543 bp, Oryza sativa
  Clone ID: PAT_MRT4530_26957C.1
atggcgagctcgaggagtgagggctcgtcggcgtcttctaggcgcacatctgcctcccccatcccgtatcgggttggccctttggagtatgagccagcggtggtatgcaggtacagcaacaaggcggcgaggtggatttcgtggatcccagacaatcccgggtgccggtacttcaaatgtgtgaatgcaaggagtggatgttgcgattattttgcttgggttgatggtccgtcgaacagtttcgttagagaagtgttgaacgatttgcgcgacgaagtgtggaagctgaggagggagaagggagatttttcggctgctgttgaagaaggaagatgtgtgcaatcagagctggttttagctaggaatgagttggccacatcgaggaaggttgttggtgagaaggaagctgtggtaggggtgttgaaggataggaatagaaatgaatctggcatctttttagtcgcagtggaatgtaatgttgtcagttatggaatggaacttggttggtattgtgtaatggaatctagaatggaattgtgctaa

SEQ ID NO: 21712 - DNA, 2950 bp, Oryza sativa
  Clone ID: PAT_MRT4530_26958C.1
atggcaggtccagaggataaagatgaggagggtgcatctcattccccacgcaccaaaggcatcatccaatactttacaaggcaagtgaagcagcacacagaaggacttgatacagatttgcaggtgacaaatgagaagattggacaattggagtccacgcagatctccaccaacactaagcttacagggctggagacagcggtcgcccgcattgacactagccttgctgctcttgtgaggcattttgatgctctcaatgctggaggcaatggtgggggtaatgatgatgacattgacggagagtacgtcgaggataatttggaggatgaatatattgctgacactgaacaagatgatcgagatgctcgagatcgtcgacggctacacaacaatcgacgaggtatgggtggtcgccgccgacgcgaggtacgcaacaatgatgatgctttttctaaaattaaatttaagattcctccttttgatggaaaatatgatcctgatgcgtacctctcttgggagattgctgttgaccaaaaatttgcatgccatgagtttcctgagagcactagagttagagctgctacgagtgagttcaccgattttgcttcggtttggtggatagaacatggcaagaaaaatcctaataacatgccacaaacttgggatgctttgaaacgggtcatgcgggctagatttgttccttcttactatgcacgtgacttgctgaataggttgcaacaattgagacagggtgcgaaaagtgtagaggaatattatcaggagttacaaatgggcttgcttcgttgtaatttagaggaaactgaggacgctgccatggctagatttttgggtgggttaaaccgcgagatttatgacatcgtagactataaagattacactaatatgacccgattgtttcatcttgcttgtaaggctgaaagggaagtgcagggacgacgtgctagtgccaaggctaatttttctgcaggtaaaacttcatcatggcagacacgcaccactcctccggccggccgtactgcttctccatcttccacacccacaaccagtcgagcagcacctcctccatctagtgacaagtcagcgacaaaggctgctcagcccgcaccgagtgcttcttcaatggcatccacaggccgaatgagagatgttcagtgccaccgttgcaagggctttgggcatgtgcagcgtgactgccctagcaagcgagttttggtagtcaaaaacgatggtgagtactcctctgctagtgatttcgatgatgatacacttgctttgcttgcggctgaccatgcagataatgagccaccggaagagcacattggggctgcatttgcggatcactatgagagcctcattgtgcagcgtgtccttagcgcacaaatggagaaggcggagcaaaatcagcgacacacgttgttccaaacaaagtgtgtcgtcaaagagcgttgttgccgcatgatcatggatggaggtagctgcaacaacttggctagcagcgagatggtggagaagcttgcacttagcacaaaaccgcacccacatccatactacatccaatggctgaacaacagtggtaaggcgaaggtaacaaaactggtgcacattaattttgcaattggaaattaccatgatgttgttgaatgtgatgttgtgcccatgcaagcatgtaatattctgctaggtagaccatggcaatttgatagggattctatgcatcatggtaggtccaaccagtactcttttctgtaccatgataagaaaattgtgttgcattccatgtctcctgaagatattttgcgtgatgatgttgctaaggctgccaaatccaaatgtgagagtgataaaaaagcccaatctgatggcaagaaacctgagacaatcaatttgaaacccaaatgcttacttgctactaaatctgatattaatgagttgattgcatcaccttcagttgcctatgctttggagtactctgatgtgtttcccaaggaagtgccaccggggctgccaccggtgcgcggcattgagcatcaaatcgacttgatcccaggtgcttccctaccgaaccgtgcgccataccgaacaaaccctgaggaaaccaaggagattcagcgtcagttcatgagttgcttgataaagggtatgtacgcgagtctcttagtccatgtgcggttccgagctattaataacattaccattcgatatcgtcatcctattcctaggttagatgatatgcttgatgaattgagtggctctattgtgttctccaaagttgatttgcgtagtggttaccaccagattcgtatgaagttgggtgatgaatggaaaacagcatttaaaacgaagtttgggttgtatgagtggttagtgatgccttttggtttaactaatgcacccagcactttcatgaggttgatgaatgaggttttgcgtcctttcattggaaaatttgtggtggtctactttgatgatatcttgatttacagcaagtctatgggtgaacattttaatcatttacgtgctgtttttaatgctcttcgtgatgcacgtttatttggtaaccttgagaagtgcaccttttgcacagatcgagtttcttttcttggctatgttgtaactccgcaggggattgaggttgatcaagccaaggttgaagcaattcagagttggccgactcctaaaacggtctcacaagtgcggagctttctaggactcgcggggttctatcgccgctttgtgcaggatttcagcaccattgctgcaccattgaatgtgcttacaaagaagggagtgcctttcacttggggcacatcacaagagaacgccttccacatgttgaaagataagttgacccacgcacctctcctccaacttcccgattttaataagacttttgaacttgaatgtgatgctagtgggattggattgggtg

SEQ ID NO: 21713 - DNA, 384 bp, Oryza sativa
  Clone ID: PAT_MRT4530_26959C.1
atggaggcaggcatggctaggtggtggcgtggaggccggccaggcgaggtggtggtggcggcggtggagaaggccggtggcacttcacggcgagcacgcgaggaacaagcggtgtcgctcctccgagcggaagtggcgtgcatgcatcctgcacctcccaacctccccgacaccacctccacatttgtcggccacggtgggcgagcaagggacgagccgtggtgctcctccaagtggaacggcacgcatgcggatgaagatagagtcattggtgttatagatggccaaaaggcccaaggcccgacggcccggcccacggcacggcattttggcccggcccaagcacgacacggcccgtcaagggtcgggcccgtgccggcctag

SEQ ID NO: 21714 - DNA, 4458 bp, Oryza sativa
  Clone ID: PAT_MRT4530_2695C.1
atggccggagagagaaaggagaaggttggcttcggcggttatgcctcaaatagcaaggcataccgggtctacaataagaacaaaggtattgtggaagaaaccgccgatgttcaatttgatgagactaatggctcccaagaggggcacgagaatttggatgatgtaggtgatgaaggcttgatgagagctatgaagaacatgtctattggagatgtcaagcctattgaagtggaagacaagccatccacctccactcaagatgagccatctacttccgctacgccaagtcaagctcaagttgaggtggaggaggagaaggcacaaaatccacctatgccaccaaggatacacaccgctctttccaaggatcacccaattgaccaagtgttgggtgacattagtaagggtgttcaaactcgatctcgtgtcgcttcgatttgtgaacattactcgtttgtttcttgtcttgagcaaaaacaagtagatgaagctctttgtgatccggattggatgaatgctatgcatgaagagctcaacaactttgcaagaaacaaggtgtggactttggttgaaagacctagagaccacaatgtcatagggacaaagtgggtctttaggaacaaacaagatgagaacgggttggtggtgagaaacaaggcaaggttggtggcacaaggtttcacacaagttgaaggtttggactttggtgaaacttttgcccccgtggcaagacttgaggctattcgcatccttcttgcatttgcatcatgctttgatataaaactatttcaaatggatgtgaaaagtgcttttctaaatggtgaaattgccgaacttgtctttgttgaacaacttcccggttttgaagatcctaaaaatcctaaccacgtttacaaactctcaaaagctctttatggtttaaaacaagctcctagggcttggtatgaaagattgagagattttcttttgtcaaaggttttcaaaattggaaaagttgacaccaccctttttacaaagatcattggtgatgatttctttgtgtgtcaaatttatgttgatgacatcatattcggttttactaatgaggtattttgcaagaaatttggtgatatgatgtctaggaaatttgagatgtccatgattggagagttgagcttcttccttggacttcaaatcaagcaactcaaggatgggacgttcgtgagccaaaccaagtacatcaaggatctacttaaaaggtttagcttggaggatgcgaagcccatcaagacacctatgacaaccaatgggcatctcgaccttcatgagggagctatgcctccccgcactcgtcgtgatcgtcgtgagcccacgcccgatcccgtcagtgagaatgaggaatcaagcggagatgagtatgttcaaagtgaggatgaaaatatggaaaatgttgagggggatgaggtggaagagcaacaacaattcaagcggaagaaggccacgctaagcctacccgaccgtcgggagcgcaaccgcctgtgccgcctcgaccgtgcgccggccggccgcgccgtcgcctcctccagcgtcgccgctaccccctccaccccggcctgccctccgtttcccgcggagacccccggagctacgtttccgccgtcgcccttccctttcctccgcaccggccgcctccagccgcctctatctccctgcctgagcgccggtcaacgtcgccaccacctccctcggctccgcgacgccgccctcatccccggcatcacctcctcctcgcccgaagctcgccggagtggcctcctcgccggcgtccagtggcgtcgccaccacttctccgtctccggccggctgctgttcgtcgccggtacgccgaccgacgtcgccgtctcctccgttgacgtcgcagcgtcgccctccaccccggcctgccctcggtttcaccggaacgtcgccgcgaacatctccgtccgcctcgccggagttgtttggccgcccgtccctcctcgcccgtgcaccggtcggccacacctccaccacctccggcatcgcagcggcaaggtcgtcctcggcatcgtttcccctccatccaaacccctccgcggtccatcatcgtcgtctccgatcgttctcgtcgtcgacgtcccatcggtcgcccggctcgtcgtctcgcggcgccgcctccgtcgtcggcaccgcagcggcgtggtcctcgccgtcctcgtccccgtgcagccgctgccggctgtcctcgtcgcctcctcgccggtcccggtcgtcgtcgtcgtcgtcgtcctctcgtcgttcccggtcgtcgtggcccccatcatcgtcttcgtcctcggctccgcgtcgtcaagtctcgtgccggccgtgtctcgccttcgttcaaggatcgccgccgaagtcgttccctcgccgtccgtctccgccgcgccgttcgtcgttgtcgttcccacgcctcgtcgcgtggtgctttcgtcgttccggaggttcccgaagcgtggtttgcggtcgtcgccgaaggttcggaaggccgttctctctgagcaaggcaaggcaaatgaaggctacacgagctgcggcccggtagtcgagatgtcatggcagagggttggtgccctgctgctaggggctcagtcctgcctgcctgtcccggaggttccggccgtaggtgggattgggtcggtactcttgtttatggctaggatgggttgggaactatgtcacgtcttccgtccgtataccgtggtgaataagcctaacatacatcataacagcaaaagacttagatctgttaaggtcctatccttagtttctaatctgtctctcccctttgctttccctctctccctctccaaacctttgcaacagatggctgacaatgagaaagacaataaggtcagaagtcaggacattggtacctcaagcccccgagtgaatgaagcaccagacaccagttgtgtgacactggttcaacacctgattaaccagaatcgattgcttatagagatactacagcagcatcagacgccaattctgaacctgagtcaaatacaacctcaagtgcagttggaggcagtccaagcactcacaccacaagtcagcatgccgccagcatcccgaaggacccatggtgacgtgccacatgttgactcaaaagaagcaagtatcatttgttttaggtgtgatgagcaagggcactatgcaagggagtgtcctcagcagaaaagaaaaacacccatgcgaaccgaagatgaagtccgtaagatgatcattaccagcacagaatggcctccactaggaatgacaaaacgtcaaagaagaaataccttccgaggtgcaccacagttgacagagcatcttttagctaatggaggtagagtgtctgatagtgaagattcagatcaagtctcctcagatgatgaagatgaaatggaacgtaaggcatgctctcgttgtggagaaatcggtcatgttgccagctcgtgtgccactacatgcgttcattgtgaggaagaccatccacccgacaggtgtccaacgagcaggatcacttgtttcttttgtgaaggaactgatcatgtaccaaaagattgtcaattcagttttctgctgacgaagaagatggccaaccaacccgccagttccaatggagagaagcatcaaggcaacacaaatcctcgccaagattacagtttcagcctaactccagtgccaggacagaggaatcaaaatgagaaaagaaaatgccgagtccgggaagatatctgttgcttcaattgtcaaggaatgggtcatttcgccgacaagtgcccaaaaccgagaaacatagctgccggcacgtcagtccacgcaactccctgcaatcagaagcttgctcctcagcgaattgtcatccatgtatcccgaagcagtcctatagcccgcgttgcaacagctccaactccagcgagtgcattaccacaaggtgtcaatgctcaatttcagccccagccatcagttgacaagacagaggccagtatcggcattgtacctttggatgctccagcacagcagccaaggaatcaagtacaagatgaagaacctgagcgtgagaaagttattgtctgttacaacgcactaacccttctctgcaccgacggcctcagcaaagaattgtcgtcgatggaagaagttgtgtctctccccgacctactccaggccaagcgaagggcaatcaacctccggagggcgataccaagcagaagaccgttattcgcctcaaacagcactcagaaggaagcttctccggtgaataatagcaatatgcagtcctatcacatcatcacagaaccaatcaaggatgatgcagtcactagaacaatgcccgctatatctctccagaatcaaaatgagcagccacgcttgtggttttcagttcgctacctatcattgtgcagtcgaaagtttgcagcaatcatgtaa

SEQ ID NO: 21715 - DNA, 713 bp, Oryza sativa
  Clone ID: PAT_MRT4530_26960C.1
ctactactccactatttgccaagccaatcgggagatcgagcagagctgcagagagcagagggagatcggagatcgagagcgcgcggggggagctagagctaggtagcgagggaggctgctgcagcagcgagaagcccaagcccctagggcgatggcggcggaggccgggagcggcggcgtggtgaagcacatcctgctggcgcggttcaaggaggacgtggcgccggagcggctggaccagctcatccgcggctatgccggcctcgtcgacctcgtcccttccatgaaggccttccactggggaactgacgtgagcatagagaacatgcaccaaggattcacacacgtatttgagtccacttttgaaagcacagaaggagtcaaggagtacattgaacacccagcacatgttgaatttgcaaacgagttcctgcctgtgttggagaagaccctcataatcgactacaagccaactatcgtaaataacagctgagctaataacagtttggatgcttctttcatcgttaattgcacttcagaatgtctgggagaattttatttttagttacccaaatttgaactttcatgctgaataaatttgccctatatattacctttcgagagcagttgttcaatttgttgtacgcaatccaaatagtttgcttgttatgttttaaaaagctagcctccaatatactcctccttttcataat

SEQ ID NO: 21716 - DNA, 222 bp, Oryza sativa
  unsure (1)..(222): unsure at all n locations
  Clone ID: PAT_MRT4530_26961C.1
aaacggcaactgcatgacctccaccacctccacctcctcctctncactcccaagaactcgcaatngccacngncgccgcggcgngntagctnnnataccggcggngcgagaggaaggcggaggagggagagagaaatgggcaactgccaggngnnggangnggcggcggtcgtcatccagcaccccggngggaaggtggagcggctctacttggcccaccac

SEQ ID NO: 21717 - DNA, 234 bp, Oryza sativa
  Clone ID: PAT_MRT4530_26962C.1
aagctttttttttttggggttgttttgtttttttttgggttgattttttttggttggggaggtttcatataagttatagatatattgtatacttggaaataactttttataaagggttttatactcttgagtctgattccccaccttgtcttcttttttgtctggctttcatcttcaaactcttccaactcttccggctcacatcgggttgtcttgaggttctgaccaaagctt

SEQ ID NO: 21718 - DNA, 524 bp, Oryza sativa
  Clone ID: PAT_MRT4530_26963C.1
aacttgtcatccagattaagtcatgccatgaaattacaattcgccatcgcccgctcggtcgccagcgacgtgtgccactggcacgccgccgcgcccgcgcccgccgtccacctgtgtcgtctccccgcagccgcgtcgacgacggcactgccctgctcaccgacacggcgccctcctcctcgagctcaaccgcgtcctacgtcccggcggcttcttcgtctggtccgccacgcccgtgtaccagaagctcaccgaggacgtccagatctggaaggccatgaccgcgctcaccaagtccatgtgctgggagctcgtcaccatcaagaaggaccagctcaacgacatcggccacatgctcgtctggtatgagtagctcacaaagtccatgtgctggcagcctctgatgtgcagcgacgacgacgacgccaacgccgcatggtacatccgcctcaacgcgtgtacggcaagccagcgccggaggacttcgccgtggactacgacggcacctgtgtcgtccccccgcc

SEQ ID NO: 21719 - DNA, 495 bp, Oryza sativa
  Clone ID: PAT_MRT4530_26964C.1
cccacgcgtccggttcttttggagatcatactggatatgctatggatgctgatattgtgatattgttctttttggaatcataccgaatatgctatgaatgagttttatagaaccttttttgctattttcgtttcatgtgcaactttggtgcatcttgagcacaactacattgttatgttccatgcagttaaaataaatcttctatttagggtagaaatttctaattaatctttttgtgcttattgatttatgcagtatgatattgtgctcaaatacattggattcctctgattttgtttctcctgtaggggaaaactggaagtcattttgaaccaaagacaattccaccacccctaacaaacaaggctgactgggagattaaccctcttgagttggatttctcaaaagctgttatcatcggaaagggctcttttggtgaaattctgaaagccaactggcgaggaacacctattgctgtcaagcgcattcttccat

SEQ ID NO: 21720 - DNA, 1276 bp, Oryza sativa
  Clone ID: PAT_MRT4530_26965C.1
agaaaagtgaactgggttttaggacagatttagtaacaaatttcaattaaagatatttcgatttcttattctattatgttcatatatgtactcctctatacataaataacaaatatcaatagtatataaagcaatgctgttcctcttgactcttgtatttggaatgattttatagagaccatttccgctttccataatcctgggcaagaatttatagaatttatatgatatgggtgaaattgaccgtctgctccttcagcttacaaattgtttctggaggaggttggcgcagaactccaaatcaaagcgtacttctggagggtcaccaatgcaatcgaacacagcatcagctgttgcaaagtcctcttctgcagtgtatccgctttttgttacgatacacttcataccagcagctttggctgctgcaagccctatagtactgtcttcaacaacaacacaactagatggatcgactccaagtgtggttgctgcaagtaagtagattgctggatcaggttttttacgaggaaccacatctccagcaaatatggtaattttttctgcacgatcagggcccagtaaacatgaaactattgccgaaacagctttctcatttgaagtactgcatactgcaactttcactccttttcctagggcttcatctattaacctttgaacacctggacggaggggaagcaacttcttctcaatcagagccatgaataattctgttttcctcttgtgcagcgaagcaataaactcctttctttcgtcgtcagtctttggtgctttagctggccaccccattttgctgaaatacgctgtcatcctttcctttccgccacctatcttgagcaattctccatatagctcaacatcccagctcacaccgaaccggacctcggcaaacgtctcgttgaaggaatgcggtggccgtccttctccgtgtccaccagcacgccgtcgcagtcgaacagcagcgccgccgggagggacgcggccggcgctccccccgcggacgcgcggacggcctccgctccccgcctcctgcccccgacggagaggcaggcggcaggagaacgcgccgtcgtcgtcctgctcgcggcggctaccctcgtgggaaggcgctggccggcgggccggcccgcgacggggcgggcggtggagaaggtccccgcggggagcagcgcggacgatgatgcggcggcgggggccatggcgaaatggcgagctgaactggcgaaggaaaacgaacgtttgggccgcaacgccgaag

SEQ ID NO: 21721 - DNA, 947 bp, Oryza sativa
  Clone ID: PAT_MRT4530_26966C.1
ctagaactcggggaggaggccgtcgatgaacgtagacttgaggaacaagtcagggacgtccgcgcagctgccgccagggaactgtcgaggacgtccgtgtcgcatgcagcctccattgcgccgccccgtcgctagctacctgggaaagctccgcccgcctccgtcgccggctgcctgagcgcgcgcgcaagaaaaagaagtagtggactggggaggtgttgggctgagggagatggatgaccccgcagcctctctctccctccatgggccggcttccccttcccctcctccctcttcgggccgccggctcagcccttttgctcctccctcgccgagaagtctattttgcctcctcctgaattcaaatattttttagggacggcggtgacgggagctggcggcggtggcagcggcacggctcggctgccttgggctccggcctggagctggcggtggtaggggcggctcggcctggagctagcggcagcgggggcggcgacctcggtcaaagagtgggcggcgacctcgggcggcggcaccgccatctcctcctcaccgccgccgccgacgaggaggaggaggcgacgggccagatccggcggcgacggttctcgtcccgcccggatccagcggcggcgggcctcgtcctgcccgaatccgacgggtctcgtcgggcggcggcgccaccaccatctcctcctcacctccgccgtcgatgacaacgaggaggtggggggcaggtggcggcaagagcggccggcgagctcgggcgacggctaggtgtgtggccgtcatcgacggtgtggccagtggctggcgtcgtccgtgttgtctgtggtggcggcggcggcgaaaatggtgggggcgaggacggagcgagagaggaatggcggcgagacgacgggggcgaggtcgcgaggagccgactagccgaggacggcggccag

SEQ ID NO: 21722 - DNA, 352 bp, Oryza sativa
  unsure (1)..(352): unsure at all n locations
  Clone ID: PAT_MRT4530_26967C.1
gccgagctcgtgccgaattcggcacgagttggctgtncttctnntttttttnttgcaacgaggtcaaaanatggcggcaagaagagcacatcnaattaattgttcaatatgcacaaagaaagagcacatncctcaaatngattgttgatanaaccggttagccnccnggttgtcnccggaaaagttccaaaaccaaaaatttcanttaccantccgacnctaacaaaaantttcctaaccaanngngaaacccaatttnnccanncnacctcccctgtgacaaattttttgattgcccnattntatntccttngaatccctttaanaancnagctccggcctgccaataact

SEQ ID NO: 21723 - DNA, 988 bp, Oryza sativa
  unsure (1)..(988): unsure at all n locations
  Clone ID: PAT_MRT4530_26968C.1
atggagattgcgatgagcagcaagcgagcggaggagctggagcagctgatccagcggatggagcaggcggcggcgcgtcgccggaagacgcagccggcggggagcaagcgcaaggtgccggagccggacaccttctgcccgacccgctggctgccgacgccggagagcctccgcgaatcggaagagaagcaccaggcgttcatgcggggagcccgggaggtcatccgggaggccgacgaggcgttggaatccatcgcgctgcagcagcgtggcgacagctgcgacgaggggagctggcagcggcggcggcacggctcggccgccttgggctccggcctggagctggcggtggcgggggcggctcggcctggagctagcggcggcgggggcggcgacctcggtcgaagagtgggcgacgacctcgggcggcggcaccactgccatctcctcctcatcgtcgccgccgacgaggaggaggaggcgacgggccagatccggcggcgacggttctcgtcccgcccggatccggcggaggcgggcctcgtcccgcccgaatccgacggcgtcctcgggcgaagactagcggcaacctcgggcggcggcgccaccgccatctcctcctcacccccgccgccaacgacgacgaggaggcgggggcagtggccggcgtcgtccgcgtcgtctgtggtggtgcgcggcggcgaaaatggtgggggcgaggacggagcgagagaggaagggcggcgagatggcgggggcgaggtcgcgaggagccgactagccgaggacagcggccagtagtggtgcgctcgacccctggatgcgcccntccgccgccgcctctctctctctctctctcctctctaaggttagccagttagggacttgggttgggctgggaacttggggaggaattatggactatttggatggatctttttaatttcagaaattccgacaaactttccggaaaaaaaaaaaaaaaaaa

SEQ ID NO: 21724 - DNA, 428 bp, Oryza sativa
  Clone ID: PAT_MRT4530_2696C.1
ggcttttcggggacatatgacgcgaccacaccaccagcactggccctactagtatcacaccactcgtgagcatggcaagaaggctgggcttactcgccgtgcgtgacccggcctgtccgacccatagacaatgagcatcgagtcgatcggtagcagatcatgcggcgcagcaaagaatattgaggctagtggcgccgacgaacgcacgatttgatgatttgacggggaagggtgtcatgaagacgaggaggcgacaggtggctgccaatcaagcacgctggtcgcgagatgatgatatacaggcgtccatctcccgccagggaccccaggcacgcgaggagggaattagtctgagggaccggaagacgatgggtccgcacctgctatacgacccggcgacgctgagggtcgtgcaatgctgcgtggcg

SEQ ID NO: 21725 - DNA, 260 bp, Oryza sativa
  Clone ID: PAT_MRT4530_26970C.1
tgcaccaccacaaccacctacgactggccggaatattatcagaagccgtcgccgacgacgccatggacttcgtagaggcgtggggtctgaccccgctcgccgaggaagacctagtcgatcactacctactactgcgacagatgcggccttagcttagcagccacgagtaaagatggcagggacgaagagcttcgtaaggccggaatcaatcataacgcatttatgctgagttataagaaatgtaaactgccagcactaaa

SEQ ID NO: 21726 - DNA, 2010 bp, Oryza sativa
  Clone ID: PAT_MRT4530_26971C.1
atgacttcctcagaaaagtattccatgcattttattggctttgcacattataaagtacagactaataataaatacagtgctttgaataatgcaccatcttcacgaattttcaggcacaaatataaccacatcttctgtgtcactgatatgggagattggtatgataaactttcacaatcttttagggatactgcaaaggaagtattggcaaagacagatattgatccaaatgttaggtgcttcccaaaaagacagatgaagcgcatcaccaacaactacagcactaccctgggaagaggagggttttctgtggtgtacaagggtaggctcgacgatggtcgttcagtggcagtgaaacaatataattggagaacacagaaggagttcacaaaagaggtgatcatacagtctcagtgtagccataagaacattgttaggctattgggctgttgtgtagaggccgctgctccgatattggtcaccgagtttgtccccaacggaaacctttctgaccttctacacggcaacagtggactgcttcctgtcacattagagacacgcttacagattgcgctggatgtagcagaagcacttgtatatatgcattgctcccaaagttatccaatccttcatggagatgtcaaaccgtcaaacattcttctgggtgacaagggtgtagcgaaactgtgtgactttggaatatcaaggctgctctctatggatagtgatgaatacacaggatttgttatcggaagtaaaggttatgtggatcctgttttctgccagactgggcgattaagccaaaaatgcgatgtctacagcttttgggtggttcttttagaactcttcaccagaaagaaaggaattgatgacatgaaagtgtgtcttgcagaaatttttgcttgttccagtagaaaaggtgatgaacataaactatttgacatggacatcgtaaccaatgagaatatggagtttcttcaaggaattggcagggtcgcactcgaatgtataaagtttgaagtagaggaacggccagagatgaggctagttttagagcagcttttgagtctcaaaagatcccgagataagagcattcatgagatgctggttgtacgtaaagagattgaggtatttttgagaggatgtggttttggaagatttatattgagtaaagagagtgtggatgacttgatatgcaacttgaaaattgttctgaaggaatgtgcgtcaggcaaggcttacatagggaaatctcgcggcacaccactgatggcgataaagatgtcaactgcagttacagagaaatggaaagacatgcttgggaatgaaatagctgtccaatctagaattaagcacatgaatgttgccaagcttatcggttactgcttagatcattcggatggtacagtgcttatatacgagtacggtgcaattagcttgtatgatgttctttttggtgatgcggggaagatatatcgtcccttcacttgtgacctgcgcctgaagattgcgattggtgctgcagagggcattgctcacctgcattcacttggcgtcgtgcatggcgatgtcagcattaacgacatactgctggatcatgtctcttcgtccctggtaaagattgctggctatgggacatcagggctccctgacatcgacaaggctctggattcgcttgaaaccggtcatgggaagaaggagcatgatgtgtacagttttgggcttgttctcctaaccctcttcacgtggaagaaggtgtcactgccacatgatctcaagtccgagcctgacaaacctgtgctactgcaccaggaagccatccgtgggcgtagatgcaatcatcttgagatgatcaagggcttggcttcacggtgtctgacgtccgaggcgacgaagagaccatccatggtggaagtagcaaaacatctcaacttcatacttatttttcctgaaaggaggaaaacttgccatgacctggcgatttatcaatctcgaatgctttcggactag

SEQ ID NO: 21727 - DNA, 510 bp, Oryza sativa
  Clone ID: PAT_MRT4530_26972C.1
atggagacggtcacgctccggcggttcgagctcgccgacgccgacgccatgatggcgtgggcgtcggaccccgaggtgacggccttcatgacgtgggagccgtacgagtccgtcgactccctgcgcgccttcatccgcgacaccgtgctcccgcacccgtggttccgcgccatctgcctcgccggcgacggcgacggcggcgcggtgtccgtgacgccgacggccgaccggtgccgcgccgaggtcgcggtggcggtggcgcgcgcgcactggggcaagggcgtggccacggcggcgctgaggcgcgccctcgccgcggcgttcgccgacctcgacggcgtcgagcgcgtcgaggcgctcgtcgacgtcggcaacgcggcgtcgcggcgcgcgctcgagaaggccgggttccagcaggaggccgtgctgcgcagctactgcgtcgtcaagggccagctcagggacatggtcatctacagcttcatctccactgatcctctcgtcgagtga

SEQ ID NO: 21728 - DNA, 251 bp, Oryza sativa
  Clone ID: PAT_MRT4530_26973C.1
gacaggcttaccacacctgctaaggataatactattaccggatcacatccagacagaatcgcaactacagcacgcgctgccgcataccttgtcaccaataacaacactggtatgctcccagaaacgaaagcatccataagagcctcctgtggtcatagaatagaagacaaggctctgatggcccagctgcactgcgtgtccgtcgcctgtttatgctcagacctttataaccattgccgtccggtctaaca

SEQ ID NO: 21729 - DNA, 487 bp, Oryza sativa
  Clone ID: PAT_MRT4530_26974C.1
aatgtacgtctcatactttttgagtataattccacaatttttttccaaaaggaaacgaccggtcacaaagtgaaaaagtaaacaaaggtaaatagtattcaatggtgagtagtattttaaacacgagggagtatatccgaagttatttgggacaacatgatgtttgcttgaggtgcaaagcgccgatgaaggaggccatacaattgatgtaatgttagtatcgtaaatcaaattgtccccattttcaaatacaatacgtgcacgtctaatcttcatctattcaattcttttaggtacacttcgccctaaagttagctacaccttgaaacattcaaacaaatatataaataaatgcatacataggaataccatttagaaataactgaaattcggaattaaaaataagtaatattgtaagaagagttcatataaaactgaatacgagattaattaaaattcaaaataaaaaaaaaaaaaaaaaaaaaaa

SEQ ID NO: 21730 - DNA, 210 bp, Oryza sativa
  Clone ID: PAT_MRT4530_26975C.1
atggccaacgacgatagggctgccgactcccacgtcgccgatttggctgctctccctgtctgccacccgagccaagccaagggaaccctagatctaggaggcggccgctcctcccctcgccgccatgtagccttcgcgccatcgccgccgcacggcctcgtcgtcactggccgccccttcctagcaagccacacggtttccgacggctag

SEQ ID NO: 21731 - DNA, 2805 bp, Oryza sativa
  unsure (1)..(2805): unsure at all n locations
  Clone ID: PAT_MRT4530_26976C.1
atggcgccgctccaccggcggttgctccacctcgccgtcgtgttcgccggcctcctcctgccgggcgtccgcgcgggcaccggcggcgccgcgtccggcgacgcgggcgcgctcctcgccgccagggccgcgctcacggacccgaccgccgcgctctcggcatggcgcggcgacaacctctgccgctggccgcacgtggcgtgcgacgccgcggccgggaacgctgccgtctccnacggcgtcntcncggggctctacctcgtgcggtctgtacctcgccggggggcgctcgagacgctcaacctcgcgtcgaacaacttctccggcgagctcccggcggcctacggcggcgggttcccgtcgctggcggtgctcaacctgatacagaacctcgtctccggcgcgttcccggggttcctcgccaacgtaaccgcgctccaggagctgctgctcgcctacaactcgttctccccgtcgccattgccggacaacctcggcgacctcgccgcgctccgcgtgcttttcctcgccaactgctccctcaccggtagcatccctccttccgtcgggaagctgaccaacctcgtcgatctggacctctcgagcaacaacctcaccggtgagataccaccgagcatcgtgaacttgagttctttggtccagatagagctcttctccaaccagctctccggcaggattccggcggggttgggcggcctcaagaagctccagcaactggacatctcgatgaaccacatctccggcgagataccggaggacatgttcgccgcgccgagcctggagagcgtgcacatgtatcagaacaacctgaccgggcggttgccggcgacgctcgcggcggcggcgaggctgaccgagctgatgatcttcgccaaccagatcgaagggccgttcccgccggagttcgggaagaactgcccgctccagtcgctggacgtctcggacaaccgcatgtccggccggattccggcgacgctctgcgccggcgggaagctgagccagctcctgctgctgaacaacatgttcgacggcgccattcccgacgagctggggaaatgcaggtcgctgatgagggtgaggctgccctgcaatcggctctccggcccggtgccgccggaattctggggattgccccatgtctacctgctcgagctccgtggcaatgcgttctctggcaatgtcggcgccgccattggccgtgccgcgaacctgtccaacctcatcattgataacaatcgattcaccggtgttcttcctgctgaattggggaatttaacccagctggtggtgctgtcggcttcggacaacagcttcaccgggacagtgccgccgtcactcgcatctctttcggtgcttttcctgcttgatttgagcaacaattccctttctggagagatcccgcgcagcatcggagaactgaagaatttgacattgttgaatctttcagacaaccacctcagtggtagtatacctgaagagcttgggggtatggataagatgagcacgcttgatttgtcgaacaatgagctttctggtcaggtgcctgcacaattgcaggatctgaaactgctgggtgttcttaacctgtcctataacaagctcactgggcatcttccaatcttattcgacactgatcaattccgaccgtgcttcttgggtaatcctggcctgtgctatgggctatgttcaaggaatggtgatcctgattccaaccggcgtgcccgaatccagatggctgtagccatcctcacagctgctgctggcattctactcacgagtgttgcctggttcatttacaagtataggagctacaataagcgcgccatcgaagttgacagcgagaattcagagtgggtactcacatccttccacaaggtggagttcaatgagagggacattgtgaatagcctgactgagaacaatttgattggcaagggttcatcagggatggtgtacaaggctgttgtcaggcctaggagtgataccttggctgtgaagaagctttgggcaagtagcacggtggcgagcaagaagatcgacagctttgaggccgaggtggaaacattgagcaaagttaggcacaagaacattgtcaagctcttctgctgtcttacgaacgaggcatgccggttgcttgtctatgagttcatgcctaatggcagcctgggagactttctccacagtgccaaagctggcatcttggattggcctgcgaggtacaacatcgcactcgatgctgctgaggggctcagctacttgcaccatgactttgttcccgcgatcatccaccgagatgtgaagtcaaacaacattctgcttgatgctgattttcgtgccaagatagcagattttggcgtcgcgaagtctattggtgatgggccggccaccatgtctgtcattgctggttcttgtggatacattgctcctgagtatgcctacactatacgtgtaactgagaagagcgatgtatatagctttggtgtggtcatgctggaacttgttactggaaagagtcccatgtcatccgatattggtgacaaggacctggtggcatgggcagccaccaatgtggagcagaatggggcagagtcagtgctagatgagaagattgctgaacatttcaaggatgagatgtgtagagttctgaggattgcgctgctctgcgttaagaacctcccaaacaaccgcccgtcgatgaggcttgtggtgaagttcttgcttgacatcaagggagagaacaaaccgaaggcgatgaagattacggaggcgctccctgccacatga

SEQ ID NO: 21732 - DNA, 2904 bp, Oryza sativa
  Clone ID: PAT_MRT4530_26977C.1
atggcgccgctccaccggcggttgctccacctcgccgtcgtgttcgccggcctcctcctgccgggcgtccgcgcgggcaccggcggcgccgcgtccggcgacgcgggcgcgctcctcgccgccagggccgcgctcacggacccgaccgccgcgctctcggcatggcgcggcgacgacctctgccgctggccgcacgtggcgtgcgacgccgcggccgggaacgctgccgtctccgacggcgtcgtcgcggggctctacctcggcggtctgtacctcgccggggggttccccgtcgcgctctgctcgctgcggtcgctgcggcacctcgacatgtcgtcgaacgacctcacgggcccgcttcccgcctgcctcgcggggctccaggcgctcgagacgctcaacctcgcgtcgaacaacttctccggcgagctcccggcggcctacggcggcgggttcccgtcgctggcggtgctcaacctgatacagaacctcgtctccggcgcgttcccggggttcctcgccaacgtaaccgcgctccaggagctgctgctcgcctacaactcgttctccccgtcgccattgccggacaacctcggcgacctcgccgcgctccgcgtgcttttcctcgccaactgctccctcaccggtagcatccctccttccgtcgggaagctgaccaacctcgtcgatctggacctctcgagcaacaacctcaccggtgagataccaccgagcatcgtgaacttgagttctttggtccagatagagctcttctccaaccagctctccggcaggattccggcggggttgggcggcctcaagaagctccagcaactggacatctcgatgaaccacatctccggcgagataccggaggacatgttcgccgcgccgagcctggagagcgtgcacatgtatcagaacaacctgaccgggcggttgccggcgacgctcgcggcggcggcgaggctgaccgagctgatgatcttcgccaaccagatcgaagggccgttcccgccggagttcgggaagaactgcccgctccagtcgctggacgtctcggacaaccgcatgtccggccggattccggcgacgctctgcgccggcgggaagctgagccagctcctgctgctgaacaacatgttcgacggcgccattcccgacgagctggggaaatgcaggtcgctgatgagggtgaggctgccctgcaatcggctctccggcccggtgccgccggaattctggggattgccccatgtctacctgctcgagctccgtggcaatgcgttctctggcaatgtcggcgccgccattggccgtgccgcgaacctgtccaacctcatcattgataacaatcgattcaccggtgttcttcctgctgaattggggaatttaacccagctggtggtgctgtcggcttcggacaacagcttcaccgggacagtgccgccgtcactcgcatctctttcggtgcttttcctgcttgatttgagcaacaattccctttctggagagatcccgcgcagcatcggagaactgaagaatttgacattgttgaatctttcagacaaccacctcagtggtagtatacctgaagagcttgggggtatggataagatgagcacgcttgatttgtcgaacaatgagctttctggtcaggtgcctgcacaattgcaggatctgaaactgctgggtgttcttaacctgtcctataacaagctcactgggcatcttccaatcttattcgacactgatcaattccgaccgtgcttcttgggtaatcctggcctgtgctatgggctatgttcaaggaatggtgatcctgattccaaccggcgtgcccgaatccagatggctgtagccatcctcacagctgctgctggcattctactcacgagtgttgcctggttcatttacaagtataggagctacaataagcgcgccatcgaagttgacagcgagaattcagagtgggtactcacatccttccacaaggtggagttcaatgagagggacattgtgaatagcctgactgagaacaatttgattggcaagggttcatcagggatggtgtacaaggctgttgtcaggcctaggagtgataccttggctgtgaagaagctttgggcaagtagcacggtggcgagcaagaagatcgacagctttgaggccgaggtggaaacattgagcaaagttaggcacaagaacattgtcaagctcttctgctgtcttacgaacgaggcatgccggttgcttgtctatgagttcatgcctaatggcagcctgggagactttctccacagtgccaaagctggcatcttggattggcctgcgaggtacaacatcgcactcgatgctgctgaggggctcagctacttgcaccatgactttgttcccgcgatcatccaccgagatgtgaagtcaaacaacattctgcttgatgctgattttcgtgccaagatagcagattttggcgtcgcgaagtctattggtgatgggccggccaccatgtctgtcattgctggttcttgtggatacattgctcctgagtatgcctacactatacgtgtaactgagaagagcgatgtatatagctttggtgtggtcatgctggaacttgttactggaaagagtcccatgtcatccgatattggtgacaaggacctggtggcatgggcagccaccaatgtggagcagaatggggcagagtcagtgctagatgagaagattgctgaacatttcaaggatgagatgtgtagagttctgaggattgcgctgctctgcgttaagaacctcccaaacaaccgcccgtcgatgaggcttgtggtgaagttcttgcttgacatcaagggagagaacaaaccgaaggcgatgaagattacggaggcgctccctgccacatga

SEQ ID NO: 21733 - DNA, 1581 bp, Oryza sativa
  Clone ID: PAT_MRT4530_26978C.1
atgcctccttccctctccctccaccaccacctcctcctcttccccttcccttcccatgtccaaaccctaaacccgctctccgcctctcctcgcctccacccacatagcaaatctctcctccccaggcgccgcccgctcgttacctctccctcctccttcgccgtcgccgccgtcgatgaattcgacgaggatttcgccatcggcgactgcgtcgtgttcgaggacgacgccttcgaggagcccgatgtcgacctcccctctccggcgccatcgaccacctcgcgccccaggcggaagccggccgcggaggccggcggcggaggggggagtagcctggtgccggagaggtggagggacgcggcggaggagataaacctgacgaagaaggagaagcgccgcatcgcgcacggcttgcgcttcgggagccgcctcgagcggcgggcgccccccgccgtggccgcgcccgatgagtaccgcgcgtaccgcgaggggaggctggacgcggagctcggacgcgtcgcgcgcgactaccccgagccgatcgagaggtcacccgtaccggatagagtggaggctccgccgcctcctgagcctggtgctcgtgtggcacctaggaatccgaggttggggctgggccgacggaagctgttcacagatgaggagaaggttcttctgaacaagagagtacctgatcttgaagctgctacttctagcaagtggcttccacttcacacaattgcagcatcaggagatttctatctgttggacaatcttctaaaacataatattaatgtgaatgcccttgataaggatggtttaccagctattcataaagcaattctttccaagaagcatgccattatcaactatctcctaaggaattcagcaaatccattcatccacgataaagatggtgcaaccctaatgcattatgcagtccaaacagcatgcagtcagaccataaagactctcttgctgtacaatgttgacattaatcggccagatgattatggatggacacctttgcatctagctgtgcaaacacagagaactgatatcgttaagctactcttaataaagggtgctgatagaactttgaaaactcaagatggatttacccctttggagttatgcctccggttgggtcatcatgcaaggacgtatgaacttatcaaattactcaagagctttcgtctaccaaagcaacatgacccagttcagcacttggatgatagaggttgctccttgaagggaatcaacaggttgtggtatgcccatgataattggaaggccaaagttccatgatatcaatgctgtataatcttaagaggttagccataaaaaactcaagatacccaaattattaatgccaaatataagtttagcgtgacctgcatacttttacatttccagtagtattattttctctttctaccccattaatcttagatattcctagcatcttggatacaaatattaatcaagaattattttgtttctccttcacgtcccgattgttagtgtaaattctcactgcatcggcagaacagatataatttttctcaccacatgtgaagtggt

SEQ ID NO: 21734 - DNA, 699 bp, Oryza sativa
  Clone ID: PAT_MRT4530_26979C.1
cgcgcgctgctcaccttgttcgtcctcacctcacctcacctttcctcgctcatgccgccccccgctcccctcgcgccgctccgctcccgcgcgcacctccgcctccattgccgcctccctccctcgccctcgccctcgccatcgcctctcctctcgcgagctccctctcgcagatggcctccgcctctccgcgcctccgcctccggtcgcgggggcgcttccgccgccgccgcgccgacgagctcggcgctcgacgcgctcctctccgccgtggagctgctctgcctcgcgccgcccgccatctgctcggtggtatgcgcggcccgcctcgtcttcccgccgccgacgacgacgggcgcccccgcgtcggggctcgtgggcgggaggatgttcgtcgtgcagtacgtgcttctggtgggcgcggtggctgtcgggagcctgatccggcggaggcagtgggggcggctttgccaggtgggtgtcgacggcggcggtggcgccgcggctaggggtgtggatttcgcggggaggattggcgaggtggaggagagcgtgaggggcgtggtggcggccgtcggtgtgctgtcgaggaccgtcgagaagctcggcgtcaggtttagggtgttgcggaggacgctgagggatcctatcaatgagctttttgtgcctactaaattgtccagaagcaagtgcacctaa

SEQ ID NO: 21735 - DNA, 297 bp, Oryza sativa
  Clone ID: PAT_MRT4530_2697C.1
atggggacaaaggaagatgtgtggttgagaaggtgcactggtgtatccatgcggcgtgaaagagacgggctacggcagttatcgcatgcctcggcgggtgactgcccgtcgcatttgtcgccgcacgcggatgtcacgccgctgccgtcgcacgaagcgccgcatatgatgtcacagtcgccgcagaacctcgccgccgtcgccgggccgacggaggaggaagacaggatcagcgggatgcagacggcaacgacgatggctgccttaggagaggctgcacggcaagaagccatgtaa

SEQ ID NO: 21736 - DNA, 338 bp, Oryza sativa
  unsure (1)..(338): unsure at all n locations
  Clone ID: PAT_MRT4530_26980C.1
gaagggggcaccactgggcttgaccaccttagagttttattcattcgtccttcatcccatgacgaacttcctggggcgagggtcgggttagggncnccgagggtccgcgtcgcgggggcctggttgagcagaaagctcggatgctgcagacgcagggggaagcgccacgctcgcggccgctggggaggcggtggaggacctcgaagaggcactcctctgctgctccaccaccaaacagaaatcaagaatcaagaaaccaccattagagcaaaccaaacacctcaaatcaacaacaacaacaagaagaagaagatttaagtaaaaaaaaaaaaaaaaaa

SEQ ID NO: 21737 - DNA, 526 bp, Oryza sativa
  Clone ID: PAT_MRT4530_26981C.1
actttggtcagactcgccccgccagtgctgccgcagcagcctcaggtggcgttcacaagcgcaagctcagggatcggcttcgcccttcgctccaccgtacccgagccggggacccccgacaattctgggagatgaaaagaagctaccgttgagctggcgactgtgaaatcatcccagtccactccaattcaagtacccgaccattaccaggtacacgggcaattcggacccaagcaggttcctttcaatttatgaatcagcaatcgaggtggcatgtggggaagaaaatactaaggcaagcgttatacacctcgccttagacggttttgctaggtcttgttctgtcgacctcctgacaagcagtggatactcgtggaaacatctgagacatgtgctcatttgaaacttttgggggacttacaaagagcccaatatccaacaggaactgttcggaattcggcagaagcctaatgaatcgacacgagagttcgtgcgaaaggttttctcaaaccaggtgccaagtcca

SEQ ID NO: 21738 - DNA, 1712 bp, Oryza sativa
  Clone ID: PAT_MRT4530_26982C.1
gcgccatcgatcgaaacgggtcactgagtctcgcagcttcgccagcgccggagagagacacgacacgatcgatggcgatcgcgtccatggccgccgccgccgccgccgcgatcgtcggcgcggtgcgggagcacgtgcgggcgagcgacctggcggtggccggcgcggtgctgttcgcgttcagcgccgccgtgagcgcggtgcgggcgcggcgccgcggggcgccggtgctgtggccgctagtgggcatcgtgcccacgctgttcgtccaccgcgacgacatctacgagtggggctccgccgcgctgctgcgcgccggcggcgtgttcccgtaccgcggcacgtggggcgggggctcctccggcgtcataacctccgcgccggccaacgtcgagcacgtgctcagggccaacttcggcaactaccccaaggggccctactaccgggagcgcttcgtcgagctgctcggcggcggtatcttcaacgccgacggcgaggcgtggcgcgcccagcgccgggcggccaccgccgagatgcactcgtcgcggttcgtggagttctcggtgaggagcatcgagcagctggtgtacggccgcctcgtgccgctggccgagcggctgagtggcggcggcgccgccgtcgacctccaggaggtgctgctccggttcacgttcgacaacatctgcgccgtggcgttcggggtggacgccgggtgcctcgccgacggcctccccgacgtgccgttcgcgcgcgcgttcgagctcgccacggagctctcgctcctgcggttcgtcaccccgcccttcatctggaaggccaagcggctcctccgcgccggcagcgagcggcggctcgtcgaggccacgcgcgccgtccgcgagttcgccgagcgggcggtcgccgaccgccggaacgagatgcgcaaggtcgggagcctgcgcggccggtgcgacctcctgtcgcggctcatgtcatcggcgccgggcgccgactactccaacgagttcctccgcgacttctgcatcagcttcatcctcgcgggccgcgacacgagctccgtggggctcgcctggttcttctggctgctcgccggccaccccgacgtcgagtcccgcgtcgtcggcgacgtcctcgccgcgggcggcgacatcaagaggatggactacctccacgcggcgctcacggaggcgatgcggctgtacccgccggtgcccgtcgacttcaaggaggccctcgccgacgacgtgctcccggacggcacgccggtgcgagcgcggcagcgcgtgatctactacacctacgcgatcgggcgcgacccggcgtcgtggggcgacgacgcggccgcgttccggcccgagcggtggatgcgcggcggcgcgttcgccggcggcgagagcccgttcaagtacgcggtgttcaacgccggcccgaggctgtgcatcgggaagcggttcgcctacacgcagatgaagaccgcggcggcggcggtgctgtccaggttcgccgtcgaggtggtgcccgggcaggaggtgaagccgaagctgaccacgacgctgtacatgaagaacggcctcatggtgcgcttcaggaggaggtcgccgccgccaccgtcgccgccgccgcgccacgtcgtcgccgacgacgacgacgacgacgacgttgcagccggtcgccacgttgctgtcggaagctgcaacagtaaccatctctaa

SEQ ID NO: 21739 - DNA, 1599 bp, Oryza sativa
  Clone ID: PAT_MRT4530_26983C.1
atgggacacatcgacttcgatcttaagagcagcctgataactatggcgcaggcaagcccgttctgtggcaagctgaacgaggacgcaagcgctcatctgcaacaatttctagagatctacagcacctacactgtaaagggtgtcagttcggacgctgtcaggcttcgtctgttttcattctcactcctggggaaggcgaagcaatggttctatgcgaaccggatgacagtcaacacttgggacagatgctccaccgcgttcctctcaaaattcttccagatgggcaagaccaatgcctttcgtaggagaacatcaagcttccagcagactagggatgagacgatattctcgaagcatgggaacgtctgcaggagtatgtggccacctgtcctcatcatggaatggacgactgactcattctgcaaagattctacaatggactcattccctcatctggaaatcatctggatgctactgctgggggtgccttcttctcaaagacgactggacgatcaggagaaggccaaaccgcaagccactgtcaaggcattagactcgcacatcacatgcaaggtctgcgagaacactggtcactcagggaatcattgcccggagacccgtgaggaagccatgttcatggggaataatggctaccggccgcaaggaagccaggggtggaaccagccccgaccatactatcaaggaggcaacaacggcaacaataacaataacagtaacttcaatcagccctccgtgaaggacttagtttttgcgcaggctaaaacaaatgatgctataaacaaaaagcttgccttgaatgttaaagttcttgagaatataaatgtcaagctagaaggctttgcttccgctttccaaaaccagctgagcttcaacaaaatgatagactctgctgggaccaagcaagctagaaaggaggcacagcccgctagcataaatgaacccgaggaagatgaggagatgcagctcaacaagatcgcgccgcaggaatactgtgacacaacgcggctgccgtttcctcaatgttggaagaagccctccatggacgagcaatttgctcggttcatggatgtcatccaaaagatccacatcaacatcccgttggtggatgcattgcgggcccaatgtgatcttgaggccagtgtcagcgtgatgccgaaggacgccttcgacaagctgaactatacggggttgattccaacaccgatgaggctccaactggctgactcctctgtctgctatccagtgggcatcgccgaggatgtgccaataaaagtcagggatttcttcatcctagtggatttcgtcgaacttgaggtggagttagataaggagacgcctttgattctggggcgtccatttttgagtaccgcggaagccaacattgatgtgggggctgggaacatccggttccacatcaatggaaaggagcagaaattcaactttagaccaagagcagagcaatgctctatggtcaagatcaaatacgacctgaatgcacggaacatgaaggaagttgaagtgcagccgccaaaaatggacagcctcgtaaccttcatgaagaaatacccttcatggtga

SEQ ID NO: 21740 - DNA, 1470 bp, Oryza sativa
  Clone ID: PAT_MRT4530_26984C.1
tcagttattaaccagtttcggatgtcctgtttccttgtctatctccactcttagacctatgtcagcaatctctggagttataacagcttcttgcatcttaagtccagatacctccttctggttttcctcatttccttcaagcaagttcttcacagcaaaaagaccccactccctcaagtatgggttttcttcatcaacaacacactgctgcaagagtaaaataatcccatccaggtgcctcacctcatcctgcacttttttgcttctatgcaagcaattagcaatcacagcgactacatctctcctgtaaccaatgtatgggcagacttttgcagttcctaaggctggttgatgatctccttgtccccttgccatagattttctgatcatacttgggggttctagctcacgtaagtacgttagaagatgctttacaagaccagtctgcatcagtgagtcaacaggagcctgtgtgtctgacggaggggattcccaagcacatatatccttcaagagcaccaatgaatatccaagtacatcaattgcagggtgaccagttggaagaggagagttaactcggcaagtaaaatccacaatctcagcagcatgcttctgtgcattgaaaatatcaagtgcaaaactgatcgatacactgacttctttaggtcggttagccaaacattttgacaatttacccaaaagatatgcatgcttagcattaaactcagttttgcattcatcaccatcactgtgctcagcatcattgcgtgagcataaagctacaaacaatgtttcaaacttttgctcctcaacacagattttgaagagaagccattctaaccattcttcatcatgccccacttgccaggcagtagtgacgatttccacaagtatgggcagccctaactcctcgtggcagagctcctcgagcctcccgcggccgccttcgccggagcagcaggtgtcgatcaccatgcacagtgggtcgaggactcccttctccctgacccgcgcgagctccagcagcgagccagggaagagcgcatcccagacggcggcgcggtggtgctccccggcgagcgcggcgttgcccagcgcctggaggcccgcgcgcgcgacgtcggaggagtcggagggggaggagagggcggaggagacgaccgcggcggggccggagaggaggacgaaggtgccctggttgaggtcgtcgccggcgaggaggttgcggaggaggcggaggcggaggagcaggaggcggtgggtggaggccggcaggaggtggagggtgtcggcgagggcgtcggagagcgcggcccggccctgggcgcttcgggaagcttctagaagcgcctctagagtttcctcgtcctcgatctcctcggcttcccacattttctcctctgcgccgttgcggtttcgccggcggcggagagagaaggagacagctgttgctggaatggttatagaatg

SEQ ID NO: 21741 - DNA, 141 bp, Oryza sativa
  Clone ID: PAT_MRT4530_26985C.1
atggcgcctaagaaagacgccggcctggcaatgggcgtcagcgaggcgccggtcactaacaaggtggatgctggggtgaaaggaggaggtggcaacgacattttacacaagcacgcacacatcggggaggagaggcattag

SEQ ID NO: 21742 - DNA, 459 bp, Oryza sativa
  Clone ID: PAT_MRT4530_26986C.1
ctgggttgggggtgtttttttttttttttttttttttggttttttttttttttttttaaaacaacaaaaacctggggcttaattttatttttttgcgataaggaattacaccccaccctaaacggcgaccttttgaggggccctgtacaaaaacaagcgaagaaggggggccagtttttttggaaaaaagttatcacttaaaagggggctttctcctaaacatgaactttgccactaaggaccgggggaaaaaaaacttccggggccttgactcagcttttggggttgctataggggccgctttagggagcaaccttcgattcttataggggtgggggttagatgaccctactgggtaaaaagagggggaggggttctttacctgggggattgggccaataggaaaaaatacctcaccagtatttcggggtttctcaagaggggctctcctttttttta

SEQ ID NO: 21743 - DNA, 3399 bp, Oryza sativa
  Clone ID: PAT_MRT4530_26987C.1
atggccaacctcctcggcacagcctcttccgcatccacagtgctcatagccagcctcctcggccacgtaggcctccagagcacagcctcttccgcctccacggtgcagccaaccagcaaacaccagagggcgtcgagttgggacagtggtgttggttttggtgagagcccaaacaatgatcacgtggtccccatgaacaaagatcaacttacaccacaaggaaacaaactcagaaaccacgtgactctaccaaaccacatcgatcgaacagaaaaaatcgcaaagatggagaacgagaagggggaagctaagaagaaaaagaagatctgctccaaatctgaaagtcaactccaaagaaaatttaaagaaggaaaaaatgtatttggagagtctactcaactgagcaacatgctgggcacaggagcagaacaagtcatcaaagaaaaagaactaataggaaaaaatgtatttggagagtctactcaactgagcaacatgctgggcacaggagcagaacaagtcatcaaagaaaaagaactaataggaaaaaatgtatttggagagtctactcaactgagcaacatgcaggacaaaaaagctgaacaaatcatcaaagaaaaagaactaataggtttgtttacaccaagagttacctacagcccacaagcactacatgatgagttaacaatgctcaactcacaaacgacacaggaagggcaacaaaacttcacaaggttgtttcagacaccaacagcatatcatatctcagaatggacaacaattgaagatttgtatgaattgaagaacacacatttcaaatcacagggaaaatcaagcagtttcacaaatggagatgaacaaccagcaatatacacaaacaatgaacaggaaattagtctatgcatacaagatcaacatatggacaaggagaatggaactgctcaagaaacagttgaagaaattcaaatacagcaaacagagcaacatgagacaatgccagaaagcaatgaaacatcaaattcagaacctaacagcagagaagaactaaatgaagaggatattgataatttcttgagaaatgatgaggatggcaatacacaaattgacaaaaagcacatacctgagcttggaatgaaattcaaaacagacaaagaagctcatggcttcttcaacttttacgcttatttagctggtttttctactgtgataactcatcactacaagtcaacaagtaaaaagagaaatggtgagattacaaagtatacatatagatgcaacttgcaaggaaaaaatgaaccagaggacaaaaatgcagaacaagaagaagaagaacaagaagaagaagaagaagaagaagaagaagtggaagaagaagaacaaatagaagaagcaacagaacaagaaaggcaaactaatgttcttaaaaagactggctgcaaatgtatgatgatggtggaaaaaatgtttgccctaggagatgtatggcaaatagcaacactagatttgaagcataaccatgcactttgcccaaggagagaggcaaaatttctgaaatcgcacaagaatatgacaataaaggagaaaaggctaataaggacattgaaggagtgcaacatacccactaggagcatgattgttatcctctcatttctgcgtggtggcttgccagcactaccctacaccaagaaggatgttagtaatgttggaacagcaataaattcagaaacaagaaacaacgacatgaagcaagtgctggcttatctcagaaaaaaagaaatagaagacccaggaatatcctacaaattcaaactagatgaaaacaacaaagtgactagcatgttttggactgacgggagatcaactcagctatatgaggaatatggtgactgcataagttttgacacaacttacagaacaaacagatataacatgccatttgcaccatttgtaggagttataggccatgggacaacctgtttatttggatgtgcattcctaggtgatgaaacagcagaaactttcaaatgggtttttgaaacatttgcaacagctatgggagggaaacatccaaagactataatcactgatcaagacaatgcaatgagatcagccatagctcaagtgtttcaaaacacaaagcacagaaattgtctatttcacattaagaaaaactgtagagaaaagacagggagcatgttttctcagaaatcaaacaaaaacctatacgatgaatatgatgacattttgagcaactgcctgacagaagctgagtttgaatcactctggcctcaaatgattgagaagttcaatttgcagaatgtgaattatttgaagataatgtggaaaaatagagctcagtttgtaccagtctatttcaagtatgatttctgcccttttatacagagcacaacactaagtgaggggacaaacagcagatttaaaagaggagttggaccacaacatagtgtaatgagtttcatgaaggaatatgagaatataaatgatactatctttgacactttgtacagcaaagatttccaatcaagaccaaagaagccaaagaccttgtggttcaactatctcattgaagagcaagcatcagaactatacaaccttgaaatattcaagaaattccaactagaactaaaggaaacattgagtttgcaagtatcagtgctacaacaaggtaaagtttatgaagtgtttgtgtcaccaaccagcatacagaaagaatatagaccaaggaagcatatagtcattgttgacttaccaaatgaaaactatagttgcatctgtggaaagttctcaaaggatggaatgttatgctcacatgtcctgaaagtaatgttggacctgaatgtcagaaaaattccagaaaaatacataattgaaagatggagaaagaaggaaaggaaagaaacaaaaaagcacatcatgcagaaagaaaatggagataattcagtcctaatgtttaatgtgctgtctaggaaaggagctgacatagcttcaaaagcatcaaaaagaaaaagaacatatgattaccttgtagatgaacttgacaagttggagaagaacattgacttaatgattcaacaggaagatcaaactcaattctcacaacatcaagacagtggtatagaaattgcaaatgcagagcaacaagagcaagaaaaagatgttcaagaagagcacatagaagatcctgatacagcaaatacaaaggggagaaaaccaaaaaggtatagaagaatagtggagaagataatagaaagttcaaagaagaaaattgaagaacaagaagatgcagaagaaaatcagaataaagcaaggccaaaaaggaataccaatgaagaaaaacaaacagcgaattcagcaaccaaaggtaatgctgaaaactaa

SEQ ID NO: 21744 - DNA, 1158 bp, Oryza sativa
  Clone ID: PAT_MRT4530_26988C.1
tggatccccgggctgcaggaatcggcacgagggagagagagaactagtctcgagtttttttttttttttttttttttgcacagtaaaccagaatatattctgagttattcacacaaataaaacgatccatcctagcccggttttagcaaagctaacagagcattcatttcagtaggaaactttcctccttttcagattttcagatcaaggcctgaatagaggcatggccccagcccacaagttcaattcagttttcaaatcaacaaccctgcatggcgacctgaactgataccagattcataaccatttcaccatatatcatccctggcttttatactcctcaaaactacaaatgcacacactagtacatcaacccaacaccacaagttagagcaaggattccaagccttacattcaccaataccttcgctctgcactgacatttggtaagtctacgagtcttggtaacgagcactttgagttgcatgccccaggttaactgtttcagcctttgtagtgaagctgagattgtagaatctggttgtcttccagcaacctgtcgtactccaggagaagctcctccgactgcttctgtagggcgttcacatgggcctccgcttccaacaccttcctctcgtgatcttcagactccgatttcagcttcttcatactctcgtttagcttagcaatctcctggtggagcttcttgatttcactggaagatttctcctccttttcacggaataaccggttctccatttgaagtttctcgacctcctctcttgatgtgttggctgctttcctcagtgtaatcagttttcggaggtagtggtgcaaccggtcaatgacaaatgcaaggaatagagtaaatccgatgagggaggcctcgaggaggtgagtccgccatagcacctggtccatggggctgacggtgccgagcttgaggcccctgttctggatcttgaggatgctggcgacgctggacatgaggatcaccgagagcgtgcaggccagcgtcttcaccgtcgccgggcccttccccgtcttcgcctgctccacgccgcgcatcgccacctcccgcagcggccccaccttcaccatcagcagcagcgccaccgccgcctccgccaacaccaccaagaacagcagctgaatcat

SEQ ID NO: 21745 - DNA, 239 bp, Oryza sativa
  Clone ID: PAT_MRT4530_26989C.1
ccacctgttgggtggaataggaccaggagctcggtggcaccccgcttaagggccacccctggacgaggtgttcctggctgtccggagaaggcgaccatgtaatacgcgtggcggcgagcctcccggcgttttgccaaagtagaccattcccctgtggcctatggtgggtggtgttgcttactggctgagttatcactatgtaccccccgactggccccataagaaatagctaccctgtg

SEQ ID NO: 21746 - DNA, 405 bp, Oryza sativa
  Clone ID: PAT_MRT4530_2698C.1
atggatgctgctggcaagcgcaacgatggcccggcgctgcgggtgacacgaaggggcggcggcggcgcgcacgcacgcggacgggccggaggcggcggcgaggacggcgacgtggccgagacgcgcacggcggcgaggacggcagcacgcacggcgcagcggcgcgcacgcctgcggacaggggcggcggcggcgaggacggcggcacgcacgcggccgcaggctcgaggcctcgacctccctctgccccgagcgctcttgttctcctcgacgcgccgccccatctacgccttcaacgagaggaagcgcacggaggtgaagctccaggacctccccgtcgtgctcggcacctgctgcgtcctccacaacatctgcgagacgcgcgacgaggagctcgagccgtag

SEQ ID NO: 21747 - DNA, 902 bp, Oryza sativa
  Clone ID: PAT_MRT4530_26990C.1
ctagagatcgagaagaagaagaggaggaggcgagctccgtttggtgcgaggcgccgccgcgcgctgcgggcctctcctcctccccgcgcgctccactccaccatgcttccgagccggcagagaagcatcttccatctcggggaggagggtggcggcgccgccgacgccgagcacctcggcgctgaccacggcgacggccatggcgatcacggtatcatcagtatccaccagcagcgccttcgtgtcgtcgggctgcagatcgtcctcgcccagacgaggcaccaccaccgccagcagcacggccatgtcgtcctcaagcagatgcagatggtgtccccgccgccggcggcgcgtcaccggcggcggcggcgtccttgcggtgacttcttgagcgcgtgctccctgtgcaggctggagctcggccccgacaaggacgtgtacatgtacaggggtgaacaggggttctgcagcgaggagtgcaggtggcagcagatcatgacggacgaggcgagggagcgggacgccatggccaagaaggagcggctaggcctgcatcatcggacgccgcggccgccgccggcggcgatccgcggcggctcgccgaggagactactcgccgtagcctagcacgagcgaagtacagtatgctatacttgatgagaccgtgacccatgcttggatgatatatgatcaaaagaaaattttctactgtactctctgtaaaatatggagaaatcgatgtaattaagaaaaacttgataaggaggaaggagagagagagagagagagagccaggttttgagtaatttgaggcaaatttgaggaaacgtatacgcataactgcatgcagtttcatatttcaaatgaacacgaaatgtttggtgcgggaaagaagctttccc

SEQ ID NO: 21748 - DNA, 1155 bp, Oryza sativa
  Clone ID: PAT_MRT4530_26991C.1
atgaaggaaaaaattacaagattacaaccctggagggtcgtaacaaggaaaaagaaaaaaatataccgccacccacacaccgacagcgccaagacacataaccgggagaaggctaacaccggaccggccaccgctaagcgtgaccggccgccgctagacgacaaaggaatacagacgagatcccccaaaagaacaccctcagaaccaacgcaaagccaactcctaaagcatgcttgcaccgatcgagaggcttcggctaggggatgtcaaaacgacgtcttcaagaagagaagcgacggaaaaccgccgcccccgtccgtcagggctcaaaggagccaagactgggctttcgcccggcaaccacccgtgagggatgagacagcacgacaacgccctcaggagggggaattaaccatcgttgcaagcccggccaaggccgggctaggttttcacccgctgctcaacacctgcgaatccacggctgatgcaccgatgctccaccaccagtcaacctctgccgacatgtgggaccactgcaccggcgcccccgccggccagccttcgtgcaccgaagaccgcgccacattcaccggcagctcctcctcgcaccaaggtcgcctcctccaccgccggccgcgcctctcgcgccaagccggcctcctccaccggacgcgcctcgcgtcaatccggcctcccaccaccggccgcgcctctcgcgccaagccgacctccatctccaccgcccgcgcctctcgcgccgagccggcctccgctaccatcggctgcgcctctctgcgccaagccgacacggccgccaccgccgcggcgctgcctcaccagctgccaccacagcagccatccgctcgccgccacagctcgccagccgccgcctcgtcgccaaccggtgcatcagtagccgccgccaccgtcaccgcctcagcagtcaccatagcaaccgccgcctcgtcaccagccgcctcctcgccagcagtcagccgccgccgtcctctaccgccgtcggcagccgcagtcaccgacgcggatgccaaccagccgcagtcgccaccagccgcagccgccaactctagcgccgccgcgtcgtccaccgccgccaccttccttcctcgccgccggctgccgctcccccagatctag

SEQ ID NO: 21749 - DNA, 192 bp, Oryza sativa
  Clone ID: PAT_MRT4530_26992C.1
atggaagttgcggtgcaagagattgctacgtactggtgcgagaaccagtgtgcaagcagaattatctctcgaacaccaatggaagttgcggtgcaagagattgctacgtactggtgcgagaaccagtgtgcgagcggaattatctctcgaacaccaatggaagttgcgatgcgagagattgctaggtactag

SEQ ID NO: 21750 - DNA, 243 bp, Oryza sativa
  Clone ID: PAT_MRT4530_26993C.1
atgatggttgctgcctcttccttggtcggatttgctcggaggtggccaagagggcggtgcaaccacgaccctagggtggtggccgccactgaggaggtggcgcgacacttcaccaacccacgatgctccgacctgggggaccctgctctctactccaaccgctccatcgcgctcgccttggtccaccacaactctaaggtgctcgtcaatgccgagaagactatcgagttgaagcctgactag

SEQ ID NO: 21751 - DNA, 879 bp, Oryza sativa
  Clone ID: PAT_MRT4530_26994C.1
atggccaacgagaacgaggtggatacatccaacaatgtcaaagacaaggacgaggaggatggggatcgtgggagctggcaaacgtgggtattggcgcaggaaaggaaagcccaaggacagcgtgtggaggtaggcttaggaaggagagagggcagagatatcaagggggtgatgacaaatctaaaatctagtcagtacgtcagaaaaagaaaaaaaatataccgccacccacacaccgacagcgtcaacacacaaaaccgggagaaggttaacaccggactggccgccgctaagcagcatgcttgcaccgatcgagaggcttcggctaggggataccaaaacaacgtcttcaagaagagaagcgacggaaaacagccgccaccgtccgtcggggctcaaaggagccaagactgggttttcacccggcaaccacccgtgagggatgagacaacacgacaacgccctcaggagggggaattaaccatcgttgtcagtcaggccaaggccatgctaggttttcacccactgctcaccacctacgaatccatggctgaagcaccgatgctccaccaccactcaacctctgctgacatgtgggaccactgcaccggcgccccccgccggccagccttcgtgcgccgaagaccgcgccacatccaccggcagctcctcctcgcaccaaggacgcctcctttaccgccggccgcgcctctcgcgccaagacggcctccatctccgccgcccgcgcctctcacgccgagccggcctccgctgccatcggctgcgcctctctgcgccaagccggtctccgaccctcctccaaccgttgccgcgtcggccaaatgcagccgtctgccacgccctcgactagccgtctga

SEQ ID NO: 21752 - DNA, 879 bp, Oryza sativa
  Clone ID: PAT_MRT4530_26995C.1
atgatgaagttccacacatgtttcgcccaacctgttgatagcataagaagtcaatatgatgatagaggcgcctcctcccccgcctcgccgccgcctgagcgggcgctggcaaagccgtgcgcccgcaaagacggcggcggcggggcctctctccccttcgcgcccggcggctggggacgccgctcgtcggcgacggtggtgcccagatccgccatggctggccggatctgggggagcggcagtcggcggcggggaatgaaggtggcggcggtggacgacgcggcgcgggagatctgggggagcggcagccggcggcgaggaaggaaggtggcggcggtggacgacgcggcggcgctagagttggcggctgcggctggtggcgactgcggctggttggcatccgcgtcggtgactgcggctgccgacggcggtagaggacggcggcggctgactgctggcgaggaggcggctggtgacgaggcggcggttgctatggtgactgctgaggcggtgacggtggcggcggctactgatgcaccggttggcgacgaggcggcggctggcgagctgtggcggcgagcggatggctgctgtggtggcagctgcggcggccggtcacgcttagcggtggccggtccggtgttagccttctcccggttatgtgtcttggcgctgtcggaccctatcacgtatttcctcatccattcatctatgtacacacgagagacgaatacctatcaatcctcgttagtgagagagaaatcaatccctgtttgtgaagccttcgatgataatcagcttatgattaatttgttgtggtcaccgtggtgtagcatcctggggcccctccggatttacatggatacgtacgtagaaaat

SEQ ID NO: 21753 - DNA, 906 bp, Oryza sativa
  Clone ID: PAT_MRT4530_26996C.1
atgtgtgttgatggatgcccgggctgccgagcattgacgtccttatgtaggaggtcggtggagcgtgccgcacgccacgcgtccgccgttttcttccgcgtcaagtccgctgaggatatcgccaagacacataactgggagaaggctaacaccggaccggccgccgctaagcgtgaccgaccgccgctagacgacaaaggaatacagacgagattgcccaaaagaacaccctcagaaccaacgcaaagccaactcctagagcatgcttgcaccgatcgagaggcttcggctaggggatgccaaaacgacgtcttcaagaagagaagcgacggaaaaccaccgccgccgtccgtcggggctcaaaggagccaagactgggctttcgcccggcaaccacccgtgagggatgagacagcacgacaacgccctcaggaaggggaattaaccatcgttgtcggcccggccaaggccgggctaggttttcacccgctgctcaacacctacgaatccacggttgatgcaccaatgctccaccaccactcaacctctaccgacatgtgggaccactgcaccggcgccccccgccggccagccttcgtgcgccgaagaccgcgccacatccaccggcagctcctcctagcaccaaggtcgcctcctccaccgccggccgcgcctctcgtgcctagcaggcctcctccaccggacgcgcctcgcgtcaatccggcctccctccatcggccgcgtctctcgcgtcaagccagcctccatctccgtcgcccgcgcctctcgcaccgagccggcctccgctaccatcggctgcgcctctctgcgccaagccggtctccgaccctcctccaaccattgccgcgccggccaaatgcagccgtctgccacgccctcgactag

SEQ ID NO: 21754 - DNA, 460 bp, Oryza sativa
  Clone ID: PAT_MRT4530_26997C.1
ctccgccacgcgtgcgactggcgagctggtcatctatagtgctgaccagatccggcacacacggttggcgctccggctgcctaggctccctcagatcgctgccatgaagtactcgacaggcgcccggcttatccttctctgttgaccgtgatagctttcaggaggcgacctagggacctgctttgcaggcggacacgctaacaggagccgacttcgaagccgacgacgcctgagacggaggcatcggagacggacactgctattattgggaggacagcccccaacgagagtgcctcggtgtattctgaccgactgacacctggctgtacggagcgacactcgcgaggccttgtttctggtcaggcacgctgtgtcccacacgttctaagagcacacgatgtactagaagctgctgacactggtagtggtagaacacatagctaccttagcacctggattg

SEQ ID NO: 21755 - DNA, 258 bp, Oryza sativa
  Clone ID: PAT_MRT4530_26998C.1
ccctatcagttgtaaagaaggcaccaagagaaggatgtgcttacttcattcaagacccatcctaactctatggtaaccaccttcaggaaagagttccatcttccgtgctctccccaatgatgttctaccaatgcatatccatctcaagagaagaggctcagaggctccagcataacagaggagatgacttcggtccattcactcccatcccataccagacctacccagacgtttataatcccagaatcctcttagtcg

SEQ ID NO: 21756 - DNA, 1566 bp, Oryza sativa
  Clone ID: PAT_MRT4530_26999C.1
atggcgggcgggtgcaaggcggcgatcgggtgcgtggacgcgcgtgtgccggtgagggcgagctacgtgagcctgtacaagtggccggagtcggacgcggagttcgtcaggtcggtggccatggcgcggcgccacggcggcgaggcggcggcggcggcgccgccgccggagagccccgccgtgccgcaccactactactacaacggcagcggcagcgcgcggcgcggcggcggcgaggggtggtactactgcagcccgagggtggtggacagctactcgtgccggcagatctacctccgcagctacaccttctccaagaagaaggagacggtgccggagcgcacaatggcgtgcctcggccgcgtcagggaccgcggcgccgccgtcttccccttgttcatcccgcaccgcgccggcagcggcggcggcggcggctccgacgccggctctgtcaacagcgcgagcagcatcaccagggagacggcctccaccgccggtgacaggaagaggatcaggcggcggcggagcagcaaggggtgcgccgtggcgcggaggctgcaggaggcgtcgtgcggcgccgtgcgcgcgctcttccaccgcctcctcgcctgcaccaccagcgtcgaggtcgccgacgccggcgagccgaccgcctcctcccccgcctcgccgccgcctgggcgggcactggcaaagccgtgcgcccgcaaggacggcagcggcggggcctctctccccttcgcacccggcggctggggacgccgctcgtcggcgtcggtggtgcccagatccgccatggctggccggatctgggggagcggcagtcggcggcggggaatgaaggtggcggcggtggacgacgtggagcgggagctggatctgggggagcggcagccggcggcggggaaggaaggtggcggcggtggacgacgcggcggcgctggagttggcggtggcggctggtggcgactgtggctggctggcgttcgcgtcggtgactgcggttgtcgacggtggcggctgactgctggcgaggaggcggctggtggcgaggcggtggctgctatggtgactgctgaagcggtgacggtggcggcggctactgatgcaccggctggcgacgaggcggcgactggcgagctgtggcggcggccggatggctactgtggtggcagctggcgaggcagtgccgcggcagtggcggccgtgtctggcagcggcgactgccgacggtggcggatgcggcggcggggaaggcgcggagaagtaggcatggcggcggggaaagatgcggcgacggggggcggcggtggcggtggaaggaggcatggcggcctcagacggctagtcgagggtgtggcagacggctgcatttggccggcgcggcaatggttggaggagggtcggagaccggcttggcgcagagaggcgcagccgatggtagcggaggccggctcggcgcgagaggcgcgggcggcggagatggaggccagcttggcgcgagaggcgcggccggtggagggaggccggattgacgcgaggcgcgtccggtggaggaggccggct

SEQ ID NO: 21757 - DNA, 771 bp, Oryza sativa
  Clone ID: PAT_MRT4530_2699C.1
atggcacgacgacttggattcgcggatgtcgacagcgggaacggaccgacgagatgcaccgaacagatgcgtatactcgacgagaaacaccggcacgggccacgcaaaaggctgccgcggaaccagagagcagcggcccgtagcagacggtatacccaagcgagttggcgaacacccaccgcccctgaccaggtgagggagagatggacgctacgatctaacaagcacggcggcaagcaggggacagagggggggggagaggggcgcaagcaggcgggtggccagaagcaccgacgggcgcggggaagtgaccaagaagcgcacgccgtcgaggacggcagcacgcaaggagcagcggcgcgcccgcatgcggacagggtatgcggcggggaggacggcggcacgcacgcgaccgcaggctcgaggcctcgacctccctctgccccgagcgctcttgttctcctcgacgcgccgccccatctacgccttcaacgagagggtgggcgacctccggcgcgtcgccgtcgacgcgttcgcgtgactcaaggcgcggtgggcgtgcctccagaagcgcacggaggtgaagctccaggacctccccgtcgtgctcggcacctgctgcgtcctccacaacatctgcgagacgcgcgacgaggagctcgagccgtagctccggagacccccgtccgctccgaggccgccaagcgcaatagggacaacatcgcccacaacctcctccaccgcggcttcgccggaaccaccttcctttga

SEQ ID NO: 21758 - DNA, 750 bp, Oryza sativa
  Clone ID: PAT_MRT4530_269C.1
atgggagctgaagcagcccgcggcggatgcatacacaccgctttattgcgaaacctcagcgaacatgtcttgccttcaggaactgacggagctgctgctgcagtaagagcaggccattcgaaggctagctactccgtatgcagccccaccacaggtgagattctgcatctggcgcggtcgcaccgacctcactgtgccgccgccatgggcttccacgtgacggccaaagagttcaaggtggtgcggttaggcgtagaggtgggcaaactgcacctgcacgccattgtgctcaccgttggcgatgcccgaggctggagggccccggccgccatcggcaaccatgatgacgcgttcctcggtttcaccgacgacgacgccagcatcgacagcgatgtgcatgcacccggtgttggcggacgggacgggtgcctccactggagtttcaggacagactacctcgacaagcccccacggcgtcctctccttctcggctctcgccgccgacgattccttccgccgtggctcgtcgccgcgctcaggtaccttgacgacgacggcgatctctccatggcagagaagaagaagaggaggaggaggaagctccttctcgcgaccactgcgcaggaggcccacatctacgacccggactccgacagtctccggaagatggcctccattgctggccgggcgacgacgattcaatgcgactcgtgctgtaccaggagagccttgtccggtttcctggcatca

SEQ ID NO: 21759 - DNA, 473 bp, Oryza sativa
  Clone ID: PAT_MRT4530_26C.1
agcaacctaagagaagatgagcttcttattatgttattccagagaaaattaatcagaaacggtgatgaacatctttccaagaatggtggggggagacccctctcgatctccctctcctttcactctttccctcctcaccttctccatctttatgggtaatttccagggatcttttcgaccacaaaacagaaaagatcccctaaaacaatacaatacctactgaaaaccaccaaaagaaaaaaaaaagaaacaagaaaaaaaaagcagcagaagaacccatcctgtcggccatgcttgtacacttgagtgtacactcatcccatgatctctgaaactgccatcaatcgactgttctttccgttcatcatcttcagggattcctctgctcagatgattggttactcacactgttgaatcacgagttgtatcttggatctatatatatatgcgctgcttgtgttcaagagtgcaaa

SEQ ID NO: 21760 - DNA, 201 bp, Oryza sativa
  Clone ID: PAT_MRT4530_27000C.1
atggagaatgaaatggttacaaacctctcaccatcaaggatgacgggggctgggacgccgccaggcgcgtcgccgctcgccgccttctctcgtgcggtgcgggcgctgttccgcccctccatcgacgccgggaagatgccatcgttggcccggccggttgatagcggcacgcggtcggcgacgatggaggcacagtcgtga

SEQ ID NO: 21761 - DNA, 359 bp, Oryza sativa
  Clone ID: PAT_MRT4530_27001C.1
attaaacaataggctgtttgctattgcacataatcaaaacattaacaggggggcacactactacattcttcttccacttttttttttgggaaatttcctagacgaactttagaggaacattaaacttacaagggaacactgaacaaagggggcatttgggccaaactttttttaggggcatttggggttatactatacaaaagggcacaactaaattcctagaaaaactctagggacaaacccagactttgggtagaccaccccagcagcagcagcccggaggaaggaagcaaagcaaaacaccggggggcaaaaacccaaggcttttgcaacaacctttaggtttggccatcctagcc

SEQ ID NO: 21762 - DNA, 934 bp, Oryza sativa
  Clone ID: PAT_MRT4530_27002C.1
atggcagatcggcagcagcagcacgcgcacggcgagggccggacggcggcgcagcgcctcgggtacgcgcccgcggcgtcggcggactcgccgtcgacgacgctgctccggcgggtgcagacgcacgcgccgaactccacccaggtggtcggcttcctcacgctggccgtctccggcgccgtcctcctgctcctgaccgggctcacgctcaccggcgccgtcgtggcgctcatcttcctggggccgatcgcgctgctcaccagccccatctgggtgcccgtcgccgtcgcgctcttcgtgctcgccgcggccgcgctctccgcctgcgccttcgtcgtcgtcgccgtcgccgccggcacgtggatgtaccgctacttcacggggaggcaccccgtcggcgccgaccgggtggactacgcgcgcagccggatcgccgacacggctagccacgtcaaggactacgcgcgcgagtacggcggctacctgcatagccgggccaaggatgccgcgcccggcgcgtaagactggaggcgagcggcgccacaaaccaaattctgcctcaccaaatgagctgagatcagcgtgcaacggcgcaaccagttccgtgcaacagtcgaagatgcattcagagatcagtgcgcccaccagttccagtcgagcagagggcatccgccatgccggcaacaacaccgaaccatcgcatcacgaaccgccgtgaagaccgaagaagaaacagggagacagggtagagataggagaacatggctacatttgctacggcccatttgtcttctgtcatgggccacaaatagcccctgccgcccaagtggagagaggcaaggtgtgcgtattttgcatttaggtcccttgccgcactcggtccgtccttcaagtcacccttgccgcccttccagggtctacttctgtaatattt

SEQ ID NO: 21763 - DNA, 544 bp, Oryza sativa
  Clone ID: PAT_MRT4530_27003C.1
gcacgaggatcgaggtcccttccgccgcgccggatctaccatccgccgtggccagctccggtgaggctgcggccggcgctcctcctcctcactccggattactgccgccacgcatcctcctctctccggattactgccgccgcatcctcgccggagccgcttcttctccgtccgccgccggagcaggtcccattccgccgccgttggatggggaccatccgtcgcggccggccccatccctcatgtgcgacgagccgtaatccgccgccgccttctccctcttctccaccgcttgccctaccccgccgctgccgcctcctcacgcgctcgcctcccctgtactcgcaccgcgggcgtgagaggccggagagacgaggtcgccgtcggccacctctaccgctgtcgccgccttctccctctctaccgctcgccctacctcgcctcctcgcgtactcgcgccgcgggtgtgagaggcagatcgccgtcggatgcctccaccgccgccttctccctataccccgtgctcctcaatcctctatagcaa

SEQ ID NO: 21764 - DNA, 1224 bp, Oryza sativa
  Clone ID: PAT_MRT4530_27004C.1
atggacccgcgcgtgtggcgccggctgccgcagccgctggtggaccgcatcctggcgtgcctcccgacgccgtcgttcctccgcctccgcgccgcctgccgccgcttctaccacctcctcttctcctccccgttcctccactcccacctcctcctctcccctcacctccccttcttcgccttcgtcgtccccgccgccggccacctcctcctcctcgaccccaccgccaccgcctcctggtcccgcctcccgctcccgctcccgcccgtcgccggcggccccgccgcgttctcgcccgcggccgcgtccgccggcctgctcgcgttcctgtccgacgcgtcggggcacaagacgctgctgctcgccaacccgatcacccgcctcctcgccgcgctccccatctccccgaccccgcgcctctcccccaccgtcggcctcgccgccggcccgacctccatcatcgccgtcgtggccggggacgacctcgtgtcccccttcgccgtcaagaacatctccgccgacacgttcgtcgccgacgccgcctccgtcccgccctccggcttctgggctcccagctccctgctccctcgcctctcctccctcgatccccgcgccggcatggccttcgcctccggcaggttctactgcatgagctcgtcgccgtttgcggttctggtgttcgacgtggcggagaacgtatggagcaaggtgcagccgccgatgaggcggttcctgaggtcgccggcgctggtggagctcggcggcgggagggagggagcggcgagggtggcgctggtgtcggccgtcgagaagagccgtctcagcgtgccccgcagcgtgcgcctgtggacgctgcgcggcggcggcggcggcggcggcggtggcgcgtggacggaggtggcgcggatgccgccggaggtgcacgcgcagttcgccgcggcggagggcgggcgcgggttcgagtgcgcggcgcacggcgactacgtcgtgctcgcgccgcgcgggcccgtggcgcaggcgcccacgagcgcgctcgtgttcgactcccgccgcgacgagtggcggtgggcgccgccgtgcccgtacgtcgtcgtcgcgcaccacggcggcgccggcgcggcgggtttccgggtgttcgcgtacgagccccggctggcgacgccggccattggcctcctcgacgccacggcgcccgtcgccttgcatggcatgcatgatggttag

SEQ ID NO: 21765 - DNA, 900 bp, Oryza sativa
  Clone ID: PAT_MRT4530_27005C.1
atgaggctacgcgtcggcaccgcttccttctcgctctactatctttctttctgtgtcttttggtcggctggagatggtgcacacaagggaaacgacccaaggaccaaggtgactgccaagtgggtccagggcgtgagaaggatgggtctcaatttgaataccaatccacctcaagtcgatgtggagcgtgctcgtcaacatcggcccagcattgttatcgtttaccctgtcaaagtgattgatggccgtcgagtcgttatgcatggtgcgggctctggatttatcatcagttctacagcagatggcaagtgcattgtactcacatgtcgccatgtggtcaaaggaagcaagggctttgacccagctacggatttgctgcgtattaggtttctgcagggtgttgaagaggacatgcaaggtcaattaatattagaagatccatttttagacattgccttcatcttagttagtaacatgccaattatgctgccggcgttgcgttttgccccgggagtggatttgccagtcggcactcctgtcttcctcctaggaaactgctttctggagcaactcccaggctgcaatattcaaactgcaattatgccaacaatacctactgtatccccaggtggaataagtgcaccatgcaaagtggaatatggtcctcatataacaagaagagagattcaatttacatgcccaaacaaagcaggttactctggaagtcccctcctgcatgaagaaaaggttattggaatactagggcgtggcgcataccaagcatcacttgcagtttgcactgaaaatttgatcacctttttggaaacgaggcttggtgtggacgaaggtacgatccctgttgaagacttgatccagatgttatatcagtaccgtacttag

SEQ ID NO: 21766 - DNA, 417 bp, Oryza sativa
  Clone ID: PAT_MRT4530_27006C.1
atggtggcgaaggccgcagcagcaccgctgagcgattgcgacagcagcggacgacggcgctgcagcggtggagcgagacgaaggcggaagcggcggcgctcggcgacggagaaggcggaagtggcggcgctcggcgatggcgacggcagtagcggaggcggagacgttgcccggcgcacgggggcggtcagatctgcgtcccccgaccacatggaggccggatccggacgccggcggtcggcgcgaggcggcggtcggcgcgaggcgaccttcgccgcgacggcgcggaggtgtatggcgacggcggtggtggagccggatacggctgcgctcggcgacgacgcacggaggaggcggaggcgccagcgccggcagcggtgcgagagggagagggaagacgagagagagatggtgtga

SEQ ID NO: 21767 - DNA, 642 bp, Oryza sativa
  Clone ID: PAT_MRT4530_27007C.1
gggcccgcacaagccgacctgagggattcaatagctcaagtgaagtccgacattgttgttaaggaggactccatcgtttttgcgctcatcaagcagcagcctacactcccgctgccgaagctaccggtggccgttgcacccgttgggcccggggggtgcgttaccccgaggccctcgctcggccgccacgtggcgaccgagcgggcggaggtcgtgactggctgccagcggataggacaggcgtcagcgcacccacgacctgcctattcaggcggcgtgggggcagccgtatccggctccaccaccgccgtcgccatacacctccgcgccgtcgcggcgaaggtcgcctcgcgccgaccgccgcctcgcgccgaccgccggcgtccggatccggcctccatgtggtcgggggacgcagatctgaccgcccccgtgcgccgggcaacgtctccgcctccgctactgccgtcgccatcgccgagcgccgccacttccgccttctccgtcgccgagcgccgccgcttccgccttcgtctcgctccaccgctgcagcgccgtcgtccgctgctgtcgcaatcgctcagcggtgctgctgcggccttcgccaccatcaccgactaccacttcttcctcgtcctctag

SEQ ID NO: 21768 - DNA, 505 bp, Oryza sativa
  unsure (1)..(505): unsure at all n locations
  Clone ID: PAT_MRT4530_27008C.1
attcggcacgagtcctcgtggccgttttgtcaatccatttcttgaaggtctagttagggtagtttcccggatcacattgatcttggatgatctagatatcattgatgttgctcgtgactacaatctcactcccctctttactgacctacttcagatgaatggtctcgacactgtccagattgtctctgctactgcactagagaatctctctcgccagtcaaagcttctagctaggatagtgccggctcccaacccaggatttggtttttcaatatttccatgcctcagtcagaagtccgtggcaactggcgcttgcagagtccatgttgggatatgttctgcaagggagagcttttgtctcttggaagggaaggcagtagaaaagttggtcgcttgcttggaccacaacaatgagaaagtggttgaagctgctctagcagcactgtccaccttgttggaggatggagtagacattgaacaangtgtcatggtcttgtgtgatgca

SEQ ID NO: 21769 - DNA, 1623 bp, Oryza sativa
  Clone ID: PAT_MRT4530_27009C.1
ggaatatgagccacctggtactcctggagcccccgccctgctgcccccccctttttccttgtggcttcttgtttttttttttttttttttttaataattagtgttctcatttattattgccccaagccatcatataaaagggacttcagaaaggtagatcaacagctcataataattcacagtgtatgtctattttcaaaaccatttacaacgaaaaggccggtctaatggcgtcccttccccccaacctacgcccagccgacctctccaatctcctttgctttcttccttccattggaccattcacggtacaggggaagtataatcaagagttctccaatagattgtaactggtactaattaagcagcagtggcaactggagtgtcaggatgggctccccattcagtccatgatccatcatatacaggaacgtcggttttgccaaggcggtggaggcccagagctaatatacatgctgtcacaccagtaccacatgaggacaccaggggttgatcaagcgatataccttcttgttcaaatcgtttacggagctcttctggaggtaatagcttttgcgaactgtcaagcaactgagggaaaggaacacatttgctcccaggcacatgcccacttcttattcctttccgtggctctggaactgcaccatcaaatctaggctttcctcgagcatctataagttgatgtgtcttggcatcaatgttctcttttacctggtcaagattccaaataagatgaggctgcaactttgcttcaaatgtggagggaccaaccaactgcccctgataaactttctcaattgcttcacgagcagcactggcttttaagatggcatcactagaggcacttgattcaacatcatacccagaagcacgccattggggcaaaccaccatccaacacccaaactttatcatgtccgaaaacacgaaacatccaccaaacacgagcagcgctaaatagtccctttccatcataaactactatcccatctttgttgtatattccaagcgaagatacagcagcagaaaatgccttttcagatggcagcatgtgcggcaacttctggtgttgcctaaagctatttttgttgacgcttgatgttctgtctgatattccatcaacatcaaagaatagcgccccaggaatatgagccacctggtactcctgaagaggattcctttgttcggcaggcatataccaagaggcatcaagtaccttcacatcggggtccttgaggttggcgtgcagccactcggccgaaaccacgggctccgtcctcggcagcgcgttggtagcctccgaaacggccgacgacgaggtggcgttgcagcgcgccgcgatcccgaacgaaccgacgccccccagcgccgccggcaccgacgccctgcacccgaacccggcgccctcctcggcggcgcgcgcccatccgactcttcccccgaccgcgaggagcgaggcgatggtggtggcgaggaggatgaggaggggaggaggaaggagggtttccttggggagggaggaggacagtatgtggtgcgagcgggcgccgcggagggagacggcggcggcggcagcggcccgggagaggagggtggccgccat

SEQ ID NO: 21770 - DNA, 616 bp, Oryza sativa
  Clone ID: PAT_MRT4530_2700C.1
atgcacggcgctgcagcgcgcacggcggcgcgcgcgcggcaatcaaacaatgaagagttcacgccgacgacaaaacaaagcaatcaaactgcagaagccgcggtggaggaggttgtgggcgatgttgtccctattgcgcttggcggcctcggagcggacgggggtctcctgcaaggtcttgtcgtcgacgagctcgtaccggagctacggctcgagctcctcgtcgcgcgtctcgcagatgttgtggaggacgcagcaggtgccgagcacgacggggaggtcctggagcttcacctccgtgcgcttctggaggcacgcccaccgcgccttgagtcacgcgaacgcgtcgacggcgacgcgccggaggtcgcccaccctctcgttgaaggcgtagatggggcggcgcgtcgaggagaacaagagcgctcggggcagagggaggtcgaggcctcgagcctgcggtcgcgtgcgtgccgccgttctcgccgccgccgcccctgtccgcatgcgtgcgcgccgccgcgccgtgcgtgctgccgtcctcgccgccgcctccggccccgtccgcgtgcgtgcgcgccgccgctgccccttcgtgtcccccgcctgccgccat

SEQ ID NO: 21771 - DNA, 122 bp, Oryza sativa
  Clone ID: PAT_MRT4530_27010C.1
ggattctgccgcagaagtcaagcagcttctcaccgggggcgttcccgaaagacaggctgggccggaacctctccctccgcgccatgaagatcagccagcctgcccccgctgtgcgcgtcaag

SEQ ID NO: 21772 - DNA, 311 bp, Oryza sativa
  Clone ID: PAT_MRT4530_27011C.1
tcgcccactcgttcgcccacgcgtgcgctcactcgtacgttttcaatcacccgtggtggaactgagaaactgccaagttatgcagcagcagtgctgccaacagctaaggatgatcgctcaacatttttactggcaggccattagcagtgttcaggttattgtgcagcagttactgctacaacaatttgctagggcttactttgatcacagttaagctcaagcccaagctatgttggccctaaacatgccggctatatgcggtgtgtaccaagactacaatacttgcttctgtggcattctcacccgtgggg

SEQ ID NO: 21773 - DNA, 573 bp, Oryza sativa
  Clone ID: PAT_MRT4530_27012C.1
ctcaatactcatatctaccttcttcctctcatctgtcctcgtcaactacggaaacaagctcaccactcactatccacacaccaacacacaaactatcacaatgcatttaagcatctatactacgctcctcatcccgacacttgcagctgccggccgcctcggcggcatcgacatgaaccgtgcctgcagagaccagtatggaggcagctggtccgcatacgtgtcactccaaggaggcgggtgcaacgcctggaggtgtgcttataacggaggggaagccactccgcgcagtatagatacgccgagggcatgtgtgaatcagtatggtggtggagcgtatgcgctgtgctataacggcgagtatgattggagttgttttagagattgagttgggggaggtgtgaagtctatattcgtgtatgttggggtcaagtccggggtcatgaggacttttacagttatgtctgcgtagacgagggcaagtttgtcttgcgagaagttgataggatctgggagaaggatgctaaaaagcctttagcggacaggtagatgaatgacacgatacttttgccc

SEQ ID NO: 21774 - DNA, 263 bp, Oryza sativa
  Clone ID: PAT_MRT4530_27013C.1
tctcttattggtcaaggagaaacaagtcagtttgataagttatatatctttctcttttgtaaacgaggtagtctacaggtttcgtattcgaactagaaagattttacttattgatatactagcttttatgcagataaaaacatggtgagtgaaataatattccgagtttttaatacaatacaagagtgatttttaggctaaaaaaaaaaaaaaaaaaaaaaaaagaaggggaaggagggaaaaaaaaaaaaaaaaaaaaaaca

SEQ ID NO: 21775 - DNA, 144 bp, Oryza sativa
  Clone ID: PAT_MRT4530_27014C.1
atggcgaagctcaaggaagtgccggaggtgtgggggaggacggtgattgacatagaaatggctagaggagggccaacaatgaaggagggttatggggtgagatttaggggcctttctattttggtggctctaatatggcactag

SEQ ID NO: 21776 - DNA, 487 bp, Oryza sativa
  Clone ID: PAT_MRT4530_27015C.1
agagacatgatacttgtctttctgatagaccagcccaactgataaactaccgcccttaaatcttaactcggagctatctgtgcagacaaaataaatcacaagtggtacataacaaagtatatcttgtgcaacatgaacaaaggtggaccactgatcctgctcaaccacctgctccttgatagctcctaaagcaccatgacgcatccattcttacctgggtgcagactatccactctccatgacaactgaatttcttagctggaccaatcagtacatacctcatgacatgatgctctaccactgacatctcaagagtatcataccttcctcagcaactctagcggagacataatgaagtcaacccatgaactcgcgacatgaatgtcaaacattaactatggacaggtctttgacatatgccactttatagcttcaacaaagcatcaagctttatgccagcacatgcgatcctatgactcatatactg

SEQ ID NO: 21777 - DNA, 269 bp, Oryza sativa
  Clone ID: PAT_MRT4530_27016C.1
gcgccaaaacgggacggaaaccccctttaaaggtttaatttttacccggttaagctttcggtttattcaggtacccctagtccgacaccctagcgggagccttcattaaaaaggcttcaactttttaaaagaccccaaacaatatttaaaaatataggattttggggggaaatcccgcgaattaaccaaccagggggggtaaccaaccaagagggaaaggtttcttcaaaaagggggggctttgccttaaaagatctacctggggggtg

SEQ ID NO: 21778 - DNA, 1275 bp, Oryza sativa
  Clone ID: PAT_MRT4530_27017C.1
atgacgcagacgaatcaagccatcgaggtggacggcgatcggctgtcgccaccgccaccggcggcgtcacccgccgtgtccgccgtactcgagaacgatgacctcgtcggcgagatcctgctccgcctcgccttccccaccaccctcgtccgcgccgcgctcgcctgcagacgctggctccgcgtcgcctccgacccctccttcctccggcgattccgcgagctccacccgccccgcctcctgggcttctacgtcacgagcctcaagataccgcgggctcacccgctcttcgtcccgatgccgccgcctgcacggccaccggagctcgaccccgtcgtccttcgcggtggcaacttcagcctcgcttacgagggttacacgaccagtatctaccagtgcaggaacggtagcatcctcctcttcaaggagaggcatgatcggcgcgagctcaaatacgcggtgcacagaccgctgcagcatcctgagagaggcctactcgccatcccgttctcttcaacacatgacgatgacgatgacgtcgagcctgatctcggcttcgacgacgagaatgtgtgggggttccacttcggagaggatggcggcagccagctataccggttatcggtgatgttcaccccaaggggagctacttccgcgtggttctacgcattccgggacggcggatggcatgtccataccaaggcgacggcacagctacctggcttgccaccggaatcagctgggttcgtcgtggtccgagacaaggcctacttggcagccacttcgagcagcgttcttgtgttggacttgaagtcctcgagcttgtacaccatccagcttccagatggggtggagttcccacctgtgatgatgtggtataatgatcgaagccacgacgttttgttcggacgagcgagcgatgattctggggtttatatcgccgatctgaaggagcctcagcttcgtatttggctacttaagcatggcagcactggatggactctggttgataccatttgtttgcggtcgatgtgcgctaatttgcacataaattgtgtgggcggggatagtcgtgttgtttacatggattatgtaggggacgatgctgagtttttgttcttgaaaacagatgaatgtgcactctacttggatgttaagagtaggcaacttcacaaggtttacgaggtgacagaaaaggatgaaatcttgttttcaatcatgccctttatgatgatatggcctcccatattccctgtgaggaaggaaatatcataa

SEQ ID NO: 21779 - DNA, 2871 bp, Oryza sativa
  Clone ID: PAT_MRT4530_27018C.1
atggcggagacggcgatcacgacggtgctggcgaaggtggcggagctggtggcgtgggaggcggcggtgctgcttgaggtcggggacgacgtccgcctcctccgcgacaagctggagtggctccacaccttcatccgcgacgccgaccgccgccgccgccgccgcgacgacgagttcgtcgccgtctgggtgcgccagacccgcgacgtcgccttcgaggccgaggacgcgctcgacgacttcctccaccgcgccgcccggaggcaccgccaggccaccccgctagcggcgatgctgctgccttcctgtgccgccgccgccgccgcgtggcccccgcgctgcgccggccaggtcgcgctccgccacggcctctccggccgcatccgccagatcaggaagcgcctcgacgagatctccgccaaccgcgccgcctacaacatcgagcacacgccgtcccccgcctgggctacccacccctcctccgccgccgccaccgccctcgccgcctgggatgatttcgaagagtatactgtcggcttcgacaagtacagcaacatgctcaaggagcagctcatcgacgacgccgtcaccggccgcgccatcgtctccatcgtcggcgagagcagcatcggcaagacgacgctcggccgcaaggtgtaccagagccccgaggttcgcaaccacttcgagatacgcacgtggacggtgctcccgcccaagtgccgcccggccgacgtcctccgtgacatctacaggcaggccagctcccagctccggcgatctccgtcccagcagagcgcggacgacggttgcggcgccgacgccgctgtggcggcgtgccggtcgtcggggaaggacgtcggtaacctgctgttccggaacctgaccggccggcgttacatcgtcgtcgtcgacggcagcatcgcggcctccgactggaacagcctgagagcgtcgctccccgacgagggcaacggcagcagggtggtgctgatcaccgacatggccgggctggaggtggtcacgtacgccgccgggccgacgatgaacagcccgatcaagctggaacggctcagcccggagaacacgtacgaggtgttccggcgccgggtgttcggccgcggcggcgactgcccgcgccagcacaggtcgaggtactaccagaagatcttccagatcacccgcggcctgccgctgtcgattgtcgtcctcgccggcgtgctgcggtccaaggagcccccggcggagtgggacgaggtgatgtcgcagcttgccacggcgagggagccgtcgtcgtcgtcgtccaagaacggcaacagcgggcggatcatgtcgctggcgttcgacgacctgccgcaccacctcaagtcgtgcttcctctacttcgcggcgatgcgggagagcgccaccgtggacgcgcagcggctggtgcggctgtgggtggccgaagggttcgtgcggccgcggcgggggagcaccatggaggaggtcgggcagggctacctcaaggagctcatctcccggtgcatggtgcagctggtggacaaggacgagttcggcgtcgtgcagacggtggtggtgcacgaccgcctccacgccttcgcgcaggacgaggcgcaggaggccagcttcatcgagagccacgacagcaccgacgtgctcgcgccggccaccgtgcgccgcctcgccgtccagaactcctccgagagatacgtccacctcagcaatgctctccccaagctccgctccgtcgtctgcgacctcgtcgacggtcgcaacggcggcggcggcggcggcaagtgcatccactgcaccgaccttggcttcctccacgcgtccaagttcctccgtgtcattgacatccatggcctcgagctcaagaagcttccaaacgaaatcggctcgatgatccacatcaggtacctgggtctccagtgcggccagctggagaagctgccgccgagcgtgagcaacctcgtcaacctgcagtcgctgatcctgaagggcaggaacgccggccacgtgctcgacgtgaccgccgcgttctggaggatcaccacgctgcggcacgtcgtggcgccgttcgcgctgcccaaggtgctcggtgacctgcacagcctccagacgcttcacggcgtgcagcatctgtgctgggacacgcgcggcggcggcggcggcggcggcaacccgctggggacgtccaccaacctccggtcgctggagctcagcgggctgctcgccaagcacgccgccgctctgacggcggcgctggagagcctggacctgctggtgcacctgatgctggacggcgagtcgctgccgtcgaccgtgttcaccatcccgagcctacggcggctgcagagcctcaagctacggggctccatggactcgccggaggggccgggcggcgacgacgacgacgacaacgagtcggcggacgacggcgtggtgcggtacatccggccgaacctgacacggctgtcgatgtggagcacgatggtggggcagaagttcgtggacatgctgggggagctcccgagcttggcggagctgacgctgatggtggcggcgttcgacggcgagcggctggagttccgggacggcgggttccggagcctgcagaagctgaagctgggcctgccggaactggaggagtggacggtgaaggccggggccatggcgtcgctggcgaggctgacgctgttcgggtgcctcaagatgcggatgctgccggaggcgctcgccgggataccggagctggaggaggtggtgctgtacagaatgccgatcatggtggagaggatcaagaagcacggcggggaggatcaccacaaggtcaagcacgtccccgtcatccagaccatctggtag

SEQ ID NO: 21780 - DNA, 417 bp, Oryza sativa
  Clone ID: PAT_MRT4530_27019C.1
ttttcttgggctttatggttacacaccgggccactggttgcaagccgaacatcggtttaaaaatgttcaccatgccttagggttcaggcactatcagaaactgataaacgacggcaggctacgttgacatacgagggtaccgaacacctacatgcagactactgttacactcgtagactatagttgaaccagtaccaccaaagtgacattatttgtgtaggtgcatttttttcagaccacatgatcccggggactatatattattctaaaatttgcgaccgccctgaaactcaatcgaattttaaatctatctgtcttatatgagctcgcatagaatacctccgagcgtggttaggattggtgcgaacacgatagaatcgattgacatgagcttgatgaggatgtttatctgcggat

SEQ ID NO: 21781 - DNA, 320 bp, Oryza sativa
  Clone ID: PAT_MRT4530_2701C.1
gcttttctttttctctttttttttacatatgagatagattttcttgaagcttaaatgtcgttacatccgattataccaatacactttattgtgatgactggaatacctggagacttctccctatgacaagcattaattgttaaaaaccccaggctctaattattaacacatacgtggttgattccctgccagatctggaccgcttgagtggccaaacccctctccaaacctttactttgcataccgaggatgcccggtcggagggataatctcccccggaagcccatcatttcttggcgacctcgacgggaaggctctta

SEQ ID NO: 21782 - DNA, 243 bp, Oryza sativa
  Clone ID: PAT_MRT4530_27020C.1
atggagagggtggaggatccggacctggaggacccgaacccggacgtgggggagctgttcagccactacgacgggctctacttccgcggcgcgctcgccggcgccggcttctccgtccagtggagctcgccgccgtcgcggatggccggaaggggtggggcttcgaaccaaggtcgtctagcccagtaccttctcgagctaccggaagacctcaatttcgtctttttagcatttggcacttga

SEQ ID NO: 21783 - DNA, 2292 bp, Oryza sativa
  Clone ID: PAT_MRT4530_27021C.1
atgagcaggctacaagtgtgggtgagagatgctgaagttctgaggacagcactgcttgaagctggaatagtcacaggacccacaagtattttgcaagttgatgctggggatggatttgaaatagaaccagtaaatcgaactggaggatctgaaatggaggctgaaacaagtgtgaatgagcaggctacaagtgtgggtgagaaggatatagatgctgaagttctgagggcagcactgcttaaagctggaatagtggcaggacccacgagtattttgcaagttgatgctggggatggacttgaaatagaaccagcaactacaactgaaggatctgaaatggagggtgtccaatcacaacctgtggtaccatttgttggtttcggtagaaaggtttcgagttgcaaaagaagcaatgtcaccaaagattacaacagatatgagttcgcttgctattctgaacgcacaagtaaggagcagaatgcaaaatcaagtattggaagcagatccaggaagtgcaacagcatacggaaaactgattgtaaggcgagaatggtggtcgttaaaagggctgaaaagtgggtggtgacaatagtagacttagatcacaatcatcctcctttgagccccaattctctaaggttcctagaatcacaccgtaacgtgtcggatgaagactatgagctaatagaattacggcacaacaacaacatccccactagaagaatcatgtctgtcctgtctgatttgtatggtaccatgcgtaacataccattcacaaagaaagatgttagcaatctgaggacatcgatgagaaaacggactactgcaaacggagacatggctgaaaccatcaagtacttccaggaattgcaagcagaagatccatcgtttttctatagcatggaactggactcggataatacggttggtagcttattttgggtggatggtgcctcaaaagaagcatacaagaaatttggtgattgtatcgtcttcgacacaacatactgcacaaataagtataacctcccatttgctccgataatcggggtaagcaaccatggccagactgtcctatttgggtgtgtattcctgaaaaatgaaaaggttgaaacttttgaatgggtgtttgaaacattcttgaaagcaatggatggaaaagagccacaatgcatcatgactgatcaggacaaaacaatggagattgcaattgcaaaagtgctgccaagaactattcataggcgctgtatgtggcatgtgcataggaatgctagtactaaccttggtgtgctgttaaacggcaaggaagggtttgaaacagacttgaagtcatgcattgataattctttgaacgaagaagaatttgatgcaagttgggatgcaatgattgatagacatgagttgtgtgggaacaagtatatgcaacacctctatgataacaggaaaaagtgggtcccctgttttttcatggattacttcttcccattcatgagcacctcccaaaggagtgagagcatgaacaaattattcaaagattttgtccacccagctgattcaatcaggaatttcatcttccaatatgagaaacttgcccaatcttgtcttgacagggatgacaatcagcggtttataacagtccaaacagacccaaaaatgtggtctggctatccaatggaagaacaagactcaaagttctatacacgtgcaatgtttgaggagtttcaagaaatgctatacagagctaccaaatacaaaacaataaatgggccggaacctggatcatattttgtgcagctaattttggatgatgacaacaagaaattcttggttcattatgacataaacaatgaaacctacagttgtgcctgcaaaaaatttcaaagggataagatagcagttcgacaggccgtaaaaagaaaaagccaagtgatagcagcaagttctaagaagaaaaaacttgatgataccagctgtttggattgtgatgatcccaccaggtggggacacaggatactggattttgaaaaggcaaaatccaaggtggaggtgacagtctccggcgaggtcaggtaccaggcgcactacaccaagtgcaaactcccgcgacgtgcccgctcaagctgcagcttgcgccgccggcggtggtgttccggaaggtcaagtgcaagcttgccactgccgacaagaactactagtgctaaccttgtcgtgggcatccccatggctgtgcctagctttgctagtgattacacgattgatttgtttgttcctctggttgagtttgtgatttaa

SEQ ID NO: 21784 - DNA, 413 bp, Oryza sativa
  unsure (1)..(413): unsure at all n locations
  Clone ID: PAT_MRT4530_27022C.1
agaccacccattactgttagttaatgatccattttaacagaggcagcaaaccaccaagntcacaccttcaaattgcagctttaatacatacataacaacacaccacaacatcacttaaaaatcaagttcataattcatatttcattcattccacgataacacctctgtaaaccaatggccccccacactgctaaaaataccctttgaattgtcagactacaaattaaaacgcctgattagtcacaccaacacaataatgatgttaaatagcactaatcacgacgatattatcatccttataaactaatctttgactcatcaaggcaaccaattcttacctctcattccacgctctagaccagtatcccctccattccatactcgaactttaaccccaactcccccagcttatc

SEQ ID NO: 21785 - DNA, 345 bp, Oryza sativa
  Clone ID: PAT_MRT4530_27023C.1
atggacaccctctctctagaatggcacgtggtgactgacgagcgccacgtcagcaacgccagggccgccctgcgcgtgtacaacgccgcggtgcccgccggcggcgacaccttcttcctcgaggacctgtgcaagatgaccaccttgacggagccgccgccaccggagtcgtccgggctgacttactgccactacaacttcatcgcctcctgcgaggccaccggatcggccgcccggttcttcgcggaggtgaacaagttcatcgcgggacatagacttctgccagaacacaaagaggacgattgtgaaatagaatacgactacgactatccttactttgactaa

SEQ ID NO: 21786 - DNA, 397 bp, Oryza sativa
  Clone ID: PAT_MRT4530_27024C.1
tttttgtttttttttttttttttggtttttttttttttttttttttttttttttttaggaaaactggtcatgggtattttttttacccatgaaacacacaaacagccttcaatttgatgtaatcgatcgaactgggtttttttatccttaccacgcaacaaaacccaaaaattaaagctggtaattcctttaatttctcctagctaaaaaatccttcacaactttaacttggtcaaataaacaatggcgccatggggatcaaaaaaaccaggtgtcaatgggcggctccacctcctcctggtgccttcctcccggggggaaccttatcccgttgcccccccccggggggaagggaaaagaataccacccccacctgcggaacccaccgcccgggttg

SEQ ID NO: 21787 - DNA, 729 bp, Oryza sativa
  Clone ID: PAT_MRT4530_27025C.1
amgwkcaacatttctccgccaatccccatcttgttcgtgactcggagcgtgggggagcagaaggaggcagacccggtggtgaggaggtgccgtggcgcagggagcaccggacggcggcggtggcgtgaggtccctctgccgaagcccgaagaagacggcgatgaggaagatggcgatagagtaggctccgctgatggcagcagtcgccggtcggcgtcggtctcgcgatctctctcgcttctgggctggcggctagggtttggaggtgggggattgggccgctactgggtcgtttggcccatggcccattccatgttctcccgctctgcatcttcctcctccttttccatggcgactcgcgcgagcggcgccaacaacaaccatagcgctggtgagggactagccgctggggcagccggcatcaaatccggatgcgacgaacaaggtactggaatcttacacggctccaccagagttcgatttgatctcccgatttgcgatttcatttacctgatgtatctgcgtatttccatccgaggaatccgtgagaaatggaagaagcaaacatcatccgtgacctacgctggtactcctgtgtcaggttcgctcatttctcgatctataatttttttgatgttggagtgcaatgaactaatcaagttttggggatttattggttctgagtgggacgctggtgtttctgatagaggagaaccaactatagagtag

SEQ ID NO: 21788 - DNA, 1158 bp, Oryza sativa
  Clone ID: PAT_MRT4530_27026C.1
atggccggtccaagcgtttggaagggtttaggcgtggccggatcaacatcgatagtgatatcagatgacgagaagaaagagattcagcaagatgtagaggatttggaggaggaggaggaacgcccaggatggcttccagatggttggataatggaggtctaccaaggtgacgatggcacaatctaccggtactacacatctcctatatcaggactcactttcaccatgaagtcagaggtgcttcagtaccttttctctgggatggatgagcgattcctggaatcaaagaactgtgctgcagataaccagcttattaataattcggtatatgtgagtcccaccatgacatatatgcagatgacacatgaatggcttccaaaaggctggataatcgaggttagagctggtggaaagaacatgaacaagatgtataagttttatgtttatccaccagctggagttcgactgttttctaaagaggatgtactgctatatattaataagtccgagattactggatttgatacaaatggagaatgtgacacaagaaccaaagacaacattcttgcaaatgtggaatttaatccacattcactgccagaaggatgggtgaaggaagtagtatttagaaagacaaagactggagtaattagaaaagacccgtatttcacggatcctgttaataattattcattccgcacaaggaaatctgcaatgctctatgttcaaactggaaaagtacctaaacgcgcatttattcagaggacaagtgttcatgacctctactcttttgagaagtccgcagatctgcatgaaagtctgaagaaaagactagactttgcagctaggactaaccggaaatccagaagatcattgaaatccaaaaactcatcgcttacagaaaagtcactcagtgatgaggaaagttcatataagtctgaagatggtgactcctctgatgatttatcagattcatcaagcgaggttaaaaaaaacaagggcaagcttgagaagactacatgcaaaaccaaaaaatcggtatcctttaacactgccaagcgtcctgttgggagaccctcaaaaagatccactgaggaaatgcctcgtgacgtggaaatcaaacaagagagtgcaagtagcgaagaatattggtgctga

SEQ ID NO: 21789 - DNA, 475 bp, Oryza sativa
  unsure (1)..(475): unsure at all n locations
  Clone ID: PAT_MRT4530_27027C.1
aaaaaagtttatgctataggagtggtggttaggtggattatacatgtgtctttaacattttagattcctgatgtttgtggcatgttgaatatggatctgtcatctagatctccttttgtgacacaaactaaaaagacagggttaaaaaggtttagttgattttacctaagcaacactaacaattgggggaaatttgcacctgatgtagtgcgcgaattttgcttttcgtgatcgtttggttgcttgatttagacgggatgcttgtagttcctttatttagtgtctcctgtgttataggagtaggagcgtcgaatttaagtcttaggttactgcggttggatctaaatcttggtctaattgttgcgtantgtcaaagatgtctagttttgttgttagcttgcatgttttgcgggtcctgatgacagnatatggataaaatattggaccaaactgcttnccatttgtttaatttacc

SEQ ID NO: 21790 - DNA, 3013 bp, Oryza sativa
  Clone ID: PAT_MRT4530_27028C.1
acacgtcaccagggggagtaactctatatgtaaaaccaacagaaaaaaaaaacatcatataatatgtacaccaggcaacagaaaagcatcatatgatatttacatcagctaacttctgtcactgcaattccattgtgatgtatatgcaagctagctacaaaattgctgcctacacaatggacctaccctacctaactgtatcaatcaataccaccttagtagaagcaaggataaccgacccagcttcttgccgccaaacatcaatccatccaccatagctccaacatctatcccttctcaactagggcacaaccaaaaaagaagtgatgcccttcttagtgcacagccaaaaaataagtgatggtgatggtgcatgcatctggggggcatagcactatagcagggaccatacatcaaatagcatcagctgctaatcagagtctgactcgattgttaatatcaacttttgtctaactgtacgatcctgctcctgcccaagtggtggcatctctcctctcaagccattcgcgctcctgacaactgagccgtctaaacctgccgtgccatcttcacagtttgtccttttctgagaagcatttttgccattagttaaactatcttgagtgctaatgatactaagatttgtcaaatccccggagtgcccatcatggcatgtttgattctggtcaccatcttgatcactcgactgacaagcttgtaacgcaccatcatgctcacattccagtgtgtttgatgctgctgttccacccaagttaacccctaaaattggctcgtgcaaaaattgatggttgacaatgaaattttgcatttcgcattgattgtctgtcacctgtgtgcctgcagcatcttgagagctcgaagattcccaaaatggcagttccagatcatcgaaaccgtcaagaaatgaagtcacatctgggccggctcctctaggttgttccccacaaattcctgaagcttcaggtgggttgggtgggaatgcattcccattgtcatgtgctgaactgaaattaacatcaccaggtgataacaccataacattatcatcatctgagtcactcagaactattacatcctgctctgttggtgctggaggaaaatgtgcatccataggagaagaatcaagatcatagatattgctggttagttgatcgaattgccctggttctggattatagattccatttttgctgttctcatcatcagtgttgcttgctgaaacaacacagttttcatcttcaatatatccattctgaccattgttagaatccaatctcttgttaatttcccactggccattgttgtttcttctgattcccaacttaagacggccacctgtttcttcagacaacggttcttctttaatctcttgctttacaattcttatgttgggcttggaccttgtatctgtaggcatacagagagtgccatcaggtaaatgccactgtgcaagacccttcagttctgctccacccttgactctccaggaaccgtcaggcttgacatcaatttcagatacatcatctccacaactttggaccaaagcagttatgcggttgaagtaaggatcaatgattatgttgtccaaagagtagtttttcaggcaaattgggcactgccactttcttgaacgttgattaagttccacaaaagcttctaaatcaaaacaacccatgtgaacgcagggtttgaaccggccagctatcttgatccttgaaccagtcatagggcatcggagattcacagagacagaatcagctacaacttcaatatcactgtcactgtcagcattatctgcctcggttccaccaccaacacagcgacgcacacgagcaagggcattatcaaagttctcaccatcttgttcctttggcaccaaagataggacctgtatgctatgaaaatttagaggacctttgataaataaaacagggttcctaaatctcaagagttgccatgttcctcccaggtaccagcttgtgttgtagatgctgagagaatcgaccgagttctggccatatccaacaagctgttctacagatctcctcttggcaatcctgactcccaaacagaatgtgcgagagtcacttctagataggacaatcttattagacccttctctcacatatgctgttaaaactggaccatcgtctctaccattcacccctaactgttgtgtgggttgcctgttgacaaccctaataggaataccattaatttgaatatcagaatgtaaaggccactgcatcctgaaaggtacgctatcattgaataggatacaccaaacctggaggtcatattcatctttctgaagcatctcccaattagctcttgatagcggaaaggtcttctcgaaatactgtacagcatatgacccatcagatgctactttacagggagttattgagactggaagtacaggatgattaacagtaacccagaaagggtcagctcgagtgattcggcacatatcacaataaaagtgtggtggtaattctggaggaacactgtctgcaggcttctcagatatgataacgcagcctacatgttgctgtgtattgcattgtggaccttcacacttaatcatggaatcattggccatggaataaccacagggacaacggactttgacatccaactgagcagaatcatctgacttccttttaggctttacaatgtgccccgagtcagtctgatttctagaggctggaacagcatttgtggagccattcatttttgcaaaagtgtcatcaactattttagccacagtttctttcccaaccatctttttgtttggcaagccattcaatctggagtcttgttcttgttgatcagacaatactgctataattttgtccacaagttcctgtttccttccttgctttggaagtccaagctgatgcaggacatcctttagctcttttattctaaagtgattcaacttgtacttgcaatcggcgagcagcggatcgtcggcggggtcgagcgccat

SEQ ID NO: 21791 - DNA, 1140 bp, Oryza sativa
  unsure (1)..(1140): unsure at all n locations
  Clone ID: PAT_MRT4530_27029C.1
nnnnnnnnnnnnnnnnnnnnnnnnnnntgtcggtcgttgaattcgccatatatattaatcaccttaaaaattaagatagcatactacatttttgttctccagccttttttttatatttttttttcacaagtgcgagatacgccaccacttctgtgatctgttgatcgatcttacacatatgcatgcgtgcgtacacacataacgcgcggacgcatgcatgagctaggtgtaattttatagttgatcaatcattcatatcgattgatgatcagttggctaattatagcttgagcttggcggcgatggcgagggcgccggtgacgacgcggttgacgttgttcttggtggccttgagcgcgaggctgggctccagctcccgctcctcgtaggcgttgccgcagtcgccggtgaaggtggtcgccgccgacatcttggtgatgaggctcgccttgctgtcgttggcgtcgatgcagcgctgcacctcctgcagcgccgacaccgtgctgtcgtacccttccttgcaggtgtccaggatggactccatcggcgtccccttctccgccgccctcgccgccgcctcgaacctcgccctcgccgccttcgccttcctcatcgacagcttcaccgccgccgtcaggagctccttcggcgagctcacccccggcagcttcctcagcgtgttgcacatcttcttgttacccgccgcgacatgatcgcaggtccaggcgcactcgtcgacgacggcgccggtgatcttgcggccattgtcgatgatggcaccgagtgggttggtgatcaggttggtcggagcgacgtcgataggtccaacccgggcctcaacgacagcggcagcggcgaaggcggcgacgacgacgacggagatgatgacgaatcgcgccatggtgtaatgtgttattttgctcttcctttctctcttttttttggccgccctcgatggttaaattgagggatataagagagacggccaagaaagagagtagaaagagaggcaaaaggctgagaagctaaaaggtttgcggacgcgtgggtcgacccgggaatccggacccgggccggcgggcgtccaaaaggaaaagaaaagaaaagaacaaaggaatggcggatgagaaagaaggcaag

SEQ ID NO: 21792 - DNA, 1086 bp, Oryza sativa
  Clone ID: PAT_MRT4530_2702C.1
tttgaatacctagatttcgtttcatttctgagagagaccttacggctcaaaaatgatacaattgtacagatttacaggctgtaacaagttgattccattgtttttttctaaaaaaaagaatggcatctcctaccaaactatatatgtatggctataaagggataaactcccccatgtaatttttttacagaataaaagagaggtgacctattcactctatcccaaaaagagttcaactctagtgatgaatctagacaaggacagggggtgtgtgtatattaatccctagagttggacactttttgggatagagggagtattgtcttgccatgcttctggtacagattatgagcttccagcaaagccaattggaatgatatgacaagttgacaattatatcattgtctcgaatttgtcgagtttcttcactctctgcatagatcttatgagcaatgccaagaatatgcctgcgccaacaaaagacccgtttgccactatttggttcccttggctactcaatgtgaccccaacgttcaacagcgtgccaccaatggctgtatacatggtcgccatttgaagtacattcgccttacgagcagctctttcagactcaagtactctgactctaagtttcagatcaccggactcaagttgcccaacaaaaatcctcaattcgctgtattctgtagggcattgagatggtagagtcacgagcactgtttgcttgctttcttatctcccggactagttcaggtgcacttgttcgtctctgtttcaagtctagaagttcctgtgcataaggtgcggcaactttcacaaaggaaaaatctggatccaatatatatccaatcccttcaagagttgagaatgcccttatgacaaatgtaaatgtggatgggaaacgaaaaggttgatcctgtgatattgcaaacaagtcctctccaattgcagccaaagtttgctgttggtctggtgtctgactcagcagattgtccaagaaaaattgtatggatcttctcccccggtgaaaggtctcctgttgcctggagggcttctaggtcaattagagctttcataaccctcgtg

SEQ ID NO: 21793 - DNA, 138 bp, Oryza sativa
  Clone ID: PAT_MRT4530_27030C.1
atggcgcagggcggacggcattgggagcgactgggtcggtcgtccctccgctcgtatgcggcgcgggcaaccacggggacatttaactcgctgtctatgacatgtgggccctcatgtgtctatgacatatgggtctag

SEQ ID NO: 21794 - DNA, 1004 bp, Oryza sativa
  Clone ID: PAT_MRT4530_27031C.1
cgcgtggggaaaaacttttcagggggggggggggcagacatgggctgtggatgccagatgattggagaagagaccagccagcatcgtgacactgctgagtctgatacacatcatgaggtgccatcttcgagggttctgcaggagacttgcaactacatcaggagcttgcatcaggaggtcgacgacctgagcgagaggctgtcggagctgctggccacgtccgacatgagcagcgcgcaggcggcgatcatccgcagccttctgatgtagccgccggcggccgtcgtcgccacattgtcttttgctgctgggcaatcagcgcgcacacaccctcggaatgtttgtagcttagagagtgatcttaattagtactggaggagcagggattcctaattcactctacgttcataagtaatgtaatgttgttgtcatgtcatcttctaaaccagatcaatcttttttgtgtacttaatcaaaatccatcctgattcgtgcaaaataaaaaaaataccactcccttcctttcgctttccttctgctctctccctcctatcctccgcgcgttcctgtgcgtactttagtgggttgatgctttttacagcgatgcctaacgtctcgaggggggtgcgccgccccgacaatttccccttattagactcgtttatggtccggaaaattgatgcagtagtaatacgtatgatcctattaaacccgccggaaacccacactcgtctccgcaaccacagtccgggacgcacggtagagtatctggaggagggcctcgcactagattcccatctcgctaatcaaaagttaaagtcctggtagcggacaaagcgattcaggcgctcagcaaaagtaggcgagaactggtgctcttgagggccgaccgagagcgacaggtagtcgcatgtctgccgacggcccgtttggtacatctcgcgtagcttgcggtgattaggtccctgcagtggctcccgcctccacgcccccgattctctcct

SEQ ID NO: 21795 - DNA, 636 bp, Oryza sativa
  Clone ID: PAT_MRT4530_27032C.1
atggggatccaagaagtgaagaagaggctgcatctccatgtcgaagcccaaccggagagctgcaagaagaaggagcaggccgccgtgtgggtgctcgccggcggcggcggcggcggcggcggcggcggcgagatcacggtgtcgctgaagccggtcaaggtcagccggccacagctcggcgacgaggaggaggaggaggaggaggtgacgacgccgagaggggaggagtgcagattaccggcggaggcggcgacgtgcccgccggcgcccaagaagccgaggacggcggcggtggcgatcgtcgccggcggcggccggcggtgcaactgctgcgacgacgacggcggcgactcgctggagttcttccgcgtgccggcggatttggaggccgtctttgccaaccgagttgcaaaggcaaattagtagtaattaaattcatagagagataaattcgtcttgaattttaagtgtaatttgatccaagtctagctctgaagatcagtgcaattaatggtgtgtgcatgcatgggtgagtgagtgagagatcagtgcagctgtaaaaaaaagtttctctttgtagcacatgatagtgtgagtgatttccatatgaaaaaaaaaaaaaaaaaaaaaaaaaaa

SEQ ID NO: 21796 - DNA, 219 bp, Oryza sativa
  Clone ID: PAT_MRT4530_27033C.1
actaacaaggagatcggagcatagcgaattcgaggaatactgtgacggacggggacatacatgagagattaaaccgctaatgcaacgatggacgcgacattgaggcctttacggtgctcaatgacttaagctacaaggtagcttcttggtagcaattcatcatgctcttagggagggaacccgaatggtaattctaagaccagaacactgggttctacc

SEQ ID NO: 21797 - DNA, 172 bp, Oryza sativa
  Clone ID: PAT_MRT4530_27034C.1
atggccaaagggctgagttgcggaagcctcgcctcatacatctccaggacggagggcaagaaattgtcgcacggcagccagaagtccacgtcgaagaaggaggcaaagaccacggtagcaagtccagttgttgccaaggctcccggggccatcgtcaatcgcaccatcttgg

SEQ ID NO: 21798 - DNA, 203 bp, Oryza sativa
  Clone ID: PAT_MRT4530_27035C.1
gttgttgccagggggagggattagcaccctacgggggttttcttgtaagctgcgcgagaccaatgtgctctaatacgctactgactgaaccactccgatcaattttgtcaacatgtagttctagcctgaaaactaggctggctgacgcggaatctgtgtggagagctggccgcaatggtgattgaggcgatgtgcctgagaag

SEQ ID NO: 21799 - DNA, 714 bp, Oryza sativa
  Clone ID: PAT_MRT4530_27036C.1
tttttttttttttttttttttttttttttaaagcactgaactgaatggatggatagtcattatcgacagtcacatgttacacacaacagtttaactttaaccacaccacggtaacgggggttgactgactatagcaaactcttgctatagtgcaacatttcagtataacgcgatcatactgaaacattttccgtcagtatcatctaggaaactgcaaaggtgttacaaaagttgccggctttgccatctggacaaaacttgttcaagcttctgattcaatttctgtgaatgatccaacaattcttggttcttctgtaattgcgcaaattttctgtagcaaaaaatggcccttctggcctcaacagaggttgccttatctcaactagcatagtccacccaccttcagccaggtgaggaacctagagagtatgatcagtagactattgtgcagcttttctccccctgcgtttaggccttgtggataaatagttttcaactattttcttttcatcttcattaagcataaaccacttgtctttgttccccactacatcatcaggatcaacctctggcaccaccagacgttaatcgcctccgctgttatatcccccttccgccagcattggaaggatgttgaaataacggctttccaacaaaccttgggagcatcattgttgggtgattacaatagtcatccagcttccaatagattta

SEQ ID NO: 21800 - DNA, 955 bp, Oryza sativa
  Clone ID: PAT_MRT4530_27037C.1
gaaccagatgctgatatccttggagattgttgttgttgctgaagttgctgtagaatgtgttgctgctgtaaaagctgggtattgagatgaggatgctgttgttgggtttgtgcgatttggtgttgattcaatcctgactgctgttgaagttgatgtattaatagcatcctttgttgatgctgaaattgttgtggagaagcaggtgatcccagcgatgattgcatttgttttaaccatgctgcctgctgctgttttctgaggaagggacattttgtcccaatcggcccatttgtcgacgatccaggtagctgtggatttaatgcagcaatcgatgctgttcttgtcaagccttgacccacaacctgtggagacagtgtgccttgctgtgatgtctgctgcggcctcaattgtgcttgtgcatgggcaaaacgttgctgattatatggaatagttccatttcctctcataccacccatgactcccatggactgcataccttgtaatgcttgagctgcattggcggtattaaattgtgcaccttgcaccatacccttctgccttggctgcgccatcatctgtgactggagaccatagtgcgccgcagatgctgcgttcccctgcccttgcagcatcccaatctggccttgactaagcatggccgcgcgagcagccagctgctgctgctgctgttgtcccacctgtcctccacctcccgagaagttcacctgactgccgtacatcctggccgcagcagcagcgtactgtggaagctggccgacagcggcgaggcgggagcccgagcccgagcggtggatctggccgaagcctccagccccgccgccgcctgaccgggcgaaggagcctgcatctgcgcgccgctctagaggatccaagcttacgtacgcgtgcatgcgacgtcatagctcttctatagtgtcacctaatcatcccctgc

SEQ ID NO: 21801 - DNA, 528 bp, Oryza sativa
  Clone ID: PAT_MRT4530_27038C.1
atggcggtgctcaccggcgcacggtttgggaaaagaacttcagggtgtgacagccgcctacctcgtctactccttcaccgactacaccaccggcctcgagcgcaacatcagcatgccgactcccatggcgacggtgaccgtcgtctctggcggcgggacgagcaggctaccggctctggcggcgacgacgacgacgacgacggagcacgagatctgcctgcaacacacgggggagaaggagacgatgatgcaccggcaggagctggtgatccgccaggacagacggcgccgtcgcggcatcatcatcaactaccggccgtcccgccgcagccgtcggcgggacccatcgctgaagtcgccgtcatcgtggaagcggtgaggatagcggccctgcggcggttgctgggctgcagcggcgcgacgcccccgccggcgccggtgcaggccaactgcgacgtggagatgggcctccccggcggcgagagcagcgcgtcgcagccggcgatgaagccgcaaccaggttcttga

SEQ ID NO: 21802 - DNA, 549 bp, Oryza sativa
  Clone ID: PAT_MRT4530_27039C.1
atgggcggcggtggcggagctcgggtgtggcgtggggagagcggtacggcggcggcgcgtggaaagcaagcggcggccgaggtagctctcgcggcggtgattgcgcggcgaggcgacggctctagcaagggcggcgtgcggccggaggcggcggcaagcggcgggcgggagacgcgggaagagggcggcgacgtggggaggacgcgggaacggcgcggcgtgggcgcgggaggagcggaagagagtggaagcaaaattgttggtgatgtcatgtatggcgatgaaaatgttgaggagctaacagatggtgaagaagatgcaagggaccaaagtgccagcgagggtctccgaggtgaaaaccttgctccactcccggtgctagcaacagcgacaccctcggacgccattcaccttcttgaaggcgttgcgtttggagccctcattttaactccacttcaaggaaattctccgggtgaaaatcttagattcgttaggatcggacgttgtcgccgttctatcggcataaccttcttgaaggattcgttctag

SEQ ID NO: 21803 - DNA, 599 bp, Oryza sativa
  Clone ID: PAT_MRT4530_2703C.1
cccgggctgcaggttttttttttttttgaaatagaattggtacaagcactcaaatattcagcaatgtaatacaatcagtgcaagtactaagcataaactgatctgtacaaatgttaataccagatatttgttttagttgcacacatacatattcaaacagccacaaccaatctatggaatacacacaaaagtaatgtttgctccttcacataggtagatttttttcgaacatcataagtaccagttcttgaataatatctgggagtccattggataggtaagaccaaaataacatgaactacatccaaaaatcattgttccagatcttgatgtttggatggatttctgtagcaatgaatcatggctggcaattggacgcacttgatctagatgatggctaaatagacagtggggcatgttgggggctgataaatattgtatagaatatattgccagataaatattgctatagcatattatgaaagtttaagagtgcacattgttagattcatgcctagatggattagaatcacaagcccaaagacaattaacagtacaaatgtcaagcatgccatttgtctaaccaagtggttcctact

SEQ ID NO: 21804 - DNA, 441 bp, Oryza sativa
  Clone ID: PAT_MRT4530_27040C.1
attcaagtgctacaaaaccctgcttcaggtgtaagagttagactactttcgtgatcctactacactcattttcaacgtgaacagtgtaagcttacctctaccttataggcactttaaattatccatcgtgcgctacaacaattcatccatgaaaagattgatacaatagcgatggaagcctgaatgcttaagttaccctgcctcagatgtcgattcaattctcttaagtggagagggctgaaaaactccggaaagcgcgacgccagtgccaacggagttgttgggtgaaaactgagtcctgctcaacaaaaccgatgtagcagacgaccacgactatctgaacacagctgcccacggcgtactacacaggacataccctactgaggatcatgtacgacacccgttggcacgcgtgcttacatagtgcaaggagttaagacc

SEQ ID NO: 21805 - DNA, 180 bp, Oryza sativa
  Clone ID: PAT_MRT4530_27041C.1
ccagactttaagaaatggcttggagccatgaaatccgaaatacaatgaatggatgacaatcaagtttggaacttggttgatccacctaatggtgtaaaagccattgagtgcaaatgggtctttaagaaaaagacagacgtagatggaaatgttcacatctacaaggcacgattggtggct

SEQ ID NO: 21806 - DNA, 1073 bp, Oryza sativa
  Clone ID: PAT_MRT4530_27042C.1
cgggaagcagagaagagaacgagaagaattgagaaagaaggaagaaaggggataagaaagagagagaatagaggaagaaaatttagaggaaaagaaaaggaagtgggacccgcagtctagacccttcctccctgagttgacttcccccatggggggatgtcgtcggggtgaggcgggagaggaggtccgacgaccgccgaccggcgacgcggcggtggcgacacgggagaagggaagggcggcggcagcccagcgcggtcgcgacggccaacagaccggcatgggacggaaagcgtaaagggcggcaaaggcgagtggttgtagataaagacgaggaagacggcgtcgacgtctcccccagcctcagccaccggggaaggagctgggcacgggtggcagccgtcgagggcatcgcggcttcggtcctcgagcgccatcatggtgtcgccgtcgtcgccgcattcctcccgtctcgccgccaccgccaagccgacgccgacgcgttcctcctgcctcgtcgccaccgcccagccgaccagcttggccgctgcggtcgcccgccgctccttctcgtcggcgagcacggagaggaagctgacgccgccgccttgctcccctcaccgccgccaccgccgccttgctcccctgagccaacgccgacgcattcctcccgcctcgatgccgacgctggcctccccgtgcctccctgccatcgtcaccgcgttcctcccgcctcgccgccggatttggacttgggaggagctcaccggcctccccgcgcctccgccggccgcgcgtgtggctccagctctgccgccgctcctcctctccgccgcttcttccccgtcggccgtgccgaccctcttctccaccgcgtcggtgacgccgccgcatcggccctcctctccgcgttcggcaacaccggcggcgccatgaccagcgccgcgtccgctgctggctccttccttccacattcgctgggtgcagatcgagtctccgacaatatcaagtccatgttcccctcctcgtccacagccagcggcgccacctccgtcaggcacgatgagtactag

SEQ ID NO: 21807 - DNA, 445 bp, Oryza sativa
  Clone ID: PAT_MRT4530_27043C.1
atcacacgattcttcccacgtttttcgaccgtcaatattaccaaaatagagaagaactagctatgcttgcaatgcatatccatgttagaataataatattccactagtttttggttcactaaacttttgcagagaatgatcattaagtggaggagaatcgacatcaaatcagacgataaatcaatcggacgatgtcgagaatcagacttatgcatgaatgggccaagaactcagaattgacacgatgaattagaccaaaattcacaagtctgtataaaggagcaacagaggaggccacctgccgagtttggaccaggtgggcctagcccatggttcggccgaacctcccgtggcaccgatggatgcagggttttgatggacggctgggattgatccctaatgacggttggagggtattaccgaccattccaaccatcacaaccgt

SEQ ID NO: 21808 - DNA, 1401 bp, Oryza sativa
  Clone ID: PAT_MRT4530_27044C.1
ccggccgggagcgatctctataaatactgagaacctctagccggccgggaaactatcatcagccatcactttcccccaccttatcaatctgccctcctgaccctagaggtgaccatcatggctcttgaggggaaaccaggtttcattaccatgtacgccatcacatgctgcaaatgcgagaaatggcgtacgattccaacaaaagaagagttcgaggtaatccgtgagaactaccccgcgaagccatggttctgcagcaaaaagcgcgactgctcatgtgagcaccctgaagatatccagtatgacaccagccgtatttgggccattgataggcccaacatccctaagcctccgccgaagacagagaggctactgatcatgaggaatgatctatctaaaatggatgcctattatgtcttgccaaatgggaagcgtgcaaagggcaaacctgatatagataggtttctgaaggaaaacccagagtatgctgctactttacccttctcgaacgcacaagcaaaaaaaggttgcaaagccaagaaaagcttgggagattctcgatggcacggtccctcgcatgcgccttcttcttcgacgccgagccggtcggcgagaccgggcggcacgcgctggacgcctgcgcgctctgcaccaagccgctgcgccgcgatagcgacatcttcatgtacagaggggacacccccttctgcagcgaggagtgccgctacgagcagatgcacctcgacgccgcctgcgcgaggcaggccgcgagcgccaggcggaagcagcagcagcaggggcagcggagcaggcacgagaccgcgccggcggcgcccgtgtcccggaaggcgggggtgtccgtggcgagctgttgatgagctgcataccttaggtagacgagcgtgagcttgcaagatgtgatgaaggagttgttcttgctcatgtctggccggccgctgtgccgatggatggatctggtcggagtcgaagcagagaaaggacggatctgaggaagggactccgagattcaccaggcaccatggtttaatttaggccatgtgtgcttctcttttttttccccttttggttggctccttttgtatgaggagctgatctgagttggtgtgaagagcaattccgctgtaaatattcgaggcattccgagaagttctattgagccataattttttgagcagaatcatatttgtgtctactcttttaggagtatgaaacacccgtgacttttcataatttgagccctcataaaaaatctgtcaaacgctgcaagctctcaaagcaagtctgttattcgagcaagtctgtttattcgtctgctgctttgaagctgtacactttaaactgttcttttagtgaacgagcggtaaaactgttttctccttc

SEQ ID NO: 21809 - DNA, 1692 bp, Oryza sativa
  Clone ID: PAT_MRT4530_27045C.1
cccacttttccgggagaccttcggcgcccctccggcgaggggagctcgtcgaaatggtcgcccacaggttccatcagtaccaggtggtgggtcgcgcgctgccgaccccaaccgatgagcaccccaagatctaccgcatgaagctctgggccaccaacgaggttcgcgccaagtccaagttctggtacttcctgagaaagctcaagaaggtgaagaagagcaatggccagatgcttgccatcaacgagatctttgagcgcaacccgaccaccatcaagaactatggcatctggctgcgctaccagagcaggactggttaccacaacatgtacaaggagtaccgcgacacgacccactatcatcagccagcactttcccccaccttatcaatctgccctcctgaccctagaggtgaccatcatggctcttgagggggtatgacattacaaatccgactcgaattcagaacaagtatggctcttgaggggaaaccaggtttcattaccatgtacgccatcacatgctgcaaatgcgagaaatggcgtacgattccaacaaaagaagagttcgaggtaatccgtgagaactaccccgcgaagccatggttctgcagcaaaaagcgcgactgctcatgtgagcaccctgaagatatccagtatgacaccagccgtatttgggccattgataggcccaacatccctaagcctccgccgaagacagagaggctactgatcatgaggaatgatctatctaaaatggatgcctattatgtcttgccaaatgggaagcgtgcaaagggcaaacctgatatagataggtttctgaaggaaaacccagagtatgctgctactttaccactttcgagcttcaacttctcaacacctaagatagttaaggagactgtttccgatagtgcaaagtgggtgatggcgaagtctgagagggaagagcagtgtatgcaactagacgcaaaagaagttccaagttccagcagcaagaagcgtgtgtgtaaaatgagagtaaagttgggaaagtgtcccgaacacaacctccaaggtaggtgcacactgcacatcaccagaaaacgaggctcctccacagactccattggcatgtatgcagttcaatgttgtgagtgtcacaaatggcgcaaggttccgacgaaggatgaatttgagacaattcgtgagaatttcactgaggagccatggcactgcagtagaagacctgactgctcgtgtgaagaccctgctgacatcgaatatgatagcagccgtatatgggtccttgacaagcctaacataccaaagcctccagcaggaactgagagactagtgattatgagaggtgatttgtctaaaatggatacctactatgtcatgccaaatgggaagcgtgtaagatgcactgcagaggtggataagttccttgaggccaacccgcagtacaaagatcgcttttcagttgaaagcttcagctttacaacaccaaagattgtcgaggaaactgtttctcacaactccgtgtggaagtctggaaaggctaagaagcaggacaagataaatgctttgagcaataacaattaatttctttcaaaagactttatattatgcttaagtgatgctcatctcaggtttgtggtgctaccctcatctactttgtgggctggtcaaatctgtttatatttgcacg

SEQ ID NO: 21810 - DNA, 1147 bp, Oryza sativa
  Clone ID: PAT_MRT4530_27046C.1
gcgcttttctcggcgactccctcgccggccgcttggggggcatcgtcgccgcctccgtgggctaccaagtcggcatgctcctcctgacggtgtcggcggcgatgccggtgtttcggccgccgccgtgcagcggcgcctgcggctcgggcgcgtgcgacgaggcggcgccgtggcagctggcggtgctgtacgcggcgctgctgctgaacgcgctgggcgccggcgggtacaggccgtgcgtggtggcgttcggcgccgaccagttcgacgagtcggaggcggcggagcgggcgcgcacctggggcttcttcaactggtactacttctgcaacggcgcgtcgcagctggtcgccgtcacggcggtggtgtacgtgcaggacaacgtcggctggggctggggcctcggtggtggcggcggcggcgaagatcagacggtgaagttgatctcgaagccgagggaggggtggatggggtcggcgggggaggggacgacggcggtgacggcggaggcgggggagccgacggggaggtggcgggagaccatctcgtcgaccttggcggggtcgccggagaggagggcctccacggtgccgtcgcggcggttgcggacccacccggcgaggccgagggagcgccggtgtctcctgcggcggcggcgatggcgtgggcgaggaggacgtggcgtcggccgccggcgtggccatggcgagcccgaggcggcggcagaggagacgtgtcctgcaaagaggaatctggagtgtggtggacgctgctgcttgctgggcggcggtgggcttgcgggtgaagccctcggcggggtcgacggggtcggcgggggaggggaggacggcggtgacggcggcggcgcgggggccgacggggaggtggcgggacaccatctcgtcgaccctggcggggtcgccggagaggagggcctccacggtgccgtcgcggcggttgcggcgccttggggctgggcgggcttggctgcggggtggcggcggaggccatggcgcggcgggcggcggcgacggagcgcggggtgagggcgaggcgtggcgcggtggcggaagggaacattctggaagacacggggaaggaaggggagagagagagagagagagagagagagagagagagagggttt

SEQ ID NO: 21811 - DNA, 564 bp, Oryza sativa
  Clone ID: PAT_MRT4530_27047C.1
atgggcgacacgacggcggtgatggcggcgacgggcgaggcggcagcggcggtgaggagcagcgcgcgggctcccctgccggccgccgcccacaaggcccacgaggcagaggaatggtggcgacgatacggcggcgggcgacacggcatcggcctcgtcggaggcgagcgcgtcggtcccaccctcctcgaccgcgcggcgcgtgcggccgccggggcgcgtgaagagggccctcgccgcggcgtcgaagtcgggcgtggagacggtgaggccggcgaggcggtggtgcgcaaagccggcggcacggagcggggcggggcagtgccggacgacgacgacgatgatggcgacatgttcgaggaggaggaggacgcgtgcagctcctccctcgccgcggcctcctccgacctcctcctcgagtccgggcaccaccaccaccgccagctcaccgcccacccatccatggcgaacccgaggatagccgccgccctcgctgccacccccgccgtcgtgtcgtccccatcgctctccctcttcgtgttcctcacctggatctgccggtga

SEQ ID NO: 21812 - DNA, 2559 bp, Oryza sativa
  Clone ID: PAT_MRT4530_27048C.1
atggcggaggaggaggaggcgaagaagagcaagatgaggaagaagggtgggttcagaacgatgcccttcatcttcgcgaacgaggtggcggagaagctggccgtgctggggttcacgacgaacatgctcatgtacctgacgaggcagctgcacatgccgctcgccaaggccgccaccaccctcaccaacttcggcggcgtctccgccatgaccccgctcatcggcgccttcctcgccgactccctcgtcggccgcttctggaccatcgccgccgcctccctcatctaccaagtcgtacgtatacacatccacgcacgcacgcacgcaccacgcacgccgccgcggcgcgctgagctgaccggagcgttcgtgttcgcgtggcagggcatgctcctcctgacggtgtcggcggcgatgccggtgttccggccgccgccgtgcagcggcgccggcggcgcgggcgcgtgcgacgaggcggcgccgtggcagctggcggtgctgtacgcggcgctgctgctgaacgcgctgggcgccggcgggtacaggccgtgcgtggtggcgttcggcgccgaccagttcgacgagtcggaggcggcggagcgggcgcgcacctggggcttcttcaactggtactacttctgcaacggcgcgtcgcagctggtcgccgtcacggcggtggtgtacgtgcaggacaacgtcggctggggctggggcctcggtgtgcccaccttctgcatggccgtctccgtcgtcgccttcgtcgccggctacccgctctaccggaggctccacccgtcggggagccccttcacgcggctcgcgcaggtggtcgtcgccgccgtcaggaagcggcgggtgccgacggacgccgacgacgccgcggcgctgtacgagaacgacgacatggacgcgcccatctcgctctacggcaagctcgtccacaccgaacaactcagcttttttgaccgagcggccatcgtcaccgacggcgacctgacgacggacacctccaacggcaagccgtcgttgtctcccatccccaagccgtggcggctgagcacggtgcaccgcgtcgaggagctcaagtcgctgctccgcatgggcccgatctgggcagcgggcatcctggtgatcacggcgtactcgcagcagcacaccttcgccctgcagcaggcgagcaccatggaccgccgcctcgcgccggggctgtcgtcgttccagatcccagcaggctccatgaccgtgttcaccctgctcgccatgctcaccacgctccttgcctacgaccgtgtgctcgtcccgctagcgcgccgcgtcacgggactggaccgtggaatctcctacctccaccggatgggcgttgggttcgccatctccgtggcggctaccctcgtggccgggttcgtggagcgccaccggagggagtccgctgccgccgcgggcaccaccgacgcggggacgtcgccgctgtcggcgtactggctggtgccgcagtacgcgctccacggcatggcggaggcattcaactccgtgggtcacctcgagttcatgtacgaccagtcgccagagagcatgcggagcatggcgacggcgctgttctggctgtccatctcgctggggagctacgtcagcacgatgctcatctccgccgtgcatcgatggagcgccggcgccgacgggtccaactggctccccgacaacatcaaccgcggcaggctcgactacttctactggatcgtcgcgctgctccaggtgctcaacctggcatactacgccatttgcgctaggtgctacttgttcaagcccttgcagctccgtgaggtggacgatgatgccaagccccaaattgagctgcaagaaaaggcttcacctttgagtcattgagccagtgaaagtgcaagaaaaaggcttcacctttcagtcattgggccagtgaagagcattgatgtatctgagatgcaggtctagctagaatcaagtaggtaggttgatcaactttgaggtatatatcactatatgtatggatttgtatgtacatcaggaacaaaccagagaggaatgcatcactcgaattgagataatacaggaacctggaaggctagaacatctctagtttgatgcagattattcaggcaagctggattatgcagatcattccagtggccaatgagatgtaactggtgtgccaattccagagaagatttgatattggcatagcccacaattcacaattccccactcaacatagagatggactattattgatgggggggcgcccgcctgccgcgggggctcctagtattagcatcacaacctaacagtgggataaacaaatcagggttttctgggatctttattcgtgattgattgtaccgtgatgacgtggcggcggcggcgaagatcagacgggtgaagttgatctcgaagccgagggaggggtggatggggtcggcgggggaggggacgacggcggtgacggcggaggcgggggagccggagaggagggcctccacggtgccgtcgcggcggttgcggacccacccgggcgaggccgaggga

SEQ ID NO: 21813 - DNA, 1055 bp, Oryza sativa
  unsure (1)..(1055): unsure at all n locations
  Clone ID: PAT_MRT4530_27049C.1
gcgacgacgtagctagctagatcgagagatcaatggcggcgagcggcggcggcaatggcgtggtggtggtgttcgacttcgacaagaccatcatcgactgcgacagcgacaactgggtcgtcgacgcgctcggcgccaccgcccgctttgacgacctcctctgccgcctcccctggaactccgccatcgacgccatgatgggggagctgcacgcggaggggaggacggtggaggaggtggcggcgagcctgagggcagcgccgctgtcgccgcgcgtggcggcggccgtcgagacggcgcgcgcgctcgggtgcgagctcagggtgctcagcgacgccaacgccttcttcgtcggcgccgtcctcgaccaccacggcctcgccggctgcttctcggcggtcgacaccaacccggccgccgtcgacgccgacggccgcctccggatcctcccctaccacggcctccccggccatggctgccccctcgccacctgccctcccaacatgtgcaagggcaaggtcatggagaggatcatcgacgagctatcctgcggctgcggtggcgcgctggcggcgaggaggaggagggtggtgtacgtcggcgacgggagaggcgactactgcccgtcgctgaagctgacggagatggactacgtgatgccgaggaaggggtacccggtgtgggacctcatcgccggcggcgaccgcgccgccgtccgggccgacgtccgcgagtgggcggacttcgaggacctcgaggcggtgctgctcggcatcgtcgccgagtgcctcacgtcggaacacgacgacgccgacgacgatggcggcgaggcggcgccgccggcggagtgccgtgcgctgccggcgacgctggcttccggtcaggaggcaattctgcccaaggcagttcacgtgcctaattgactgggccagatgatagattaacgaactagtattaattaattaattaattaattaattaatnaaacatgcttaagtaattatatattcagtaataaacttcacctgtgttgttgcaaaaaaaaaananaaaaa

SEQ ID NO: 21814 - DNA, 507 bp, Oryza sativa
  Clone ID: PAT_MRT4530_2704C.1
cacgagggcctcctgccacagttggctccgatcccccaaactttggatttaatttggtctttgagtgatcaaccaagagacatatgccagccttgatagtttatctgccaactaacaaaccaactaactggagaatcatattcctaaccaagcaataacctagtagaaacttgactaacaactaaatcattccttggcatcaatgatgctggatgctgtctgttctggtttgtcctctcactccaatgaattcgtccacaactgttgagttttaaacctatctatttttatttcacatcagtgccacctctgaaaactattgagtagaataagggaatggatgcaggctcccagtaatcaatacccgatgtcatggatgcttgttttttatatattccgcacttgtcatttgtttcatttgtttatattcactattcacattcagattggctttgttgttttgttcaggcattgttagaggaatggatagccaccagggcttccagg

SEQ ID NO: 21815 - DNA, 603 bp, Oryza sativa
  Clone ID: PAT_MRT4530_27050C.1
atgcagatcattccagtggccaatgagatgtaactggtgtgccaattccagagaagatttgatattggcatagcccacaattcacaattacaactcaacatagagatggactattattgatgaagaaacactagcatacatggtactactagtattagcatcacaacctaacatggataaacaaatcaggttttcttgatctttattcgtgattgattgtacctgatgacgtggcggcggcggcgaagatcagacggtgaagttgatctcgaagccgagggaggggtggatggggtcggcgggggaggggacgacggcggtgacggcggaggcgggggagccgacggggaggtggcgggagaccatctcgtcgaccttggcggggtcgccggagaggagggcctccacggtgccgtcgcggcggttgcggacccacccggcgaggccgagggactccgccgtctccgccgtccagtcgcggaaccccaccccctgcacccgccccttcaccaccacccgcaccgccttgcgcgccggtgtctcctgcggcggcggcgatggcgtgggcgaggaggacgtggcgtcggccgccggcgtggccat

SEQ ID NO: 21816 - DNA, 237 bp, Oryza sativa
  Clone ID: PAT_MRT4530_27051C.1
atggtggaggaagctgaggaggctgttgccgccacctgggtcgtgcagtctaccacacccgcccaaagcagtgtggacatgggccgcctagtcgtcgctctacctttggccgtgccgtcgctctggctggaggaagcgccgtcgccgctccaccacgctggcgccccaaatcctgacctattggaggggactgtcgtcctgctcgagctcagttgtcgtctttctgacgcgaggtaa

SEQ ID NO: 21817 - DNA, 492 bp, Oryza sativa
  Clone ID: PAT_MRT4530_27052C.1
tatcagaaatcacaaagcacaacaaaacctcattgcatctagctagcttttctgtctcctgaatttctgatcagccagcgaaaacccaacgcaagcttggtcaccatggggtttgcttcctgcgtcgccgtatgcctcgcgttcgccgttctcctcccttggcacgccacggcgacgtcgccgacgggcacgatacagcgggagacgaagcagcagatcctggccagcatcccgccgcactggcaggagaacccggtgctgttcctgacgtcgccgtcgggcaagtacacggcgtacttcctgcgcagccagaccgcgccgggcgccggcggcctcggcgccgacttctgctacgtggaggtgctcgacacctcggatcccggcgcggaagggcggagcgtgtgggattcagagagcctggcggtgagcaccgtgaacacgtgctcgctcgtgttctcgtagaaaggactggaggtgttcgacgggagcaac

SEQ ID NO: 21818 - DNA, 384 bp, Oryza sativa
  Clone ID: PAT_MRT4530_27053C.1
atggccggtcgccctgcccccgccccacggccgcatcgcctccccctagccctggcgctgcagtcgcccctccccctcctccccgcgacatcgcaccctagcgccacaggcggaggcagcgcccacgttgccgacacgtcggtgcctgggagaatcaaggaggattcggcagcgaccgcgtccgccaagagcgccagctcgggcgaggatgtggcggccaagagagaaggggataagacggccatcgctgcagcgaagagctcgcgcaggaagaaggagcagcaacaacagcagcagcagcaggcgatgccttgggtgaagctgctttcgcggtcctcacaaggttggaagttaaatctggggcttttggatactgaactctaa

SEQ ID NO: 21819 - DNA, 479 bp, Oryza sativa
  Clone ID: PAT_MRT4530_27054C.1
tgctcatatcatggatgaacaagaaaatatcaagatcaagtcctctaagtgctggaatccgatttggccacctgctacactgctgacttcaaatggccgccaaatctacatacaacctccgtttttagcccgtgagtacttgatagaaagctctcaaagccctctttccaacggatccagcctcattgccaaattccatgtcgttttgctgcaatcacaaggtgttgcgtcacctatcttgggcctatgggcttgtaactttgtttgggaccccggcccaagtggggcccatgtggagtgcggcccaactaggtggagaacaacccttcgcaccccttggtcatcctcccacccctataaattggtaggaataaggttgatctgcaccgacaagatcaacaacccacggagaggtgtatcgatcgcaaaggcacaacacaacatcttttatcatcaactcactgaaagattgggccaaa

SEQ ID NO: 21820 - DNA, 193 bp, Oryza sativa
  Clone ID: PAT_MRT4530_27055C.1
aaccccgccgataattccaaacgaatggccgccgccaagggggcatttataaacctaacgtggcatcccctacgccttccatggctgtcattggaagaacttgcctaccttcctatgacctttggaccacaacgctcgatcggaggaggaagccgtcgaggaggagtcggtgcgggcggccatggattgcgcg

SEQ ID NO: 21821 - DNA, 371 bp, Oryza sativa
  Clone ID: PAT_MRT4530_27056C.1
cgaacaacaacacaaacacagacggacagagcacacacagcaacacagagggccccccccgcgagggcggcacgcggacccaccgacgccccccaacaggggcacaagcgcaccgacgccacgcccggccgccggcgggaccggaacgccagcagcggcaacgagaggaacggcggcaggaccaggcgcagacggcaagcgcccacggaaggcagcacgacatacgagaccaacatgccaccaggagcaccgacaccggggaaggacgcgcccgaaggcaggacacagtaccgcgcgcccagagccaaggcgggcgcccgagccagggaggagcaaccaagaggcgcaacacggacagaccagagcagcaa

SEQ ID NO: 21822 - DNA, 2934 bp, Oryza sativa
  Clone ID: PAT_MRT4530_27057C.1
tttttttttttttttttttttttttttagttcaaattcaacgccttcattgctatgaattaagcaaaaggtccagccagataaatagaaatatgtacctccaaagttaaaaaagttagaaccctaaaattgttctttgacaaaaaaagaaaagaaagaaaaaggatatacaacaatgatactctggtacacaagttgcgctgtacagatctgagcttcccaagggtaaagcttattgccacctgactaacccaaacatgtcacaaaatggaggggaggccccgctttgagcgtaagatgcacaaataacaacagatgcaaagatcctttaggccagaggcagctgagaccaatggcttgtatttcactgaacttccgcaaatatgactcgagacaaaaacaacacgtcgtgacgctgttcttgttttgacttagtgcacaatcaggtagtttttatttgctcatatttttcacctatgctcccacctttctgcttctggaattcaatgtaacgtaaagtgcttgcaaagaaggcctctgtcgatggatcagctacagtgttctcactttgcttctctgtcctaatcaattcaatcaaatcctggattacagtgttcgtgatctctggaattcctttctcgaagaagtacaaatacttgttcaaaatttcgataaatagcgcgacagatccgctacttccccttgttacattagccatctgttgagcggcatttgcaattcttaaggcacgctttaaacaaaggaggaccctttcaccatccattattccgtcttggtcgtcagtccagaaaaggtgtgaacatgcataaaccgctcggcattggtcaggtttctttagaagttttgctgagtaccctgttgtcttgtgagtcagggtatctctattttcaaccccgaatatattcatccgttgaagggttccaattataagatgaattgcagtgatttgagcctttgaatccgcaatttcttcttcatataagatgaatgcttgagtaaagaactcataagcaaccggttccagatcacaatcattggccgcctctgcacactgcagatataatctgagagccagttcaggagaaggaacacatgagagagcttcaatggtctgatgcaagatctgaaatattttcttaggcgttgcaggaacttcctcccctattacatcaccatcttgaccttgtaatcttcggaccaacttgagagcagagaatactaaggatggcacagtgaaaggtagccgcttgggacctccctgaagtatatgcttctgaacggtgcataatatcttcaacatctcttcatggtcatcattgtgcaacatgtgaataagacgcgccacagaattctgttcctccttaaaatcctcatcatcaagctcatcattttgagccccatccatatcttttataagacctttaattaaatcaaaaagagcttcaatcttgtcagaagtagatatgcaagtcgtgttcttcattatgctttgaattattacaagagccataacttttgttgtagaattatcaaggtaatccataacccgaggatagtttgagagctctaatgcagtaacaatattgctatatttctccaggggggcactgagaagtgcaacaatttgctttgttgccctgctatcttcaagttttgcattccctgaaagtttctttacgcatgcacccaacacttgatcaacataatcaagccgatccggatgcacacggagagtaaatgtcaaaagtgatacatataaagttactgcaccaacaactggcatgtcaacttgggcctctatcacctttccaatagcattgctgaactttgcaaaagcttcaacttgcaagaattctggcaatacttcaggacttgcggcagcatagcttgataacctgtccatgagttgagacagcacggttttgatatcaacatttggctgtagttgcggaaatgcgctcaacaatgtttccaatgtctgtaaatggtattcgtctggaaagacttgtattatgcagtccatcaggtagaattgtgcaagttcatccttacaattaaccacctgttctaatatccttggaaggacagtttctttgtacatgtcaaggtcaacaccctcaatctggcttagaacgtgaaggtttttgcctaccaaatcacgcagttcatttctttcttttccccgcttctccttctctcgaacagggccctgatgttgcattcggacccagagtttgttcatttctatgaaattctgaagaacaaactcaactgcgtcgttaatgctgtcagcatccccttcatactcggaaccaatatctggcagtttgtctcggcttatctgagataggtagcttcttaggaaaagcccacgaagaggatgttggatgcctcgacacatttcaacaaggtctttaagaacgtctttcgcaggagcctcttttgatttaatgtacacagatcctactgtgcagaggagatagagtctgggcagtacgttgccagcatgctgcacaagctcatacaaatcaacaacggagcagctgccacgacgggtctcctccctgaagaacatctccagcttccgcatctcatcaaacgccctcatatatagatcataatacttgtgcggcgagagccgcgaggtccgcagctcggagagcatctgcgccgagtacttgagcgcatccttgaggttgttcgaatcgagggcgcggtgcatgtagaaggcgttctgctggacgccggcgatgccctcggcgagccaccgctcctcgtcgtcggcgccgccatccggcagcatcctgaccgccgccgtggccgccgtcttcgctggctgcgggggtggatctggtcggcctctggtggctcgggttggggttggggttggatctcgcctctcgcgcgtggagaa

SEQ ID NO: 21823 - DNA, 417 bp, Oryza sativa
  Clone ID: PAT_MRT4530_27058C.1
atggcgatggcgtgcaggacgctggagctgacgctgctgtccgcgagcgacctgaggggcgtcaacctcgtctccaagatggaggtctacgcggtggtctacctcgccggcgacccgcgcgcgcgccagcgcgtcgccacggaccgcgccggcggccgcaacccgtcgtggaaggggaaggacgccaccgtccgcctcgccgtcccggcgtcgggcgccgggagcggcgcgttgcaagcccgccgcgccggcagcaggtggctcgacgatggcgtacctggcggcggcagcggcggcgtacagggtgcgccgccgccgcagccgccgctgtacggctaccgccagctgccgccgataccgcagccggtgccgcctatgggcgcggtggagggcggcggcgtgcgcgccggccggtga

SEQ ID NO: 21824 - DNA, 876 bp, Oryza sativa
  Clone ID: PAT_MRT4530_27059C.1
tttttagacttgagtatatagcttgcatttccacggttcataaacagctaaacaccattgcgatttgcaagcttcaatttcataattttactttttttgctcgccttcagatgatcagattcattcgcatatatgttcacatatttatatatttatttaagacagaatatagtttagcattcatattctgcaagactccatttttgcccgtggctgcttcaccggccggcgcgcacgccgccgccctccaccgcgcccataggcggcaccggctgcggtatcggcggcagctggcggtagccgtacagcggcggctgcggcggcggcgcaccctgtacgccgccgctgccgccgccaggtacgccatcgtcgagccacctgctgccggcgcggcgggcttgcagctgcaggcggcggcggcggccgcggcggggtcaaggtggacgacgccgccgagcttgtaggagaggttgagcacgccgtgggtggtcctgctcgagccgaccttgcggaccgggtagaacgccaccgcgccggcggtgggccgtcccggagccggcgagatgtcctggagcggaagaacacctccccgacgtcgcgttcgcggcggagccgggcgcgctccgcgcggaggagcacgcggaccgcgccgctccgggcgcctaacccggggacggcgaggcggacggtggcgtctttccctttccacgacgggttgcggccgccggcgcggtctgtggcgacgcgctggcgcgcgcgcgggtcgccggcgaggtagaccaccgcgtagacctccatcttggagacgaggttgacgcccctcaggtcgctcgcggacagcagcgtcagctccagcgtcctgcacgccatcgccat

SEQ ID NO: 21825 - DNA, 150 bp, Oryza sativa
  Clone ID: PAT_MRT4530_2705C.1
atgacagggaagaagcagagtgatgtggagctcaatgattttcagaagtatgcctgtccatttttgcatgggaagttaactgttggaaatgatcactgttccttcataggcgtcattgtcaacataaaactgccagtggtttatgcatag

SEQ ID NO: 21826 - DNA, 2064 bp, Oryza sativa
  Clone ID: PAT_MRT4530_27060C.1
atggcgcagcacacggcgggcggcaccgaggacggcagcgcggtggagaggaagaggggagaaaagaggggaaaagggggtggggtggtaatcaatatcaaggcagacaacatcagtggtgctgcagaggagataatccattttctgatgggttcaaacaaaggagatgtgatacactttgatggctggggtggattgggggcatccgctgttctcaaagccatcgccacacggctcaaatcatcagcatcactgttaggagaggctgctactgtgatgaaagcaggcatggacaaaatcatccacgttgattgctcactgtggcaaaacaccagggctgtgcagaaggccattgcgattgatctgaatcttcctcaacatgtgatagccctctttgaccagtgggatgagaaggacgattttgatggggtacaccaggttgctagaggcccaatacaacatgtcaaggaggaaatcttgtacaaccttcgtgaccgcggattcctggtgatcttccataatgggagtggccgctacattgatcttaaagattgtggtatccttgtagcagggcttttgggcaagagggtgttgtggacctcccgaggcaggttttcacttcatagcaatgacataagagaggtgcatgaaaggaagttagctgagagtaatgtttctatatatgctgatttgtcaagtgattccatacttaatagtgtcaggcacctgctgcaagtagaggctgaggaggtagccttctacagcggtgtccttgaacctgatatgagcaccaaacttgtcatggagtgcatcttgtacaaggcattgagaggtgatgactatggcatcaactggggcaccaacgcagccaattattgggtatgtgatggaatcataaaagatgccaccaatggtgatagatcggcatgggagattgctgaagctctgcatagtgctatgcacttggaggattggcatcaggtctgggcagtcaatattcgtgatgcctttgggttgagtagtaaagagtggaggcacacaaaccgctggatttcaactacccaccagtatgtagctacagtaaaagtgccacctcaagcaacatccttctttgtgacggaagccggatcactgattgacaaaagtagctccatgatattacgaggtgacatgtttggacattcaaacaggagcagattgcgtgtactacatctctcccagtgtaccttcagtttttcatcaccccccttccttggctgcagcaaccttaggttcctcctacttgaccattgcaaggacaaggacatagacgatcaaatggcagctcatcttgatgaagaggatgagcatcaacagagcaaaatgggccatcacaatagaacatgttttgaggagctttgggtgttggacataagttatacagagtggtattggttgctatcagaagagatgatggatcaaatggttcaccttcatgagttgaatgtgaaggggattaagaatgcgacctggataagccatctaggtcctggccatgttgctagaagcaacagctgcaggccgcgcaaccttggcaagctccgagttacatgttgcgagattacaaaccaagcatcatcatttgtagaattccctgacctgtcaacctctagtatcaagacaattgcccttgatggctgtgttgagctggagaaacttgcccacaatttcctgcctctgttgctagagtcatttatattcgtcagcaatgtcgccgccaagataaagatcatctcgttccagggatgcacgcaactgaagagcctattgctgagaggattgttagagaacctcgtggagatggacatgtcacatacagcaatcaaaatgcttgaccttactgcaatgcaagctccacgtctcaacaagctaattctgttgggttgtgagaagctacgagcaatactatggcctagggaatggaagaagctagaattgtatgtgctacacattgacaccactgatgcaagatgggtgggagaagacaaatcaagcaagaaagaggcagccagtggcgatacaagt

SEQ ID NO: 21827 - DNA, 636 bp, Oryza sativa
  Clone ID: PAT_MRT4530_27061C.1
ccaagcaaaaaatctaacagctttatttaggcagatccacctctctacatcatcatagtcatagtacaagaactcgacgaattcagaagaaacattggcagctacacctagagaaagaaaaatgaaaagaaaagaagatctaatatattacaagggatccttggatatatgctcatagcattgttacatcccgagcaccgagtcgcgacttgtggcgaaaacgggtgccatttccatgcttatgccattactgcttcgcctgagagtagatgaaagttccgagaatcgcaatggcggctccgagggcgttgatgggctggaccggcgtgtggaagatgatgatggaggcgacaatgacggagatccgcttcatggtgttgccgatgctgaatgtcagtggtgagatctcgtccaatgacatgtaggacacttggttgtacaagtggtagaacacactctgcgccggcacccacctacaaaaccacagagaaatccatggccacatgaatcagctggattatcacacaaaaatatcatcaaatcttttgatacttgttatttctctttcagaatgaactgaagaagatattgccgcttaggaggaaatgatagtgataggacgatcctatatctata

SEQ ID NO: 21828 - DNA, 591 bp, Oryza sativa
  Clone ID: PAT_MRT4530_27062C.1
tcgtttagatatgggaggatgtgaacaaggtataatgtgattagatttggaactctcgagtttgaatgtttttaaggatgttagcaaggtatttgttattaactttaaatgctttttattgtaagatgattattattaatatgttgtattttaatattgtatttattgataaaatggtttatgatattttatcatattgtataaatttttgtttattatttatatattaatatttttaattattttatttttttttttatttaatactttttaatttattatttttatttatattttattattttttatttattttatttttttttatttaaataatttattttatatttaaatttatatttatttttttatatttattttattaatttatttatttatttttattatattataatttattttgttatattctttatatttaattttttttatattatcttttttcactttaatatttattattattatttaattttattttaatatttatattttttatcttttatattaatatatttatatattttttatatatttttattttaatatttctattattatttttttttt

SEQ ID NO: 21829 - DNA, 1014 bp, Oryza sativa
  Clone ID: PAT_MRT4530_27063C.1
ccgggctgcaggccacgaaggaagagaaagcaactcccccttccgccgccgccgccgcaacaccaagaagatggcggcggactcgctggacatgtccctcgacgacctcatcaccaacaagtacaagcgccgctcccgtccagatccagcgccctctgcccgccgcttccactcccgcgccgccacccgcgctgctgccgctccctatcacgccatcacctttcaggcgccgcccacggcctacacccacccgacgcccgcggcccccgtcgagaccggcaccaagctccacatctccaacctcgactacgccgtctccaatgaggacatcaaggaactcttctctgaggttggcgatgtcaagcgttactctattaactatgacaagagtggaagatccaagggaactgcagaggttgtattttccagaaaatctgatgccctggctgctgttaagagatacaacaatgtgcagctggatggcaaacctatgaaacttgagctcattggtataaatattgagccaccaccacctgctatgtttggtttcgctgcaccagctggatacttcgattttcctcccaaaaggggtggaagaggatggcctcggggcaggggtggatttggtgggcgtggtcggggtcatgtgggtcgtgggcgagggaggggagaccgtggaagtcggaagatttctgctgaagacctggatgctgacttggacaagtaccatgcggaaggaatgcaaatgagctagatgaccctcacgctttgttgccttgccttgattgcattaggtagagacagggggacaaactagtaggccttccttggtctccttgttagtattttgtagggatagatgcagaccaacatatgcatactctgtttagatggtgtcataattttgagcagggaatggctacgcttaacctggtaggtagaagctagctcataatatgtaacacggagggagcacaactttgaacttttatagctagtgttgaacttttagct

SEQ ID NO: 21830 - DNA, 1173 bp, Oryza sativa
  Clone ID: PAT_MRT4530_27064C.1
aaaaaaaaagaaagtctctttacttttcagtttaaagggccccattatatttctgtctaccttttttattttttttttttttactacacagatattgctatattactagcactctggcatttccagggaggtgctttaacagcttgtttttacagagctacagatgttactagggaagagcattacatacaaaaagcattagtgattacttcttttttttctctctcattcaaatgcaaatagcatatgaacagatgtcaacagattatttctcccccataaacaaactcatcatgattctctcacaaaacactcactctgcacaaacattgccttacttcccactaccatcatcagtccagacactgtcccaggagttgttagcttttggtgcctcagcaaaatgatgccctggaccttcaaacgaagaagtttctgcgccctgaaccccacccttctttgcttttgttttgatcccaagcaagcgtagaacgaacctcgcaagttcaccataaagcattccagtccgatcacatagctgcaaaagagctgagataaacatgtggaatgcctgtgtgttctggctaaaaaggaaagcaactcgcccacaaaaattcacaacaccatgcatcactcgcaggaaggacatccaaaaaccagggggtggtgctggtggcccaaatgaatttggaccttggttgtaagcacccatgcccataccatagccaccatagggacctcccatcccgctattatacatggacccaccgtacattccagaacttccatacatacccccataacctcctccataacttgaatacatgttatttccgtaaagtccgccgctactataaggtccaccaaacccaccaagcgaactatacatactggagccataacctccataagaatttccgtatccttgctgctgccaaggccgtgggggcacaggcctagagatggtgctgttcacattggaagcaacattgctctctgcggcagaaacaacttccccaggttttgctgtgccagaagcttcgacgatatcactagtgctacccccggatgggggcttgaaaggcgctggaccagatgaagttccagcacgttcccatggtttgggtggtggattacttcctgccattgggcgcggggttgccggacgcgtgg

SEQ ID NO: 21831 - DNA, 1284 bp, Oryza sativa
  Clone ID: PAT_MRT4530_27065C.1
atgcgtaaggagaaaataccgcatcaggcgccattcgccattcaggctgcgcaactgttgggaagggcgatcggtgcgggcctcttcgctattacgccagctggcgaaagggggatgtgctgcaaggcgattaagttggaaggtggatacatcaagataaaacgtagcacatttgcagtagtaatagttttcacagtcatgctgattgctcttatcattgcactcatgagatacatgagcaaaaagagcaaagctgatgagaccattgactcaacaagatcttctcaagacaacaaggttcatggggaggtgatcaacaggtggtcagggctgtacaagttcagcaagggcgagatcgagaaggcgataaactacgcgaacagcaagatctgccttggctccggtagcgcaggccaggtataccaaggagtgctaccgagtggtcagcttgttgcgatcaagcacatccacaagtcggccatgtccgggtccttcatgagggaggtggaaggcctttccaaggtgaggcaccccaatctggtctgcctctttggctactgtgatgatgggggtgaccagtaccttgtgtatgagtattgtgccaatggaaacctggctcagaaccttctaaggagtgactctgtgctgtcctggccagcaagggtgaagattctgagggattgtgcatctgtcttgaggtttcttcacacacaccctgatggatgcattgttcatagagacattaagctcactaacatcttactgacagagagcatggagcccaagttatctgatttcgggctggcgaagatgttgcaaatggaggagactaaagttttcacagatgtgagagggaccattggctacatggatccagagtacattacacattccaagcttacttgtgccagtgacatctacagttttggtgtggttgcactgcagctcctgtcaggaaggaaggtcattgaacttgacactgttgccagggattcccttacaaagaaggccagggatgtggtgagcgggaaaaaaccattggacgaattcatagacccccgtgttagagacgaggttaacattgaagatttcgtgttgatattgaaaattgcggtcctctgcgtggcgcattcaagtgtagggcgtccaacaataaaggatgtttttgaggagatggacaaagcattgacgaatacagattcaaaggttggcagagcgagagaagagataaacccatccagtacaatccagtatcagtatgcaacggggcttaacatagtatag

SEQ ID NO: 21832 - DNA, 445 bp, Oryza sativa
  Clone ID: PAT_MRT4530_27066C.1
gacagtgtcttcgtggagctggcgtggcaaggtcttatcgtggaaaggactactggcggtggggtggcttctgcggagatcaggaggagagagaaaggctaggtgttatatctgttgcatgaatcacaaaaaatccttgatgtctgtgatttaacaacatatcaggatctccaacctaaagcagagatccaacctgcttgtgggactctaaaagagcaaccatccaaagctgtttatggaagctgcatttctggtcaaatgtttggactacaggattcacaatatatatttggccaagccatcctcatctgaaagattctataatcataactctgatgccattggatccaaccatctgaagctccatagacaaataagtgctgatggaaacgctgaatctaggttagaactgaacaaagatgctattggagtttatcaggtgaaa

SEQ ID NO: 21833 - DNA, 282 bp, Oryza sativa
  Clone ID: PAT_MRT4530_27067C.1
atggccgtgttgatcaggaagcttgttctgtcactgatcgtgatggtgatggtgttcttggtcgtgtctggcaccgcggcggcgcggccattggtgggacaggaatggaccggagaagacaccgccggcgacgactccgtcgtcgtcaggtttctccggcagctgtatctgcacaagcttgctggtccagggattgaaattttcttgttgaaacgatcttgtggtgtagaaatttcagtggataaccctgcagctgtgtatagaaaagcttatatcaaatag

SEQ ID NO: 21834 - DNA, 180 bp, Oryza sativa
  Clone ID: PAT_MRT4530_27068C.1
atgtcggtcagctgtgtcggcctgattgatgtcgggaaaatagaaaaaatataccaccacccacacgccgacatcgccaacacacaagcccaggagaaggctaacaccgaaccggctgccgctaagcgtgaccaaccgccactagaccaacaaagggacaccggcgagatcgccccctag

SEQ ID NO: 21835 - DNA, 560 bp, Oryza sativa
  Clone ID: PAT_MRT4530_27069C.1
ggagagagagagagaactagtctcgagtttttttttttttttttttttttgttgtttttttttttttgatgccaatagtgacgttctctttcataaattgctggtagattcattcatttcatacatttttcatgtgcctatcgataacttacaactcatcctgattgaatgaataaacacaatttattctctcccatcaacccgtggctaaaaagattaaatctataaacctaggaaaaaatggttgcaaaacaaagacaaaattaagaaggaaaagggagtaggagaaaataaataaaaagaataaatacaacacatacttttatattggccgtagattgtggcttgaactaccctttaataccacggcagtagttaaccatattggtaaaaattcgccgatgggtgggcttgtgattatcaatccaactttatttcttccaactgttcttccaactttattgtggtctccggcgtgtctaatctgtgctcactatctcttctgggtgtatccactctttgttcaccctcctgtggagagtctccttgcttttcatcat

SEQ ID NO: 21836 - DNA, 885 bp, Oryza sativa
  Clone ID: PAT_MRT4530_2706C.1
ccacgcgtccggaggcattttgcgtatgaggagagagagaacgcaaaattgcgtcgtctctctccaagacgcaatcgtctgcacggcgtggtggtgggcctgaagattcgcgtaggggcgcggtggccagcggacgatgacatcgaggcgagcccgcggccggcgtttccaggcatgtccgcgacggggcgaggagggccgatgacggatcctcgtcggggggcggcggcgcggcgcggtgagcctgcgggcggtgcttgcacggcggatccatgtcggcgaggcgtccacgtcgacgaggcgaggaggatccgcgtcggtgcgaggcgcggcggcgaggcgaggcggatctacgtcggtgcgaggcgcggcggatgcgcgtcgacgtgcgtcagggcgaggcggcttgtcgggcacggcgggtgcgaggaggaagatggaggatttgcgttcgtttgttggagttggctttgttttgggtgcccaccttttcctttcaacgcgaggcataccaggtataggtctcctattttgcatcgtattgttggagacagtctaatagtcggtgaggcaccttgctactagttccattgagaaagaagacgtgataggcgctagccgatgaggcaacaaaatgttttgtacggtgtcaacgatatcaagtggattgtgttaagacgaccacttaatctaaagcggggtgtggcaatatagccatagcttctcgcagtgttagtggtagggattctttttttttttttacttgatgtagggtgactaggagcacctaatttgtgggcatcgtttttattttgttgcacgtacaaatcaaaatgatgttttataatgattgattaaaaattgagtggatataagttgataggc

SEQ ID NO: 21837 - DNA, 3330 bp, Oryza sativa
  Clone ID: PAT_MRT4530_27070C.1
atggccggtcgcggtggccgcgacccccggagaggctacgacggcggctacgggtacccgagaggcggaggagggcaagggggtactaaccggggaagagacgggcagcgcggtggaggaagaaacgggcctcgcggaggacgctttcccggtggaagaggagtcgagcctcgcagaggcggcgatgttctgggaggaggccaaggcggtgggcgggggactactgctggtgctggtggtcttgtgcgaggagggtccgagctcgcagtgggagcggaactgcggcggcgcgtgcccacctgccacgtgaacgacttcccggagttggggattggggggacgcccgtgctcgttcggcgatggcgcccgcgcgaccaccgagaccagcacgaccaccagagccagcgtcaccaccaccgccaccaccaccaccagcgccagcgtcaccaccaccaccaccagcgccagcagcgaaggggatccaggacgagggatcctcgagttcgtcgtggtccgttgcgcattccctacggtgaggatgaaaaagaagaaccaccggcaaccccaattgcttccagtaacaagaataaaagagaagaaccacctaccaaacataggccaatggcaagaccacctggtggtggaggtccattatctaaaggcgaggtcaaattgttggtgaaccatttttcagtcgactacccaaaggaatcaaccttttttcactatgaaatacgaatcaagcttggtgacggtcccaacagaaagctctcaaaggcagagcttcttacagtcaagaatgagctcttcgagcacgagagccttcaggagctttcgtcagctgttgcttatgatggagagagaaatttatacacttgtgctgaactaccagaagactgcatagtccctgtgagcaaattccgtgtgaaggacagttcacggacctacattgtatcagtgaagttgaagaagccgctgcctttaagccaactcttggagcagcggcctgggcctagagatgtcatgcagggccttgatgtcattgtgcgtgaggcatctagcttcggcaagattgtccttggtcagggattttacccgcagagcggcagtgaggccatcagtgatagcaatattgtagctctcaaaggaacccagcagagccttaaatgcactcagaaagggctgatcctgtgtgtggactattcggttttgccatgttggaaagctggatctgtgttggaccttgttaagactatgaagttcatggaatacccgctcttggaagaccaattgaaaaaattgaacaatgcgctcaaaggcctgtgtgttactgtaagtcacaggaagactgaggagaagtacactgttaaaggcttgacagataaacctgccgaccagataacttttaaagactctaaatcaggacagacgacgaagcttatcgagtactataaggagacgtataagaaagagattgagcatccgatgcttccatgcttggatttgagcaagagcaagtccaaacaaaactatgtgccgattgaattttgtaatattcctgaaggggagaggtatccagtggcgaggttagatgacaagaagtctgataataagggcgaacaagagaagccatctacaaagacgacactgagaaaaatttctataaaggttgcctctagtcggaaggaggagattctggacttggtggggaatgctcaagatgggccttgcaggggaaaaatagctcagcgattcaggatttctttagatgcagcaatgatggaagtcactggtaggattcttgctccccccaccctagaacttggcactggcacctccagaggccagaccttcaaattcactattcatcaggatgactgccagtggaactggaagcttaaaaaatacgataaacgagtagtagcacatggcgggactcttaactgctggggcgtcgtcgatttcagtgaaggcgacctagagagcaagtttattgacaaggttgtcaggaagtgctccgcccttggcatggtcatgacccgtaaaccatgctatgagcatgtgtcaaatatggaagtgctatccgatccaaagagcctcagagatgcgcttatcgaagcgaagcgtgccgcggaggaggaagacaagaagctgcagctcctcttctgcccgatgctcaaccggtgccatgggtacaagaccctgaagttgatgtgcgagacggagctggggatccagacccagtgcttcttgagcaccgccgcaaaactcgacgaaaaacgacaggaccagtacattaccaaccttgctctgaagatcaacggcaagatcgggggtagcaacatgcagctcgacccggactcgatcccagtggtgtccgccaaggatttcatgttcatcggtgcggacgtgaaccaccctccgcctgggaatgtcagtaaggacatcccgtccatagcagccgtggtggcctccgttgataaaggcgccagcaagtacgtgacaaggatccgcgcccagtatcaccggtgcgagatgatccagaacctcggtgatatctgcaaggagctcatcggcgcgtatgagaaggtaaacaagaagaagcctgatagcatcatctacttccgcgacggcgtcagtgacggtcagttcgacatggtgctgaacgaggagctggcggacatggagaataagatcatggtgggtgactacccgaagatcaccgtgatcgttgccaagaagaggcaccacacgcggctgttccccaaggacaggaaccagcggcagaccaagaacggcaacgtgctccccggcacggtggtggacaccgacgtggtcgacccgacggcgtacgacttctacctgtgcagccacaagggggaggtcgggacgagccggccgacgcactactacagccttctggacgagcacggcttcgcctccgacgacctgcagaagctggtgtacaacctctgcttcgtcttcgcccgctgcaccaagccggtgtcgctggccactcccgtctactacgccgacctcgccgcctaccgcggcaggctctactacgagggcatgatgatgttgcagccggcggcgtcagcggcatctgcctccgaggccatgatgccggcggcacagccccaggcggctgcggctgcggctgcggcagcgtcgccgtcgtcgtcagcggcatcctcatctgagggcatgacggcgtcccagccccaggcgccggcggcggaggcggcatcctcctccgcgggagctgccgacttcagggagttgcctccgatgcacggggatctgttgaacaacatgttcttcctctga

SEQ ID NO: 21838 - DNA, 494 bp, Oryza sativa
  Clone ID: PAT_MRT4530_27071C.1
gcggggttggtctccatcagccttggactccacgcggtggtggtcgctctagaactagtggatcccccgggctgcagaattcagcacgaagcgggaaacagatcggggggtggatggcgaagcgtaatgcacctgaaagactggtggaaggcgggcgcatcgggggttaaaacctgaacccttccacccccgttccatttaaacaccaacgaaccggcaagcaatttttaccattttttccaaagttgcgccaaaccccttcccttccccaggaaaacccgaggtttgaattttttcttcccccagggttcactttttttaaaaatggacctgggcttttccctcaaggaaacccccccccggggggggggccccaaaaggtgtatcttcctttttcaatcccccgggggcccccaaatttgtttccctcaagaaaatttttctaaaatcctttttttttttcccaaaaaaagggggtacagggggggttcccc

SEQ ID NO: 21839 - DNA, 723 bp, Oryza sativa
  unsure (1)..(723): unsure at all n locations
  Clone ID: PAT_MRT4530_27072C.1
ggatggggtgtgtcacctccgggtgcncactaatggggaacctgggaggtgacctatctggcgcctgggaatgggatgccccttgcaggtgccaaggagnggatangccctagtaccnatgttgtnccntaataggnncctctaataagggaaaacgtgtgtgtgtagggggtgtgagggangccccanagaatgcagtgtgtcgtgcgcagtgtgatgtgcgctctggagtggcgttgcnatgggggatatagatgtgatgtgtgcacacagggagcngcctgcccctaggtggcgcccccaaganagaatcacaaggcnctgaaangctgttgctggcaatgccgccctgtttggcgccgatatagatgtgtgcaaccttgggacgctatgactgtgaatgagtgtgggggtgtgtgcnaccccatgtgaatgtgtggtggtgccgccagtgtgcaatgtgtgtgggggaaatatgtgggggtgtgccccaaatgaatatgtgcttgggatgnacncacctgtgtggtgtgggtgtgcacctggaaatatgtggtggtgtgactgagaatgcgtgcataccgggnctgggctatttggtatcatntnccgctgtttgggagaactgctgttatnactttgtcgtgttggtagcctggtggtactcgccgaaatgcatattatacccaatgttgatgaatttttaaaaaaaaaaaaaaaaaa

SEQ ID NO: 21840 - DNA, 2151 bp, Oryza sativa
  Clone ID: PAT_MRT4530_27073C.1
atgaggccgctgagagattatcaagatggctctgctcaatacagcagctcattggctactcgtgttcaagaagcgtggaacaagtgggagatccagtgcctagtgatggcgagcttctccctgcaggtgttcctcctcctgtcggcaccatttcgcaggcgccacggctccaggctgctgaatggctcgctatgggtggcgtacctgatggccgactacgtggcgacctatgtcctaggccgtctgtcattcctgttggccgcagccggtgacacgcggcatcagttggcgctgttctgggcgccgttcctgctgctccacttgggtgggcaggagacgatcacggccttctccatggaggacaacacgctgtggatgcggcggctgctggacctggcagcccaggtgacgatgtccgtgtacgtggtgggcaagcagtggaaaggggatagattgctggtggctcccatggtgctcgtgttcgtgttgggagcagtcaagtacggcgagagaatatgggcgctcaggtcagccgccgcacgggcacccggaagtagttccattgctagccttgctgctcgcacctacagcaatattgctagtttcattactagccttgctgatgtgctgccggaatcagggcgtggtgtgatggcccattatagaagcatggttagtattagttcacaagacaaggtaagtatcgagagcatcctgaaggaggcctccatggagttccaagcaagcttggactttttcatggacgtgagcccttcaaatgtaagcggttcctactcgaggtaccataggatcaagaatgcgttggtggagatcaagtcttcaaagaatggatacgggatggcatacaagctggctgagatgcaggtctctttgatctatgactacctgtacaccaaattcggcacagttcgattccaaaccttcccaatatcaaaatcaaaatcaaatccaaccatggcggcggcgctccaatggcttgtctctcttggcctaacctctgtggctcttgtgttgttcgctagggccatggccggtaacactactagtagtaagttcaaatatagtagacctgatgttctcatatcttacatactgctcgtgggcgccattgcaatggagatatcctccatcttcattgcactcaccacatcatgctgggcaggcatcgctgtggtcaagcatcttcatctccatgtaggggagtggtcagggaagctggcacaatacaacatggttgatgcatgcgtccaggagagggagagacgacgacagacagcagctagtggcgccgtagggaagctaatccgctggatcctggcaccatgcgacagcgagacaccacaaccacacgtcgttgtctctcttgaggtaaagaagctgcttctgaacaaagtgcttgaaatagcgaccgatgtagacaacaaccgctgggacttcagtaggttccaaggccagtgggctctgtgggtggccaacagagtcaacggcggagacagtgatcctgctgctctaggcccagctcacagggcactttcggctagcaagatccaagagctggatttcgtgtccaccgttgttgcttggcacttggttacgaccatatgcttgctgcccggcgatggccctggcgagctcacaaaccctagcaaggacttgtccagttacatcatgtaccttgtggctaagcatgggatgatggttgatagcaatggacacatcgtgattgctagaagccgaatggaggtgcaggcatcttcgcaaatgcttgattttctcgatgagcttcacgaagatggcttcatccaggaactccgtgatggtgataggcaatataactctccggatatgatcgtacgtcatcggagtagacctgcacttaccacagctcgcaaggtctgtgtggagttgctcaatatcccagaagcaagagatcgatgggagctgattgctgcggtgtggacggagattctatgctacatggcacttaattgtggagctaccttccatgtcaagcatctcaccactggtggagagttcctcacacaagccaagatgctcctcttcgttatacgattgccttttcttatgaagagtcctctggaaggtataataatgcctccatttatgtga

SEQ ID NO: 21841 - DNA, 408 bp, Oryza sativa
  Clone ID: PAT_MRT4530_27074C.1
atgttggaagcatcgtacgttgatcaggcgcaggtggctgcggaggagcgggcaacaacattcctctccagccaatggttggcctccttccccttctcgctccccagatgctaccgcattgagctcccttgtcggccgaccactgtcgccttcttgagctcactgatgcggcagcggcggatctcaagctcaagctcacgaaggagggacaccaaccacaccatcctcagcttgcctccccacaccccccgccacatccttggcatccgccttcccgcgcccgcccgctctagtgatcacgtccttgccctcatcttcgatgtcgttggccgtgtttgcctcgacctcgccggctgcgccatccttggcatctgcctccccgtgcctcgttgccaaagatcagaatag

SEQ ID NO: 21842 - DNA, 417 bp, Oryza sativa
  Clone ID: PAT_MRT4530_27075C.1
ccaccaccgatccatcgcgacagggaggaggcgacgaggagaagcggcggcggcggcggcggcagcgggcggcgatggatgtgagcaggaggaagaagtgggtggcgtgggtggcggcggtcaccatcttcgtcgtgctcatgctcgtcaccccggccatcccgcagaacgaggagtaccacgacttcgccgaccagcgccgcctcttcctcgggatccccaatacgctgaatgtgatttcaaacatccccttcttttttgtgggtgtcgttgggctcgtcttgtgccattacaaaaactacttcaggctaaactcgcaaggggagctctggagttggacactgttctttgctggtgtgactgctgttgcttttggttcatcctattatcatctcaaaccgaatgatgccacactag

SEQ ID NO: 21843 - DNA, 374 bp, Oryza sativa
  Clone ID: PAT_MRT4530_27076C.1
aatggaataactttggcatcagaccaaagcatgctcaatacgagcttgattgtggcgatcaaaaacacagttgtgcaggccacacagtaacacaaacttgacagttgttccacacaaagccaccggtgataccgatcggatgactataatgccagctcgattagatagatagataacttggccatgagggcccgaccgtttatatctttcattatcagagggaactagctacgtcttgtttaacctgatcaccggaatagctgactacgtagacacagacgtcacgtgattcgtcgcatcagtgggagcatccttaactgtggtgtccgaattcaccgtatctgccactacagtaagcgcatccatcaccgatg

SEQ ID NO: 21844 - DNA, 1074 bp, Oryza sativa
  Clone ID: PAT_MRT4530_27077C.1
atgggccacgtcactgttcactcctggtcccattccataagtttaagggtgtgtttagttcagcggcggcaatgccacggcaagaacgcgccgccaacgctggcgccgccgcggagggcgcgcggcggcgcgggcgggtcgttctcggcgtcgctgctcgacgcgatctaccgttctctggacgagggagggggtggcgatggcgcgggtgctgtcgtcgatgacgcgcggcggtcggaggcggaggagatgaaggcagcggcagcggcagccgtgccgccgcagttctggtgggccaagtcgaagcaggcggcgggcgccgcgggcaggagccgtcgcgagtcggtggctcgcccgcggcactcggggtacgcgtcgtccaccgcctcgtcgtcggacgcgtcgtcgtccagctacagcagcttcacctgctcgtccgcgtcgaccaccgacacggagtcgaccacgcaccggagacgccacagccagcctccgccgcagcagccggaggacgtcgacgccgccgccgccgccgccgctgccgcgccaccgaacagcaaaccgaagaagaagaagaagaagagccggccgtgtttccctggagcaaggctgcggccaagaggcacagtgccgccgccaccgccgtcgtcatccggcccgtcgccggccacgttcgcgtgcgtcgtcaaggcgctgttctcctcgtcgcgcctcccaagaaagcccaaggctccaacggccgtccctctgccgccggcatcgccgccggttccgcagccaccgtgcatgtcggcggcggcgacgacgacgtcgaacaccaaggcgtcggagcggaggtccgtacgcttctgccccggcgccgagacgtcggtggtgcggcgcagggtggaggagctggtgcggagcctcgccgatgtggaggaggacgaggacggcagcgacgcgagctccgatctcttcgagctggagagcctccgcggcgccgacggcgacgagctgccggtgtacggcacgacgagcctcgcgaccaaccgcgccattatattgcgcagagagcagcttgctagttcataa

SEQ ID NO: 21845 - DNA, 477 bp, Oryza sativa
  Clone ID: PAT_MRT4530_27078C.1
catactttggtggattttgtgaaccaagcagagatctgaacaaagttagcaccatgcgcgctaactgttgcattggactgcaaagcaaggtacatgatctaagagttatgatggaagattggaggagttatttgtccttacctccaagcttgaaaagattgagtgcattggcatggagggtgccgcaaaattgcagcctttcttggtcacaccaataaaacgtccttatggacagcaaaaagaaatgaaaatggtgaagcccgccgaaagcgctctgccttccccccgaaagaaccttcagctaaacatctaaacagtgtgacgagattctgattgaaaggtcgcggtaagttttgccaaacacttcggagatccttgacaatatagagcggagttgccggaccgctctggaaaaatacactacaaggatggagcggccttagcactgctcctcagctccgctggctgtaccgaacg

SEQ ID NO: 21846 - DNA, 302 bp, Oryza sativa
  Clone ID: PAT_MRT4530_27079C.1
gacagctaggttaaagttctcatttctgtgacatcccggtctagggcttaataggattaataaaatactcatatcaacaaattgcaacttcttttctggaagccgatctcgaaataactctgaggttaagcgtgtttgacctcgagaaatttcgagataggtgaccgtcgcaaaaattcttcccagatgcacacgagtgaggacaaaatgtgcagaaaagatttgtgttggtctgtgagggcagtctatgacctataaaagctgccagatataagcgggcccggcctgggagaggcgtctct

SEQ ID NO: 21847 - DNA, 564 bp, Oryza sativa
  Clone ID: PAT_MRT4530_2707C.1
atggggaaatgttataacaacgcctccaagaacggtaataacgcctcaggtgtcaccatcgtcaagctggcccaatggcctgacaaggctttcgccaacagttccccattcaacaccatgaaaccaacccgtacaacgacgcttgctagaacaccgcaccatcccttcagcaaccaagcccaggccatcaccccatgctcaggcgtgctcacacaagactgctatcccacacaaagcggacggcgagccacgcgggtcgcggcggcggacggccctgccccaccccgctgccggcatcgaagcggcggcatcgacggggcacggggcgagatctggatctggtcggccgcgccgtcgccgtcgtgggtggatctgggcgcggatccggggctagatccgcgccgcatcgagacggacgtggcgccggcggagatcagggaggacgacgactcttccacctcgccggtgtcggatccgctctttccccctctcttccccgccgccgctcgtcgccgtccacctcgtcggcgcggcctccagctcctccaccacctcgagctctag

SEQ ID NO: 21848 - DNA, 1624 bp, Oryza sativa
  Clone ID: PAT_MRT4530_27080C.1
actctctgtccccaagagactcaaatcttaagaatgatagacaagcatgtgtgtatacattcatccttacttcttccgtcttaaaaaaaaataaaaaaagataacctaggtggtggtttgacacgagcaacatagcctagatatgtcattgttcatgttgcacaggagaagcatatgttttgcccagtatggaacgattacaccttccaatttccaagagggcatctttgaataatctggtacagtagcgcacaagacacagagaaaagaactcactaatcaaggctacaaggatttcaccaatatggccatcggagagcatctaaagctaaagctatacacacaccaaaatgatctttgcgaacatcagcgagtctcttcatctcttgctatctttcttttaatttatttacctggcggggtttcgatgcggtccttgatgatcttctcaccggatctgccttctcgcccttgctactggtgctaactttgtttggttcagcagtctcaccatcatcttcactatagtcactacctggtttctccttgccaccaccatttttccttgtctttctggaaagggcacctatggcatctctcttttgctttcccctggcaaccctagaagttgctcctcgcttctttgtattcaaattatcagcatcttctggatctgtgtctatttccttcgcatcatcgttctctgccacttgttctgggttagcaatgactactttgctagattgcattccagtcagcttctgcagttgtggcacgtatgctgtagtcctgccaccagctgttatgaactcaattttctgtccattgactttaccaggcttcttgccccatcggtgatggaataaccattccacaggaaagcagtcacaatcagcatcaacttcaacagcatatttcacaacctcttggatgctttggtgtagtgcttcacaactctccctggatagacttgaagcaatctgtaatggatgggttctcgactggtaaagcacctcatctgcaatccaattaccaattcctgatatgaagctctgatcgagtagaagagcttttattccaatcttctttctgctcagcgagtccgcaaaactgtcagaagacatcggctcaaagagagcatctggtcctaactcagaaatcgggggtacagtttcgggatcttcaaacaaccgaactcttgcaaaccgcctcttatcagtgaaggaaaactctaagccatcatcaagttgaacaaaaaatttggagtacttggagggccactcgtctgtagaactgacaactgatctcttgtacttggtcacaggaactcccttaatgtagatcgcacctgccatcccgaactggaaggaggggaatggaggggcgtcgaggcggagccagaggttcttgcccctccgccgcgcggcgacgatggtccggccgaccatggcgcgctcgaacgccacgcgccccccggcggcggcgaccaccaccttggggtcatccgccaccgcgcagcgcgcgatcctcctccccacgcagtgcgcctccagcgccctcctcgccgcctccacctccggcagctccggcatcccctccccctccccctccccggacgcgtggg

SEQ ID NO: 21849 - DNA, 519 bp, Oryza sativa
  Clone ID: PAT_MRT4530_27081C.1
atggcctccttcatggcactggccggcgcgtgccgccgccggccgcagctcctccggccatcggcggctcgccgcctcagcttcgtcttcctcagtcgtccatttcctcctgctcctgcacccttgttgcagctgatccagcggcagcgccatcgttcttcttcttcttccagcatctcggagaacggtgcggcagcgccggtgaccgagaatctgcaggcggcggcggcgaggcggcggaggcaatcggccggcggccgcccggcagctccgaggggaggccgcggcggcggcggcgtgagaccgacgccgcccggtaacccgagagaagcgcagaagggcggcggggtgatccacgcggtggcgccgccaccggcagcgccgacgagcagcaagcctaagcctgagccgccgggctacccgagggaaggcggcggcggcaatggcggagtcgtcgacgatgtttctccttcttctaccgatacctcgacgtcttcttcttcttcctcctcctcttga

SEQ ID NO: 21850 - DNA, 826 bp, Oryza sativa
  unsure (1)..(826): unsure at all n locations
  Clone ID: PAT_MRT4530_27082C.1
cacgagcgccgcccctggcgtgcgaaccctccaatccgccctctccctcggatccagccgcgccaccgcccgcctcttgcgttgaatggaagcaggagggaggagaaatcaccggcggcggcggtgacggttgggaggtcctaagccctagcggctagcgcacaggttgacggagagaaaactacaatatgcgcgaatttaatggagttcgttcagatgggattacgttgagtagcatcacatgttgggacctgtcctcatatgcctccagcagtccagctgcatgactgcggtgaagatgagcatcaagaattggaataatctgaagaacatggagggatggttttatctgtgcgactgtgcgctcaaagaaattctttgctgatagtctanaaaacatttgtgaagcaaagtgcaggcttttcttctattggacccatacctgcactcgcaattacagaaattgagtgtgtgtgtgagaganaaatgagaagtggagcagtgaccactanccagtncacggcgaagcaataggcgaagggctcgganttttgcctctgctaaggtctccactggttgatctgcccattggtgtttcctgtcgttcacttttggtcgttgaactcccatggctcattggatggcacctcacttgtccacggtggggcaatgaactcagatatcancgtctgcgaagattgctgccactgatctacccactggtccccattgtggcgtttggatcnaactcatctatgaataaaaattggtttgaatgctatcnaagttcccaatgcttggattccaactcttttgtccatttttt

SEQ ID NO: 21851 - DNA, 535 bp, Oryza sativa
  Clone ID: PAT_MRT4530_27083C.1
gtgacaagtcgttagcgattagttttgaccgtcaatattaccaaaatagaggagaactagttatgcttgcaatgcatattcatgttagaatcataatattccactagcatttggttactaaccttttgcagagaataactataaagtggatgaaaatcgacatcaaaccagataataaatcaatcggatgatgtcgagaatcaaacttatgtatgaatgggccaataactcagaattgacacgatgaactgggccaaaattcacaagtctacatatgagagcaaaggaggaggccacctgccgattttgggccaggtcggcccagcccttggttcggccgaaccccctccccccctcgcagcgccacttaatccagggttctcctggacggctgagatgactccccaatgacgattggtgagtattaccgaaatcggagtgtggaagaattcggaagagttcgggtatgcctctagtagctcttctcttctcttttgtaagctctgtactttatttagaatactcttctatatac

SEQ ID NO: 21852 - DNA, 559 bp, Oryza sativa
  Clone ID: PAT_MRT4530_27084C.1
tgaaaatcgacatcaaaccagataataaatcaatcggatgatgtcgagaatcaaacttatgtatgaatgggccaataactcagaattgacacgatgaactgggccaaaattcacaagtctacatatgagagcaaaggaggaggccacctgccgattttgggccaggtcggcccagcccttggttcggccgaacccccctccccccctcgcagcgccacttaatccagggttctcctggacggctgagatgactccccaatgacgattggtgagtattaccgacctttccaaccgtcacaaccgtcattctcaagctataaaaggtgctctcatcctcacttcacacacacccctcaagcaaagctctctcatattctctcaagtttagtttagtgttctcaagctagtggagtagaaatagagtagaaatcggagtgtggaagaattcggaagagttcgggtatgcctctagtagctcttctcttctcttttgtaagctctgtactttatttagaatactcttctatatacatttatggtattggaatactttctgagt

SEQ ID NO: 21853 - DNA, 500 bp, Oryza sativa
  Clone ID: PAT_MRT4530_27085C.1
ttcttttttttttttttttttttttcctctttttttctttttttctttttttttttttttttttttttctctttttctttttttgggggaaaaaaaaccccggccataaaccaaatcgcaaagggttttttaaaaccggggccggttttttaacaaggaaaaaaaccttgggaaccccccaaggggggtgggggtatccccccaattccttcctctgggttttttgggggccccacccctaaatttcagctccacaaaccccattcccggacaaaaaggcagaaccccccggctgggggccgcccccacataaaaaaaaggttccggaaaaaaccccaagaaccccccagggccccccgtttcccccttcccgggaataaagaaaaaaggtccctgggcccccaacaagaccaaaggggtggggtccctaaaaacccaagggaaaccccccggttgttccaaaaaccttgggcccccccccctaaacaaattttttttta

SEQ ID NO: 21854 - DNA, 527 bp, Oryza sativa
  Clone ID: PAT_MRT4530_27086C.1
ttatcctgctcctggttccgggttcccgttccgaaacgacaaaaaggaggttctggaacccttaagtttcgatggtatatggatatggaaaatccaacatgccccatcctaataggaaaaggaagggaacagatacccaatatgattattgggaagaacttttggtaatggtctcgggcctatatgctcttttttgtgtgttcttagttctattcatcttctttgattcttttaaacaagaatctaataaactagaattgagtggaaaagaagagaagaaaaagttaaacggagagaatcgactaagcagagacattcagaatcttctttacatcaagtaaatccttcggctcctatgtcctttttctttaagttatttattgtttctctcaagccatagggaaagtgtctatgataaataaaaaaaaacatctcactctttctctatggcccagatttcatgataagtgggggaagatgttttcttccccaattctttgttcaattctgaacaaaaaaaaaaaaaa

SEQ ID NO: 21855 - DNA, 152 bp, Oryza sativa
  unsure (1)..(152): unsure at all n locations
  Clone ID: PAT_MRT4530_27087C.1
aagaggnnnnggccgacaaggaaagataaaaagtactggaccattacagaagatcataaaaaagcggacacttcaagaagaaggaaagacctgaagtggctccctcaacagaggaagaacaggggtagacagggtacacaaagggaggcaag

SEQ ID NO: 21856 - DNA, 174 bp, Oryza sativa
  Clone ID: PAT_MRT4530_27088C.1
gacaggggacctgaagttcatggtaggtattagattatcagaagagacagtacagcaatgaacttgatgggtactcactgtcatcggcacagggtaagttcgctttatatatatattcaggtacaagccgtagaaagggacgagaaacagaacagaaacaaattgtggaagtat

SEQ ID NO: 21857 - DNA, 231 bp, Oryza sativa
  Clone ID: PAT_MRT4530_27089C.1
atgcaacgtgttactaagtttatatgtgttgttttcgtgcagaccaagcgacgagagaagcgtgtgtatattgtcatgagcttagttgcaggcaaccaccgatcgactgttgatcaccctcacgtcaaattcaccaattatgcgtatgaaattgacagcttaattcgatttcattatttcaccacgaagcgagttgaaatttggtttggtctccatcacaagatctgtgca

SEQ ID NO: 21858 - DNA, 354 bp, Oryza sativa
  Clone ID: PAT_MRT4530_2708C.1
atgtaccagaatagaagagacaaccgattggaccagaaccgagcgacccgccagagtgtggatcggagtaatcaagcatttggtgaagttggtctgaagcccggaagcggcactgaagatagagaggatgccttggatgaactcaaggccaccgacgccgtcgcacctcctgccgacggccccacctccacaccggctgtcttcgccgagccgcaccttcagatttggcgcgggccacctctgtccgactgcctcccgctgccgagggactcggctgcgcaggttgccttcctcccgccgctgcacgccgcctcctgccgccgaggggagcgggccacctccctcccaccgtag

SEQ ID NO: 21859 - DNA, 458 bp, Oryza sativa
  unsure (1)..(458): unsure at all n locations
  Clone ID: PAT_MRT4530_27090C.1
aaacaagtccggcctttgggcgttgccgttccaggtgagcgcagaggcaaagtgtgttcgtcggtttccgtggatttatttttgcaacggcgccaccggccggatcggtacagctacggacaggcgagatacagaggggaaaccgtgggggatgtgcaatggttttttgagatgtgtttcttccttcccagttgctactcggatcaccgtggaatctgtttgtggctagtaggaggatatgtgttagaaattagaatctcctggttctggtctaatcaattgttacgttttctacatcgaaaaaatatggggatagttggctagtggctatatcgggttcgatggttgtacgttcctagtttacttttttacgatacgatgggtgtaacgcgcaaaaatgtattttaatatgaaatcaataggtcaccaatgtagggtttnnaagcaggaaacaatta

SEQ ID NO: 21860 - DNA, 457 bp, Oryza sativa
  Clone ID: PAT_MRT4530_27091C.1
tagggactgttccttgctgtatacttacctgcctgcttgcccacctaagagcgactagcgccgtcgagccttaaaaatgaggggcttcctgcaaggtcgcgcctaatggctgagccgccccgctgccccagaaagaggagtactcagattgtgcattgtgtggccagcgcgctggttaggggttatgctggcttggcgtgggggtcgcgtccggggggagcagactaggggcgctggagacaaagcgaaaaccgaagggagagatgggcgtgggggcgatgccacctaagagagcgttctggagtaggttggacatgacgggacggaggtcggacgcgatatatatgggctggagagggggcaatatgtgagagcacgtgtatctagcggtcccacgcgcgcggacacggaggcacgttttattgatgtagccttcagtttttaacaggatatgaca

SEQ ID NO: 21861 - DNA, 1166 bp, Oryza sativa
  Clone ID: PAT_MRT4530_27092C.1
cggcacgaggatcacgactcacaaatccacaccgaaaaagcgagagaagaaaacgagagtgttcgtcaagctcgcgaatgggagggaagatgggcaaggacgtggccgccggcggcgagagcaaccgccgcccgccgccgccgccgcctatgccgctgggcctgaggctccagctgatcgggctctcggcggcgatcgacgcggtggagcggcgcgacgggacggtcaaccgcgcgctctactccgtcctcgtcgaacacctgatgagcgtccgcgccgacccgtccccggacgccgccaccggcgccgtccgctccttcgacttcaccatcgacgccgcgcgcggcctctgggcgcgcgtgttcgcgcccgcggcggcggcgcaggcggcggcgccgatgccggtgatggtgtactaccacggcggcgggttcgcgctgttctcgccggcggtggcgccgttcgacggcgtgtgccgcaggctgtgcggcgacgttggcgtcgtcgtcgtctccgtcaactaccgcctcgcgcccgagcaccgctaccccgccgcctacgacgacggcgtggacgcgctccgcttcctcgacgggaacggcatcccgggcctcgacggcgacgtcgtccccgtcgacctcgccagctgcttcctcgccggggagagcgccggcggcaacatcgtgcaccaagtggccaaccgctgggcggccacgtggcagcccacggccaagaacctccgcctcgctgggatgatccccgtgcagccgtacttcggcggcgaggagaggacgccctccgagctggcgctcgacggcgtggcgccggtggtgaacctccggcggtcggacttctcgtggaaggcgttcctgccggtgggcgccgaccgcgaccacccggcggcgcacgtcaccgacgagaacgccgagctggcggaggcgttcccgccggcgatggtggtgatcggagggttcgacccgctgcaggactggcagcggcggtacgtcgacgtgctgcggcggaaggggaaggcggtggaggtggcggagttccccgacgccttccatggcttctacggcttcccggagctcgccgacgccggcaaggtcttgcaggacatcaaggtgttcgtccagagcaacagggcggcgcgcgccaccgcctga

SEQ ID NO: 21862 - DNA, 1020 bp, Oryza sativa
  Clone ID: PAT_MRT4530_27093C.1
atgtcgacgaagcgccggcgagcttgcgtatgcccgaacgaggtcaccacatcaacggggtcaacgggagacctgcacgcatgccacgagactggggccgcggccggcgatcggtcgtcgtcgccgtcgctgctggatctcccgctcgacgtcctgctcaagatcgtcgcccgctgcgacgccgccaccgtcttaagtctcgccgccacatgcaaggccctccgccgcatcatcctcggcgacgacttccgccgccgcctggcgctccaagctgccgccaacggcggcttcgaccccgcgctcctcctcggcgtctcctaccggctccacgagcacggcggcgcggaggatgatagacgtctcgtccaggcatacggccgccgcgcacgcttcgacgagagcctgctgggatcgttcacgccggtggcctcgcgcgatggcattctcgtcctccgccgcgagcaccgggatgcgagctccggcggcggcggcgctggccaactttgtgcgatcaagactcgaccacttgagctgctcgtctgtaacatgctcaccgggaacacgtcgtcgcctcctaccctgagcttctgcgacgacgacttcacctacccgcccgccttgctcaccgtcgccggcgccggcgccggctgttccttcgagctgctcgtcgccgacagtcacctgacaacgcagacgtaccaatcacagaacggtaaatggggcgcccgccgtgccatcgccatgcccccggaccacccgcggctcggcgcgcgggtggacggctgcagcgccgccgtcaccggacgaaccgtacactggctctgccataaatcccgaccaaactccggcgaacacgcgttcgtcgtcctctccgtcgacgccgacaccgcccgggggacggtgacggagctgccgcgtgaatgcattggcgggaagaccggcgccttcgacgtccacggcctccatctcgccggctcggcggcggacgggaggctgaggctggtggccgcggggatgtag

SEQ ID NO: 21863 - DNA, 2614 bp, Oryza sativa
  Clone ID: PAT_MRT4530_27094C.1
gtggaacaagaggaagaggaaggaaggaagctagggttagctagctgtgcatggaggagcctggccctgaggaagagaaggaggaggaggaggcgcgcttcgacttcctcgagtggatcggcccggacacctccgccgccgttttcaccttcctagaccaccccgctgatctcgcccgcgcctccgccgtctcccgttcctggcgccgattcgttgttcggaatggcttcagcaagatccaatgcctgcgcctttgccctgaagcttcaaacttcacccgtattattaccaaacaagccattgcctctgcttctgagtcggatgcggagcaccagcacagggcgtacatgcatctcagctatgcccttctcttggatgacccccaggactgcatcatccgctgcatcggtgcctccaccaccgacaatttccctgaggagaccatacaaaacacccttgtgcccaccgattgggtggccatgatgaggccctcttattggtccagcgccggccacttcgatcctgctgtgcccgaatgcctcttttacaggcttcgctccgatctatgcctcgttcaacaaatcaacatacagccattcagagctttcttccagtatggtgatccaatatactccgcaaaatatgtccgcttccagatgggttacccaaagacacctctaccatctcaattacttgtatctcatgataatgaaggccagttggctgctgatgacaactatatctggacgtacacatctccacaatttccaatgctgcaggaaatggatgatctatattacatatgcatatctcatgtccaaatagtggggattccactgccgcgggaactaggagtagatccttacaagaacggtgtggtcctcaagtactatccaggcatcggcggagttggcgagattgagttcggctttatggcccagaatcccgacctggatggcctatattacatatgcaacgctgccgccgcctcctctcccattccacctgccgcgggaactaggagtagatccttacaagaacggtgtggtcctcaagtactatccagatactcgcagatctggcgtgtgccatggtgagtcatcaggggatgatggtcgcaacagcccctctaagtggcgcaactttaccacaagaatcttgcactcaagctcagctcgacgattaggatggaaccaggccatcttgaacaggctgtttggcgcgcatgatgcatctgaggaagaggaggaagagacttaagaggatatatatggaaattcattttgtcccatgtgatgtatgctcactgtgtttttaagacccttttctcctttttttaacaagatgagaatgcactggtgccttgtatgtaagagatgctgtgagtgcatccttgttgaatgctactataatacatgctgtatacatgaacaaggattaatgagcggagcatagaatggagaagatgctgctactctactgcagttctgttgcaatgcaacatgaacggcagattcatgcccgcttgttcaagtttggactagagcatgatacctcagtctgcaatgcacttgtggacttgtacagcaagtcctccagccgtttactcgacttgttgcacactttccatgcagtcgacaagccgaatgtcgtgtcctggactgccttgatcgctggacttgcatgccatggcagagatgaggaggcgtttttggcattttctcagatgcggcttagcggggtgcttcccaactcgttcaccgtctccactcttctcaaaggcagtagctcctcgctagctttcctgcatgccaggaaaatccatggctacattctcaagaccagctttgaatctttggatgcagctgttgggaactccttggttgatgtttatgttaggtttgcaaggatggatgatgcatgggcagtggcgaccacaatggccttcataagggacaggttcacatacacaagccttgctagagggttaaatcagatgggccttcaacagaggacccttgaaatgtttgtccggatgttccatgaggatgttgatatcgatggtttcagcatcgctagcttcctttcgtctgctgcaagcttggcatccatagagactgggaagcagttgcatagctgctcggtgaaactaggattgagtagtgacatttcggtctctaacagtcttattgacatgtacagcaaatgcaagtgtatgggggatgctaggagcgttttccagtcaatcagcgagccaaaagttgtgtcctggaatgccttgatgtctgcactggtatccaacgagtattataatgaagcgttgtcggctttcgaagacatgacattggttggagctaagcctgatggcatcactttctcactaatgcttttcgcttgcaaccgcagtggcttagttgacattggcatcaaatacttcaactctatgggcaatttgtttggtgttctcccacagaggagccactacacactctttctggatatgttaggacgatcaggtcgtcttacagaggcagcgagcaccattgatgttatacccatccagccagacctagttaatgtgcagggctctattggcatcttgaaatctctgtaa

SEQ ID NO: 21864 - DNA, 398 bp, Oryza sativa
  Clone ID: PAT_MRT4530_27095C.1
aaacaaaaaaccaaaccccctaacccataacttaatcactacggaacaccgagaggatccaactttttcaaagggggtcacatcacactaccaccacaggagttagcccgcctgcctgctaaaaacaaaagctacttaccagggggggtacaacacaagggctgaaactaaaacaacaaccggcctgcaccccgggtttggtggtgcacggaaaaagggtggggggaaaacggttttccgccttttcaccaattcctaacgaatttaaaacatggcaaccgggagccccccgggggaattttcgggtccttttgggggtgcaaccagggcacttggactggttgaagggccccgccttcccaggggggatccaaacccccttgccatggaaccacttt

SEQ ID NO: 21865 - DNA, 384 bp, Oryza sativa
  unsure (1)..(384): unsure at all n locations
  Clone ID: PAT_MRT4530_27096C.1
gcacgagcccaaccaccgcgcgcctctcctctcctctcctctcccgccgcgcgaatcgcgatcttttcctaagccgcggccacggtttgcctcgctagcttgcagtatctgtatcacacagaggggtcaaggggacggatcagctagctctctctatagctagcaaagccggccatgtgcaagaggagctgcatggcgccgtccgagtcgtgcgcggcgcggccggcggacgagaggccggcggtctgcagctgcggcggggccggtggtggtcaggcggcggcggggacgtcgtcggaccgccaccaccagcttgtgctgctgcaggcggaggcggtggagaagaagaagggcnggcaggggggcggcggcgccggacgaggc

SEQ ID NO: 21866 - DNA, 5081 bp, Oryza sativa
  Clone ID: PAT_MRT4530_27097C.1
tatgtttcctaaatgtacacatgagtcattttctcagaagctgtacgagaagttcaagaaccacaaaaggtttagcaaaccaaagctttctcgtactgcatttacaatccaacattatgcaggagaagtaacatatcagtctgatcatttcctggacaaaaacagagattatgtagtcgtagaacatcaagagttgcttaatgcttccacgtgctcctttgtgtcagggttattcccatcagtacaagaggagaacacaaaatcttcaaagtcctcaattgctaatcgttttaagaactgcaaaggggcaactccatgacctgatggagactttaagttctacagaacctcattatattagatgtattaagcccaataatcttcttaagcctgctacttttgagaacgccaatgttttacatcaacttcgatgttcgggtgttcttgaagctattcgcatcagttgtgctggataccctacaagaaaattatttcgtgattttcttcaacggtttcgcattattgctcctgattttttcaaagaaagaaatgatgaaaaagtaatctgccaaaagattttggacaaaatgggactccagggttatcagattggaagaactaaggtgtttctgagagccggtcagatggctgaattggatgctagaagaactgaagtgcagaatagagcagctagagctgttcaaacaattttggcttgtaagctgcatttgctcctgagaaaacaagctgcagctctgaaaatacagaaaaacgtccgctgctattttgcctcaaagtctttttctgaactgcgctcttcagccattacattgcagacaggattaagggcctttggtgcttataacgaatatattcgcagaaaacaaaacaaagcttctactgatatccagactcaatggcgtagccacagggataattcaaattatctcaaactgaagagatcagtgttgatttatcagtgtgcatggagaatacaagttgctaaaggaaaactcagaaagctcaaaatggctgcaagagatacagaagctctcaaggtagagaaagggaaacttgaggagcatatagaagaattatcaagccgtttgtgtttggaaaagaaactgaggagtgacttagagaatagcaaagcaacggaaatttccaaattacagaccactcttcatgagatggagcgtagagtagaagaagccagagcaacacaagaaagagaatcagccaaaaaggttgtggaagaagctctagttctagaaagagagaagatagctttattgactaaagaagttgaggagctgaaggtactactgctaaaagaacaagaagaaaaaaatgcaaccaatagtgccttttctattgctcaagaaagaaacgatgacctaactaagaaagttgaggttgcaaatgaaaacttcaagcagcttaaagatactctgaagagttttgaagagagcacaaaaggacttgagacttctctgatgatggagaggcaacaaaacgaggcaaatagaagggaagttggtgaagcacaacaaagagttgaagaactactgagactggttgcagatgctaatggaaaatccacatcgcttcagactactgtgcagaggttagaacaaagcttaattgagaaagaggccacttggcttacagaaaggcaagaaagtgaaacaaccaataaattgctcatcgaagctcatgggagaaatgaggaattgctcaataaaattgaagttgctgaaaatgacatatctaaatttcgagacaatatccagagatttgaagaaactgcaacaacattggagacttcattgctagctgagaaacagcacagtgctgcaatcatgtcacagttagctgaaacgaaacagggaaatgaagagttgcagaagaagctggcagatgtcaatagaacaaacgatatacttcaagattctttaaagaggtttgaagaaaatgtaaccacaagggacgccctgtatttagctgaaaggcaagagcacgatgaaacaaagcaatcactttctaaatctcaggaaagaaactgggaattgcttcagaaagttgatgaagcggagaaaagaataaataagcttctggagaatgcacaaagacttgagaaacatgcgacagcaagggagtctttgctgctaaagacaaagcaaagtcatgattcgacaacaaaagcactagttgaagctgaaagtagaaaccgagagttaacaaaaagttttgaggattcagacaggaaaatcaatttgcttgaggattcagtgaacagactggaagaacgtatagcagagaaagactctttgttggaaattgaaagacaagaaaacaatgcaaccaaggatgaagtaaccaatgctcaaaacaagatcatggaattagtaaacgagtcccaacaattgcaagatatcagaaaacatctggaagataacatcaagaggcttgaagaagatgctactacaagagaagctttattgatatcagaaaaacagacacatgaggcaactaagagaactctaactgaaactcagttgagaaatgaagagttaatcaataagatccaggattctgataagcatgcccttcagcttgagctaactatcgagaggcttcaagagaatgcatctacaatggaggctttacttttgagagaacgagagcaaagcaatgcaactatgaaggcacattcagaaagtcaagaaagaaattcacagctactaaagaaatttgaagatgttgacaagaaaattggtcttcttcaaggtgccatacaaaggcttggtgaacaaacaacaaaagacactttgttgttatctgagagaaaggagaaggatgaactgaagaaagtgcttagtgagactgaatacagaaatgaagagttagtaatcaaaattgaagaagagaacaaaaaagttgagcatcttcaagacaccataactatgcttaaggaaaatatagcggttcaagctgctaatttggaagctgaaagacaagaaaacgacaggattaggaaatctcttgttgaagctcaggagagaaatgacgagttatttaagaaagttagtgacagtgaatacagggcccagcagctccaagatactgtgcaaaagttgagacaagaaagtgatgctgtgagaaaggcacttgcggaatctcatggaagaaatgaagatctaataagacgaaatgatgacctcctcagtaggaatgatgacttgatcaagaaaattgaagattccggtcaagttgttgctgagctccaggcagccttagaaaggatagaagggaaagcggccaacttagaggcagaaaatcaaattcttcgccaacaagcaattgcaacccccccatctacagccaagtctcaagctgcattctctaaaatcaatgcatttcaacagagaagtccagaaaatggacatattttaaatggcaacgtagcatatgctgaaaagtccttgactggtccagcagaaacaagaccctctatggttgttaaccaaggtagcatcctcaatttgattaaccaaaaggattatgaaagtggagataaaatgcaaagagcacataatgaagtatatcagcaccagcagccccaggatgatcagcagttattgcttcagtacattacccagcaccttggattctctggtagtaaacctgtcgctgcgcttcttctataccaatgccttcttcattggaaatcgtttgaaacagcaaaaacaagtgtctttgacagtatcctacaagagataaactcagcaatagaggctcaacatgatacgagaagcctggcctattggttatccaacctgtcaacattgtcagttctcctgcaactctcatttaaaaccaccagggcagcaatctcaaccccacatagacggagattttcctacgagaggatttttcaagctagtcaaacttcaaatagcggacttgcttatttcagtgctcaaccggtggatgggcctagtggattgcaacaaattgatgcaaaatatccagctttgctcttcaagcagcagcttgtggatctgattgagaggggatttgtaaagatagtcgaacatgtaaaagaggagcttaacctgttacttgagatgtggttacaggatctaagggcttcccacacaatgaaagcaaagatctcactttcctcttcaagcagcatgttgcaaacatgattgctcaggtgtttggaatgaaaagtgaaaatctgaagaaggagcttgcaactaatacgagcaagttattacggcttatttggaatccacacgaagataacccaaagacttgaagaccttcggatattaatgtctacacattgagcagattcaggctgggaagcactgaggcatataagacaagctgttgatttcttggtaatttcgctgaagccaatacggacatggagtgaaatatgcgatgatgtttgccgagtacgtgacttacagcagcttgagcgtatagttggcatgtactgggatgatatgaatggcacaaacattatttcagcagagttcacatcaagcatgagaactatgatgaaggaggaatcaaataatgccaccagcttttctgtcctgttggatgacgattccagcatacctttttcacttgaagacattgcgaagtcgatgccaaccattgaggagacgacagagaatgacctgctaccttttgtccgtgaaaaccaaagctttgcgtttatattgcacaggagagattgagtggttccctcttcacagatcattcaccggctatgtgaaaaaggagcgcctctgtgtagcgtggatattacacgttattcatgttgtagactagtaacccatttaggaatcaagagcaattgcagctgagggtttctaggcctctctggtttgaatggttggttaagcaaactgtacatgttttatctgcagtgtgtataacacacgttattcatgttgtagactagtgacccatttatgaattaagagcaattggacctgacgttttctagtcttctggtttgggcggttggtcaagcaatcatcttattttctcacgtc

SEQ ID NO: 21867 - DNA, 474 bp, Oryza sativa
  unsure (1)..(474): unsure at all n locations
  Clone ID: PAT_MRT4530_27098C.1
attttattatcatgtaaacatgacaatcatatttgcgganaatagctgctatctgcaagctgcttggattatgacatttagctacttttgctctggcgttgcaccaaattttattgtggaccaaatggattctccatgggcccaaatctagcctgttccttagcaaaagagtaaagatgatttatgctgtcatgtgggaaaccccctatcagtgccaacatggggccatgaacactacagccatcgcacaagccaggccagtgctgcctgagggctggttgtcttccctgtgcattgccattcagttaggactttgtgagttggacatacattaaattataagagattggttgagtgtaaagtgtacttcagtttaaaaggtgttggattcttaatcttcctcgatctgttaagagagaccagggggtatctctatcttccctctctcgggattgctgagctcacagtctactg

SEQ ID NO: 21868 - DNA, 361 bp, Oryza sativa
  Clone ID: PAT_MRT4530_27099C.1
acgccgctggggatttacctgatgcggatagggctcctgctcctgagcactcatggcggtggctacggacagagcatgctgtaccggggcttcaacacgggcagggggctcggggccagaagctacgcgctcactaagctgttcatggtcaaccaagactactggcatggatggacgatctgagagatactgcaatatatgggggaacacaactggtacagatactgaggaggctctcatagccaacctggctctagcgaagatgatcatcagacggcgtcttctactccgttggtcagtggattgaacactgctaccaatgcaagccaatctttgatgtacaccgcactgggatgttgcg

SEQ ID NO: 21869 - DNA, 131 bp, Oryza sativa
  Clone ID: PAT_MRT4530_2709C.1
gtgacgaccagaatgacttggggcaagataaagaatccacgtgtctatctacagaaaggtcctgaacctcttataacatgaatttcgttacatcttaatggactgtaaaacattgttatgacccacctatc

SEQ ID NO: 21870 - DNA, 2412 bp, Oryza sativa
  Clone ID: PAT_MRT4530_270C.1
cagcgcgccgaggagagtgggtgtccgtgtggcctactacttgcttcctcggcgcgcgcgggtgttgttgcctcgcatcctccaccaccactagtgcagccaagtgcgtgcgtgtgtgtgtgtgcggacaccgttgctgccgccgccggccgccgcgcgcagggtggtgacaagatgacggcgacgccagcggtgatcgggctgagcgcggggaacaggctgctgagcgcgtcgttcgggccgaccgacctgatgccggacaaggtcagcctcggcgtcggcggaggcgggggaggaggaggaggtggtggaggtggggacgcgatgtcgttcgccgccgcgcccgcgacgccgaagctcaccgcggtcgccgcgcacaggctcaagctctccccgcatggccgcgcgcaggtcatgcgcgcgctcaggcaccactcctccgcggcggccgcgctcgcgcccccgcccccgcccccgcccccgccgacgccgtcgcccgcctcgcgcgccgcccacgcccatgacctcgagtcctccctcgaggccatcgtgctgctgcagaggtccatgctcgagaagcagtgggagctccccttcgacgacgacaaccacgccatggccatcggcttggccgaggatgacgacgacaccagcaaggccaccgtcgtcgtggcgcggtccagtgtctcggcgcggcagaggaggatgagcgggcggcggcgggggaggaccaagaacggcgcggcgcacttcgccgtcagccccgagctgatccagagcaggaacaggatctacctcaggggcaccgtcagcaaggagctcctcacgcacaagcaggtcgtccacctctcccacaagatcaaggatggcatctggctgcagcagcaaagatcaaagctgaaagagaagctgggaaatgagccctcatacaaacagctggcgcattcgctgaagatatcaccgcccgagctacgatcaaggatgcacgagtcgtttcttgcaagggagatgctaacaatgagcaacctccgtttggtcatttccattgcccagaagtatgataaccttggtgttgagttggctgacctcattcagggtggtctgatagggttactccgtgggatcgaaaaatttgatgcatccaggggctttagaatttccacttatgtatactggtggatacgccagggtgtttcaagagcattagctgaaaactcaaaaacattcaggcttccaacttatctgcacgagcggctgattgcgattcgtggtgcaaagtatgagttggaagatcaaggaattgctccaacaatagaaaacatagcagggtcactcaacatatcagaaaagaaagtactcaatgctacagaggctgtgaacaaggttctttcgttggatcaacaagcatttccatccttaaacggcttacctggagagacactgcacagttacatagaggatcaaaatgtcgcaaatgatccatggcatggatttgaggagtggtatctcaaggaagaagtcaacaagcttttaaactcaactctcaacgagcgtgagagggacattatccggttatatcatggcataggaaaacaatgccatacatgggaggatattagcagacaattcgggttgtcgagggagagggtgaggcaagtaggactcatcgcaatggagaagctgaagcatgctgcgaggaggaaaaatttggaggcattgcttgaggattattgagttgaggggctttttgtttgagtcagatccacaaacacagcggttgtatatactcagaaaacatagggtacatccttcaaaaggcgtactgccactcacatgaaagtaattatacgtgtacattttgtgacattagggagatgcatgatcaaaatctctatgcctgtgttatgaccaaggcaatcaggaaacagagagatgatgtttttccttcaaggtttacaattattctgtaatatatatgtaagtatgatttagcttgatcaatagagcaacacttaaaagttctgagccaaaaaataccgagttcataaatatgtattctttctatttacatataaataagatgcttaaaactgacaaggctggcaaaaaaatttcttatcatgttagatgatattagagttggtgtaactccaaaatcttcacaagtttgaagtatggtataaccgaactcattgaaacttctgaacgtttaatgaattaatccttgtaattggcactgaattttgttcaaaacttatcatcatgttaaataaaatacttttctaaactcaacctatgtttaccatttcaaatgagcttggtggcaaagagtaggcttttccacacgatattcaaaaaagagttggtggataaaattctgtaagtttgagaaaagagaggttgatatgcgcc

SEQ ID NO: 21871 - DNA, 843 bp, Oryza sativa
  Clone ID: PAT_MRT4530_27100C.1
ctaccaatgcgagcagagcacgccctctgcaatcatgccgtccatccccaggtccggcagcagccttgccttgccccggcgttggtttttgagggagcgatgatggagagggccgaggacctgcgcctgagcctcagtctcagctcgccgcttattgctcctcgtactcaccatgtcgccatgctgttccacgctcctccagagaaaagattcctggagatgccgctgctccctgctgcgaagcggagcgaggtcgtcgcggcagaagaggagcgcgcgggcctgcgcggcggcggcggcagcgacgaggaggacggtggctgcggcatcgacggctcacgcaagaagctccggctttccaaggaccagtccgccgtgctcgaggacagcttccgggagcaccccaccctcaaccccaggcagaaggcaactttggcgcagcagctcgggcttcggcctcggcaggtcgaggtgtggtttcagaacagacgcgcaaggacgaagctgaagcagacggaggtggactgcgagttcctgaagcgctgctgcgagacgctcacggaggagaaccggaggctgcagaaggaggtgcaggagctgcgagcgctcaagctcgtctcgccgcacctctacatgaacatgtccccgcccaccacgctcaccatgtgcccctcctgcgagcgcgtctccaacaccaataacaactccagcgccgccgccgccgccgaccgccgcggcatcaggactactactgccgcaggcggcggcagcgtcgtcgacaccgccgccgacgggggcatcctctgccaccgcccgatcgccgtccggccgcagcagtcatga

SEQ ID NO: 21872 - DNA, 993 bp, Oryza sativa
  Clone ID: PAT_MRT4530_27101C.1
atggcagtgtcggatcatcattgcggcggcggcggccggagctggcggttcgcggtggcgtgcggcgtgctcagccggtgcgtcaaggccgaggcggcggcggcggccaacggtcgccaccgccaccaccccacgatgctcctcatgccgggagccgacgtcgagccggacgtgagggaggaggcggcggcggcggcgcagctgaagatcatgtacggcgggcggatgctggtgttcgacgacttcttccccgcggggggcgcggtcgtcgagctggtgcgcgccgcggcgcgcgccgggcaggacgtacgacgcgcgggcgcggcacggcggcgagtcggcgacagccgtgggctcgacgctggcctgccggtggtgaggaaggtgtcgctacagcgattcgtggagaagaggcgtcgcatgcgggtataccatattttgtacactgacaagagtagtcatcatgtaccggggccgggtagatatcgatcatggcagtgtcggatcatcattgcggcggtggccggagctggcggtttcgtggtggcgtgcggcgtgctcagccggtgcgtcaaggccgaggcggcggcggcggcggcgaacggtcgccgccaccaccaccaccaccacaccacgatgctcctcatgccgggagccgacgtcgagccggacgtgagggaggaggcggctgcggcggcgcagctgaagatcatgtacggcgggcggatgctggtgttcgacgacttcttccccgcggggggcgcggtcgtcgagctggtgcgcgccgcggcgcgcgctgggcgggacgacgacggcgcgcgggcgcgacgccggcctgccggtggtgaggaaggtgtcgctgcagcggtccgtggagaagagaagtcgcaggcggctcggggcgacggcgccgtacatactcgccattcgccgccaatgctgccggcaaggacgccgggatcaggccgcactgacgacgccgcgttctactga

SEQ ID NO: 21873 - DNA, 426 bp, Oryza sativa
  Clone ID: PAT_MRT4530_27102C.1
atggagaaggagttagatggggagagtacatgtgctgctccatgcgagaagaagcggctgattccaagctgtttcgagtggggtacggtgccggcgacgaaaaagatgaagacggaggaggatttggaggtgttgctggcctatccatcgcttggcgaagggaagaagaagaagaaggtggtggtgaagaggctggggaaggaggaggtggagaggctgcttctaaatcgtgtggtccctgattggaatcatccgatacctgatgagtatcaccgtttggacagaaatatgtatcagaactctgctgtcaccatacgccagaggcaggatgtcatccgcgcccagttcgaggccaagggctacgtccacgtcctggccgaggccgacgacgactctgacaccgaccaggagatgcatccgctgtaa

SEQ ID NO: 21874 - DNA, 135 bp, Oryza sativa
  Clone ID: PAT_MRT4530_27103C.1
ttccttatcagtgtgagggagcttgtcacagcgcgcgctcaacacgaatacagggcagcgaaatcggacatttcatttcccgcattagagtgggatcttcagcaacggaggaatcatagcccacatgctactctt

SEQ ID NO: 21875 - DNA, 519 bp, Oryza sativa
  Clone ID: PAT_MRT4530_27104C.1
ccggaaagtagattttgtacattaaatctacttttctgaactagttactattttgctttcaacatacggttaaatttgtataaaaaagcatggagaacatacaagttctcagatttctgaattctgaacatgcacagaactgaacatgctccgtgctaactaataaaagatcatctttaactaaatttgacaactaaatttggtaagtgctaccgtcatgtaatgaattggatgctatgaaggggtttagtcctgttgcactgtgcactctttaagaaaaaggaatcggatcctctggcttcggccttccctaacgttactctgcagtcaccctgatctgccatccagcagcaatccaacgactcgctcccagatgccttgcgtggtactcctgcctccttgctcggcgctggctcggcttgctcacggtttttttgacagaagtcgctcacggctcctgggtgacggctcgcttccccttcccctgtcctcttctcctgcttactgcttgctgcgtcc

SEQ ID NO: 21876 - DNA, 281 bp, Oryza sativa
  Clone ID: PAT_MRT4530_27105C.1
gcaagtcaccacacacattttttgtgtgccggcgcacaatacacagatgcaggcggcagaaagcgtgtggacttcgcctatcgacctctcaggaaacgacgcgtgcgggcgggcaggacgtggagcgcgcgccggagccagggccgagcggtgcaagcacgcgcggcaaacgcgccataggcggacgcctgacttgccggccccaggccgggcccagaggaccgaacatgtgccaccgcagcgccggggatggcacctcatcacccaaaaaattgcgaacc

SEQ ID NO: 21877 - DNA, 969 bp, Oryza sativa
  Clone ID: PAT_MRT4530_27106C.1
atggggtgcaccacctccaggcaagcccggcacgacctccgccattgcccgtcgccgctcgcgctgccccggtgccagtcgttccccgcccggtgcgccggtgacgccggcgtccatgtcgtgcggctcacgtcgaccacgcttggctccctcgaggtcgacaagggcgcgccgcgggcggcggaggcgccgccgatgaggaggatggtgccgcgcacgccgaccatgacgccgccgaacgagcccgaggccatcgacgcgtgggcgctcatggccggcctcgaggagcactcgccgctcctggtcccgccgttcgcgcgccactccttctcgttcccgatcacggcggtgcccccggagctcgccgctgcgtcgcgcaaggtcacgccgctgccgctggtggagaagaagaaggcgtcgccggtggcgcgtccgcgcaaggccgtgctctacttcacgtcgctccgcggcgtgcgcgcgacgcacgaggactgctgcctggcgcgcgccatcctcgggggctacggcgtgcgcgtcgacgagcgcgacgtgtcgatgcaccggggattccgcgacgagctccacggcctgctcggcctcggccgtggcgccgccctcgccaagtgctgggcgccggcggcggcgcccgccctgccgagcctgttcgtggacggcgagctcgtgggcaacgccgacgagctgaagcggctgcacgaggccggggagctcgcggcgaggctcgccgggtgcgagagcgcggcgcccggcgaggccgccggcgcgtgcgaggcctgcgccgacgtccggttcgtgctctgcggcgcgtgctcgggcagctgcaaggtgtacgtagacgacggcgacgacgacgacgagaacccattggacggcggcggcggcgggggattccggcgatgcacggagtgcaacgagaacggcatcgtgaggtgccccgtctgctgctgctga

SEQ ID NO: 21878 - DNA, 439 bp, Oryza sativa
  Clone ID: PAT_MRT4530_27107C.1
tttggtatatttttattttttgggtttgatctcattgtttgtttttcttttctctttttcaattgcaaggtttgtcgcaaatgcttgtgaaatccagtgatcaagggtgccatgcatgcaacataaaaagcccaagatgaggattgaaacattgaagcactggaccaaaccagatccagtgaaaggcattagttgcctccttgatcggctcaagcggagcggacacattatgctgcgacaggcctgtacaaaaccgacctattgacgccttttttctcacatactgcccctagccttacagagaaggactacccacatgatgcctgacaaaacatgctgagctaaataacggtcccggaacccgtgtaagagcattttctctgcagccagcaggggatgaacagacaggaccaggcggaagcaagggcggctaacccat

SEQ ID NO: 21879 - DNA, 792 bp, Oryza sativa
  Clone ID: PAT_MRT4530_27108C.1
ttaagtcagagggtaataagttagaggatcctggttcctacggacgcaacatatcccatctgtttttccatcgccaattaaccatgtggtactcgtatcgatacaagtccattctgaaaactgtggcatgggactcaacaaatcaaagctcagtagaaaccggtaccctcccaagaatagactttgtagcaaacattcaactgtagtatgcatgattgaacaagtcagtccacctgctaactcaagaggattcttctcatcacatcgcatcaaagagcgaaaagtccttattaggattagtgctgaaagcagcactagtgaggtcaagttggggtcaaatgtatgaattgtcagcgccttagcgtcgtctttttctggaagagtgagtatccaacaagagcagacagtaatatagtccataaaactatctgtagaagaaacttctcttgtaggtgaagataaatctgaattgaagctacctccttgtgactggataaactcaacaagttcttgtagcctagcagcttgttggttatgaataccagtatgaacattttcatccgctggcaaactctccagaataatttgaagatagctctttgtcgtgtatgaatcatctaagctgagtgcagatgcagcagaggaaactatttccttgttcgttcctttaatctgaagatacggatttgtctcaccttgtagactatcaacctctataagaatcggaggaggggacactacccacagttcaaggaaatgcaccagcgaagacacccaatgagtgctttccat

SEQ ID NO: 21880 - DNA, 138 bp, Oryza sativa
  Clone ID: PAT_MRT4530_27109C.1
atggagcgcgagcaggagttggccgtgcgcgaggtggttgcggcgctccgtctccaaaccctagccgagggcttcgtcggcgcaagcagcgaagctggtgaagcaagcagcggcggcaaaggagcgagcagggcctga

SEQ ID NO: 21881 - DNA, 494 bp, Oryza sativa
  Clone ID: PAT_MRT4530_2710C.1
gcgcggagtttcacctaaggctagttcattttgatgtcatttttaaccttaccaagtgtaaagttatcaaaaaagtagctacatttagtttgctgccaaattttgataactatataagaaatcctgccatgccaaaattttggcattgctaaaatttgataaagttttttttttgcatcaaagtgaacaacagacccctagttataacagatcgaataattcaaggaagtaaaaacaaacttcttatcacttcagaaaagttacagagagccgcagtcatagtctgcatgcctgcgtgacctggtgcctagaagagccatgacgaccgcgcacacaagccttaccacggccgacttcgttcttagcaaagtcccaacggtgaaggactccagcgacagccttatcaccctcgccctcctctccctcacgtacctccctatcgccgcgcccatctcgccgtcgacctgcggctgatcgtgccggcgaccacggtc

SEQ ID NO: 21882 - DNA, 345 bp, Oryza sativa
  Clone ID: PAT_MRT4530_27110C.1
atggcgccatggcaagcctcaccgcctgtgggtcccgtcatagagggggcgcagccgccgccgcctctggatgacgacttcgaccaccctgatgaggaggaaagggagcggttcgttgggtgcgggtgctggtccacgagggcgtggttgctggagtccggcgctgagcacgacattgtcgtcgcactggacgtcaagagggtgcggttgttcgtcggtcaggagccctgcaacatggcggaggaagagatcctcatttggtttgtgccgctgctcgcgccgccaacaccaccatcatccgcggctgcgccgccgtgttcacgttacagaggcgcctccggatga

SEQ ID NO: 21883 - DNA, 1518 bp, Oryza sativa
  Clone ID: PAT_MRT4530_27111C.1
atgggcacggaagcagtgcacgccgctgtcgccgccggcgccggccaccgtcgtcgccgcgtcctgctcctcccgctgccgctccagggccacatcaaccccatgttccacctcgccagcgtcctccacgcgcggggcttcgcggtcaccgtcttccacctccaaccggccggcgtcaacgcgcccgacgcgtccctccacccggcgttcgacttcgtccccgtccccgccgacggcgacggcgacggcgccggcggcgactacctggaggccaccctggcgggcatcctcgacgtgaaccgccggtgcgaggcgccgttcagggagcgactcgcggcgctgctcgaggaggctgctcctgccggcggcggcgacgtcgcgtgcctcgtcgccgacgcgcacctcctgacgctgatggacgtcgcgcggcggctcgtcgtgccgacgctggcgctgcgcaccggcagcgccgcctccttccgcgtcttcgccgcgcatcgtatgctccgcgacatgggctacctccccgctcgagagtcggagctggacgcgccggtgacggtgctgccgccggcgccgtaccgcgtccgggacgtgatgctgaccgccggcttcggtggccacgcgcaggaccagatctacgagctggtatcccgggccgtcgaggcggtgaggacgtcgtcggggctaatcctcaacaccttcgacgcgctcgagcacgacgagctcgccgcgctgcggcgagacctcgacgtcccggtgttcgacgtcggcccgctccacaagctctcgccgacggcgccgccgagcagcctgctgcgccaggaccgcggctgcctcgagtggctagactcccaggcgccggcgtctgtgctctacgtcagcttcggcagcatcgccagcgtgagcgccggcgagctcgtcgaggcggcgtggggcatcgccaacagcggacacccgttcctctgggtgctccgcccgggcctcgtccgcggcgccgccgccgccgccgccctccccgacggcttcgacgccgcgacgcgcggccgcggcgcggtggtcagctgggcgccgcaggaggaggtcctggcgcacccggcgaccgccgcgttctggacgcactgcggctggaactcgacgctggagagcgtctgcgccggcgtgccgatgctgctccggccatgcttcggcgaccagccgggcaacgcgaggtacgcggagcgcgtgtggcgagccggcctcgcgctcgacggcggcggcggcgagatggagaggggcaaggtggaagccgccatcaggaggctcatggaagaggacgacgccgccggaatgcggcggagagccggcgagctgaagagcagagcggcggagtgcatcaccaaggctggctcttcttgcctcatcattgacaagctgggagctgctcgatcccgagctgatgcatcgacctggttttttttggctcctgtgcgcatcaaagatgccggttatggaaccggcacctttgaccatggctaa

SEQ ID NO: 21884 - DNA, 157 bp, Oryza sativa
  Clone ID: PAT_MRT4530_27112C.1
ttaataaaaaaaaaaaaaaaaaaaaaaaaaaaaaaggggcggtcggtaataagaggatcaagtctaacatacacgagcatgcaacgtcatagattttgggtagagtcaccaaaggtcaattcactgccccccgttttacaacatcttgactgggaaa

SEQ ID NO: 21885 - DNA, 2597 bp, Oryza sativa
  Clone ID: PAT_MRT4530_27113C.1
gcgcgacgctgaaggctgcagctcttactcgtggccatttgctaggtaatttaactggtggattgtcgtccctcgggagctggccatcgctgggtccttccttgcgtgctctgccccgtgccctgcctcttgggtgcgcagcgcgggcgagcctgggggtgggggcagtcgatgtacatgggaagagcggatgcgccatggctgccgcttctgctcctgtgctcctcctgctgcttctgcatttggccccagaagcaaatcttggtcgctgcagacaccgaccctaatgatgttactgtcctcaatacgctcttcactagcctgaattctccggggcagctcaaaggttggcaggcaagtggtggagacccttgtggccaatcatggcagggtatcacgtgctcaggatcatcagttactgcaatcaaattaccaagcttggggctctccggtaatttggcgtacaatatgaataccatgggttcattgattgagatcgatatgagccaaaacaaccttggtggtggccaacagatacagtacaatcttcccactaataagcttgagaggctcaatctcgcaggaaaccagttcactggaaatttaccctactcgattttctcgatgtctaatcttaagtatttaaatctaaatcataaccaattgcaaggaaatataactgatgtattttccagcctctatagcttgacaacactggatctttcctttaattctcttgctggtgacctaccacaagggttcacatcattgtcaagcctgaagaaattatatctgcagaacaatcaatttactggttatatcaatgtccttgctaatctcccccttgatgatctgaatgttgcaaacaatcatttcactggctggattcctagtcaacttaagaagataaacaatctacaaactgacggaaattcttggagtaatggaccagcaccaccacctccaccgtattcagctccacctccaccaaaccgtccaaacagcccaggtcaaaacaatggtggttcaagttctggtggaagctctgggataggtggtggaggtgtagcaggcattatcatatcattgctggtagttggagcagtcgttgcattctttgtgataagaagaagaaaacgcagagcggcattggaagaacattttgaacagcaccagccattcacttcgttcccttcaaacgaagttaaagacatgaagcctattgaagagtctactacaatagatgtagagtctttgccatcccctgcttcatttagtctgaagccaccccccaagattgaacgccacaagtctttcgatgatgatgatttatcaaacaagcctgtcttgaagaaaaccaatgtggcacctataaaggcaactgtttattcagttgcagatctacagatggcaacagaaagctttagcatggacaaccttgttggggaaggtacttttggacgtgtatacagggcacagtttactggtggaaaggttctggccgtgaagaaacttgatagtaccgtgatgccattccattcatctgatgattttgctgaactggtctcagacatttcaaaactgcatcatccgaatctcaatgagcttgtgggctattgcatggaacatgggcaacacttgcttgtttacgatttccacaggaatgggtcactccatgatctactccatctttcagacgaatacagcaagccacttagctggaactctcgtgtcaagatcgcactaggctctgcccgtgcactggaatatcttcatgaaatttgttctccatccatcatccataagaatttcaagtcatccaaccttctactggattcagaattcaatccacacctttcagatgctggacttgcaagctttatttctgatgcagaattccaggcagcgcaacagagtgctgggtgcactgccccagaggtggacatgactggtcagtacacactgaagagcgatgtctacagctttggagtagtcatgctagagcttttgacgggacgcagacctttcgatagcactagaccgaggtcagagcagtcacttgtgcggtgggcgactccacagctccatgacatcgatgcattggacagaatggtcgatcctgcgctgaagggtctgtaccctgccaagtctctctcccggtttgccgacgtgctcgctttgtgtgtccagcctgaaccagaattcaggccaccaatgtcagaggtggtgcaagcattggttcgtcttgtccagagggccaacatgacgaagagaatgctcgacggagatacttcgtcgcgccgaacagacgaccaagaacaagatttcatatgacaaaaactacacccctagcttttcctgttacatctcaaattgtatttattttgttcgcctatcgcctattggagagaagaatggaaggagaaatagaaaagaaagtcagtttcatcagtacataatcacaggtgttgcttgatatattgtaggaccaggtgtgccattgtatcctgtctacagaacagtattctgaattcctgattgttcattaatgccatcatggtagtagattatttggttaaatcaaaaaaaaaaaaaaa

SEQ ID NO: 21886 - DNA, 413 bp, Oryza sativa
  unsure (1)..(413): unsure at all n locations
  Clone ID: PAT_MRT4530_27114C.1
gaaccctaggtggcggcggtggtatcccgttcgcggtggcggcggcacatccatagctgccgacggaattccccgttcgcggctgcggcggcacatccgtagctaccgacggcggcatcccgttcgcggcggcggcggcgcatccgtagctgccgacggggcanacccgttcgcggcggcggcggcgcantccttggttctctgggaagagctatcggtttgcctttctccccttcgcggcggcgcctcatccattcctctcgacaccgcctttttccccttgtccaaatcgtcgcgggacttcgatgcatgcgtgcgtgcgtgttcggccatggatgagtgaagcttacaatttcgggaaagtacaagaagatgtttgagatggatatgaagtacaagacacaatttgttct

SEQ ID NO: 21887 - DNA, 1325 bp, Oryza sativa
  Clone ID: PAT_MRT4530_27115C.1
ttactgtcctcaatacgctcttcactatcctgaattctccggggcagctcaaaggttggcaggcaagtggtgaagcccttgtggccaatcatggcagggtatcacgtgctcaggatcatcagttactgcaatgtgagcctcatcatgaagcaaacaaattaccaagcttggggctctccggtaatttggcgtacaatatgaataccatgggttcattgattgagatcgatatgagccaaaacaaccttggtggtggccaacagatacagtacaatcttcccactaataagcttgagaggctcaatctcgcaggaaaccagttcactggaaatttaccctactcgattttctcgatgtctaatcttaagtatttgtgtctaaatcataaccaattgcaaggaaatataactgatgtattttccagcctctatagcttgacaacactggatctttcctttaattctcttgctggtgacctaccacaagggttcacatcattgtcaagcctgaagaaattatatctgcagaacaatcaatttactggttatatcaatgtccttgctaatctcccccttgatgatcttaccacatctcatatctttgctttcctatataggaatgttgcaaaaaatcatttcactggctggattcctagtcaacttaagaagataaacaatctacaaactgacggaaattcttggagtaatggaccagcaccaccacctccaccgtattcagctccacctccaccaaaccgtccaaacagcccaggtcaaaacaatggtggttcaagttctggtggaagctctgggataggtggtggaggtgtagcaggcattatcatatcattgctggtagttggagcagtcgttgcattctttgtgataagaagaagaaaacgcagagcggcattggaagaacattttgaccagcaccagccattcacttcgttcccttcaaacgaagttaaagacatgaagcctattgaagagtctactacaatagatgtagagtctttgccatcccctgcttcatttagtctgaagccaccccccaagattgaacgccacaagtctttcgatgatgatgatttatcaaacaagcctgtcttgaagaaaaccaatgtggcacctataaaggcaactgtttattcagttgcagatctacagatggcaacagaaagctttagcatggacaaccttgttggggaaggtacttttggacgtgtatacagggcacagtttactggtggaaaggttctggccgtgaagaaacttgatagtaccgggatgccattccattcatctgatgattttgctgaactg

SEQ ID NO: 21888 - DNA, 612 bp, Oryza sativa
  Clone ID: PAT_MRT4530_27116C.1
gcacgaggctgggacgccgtcgacgatggggatgccgtggatgacggggacgacgccgcggactgggacaccaacgatgacggggacgacgctacggactgggacaccgacgatgacggggacgacgctactacggattgggacaccgacgatgacggggacggcgccgaccggtacatcaacaatggcgccatcaggtttggcctccctctgcactgcaacgggctcgtgttgctgagcacgatggagaactcctctatgatgttagtttgcaacccggcaacgagggagttcgccgagctaccggcctgtacgccggactacttgaggatccaaagagtaggcttctacgccgaccagcctacaggcaagacgaaggtggttcgctacttcatccgccactgcaacgaaacctacacggactacagcgtcggatgcgaggttttgtccctcggctcgccggcgtggaggccgctcgccgaccctccctacctcgtcctgaacaaaacgtcaccgtgcatcctcggtggcatctactggatcgccatcctaccgtcgccgcccaccggcagctgcagcacccccggaaaaatgctacgcttcgacgtgtgc

SEQ ID NO: 21889 - DNA, 570 bp, Oryza sativa
  Clone ID: PAT_MRT4530_27117C.1
atgaagaaggcatcgaccggatggacttgccaactagaaggttggccatccaagctgaagggatacaagacgtggtaccgcaggatgatagcggccaagcaatcttattggaaggaagtagggatagcccaatgtttagctttatctctggcgggccttaagaaggatgaacctttgctttctgccgcaagctacttctggtcgtatactcttaacacgttcctcttccggtcttttggggaagccgtctcagtttatctgctgggtgccaaatcgtttgctgaggattttatgatatggtttggccggttctacaatagctccaacctttgtgccaacaccttctttgtttacggggccaacaccaagtttgaactcccgtatgacctcaatttaggacaggaggatgatctggcatcaagggacaattatttggccatcatagccccctggtttcttcctacaggaatctctagggggaagaaaagcttctccaatgaattttatcagcttgcatcggcccgacgggtacccggaatgcaattggccgagagctttggaagcacttaa

SEQ ID NO: 21890 - DNA, 1225 bp, Oryza sativa
  Clone ID: PAT_MRT4530_27118C.1
ttttttttttttttttataataccaatttcagtactttattcgtcaccatttcagtattcaaacaatgtggtggcctattgcctatgttcatacaatgatgtgtagcaaatacgtaagaactaaaaagtaatttacatgtaattgaccgcactgttttctcgactttattatgtacttttcaagaatctgaaatctagcgaataccattaattctttgaaggacggagattacatggagaagaaacagcgaatgtgattatggacgcgacattgaggtatatacttttcttcatgacttcatttcaatggatttttcttgctccccatccgccatgtacatcggaagagaagaagaatgctaatttcaagatcaaaacactgagatcgatcaataggctcggttgttgaatgagtccgacttttgcagcctaaattgctcgtagaatttcgcgatgaactcctcggcctgcatgtcgatcggattcgggctgcatccaccgtcctccgtctccagagaattcttttcttcttcctcgtcttcttttccatggccattgacaagctcctgcaggtcctgggcggacgagtagctgctggtcatgctcgtgccatcgctcctgtccggcgacggcggcgggtagtactccaggtggccgtggaggcggagcgggcgcatgccgtcgacgaggttcttccacgacgcgacgtcgctggacgacctctccacgtcagccgccgcgccgccgccggccgcctcggccttcttctgatagcccatggtggcggcggcggcggcggccctcttcttgatgctggcgctgccgttgaaggacatgaacatcgcccggaagaggccgaacgcgccccgcttcttgtcttgctgccggcttccgttggaggaggcgctcctggcgatggcgatgccgtccgtctcctcctccttcatcgtcctgtcgtcgccgtcggttctgtccatggaagcagcggtgatcatcacaacatgatttgtctctgcagctccattgatgtgctccttctcctccgtgctcacactagggatgatgatcacattgtcgccattggtgatactgtctaccttggggttggaggtgatagatagaacttgttctacctccatgggaggaggtagaacaaggtaggggagggctcgaggccttcgagggctaaggttctcccggacggctgggtcgacccgggggtccg

SEQ ID NO: 21891 - DNA, 408 bp, Oryza sativa
  Clone ID: PAT_MRT4530_27119C.1
atgccttcgggccagcccagcacggcccaaggccgtgcctgggccgttagtgcggcacgtgggctggcacggcatggcccgactaccctcggcccaggagttgttgacgcgacacgtccggagccggccgccgccggcggcggcaagtcccacaacccccaccacatcgccgccaccctgtcagactcagagctcaactccgacgagaaatccggacagatcgccctgataatatcgaagagggaacggacgggggagtacggcgaccgccctgacgacgatgctgctgctcctggtcgctgctgcgtttgccaactccgcgtcggcggcgcggccgttgcccggcagtggccaccacgaggctgccaccaccgctgctgcatgcaccggccgccgggaagccgctga

SEQ ID NO: 21892 - DNA, 2802 bp, Oryza sativa
  Clone ID: PAT_MRT4530_2711C.1
atgcaaggcacaacgacgaccaaggttgggcgcaatggcgaccacgccgacgccggcgtggaaggccccggcacgacgagagcgacagatgggaggggcggcgccaccgtggcagcccgcaaagtcggggacatgcgccgcatgtcatgcgtggaggccaaggactccctgaccatcgtcgcgctgcagtcgctagtcaccgtcgagcgctccgtccgcggcgacctcgaggagcacatccccaagccatcgtaccccaataccctctatatccggtttacgggtatcccccgtcgactgtggcgcgccagcgtcaaccccggcacaagccaaggagtttctacttcaacaatgctggtgtggactcaagtcggcgaaatcgtcttcccggtttacaccacggtgtcgatctcgactggtccatcaatgaccggaagcgagaatgccgtggttacaaccctgggcgactccatgtcgaaggatcctcccgcagaagtggagaacggaacatcgacgacatccgagcctgagaaggatccttgtgcggccaaatcttgtccttccgacgagaatcacgagccggcaaggacaacttccgaggcgacaagatgcgcggacaaggaagaaggggtgacagttatctcagaccgattcgttggggtaatcgacatcgatccccatgagcccacgtctacacgcgctaacgcagaagcggagaatcaagtggctacaccggcccagcacatcgaggccatcaacgcaataccgagggaaaccccttatgatcccgttctgaacgatgatctcgcacggtggacagaacgactacgggagtcagtggctaatctcagtaacgcgttcgaggaggccgctgccggagcacagccagaacaaccgccagctggcgttgccaatggcgaaccacctgagcagcggacatcacctcgacaagccactcctccacctcacggcaccagtgatctccgtgaccatttgaatggccgccgagaagcacgacatgcgcgagacaacaaaaatcgttcccgacatcgcgtctcttcacgacgtcgagaaaacgaagagcgaggagggcacccgagcgagaaccgagaccgtgataaccgccacagccgtcacgaacgcgatgatcgcgaacaacggatgccaggcgatactggccaacgggaagtggaggatatcagcatggcgaaagaggacgaggagaagacagtattcatcacgccgttcggtgtattctgttatgttaagatgccatttggactgataaccgcaggaaacactttccaacgcacggtccaaggggcacttaacgatcagcttgggaacaatatcgaggcctacgccgatgacattgttgtcaagaccaagacaagcgactcattgatggaccatctccgggaaacgttcgacaacctccgacgatatcgcctcatgctcaatccagagaagtgcacgttcggagtaccatcgggcaagttgctcgggttccttgtctttggacgagggatcgaagcaaatcccgagaaaatcaaggcaatcgagaacatgaagtcgcccacaagactcaaggaagtccagaagctaactggatgcatggcggcactgagcagtaatcatgacatcaagatgttgcgccactactttcaagcccacagagtcacagttgtttcctccttcccacttggtgaagtcgtgagaaacaaggacgttgtcggccgcattccgaaatgggtagtcgagctaagccagtttgatgtccactttgtgccacgaacagccatcaagtcccaagtccccgctgatttcgtagctgactggactatgcccgaaaacaggtcggacagtcaaaccgacagcgaaacatggacaatggcgttcgacggcgcactcaacagtgaaggagcaggggcagggttcatcttgacatcaccttcgggagatcagttcaagcatgcaattcacctcaacttcagggcgaccaacaacacagccgaatgcgaaggactactcgctaggataagagcagcagcctcacttggagtcaagcgactgatcgtgaaagaggattccgaactagtcgcaaaccaggtgcacaaagactacaagtgctctagccccgagttatctaagtacctcgcagaagtcaggaagctggaaaaaaggtttgatggaatcgaggtccggcacacataccgcaaggacaacatcgaaccagacgacctgacacggcgtgcgtctaaacgagagccactcgaacccggcaccttcctggacgtcctgacaaagccatcggtgaaagaggcaaacgatgaagatagcgtggtagtccccgacattagctcgggggctacagatgcagaacgcgccgttgccgacatagaaaccacagacgactggcggatcccactcattaaattcctaggtagcgataagttgcccgaggacgatacagaggccgagaaaataacccgtcaagccaaaatctactatatgatcggcaatgatctatacaagaaggcgccaaacgggggcggccacaaattcctattcgtggcgttcgacaaattcaccaagtggattgaagctacacccacgggggaaatcaaggccgacaacgccatcaaattcattaaagggatattctgcagatatggattgcctcactgcatcataacggacaacggctcccagttcattagtgccgacttcaaagattattgcattgggctgggagtcaagatctgcttcgcttcggtttctcaccctcagagcaatggatag

SEQ ID NO: 21893 - DNA, 1353 bp, Oryza sativa
  Clone ID: PAT_MRT4530_27120C.1
atggactggtcaggcctccccggcgacctcctccgcctcttctccggccgcctccacgacccactcgacttcctccgcttccgcgccgtctgccgcgcgtggcgcgccgccaccgccgccgcagcggcctcccctcctcccttcctcccatggctccttgcccgccccgcccccatcaaccccaccgccggccccggcccctccctctccttctactccctctcctccgccgccctccgctccgtcgccgccccctccgccacctgctccctcctcggccacacaaactcccacctcctcttctccgaccacggccccctcctcctcctcgtcaaccccctcaccggcgccgacctccccctcccgccttcccccttcgacgccttctcccccatcacccagggctactacctccccggtcccgactcgccggtggtgctctacgacaccaggaggatcttcttccaccaccccgccggcggcggcggcgggtggacgacggtgccggtggtggacctcgtcgccgagaacatgtaccacgccgggaaggtgttcgtctgcaacgaccgcggccacctcaccatcttcgacgccgccacgcttgccgtgctcggtgacgctgcgccgccgccaccaccgccggtgaccctgcacagggatgccttcaagtgctcatccttcgtcccgtccggcgatgatctcctgtgcgtgattcggtacttcaggcgcaagaacacagaacaagcaggagaattgctggaggattgccgtgcattggaggttcaccggctagagattgcgggggagaaatcgcggtgggttcagatgaggagcattggagacagaatgctgttcgttggtctctaccagggattctcgctccgcgccgcggatttcgcggggcttgaggggaattgtgtttacttcttcaagatggacagagccagcaggtctttcatctaccggttcagcatggaggatggtcaaatcgaagagttgcctggcccctcaatgcatgcttgcacttggagcaagaacagtgaacaagcaggagaattgctggaggattgctgtgcattggaggttcaccggctagagattgcgggggagaaatcgcggtgggttcagatgaggagcattagagacagaatgctgttcgttggtctctaccagggattctcgctccgcgccgcggatttcgcggggcttgaggggaattgtgtttacttcttcaagatggacagagccagcaggtctttcatctaccggttcaggatggaggatggccaaatcgaagagttgcctggcccctcgatgcatgcttgcacttggtttgtgccaagtttgtcatag

SEQ ID NO: 21894 - DNA, 197 bp, Oryza sativa
  Clone ID: PAT_MRT4530_27121C.1
atcttgattaacactagtattagtagaatgaggcaatgggagcatacacccgcaatatatttgccctgtttgccttaattgatgttactgcaagtgccgctactgcaatcaccactatgcaggatttcccaccaacattagccatggtgaccatgggtccgtgtaagcagaacatgatgggagggtgggaatgggta

SEQ ID NO: 21895 - DNA, 587 bp, Oryza sativa
  Clone ID: PAT_MRT4530_27122C.1
aattcggcattccctgggtattgaaatttccaaattcgcatgcccctaaccacagacacatattcacatcccccctccccaacacacacattgacaaagacacaattccaaaaaatcattcattacaaagataaattaaaattaatttagtactttcctattatttttttaaaagggaaatctgagccatagtagcccttagcaatattgagtagcccaacctatttttgccacgttatagaagcaaggcagcaggacatcattgttttaacaaatacaagaataaataacccaaaatttttaacttgtaaacaaaggtacaattcattctactttatgccatcattctaacatgaaattagcaatcacttactggttgggcagaccataacttgctcatgataagattgtactccctccattccctgttgatcagcgccttttctataaacaagcgaaccatgttttcaatgtcctgaacaatactatcaggctgaccctcaacagcaactttagtaagcccaggaagattgataagagtcaggttcacaactgttgttgactaagctgatagaggcgacagcaag

SEQ ID NO: 21896 - DNA, 449 bp, Oryza sativa
  Clone ID: PAT_MRT4530_27123C.1
tttcaaactgttggacccccgtacccaacgcgaagctgcagtgatggctcaagagagtcttggtctgaagtggacgatggcacgtgacctatggcatgatggcacctgatgacatatccagtgttgaccgctgttcatgagcgagaacaaattggcagagcactgaatactacataatggttcatgttccagggttgaagaaagccttgatatcgttgacctggagaggatgctggtgggtagcagagctcgagctctttcataacacctgcaagacgttagactatcacatctgataggctgtgcacacagaacgtcatatggctgactgagatgatcaccagcctaggagctatgagagattatcacccaagaccgatggatgatagcatgtacagcgagagcattgaccatgatcactagtacgtggaccatgcttagactgcata

SEQ ID NO: 21897 - DNA, 2806 bp, Oryza sativa
  Clone ID: PAT_MRT4530_27124C.1
atgagccggcggcaggggcttggtggcggcatcggcgagcgggtgccggagtggtggctgcggtgggcggtggacctcgggcgacaagcgcgggagcagctcctccttgaaatgggcggtggacctcgggcgacgtgcgacgaaatgcgtcgggggagatgggagcacgctcccagccgccgctcctcgtccccactctgtgtcgtgggcagtgaggtgggcggcggccgcggcgtcgacggcaagactggcctcgagcgctccggcgtcgacctggccatgatgcggagcagcgactggaactcctcctcctcctccgacacgggccccctccccgaccacgagcaggaggctcggtggccactgggcaccaccatccccatctcccgtggcactagcaccgctccagtcccggacccgctgaagccaaatccttgctactgcggcggcggcagcggaggcgacgcgaagaccgtcggctgctgctggatggcaaagtgcagccctagccccgccgccatcatcccccgcggcaagcgcaccaccgatgccacgaacgcctcggcctccacgacgatggacagcgacccctcctcctcctccggcgagtaggaggaatccttatcttccatcatctataactacaagcatggattctcaggatttgctgcaatgctaacagaagagcaagcagaacaacttgcagagttaccagaagtaatcagtgtgcagcgaagcaggaggtacaagacaacgaccacacggagctgggatttcctggggctgaactaccaaaaccccagtgaattactccgaaggagcaactacggagaagacataatcatcggggttgttgacaccgggatatggccggagtcgagaagcttccgcgacgaagggtacgggccggtgccggcacggtggaagggcgtgtgtcaggtcggagaaggatggggcagcaacaactgcagccgcaagatcatcggcgcgcggttctaccacgccggggtggacgaggacgacctcaagatcgactacctctcgccccgtgacgtgaacggccacggcacgcacacggcgtccaccgcggcgggctccgtcgtggaggcggtcagcttccacgggctggccgcgggcaccgcccgcggcggcgcgccccgggcgcgcatcgcggtgtacaagtccgtctggggcaggggcggcgccgggtcagggaactccgccaccgtgcttgccgccatcgatgacgcgatccacgacggcgtggacgtgctgtcgctgtccctgggtaccctggagaactcgttcggcgcgctgcacgccgtccagaaggggatcaccgttgtgtacgcagccacgaactttgggcctgcgccgcaggtagtcaggaacactgctccctgggtcatcaccgtcgcggcaagcaagattgatcggtctttcccgaccgtgatcactctgggggacaagcgccagattgtgggacagtccatgtacaacgaagggaagaactcatcaggaagcaccttcaaacttctagtagatggaggcctatgcaccaagaatgatctgaacggcacggatgtaaagggaagagttgtgctgtgcatctccctcgggataccaccacttatgctttttccggtagcattgaaaaacgtcttggatgctgggggttcaggtctaatctttgctcaatacacgactgacatcctgggcatcacaaaaaactgcaacggcactgcctgtgttctcgtggaccttgaaagtgcaaatctgatcggctcgtacatcagcgaagcaagctcaccaatggcaaagatcgaaccggcacgcactatcacaggagaaggagtattggcgccaaaagtagcagcattctcctcgagaggtccatcggttgattaccctgatattatcaagcctgacgtagctgcaccaggatccaacattttagcagccatgaaagacggatacaaacttgagtcaggaacatcaatggcaacgccacatgtagcaggtgttgtcgcgctgctgaaagccctccatccagactggtccccagcggcaataaaatcggccattgtcaccacggaaggagtgcctcggaagattgctgatccatttgactatggaggtggaaacattaacccaaacagggcagctgatccaggcctcatttatgacatcgatccaagcgattataacaagttttttgggtgcatcatcaagacatctgtcagctgtaatgcaacaacgctacctgggtatcacctgaatctaccatcaatcgctcttcctgatctcaggaatccaaccacagtatctagaacagtgacaaatgtaggcgaggttaatgcagtttaccacgctgaaatccagagcccgcctggagttaaaatggttgttgagccatctgttcttgtctttgatgctgcaaacaaagttcataccttcaagtccggattaccattcaagatttctatgcagatgttgcataacctgggtcaaccatttccgcaataatatagtgggcaatagagcaaaatacaggatataccaatttccacaccgggagatatggttgcttgtaaatacttatcaccagaataatgagttaatgaccggccaatgttgactggtcaatgtatttcatttctatcacgtatctgattatcacttcgatggatggtcaatttcataccatgttggttacagaaatacaaaaatgttcaggtctatgtcatgccatgtcttaaaatatcatgtagtttttcctcccacctaacgcggtatgacactgatt

SEQ ID NO: 21898 - DNA, 3910 bp, Oryza sativa
  Clone ID: PAT_MRT4530_27125C.1
aaaaatggaagtccattcttgtcagcaccgtttggtttcattgctgctactttgtttttggatgctgttcatcagagcgcatggatcacgcaagctgtacatagcgtatctcggtgacagaaagcatgcacgcccagacgacgttgttgcttctcaccatgatacgctctcgagtgttcttggaagtaaagacgaatccttatcttccatcatctataactacaagcatgggttctcaggctttgctgccatgctgacagctgagcaggcagaacagcttgcagagttaccagaagtcatcagcgttcagcgaacgaggaggtacaggacggcgaccacacggagctgggacttcctggggctggattaccaaaagcccagtgaattactcagaaggagcaaccacggacaagagataatcatcgggattattgacaccgggatatggccggagtcaagaagtttcagcgacgaaggatacgggccggtgccggcacggtggaagggcgtgtgccaggtcggagaaggatggggcagcaacaactgcagccgcaagatcatcggcgcgcggttctaccacgccggggtggacgaggacgacctcaagatcgactacctctcgccccgcgacgcgaacggccacggcacgcacacggcgtccaccgcggcgggctccgtcgtggaggcggtcagcttccacgggctggccgcgggcaccgcccgcggcggcgcgccccgggcgcgcatcgcggtgtacaagtccgtctggggcaggggcggcgccgggtcagggaactccgccaccgtgctcgccgccatcgacgacgccatgcacgacggcgtggacgtgctatccctgtccctcgaggttcaggagaactcgttcggcgcgctgcacgccgtccagaaggggatcaccgtcgtgtacgccgcagggaactctggacctgtgccgcaggtggttgggaacacggctccatgggtcatcacagtcgcagcaagcaagatcgatcggtctttcccgaccgtgatcactctgggggacaagactcagatagtgggacagtccatgtacagcgaagggaagaactcatcaggaagcaccttcaaacttctagtagatggaggcctatgcaccgataatgatctgaacggcacggacataaagggaagagttgtgctgtgcacctccctcgggataccaccgcttatgcttttcccggtagcattgaaaaacgtcttggatgctgggggttcaggtctaatcttcgctcaatacacaactgacatcctggacgtcacaaaaaactgcaacggcactgcctgtgttcttgtggaccttgacactgcacaactgatcagctcatacatcagcggcacaagctcaccagtggcaaagatcgaaccaccacgcactgtcacgggtgaagggatactggcaccaaaagtggcagcattctcctcgagaggtccatcagttgattaccctgatattattaagcctgatgtagctgcaccaggatccaacattttagcagccgtgaaagacggatacaaacttgagtcaggaacatcaatggcaacgccacatgttgcaggcattgttgcgctgctgaaagctctccatccagactggtctcccgctgcaataaaatcggcagttgttactactgcgtctgtaactgatgaacgaggcatgccaatactggcagaaggagtgcctcggaagatcgctgatccgtttgactacggaagtggaaacattaacccaaacagggcagctgatcctggcctcatttatgacatcgatccaagcgattataacaagttttttgggtgcatcatcaagacatctgtcagctgcaatgcaacaatgctacctaggtatcacctgaatctaccatcaatcgctgttcctgatctcagggatccaacaactgtatctagaacagttacaaatgtaggtgaggttaatgcagtttaccacgctgaaatccagtgcccgcctggagttaaaatggttgttgagccatctgttcttgtctttgatgctgcaaacaaagttcacaccttcaagctttacatagcatatctcggtgatgtaaaacacagccaccccgacgatgtcatcgcttcacaccatgatatgctcaccactgttcttggaagcaaggaagattctttggcctctatcatccacaactacaagcatggtttctcaggcttcgccgtgatgcttactgaagatcaagcaaagcaacttgcagaatttccggaagtccttagtgtggaaccaagcaaaacgtatacgacggcgaccactcggagctgggacatgcttggactgaactacagaatgcccactgaactgctccagcgaaccaactacggcgaggagataatcattggcattgttgacactggtatatggccggagtcgagaagcttcagcgacgaaggttacgggccggtgccggcacggtggaaaggcgtgtgccaggtcggcgaaggatggggcagcaacaactgcagccgcaagatcatcggcgcgcggttctaccacgccggggtggacgaggacgacctcaagatcgactacctctcgccccgcgacgcgaacggccatggcacgcacacggcgtccaccgcggcgggctccgtcgtggaggcggtcagcttccacggcctgggcgagggcgccgcccgcggcggcgcgcccagggctcgcatcgccgtgtacaagtccatgtggggcagcggcagcggcgcggggtccgggagcaccgccaccgtgctggccgccatcgacgacgcgatccacgacggcgtggacgtgctgtcgctctccctggggaccctggagaactccttcggcgcgcagcacgccgtccagaaggggatcaccgtggtttacgccgccatgaaccttgggcctgcgcctcaggtggttcagaacactgccccttgggtcatcaccgtcgcggcgagcaagatcgatcggtccttcccgacggtgatcacgttgggtgacaagcgacagatagtgggacaatctctctactctcaagggaagaactcatcgctcagcggtttcagacgccttgtcgttggagttggaggcagttcacccattgtgaagatcgatccagcacgcaccgtaacggggaatgagataatggcaccaaaagtggcagatttctcttcaagaggcccttcaactgattaccctgaaattatcaagccagacatagctgcaccaggattcaacatcttagcagcagtgaaaggcacatacgcatttgcctcagggacgtcaatggctactccgcatgtagcaggcgttgtcgcgctgctgaaagctctgcatccaagctggtcacctgctgcactaaaatcagccatagtcaccacagcatctgtaactgatgagcgtggcatgcccatactggccgaagggttgcctcggaagattgctgacccatttgactatggaggcgggcacatcaaccctaacagagcagctgatcctggcctgatttacgacattgatccaagcgattacaacaaattctttggatgcactgtaaagccatatgtaaggtgcaatgcgacatcgttgcctgggtattatctgaacctaccgtccatctcagttcccgatcttaggtatccggtcgtcgtatcaagaacggtcacaaatgtagctgaggttgatgctgtttaccacgctgcaatcgagagcccacctggcgtaaagatggatgttgagccacctgttctggtgttcaatgctgcaaacaaagttcatacgttccagcagacatgtataatggacagggcgaaggtagcgaacctggtgggctggtggccaagggaggtcaagggtcagaggcgtttggcgatcctctaa

SEQ ID NO: 21899 - DNA, 3888 bp, Oryza sativa
  unsure (1)..(3888): unsure at all n locations
  Clone ID: PAT_MRT4530_27126C.1
cggaaattcccggngtcgacccacgcgtccgcgctcgccgtctgagccaaaacccactcggctagccaccggcggcggccgatcggacccggggccaagctgcggcgaagcggcgggtcacctccggctgcgtcgtcgctggcggcggccacttggatgggcggtggatcgggggcgagctcgtcgttgtgttgagggcgtctgcgggaggcttgaggggcgtgatgccgggtgtggcggcggagacggcggtggcgtcggcgtcgggatcggggatctggtcgcggcggcgggacgagatcacgttggatcgcctccagaagttctggaatggcttgcctcctcaagcgcgacaggagcttctcaaattggataagcaaaccctcattgagcaagcacgcaagaatttgtattgttcaaggtgcaatggattgcttctggaaagtttcatgcaaatagtcatgtatgggaagacactgcagcgtgatgcctcggatattaatcgtctgaacacaactggagaaacaaggattaggcaaggggaacaagaagacccatcagttcatccttggggaggccttgtagcaacaaaagatggcatccttacgcttcttgactgctttgtaaatgcaaaatcattgcgggtgcttcagaatgtatttgataatgcacgggcaagagaaagggaaagagagatgctttatcctgatgcatgtggtggcagtggcagaggatggattagccaacgcctagctagttatagcagggggtatggaacaagagaaacatgtgctctgcatactgctcgcctttcatgtgatacactggtggatttctggtcagcattgagtgaagaaactagattatctcttctgcggatgaaggaggaggatttcatggaaagacttatgcgtaggtttgagagcaagagattctgtcgagattgccgaaggaatgttatccgtgaattcaaggaactgaaggaactgaaacgcatgcgaagggaacctcgctgcaccagttggttctgtgttgcagacactgatttccagtgtgaggtgtttgaggatgctgtcataattgattggcgccaaactttatcagaggcagatggatcttatcatcattttgaatgggccattgggacagatgaagggcaatctgatgttttcggctttgaagatgttgggatgaatgtacaagtccacagagatggtattaatcttgatcagtttgaagactatttcataactttgagagcttggaagcttgatgggacctacacagagctgtgcgttaaagcacatgccttaaagggccaatcgtgcgtacaccacagactggtggtagggaatggttttgtgacaattacaaagggtgaaagtatcagaagtttctttgagcatgctgaagaggctgaggaagaggatgaagaagatgccatggacagggatggaaatgatcttgatggtgatggcttacatccacagaagcatgccaaaagtcctgaactggcaagagaatttcttttagatgccgcggcagttatatttaaagaacaggtcgagaaggcattcagagaaggtacagctcggcaaaatgcacacagtatttttgtgtctcttgcattagaacttttggaagagcgagtccatgtagcatgcaaagaaattattacgttggaaaagcagaacaagcttcttgaagaagaagagaaagaaaagcaagatgaacaagagcgcaggatgaggaggagaacaaaagagagagagaagaaacacaggagaaaagagaggctgaaagaaaaagagagggataaagggaaagaaatccttgggttgaaatcatcagatgataattcatgttcaactctcagaaactcaacatctactaatgatgaatcaacaaatactcctgactctagagattcagctagtgaagaagaagataattccacagtggtggatctttgctcccctgacacctttgttgatcaaacagcttgcagggagattagtgtgcaaaacaatatggactactgcaatacattgacagaatttgctcgaacaaatagcagtgaccttttcacatctggacaatcaaaatcatcaagatggaatctgaggctgagaaaagatttccctcaagatcagtcctcttgttgctatgatgagtgcggagatgaaaatggaagcattggtgattttcagtggcaatcaaaggaaaggacaagacatagtgcccgaagttgtaactcagtgtttactacaaataacagaacaagggatagacacaactacatttccttcagctgtgaccctcgtgatgactatgtaataaatgacagctgttcttcatcatcaactggatcaggtagggagacaaagatggcaagaaaaacaggagttgagagacctagggtgcagtaccgcaggtgctatcctttggacaactttattgtgtcaaaagaaagccgtactggtaatactcagcagaaaaatggtgctccaaagcaagtatgggagccaatggattctcaaaagaagaatttgttagacaacaaaaacaatgggtcgggagcagtttgtaatgttgatccaaccaaattagtggaacaagatagcagtgaatgcccaaattttgacgcagggcatgagccactaagtcaatcttctgaaagatccagggatatctgtaaatcagaaacagatcaaccatgtgaaaacaatgagaaaaatcaagctacttcttgcggtggtactattatggtggataaacaagactgctactcaacaaaagatgaaggttctgggcatgatgaagagctgatgatgaactctaccagttctgatggcttgtcttcatgtacgagtgaagcagatagagaaagcagcacaagcagtgtgacttctttgagcgctcaacatcaagaatcatcatcatctgactctgaggaatctccagagagagtcaacagcatcgaggaagctccatcaacaaagaccgtttcacggtccttacttgaggcttgtgcaggaaaaggtttcagagaataccaaccaaaagccatgcaccggcctcacaacgacagattgggattcaacataccccctttccaagatcagctgttgcatcaccaaagcatgcatgtacctacacattcttcagccacaatggggctccacaaccatccctgggctgctccagcaagtggatacatgcagtatgcccagcctagccacttctattccaatccacttggatttggagtacctggaaagcagtctcctgattttccagtgcagtacagcaatgttcatcacttcccagctcctgcttttagttatgctcctccggagccgattcggaagaccacgccaagcttcagagtcatgcatacatcgccgccttaccgaaatggattgcatcagagtcaaactgttggccatcctcatggagacccgactctagaaaggcatccttctcagcctaagccgttggacctgaaggatgctccaggagagaacaaaagctcgcctgaggggaatgcatccttctcgttgttccaattcaacctgccaatagctccccctgccccaccatcatccaaagatgacacgagtggagagtcagctacaagaacgccgttggctcaggttcaagttcagccttgctcgagggagcagactgatgtcaaagaatacaatctgttttgctcgaaaaatggcagcatgttttcatttatatcgagataaaagcaacacacgcgggagatctgtactgttgttgctgttgtggttggcactatacttggtgagtgatttgtattgtccgaacgaaataaaagatgcttgagttttttccttgtaaaaaaaaaaaaaaaaaaaa

SEQ ID NO: 21900 - DNA, 240 bp, Oryza sativa
  Clone ID: PAT_MRT4530_27127C.1
atggcgcagctggtgccggagtcgaagctgctgccgtcgactgaactggtggtgcattggaaattggttgatcaaggcatgttgcaccgcataatcaacttggtcatggaaattggtgcacctaggaggttcttcttgcacttcagcaccatcttcgccaagatcttcaaccacaccatcctgaagcccgtcacctttgtcacccaaggcatctacaacacatttaccaccttgagatga

SEQ ID NO: 21901 - DNA, 582 bp, Oryza sativa
  Clone ID: PAT_MRT4530_27128C.1
ggggaaccaaaaagcagcagatgcagcagcattccttttagagcaaggccaatatgaagctagcactcctaaattagctataagcatatatggagaagagatgagaggaggggagaggagagaagagagctacagatttgttagctggagtatgggctacaagacagtactgattggtatagtatttttttatatgaaactattatatgtgtagactattagattaacagtggatggtgtgccaatttttagagctagcagttgactatacaattaaacttgctcttaaaaaaatgcagcagcattaagccgccggcgacgataccggcgtcagcgcggtggtggaggggagggtgtcgagccatgggagcagcttggcgtggacgaggtccgggcggtcgtcgtgggggcagtggccgacgccctccagcatgtggagcgtcacgttggggagctcgctggggagcgcggagaagtacctccccaccggcccgtcgatcggggtgaaggggtcccggtccccccacagcaccagcaccggcgacctcgccgccaccgccggcatcagcgcgatcctcgtgc

SEQ ID NO: 21902 - DNA, 297 bp, Oryza sativa
  Clone ID: PAT_MRT4530_27129C.1
gcgcccaatacgcaaaccgcctctccccgcgcgttggccgattcattaatgcagctggcacgacaggtttcccgactggaaagcgggcagtgagcgcaacgcaattaatgttgggcctgtttggcacagctccagctccagctccacccctcctggagctggagcccagccagtcagttttagggcctgtttggcacagctccagctccagctccacccctcctggagctggagctcagccaaacagtttcagctccaccaaaactgggagtggagctgggtggagctctctcacaa

SEQ ID NO: 21903 - DNA, 210 bp, Oryza sativa
  unsure (1)..(210): unsure at all n locations
  Clone ID: PAT_MRT4530_2712C.1
actacaccaattaagccaacactttattacagtacacacaccattattatcaccaggcatgcatgtatacattacatagtccgatgtcatattcacatgttagctccatagttaatttaactagtcaggtaaaaaaaagtaaaaactcaagaaaacatgggaaaagaactcaagaatccggnagtcgataccttcaccacaaaaacaagc

SEQ ID NO: 21904 - DNA, 966 bp, Oryza sativa
  Clone ID: PAT_MRT4530_27130C.1
atggggaccatcaccgccgccaaagcagccgcggcggcggccgtcttccagtctccgtgctcccctgcgcctgcggccagcttccccgcccgcagcgtccggccggatcgccgccgcgccgtctcgctctcagtctcaggtgtaagaactcatgttgcagctgttgaacaagcagtggtacaagatgctattgcacagtcagaggctccagttgttgttgttacaggtgcttccaggggaattgggaaagccattgcattggcttttggaaaagccggctgcaaggtcttagtgaattatgctcggtcttcaacagatgctgaagaagtctgcaaagagattgaaggatttggtggtcaggcaattaccttccgaggagatgtttctaatgaagccgatgtggattctatgattaaagcagctgttgatacatggggtacaattgatgtacttgtaaacaatgcaggaatcacacgggatacattgttgctgagaatgaagaaatctcagtggcaagatgtagttgatcttaatcttacgggcgtattcctttgcacacaggctgcgacaaaagtaatgatgaagaagaaaaagggaagagttatcaacatagcatcagttgttggccttactggcaatcttggccaagttaattatgctgctgccaaggctgcagttattgggttaacaaaaacaactgctagggaatttgcaagcagaaatattacagtgaatgctgttgctcctggatttatttcatcagatatgacctcccaacttggggaggagattgagaagaaaaatctgataactattcccttagggagatatggtgaaccagaggaagttgctgatctggttgagttcttagcacttagccctggtggaagctacatcactgggcaggtctcatactctcgtgtcaccatacaggtcctcactattgatggaggaatggtaatgtaa

SEQ ID NO: 21905 - DNA, 147 bp, Oryza sativa
  Clone ID: PAT_MRT4530_27131C.1
atggccggcgacgagattgagacggcgaactccggggaaaaaggatgggtggacgggcttcctgaggaccttgcgatgccgacgcaggcttctgcgatgaccagcggagacggcaacggcgacgcagcttggctgaggatcgaatag

SEQ ID NO: 21906 - DNA, 1416 bp, Oryza sativa
  Clone ID: PAT_MRT4530_27132C.1
atccaaactggcattattaaattaccctgtaacaaatgttgtaatacagttctataccatatccaacccgagaagaattatcaattggaacaaatgaacatgggttttacaagttacaacacaggttttatcttgtacagtcatttgtattcttggaagttgacatgtccagtggcctgagcatgttcaacggcttccttttgaccaatcacaccaatttggcagacgccacagcgcaaggtgaagtttgcagtgtctgtgtagctcctcttcctcttttcatccttcacgaagttaagagcaaggccctctactgggccaatcgaccatttgtggtcgacagggaagatagtctgatcaaattcttccggtgcaccttcaaatggtgacatagctaaagcatcataatgcagcccatcatagatgagcatagttcgctcagtgtagttcttctcctgaccatacagatcacagcgggttgtctggatgtcatatgcagcaatttcacgcccataatattccgataggatagaaagttcaatggcacctccccacttttcagaatccaaaatccaagcacagtacgcttcatttggttttccaagaaaaacttcactgtactttgcaggatcactagcaactgctgctgctataacctgtctgagctcagaagccttgttcctgttatgctccatgacatacccaacagcattgaagaggcaactgttgtccgaagggatcaccctcctcacaacaacaccttccattccagctcagcagagaatccctcccgacgaaccccccggctacgagcgaagctacgacgaacagcagagcaaagaagaagaagaagaagccgacacgaaggaaagttcttgtcctctgtcgagaatcaatggaaggaggaggcgttccgcgaacatccgaaagggagaaaggagagggggggaatggaagagcgagacttacgaggaggaggcggcgcggggcgagggatccggggtgctgtccgggcagacgaacgaaatcgtgggggagaagaagaggaggagacgcgcgaggagagatacgaacgagagcggcgaggcgatccgagacggatctgaaggccaaaaagagggcagattcctttgccacaacatggagaaagagatatatgcccagtgttgtgatatccagggccagggtagctgctcctttaccccaatcaccatccatccggcatcaaccaacaagagtccaaatcatatactaaaggggaagttgatgtgcttccatgctgcttcagaaatgtgtcgtttgccaatcaagagcgacggcaatggcggatcagtgagctacgatcttagggttcaccaagtaccaccagagcttgttgatgatgatcaaggaagtacagaagattatggcaattaa

SEQ ID NO: 21907 - DNA, 2243 bp, Oryza sativa
  Clone ID: PAT_MRT4530_27133C.1
cgccacctccgcctcgcgcccgccaccccgagaccttctcgaagcttcctcccccccaaaccgaaaccgctcctcctcctcctcccaaatccaccacggcgacgccgccgccgcagagcccctagctcccggaggtccctcgcccccgccagctccgacggcctcacggaaggaggagtaacgtgggcgttgattggatttttttgttttccccccaccttgagtgagtctgtgccgtttccccggcggcgagggagggcagagggctgatcatggtcgtgcgccgccggtgccttgccgagatttcccccaaccgccaccgacgatcgttcacttggcacaaaggggagtagcactgtccaagctgttgtggtccgtcagggagattggccaacctgtggggtttcagatcgacataagtacgtcagtatttcagccatcgatcaatctggcggttcatagggctgtgcttgcaacctttctggcagaaaggagagagcaaagtgatttgctgtctcctgttgattgtggcctgttgaggcccagtaatggcagatgctagttcaaggactgacacatcgattgttgtagacaacgacgacaaaaaccaccagttagaaaacggacatagtggtgcagtcatggcttctaactcttcagatagatctgacagatctgacaaacttatggaccaaaagacaattcggcggcttgctcaaaatcgtgaggcagcaagaaaaagtcggctgaggaaaaaggcatatgtgcaacaactagagagcagtaagctgaagcttgcacagctagagcaggaacttcagaaagctcgtcagcagggaatcttcatctctagctctggagaccagacccatgccatgagtggaaatggggcattgacttttgacttagaatacactagatggctcgaggagcaaaataagcagataaatgagttgaggacagcagtgaatgctcatgcaagtgacagtgaccttcgtcttattgttgatggcataatggcgcattatgacgaggtattcaaggttaagggtgtagctgcaaaggccgatgtgtttcatatactttcaggcatgtggaagacacccgcagaaagatgcttcctgtggcttggtggtttccgtccatctgagcttctaaagctcctagcaaatcacctcgaacctttaaccgagcagcagttgctgggattaaacaacctccaggaatcttctcagcaggcggaggatgcactttcacaaggtatggaagcactgcagcaatctctggcagatactttggctggatctctcggttcatcagggtcttctgggaatgtggcgaactacatgggtcagatggcaatggccatgggtaaactaggaacgctcgagaatttcctttgccaggcggacaacctgcgacagcagacattgcatcaaatgcaacgaattctgacgatccggcaagcctcgcgtgctcttcttgccatacacgattacttttcacgcttgcgtgctttgagttcgctgtggcttgctaggccacgggagtaacaaaatggtcatgtgtgcctgtgacgaggttagacgctcattttgatggactgcagataattgggtttttccctgtacaattgtgtttggcagctgtggactaaagttaaaaactgtacctaaagtggtgtatgcaaataggtgaagcctctaagtaagttataacgattgcattattgtgttagcaataaaagttgggtaattcaggatgtgtcctgagttgttttgttgtagtagaagaactgcatgtagtggctggaaatgcagtgttgaatgtaactaaagctctgctgctcacgttgcataatgttgtgtagtaatagttagctagtgatgcccattttacctgcactcctctgggaagctgaaactgcaacctgaagcaaccacggtgcagaagaccgcatgcatggtaaatgattaaaaggatatatatgggctcaacatcgctgccaaatcctgagataatgaacaggcatgctaaactgctacttccacatgaaacctcccagttgacatgaagaatgagctgttcagttttatggtttctgtgttgcactgtacataattcctgtacgggtctgaatttatcctgaaatcatgctaaactgcagaagcatatgaaatctccagaccggttgacatgaaaaaaaaaaaaaaaaaagcgggggatccactagtttagacgca

SEQ ID NO: 21908 - DNA, 404 bp, Oryza sativa
  unsure (1)..(404): unsure at all n locations
  Clone ID: PAT_MRT4530_27134C.1
gacaccttataaaaaaaccctttttttttacttaaaaaacacaccaaaaccatttttttaaagactttgggggttggtccacaacaaatttttttttttttttttaaacaacaanttttttttaaaaaaacattttttttaaaaaagcttttnaaatttttttttaaccaccgattttcaaacaagaggattcccggggaccatgggcggcaacggcaggttggtttttggagggggaaaaaacaaccccttttccttgccgactcaaccgcctttgggggcctcctttcccctaaagtttttcctaccatcgaagggggggccaaaaaacaanaggaccatccacccccttttcattannaaagcnaccaccacggaaaaaccaccatttgggggcttggcca

SEQ ID NO: 21909 - DNA, 239 bp, Oryza sativa
  Clone ID: PAT_MRT4530_27135C.1
aaataataatcataatatatatatctgagcgcgccaaataacacttgggtaagaatcatcatatttagtactcaagaagcactgaacttaatatttcatacccatcaaattttgtaacccaaactgcatttaatctgcaacacacaaacataacacaacacacactgctaaaataatacatttttcctgcgtaatacgtcaatcttgctgtttatcactcatatgttccatcaactttc

SEQ ID NO: 21910 - DNA, 2009 bp, Oryza sativa
  unsure (1)..(2009): unsure at all n locations
  Clone ID: PAT_MRT4530_27136C.1
tttttttttttttttttttcataagaaacacaaaagatgtcgtccaatcaaaattcgccaaattggtccataatcagaaaatttggaggactgatcacacacccaagctgaagtggtgaacgtacaaccacaagacagacacaacaacacactcctgttcctaccctaacaatagattaaaagatcaaaaacaatttgcaagtaccacaaaacccaacaatccgtaatcaccttggtgcatccacctaacaaaagtgccaattccaaaggagcaccaaattaatctattcaagctcagtcggttgaaatcctggacaccctgggaacaaccacggggaaccgatcgatctcatccatccacgggttcttcttcagcgcctcctcctccgggtccaccgaccggagcgccctccacaccgcgctgttgcacttgaacccggacccgaacgcgatctgccacaccctgtccctcctcctcaccctccccttcgcctcgctgtacgccagctcgtaccacagcgagctgctcgacgtgttcccaaacattgtgaaaagagggagtatcaaataattagaatggacgagacttcgaaccaggtcgtgtttttcgaacctgtacagcgtcatccgtgacggctccatctgccactcccccagcgacaagttcttctcgatctcgtccagcaccgccctgccgccggcgtgcacgcagaagtgctcgaacgccagcttgaagtcggggatgtagggcttgacgttcttcatcttgagcagcttcttggcgaccagcgtcgccatgaacaggagctgctccgacagcggcaggacgaggggacccagcgtcgtgatgttcgtcttcagcgcgtcgccggcgaccgccatgaggtccttggacagcgcgacgccgacattgccctcgccgtcctcctcctgggtgacgcaaccgaagcacttgtcgtcgccgcccttgtgcgtccgcaccgtgtgcaccagctcgtacttggaccggcgcctctccgaccacctgttcgacagcaggatcgccgcgccgcccatccggaagaggcagttggacaccagcatcgaccggtcgttgccggagtaccagttgagcgtgatgttctccatgctgatgacgagcgcgtacgagtttcggtgcacctggaggaggtccttggcgagatcgatggcgaggaggccggcgctgcancccatgccgccgaggttgtagctgacgatgttgccgcggagcttgtagtggttcaccaccatggcggacagcgacggcgtcgggttgaagaggctgcagttgacgacgaggacgccgatctccttggcgctcacgccggtcttggcgaggaggtcgtcgacggcgccgaacatgacggcctcggcctcgcgccgcgcctccgccatgctcgggttgggcggctcccggagcacggcggcggggaggtaggtgtcgtcgccgaggcccgagcgctcgacgatcctgcgctggaagtcgaggctggcggcggtgaagcatccggcgagcctggagcaccgcatgaaggcgtcccggctgcaccggcgctccggcggcggcttgtagcaggcgaagtcgacgaggtagacggggcgcgggcgggtgaggaagcggacggtggagaggaagacgaggagggtggtgcaggcgacgacggagacgaggttgaagcggaggtgcgaccagaggccggcgacgtcgccggcggtgagcgtggagaggtggacggcgacgagggcgatgagcggcgtcaggaggaggtacacgccgttggtgatgaggtagtggtaccccagcttcacgtacttgagccgcaccgactgctggaagtccggcagccgccgccgctcgccggcgccggcgccgtcattcgctgcctcggcgttgttgtccatggagaccggtaaaaaaacgaagcagaacggagaccacgacgacggcgaagaagacgcagacgatctcgccgccgccgctgtgtcgc

SEQ ID NO: 21911 - DNA, 502 bp, Oryza sativa
  Clone ID: PAT_MRT4530_27137C.1
ccaagatccaacttgcacagttcgcgcaggcgactttctccaagatgcttgcctttgccaacgccctcgctgataagccttggacgcggccaacggacaagttctcggggctcatgcaactccgcatctgcatcaacgacgtctcagatatcctcgtcccgctgtacaatgaggttttcttactagctgattattcaaaagaaataattgaaagcatagtaaaggagatcgatgatgttttctgggtagagccatattgatgatgacgacggacgccttgagccccccgagtggaccatttccggacaatgcagaaatccacaaggctactctgttagctgtcaactatgcaatattgttttggggataccatagcgtgctggaggccatcctacttgataatggcgatttgtttggtaattgcagttggtattctgagaagctagtagtagaaagattgattgtgcaaattataaccaacttgcaggatgagctcgagaag

SEQ ID NO: 21912 - DNA, 327 bp, Oryza sativa
  Clone ID: PAT_MRT4530_27138C.1
aggcgttcgaaaaattaagcttttaatctctcctcccggaatcaaccgacccccatccgagctctcttgtcttctgacaagtcgtagccgcccgctgattacccgacgaggacgatgcattcaactcctgatcgatctccctacggccgcacgacgcgatggaggaggtggcgaagacgccacgctgcagatccggacgcacgtgcttgtagatccgggcactatcccagacgtaacgttacgggaggaagccatggaggggcatgagggtaagttgtgctgatgatgcacgcgctagtcatatgcgccgactacctgctcgatccg

SEQ ID NO: 21913 - DNA, 312 bp, Oryza sativa
  Clone ID: PAT_MRT4530_27139C.1
atggacggcgagggggcgccggcgaggcgggcgccggcggcgtcctactacgagtgcaccttctgcaagaggggcttcaccaacgcgcaggcgctcgggggccacatgaacatccaccgcaaggaccggagcgccggcggcaagtcgcagggcggcggccagcaccacgaaggcggcggcagcggcagcggtggcggcggcggccagcagcacggcagagatgtccacctgggcctcaccctggggaggaacgaggaagagagggacggcgtcgacctggagctcaggcttggccatgcccactatccttga

SEQ ID NO: 21914 - DNA, 2502 bp, Oryza sativa
  Clone ID: PAT_MRT4530_2713C.1
atgctggtatggactcaagtcggcgaaatcgtcttcccgatttacaccacgacgccgatctcaactggtcctccaatgatcggaaacgagaacgcagtggctacgaaccaaggcgactccatgtcgaataatcctcccgccgagacgaagaacggaacatcgacgacatccaagctcgagaaggactctgatacggccaaaccttgtctttccgacatgaaccgtgagccgacaaagatgacttccgaagccacaaggtcctggtgtcctatccacaaaaccaggaaacacactctgcaaacctgctgggttttcctcaacgtccgtgctgaaattcgcgcctgcaaagagcgtggaattcaacgtgtttctccaactcgtgatgtctattgtcctattcataagacaaagaatcacgacctctcgagctgcaaagtctttctcggcgccatgaaagctctgtctcctaagtcatacgtccccatcagggataatggcaaggaacaaggagcgactccaacttcagatcgattcgttggggtaatcgatatcgatcctcacgaaccatcagtcttacaccttctcgaagactatgggtcatcgacaacgagcgtgccgcgggaggtattggctatcgatgacgttggcacgtcagcgcacgccaacgcagaaacggggaaacaatcgactactccagcccagcacattggggccgttcaagctatactgagggaaactccttacgatcccgttctgaacgatgacctcgagcattggacagaacgactacgggaatcagtgaccaacctcagcaacgcgtttgaagaagccgctaccgcaggacaccaggagcagccaccacctggcgatgccaatggtgaagatccggcactggcgatctccgagatcaaatcaacggccgccgagaagcacgacgcacacgagacaatatatccacgaaggacacacgaccgccgacaacccaccgcccccaacgctgggtgtagggctttcggtcgttccctgcgtaatgtccgatggcctgagagattccgacccagagcaatagaaaagtatgatgggagcaccgacccagaggagttccttcaagtctactccacagtactctacgctgccggggcagacgacaacacgttggcgaattatttaccaactgcattgaaaggttctacacgttcatggctgatgcatcttcctccctactcaatctcttcatgggcagacctgtggcaacagttcgtcgccaatttccaaggaacatacaagcgccacgcgatcgaagacgacctacacgcgctgacacagaactcgggggaatcattgagggaatacgttcggcgcttcaacgagtgcagaaacacaattcccgaaatcaccgacgcttctgtaattcgcgccttcaaatccggtgtcagagatcgctacactacccaggagttggcgacaagacgcatcacaaccactcggagattgttcgagattgttgagcgatgcgcccacacagatgatgcgctaagacgcaagaacgataagccgaagaccgggggagagaagaaaccagccacggacgcatctgagtcaagcaagaagaaaaatcgcaaaaatgggaaaaggaaagctcaagcggaagtcctcgcagcagaatacgcgaaccctcccaagcgcccagacccacaaagtagtgacacaaagaaagcatggtgccccatacacaagacggacatacattctctggaagattgccttgttttcaaaaagtcgctcgagaagcacatagcatttgaaaaaggcaaatacagactaccgcaccgcatcataaccgataacggctcccagttcatcagcgccaatttccaggattactgcatcgggctgggggtcaaaatatgcttcgcctcggtctctcatcctcaaagcaacggacaagtcgagagggcaaacggcatagtactacaagggatgaaaacccgcgtctacgacaggctcatgtcacacgacaaaaagtgggttgaagaactcccatcagtactatgggccgtacgcaccacaccgacaacgtctaataaggaaacacccttcttcctcgtgtacggctctgaggccatgctccccggcgagctacgacaccagagtacacaagtacagaagtactccgacgggaaccaggaggagcagcgagacatcgatgtaaatcttctcgaggagcatcgtgaacgacttgccgtccgagcagccagctatcaacaggccctccgccgttatcacgagaagcgcatccgagcacgcatactttcgatcggcgactatgtcctccgacgagttcaaagccaagcagggcgaaacaaactctcaccaaaatgggaaggaccttacacgatcacacaagtcttacggccaggcgcattcaaaatcgcagacggcgatggtcacgaattagcaaattcttggaacattgaccaactacgtaaattctatgtatga

SEQ ID NO: 21915 - DNA, 166 bp, Oryza sativa
  Clone ID: PAT_MRT4530_27140C.1
tcttttggtaagtagtacaataccacgaccgacaattgagctaataaagtttgatccggaacgtgggctatttgtgctaacattgttcatctgtcttgactgaccaaaagatccatgctagtacaagattgagtgcatgccaacaaaaaaaaacaaaaaaaaaaaa

SEQ ID NO: 21916 - DNA, 1034 bp, Oryza sativa
  Clone ID: PAT_MRT4530_27141C.1
ccggccgggatccattcgccgccgccaccatccactcccccaccgtcctccgtcgccttctctctgaatcttggcggcggcggcgaccgagtgcgctcgagccggcggcggcggctcgcatccccattccgtcctccgccccctcctctctgaatctcggcggtggcggtgtccgcgcgcgctagagccggcgccggcgccggcggctcgcatccccactcgcattccgtccttcgtccccctcctctttgaatctcggcggcgaccacgcatgctcaagccgccggcggcggcagcgaccgcgcgcagtcgaaccggcggtggcggcggcgaccgtgcgcgcactagctggcggcggtggctagcatcccccctcggtactccgttctaggatctgcaggtttgtccacggcgacgacgccgccgctctggcgtgcgctgctatggacgcggccaccgccgaacagcagcagtgccaggatttcctcctccgttccaagagccggtgcctcggccctgctgcttcccggcttaccatccgcccccaccaagtgccttagcctcttgctgcagcaacagcacaacgacaaccaaagagtgaaatgtggggatggcaaagtcaggaatgtgatctgcagaaagatttgcttactgaagatgctgcagatccatctagctgtttgtggagtgaagcaaatcagaatgccagtgatgcttggaccatgttcgattagcaaactccatctagctgcttgtacatgtgttttttttaggttgctgggctcaaacatatgtgaactttgatggagaagtggccaaaatgctttggtggctgctgggtattgtcatgtgcttttgaacaggttttaattatgctgtatgagatatgctcaacaaacattatgttgtatgagatgtgaaggttgtaatgtgtttttagaatatttatgtgctgatctgatgatgatgatgagagaatgtaaattgatgatcggtaattaattttgtttaaattaaaaaaaaaaaaaaaaaaa

SEQ ID NO: 21917 - DNA, 340 bp, Oryza sativa
  Clone ID: PAT_MRT4530_27142C.1
ggttggtggggtttaaataaattttttttttttttttttttttttttttttttttttttttttttttttttgaaaaactaattataaaatttatttaaaaaatttgcggattgaaaaaaaaatataaaaaaccgtggattcttgattaaaagtgaggacaggaaaaattatttgcaaacattatataattaaactcctaataaactaaagtacccaatacgtgaaaaaatcggggagcttgccaataaaaaaaaaaaagctcgctcgctaaatcaaacttgcccttgtttttttccttgggaaagggaacaaacttcttcttgccggaaaaaatccccga

SEQ ID NO: 21918 - DNA, 462 bp, Oryza sativa
  Clone ID: PAT_MRT4530_27143C.1
gtatgatgatggatttgatggacgatcagttggggacgacaccggcatagttgcaaacaccgcaagtgtttccaccgttgagtctgatgtaacctccctctccccatccagttccccaggagttcttgatcttccaggcaccaccgacgacaccgacggcaaggacagcgtggttgatggaggcagcgcagttggagaagatacctgatctgtaggggctccagttagtggcatcaacagtgacggagacgggggagttgttcaactgggaagtaattccattgcatccgctgtagcttccgaaaccgttgattctgtaagcaccaccctgggtcttgcaagcctggtctctagcaacatagggataggcagattcggtagtgataccgttacccttgatgtagttaagggcagatgaaggccatccaccgttgcatccctggttgccctgaggtctggagc

SEQ ID NO: 21919 - DNA, 444 bp, Oryza sativa
  Clone ID: PAT_MRT4530_27144C.1
atggaggggcaatctcctgagccgatggttgaaacatctcaagataaatttaatgaaacagttcatcgtgccttgtttgatcagtctggggttttgatgcatacactacaagatgtgatcaagaagatagttcctgaaatagttgctcaaagaaatcaacttggggggcaaatcgaggaacttcatcagtatgggcatggtgaagaatatcaatataatgatgatttggccgatagaattgcaaagatgatagaggagcagtttggaatcaaacctaaggaacatacttttgtgtatcggctgccatatcctgagtggtttgatagggttccattgccacaccgatacaaggttctagatttctccaagttttcagggcaagatgatatgtctacaatggaacatcagctgattcttagcacaatgtggagaggcatcggttga

SEQ ID NO: 21920 - DNA, 444 bp, Oryza sativa
  unsure (1)..(444): unsure at all n locations
  Clone ID: PAT_MRT4530_27145C.1
tcgtcgtncgcgcctcgagnaggccctcgtcgncggaggcgcgctgcgaccttaacgggcttgaacgcggagtcgagtcgcaaccggctgcggctcgaactgccaacgtganaaacggcgtcgcgaaccgcganctttcttttanctganagtagactttgggggccgcgccccaagtgtgacccaggaccgggggaaacctcctttaatagttttcttttttttttttcacaccttttctttttgcttgctctgcaacgttgtaggattcccatgttcctcctgtcatgtacttgtgtgatgtctgcctgtacagactttctcagattcggctgtgacaaacttgttcaaaatcgatagaaccatccagatttctggagtgaacaccaagaagttgaaatccgattattctccaaaaaaaaaaaaaaaaaaaaaaaaaaaaaa

SEQ ID NO: 21921 - DNA, 2784 bp, Oryza sativa
  Clone ID: PAT_MRT4530_27146C.1
atggcagatcagctcgtgatcggctcagtcaagggcgtcctcgacacgctgctgggccgcatcagcaccgtgctcgctgacaaggcacggctgcttggccgcgtccgccgcgacatgcagttcatcaaggacgagatggagatgatggacgccttcctcctgctgctcctgaaacagcaggccagcaccctcgaccgccaccactacaacaagtgcgcgccatggatcaagcaggcggtggaactcgcccacgactgtcaggactgcgttgagcagtatgcgcagtgtgtcgcagccggccggccgccatccaagggcctcctcagccacttccagcgagtctcccgtcttgtccggaacctttccgtctgccaccggctggcctcgcggatccaagacatcaaggtccgactgagtgaggtgaacgaccggcggaaaacgtatgatatttgcccccgctttgacaccttaagtcaattgtgggaacaggatgacgatggtgaacatggagatgaaactgcttggagacgttcttttgctttcgctgaaccaccagccaacctgaagaagagcactgtaaacgagctgatcagatggctcatggaggatcaatctgcagggcccaggctcatacctattgtgggagtcggcgtggaagccggtaagatcattgctgaaagagtttaccaggactcctccgtcgccatcttatttgactgcaaggcctggatcactgtcaacggagctcaatctcacgttcagatattaaaagatatactatgtcaggttgttctccctctgaacaagttcaggagtgaaatggatggctggaacgaggaggagctggtggagaagattcggtgctatttgagaggtaaaatcttccttgttattcttcacgatgtccgtgacaaattgatctgggatcatataaagcttgctttcccagatgattgtcctgctggtagtgccattatagtcacaacagataatgatgataaagtggcccagactttctctccgtataaaaccttcaatccagatagctccggtcatgttctcaacttcttcctcagtagagctatatctctgcttaaacatgaaagggaaggttggctacggaaaattctaccatgcatgttgatctatcttgaacctcaaatctactttatgaagatgctccttcggtttctgtattataatgagagtggttcttcaagccaagtgtacgatgcactaggcaatagaggatcactgcatgattactggcctaagaagatggtagagttatgctactttgatatgcctaataagtatcggagttgcatgctgtatctatctattttcccacctggctacaaaatcaggaggaccagcttagtaagacgatggattgttgaaggcctcatcactgacggacaagaaatgaatgcactagaacaagctgataactgttttgattcccttgttggcaggctgcttctctgtccaagcgacattgatgcttcaggcaaggtcaagacctgcacggtacttgacttggttcatgatgtcattactgatctggtatccggaggatatgatactacttttgttgtcacggttttggcaccacgagaactggctcgccatctttcaatccgcttcagcacaaagttgcatatatctctgtctgaacctatcgatgatattcttacctttctcaagtccctgccatcgtcttctttgctgtgtctgctcaaagtgctagatttggatagctgcaaaggtttgaagaggcgccacctgaagaacatctgtggcatatattcgctcaagtatttgagcctgcgggatacagatgtcaccgaactgccgaaggaaatggagaagctgatccacttggaaacgctagacatcaggcagacgaatgtcagtgtcttccccaggaaatctttagtgctccctaggctcaagcatttgctctcaggccatactgtctgtccaagtgaagacatcgtcaggcaacaggaatcattctctgccgtccacattccccaccgaattgggaagatgagaaacatggagatactatcccatattgaagtttcacatggtggaaaggagttgactgctgttagccagctactgaagctgaggaaattaggtgtggtcttccatgatgctgataaggatggttctgattgtttgcttcatgtaatcggcacgttgcacaagtgcctacgctctctgtccgtccaaatcagatcatcttctgccgatgatggaagcaagggctttgacatgagcatgatggatgccacactcccaaggtttctcgagagcctgacaatctctggcatcagaagtggattgcctctgtggatagaacatctccacaaacttaccaaggttactctgcgtgatacctccctgacagagagtgctatccatgtcctgggcaagctcgtgggcttgcgctatctcaggctccgacacaggtcatacatcccaggcaacctcaccatctccggaagggaattcagaaacctccagtttcttttgatcgagaactcagacattgtcagcatcaggttcgatgagggagcagctcctaggctcgagaggttggtctggcgtttcaccataatggattctcttgtcgggatcgatcacctcctaagcttcagggagctccagcttcacggtgactgtgacacggagaagattggagtgattctgcatgacatcagtgcacaccccaatgaccccagtctgaagcacattccagcagcagggaactaa

SEQ ID NO: 21922 - DNA, 341 bp, Oryza sativa
  Clone ID: PAT_MRT4530_27147C.1
aaggcaaaaccagactatgccttgggtcaagggccaagggcccgacaaagacttgcccgccacccaaaagctaaaaaacgggccaagcaaaagccaaacatccccctggttgcgggcctattatttgtcaggccgcatatgccagagaaccctgggcgacaacaaatcaaatcgaggaaggacactcatgttctattcaaacggggaacaaacttggggcaaaagcaaaaccacctggatggggagggcccgcttattttattatgggactgggatgcacaaaatttggcaaacacttcgggggggccacaattttcaggagaccggaattatggtttgga

SEQ ID NO: 21923 - DNA, 345 bp, Oryza sativa
  Clone ID: PAT_MRT4530_27148C.1
gcataccctttacccttcgatatatattacatatcggtacggcatacccacgcgcatacggatatttcctgcgtacactaaggaaatccttcacggagtctacggatgggaagagtcctactcggacaagactgggtcatcaatgtatcgtatagggtctgttatctccgagttctatttgtaaaccgcctgacctgcgatataaaagggaccccccgggaggacctgaggcatcgaatctcagagccaacacaaccctcacagcctacgaagtcagagcctgcaagcagccgaatcgtcggggatctagtcgagccaactcgaccacgatctcgccggatctgt

SEQ ID NO: 21924 - DNA, 1056 bp, Oryza sativa
  Clone ID: PAT_MRT4530_27149C.1
atggccgccgtcgcgagccccgccctccggctcaggccccgcccccggaccgccgcgccgtcgcctcctcgctgccgcctcagctcctccgcttactcgtattccaaggcaaggcatgctttaagaagatacggcaaccacgatggaaggtttcatatcaagcgaattacttccttcgctgctatggacaaacaggagtcaattacttcacctaccacagatgcgttgccggtagaagagaccgataatagcactgaggattcccctgcgtctggtagctcctcctattttactgagaggggtaatggaaaatcagggttcatctcatttcaaggcagtagttatcagatgaaaagtgtggagagtgtgccacatcctggcaaggaagcgtctagattagtttggtttgttggtccaactatccttgtggccttcttggttcttccatcgctttacttgcgcaaagtactctcagctgtgtttgaggattccttgttgacagattttcttatactattctttaccgaggctctattttatggaggagtcgcaatttttgtcctgttgattgataaagtctggaggcctttgcagcaagtagctcctaagagttatatctggtcaaaatccagatttttccgtatttcttcagtaacaacgatggttttgagcttgatgataccgcttttgaccatgggaatggtctggccctggactggaccagcagcttcagctactcttgccccttatctggttggtcttgttgtacaattcgcattcgagcagtatgcacggcatcggaaatcaccttcttggccagttatccctatcatctttaagatctacaggcttcaccaactgaacagggcagctcagctggtgacagcactcaccttttctgttagaggaacagaggcaacaaaccaaaccttggctatcatgaactccttaggagcattattgactgtcctccagattcttggggttatctgcgtatggtctctatcgagtttcctaatgaggtttcttccctcttcagacattccagacccttaa

SEQ ID NO: 21925 - DNA, 1056 bp, Oryza sativa
  Clone ID: PAT_MRT4530_2714C.1
ccacgcgtccgctgagcgaggcggcgacgaggacgacagaacgaagatgagttcgtacatggaggcggcggcggcggcgagggcggcggaggcgaagacggaggggcttctccggggcgcgtgcgcgctgctggcggcggcggcggcgctgctggtggggctcaacacgcagacggagacggtgctgttcatcaggaagaaggccaccgtcaaggacgtccaggccctctgggtgttggcgatggcggcggcggcggcggccggctaccacctgctgcagctgctaagatgcttctacctcagccgcttcgccgacggcaagccctgccggcatcgcagggccatagcctggctttgcttcctcctcgacaagggttgtgcatacataacattcgcgacgacggtggcagcggctcaggcatgcgtggtggcactatatggcacgcacgcgttgcagtggactaagctttgcaacatctacacccgcttctgcgagcaggttgctggtagccttgtgtgtgccatgctcgctgccgtcggtactgccctcctctccgtcgtctccgcccgcaacctcttccgcctctatccctccatgctttcacctccgccgtcttccttcgtgggatagacattgtccaccgcccctctccctaggccttcgtttgtactcttatattgggctgcatagaaaaattaagcccaactatagacccaagtaaagcatacctaccttttatttttcttaacttttgttagagtgcatttaggagtaatacttatccacatgtagtatatactccacagaaggtatatgttcttgtacctctctctcaaaaaagtgtatccataggtaatgtgctttgcttcctctctctctcataagaacaatagtagagaagatggttgtaaggtaattaaggaccaacctttgtggcatgtttcagtgcagaagtgataatgttacacactgaaattgttgtggataacagaactaagttcagttcagttaccaccagaggtaaagaaatggttgatttaattaaaaaaaaaaaa

SEQ ID NO: 21926 - DNA, 560 bp, Oryza sativa
  Clone ID: PAT_MRT4530_27150C.1
ggggaaaaaaaaaaagggtttgcaacccaattttttccatttacccaccccggggcccaaagagagcaaactaaagggggttcaaaaagggcccccccccaaaaaggccccatttcccgagggaacccccctagggggcccctggcccaaaggggggtttatacccccccaaaaactaaacaagccggttttcacaaaggggggtaaaccaccgcccaaaacccggaaaccaatggggggccccatagctcaaaacccaataaaaaaaccccccaaacaaaagggttttgctttgccgggggaaaaacaaaatttgactgggtaccccaatttttcccccccaacgagggctttgggggggccaagccttttcttgggggaaaccaaattttccaaaaaaaacccaccccccccgggggagcccggaaatttttcccgggggggccaaccgcttgttaattaaaagggaaaaattttttgccctggcccgggaaaaaattaaccccaaaaaagcacccccctgcaaaaaaactggtttgtaaaaaacaaaagcccccttt

SEQ ID NO: 21927 - DNA, 987 bp, Oryza sativa
  Clone ID: PAT_MRT4530_27151C.1
aattcggcacgagggccgtcgccctcgcgctcgcgctctcctctcctcgccgcctcgccgcctcgcatggccgcgtcctactacaacaacccgccgccgccgcactcctcgtacgcggccccgcctccgccgccgccgccgccgccgggcacctccctgtacgcctcctaccgccaccacgcctaccctcctcacccgccgccgccgcccgcgtacgtcggcgcgtactacgaccacgcggcggagccactgccgccgcgcgacgagctccgcacgctcttcatcgcgggcctccccggcgacgccaaggcccgcgaggtctacaacctcttccgcgacttccccggctatgtctcctcccacctccgcacctccggcaaatcctcgcaggcatatgcgttcgctgtctttgcagatcaaccttctgccttagctgcaatgagtgccacaaacggaaggatatttgaccttgagaataattgcacactgcatgtagatcttgcgaaatctaattcaagatcaaagcgctccagaacagatgatgttccgtcttattcctctgagaaaaaagctagaaatccgaggggatttcctgattcaggtgctggaagcaatattcacatgtctggaatgggtaattcttcacacagcttgaatggttatccttctgcacaaagttacacgaactttgagcctgctgctttcagcaaggacccatcagcatttgcccctcaaaacaatcctccttgccctacactctttgttgctaaccttggtccaacttgctctgagcaagagctaatagatgttttctcaagttgcgcgggattcataaaggtgaagatgcaaaacaagtttggagctccagttgcatttgtggatttcaaggtctctagctattatgttggtctattgtggagagctatctgccttttgaaatctgtggtaaatcttcagataatggatgcccatttcacttttcgttaa

SEQ ID NO: 21928 - DNA, 287 bp, Oryza sativa
  Clone ID: PAT_MRT4530_27152C.1
aatgaatgctagtgctgagatacaatcaatacaagtgaattacataagaccaaaggtctaggagagtaaaggtctaggagttgaacagcctatagattaataaataatcctaatacccgcccgcagtcatagcgggaggagtacgaacgcaaagactggaccgaaaatcttgtgataaaagaacacttgcaactctcttgatctatcatgtcttttctagtccatttgatcagtacaatcatttttatttagttgtatgcattagacataccatccaattaattatt

SEQ ID NO: 21929 - DNA, 317 bp, Oryza sativa
  Clone ID: PAT_MRT4530_27153C.1
acatccttgacggcagcgacgaaaccaacctttctgagacagctccaactgggaagaacttccgctctggtgtgggggaaaagagagcaagactgagtactacccactgtactcagcaagtcataccggaagatgagctggacaaccggacatcccggccgacccaactccatcacgcccaccctcgccaccggtgcctaggaaagggtcgagctatacttcagatcaagcagttacccactcccgcttgtggtaagcacggaaccgtggatcgacgaaacgaccgaaacctatgcgacaaacaaagcacacaagca

SEQ ID NO: 21930 - DNA, 1091 bp, Oryza sativa
  Clone ID: PAT_MRT4530_27154C.1
atggcggtgacggcctggcggcagaaggggatacggcagcggcgggaggggagacggcggtggtccaacggcccggcggcggcgacggtggtgccgcggcagcggcgccctcctcctctccatttgacgacggcggcgaatttgacagaatcttgtttagctttggcattcaaaccccttacattccagttgaacaggaccaaccagggtacacaaacgataattgttgacatacagatccatgtcttacaaaaatataaaagattacaaatgcagcggaaaagcgggcgactccactctataggcatccttgacggcagcgacgaaaccaacctttctgagacagctcaaactgggaagaacttccgctctggtgtgggggaaaagagagcaagactgagtactacccactgtactcagcaagtcataccggaagaggaggtattgggcagtcccctcgtgcgccgtggtgaatccggcagctggacaaccggacaccccggctgacccaactccatcacgcccacgctcgccaccggtgcctaggaaagggtcgagctatacttcagatcaagtagttacccactcccgcttgtggtaagcacggtaagtctcccagggtttcccgggcgggggcgccgacaggtgggccccacgggtcaaaggcacaaagggcgccggtccaccgtggaccgggaccacacgggtggtccacccccggtccacgggaccgacggtccagatcagccccgaggccgataggacggtgcggcggcggcgaggcacggcacggctcggcacaaagcctgctggccggccatggcaagcggcggcggtgcatggccgccgacggcggcgaccggcggagcgaggcggcggcagacagcgcgaaaggcggcggcggacggccggagtggcggcacagccaagggcggcggcgcacgcgggaaggggagaaaagggagggggagggagtcctcaccggagggggtggcggcgaccggtgcagaaaacgagggtggcggcgacgaccggcgatgccgaggcgcggacgggcagtggcgacacctagagaaggggaggagaggagt

SEQ ID NO: 21931 - DNA, 1734 bp, Oryza sativa
  Clone ID: PAT_MRT4530_27155C.1
atgcctctctcagcagcttccatcaaccgtgcatcctaccaagttctcctcctcctcgccgccgccgccgtgtccaccacgggcggcgacggcaacacggcgcccggcaatgccaccgccacggcgacgactggcggcgacgacacggagatgtacatctgctacctctgcaccgggcgcaacccgatcctgatcaggaggtgccccatctactgggactactgccacctcaactgctttgacgacgcgccctccaccgccgccgccgccgacgacgtcgccgccgttcccgtggcctcgccggcggcgcctgcgcgacgggtgggcggcgtcccgcgcgagaccctcgaggacgaggagtgctacgtcatgaagctgtacgagaacggcagctacgtcatcgtgaccacgctgggctgctcccagaccgcctcgtgcctcctctcctgcggcggcggcgacctcgcagccgacggcgaagaagccctggcggcggcgcacccggccggcgccgtcggcgtctcgccgccggtggccgcggccacgggggaccccgccgacgtctacatgctcgcgcaggcgctcttcctgggccgccacttccgccgcgcgctccacatcctcaactcctccaagctcctccgcgacctccgcttccgcttcctcgcagccaagtgcctcgaggagttgaaagaatggcatcagtgtttgatcatacttggagatgcaaaaatagatgagcatggaaacgttgttgatcaggatgatggcagtgacatttactttgataaggatgctgaagaccatgagatcaatatcaaagcggcaatatgttttttacgtggcaaggcatacgaagcactggacaactgtgaccttgctcgacaatggtacaaagctgcagtgaaggctgatcctttgtgctatgaggcccttgaatgccttgttgataactacatgttgacatgcgaggaagaatctgagctattgtcctctctaaaatttggaaaagaagatgggtggctctcagcattctactcttgtttgataaggaagcatgaaaaagaatatatagtggaagcaaagttcaaggaatttgaacgagaatcttgtagtatttcatctttgagttcaggactgacactgaaaaataatattgacgtgttggcttgcaaagctgaatactatcatcagagtggagagtaccaaaaatgtttcgaactcacatctgcgttacttgaaagggacccttttcatttgaaatgcacgttagttcatttggcagctgcaatggagcttggccattcaaatgacctttatattttggcctgcaatctagtgaaggactatcctcagaactgtggttccatctgtagagctctttcctggtttgctgttgggtgttattactactgtattaagaagtatgatcaagcacgcagatactttggcaaagctacagggttagatgggacatttcctcctgcttggattggtactggtattgcttatgctgcacaggaggagggtgatcaagcaatggctgcatttcggacagcagctcggctatttcctggatgtcatctgccaactttatacatgggcatgcaatatttgcgaatgcacaatttcaaacttgcagagcagttcttcacgcaagcaaaatctatctgcccatctgatccgcttatatataacgagatgggggttgtagcttataatatgaaagagtaa

SEQ ID NO: 21932 - DNA, 376 bp, Oryza sativa
  Clone ID: PAT_MRT4530_27156C.1
tgtaccactgtacccacaagacacagcctcaacatcatggggcgactccacaccacaggcaatccttgacggcagcgacgaaaccaacttcgacaagacagctcccactaggaagatcttcagctctggtgtgggggaaatgagagtaagactgagtactacccactgtactcatccaatcatactggaagaggagctggacaaccggacaccccggccgacccaactccatcacgcccaccctcgccaccggtgcctaggaaagagtcgagctatacttcagaccgagcagttacccactcccgcttgtggtaagcacgaaaccgcggatcgacgaaacggccgaaatctacgcgacaaacaaagcacacaagca

SEQ ID NO: 21933 - DNA, 542 bp, Oryza sativa
  unsure (1)..(542): unsure at all n locations
  Clone ID: PAT_MRT4530_27157C.1
aatcgccctcctgggggaataagcttgcggccagccatcggaacgacgctcacgtgccagctgaaaggcggcgatcagattgtccgctttgcgtgggccaaaccccggaatgcgctgcacgcgctcatgcatccatatccacccaacctagcagatcgctcacctcgccggcctcgacgaggcgcctccaggctccggtacccaggtggggtaagcccagcccctgcttgccgctcagccagggcaggcgggccagaaactgctgtccgcacgcaggggcagggggccagcaacttagcgaatggtagctcggctgggttgggtgcttcgatggtgggccgctgctgcgcgcgccaaacgacgcgttcgaacccagggatggtgaggccggcgagggcaatggtgagctggtcgccggggcgtacatcatcggcaccncagcgttgcaaggagccaaggctgacgcgggcgatgcgtcggtcatcgacgtgcaccgggtccaactgcagcaccggtgttatccggccgctgcgaccgatatt

SEQ ID NO: 21934 - DNA, 2223 bp, Oryza sativa
  Clone ID: PAT_MRT4530_27158C.1
atgcctctctcagcagcttccatcaaccgtgcatcctaccaagttctcctcctcctcgccgccgccgccgtgtccaccacgggcggcgacggcaacacggcgcccggcaatgccaccgccacggcgacgactggcggcgacgacacggagatgtacatctgctacctctgcaccgggcgcaacccgatcctgatcaggaggtgccccatctactgggactactgccacctcaactgctttgacgacgcgccctccaccgccgccgccgccgacgacgtcgccgccgttcccgtggcctcgccggcggcgcctgcgcgacgggtgggcggcgtcccgcgcgagaccctcgaggacgaggagtgctacgtcatgaagctgtacgagaacggcagctacgtcatcgtgaccacgctgggctgctcccagaccgcctcgtgcctcctctcctgcggcggcggcgacctcgcagccgacggcgaagaagccctggcggcggcgcacccggccggcgccgtcggcgtctcgccgccgtggcgaatgtgggatacaaaattcggtttccctccagcagcgccgcccaccaccgccgccgcagcgcagaaaaatcccaagcggaggagagaggcggaggcggagggggaggtggcggcggagatgagggaggaggcggtggagcggctgcgcggggtggtgcgggacagcgtcgggaagcacctgtacgcgtccgccatcttcctcgccgacaaggtggccgcggccacgggggaccccgccgacgtctacatgctcgcgcaggcgctcttcctgggccgccacttccgccgcgcgctccacatcctcaactcctccaagctcctccgcgacctccgcttccgcttcctcgcagccaagtgcctcgaggagttgaaagaatggcatcagtgtttgatcatacttggagatgcaaaaatagatgagcatggaaacgttgttgatcaggatgatggcagtgacatttactttgataaggatgctgaagaccatgagatcaatatcaaagcggcaatatgttttttacgtggcaaggcatacgaagcactggacaactgtgaccttgctcgacaatggtacaaagctgcagtgaaggctgatcctttgtgctatgaggcccttgaatgccttgttgataactacatgttgacatgcgaggaagaatctgagctattgtcctctctaaaatttggaaaagaagatgggtggctctcagcattctactcttgtttgataaggaagcatgaaaaagaatatatagtggaagcaaagttcaaggaatttgaacgagaatcttgtagtatttcatctttgagttcaggactgacactgaaaaataatattgacgtgttggcttgcaaagctgaatactatcatcagagtggagagtaccaaaaatgtttcgaactcacatctgcgttacttgaaagggacccttttcatttgaaatgcacgttagttcatttggcagctgcaatggagcttggccattcaaatgacctttatattttggcctgcaatctagtgaaggactatcctcagaactgtggttccatctgtagagctctttcctggtttgctgttgggtgttattactactgtattaagaagtatgatcaagcacgcagatactttggcaaagctacagggttagatgggacatttcctcctgcttggattggtactggtattgcttatgctgcacaggaggagggtgatcaagcaatggctgcatttcggacagcagctcggctatttcctggatgtcatctgccaactttatacatgggcatgcaatatttgcgaatgcacaatttcaaacttgcagagcagttcttcacgcaagcaaaatctatctgcccatctgatccgcttatatataacgagatgggggttgtagcttataatatgaaagagtatcaaaaagcagttcagtggtttgagctaacactggagcatacttcatcctccttgaatgaaatgtgggaaccaacattggtgaatcttgggcatgcattgcggaaactcaagaaatatcaaaaggcaatatcatattatgaaaaggcactcacctttcaaaccaaaagtttgagcgcgtttgctggtcttgcttatacttaccaccttatggcgatgtatcatgtgcatagggcagaagttctgcaaattctgacaaaagaacctggaagatga

SEQ ID NO: 21935 - DNA, 444 bp, Oryza sativa
  Clone ID: PAT_MRT4530_27159C.1
atagaacgcgaacacagttatgactaattttgtacataaccttgaacacaaatcactctggcaaaaacaaacaccacaaaagattggatttggcgaggctcacattatttaattatcaggaagcagcaatacggggatggatgtatattatttaggtttatgacgatcattaagcatactcggtagggagagcgacgagggacacctcgatcatatcgagcgtgcctgagtagccgtcacggatgagctactgcttatacggcgacagggagccaccggactcgagctcatagtccacgtttatcgtgcgcaagctaggagacggctccggcggccttgagcttagtctctgacacgtgcgagttgagctagtccaccttactacaggtcgggacatccagaagctctgactcgatgatgtgagctggattgtcacgtgcaacc

SEQ ID NO: 21936 - DNA, 2070 bp, Oryza sativa
  Clone ID: PAT_MRT4530_2715C.1
atggtcgccgccggcgaccaacggcgcggcggagcggcggccgagagaggggagggaagggggaagcgaaggaggcggtccatggctcaccccgggacgacgaggacggcggaaacgacaaccggagcggaggaaggcggcggcgcggttcggatcgacgaggacggcggcgctccgacagtcggcgggcgaaacgaaggggtggacgaggtcgacgggaacgcggcgaagccgaaggaggtgacgccgagtcgggaggaggtccggagcgacgacggcggcgaaccggagctcggcggcgacggcggagagagaggaagacggcgcgggcacgaatccgacggggagagatgtattttagagtcgttttgggacgcgacagaatgtgagcagagttttcaagaattgaagagtcgcttaatatcagctcctattttgattttacctgatccaaagaagggtttccaagtgtattgcgatgcatctaaacttgggttaggttgtgttctgatgcaagatgggaaggtgattgcctatgcatctcgtcagttacgtccgcatgagaagaactaccctactcatgatcttgagttagctgcagtagttcatgcgttgaaaatttggcgtcattatcttttcggtactcgtacagaggtgtataccgatcacaagagtataaagtacatctttactcagccggatctgaacatgagacaacggagatggttggaattaattaaggattatgacatgggaattcattatcacccgggaaaggctaatgttgtagcagatgctcttagtaggaaaggctattgcaatgctacggaaggacgacagttgccattggagttatgtaaggaatttgaaagattgaatttgggaattgtcggtagaggtttcgttgcagccttagaagcgaagcccacactaattgatcaagttagagaagcacaaattaatgatcatgatattcaagaaatcaagaagaatatgagaagaggaaaagctatcggttttttggaggatgagcaaggaactatatggttgggtgagagaatctgcgtccccgacaacaaagatttaaaagatgcaattctgaaagaagctcatgataccttatactccattcaccctgaatacgtagcagtatgtgatgtttgtcagcgagtcaaggcagaacatcagaaacccgccggtttgttgcagcctttgaagattccagaatggaaatgggaggaaatcggtatggatttcatcagtggtttacccagaacgtcatcaggtcatgtctctatttgggtgatagtcgacagacttaccaaagtggctcatttcatcccagtaaagacaacatattctggtagtcggttggcagaattgtatatggcaaggattgtgtgtttgcatggagtccctaagaaaatagtgtctgatcgaggcagtcagtttacttcaaatttttggaagaagcttcaggaagagatgggttctaagctgaactttagtactgcttatcatccacagacagacggacaaaccgaaagggtgaatcagattttggaagacatgttgagagcttgtgctttagacttcggtggaagttgggataagaatctaccttatgcggaattttcgtataacaatagttatcaagctagtcttcagatggctccttacgaagcactgtatggtcggaagtgccgcactccgcttttgtgggatcaaacgggagaacgtcaggttttcgggacggatatcctaagggaagcagaagaaaagccgtgcgccgctgccgttccagtcgtcgccgtcgctcgggaaggtcgccatcgtggtcgccaagtcgtcgccatcctcgtccgctccttcgccgtcgctgaagactgccggaggaccgtcgccgccgtcgacccgatcttctccgccccttcgacctcaacgccgtcaccgattccgacgtttccggagagtccgttttcgcaggagaagattttgaagagttccaaggccagcaaggcaagtcacacagatcccaaacaaccctttgagcatgttgatcctatttaa

SEQ ID NO: 21937 - DNA, 1167 bp, Oryza sativa
  Clone ID: PAT_MRT4530_27160C.1
atggttggagtggacaagagcttcacggagcttctacagctgattggagacctacttccagcgggacatgtactaccagaaacaacataccaagtgaagaaggttgtctgcccactcggtttggaagtgcagaaaattcacgcatgtcgaaatgactgtatcctatatcgaggtgactatgcagatttggaatcatgtccagtttgcaaagaaccgcgttataagggtggagataacgatgttgatgctgatgatgacattggtggccctatcgtgaagaagaggaaagtgcccattaaggttgcgtggtattttcctataatccctcggattaaacgcatgtttgcaaacaaaaaacatgcaaagatgatgcgttggcaccacgaagagcgtaagaaggatgggatgataaggcaccctgccgacggatcccagtggaggaagatagataggaagtacaaaaagcatttctcacacaagattaggaatataaggtttgatctgagcacagacgggatgaatccattcggtgacatgagcagtcggcatagcacgtggccagtggcacttgttatctacaaccttccttcgtggttgtgtatgaagcgcaagtatatcatgatgccacttctaatccaagggcctaagcaacctggcaacgatatcgacgtctacttcaggccattagtggatgatcttaagttactatggcatcggggtgtgcagatgtgggatgcgtacaaaagagagtacttcaccttaagggcaatgttgttctttaccatccaagattacccctgcgctggtaacacatccgggcaaacagtgaaaggtggttgtgcatgtttgcaatgcatgcgagacacggcgagcaggtggctgaggtactccgaaaagacggtgtacatgcgccatcggaggtttcttccagctgaccaccagtaccatagcaatacaagagaatttgatggcacggtggagctagaggacgatgtccgccacgcaatcgacgtgatgcacgttgagaagaatgtgtgtgagagtttgattgggatccttctaaacattcctggcaggacaaaggatacgttgaaagctcggagagatctcgcagacatgaacatcaggtctgagctacatcctcaagaatgtccaaatggtaggtag

SEQ ID NO: 21938 - DNA, 187 bp, Oryza sativa
  unsure (1)..(187): unsure at all n locations
  Clone ID: PAT_MRT4530_27161C.1
anccacaggggagctctatcaacatgtgtttgttccacgacaactactaaaaaaacactgacatttcatatatagtacataaaactactatctcacagttaaaaaagaatatgaaaattactcaacatttctcagtgcaaatcgttggtaaaccaactaatcatttttctactaaaattgcaagaca

SEQ ID NO: 21939 - DNA, 2772 bp, Oryza sativa
  Clone ID: PAT_MRT4530_27162C.1
atgatcatcatgttcgatggcgttacgcgcaccgcggatcagatacttgagaagtatctgagtaacagcgatagaccctattatcagggcgggcaaagcatttactttgatggctggaaagggtttggcacctccgccatccttgcggacatagcagagttagctagacgtaagaaatccatggactatgaaatagtcctccatgtagactgctccgtgtgggaaagcaggagaacactgcagaggatgatcgcaaaggagctaaacctcggcggttccacgatggccctgtttgacaagcaggacgaggatgacgatttcagtggaatagaaaagagctcccgagctgagatagatgaggttgcaaagctcatctttcaggcagtaaaggaccgtagctgtttgctgattgttcacaacggaagtgacgatgagattgattttcttaggtttggtgttcctgtgcttgagcggagaaacacagtgttgtggacattcagggggaggtttcggcttgaacctgcaatcaaagacaaagtgaaaaatgctgatcttttcctttctatagatcaagaaggttgtgggatcatagaaggagacagtgcatgggagattgccgacagactttatcaccggatgcggctggaatatcttcctacaagacacaaccatgacttttggttcccgcagtattttgggagccaaatacaagcaagggattatcgatgggtttcagttatgcccaggaattcagatgagaacctcaaatttattctgatagatggctgcttaaacaaggatgctgatttaactggtgaatggtatcacgagcagaacggaaaacaatgggaatttctccaaagtttatgggtgttggacatacgtgatacaaactgggactggatcttatccccatcaaaggtggtgctgatggttgaactgcgggagctgtatctcaaggctacaggaagaagctggcatgatcagatctttcttgatatgagttgtctctctaagcttcaaatgctcagagtgattgattcctctacatacatgaaagcggcggtacatgactcgttccaacacatgatgaacctggagctccttgacttatcaggcaacaccactctacatgttttgccaaatttatcaggggcaagtaaactaaaggtgctcatccttgatggttgtgttggcttggaagtagtggagcccaatacccttcctaggtcgttggagtcattcagttttgatggatttggaccagcatccaggtcagaagaagaagaagaagaagaagaagcgcgaccaaacacatatataaatcaagagcatacttgtgtaatttccaatatatctctagagggatgtgagcaactgaagagtttattcttacgtggattgccaaacctcaaggagctgaacctgtcggggacaagaatccaagcactcgacctcgaagctatgcaggtccaacaacttgaaaggctctttctactgggctgtgcgaaccttaccagagtgaaatggattgatccaagcaacccaccactgaagttgctatgcatagacacaagaggaaaagcagcaagagcaatggatggtgtctgtcagggatctcatctcttcacccaacaagagcatgaagcccatccgtctacacatgttgtagctacagatgctaggttccttcgtggcttcagggctggtggatatggaaataccattgcgttcggtagatatgttccatctcagcatttccatttgcatatctctgatactgtcaatgacaaaccagttcttccaagagctaaggagaaagatgccagttctagagatggattaattcctggattcccatatcttgatgtcattgacaaggttttcaacaacgatggtgaagatggatgttcagtgccatattgcaagcatcctgtgcctctcgattgccatatagaaattgccgaaggaggaagcaatttggaaatcgaacaggacctttatggtatgggttccttaatctataatactcaatccttgcatatacatgacaactcgtccatcagtattggtaaccttggagtcaaggggaacaaacaattcaaaaatctcagatggtgtcatgtcacaaggtgccttaagatgcacacggtctttttctgtgatgatgattggaggtatggtaacttcttcccgagcctggagacactctgggtatctcaccttgtacaagcccgctgcatttggagcacaggattacgtttttggaaaccaatagcaaggaccacacctgcagccttatcaaagctacggtgcatacacctgcactcctgccccagactaagacatgtcctcccctggtccttacccacaatggagagcttggaaaccatccacatcacctattgtggtgagctcacacagatcttcccaaagccgggtagttgctggacagaacgtactgaattcccaagcctgagacgaatccatctccaagatctccccatgctgcaggacatatgtgaaagagccatgtcagcacccatgctggagaccatcaagctcagaggctgctggggtatcaaacgtctgccagccatccacgccggccgtccacgcgataagcctccggcggtggtcgactgcgagaaggacgtatgggacaagctggagtggaacggcgacggcatggaagcgagccgcagtctcttcagcccacggcactcacgctactacaagaaggacctgccccggggatcagtcctcaggtga

SEQ ID NO: 21940 - DNA, 1182 bp, Oryza sativa
  Clone ID: PAT_MRT4530_27163C.1
ccgggctgcaggaattcggcacgagggttcgctttctccccacgcattcctcccacccgcggcgctccctgatctggtcaagcccaccaaaatccgctctccagagttggtgggggcggagggggaagggaggggcggcggatgcagacggaggcgagagtggggatggccgccgcaacgatggacagcggcgccgccgccgcggccgctcggaggtactcgacgcagcagcagcagcagcagccgccgccgccgcagctgcaccaccaccagccgcagctcgggacggtgccccacctccttgccggcggcgtcgcgggcgccgtcagcaagacttgtaccgcgcctctcgcccgcctcactattctattccaggtgcaaggaatgcattcagatgtggctaccatgcggaagactagcatatggcgtgaggcatcccgcattgtctacgaagaaggcttccgagcattctggaaaggaaatcttgtaactattgcacaccggttaccttactcctcaattagcttttacacatatgagaggtacaagaacctgctacaaatgatacctggtcttgacaggaatggtggatttggtgcagatgttggtgttagattgataggtggtggtttgtctggaataacagcagcttcgatgacatatcccttggacttagtacggactcgtcttgctgctcagacgaacactgcttactacaggggcatatctcatgctctttacgccatctgcagagacgagggtgtcaaggggctctacaagggccttggtgccactttgctgggagtaggtcccagcatagcaataagcttctgtgtctatgagacattgcgatctcattggcaaatagagaggccatatgattcccctgttctgatcagtttggcttgtggaagtctttcaggaattgcatcctcaactattacatttccgttggatctagtaagacgccgcatgcagttggaaggcgcagctggaagggcccgtgtctaccaaactggactttttggaacatttgggcatatcgttcgcacagaaagtttaagaggattgtatagaggaattttgcccgagtactgcaaagtggtcccaagtgttggcattgtttttatgacgtatgagacgctgaagtccatcctcacggaactggcatcagatgattag

SEQ ID NO: 21941 - DNA, 119 bp, Oryza sativa
  Clone ID: PAT_MRT4530_27164C.1
cttatcacaagtgctcctattacgtgggctgggaaagaaacggccaactgatgaatgtttaagcgccactttggcaaagaatgtaagagcctgagcgggaaggaagcaacgcacacgag

SEQ ID NO: 21942 - DNA, 248 bp, Oryza sativa
  unsure (1)..(248): unsure at all n locations
  Clone ID: PAT_MRT4530_27165C.1
ttctgtttgctctcccccgatgccatccaccgncgccgncggcgccgccgagatggagccggagcccgaccacaccaaaccctccacctccgccgccgccgccggncaccgcaagcacctggccatgctggagcgcctctncaagcgcgctgcctnccccgncccgtcccaggactnccccgtcgcggccttnctctcccgcttcggcgccggcaagctcgccgccgagtccggcctctncgctgccg

SEQ ID NO: 21943 - DNA, 1257 bp, Oryza sativa
  Clone ID: PAT_MRT4530_27166C.1
atggaggtggattcgggtcggaacgggaccggccacggccagatcgctggccccgacgaggagatccccgccggcggagacgcgaagaggtcgcgcgaggagggcggccgcaacaccaccaccacctgccaagaagacgaggacgaggacaacgactactacaacgacgactccaatttcctcgactcctaccgtaccacctgggccaccaactacggcaaaaacgacggatcctcctttgaggacgagatcaaggtgacagaggtcatggggaaccttgagtggccactgcgtgtctacggcatcgttgctgtccgtgactcgctggatcacaagaggaacgtcctcttccgccgcgacagggacgactgccagaccctcacctcgccacaggcaagcatcacattcaacgattcatctctgacgctcactggccctagccgtgccgtcgtgctgatcaaccctgtcatgttcgaggttgacctcaaggtgatcacccacaacaatagtggcttgccgttgtctgaatctgaagaggacgataaggtgctaagctacaacgccttcttctacgacggcgtagctcacatgaacaacactggcttcgcccggagatccgtcgagtcgacggagcactccacaatggagttcgtcttcgcacacctgatattcgccgtggaggccaccatcgcagttcgtgtcatcgaaggctcaaccgatttcagggcccgtctcaccgctcgcaccgctggcatcgatgaagacgtggtgctgctcgactccggtgacggcaaggtggcggtggtcaatgacgatgacgacagtggcccactcgtcgtgctgcagcggcgcgtcgtggtggtggaggagaagggaagcctgatccttggtgtggaggctgcagagattggcagcgaagagattgtgacgagacaggtggacatcaggcctaggcatgcgttgagaagcaggtgtggattcaatcttgggttctgcaggatgtcggtcatgatcgcctgcttcattggcgactcatatgtatccagcattgggggacatcttgcacccagcagcctcttcagtgtagaactgaagcattgtgctggtgccacctctagcaccggcaccggcaccgccagtggttctgcgcctgcgcaagcttgcggcagctgctgcgctccctctggcagggccatcgccattagccggcatcttgttttagctctctgcaagggcaatacaggcttcaaagattag

SEQ ID NO: 21944 - DNA, 837 bp, Oryza sativa
  Clone ID: PAT_MRT4530_27167C.1
gcacgacgcttctcctcttcctcctctctccttctccccgagctgcccctcttctcttccgtcgatgggtcgcaagatcaaagtcaagaagaagaaggcatcgagcaagaaagccgaagcttcatcgtctagggtgccttctgccccagccaaggtatggcaacctggcgtggatacactggaagagggggaggagctccagttcgatcctcaggcttacaattatctccgagggtttaacattggctggccatgcttgagttttgatgttgtgcgggatcaacttggccttgtgcgatctgaattcccacatacattatatggcgttgctggaactcaggccgagagggctacatggaattatatcggcattttcaagatttgcaacataaacgggaagaagcgggaacctataccagcatcagcaattgatggcgacagtgatatggatagtgaaagtagtagtgatgaagaagatgaagcagttaatgaagatacaatgcccattttacatctaaaaaaggtggctcatgcggggtgtgtaaatcgtattcgctctatgaatcaggaaccacatatatgtgcaacatggggagacacaggtcatgttcaggtgtgggacttcagctccttccttaattcgttagcagagtctggagcagttgcacacaacgaagacgacagaatccataatcacgtacctgtgaaaatatttggtagccataaagatgaaggctatgcaattgattggagtccgcttgttactggaagacttgtttctggtgattgcaataaatgcatccacctctgggagccaacttcaaacagttggaatgg

SEQ ID NO: 21945 - DNA, 697 bp, Oryza sativa
  unsure (1)..(697): unsure at all n locations
  Clone ID: PAT_MRT4530_27168C.1
gggcgatgnagggcgggcggcggtcggcgggtgggaagggnnaagggcgctgacggggnatgaccgcagggcggaagggacgggtcgtnncgtcgtcgggcggcgagggnnaggtgtcgtnngggtgcccgaccccgntgnacgggccacttaccnnggccctccaacttctgtctcggcggcgccgacnngccgccgaccttccgcggcgctgccangtgngcccnncagcttacccccccgcgcgnntgatgcgcnngcgacctcgcncnngtcgtccgacccgacnngacgacgccnnatccatccattatatattttctgctccnngcgtcaacttacttcattcnnacctctnncgaccgcgccccgcgcnncgcacgccgcttccgccttccgcgnntgcacctnngaacgacgacgacgagcgcatcatttcgccgnnggcggcggatctgtgccgtgcggcggcggcggcattccctacccgtttccttgtctgcgtgtgnnggctggatgctctgctcgtgtgcctggttcttcgtgcancctctcatgtaacagncgagcagggncctcacttctactactactgttttttgtttttttaacttttcacggtgttcaccacgttaccccgagtgtggatggtttttaattggaacaaggtaataaaatcagttntaattttcctttt

SEQ ID NO: 21946 - DNA, 696 bp, Oryza sativa
  Clone ID: PAT_MRT4530_27169C.1
ccgggctgaggctaggttttctccctctctatgtagctgtatgttgtatggtcgcctcaaaactctttgtaagtgtctttattatgtgctcggtggctaattagccaatcacacactgcggccgccatggcagcaacctttaaccctgtgtgaatggtcagtaagcccacctacattgatccgctttgttgcgtcgattggaggaacgactcttcttgtgcgtgcttccttcattgatgcatcaacgcacactgctatataatatgacctagctctaagttaaatccatcccgtgttgaattcgttttctaggttgcaaataagctgttttagaaatactagtggggatctccatgactcacgtatgcattattcatttagagtggagggttaggggtactgacatgaacaagtgcggtgactcgttagccagtcgcaatatcaaagctctgccgctggtagtaggtggtcacctatatttagttttcgcggtctgcatcttgtgcaatgggcggatggagcaatcggcaaaatcggtccttcaggctgttgttgcgaacactgcttgctgctgctttgctaacagtcaataccaaaacaactctttcaataccaaatcaactctttttttttgtccctttctctaagcaagtcatctcaccacacctgatgttgtgtgttagttgtggtggtagc

SEQ ID NO: 21947 - DNA, 1641 bp, Oryza sativa
  Clone ID: PAT_MRT4530_2716C.1
atgttggcaacagcatttcaactattacagaattggaacaacccagcaggggcaaccaacgttcaagtatctacagtccagcgacagttcgagaagaagctggggttgattcagtgcacagaccagaagcgggttgtcttcgcaactcatcagttggttggaccagctttagaatggtgggatagctacgaagcatcacggccagaaggacataccatcacctgggatgagttttcagccgtgttcaagacatcacatgttcccgtaggaatgatcacactgagaaaacgagagttccgctacctgaagcaagaagatttgaccgtcacagagtacctgcacgagttccatcgtttggctcactatgcaccagaagatgtggaaacggatgaagacaaacaagagaagtttctccaggggttaaaagatgagatcgcagtgcaactactactagaggaatatgaagattttgagaaacttgtggacaaagccatacaactcgaaagtgagcataatcggatgaagaactgcaagagaaggattgttagcatcccagtatttccatgtggtaaccaaagacagcgcaccgagccacttcagatcaccggatcttctgttgcgcatcaagagtttccgcaccaagaagatggacacaatgcagacaacaacattagcaatactaatgatgatgataccaccaacaaccatgcttcttgccccattagtgaccacttgaatcaagcgtgcaatgtcaacatcattcaccaaggtgtcgacgatagtatcaatgatggcacccagaagactctgagaaagactccaatggtgatagcaactatggtaccactgatgccaatcctcatcccgagcctccccgtggtcgtatcacccctccccgccgtcgcccttctctttctcccgcgccgggcgcctccagccgcctctccctcctcgcccgagcgccgtctggccgtgccgtcgccttccctgacatcacagcagcttgctctcccccggcctgccctccgtttcgcgtggagacccccggaggcgtgtccccgccggcaaccggtggcattgtcgccacccaccgcctccagccgcccctgccgcgccgctcaggtgcgggccggccacgccatctcctccctcggcgtcaccgcgtcgacctccaccccggcctgccctcggtttcgtccggagaccgccgtcgcccgcgccggcctctccatccttgtcgtcgccgacgtcccttcggccgccccttcgtcctccccggcttgtcggctcgctgcgccaccaccacctccggcatcgcggcggcaaggtcgcccttggcctcgccttcccttcacccaaacaccaccggtgtccgtcgtcgtcttcaccgttcatcctcgccggctcgtcgtctcgcggcgccgcctccgtcgtcggcatcgtagcggcgtgttccacgccatcctcgtcttcgtgctgccgctccccgtcgttgtcttcgtcctcggctccgcgtcatcaagcctcgtgccggccgtgtctcgccttcgttcaaggatcgccgccgaagtcgttccctcgccgtttgcttccgtcgtccccgagccgtctccgttcccacgcctcgtcgcgtggtggtaa

SEQ ID NO: 21948 - DNA, 436 bp, Oryza sativa
  Clone ID: PAT_MRT4530_27170C.1
ccaaattacagtttctatcttttttccatacaaatgcacaaaacatgaatacactttgatccattcgccatacaactacacatgtgcctgatgtctacaaagtatttacaggtagtgccaagatcctgcaccaaaaggttgaagctagacccttctttgtttgggcgtattgcatatagcaagttgcctatgaacaagttacaccatgcggctgttgcaatttcagtctgattgctgccagctgtcatgaacttgtgccaaaaaatactgcgttacaaaaaccaacgtagaacaatgtaatttggctactaaaagtgccaaccacgcataactgatgctgcaggtagcggatgcattggaagcagacaggaaccttgtgcacgaggctatgaaccctggtcctcttgatttaagagaggctgatatatggttactt

SEQ ID NO: 21949 - DNA, 515 bp, Oryza sativa
  Clone ID: PAT_MRT4530_27171C.1
ggcgataaacagcactggaactaattaagcagtaagttaattgactaattaagtagtttctttatccagatgacagcaccatcatacatacatatcaactatcaaaggcacactacgtacacagcaaacatttctagctctgttttttttttcccctttttaaccttctgttctcactagctaagctactaggtacttacaaacaaaacttgattacctactagatgaggatggtgatgatcgacatcgactggcctaataattcagaagttaggaatttgtaggggagagataggaagccatgttaggagcggcttctcatgttctaagcccctgcaattcctcttgctgaaaagccaaacaaagaagaaagaaaaaaaaaaaaagaagaagagagaataacattttggccccattttgtcatccgatgatctcgtcaggcaaggccacaaacctcgtccgcttctctttcttcatggccgacgttttcctccccgacatcgccgacaccgggc

SEQ ID NO: 21950 - DNA, 372 bp, Oryza sativa
  Clone ID: PAT_MRT4530_27172C.1
aagctttttttttttcatcacaaatattaatcatgccaatgatttcatagatagtttccgcagttcaactttagctttgatctgtatgatatttttcattcagaaccaaagtaatcaaatgtaattcacatcacaggggcgagctggagagctctacggttacagttgggttttcatttgtcacaactgaccgactaattagcagtttagcactacccctttctcccctaaaagaaataaacaaactcatcaaaactgaaactcacagctaaaagactcagccgcaggctgcagcagactaagaaggttcagtttcttcaggacatccacaccctctttcttctcttgtcctcacctgctagaccaaagctt

SEQ ID NO: 21951 - DNA, 1629 bp, Oryza sativa
  Clone ID: PAT_MRT4530_27173C.1
gtcagcgactgactagcacatatttttttagataatgtccatgctgatcaagtatatatactatacatgcataattacatatatatatataaactcctaatttttcgtatgcataatttcaatccgccgcctacagagaccagcaatttctcagagcaacatcacaacgcatgattcccaaatttacacaaatagaaacgaacttcacatgagatcgacggacaggagcagcacggcgagggcagcggcggcgaggcgagcgccggaggcgccgccgtcgcggtggccggcgccgccgtacgggctgaaggcgctgctgggcccgaacgacgagccgctcccgttgaagctccccggcgggccgaaccccgacggcggcgtgccgaacccgcccagcggcggggtgccgaagccgcccgccggcggggtgaagccgccggccggaggggtcgtgccggccgccggcgggctgagtcggtcggtgggctggtgccgaccggcggcgtgaggcccgccggtggggagagcgtcgtcggagggctggctcccggcacgctcgtgttcgagcctccttcctgtgaagacgcatgatcctgagctgggatcggcggtggtggtggtggcggtgccattgaaggagcaggtggcgccggtggacgccatcttctggtagtagtcgttgtaggcgtaggacgccagcgccggcaggttgttctgcttgtagcacgcgccgccgggctggatcgccgcgcagtccgcctgcccgggcccgcacgcccagttcagccccgcctgcagcgccgccgcgtccgcgttctgcagcgccacgcagaacatccccgccgacgtcgccagcgaccgcctctcgccgccgccgacgccgccggaggcctgcagcaggtagctgtggtacaccaccgtcgtcgcgccaccgccgaattcttctgtctccaccggcgccgcgatcaccgggatggcgcccccggggaaccccagcgcgcgcatcgcgccgtaggccgcgtcgaccatggtgtccgtggactccgacggccgggtcttgaggaacagcggcgcgccggtggcgttcaggaaccggaggaggccgcccgccacggcggcggcggcccacgccgggggagcctgcagcgcggcgccggacaccgcgctcgacaccttcacgcggccgtcgaggcgcgacgcggcgagcgcggcgtggaggttggccatcgccgggaggaggaagtacgcgttccccggtgacctggccacaacgtcgtcgccggccaccacgtgcgtgatcctcgtcgccgggaggaaccgcgcgacgttggcggcgacccagagctcggcctcctccgggaactcggccatgtgctcgagctggtcgttgggcacggtgaggatcacctcctcgccggtgttcgccagcgatcgcagcgaccgatggtccccgccgccgatgaacacgcgcgcatgcttcgtctgcttagactgaacaatcttggcgaactccgacggcgagttctccggcgaagggatcgtgttggcgccaacataagtccctgatgcattgcagacaagacagatgagcaaaagtatggttccccgccatcttctgtccaacatcat

SEQ ID NO: 21952 - DNA, 570 bp, Oryza sativa
  Clone ID: PAT_MRT4530_27174C.1
ctagtggatccccgggctgcaggcccatgtgacatggtatcagagcaaagatcccaaaacctagccaccaaatcctgtcatctcgccggcgctccggtggcggcttgccgccggcgagccattttctcgtcctcccgtcatcagtcgtcgtcttcaggttgcagcagtttttgccatcggttgtcttcgttctcttgtgtcaaagcagcagcagctgtttgggattctcttcgtcgagcagtagcactagcagcagcagcagcagcagcagcaatcgcctcctccagttgccgccgtcggcctagccgctggcttcctcgtcctgtcatccatccgtcgtcctctgcgtctcctcgtcctctgccgcgtcttgtcgtcaatcggcgccgtcctcgtcgtctgtctcagatctgttcatcgtcgcacttcgccgcggctcgtcgtcgtccccgcatttccctttgccgttgcggtctccgcccgtcgcggtgcctcgcccacttcaccaccatcgcagtcactgtggcggcgctattcatcgctgccggcaacgctcttcttcaccatcgc

SEQ ID NO: 21953 - DNA, 301 bp, Oryza sativa
  Clone ID: PAT_MRT4530_27175C.1
gtggttttgtgccacaccctggacggacaggctagctcaaaacaatggagactcgggtattggcactcgcaccatggctgctacaggtacctctgcagctggccacagcgtacgatgtcatccaccgaagcctacaggccatacacgcgccgagctcgtgacctgcctgcatggtcagccccgtgctcacgacaggagaccacttacaggcacggaagaactggatcaacaatccaaacgggccactgccatacaagggatgtgaccacctattataccagtacaaccccaagggagctga

SEQ ID NO: 21954 - DNA, 285 bp, Oryza sativa
  Clone ID: PAT_MRT4530_27176C.1
atgggaacgcaaggagaggaattcgctggaggcagccacgagcagtacttcttcgccaatgacgggactccttcaggtaaggcgattgatctccgcagaggagccgctgaacagcgcaaggttgtaaatcaactacagggcaaggagtacaagatcgatctcgtcgccatcgccattccacccgctgccgcctccgccgccgcagtagtccccctccccccttgccttcaccccttcttgttgacgccgagggcagcctccggatgccgtcgtcaccgacatgag

SEQ ID NO: 21955 - DNA, 2604 bp, Oryza sativa
  Clone ID: PAT_MRT4530_27177C.1
atgccgcccacgctcgcgctcctcctcttcctcgccctctcggcggtggccgctgtcggcggcgccggcgacgtgcggcgggtgctgcacgagccgctgttccccatcgagtggacaccgccgccgtccacggcgtcgccgtcgccaccgtccccggacttctcctccgacccctccacgcccgccacccccgtggacaacggcggcccggcgctgctcccgccgccgccgccgaacacagtcgccgccgacgtgtcgtcgtcgcgcagcgggccggacccgcgggcgcgcgggggaggcggcgtctcaccccaaaggcccgcatcggggcgcctcccccgccgccgcggagggcccggcggcacgccaaaggccgccatcgtggtcgcctccgccgccgccgccgcggtcctcgcgctgctcgccttcgcggccgcgttcctcctcacgggccgcctggcgcgccaccccgccgcggccgccgcccaggcgcacaagccgccaggccacgcgcacgctggcgctggctccgtcgcgggggcgcacgccgacgtggcgggctgctcgacggcggtctcgccgtaccgcaaggtgcgcccggagcgcgcgcgccgtggcatgtgccgtgacgtcgacaccgtcccgagcccggagctccggccgctcccgccgctgcggcgaggtgcgtccgcgctgacgcaaggatcgtccgacgaggacgcggcgtactacacgcctgggcagcgctcggctggctccggtggcggtggcggcggcgagggcggcgggacgtggagcgaggcgagcgcgtccagcccgcgcaccaccacagcctcccgccgcagcctccccagcctcaccagcgacttcttccccacgacgccggccgccgcgcccgtgcccgcgcccgccgccgctgctccccctcctgccccacccgcgccacgctcccgtcgaacacctcctcgcacccgcttctccgccggctccggcgccgaaatgaacaaacagatggcctcgccaccctccaacccaccacccgcgccgccgccgcctccaccaccaccatcaagattcaacaacacaaccccaaagcctccaccgccgccgccgccgccggagccaccaactgggccagtctctgctcgccggctgctcagaccgctcccagcagagggccccagcattgtgatacccagggcgccagcaatggcggtgacaaaggacaacgacgccaccgccgccaccatgtcagtgcgaacgcggggtgaagccgccggcgacgagccccggccaaagctgaagccactgcactgggacaaggtccggacgagctccgaccgcgacatggtctgggaccggctcaagttggatgaggatatgatcgaggtgctattcatgaacaattcgacagccgtggcgcctaggatggacaacccgaagaaagtcggcatgccgcaatttaagcaagaggagagagttcttgaccccaagaaggcacagaacattgccatcctgcttcgcgcgctgaatgtcactctcgaggaggttacggatgcgcttttagatggtaatgctgaatgtttgggagctgaacttttggagaccttagtaaagatggctccaaccaaagaggaagaactgaaactgcgagatttcactggggacttatcaaagcttggttcggcagagcgctttcttaaagcagttcttgatataccgttcgccttcaaaagagttgatgttatgctataccgagcaaattttgagaatgaagtgaattatctcaggaaatcttttcaaacgcttgaggcagcttgtgatgatttaaaaggcagtagattgttcttaaaactccttgaagcagtgctgaggacagggaacagaatgaatgttggcacaaaccgaggtgaagccaaagctttcaagcttgacaccctcctcaagcttgcagatgtcaaaggcgccgacggtaaaaccacactgctgcactttgtcgtccaagaaatcgtccggtcagaggacgcaaaatctgaaaaggctccagaaaaccacatcacaaacatcgcgaaagttgaacagctgcgtcgacagggcctaaaagttgtgtctgggttgagcaccgagctaggaaatgtcaagagagcagcaaccatggacttcgacgtgctacacggctacgtatctaagcttgaagccggtcttggaaagatcaagtcagtcctccagctcgagaagcaatgcagccaaggggtgaatttcttcgcgacgatgcgtgaatttctcaaggaagctgagcaggagatcgagcaagtgaggcacgacgagaaggcggcactcggaagagtgaaggagatcactgagtacttccacggtaacgcggtgaaggaggaggcacaccctctgaggatattcatggtggttagggacttcctctcaatgctggatcatgtttgcagggaagtcagccagcaggacaggacatttgttgggtcagcgaggtccttccgtatatcagcagcaaatgcattgccgatcctgaacatgcaagggcagaaaggaggaagagagagtagctctgacggagatagcccgtctatgtag

SEQ ID NO: 21956 - DNA, 2628 bp, Oryza sativa
  Clone ID: PAT_MRT4530_27178C.1
aagtctccaatctgtttgctcctagttagttctacttccttttccactacagaatcaaccacgccttcagtttcctcgctctcggatacttcgaccacgatcaggccagtagagttgggagaaccttcctgattggtgatgatgaactttagggaatcgatatcttaaccactgggctcgactgtgttgtcggctagaaccatatctctcacctcccaccgcgactgagatgacgcccagccacggggcgatcgagaaggcgagatgcataatgagattgttaaaaccgtgtgtgccaatagaattccatcaaatgatatccgcacttctgatttggaggacacgtcctatacatcttatcaaccagatcttaataacgcaaagtaagctcctctaaagcatgttaacgttcttcaaaataaggtcctacgtcttgtggccgggcaagaagcgccagccggaactgatttggtcccacccttgcgattccttttactcggaaagactggtattaaaaagagtgccacagtatactccatttttgatgaaccaaaggttgctaccaatgcattagctcctgctactgaaaggataaggaggattgatggaacaatcaaaggaataagagttacagttatcgacacacctggtttgttgcctcattaccatagacagaggaagaacaggaagattttacatgctgtcaagcgcttcattaaaagatcaccacctgacatcgtcttgtacttcgagcgactcgaccatattaacagtagatactgtgaatacccgctgttgaagctcataactgatatcttgggttcttcgatgtggttcaacactgtccttgtgatgactcactgctcttcatctcctcctgaaggaccagatggttatcctctggaatatgactcctatgcccgttattgcaagaatgtggtgcagcgtcatatccaggtggctgcttctaacacacagatggagaaccctgtagttcttgttgacaatcatccaatgtgccgacggaacaccaaaggtgaaagagttttacctaatgggaaggtatgggtatcagaacttttactgctatgtggggcgaccaagttgttggcagaagcaaattccttgcttaagttccaagatagcttccttctgtcacaagcaaataccagactgccttcactgcctcatcttctttcatcactccttaaacctaatccatcatcaagatcagaagatgttggcattgacatgaccgaagtgtcagatgatgaggatgaatctgatcagctaccgccattccgtgttctgaagaaatctgaatatgaaaaattgtcaaaagaacagagatctgcatatcttgatgaactagactatcgtgaaactctgtacctaaagaaacagtggaaggagggaattaggaggcaaaagcttgttgaagctcaaaatgttgatgcatcaaatgctgttggtgatgattacgaagaaagcgtgtccccagaggttgtgcacatgtcagatatgaaattccgtcaagttttgactctgattatccagtccatcgctaccgttaccttattactgatgatatggtgttcagaccagttttagatccacaaggatgggaccatgatattggatttgatgggatcaattttgaagtatctcaagatttagaaaagaataccactgcatcaattgcggggcagatgagaaaggacaaagaagacctgtatatccaatcagaatgttcagtaagctacagcggtaagaatggccgctccttgatagggagcatgaatatgcaaacagcaaataaggatctggtctgtactgtcaatggggatgccaggttccacaatttgccctggaacactactggaggaggcatttccattactaaattcggtagcaagtattttactggtgccaaattagaggattccatcactgtcgggcgacgagttcagttggtcggcaatgctgggaggatggttggctgcgggcaagtggcacatggaggtggcctggaaatgacattcagggggaaagattaccctgtgagggaagagagcatcacagtcgcagccaccgctctgtcgttcgagaaggagactgtaatcagcaccaatcttcagtcagacttccgaatgggccgcggatcgaaagtctcagtcagcgctaacctaaacagcaggaacctaggccgcttctgcgtcaagactagcacttcagaccattctgagatagccctggtagctgcggttacactgttccagttctttctcaggagaaggacagcatcaactgataaaggtgagcaacagtttgagtttgacacttactcagatgagtaaacgagtaggaccaagaacacaaccatagcatgatgcagatgttcagcgacatcaagattttgggctacttggtgaaagtttgggcgtccttcaaaatctaggattcccacttgtacagaattactgtttgtctgatgtataaatgcagcatttttctagccaagatgggcttctgcctgatgccaactaggctgctagtttttaagaatgtaatgaagttcagttttgacgtcagataacgtttacttcagaaaaaaaaaaaaaaaaaaaa

SEQ ID NO: 21957 - DNA, 472 bp, Oryza sativa
  Clone ID: PAT_MRT4530_27179C.1
cttctgtacgtatacgtcctgctgtcttatcgacacacaccctttgtgggttctatgttacgcgcagttcggccccgtaaccaggcttccggtcatcccgcatcgcagttctagcttacaaaaatggccacttggagctcccgattccgtggcgcggctcaccggagcagccgcgccgtcctacctatatacagtttgagcaataggtcgatggcgttgcgcccccgattgctctaatcattggctttacccgatagcactcgtcctgggctccagctcatctgagggcacacttcggagggaaccagttactagatggttcgattagtcttccgcccctattacccaaggtcagcacgcacgatttgccgtcagtatcgttagcgctccaccacagtacctctggcttcgcccgatcagcatattcacatctttcgggtcccgacaggcgtgtcaactcgaaccttcaaga

SEQ ID NO: 21958 - DNA, 1716 bp, Oryza sativa
  Clone ID: PAT_MRT4530_2717C.1
atggacgaggccgccgccggccaacgcgccagtcctcttcttgccaaggggaagcagaatagtatgatgcaaagattgtggctttaccgatcaagatttggtttttactacagttgggtgtggggatatcgaataagctgttttcgatctactcaatcacattgcggtgtttatgctgacgtctggccttctgtcagaatgatggatcaagctatggtgaagaatcacagagtttattggaagaacaggagccacaggttaaaactaaacaatctggctggagagcaccatcaatcattctggggtacggtattcattactgttggagcttttctgccttctgctccagccttatgcaacacggaatcatgctcatcaatgaatgggactcaacatctagtatacttctcaggcctgtatctcactgctattggttgtggcggagtaaggtctgcgttgcttccgcttggtgcagatcaattcaacaacgatagcagtttagatatacaaaagagaaggaatttcttcagtttattctacatttgtgttatctttggtgtgattacttctggcaccatcgtagtatggattcaggaaaatgtgagctgggctataggatatggtgttgccactgcatgcatagctcttgctctgataggctttttggtgggaacaccaatatttcggcgacatgagccccatggttctccagtaaggagtgttttccaggtcattgttgcctcttttaggaacttggccttggagcttcctgctgatagctctcttctttatgaggtcaggagaaagaacacacagaagagtgaaccaaagttggctcacactgatgatttcagttggtttaattccttagataatcaacttgctaatcctagcttttgcctcagattcttagacaaggctgccattatgtctgatctgagcttggaccaagacagttgcacaagtccatggaggatctgtactgtaactcaagtcgaggaattgaaaatactaatccgtttacttccaatatgggcaaccgggatattcttttgtgttgggatctctcaaatgcacaccaccttcattcagcaggggactgtgatgaacaccaagattggctcactctccattccagcagcttccctgtattcatttgaagtgatatgcgtgacattctgggttttcctggtgaacaaagtcatcataccagtgaccagagcatgctttgcaaacggggcggaaatgacgcagctgcagaggatcggcatcgggcgattcctgatgatattcgccatggcgatcgccgcatttctagagatgaagaggctagagagcgtccaggggggcgatcagcccctgagcatcgcgtggcagctcccgcagtacttcgtcatcgctggggcggagtgcttcaccatcatcactcagctggagttcttccacggtcaggcgccggactccatgaagagcatgctgacggcattcgcgctgctcaccaccgccctcggcaactacttcagctcggcgatcatcaccctcatcgcgagggtgaccgggacatggcatagccctggatggataccagatgatctgaacaaagggcaccttgactactactactggtgtctcgcagccatctcagctgtaaatttcgttgtttacatctattttgccagtaaatacaagttgaagaaggctgtcatccaagtctaa

SEQ ID NO: 21959 - DNA, 426 bp, Oryza sativa
  unsure (1)..(426): unsure at all n locations
  Clone ID: PAT_MRT4530_27180C.1
gggggggaaaaacaattttttctttcccagaaagaaaaggcttcaaggccctttatcatcttatacactggggaatgtaaatgggatgngtccattgggtaacctgtgagggcctttggagtgtatctaatgatccaacaacccaagccggcggaggagagcccccccacacattaaagtacaagcagcccccttttggctgaaacacaacctttccgttgggccaattttattttcctcccaactttttaaccgtgattcctcgccccaagagcttcaaagtatctagccccaccccaaaaaccgaccaacattttgttgggggggatactaacacatttttcaatttttcgggcataccatatataaggccccccctactgcaacgcagttttatgtgatcatcaacccccctttgcgcgcgaa

SEQ ID NO: 21960 - DNA, 115 bp, Oryza sativa
  Clone ID: PAT_MRT4530_27181C.1
ttagtttttagcgagacacattttgtttcgcgtgccggatccaaaccaatcttccctccggctactagaacagaataggacaatgggggcttgctgggcgatgaggaactttgcc

SEQ ID NO: 21961 - DNA, 255 bp, Oryza sativa
  Clone ID: PAT_MRT4530_27182C.1
atgcggatctggcagcggtgtccctaccccctcgccgaaacggcggtgacggccgttccccgtgcggatgcgactgtggtggccctcccctgtgctccccaaacgcggatccggcggcaggagcaggcacgcgtcaacgccggtagcaacaaggccctcccccgcgtggatccggtcacggaggggcagtggaggcgtggggatgacggtggcctcgcgacagtggactatgtcgacaacgtcgttacgatataa

SEQ ID NO: 21962 - DNA, 801 bp, Oryza sativa
  unsure (1)..(801): unsure at all n locations
  Clone ID: PAT_MRT4530_27183C.1
atggagtggggtggagaagggggaaggggccggggttttataggggagagggggaagaaagagaggggaaggaggggccggcctgatgcaacggcggcgcagggctcggggcggcaacggggctcggggcggcccgggcctcggccccggngcaccgcgggcttggcgcccgcgacggtgacaccaggtgaccgcgaccccatgtcaacgggggcgcaggggctcccggcgcaccgtctatctacgtcgaaagctcccggcttaaagtcctgcccgccggcccgtgggcctctgttccagggccacgcgacctccacttatgatcctggcgagggcgggaaggaggggggcttatggcgttgggcggcttggggtcggcaccggggctccgggcgggcgcggggtttggcggtcgggaatggggccgggcgacccgatggcggcgggcgacgtgacggcgatggcggcccggcaacggacgggcgcggcgcagcgcggggctcggcgcgcggctacggtgacacaacggcgtcggcgacgcgatggcgacggggcggcgtggggctcaagggcgacggcgacacgacggcgacggcgccggctcgaggcgcgggcggcggtgcgtggcgctgggctcaagggcgacgggacgcgacggtgatgcggtgcggcagcggcgatgggacggcggcgcgacgatgcgatgggacgggcgcacggcggcaggcgactatggcgacggcgcgcggcggctcggggtgcgaggcggccaggcgtgacgggcggcggcgcgtgggttaa

SEQ ID NO: 21963 - DNA, 336 bp, Oryza sativa
  Clone ID: PAT_MRT4530_27184C.1
cggacgcgtgggtggatggatggtggggttaggattattaagcgcaagatcctgtgcaaggcattccttttttgaaaatcatcctatacctgttaacatcatatacacacagtttccttcggagtaactgaatttctaaaatataatgaaaaatactcaacccaattatgatgatccaattctacaacacatgtccatattacagatattctgttacttgagcagactgtacattgttaccatgtagtttttatttatggatgtttgtacccttaacaggatagtgactatatcgaattgaatatccgggctgttattatttccatgcatgatcat

SEQ ID NO: 21964 - DNA, 2938 bp, Oryza sativa
  Clone ID: PAT_MRT4530_27185C.1
atggctcgccgcgcccgcgacgacgacgacgacgacgaggtggaggaggaggacgaggaggaggcgtacgacctcgaggacgaggaggaggaggaggacgacgaggacgactacgaggcggaggcgaggggcgggggcaaggcctcccgctcctcctcctcccgcggcggcggtggcgggggaggcggggggaggaagcggtcgcgggaggacaacttcattgacgactccgccatcgaggacgacgaggaggatgacgacgacgacgacggcgggggccgcccgaagaagaagggcggcggcggcggggtgcgcgggttcttcgacgaggaggcgcaggtggatgaggacgaggaggaggaggacgacggcgagggcgaggacgatttcatcaatgatgctggggccgaccttccagacgaggatgtcgttaggggctcaaggcatcgttcaatacctatgagggatgaagaagaggatattgatgaaattgaaagacaagtaagggagagatatgcaagatctactcatattgagtatggagaagaagctgctgaagtagaacagcaagctctcttgccatcggtgaaggatccaaagctatggatggtgaaatgtgcgattgggcacgagagggagacagcaatttgtctaatgcaaaagttcattgatagatcagatctccagataaagtcagttgttgcgctagaccatctaaagaattatatttatgttgaagcggagaaggaggcccatgtcaaggaggcttgcaaaggtctacgaaacatttacgcttcagcaaaaataacattagttcctataaaagaaatggcagatgtcctctctgtggagagcaaatctgttgatctttctagggacgcttgggttcgaatgaagctgggtatatataaaggtgaccttgctaaggttgtcgatgttgacaatgtgcgccaaagggttactgtgaagctgatccctagaatagatttacaagctttggctagtaaactggaagggagggaggctgtgaagaagcaggcacttgtcccaccaccacacctggttggtcaaccgatgactccaggcaatgttggaatggacataatgtcgcctataataggtggtgaaggtgaaggtaactggctgttgccagatgttttggttaatgtgttgagggcaggcgatgatggtcctggtgtggtgagggaagttcttgcggatggatcttgtcgcgtcgcccttgggtcatcaggtaatggtgagatcgtgacggttcttccaaccgagctcgaggttattcggccaaagaagagcgacaagatcaagataatgaacggcaatttccgtggatactctggaaagctcataggtatagatggttccgacggcattgtgaagcttgatgacacatacgaagtcaagatcttagatatggtgattttggccaaactggcgagttgagatggatgtatattttgtacgagtccatcgtatagccaaatgtttgtaacagataccctttgtagtcaataaaacgttttgttatttattccattatttagttgtatccagattttgacatcgaaagaaaacttaccttaagaaaaaaacaacgggaataaccagaattggtgattatgagctgcatgatcttgttcttttggacaacttgtcatttggggttattataagggtggaaactgaggcatttcaggttctgaaaggagtaccggatagaccagaagttgtcctagtaaaattaagagaaataaaaagcaagattgatcgccgaacatccgcaaaagatcggtccaacaatatgatttcatctaaggatgttgtccgagtagttgagggagcatgcaagggtatggatacgtcagatccaaggcttggtgctttgagatctccagcaagcattttgcaatcaccgggaaggctgcccccaagaggacctcatatgaactgtataaacttctttcgcccaaactttcttgctccttttgcctgtaatatagacttctcctttaaagcagttggtggaaggtttggaggaggtggtcgtggtggcagagggcatgatgcattggtgggcaaatgtattaaaattaaatctggtccttacaaggggtaccgtggccgtgttaaagaggtgactggcgtgcttgtgcgtgtggagcttgattcgttaatgaagattgtgacagttaaaagagatgatattgctgatacacctactgttgcaacaccattccgtgaacctcgttatccgttgggtggtgaaactccaatgcacccatctcgaacaccgcttcatccttaccagacaccaatgcgggaccctggagggataactgggaagaaggaaatcctgctacttggggaagcagtccagcttaccagccaggaactccaccagctcggccatatgaagcacccacacctggatcagggaaatgctccaagcccatatgtgccttccactcctgtaggtcaaccaatgacaccgaattctgcctcgtaccttcctggtacacctggtggtcaaccgatgactccaggcaatgttggaatggacataatgtcgcctataataggtggtgaaggtgaaggtaactggctgttgccagatgttttggttaatgtgttgagggcaggcgatgatggtcctggtgtggtgagggaagttcttgcggatggatcttgtcgcgtcgcccttgggtcatcaggtaatggtgagatcgtgacggttcttccaaccgagctcgaggttattcggccaaagaagagcgacaagatcaagataatgaacggcaatttccgtggatactctggaaagctcataggtatagatggttccgacggcattgtgaagcttgatgacacatacgaagtcaagatcttagatatggtgattttggccaaactggcgagttga

SEQ ID NO: 21965 - DNA, 303 bp, Oryza sativa
  Clone ID: PAT_MRT4530_27186C.1
ggaaaaaaagggaccccccttttctatggaaaagccaaaggaaccgccaaaacaaccccagggtctatgggaaaaaaaacattgcacagggaattacacagctccttggtgaaatggggaataagggggtggtctaacacacaacgcagtctttgggaggtggcccccgcggcaacaggaaactttttgggggatacattctccaacctgggctgggaaagaaattggtaaaaaaaatgaaacccccccccgcccaaaggaagaggaagcctcagttgaaaaaggtgcaggggccgaaaaacc

SEQ ID NO: 21966 - DNA, 1126 bp, Oryza sativa
  Clone ID: PAT_MRT4530_27187C.1
gtaaactgaggcatttcaggttctgaaaggagtaccggatagaccagaagttgtcctagtaaaattaagagaaataaaaagcaagattgatcgccgaacatccgcaaaagatcggtccaacaatatgatttcatctaaggatgttgtccgagtagttgagggagcatgcaagggaaaacaaggaccagtggaacacatacataaggggatattatttatctatgatagacaccacctcgagcatgcaggctttatttgtgcaaaagcacagtcctgtcttcttgttggtggatcagctggtggacgtcgtggaaatggtatggatacgtcagatccaaggcttggtgctttgagatctccagcaagcattttgcaatcaccgggaaggctgcccccaagaggacctcatatgaactttggtggaaggtttggaggaggtggtcgtggtgtcagagggcatgatgcattggtgggcaaatgtattaaaattaaatctggtccttacaaggggtaccgtggccgtgttaaagaggtgactggcgtgcttgtgcgtgtggagcttgattcgttaatgaagattgtgacagttaaaagagatgatattgctgatacacctactgttgcaacaccattccgtgaacctcgttatccgttgggtggtgaaactccaatgcacccatctcgaacaccgcttcatccttaccagacaccaatgcgggaccctggagcaaccccaatacacgatggcatgcggactcctatgcgtcgtggctgggctcctatgagtcctccgagggataactgggaagaaggaaatcctgctacttggggaagcagtccagcttaccagccaggaactccaccagctcggccatatgaagcacccacacctggatcagggtgggcaaatacgccaggagttagctataatgacgctccaactcccagggagagcaactacggaaatgctccaagcccatatgtgccttccactcctgtaggtcaaccaatgacaccgaattctgcctcggaccttcctggtacacctggtggtcaaccgatgacttcaggcaatggtggaatggacataatgtcgcctataataagtgggtgaagggtgaaaggt

SEQ ID NO: 21967 - DNA, 241 bp, Oryza sativa
  Clone ID: PAT_MRT4530_27188C.1
gcagcacaaggtctgggggagttaattgatgttccaagtgagaaaactcttaacgaggttggtgtgccgattacaggtactctaatgcaaattcttggagatcgattcccgccgcaagtcaagtcagatatcctatcaactctgactatgatcatatctaaaggggggctggcactaaagactctacttgcacaacttgagactacatttgtgaagtgtctgcaagataacaatagatctg

SEQ ID NO: 21968 - DNA, 156 bp, Oryza sativa
  Clone ID: PAT_MRT4530_27189C.1
atgactacaaacttgaaggaacaaagcttgcagcggctgctcaaggaggcagcagcagccgcgacggcggttgatcccgaaggcggtggctatgacctgcagtggtggcggctgctcccgaagtggcctcagggtgaggagtatggaggttcttga

SEQ ID NO: 21969 - DNA, 1006 bp, Oryza sativa
  Clone ID: PAT_MRT4530_2718C.1
atggggctgtggtgtttctcacttctctcatattgtcacgaccggaaataacccaacgggcgttccttacgtgcgtgcattaatccttgtcccaggaggcaaggtacaccaaaagttgatacactgagtacaaccaccgtactcaacaagacacacccacaagtgcagaataaatgcaagggagtacaaaggagttatactataaagggtacgtgacatagtttccaacccatcctagccatagacaagagtaccgacccaatcccacctacggccggaacccccgggacagccgaggggaggagcgcgcggaccgggtccacgggagtggggcccacgcggcagcctctcggtccacggtggaccgggttcacgcggctcacaccggccggcgccgcggcctcgctggcacagccgacgggaggcggcgcgcccgcgcccctatggtcgccggcggcggccataggcacggcggagcggcggccgagagaggggaggggagggggaaacgaaatgggcggtccacggctcaccccggttcgacggcgacggcggaaacggcgaccggagcggagaaaggcggcggcgcggctcgggtagatgaggacggcggcgttccggcggtcggcgaccgaaatggagaggtggacgaggtcggcgaggttgcggcgaacccgaagaaggcgacgccgaagcgggaaaaggtccggggcgacgacggcggcggaccggagctcggcggcgacggcggagagagaggggcgacggcgcgagctcgattccgacggggagagagagcggcgagtggcggaaacggtggagggaggcacggggagcgtttatatagggtcgggagggggagagagaggccggatgagggggaatcggccgcggaagatccggccgccattgatgcgccggcgaagttagggggaaactttccgaatgaatccgagggagagagagagggaaaagtggggggaaagggagagggaatcgcggggag

SEQ ID NO: 21970 - DNA, 669 bp, Oryza sativa
  Clone ID: PAT_MRT4530_27190C.1
atgctgggaaacaagttagtagtgattattggtgccacgggaactggaaaaacaagactctcaattgagatagccaaggcgattggtggggaagtggtaaatgctgacaagatgcaaatttacgatggcctggatattacgacaaacaaggtttctttacaagatcgatgcggcatatctcatcaccttattgcgtccatccctcgcaacgcaggtgattttcctgtgtcattttttcgatctgctgcaaaaaccacaataaactgcattgccagacgtggtcacacaccgattgtggtgggtggatctaactcacttatccatggtctccttgttgacaattttgattcgtctattgtggatccttttgggcaattggaggttagctatcggccgacgcctcgatcgcaatgttgttttctatgggttcatgttaatgaggtgattcttaatgagtatttgaaacatcgtgttgacgacatggttgatgctgggttagttgaggaaattgaagaatattttgacacattatcagttaatggacatgttccatatgtgggattagggaagaccattggtgttccagagctaagcgagtattttactggacgggtgagttgtagtgatgctctttctatgatgaagaccaatacacagattcttgcatga

SEQ ID NO: 21971 - DNA, 604 bp, Oryza sativa
  Clone ID: PAT_MRT4530_27191C.1
aggggcggtgtgcgaaagaaaagggaaaggaaaccgagcggtgatcccgtgcgtgcgattttccgctggtgaccccgcctgctaagttgttgattctgatgcgtcagatctcagcgagataatctggaccgttccatgatgaatgaaagaatgaaagaatgagtaaaagtatttgttgaactatagggtagataatgtacaaagcggcacagagttgtttgaattgttaaatgacaatagaaaatgttttgggattttttgccaatcttgtcattgcaattcactgagtttttaagaaaatgagaaaaaggaagaaaacaggtgttattttatgatttgtaaagctatactgttgttgacatcagggaatatatttctttaagtcataggctcaaatggtttgtttatttggcacctttttctgaactgtaagtttccagtgatgtcacttaggctttccgtcctaatgcaagtcatgtatttgtgacactaagtgactgggaatatgtaattccgtcctaatgcaagtcatgcataggcaaaggtcctctgtagcctagtacatgcttatactaaccatgcatatgatatttcatgtggtcat

SEQ ID NO: 21972 - DNA, 1908 bp, Oryza sativa
  Clone ID: PAT_MRT4530_27192C.1
gcttttttctctctctccgatccggatctccctacccactccggcgagccctcgccgcgtcgcctccacgcgactcgctcccgtatatcggcgcttcccttagccgctgccgccgcccgcctataccaccagctatatccgattgcctcctccccctttcgcgcctctgtcccgcgccccaccaaaccctaggcgcgccgcccatggacatagagaccgacggtcgcttcggcaacaagcgcgtgcaccaccgcctcggcccggccaacggcgccgcctcctcgtccacctccgggaaggtctgcatccactggcgcgccggccgatgcaatcgcttcccctgcccttacctccacagcgagctccccgaggcgacagccaagcgcccgagccaaagcggcggcggcgggaacgtctggaggaatccccactcaggaggtggagggggccgcggcgccggcggcgccgggggcccgaacaaatgggggaggggccccggaggtgcggatggtggcccgaggcacaaggtgcccgatcggccctgcaggtacttcctcgccggcgactgcagctacggggagaagtgccgataccctcactcctactccatgagcgatagcatcacgatgcttactccgctccagggccacgagaaggttgtgacagggattgcactgccggctgggtcagacaagctgtattctgggagtaaggacggaactgtgcgcatgtgggattgccaaactgggcagtgtgctggtgtcatcaatatgggacgtgagatcgggtgcatgatcagtgaggggccatggttatttgttgggattccagatgctgtgaaggtttggaatatgcaaacacaagcggaaatgaaccttactgggccaacggggcaagtctatgcactcgctgttggaaatgagctactctttgccgcaacacaagatggacggattttggcctggagattcagcgctgcaacaaatggttttgaaccagctgcctctcttgttgggcaccagcttgctgtcgtttcattagtagtaggagccatgaggctttactctgcttcaatggacaaaacaattagagtgtgggatttggcaacactgcagtgcatacagactctttctgatcatacaggtgttgttatgtctgtattgtgttgggatcaattcctattatcatgttccttggatcaaacaataaaagtttgggcagctacagaaagtggaagcttggaagtaccatatacacacaaagaggagcatggagcacttgccctaagtggcatgcctgatgcacaatcaaaacctgtgctactatgttcactaaatgacaacactgtccgactatatgacctgccatcgttcagtgataggggcaggattttctcaaaacaggaaataagggcaatacaagttggtcctagtggtttattttttactggggatggaactggtgagctaaaggtgtggcaatgggttattgatggatcccagaccaaatgaatatagtgtactctagattagtttcccccctttatttggtgagggataaagaacacatgcataatgatttgagatgtggttggcggccagttctgtccttgcatgtcctaaatttattctccgagggtatgagattcaattggatcgccttgcagttagattacaagctaagtctcaccatggacgagagtttctgtcctggaatgagtttcacgtgagggcaataatttcttgtaatatgtaaagcactggaagtctggaaccaacaagtacatctgatcactgttacgatgtgctggtagttcagaggatgtatcaatataaaggttttgctcggctgcatttgtattaaggaactcaaattttcacagcaaaacaattgtttgatgttctctct

SEQ ID NO: 21973 - DNA, 240 bp, Oryza sativa
  Clone ID: PAT_MRT4530_27193C.1
atggagcagtctccagcaatgaaattccctttcatctttacagatgaaagtaacagagcattggttggacagagagcctctctcaactggtcatggagactctcgtatggaggaaggattctgtctatttttccggggcagttcaagcaggaagagaaacgggctaaattcaagaggaacttacaaaaactagcagctatttttattgttcgggacctgtttttacctagcttaccttag

SEQ ID NO: 21974 - DNA, 291 bp, Oryza sativa
  Clone ID: PAT_MRT4530_27194C.1
ctagtgggaccccgtcacccctaatccgatcgagaaggggcgcagccagtgacgggaagcttcaccgccacgccacgcctcatcgacgccgccgacggtcgtccccgccacaaccaccgacgccatcacgaccaccgtcgtcgccgtccacgacaagcccgcgacgacaacgacgatggccggcacttcttcatcctccaacaccacccgactagatctaaacctaggcgacggacgtctgcgccgactaggtgcgcccactgtcgcagcctgccccagcccgctccacat

SEQ ID NO: 21975 - DNA, 233 bp, Oryza sativa
  Clone ID: PAT_MRT4530_27195C.1
gggggaaaccccccaaatacccgattggttaatttcactggaaaaaggcggggtacattacataacaaaaattttttcgttgatacccccataggcgccgaaaggaccaagtgtttaattaaatgataaaacacgggtttaatttaggaataattaggacacacccaaaccacatttatttgggggggttttattggggaccaaataaggggggggacccccccgggggaaag

SEQ ID NO: 21976 - DNA, 537 bp, Oryza sativa
  Clone ID: PAT_MRT4530_27196C.1
aacttggggcagtactcctcccgttcggcttatcgtgtcctcttcttcggaagaactcgcttccaacacgcgccgatttggaaatctttcgcgccccctcggtgccgttacttcctttggctggtcgcgttgaaccgttgttggacggcggaccacctctaaagtcgtggattgcctcacccggaccgctgcccactctgtgatcaaggtcccgaaacaattgatcatctcttggtcgcttgcccggaatcgcggcaactttggtggatcgctcttagtgttatcggccatgccgaatgcctcccgctcaatgagcggtccttccacggctggttgtgtgacagccgcaagaagttgaccaaggatcatcgccggggtttcgacaccatcgccacgctggcagcttggacaatttggaaggaaagaaacaatcgggtctttaaccaagaaagcagaacctaaccggagatcactagggcgatgtcaggggaagcggacctttggcggatggctagggtagccattccggtcatggta

SEQ ID NO: 21977 - DNA, 480 bp, Oryza sativa
  Clone ID: PAT_MRT4530_27197C.1
atggtggtcagagcttttgaagaggctgctgatatactgaaggaggaggaggcggtggtggcgggaagaatggagacagcaagggcaggcacaagtgttggtgctagatctggactcgggatcactgtgagaaccaaggaagaggaaaacggagcttcgctgactacgccaccccccgtggccgcaactattgtggtagccgagggggacaccagcaagcaggagatcatgcaggacccaaaggacatgctctccaaggtcaaccctatggcaaaggagattcgggatctggaggatgtcaccaccgtgttgctcaccagtgttgtctgcaaccatatcggcccagtttcttttacggtgtttgcgaggtacttagaggtacttggagatagaataatctataccattgatcaagtgaagggcaagggtttgaacctgttcaccggagggagacagagggagaagcgccggtatggttaa

SEQ ID NO: 21978 - DNA, 444 bp, Oryza sativa
  Clone ID: PAT_MRT4530_27198C.1
atgccgttctccctgttactcttcaccggcgccgtcgctggagtcgcgatgttggtcctcccttggtggtgcgccgtcggcgaggacgacgacacctacatcgacggcgtcgtcgatgactcttacgactctgattcctggtacacagattatagcgacgaagacgacgacgacgttggcggcgacaataaggacggtttaacgccagaccagctgcggcggctgccgtggttcgcctactgcggcggcggcggcaggagctgcagcatatgcctggaggagatgcgcgacggcgagaggtgccggcggccgggtcgctgccggcacgcattccacgccgcctgcgtcgacgagtggctgacgacgagacgcacctgcccgtgctgccgtgagctcgtcctggtccctccggctgcaaggctagctgctcccacgtatcggtag

SEQ ID NO: 21979 - DNA, 435 bp, Oryza sativa
  Clone ID: PAT_MRT4530_27199C.1
caagaaaagagaaacatttatatactaatctcagataataaccaccatctttccccccacggcagacatctctcaaatttgagatgacttccagcttaaggccaaaactttacatgagttgtgcagaaatttacagtgcagagtatgaactttcatgtcataaccctatgtcttgaaaagcatatcactgtttcctgcaaaataacacttacgtccagaactctgttctttgcagttcaatagttctgccccctggatgtaactacttgtcagcacacctgagtggcatcattgcagatacatagtattcaagatagtttctccagaggacgcaaacatcgatctgtcccgcaaaacatcaggaacgcaagagcgggcagccatcattgtcggtcccaaatcgaagatatcttattctggctgctcatctcaggc

SEQ ID NO: 21980 - DNA, 338 bp, Oryza sativa
  Clone ID: PAT_MRT4530_2719C.1
gagcaaaaataatataatgagggcacataatatacacaagaaaatcaaatgcgatgtggtaagcactggactgtcataaaacgagcaatgtagcaaagctataacagataagcaataaattgggcaagaccattctgagcgtatgataaacaaactaaatctggcataaacctactggaaaaacaccaatgcggttcagtgcgctgacgttttccaatagagaagtagaccgtcttaggcaccacgagccacggtctagaacggcccaagagcatgacatgacacacggcacataacatgtgtacaaaccattctcttctgggagtgagatatgatca

SEQ ID NO: 21981 - DNA, 319 bp, Oryza sativa
  Clone ID: PAT_MRT4530_271C.1
ggccattgcatagtttgagaggacggttgccggcttggaagggtgacatttgactaggaagagctttaggggagggaaaaggaaaaccctttctctctctctctctcagcctttctctccctctctcttcttcttcttccttgcaccaccgtgctactcaccgtcgcatcatccactgatccggccggcgatatcacctccatccatgcatcacattacggtcggcgtctgccgctgccactaccaacgcgggtgagatctcaccggtgaagtgcccgccggcaggatgccaggaggagggcccctcaatccccaccag

SEQ ID NO: 21982 - DNA, 277 bp, Oryza sativa
  Clone ID: PAT_MRT4530_27200C.1
gtcagccaactcgcttgacattgtggggactgtatactgtaggtttaattgtcagaagctaaagctaccagagggctgtgggcacgaatatcaaatgcattatggatcaattggttgccggaggggcaactttgggatatgcacaggctggtaaggataagcgaggcattgcttgcatcggcaatggaagctttcatgtgacggcgcaagaagtgtcgacaatgctttattgggggcagaaaagcatcattttttctcatcaaccaatgaagggtac

SEQ ID NO: 21983 - DNA, 477 bp, Oryza sativa
  Clone ID: PAT_MRT4530_27201C.1
gacaaatacagcgtcaccctgaacatttgaccgtactagaggaccgcatacaggaacatcattcacaaagatgttctcattgctattgctcaatgcactacttctgtacatgttgcagaaaaaagggctaggaaaaagaaggctctgaagggatcggatgtaactgctactaaagagaaatgcttaccccttctaaagagcactatagggggcccagctgtatatatccaatgccctatcttgataagaagtgaatgctaaatgagacacagaccagtatgtcaacagctagtactgagggttcaacactcaaacttataatacattaacagggatgaagtcatcaactgagaggtacacatgaatcgatatggtacactatagtttcattcaaaatggtcacaaacgcgatatatacatgctcttaacgggccatagagatatggtactgaccataaccactagggtgcacagaat

SEQ ID NO: 21984 - DNA, 171 bp, Oryza sativa
  Clone ID: PAT_MRT4530_27202C.1
atggcccgcctgcttttatgtctggttgcttgtcttcctcacttcctggctcttgtggctactccaaagacttcaagagatgaacagcggaagcgactgaaagagcagaccattggtgacatctcagtcgcaggaacagagctcaatggaggccattctgggctacaatga

SEQ ID NO: 21985 - DNA, 213 bp, Oryza sativa
  Clone ID: PAT_MRT4530_27203C.1
cacggattgcatatgatggtaaaaggatttttattttcatggaccgccatgagaacgacggggatgtggtcaaacgtgggttttacccccacccgcgtggggaaccaccctacaaacaccaaaatgcaggcgaagcacctgaaaactctaacagcacagaccaaggctagtgaccataatagagcgctccatggcgtagacgcgaagaatgag

SEQ ID NO: 21986 - DNA, 1385 bp, Oryza sativa
  Clone ID: PAT_MRT4530_27204C.1
atggcggtggcggcggtggccagatgcggacctccgacgcgcgcggcggacggcgcgaagacggcgaacggtggagccgtgaaggtaatggccgccgccagccagtggaccaccttcttggtccccctacgacctgcgcgcgtcgatctactaccggggaacgccggatgcaggccgtcgtggctggatctaccagcgctggtgtacgacggcacgaagttttgcaatggcgtcgtgcttgggacaataggagttgttttatcttccaatgttctaagtcactggaacaagaacgacatggcagagaggataagaagagaaggggctagcgtgaaggttctcaaggaggtgaccaagacgaggaaggtgcctgtgctggaggtgcccttggcgttgaccaagatcaagaaggcaaatcttgagacatcctcattctttgagactcttagagggacagagttcccggtcaggacatggatgcgcatctttgtgaaggttagaaatagatgcatgattgcttgcaagagcagttgatttggtttttctaaaaggacttttttttgcttgcttacttgcttagttcgttgggtaaaaatgtcaggatcagctgaagaaagggtagtgtacaatgtttttatgctgcatgagctccttaattaatcatgttcttcattatttgtcatggtagtgaaatagtgatgatgctttagcagcccagttgccatgggcattcctgacattgagaactaactgttacagtgtattactgcaccctgtttgctgaaccctgcaagcgcccctggtccgaaactgtttgtgatagtgtgatggccatgcgatattaaccaaaacaagaaaatgacatacctaattttaaattgttgtgtaaggctttattttagtcggaataaacaaatgtttggaaccgtggtctgctatatattatgtgtttatcatgcccaactcctaaacctgtatttgaactaaatgaatttgtattcttgtattgtttatcaccacagaaagaggattgagaatggtgtgtatttgtgtccttaacctttaaggggagactcatgaaagaagaaaaagattctagactttatggcctttctgtcccctcaatttctgccattgtttggatgccatgggaccatcaccagttcaaagctactgacagtgctctttgtagtgggtccagacgttaccattgtatatatgtatctatttacatgtctaacttgatgcttatagagattatatttgttgtttatgtattttttttgtgagttattcccatatcaaactaatttagttgcgactttggagttgctggtatagtagagaattgaatggctctgctttttgtaaaaaaaaaaaaaaaa

SEQ ID NO: 21987 - DNA, 310 bp, Oryza sativa
  Clone ID: PAT_MRT4530_27205C.1
cccacgcgtccgcccacgcgttcgcccacgcgtgcggctactgacagtgctctttgtagtggttccagacgttaccattgtatatatgtatctatgtacatgtctaacttgatgcttatagagattatatttgttgattatgtattttatttgagagttattcccatatcaaactaatttagttgcgactctggagctgctggtatagtagagaattgaatggctctgctttttgtgagtgcaagcaattgtgttctctgggtttatactaattctcgaacttgatgatgttgggccggtcgttcatgac

SEQ ID NO: 21988 - DNA, 370 bp, Oryza sativa
  Clone ID: PAT_MRT4530_27206C.1
gggatattaaagatagcgggaaaaataaaaaaaaaccctttcttttttcatgaaacccaaggtgatacctgggcttatttttaacttccgaacctttttttgataaaagccacttcatgagccaaaaatggttgaaaaaagccctggggggctataaatgatcggggtgcaacaatatttcgagggggggttaaaaaccaaaaaagcttggtaatagagccaaatttcttgtcattgggagaaaacccaactgggggggatgctcccaaagggagggttttttcctatggggaacaaatgatgaactttgggggttaaagaaaaaccttaatgtttaaaaaaaaaaaaaaaaccaaagggtggggcaaaa

SEQ ID NO: 21989 - DNA, 390 bp, Oryza sativa
  Clone ID: PAT_MRT4530_27207C.1
ggcagttttggagggcggctacgccgggaggggggatggcggtggcggcggtggccagatgcggacctccgacgcgcgcggcggacggcgcgaagacggcgaacgttttatcttccaatgttctaagtcactggaacaagaacgacatggcagagaggataagaagagaaggggtgtccttttctctgaaaagataagaatagctctcttcaagtatgttcaagtaggctagcgtgaaggttctcaaggaggtgaccaagacgaggaaggtgcctgtgctggaagtgcccttggcgttgaccaagatcaagaaagcaaatcttgagacatccttattctttgagactcttagaaggacagagttcccggtcaagacatggatgcgcattt

SEQ ID NO: 21990 - DNA, 123 bp, Oryza sativa
  Clone ID: PAT_MRT4530_27208C.1
atggctctggcggctctggatcgccaccccgagggcacacagttgccggctaccagggggcagtcagaccagcctatacccaccggtcagaccgaccgggacacaccggtcattaccccttga

SEQ ID NO: 21991 - DNA, 325 bp, Oryza sativa
  Clone ID: PAT_MRT4530_27209C.1
gcggcggtccaaataaggtggtgggaccaaacagagggcacaaataaaaccttggaaattacaggttccaaaatgtaattatgggatggggatgattatttattcccacacccggcattcagtgaactttttactggggctggaagctgggtggatgctttttggtgaattcctcctcaatacatgtctttgcttttaagctaaggttcaatacaaaagtgaaaccctatgtttggcgattttattttggggaggtcccactgttgttgctcttttccatttgagggggtggccctttttgttttgctttccacttgggggggtt

SEQ ID NO: 21992 - DNA, 480 bp, Oryza sativa
  Clone ID: PAT_MRT4530_2720C.1
atggtcaccgccggcgaccaccggcgcggcggagcggcgcccgagagagcggagaggagagggaagcgaaagggcggtcttcggctcaccccgggtcgacggcgacgacgggaacggcggccgaagcggaggaaggcgtcggcgcggttcgggacggcgagggcgacggtgctccggcggtcggcgagcgaagcggaggggtggccgaggtcgacggggacgcggcgaagccgatggagggttgaacctttagctgacttcgactgggttgcggcacttgaagatggggcttcagttccagaacttcgcatagttcatatctttggagtcaacctcatacaagttacccgcttcatgtcatgtgtcgagatcagctcgtcattactaagataccatgcttgtcatttgcttctaactcgccaccaactgcctcatattagcttccctggtctccgggtgatagctacttctgctatttga

SEQ ID NO: 21993 - DNA, 207 bp, Oryza sativa
  Clone ID: PAT_MRT4530_27210C.1
atggattccaaggccaacgtgcaaggcatccggccgaccaacccggcctggatctctctatcagccgggatcctggtgaacggcgatggcggagttgtggacggcaagggcgaagcccatgcatcatgcatggtcgccgcggcggacggcaagggtgccaggatgctagagtttgcatgctgcaggtcaggtccattaagagattaa

SEQ ID NO: 21994 - DNA, 333 bp, Oryza sativa
  Clone ID: PAT_MRT4530_27211C.1
atggcgtcgtcctcctcgtcgtcgtcgtccaaggctttgcttgttttcgctctcctgctcgctgctgctttcgtcgcctctgccgaacaaactcatgacgacggtgacaatccgccggagtcgccggaccacgaagacccaccgccctcccctgaatactacgacccaccgccatcgccggactactatgacccgccgcactcaccggactactacgacccgccgccatcaccggactactacgacccgccaccgtcgccgtactacggcggaggcggtggatatggcaaaccaccgccgccgccgccatgctgcccatgcaagggtgtctag

SEQ ID NO: 21995 - DNA, 370 bp, Oryza sativa
  unsure (1)..(370): unsure at all n locations
  Clone ID: PAT_MRT4530_27212C.1
ctcggttgcagaagcttggggtgtatggtgtcataaccctgaatgaaccatttgagactttggtgccatcgtcgatgtatcagagtctgatgaaaggttgttggcttactgcaaattcagttatgttcaattggaagtttcttatgacacggaatgctcctctgctgaaattttcagtctcgtgggattgatcaccttgttattcctacaagagattatatgtttgctccctcacttgtggatattagtcgagctgttgatttcatacatagaaatgcatcttgtgggaggatgacatacatccattgcaaagctggaaggggcaggagtacaactattgtctngtgtaatctggtagtcctaattaccc

SEQ ID NO: 21996 - DNA, 383 bp, Oryza sativa
  Clone ID: PAT_MRT4530_27213C.1
tttgttttttttttttttttggtttttttttttttttttttttttttttttttttttttttttttgggaaaaaacaggggccccggaagggacttttaaactttttggggcaaccataagggagccttaacaggttgtttaggactaccaactcccaagaccggcgacaggggaaaaaaaaggcaaaagatcgacaacctggggggttgggactaaaggggttatgccctgggtctccccgccggaggggggaaactcagaaccggggggggcccccggaccatgccaaaaaagggttgccttaagagaggaaacggcgtcgaactaggcgttgcgcagcgccgggaagctcctgaaggcggaagcccccgccccgggggggg

SEQ ID NO: 21997 - DNA, 156 bp, Oryza sativa
  Clone ID: PAT_MRT4530_27214C.1
atggtggaccaaattggcagtgggaatttgatgtttggagtcgtgaacaagagaaagaatggatttttgtggctcgagtccttgaaggtgactggcggtgatactctggcgatcactgttccggtgaccaaagttctggagattaagccggagtaa

SEQ ID NO: 21998 - DNA, 1091 bp, Oryza sativa
  Clone ID: PAT_MRT4530_27215C.1
ataaaattgattttagctacttttgaaaaattatctagcttgaagataaattttcacaagagtgaattattttgctttggccaagcaaagaaatgtcatgagcaatattcaaatatttttgggtgcaaactaggagattttcatgttatatatcttggcattactatgtattttagaaagcttagtaataaagattggttaacaattgaacaaagaatttagaaaaaaacttagtagttggaagggtaaacatatgtttgtaggtgggagattggttttgattaactctgtgttatcaagtttagttatgtttatgatttcgtgttttgagattccaaaagggttcttcaaaaaaatgattattatagatcccattttttttggcaaggtgatgaacataaaaagagaaatatagattgacgagatgggaaattatttgtcagtctaaatatcaaggggaacttggtgttcataatttacaaatccaaaaccaatgttttttaagtaagtggttgtttaaattaataaataaataaggtgtgtgacaagatattttggaaaggaaatattttgtactaaatctataactcaagtcaagaggaaataaggggattcccattttttgtcgggtttgatgaaggttaaaagttcttttctaaatatgggtttttgggttattaataatggtgagcatgttagatctgggatgataagtgattaggtaattcatctttaaaggacaaatacccatctttatattctatagttagaaagaaaaatacatcgattgcaagggttatgagtgctgttttaatgtatcttttatgagagcgttagttggtcaaaacttgattagatggcacaatttgtgtgcttcaattgtgcatgttaacttaacagaggaggatgatatatttagatggaatcctcgtcaaagtggtcaattttcagttcgaagtatgtatttggctctaattaataatgggtatatagacagaaataagtttatttggaaacttaagctgcctcttaagattaagatttttatgtggctaaaaaatctggatttccttgtcgctttagaattggtg

SEQ ID NO: 21999 - DNA, 435 bp, Oryza sativa
  Clone ID: PAT_MRT4530_27216C.1
atgacgccggcggaggaagataaaagggaaaaaagaaggaagaaagggggcttgccccttgcctctttgggaaaagaaagagggagagagagcgatgaggcagatggaggaggagctctgcctccattccttggaagcatgcgcgtggagtggcgggaccgggtcgatgatgacggtgatgacggcggggcggtttggaagggcgcggctacagggcggcaggcgcgggctcaggcgcggcaggcactgacggcggcggcgactggccgctgtgtgatatttgtccggcagcaagagagcaagtatgcaacgaaatctagtgatttaagcacccgataccttccattcgtactattcatatacgtcgccattgtgctggacttcaaagagagcacatgtgtctattgtgcgggaatagggcatataaccgtatga

SEQ ID NO: 22000 - DNA, 627 bp, Oryza sativa
  Clone ID: PAT_MRT4530_27217C.1
atggcgcgaggcaaggtgcagctccgtcgcatcgagaacccggttcaccgtcaggtcaccttctgcaagcgccgtgccggcctgctgaagaaggccagggagctctccatcctctgcgaggccgacatcggcatcatcatcttctccgcccacggcaagctctacgacctcgccaccaccggaaccatggaggagctgatcgagaggtacaagagtgctagtggcgaacaggccaacgcctgcggcgaccagagaatggacccaaaacaggaggcaatggtgctcaaacaagaaatcaatctactgcagaagggcctgaggtacatctatgggaacagggcaaatgaacacatgactgttgaagagctgaatgccctagagaggtacttagagatatggatgtacaacattcgctccgcaaaggaaggcatgttgaaagctgctaacgaaattctccaagaaaagatagtagaacagaatggtctgatcgacgtaggcatgatggtagcagatcaacagaatgggcattttagtacagtcccactgttagaagagatcactaacccactgactatactgagtggctattctacttgtaggggctcggagatgggctattccttctaa

SEQ ID NO: 22001 - DNA, 406 bp, Oryza sativa
  unsure (1)..(406): unsure at all n locations
  Clone ID: PAT_MRT4530_27218C.1
cctttggctgcaggattcgccctntggaaaaccaacaccgaacttcggtgggtttgtttttgttnnaggtgntgaacttnggntgcccntttaactttaattaanntncnttttaggccccggcggtngnataaaancctaaggcaaaacccttttggggntnnccgncccnaccattgccaacacntccggnctccttcccccttttgaaaaattgcnnccgaatccgttgtttcctcctccccnccaagaatgtttggcctggttacnaagtttgggtttgccaagattaagtctctctttaaaacatctccaagatatttgcccncttttcnccnntaaaaccccgtnttnttantngtgttttctctnattttccccataaattngataactctcttctctt

SEQ ID NO: 22002 - DNA, 276 bp, Oryza sativa
  Clone ID: PAT_MRT4530_27219C.1
atggcgatggcgagggggaggaaggagagggcgccgcgagggtacgtgccgatcctgatcggcgggcagggggaggagagggagaggatcctggtgcgcacggagcagctcaagcagccgcacttcctcgcgctgctcgacctcgcggtgcaggagttcggctacgagcagcgggggattctctgcatcccctgcaccaccaaggccttccgttccatcgtcggtgcagccacgcccaccgccgccgccgtcgccggcggcgagatcaagtcatga

SEQ ID NO: 22003 - DNA, 675 bp, Oryza sativa
  Clone ID: PAT_MRT4530_2721C.1
atgaagaacatcttcgccttgcattggagaagctacgagaacatcaactgttgtgttctgatgcaagatgggaaggtggttgcctatgcatctcgtcagttacgtccgcatgagaagaactaccctactcatgatcttgaattagctgcagtagttcatgcgttgaagatttggcgtcattatctcttcggtactcgtacggaggtgtataccgatcacaagagtttaaagtatatctttactcaaccagatctgaacatgagacaaaggagatggttggaattaattaaggattatgacatgagaattcattatcacccaggaaaggctaatgttgtagcagacgctcttagcaggaaaggctattgcaatgctacagaaggacgacagttgccattggaattatgcaaggaatttgaaagattaaatttgggaattgtcagtagaggtttcgttgcagccttagaagcaaagcccactctaattgatcaagttagagaagcccaaattaatgatcctgatattcaagaaattaagaagaatatgagaagaggaaaagctatcggtttcttggaggacgagcaaggaactgtatggttaggtgagagaatttgtgtccctgatgtcacgcccggaatttctatccaaaattccaaacgcttacatgtgtgttaa

SEQ ID NO: 22004 - DNA, 1192 bp, Oryza sativa
  Clone ID: PAT_MRT4530_27220C.1
caagagatagggagaaggggaagaggaagaaggaggaggtgtagggagaaaccggagcaacctcgaagctagtccaaactagtgggaggttgtctttccggcaagccggagcccggagctatcgatcatcaagctttctaccccgaccgacgaggaagaagacgactgatcaattgatcaaaccgatctctccatagctaggtagacaggaggagaggaggaagaagagggggagaggagacttatcttgatcgatggcgcgaggcaaggtgcagctccgtcgcatcgagaacccggttcaccgtcaggtcaccttctgcaagcgccgtgccggcctgctgaagaaggccagggagctctccatcctctgcgaggccgacatcggcatcatcatcttctccgcccacggcaagctctacgacctcgccaccaccggaaccatggaggagctgatcgagaggtacaagagtgctagtggcgaacaggccaacgcctgcggcgaccagagaatggacccaaaacaggaggcaatggtgctcaaacaagaaatcaatctactgcagaagggcctgaggtacatctatgggaacagggcaaatgaacacatgactgttgaagagctgaatgccctagagaggtacttagagatatggatgtacaacattcgctccgcaaagatgcagataatgatccaagagatccaagcactaaagagcaaggaaggcatgttgaaagctgctaacgaaattctccaagaaaagatagtagaacagaatggtctgatcgacgtaggcatgatggtagcagatcaacagaatgggcattttagtacagtcccactgttagaagagatcactaacccactgactatactgagtggctattctacttgtaggggctcggagaatgggctattccttctaacctaataatggcctgggggatacttgtgttcattactaagggggaatatgggtaataatgcttggggtgctggttgctttgcttttctgatgtaccttatttagacaagttcccgcaggaagtgtcttttagtattgtatttgtcttgggctgtggtgctttgtttttccctaaagaactcttgaggagctctgttgttgaaccatttcaagtaattgagactattgtttcctggaacgtttaaaaaaaaaaaaaaaaaaaaaaaaaa

SEQ ID NO: 22005 - DNA, 626 bp, Oryza sativa
  unsure (1)..(626): unsure at all n locations
  Clone ID: PAT_MRT4530_27221C.1
aanatagtccgtgagtggggatgggngnacatcaacggacgtggcctgccccgaccggagatgccccacacagttatccccccagattggtgggctggtgcgtattgttaatggagcttgaccggggatctaatgcaaggttgctttcagtggacacagagagattttgtgccaaagtgcaggttgagaagggcctctatgatgggaaggttcttaaggccattgagtacgaggacatttgcaagatttttcactgagatatcatggaattccatcttatttctggagcattactgctgtcaaatgtcaaacatatgactatgcaagccaatgtgttggacctttctgttagttgcctgaccatgtatgtgcttgtgctagaatttgttctatcgaatatctttcacatagttgatgtttctactttctagttcttcctagctgccgaaagaactctgtgtaagaaaatggtctgatgctttcttgcttgtttggtgattagaatgatatgacattttttcaacagggaatctcgtccataagtggttctgataaaactggttaggttacccaataaaatttactccgccagttccgttttttttttaaaaaaaaaaaaaaaaaaa

SEQ ID NO: 22006 - DNA, 549 bp, Oryza sativa
  Clone ID: PAT_MRT4530_27222C.1
atggggagcggcggcggcgtgcgaccgccggcgacggcaagcggcggcggatggcgcataggctggcggcggcggccgaaggcgatggcgagcgcagagagcggcggcacgaggggaggagaggagctacgagtagggaaaatgaccacagcggatgccattgacgaccggaggcggaggggagggacaaactcaccagcgtgcgaggagaaggggactccagtgggtttttgcggcaatcgagtggcggctgaagtgcgggcggactcggtgagcacgacggcggcgatggcgcggcgcggcggtggctctagcggcggcggcgcgcggcaggaggtgaagggggaggcggacgtggccaaggaggtggccgaaatcaccggtgacgtgggggcggagagagagagaatggggggtgggattcgaaatcgaatcccgcccattctcgggcagcgtggggaggtgggggcgccggcggttggagctcagctccaaccggctggaggtaggggaaggactgacaggtggaccccacctgtcagcgcctga

SEQ ID NO: 22007 - DNA, 1553 bp, Oryza sativa
  Clone ID: PAT_MRT4530_27223C.1
ttaatcaatcccagtgtaagaccgtagagacatggagtcctggacaacgttgaatggaattttcatggtcgttcggctctcagagtctgacaagaccttatctgctctgggcgtccctagccaaaattcccgtaggtctcttggaggcttgtcagaatggcgtaaagggtcaataggttcgatttcaagagtaggtgctatcgtggtaagggatctctctaccacttgaagagaatccagagtaatagatggacgacattctcgtgacctgtgagaactgcctcctgaagatgaacttttaggtggtgagagatcgctacaatcaactggtcgagaaccaggtgtagacgtatctcgatcacctgaagatgaattttcaggtggtcgagaaccaggtataggcgtatctcgatcaccgaaagatgaaattttaggtggtgagagatcgctacaatctactggtcgagaactaggtgtagacgtatctcgatcacccgaagacgaattttcaggtggtgagagatcgctacaatctactagtcgagaaccaagtgtagacgtatctcgatcacccgaagacgaatttttaggcggtaagagatcgctacaatctactggtcgagaaccgggtgtaggcatatctcgatcacccgaagatgaattttcaggtggtgagagatcgctacaatcttctggtcgagaactaggtgttggcgtatctcgatcacctgaagatgaagttttaggtagtgagaaatcgctacgatctactggtcgaggatcaggtataggtgtatctcgatcaccttcgtagatacatgctggatgtattcttgccgggttggatctccttggtccaaagtagttgaagtatctctcatcaaaaaatccatagtgacgcggccatgacgaagcttgagatgacgagggtcccgatccgccagataatgcacttcggttgggttggatcccccctatagccgaagtcgtcgagtagctcgttattggagaatccatcttttgaacccatctcgtcgaaatcttgaagcaccaaaattcccctacctggcgcgccactgtcgacgttagatgtcccccttctggtgtttgcatagtatggagatcgtcggtgctaggatatacgcgagacagtacaatatgtggggtagcctatctaactgttgtccacatggcggtctaaaggtctgactagtagtcgacaacagggtagtcttcctcctcgaatccgtgcccggcgatatcagagaaaaagctttcgtctctactgacagtatccagagacaccataggggactagccgtgtctatccctgaagtcgatattcggcgtcttgtcttggtgtatgttgtcttgtatgttgtggcctctgttgttccctccagtctatggtgggtgtcaattgaggtggtcgtgttgtccgtccccctctcctcctagagggccttgtatttatacccataggtgtccctttgttcaagtagaactagggaaaccaatatggatataatccgaatagttcttgtcgtttccat

SEQ ID NO: 22008 - DNA, 568 bp, Oryza sativa
  Clone ID: PAT_MRT4530_27224C.1
gatcctatttcttatccatcgctccatctcgccgacacttggcaatgcatggcggtggcgagagcgcgcaccggctgctacaagtgctggtcgtgacggccacatggggcagtgactgcctctacgagcccgccgacgacgatgctgcatacaacgacgaacctaaccctaacccctacacaaaacccaggggctgccgcttacccccttactccgagtacgacggtcctgaaaagagccacggcggagggggaggcaaaagggaaggacggtagtggaggccaggcacagggtgcgaagaagaataaagaaagggcgacgcgggccaagctcactgaggacttgctgctctccgatgacggtctaggcttacggctccgctactatacgaaggtcttataacccggagcccgcccgggacacgaggatgaggatcccggcactgtgatacatgctatacacagactgacactctcgctagattccttattactactgtgctcagctagagcgatttgctgagaatgcgggggctagtcaccgggagaggaaatgcgttgatgaactg

SEQ ID NO: 22009 - DNA, 162 bp, Oryza sativa
  unsure (1)..(162): unsure at all n locations
  Clone ID: PAT_MRT4530_27225C.1
cggccgtcctttttttttttttttcaatatcgctcgaaaaaatgaatagttcgcactctggggcaacggggtacattattgttgcaaaaacatgaccgtaattcttgattatctacatgtacacaacatcaatttatacttaatanttcacacactaaatcc

SEQ ID NO: 22010 - DNA, 255 bp, Oryza sativa
  Clone ID: PAT_MRT4530_27226C.1
atggtccccgtcacgctcgtcttgccctgtcgccgcctcgcctcgccggcgggcaaggctcggatgacaacttccttgatgtttccttggcgtgctagctgtggtttgatgatctcccagaactggaggcacaagcaaagcagaagtcagtgcagcagcatgggtgatgttgggttcaccatggaagcttgtgaaagaggagggcggattgagatcccgcaccgtgactttttcacggacaggtggacccgatga

SEQ ID NO: 22011 - DNA, 325 bp, Oryza sativa
  Clone ID: PAT_MRT4530_27227C.1
cttcgggttattattatcaacacattcacggggaaagcagcatccaaacctgaaagaggcccccagcaaaaatcggaaattaattatccaggaccccgggtaactaattaaaaaattaattaagcaaaggcccaattaattaattcctaaggaaggtaatccatgccccccccaaacagggggcagccaaaaaaaccagggggctgcaggttgcaccggccgtaatccgtaagggcgctccccatcccggggatcggcggggggtcccacccgggccccgggggctgggagaacatcccggggacgcgggcgccctcctccggga

SEQ ID NO: 22012 - DNA, 201 bp, Oryza sativa
  Clone ID: PAT_MRT4530_27228C.1
atgtcgatcgagtcgcgcgtgctcccgaatttcgagcggggccggtgtggcatcaaccgggctaaggagacagtgatagagtgtggaatggggacagccggcaagcagatgcacccctgcggccgcggcgcacgtgctcgaaggctaatctctcttcccccaaccgagctcgagcagtcatttggacctatcgccgcctag

SEQ ID NO: 22013 - DNA, 818 bp, Oryza sativa
  Clone ID: PAT_MRT4530_27229C.1
atgggagaggagctgtacgagtccgacgtgctgtggccggatcaccagtcgccacacgacgtcgtcccgccgacggcgacggcgacggcgaccgcgccgacgccggctcggcggggccagcagcagatcacgcgccactgctccacggcgagctctcggccggtggacattcccagggccgcgcagcggtggagcggcggcgaccagggcgacgactgcggcggggggacgatggtgccgccccacgtgatggtgtcgcggaggcggtcgacggaggagggggatcaggcgttctcgctgcggacggggaccgggcgggcgcgccgcgacctcagccacctgcgcaactccgtgctgcggatgaccggcaattatcacatgaaaaagtgccgcctaaaatcacctggtccagtctttgcaccagatacgaatcaagagggatctgaaagaaaggacaagtgctgtcgtatcatcaaaaaccatatctttcaacttcgaattgaaattaccttcatgatttgccatctgtcctggggaaaccctgaaaaaggggacgtcaaaacatcagagtaccagttgatgaagtatccccaccagcaccaccatcagttatctccaatgatgcagatgataaacctggataacaattcctttcaatcaaatcattccatagatgtgaataaagagcttgcctatcagttacaaaatgtgccaacaaatattagtgaagttatggactaattccaagtgtgtcttgtgtacagttcctgaaaaggcattttgaaatatcgacctttttgtgttgaaaaaaaaaaaaa

SEQ ID NO: 22014 - DNA, 381 bp, Oryza sativa
  Clone ID: PAT_MRT4530_2722C.1
atgaggaagaagggtgtctccttgttggacgttgtcggtgtgtactatgccatttgccctcttgacctgtccattgctctgagggtgagaaaccgaagcgaagcagatcttgactcccagcctaatgcagtaatcctggaagttggcactgatgaactgggagccgttgtccgttatgatgcggtgaggcaatccatatctgtagaatatctctttaatgaatttgatggcactgtcggccttgatttcccccgtggaggtcgcttcccttgtcctcgtgggaatggtccgaatcccttcgtgtatgtcgaggaggagatgtttgccatcgtcgaacgagacgcatttgagaagtaccccgtttggtgccttcttgtatag

SEQ ID NO: 22015 - DNA, 681 bp, Oryza sativa
  Clone ID: PAT_MRT4530_27230C.1
ccggccggaacggagaggtaaccatgatgaaaactagcgatcccctcctgaatcccccggcgccgaggagtaatcgcggcaacgttggtgcgcgtcgggtaccgtgcccgaccctgatcggtttcatcgcccatcacaacaacttggcgctctgcatctaccgcaagtaagagaatcgcgacacgatcgaggttgtcaccttctcctatcatcaacctgctgctcctcttctggtgcatccgccgattccatcaagggccgtacggatctgttgcaaaggacccgaatatctgttgtccgccgagttattgaaactagagtcctactactaccccattacactaatggggcatctctagtatatatcatccaagggagaggtataacagggccgactttcccagggtgtcctgagacctaccagcagcagttccaacaatcagggcaagcccaattgaccgaaagtcaaagccaaagccataagttcaaggatgaacatcataagattcaccgtttcagacaaggagatgttatcgcgttagctgctggggtagctcattggtgctacaatgatggtgaaattgccggttgttgccatatatgtcactgatatcaaaaaaaggtgataatcaacttgacctcacagaggattctgtagctgaataaaacctcagcatacag

SEQ ID NO: 22016 - DNA, 373 bp, Oryza sativa
  Clone ID: PAT_MRT4530_27231C.1
cacaatgatcaatttagtgcttacaaagctatctatctctcaatatcgaaatcttcgcggattctcatgcaaatagaccctccacgtagcgtcatacgaatccagagttagaccccctcctatagccgtcggatcgcagatgtacagtgacggatctctgtggtggacctcgttgtaatatagaagattttaggtgcatttttttgcaaaaaaaaagtcaggcccttctctccccttcgccaccactctattcctccaccttcgaccccctcttatccgccacctcgccgctctcccctccgacctgcgccgacgtcaccgccggctccttgttattcgacccgccgtcctacggcgacgtcggcggcttttt

SEQ ID NO: 22017 - DNA, 369 bp, Oryza sativa
  Clone ID: PAT_MRT4530_27232C.1
ggatggccgccacccgtcggatcccgcgcctccaccgccacgccgtcgtcgctgtcgccgcgccgcgctccaccgccgccaccgccggacccgtgcggcaacggccgccgcccgccggatcccatgcctccactgccgcaccgtcgtcactgtcgccgctcagccatcaccgcgtcgccgttgccgtgggctgccgctgccaccgagagcatccgcctcgccatcatcccctccgagcacggccagctcgctgaccccaccagcttcttcgatgccgtggatgccaagataggggtggccgtcgagcagctgttcgaccggctagagcggaggcccgacgcaatcgtggctaacacctacctgacgtag

SEQ ID NO: 22018 - DNA, 2080 bp, Oryza sativa
  Clone ID: PAT_MRT4530_27233C.1
tttttttttttttttttcaagctataatacagaaagacattagaaaggttctcaacatggaaaggtttaagaggcacagtggaaatgatggataattaaatccatcgatttagattacgaaatgatacaagtaccacaactaaaacttgactctatagtccctaatcagcagagcgaactgcagcataatacatcatactaacctaaacagaacgttgtactacataggattgaaaggggtccgacaattagctacttgtctgaacggcagattgaactgcagctagccagctacataaatacagctaaagtacaactaagatcgatctcttgatagcgagatcagagggattccctcttcttcttgttcttggcttgcttcgccaatagaactgagagcccagtcaatgcgaatttcttcctcttccctgagaccctcttgcgaacagccgtctcttctctggacaaaactctacccctgttcagaatctgaccaagggaaacgttcggcatctcgctcgttttgtcgtcccagatggttttgtcatacccttcaggccccatcagcttcatgcttagtatctgcccaattgacaacgtttgcttgcaggaattagttgaagcatcagagatgatatccatgctgtgtgaatctttacgacgttgagctgcattcttaaactttggagagccaccgatggagcgcctcttgtgcccattctcagatttccatctgcgaagaatctcatcaactgcaagtttcccacggtttgcagcttccaccctcttcagggcctcttgcagtgccctcttgcattcctcaacctctaatcgggcatcatctaactttttaactgagtcagtctctgagctgttagctacatctacctgcagcatggcctcttctactttcttcctcgagttttcatcagcctcttgagccttcgagcacagtgtgaaatattcttccgctgaaagagtcactccatcacaaacagagctgccacattcagaagaactttcactgctcaacagagctttgatctcagcaagtgcaagtgcttctgctgctctagctgcttcttccatcttcttggctgcaatgcatctgatctctgctgtgccaatgctagccttcgtctgctcgatttctgcagccagcatcatagcctcagactttgaagcattagccatgcccctgagctgctgtacctcagatgccattttcttgatctcaatgaaaatgtcagagggatcttcacgtcttgcctgcagatctttcagggtttgcaacttttgtgttgtctgatccagctcatcttccaaagaagaagccagtgcagtattggaagaaagcttttcccggcttctctcaagcaaaagtttctcctttgctatgctattgtgcagtaattcaattgcagctcgtactgcagccaggtcacctgtagttctgtttaggtttgcttttgcctgctcaagttctaacagtactgaacctgaaagcggttgtggatgttcatctaggccttccatatccatatcaatgttaacattttcaggtttctgctcttcagattctgtaataggaatttcactttggtcatcagacttcacagctgaaggagatgtttcatttgattccttctgtattctctgttttaagtctgctatgattttcttggtagattccaattcctttaacacatcaagtgtctccttttctttgatgataagatcatgttctagttgtgcagcctgctctttgatatcgacaggctgtttactttcttcagattgctccttggggttgggaggggcgaacatgcgcctgatgaggtgggagctccaggcggcgctgccgccgaagcggtcgacggcctcccgcaccgactcgaacggcgccgacgtgtcgatctccgccctcccgccgccgcccaccgccgccgcggcgcattccgcctcggcgctcgccatggatggaggagaggggaagtgggggggaatcctccgatcaaaagacgggggattttttccctgggattctgcgcggagtggagtggagagcggagagtgtggg

SEQ ID NO: 22019 - DNA, 696 bp, Oryza sativa
  unsure (1)..(696): unsure at all n locations
  Clone ID: PAT_MRT4530_27234C.1
ctatctttttttttttttttttctctctctctctcatnttacacaccctctctcccactagcgcgcgcttntcatccgcgctccttcccgccatccccatcaccctccncgcacagctccctccacactcgctcgccccccccacccaaaatcactccctcccactcccgctcngccctccctcaccccnncantnacactctcccccgctcccgccccctcaacaccacgcccctcactccgcccactgcactctctcacgcccccttactactcgcctacacgcgcaccaactccgctcgcctccctgcctcacgcacaccccctgcgcactccaccgccacgcgattcacacacacactccacgcacccgcgccacccactcccacacacacacttcccctgggttgccctcctaatggggttccaacaatcctacatccttgatttcccccgcttcctccccaacggtcgtaccgtcggtgttgcaatgcctactgagtgggctttgctattgtcatttaaagcgaacacattccgcacatggggtggggccttcgcggtaattgcacagcacccccacctccattcgcacaccgcaatactgcacctggactgggacgcggacaaccaaccacgcggaggggtattatgcggtaccttgcagcacgctcctcctggcctacgggaagaaaa

SEQ ID NO: 22020 - DNA, 614 bp, Oryza sativa
  Clone ID: PAT_MRT4530_27235C.1
tcagccgcacgaatccccgccgcctcgatcactcgctccgctcgattccccgttgccgccgttggaccagccaccctcctcctcgctctgtgtgcatcctccctctctcagcagcacgaggaatccccgccgcctcacctgccccgcctgattccccgcggccgacgcagtccaccgccggaccagccgccccctcctcgctccgtgcgcatcctccctcctctcagccgtacgaattcccgccgcggtccactgccggaccacctcattcgctggtgcgcctcctcgcgactccccgccgcacgccaccgcatcgtgcccctgcaggcgacgtggtggttcccccttccgccagagccccatccgagatggccgcatgcagtcggcgtcaatccagggccttccatcgccgagctcgataaggggcatttgatgttggcagtagttcctcaccatcatctcctttcccagcgtgcactcctgcatcaaagcccaccaactcctccaaccgtaatccccaaccagacttgctccatctatcgccaacactcgatctgtatctgactatctgttggctactgacctggaaggacaaggggcatttgatgttggca

SEQ ID NO: 22021 - DNA, 1635 bp, Oryza sativa
  Clone ID: PAT_MRT4530_27236C.1
atgagctgcctgcagctctgtaaagccttcgccgcgaaggagtctcggagggaggaagtcaggcggccggcgtcctcccgtctaaatcagatgggcgcgtcgctgtctccaatatcgacgaaaccaactttgacaagacagctcccactaggaagatcttcagctctggtgtgggggaaaaagagcaaggctgagtactacccactgtactcagcaagtcataccgggagaggagggctgacgtcagcaagggagggggcgccgacatgcgggccccacttggcagtggctcaaggggccggtccaccgtggactaggaccacgcgggtggtccaccgccggtccacgggaccgacggcccagatcggcccggggccgatcggacggtgcgggcggcggcctggcacggctcagctcggcacaaagccggccgaccggccatggggtgcggcggcggcgcacgcgaccaccggcgacggcaagcggcggcgcgagtggcggcgacggatggtgcacaggtcgacagtggcggctgaaggtgatggcaagcgcgcggagagcggcggcgcgagcggggaaaagtgggaaggagggaggagaggggctcctcaccggagggcggcgaccggagcggggatgaaggtggcggcgacgacctggcgacgaggaggggcggacgggcggcggcggcacctaaggagggagaggagaggggttaggggattggaggaaacccgcggcgagaaaaatggccggccggagttgaagggaatggaggggctcaccgacgtgcaaggaaaccggagctcccgaggggttcgggcgattggcggcggcgcgcagctggaggcggcggcgagcggcggcgcggcggcgagcggcgcgagctcagtaggagtcacgggagggagcggcgagagcggaaaggggaagaggagggcacggggaacgttttataggcggagggggaggcggacgtggccgggaggacctccgatttcgccggcgacgtggggaggagagaaaggaaatgtggggattcaaaatgcgaatcccgccccttttcgggtgcacgcgcgggccgggagacgcggggagagggcggcgtcgcggggaagacgcgtggggcgacgcggcgtgggcgcgggaggagcggcggaggtgggcgcggcggtttcggtggcggttgccgacggcgtgacaggctaccacccacagcagcgcgcgcggccggagggtggtgcagccggcggctcccgggtggtggccgtgtgctcagggcggcgcaagctcgccggcttccccaatcccctcgtgcgggatcagtcggtgcatcaatcatggtcgatgacagctcctcaaggttgccgcggacggggcactagatcaatgactggcgactaccgcgcgacgatggtcagggagtccttggcctccacgcgtgggggagaccctcctgctccggcggcgtgggagggcaggcgcgggaggacgaggcggaggcggatggcgccaacggggagagggaggtcgtcgccgtcgtcatccatggccgcacgtggaaagacgacggaggctggcggcgtgggagggcaggcgcgggaggacgaggcggacgcggatgccgccgactag

SEQ ID NO: 22022 - DNA, 1581 bp, Oryza sativa
  Clone ID: PAT_MRT4530_27237C.1
atggcgcacgacgcaaaaatggaggatgcatctcacggttacgtctacctcgccatggctgtcgtggcgctgctcggcgtgctgctcaccaagcgcagccgcaaggcgacggcacagcggctgcctcccgggccatggcagctgccggtcattggcagtcttcaccacctcgccggcaagctcccgcaccacgcgatgcgcgatcttgcgcgccgccacgggccggtcatgatgctccggctcggcgaggtgcccacgctggtggtgtcgtcgccggaggcggcgcaagaggtgatgaggacgcacgacgcggtgttcgccacgcgtgcgctgagcgccaccgtgcgagcggccaccatgggaggcagggacatcgcgttcgcgccgtacggggaccgctggcgccagctccggaagatcgccgccacgcagctcctctccgcgcgccgcgtcgcctccttccgcgccatccgcgaggaggaggtcgccaccatgctgcgcgcggtggccgcggccgcggcggacgggcgcgccgtggagatgcgagcggcgctgtgcgtggtcgtggccgactccaccgcgcgcgccatggtgggggagagttgccaggagcgcgacgcgttcctccgtgagatcgatcgttccatggagctcgtgagcgggttcaacccggaggacctgtggccgtcgtcgcgtctcgccggccgtctcagcggcgccgtgcgcaagatcgaggcgagcctccacacggtgttgggcatcctcgaccgcatcatccagaagcgcctgcaggagaagattggcggcgccggcgccgccgccgccagcgaggacattctggacgtgctgctgaggatacacaaggatggcggtgccggcggcctccaggtcccgctcgacatggacgacatcacattagtcatcactgacctcttcagcggcggcggcgaaacggtggcgacgctgctggtatgggcaatggcagagctgatccggaacccgatggccatgcagaaggcaacagcggaggtgcgacgtgccttcgcactgcccggcgttgtgtcggagggcgagggcgcgctcggcgagctccgatacctgcacctcgtcatcagggagacgtttcggttgcacccgccggggccactactgctcccgcgcgagtgctcggagccgtgccaggtgctcggctacgacgtgccgcgcggcacgcaggtgctggtcaacgtctgggcgataggccgtgatgagcggtgctggccggccgccgccggcggcggctcaccagaggagttctggccggagcggttcgaggatggcgccgaggcggtcgacttgaggggcaacaacttcgagctcttgccattcggcgccggccgccggatgtgccccggggtggcgttcgcgctcgccaacatcgagctcacgctcgccagcctgctcttccacttcgactgggaggtgcccggcatggccgaccctgccaagttggacatggccgaggcgttaggcatcacagcgcgccgcaagggcgacctcctgctacgccccgtcctgcgcatgcccgtgcccggcgtctag

SEQ ID NO: 22023 - DNA, 294 bp, Oryza sativa
  Clone ID: PAT_MRT4530_27238C.1
atgggtagggatggcaatttccccatagggggtggggacccgccggatacccacccctacggagacagggacggggacggggacggggacagggctggttttccaccgcaggttgggcgggtacggggcccgcatatatgtggggccggcggcgtcggatgccttctcctcctcgcgtcgtcggcctcctgctcctccttgcgctgccaacctcttcctcctcacgccgccagtcacctgatcctccttccttgcgccgccaacctcttcctccttgcgccgctggtcacctga

SEQ ID NO: 22024 - DNA, 633 bp, Oryza sativa
  Clone ID: PAT_MRT4530_27239C.1
ctagtggatccccgggctgcaggtttttttttttttttttctcgcggagtagaataataagttcattattgatcattttcaacaattacaaacgagattacacagccctagagcatagttggacacttggcatcgagaaattccttgagcatgcgtgcccctttctgagtacccatcaactcagacagccgctctaccggaagcagggccagctctgctaagctattgcattcctccattattcttctatagtttgaatctgtcacaccaggaagcctcctcaagaattcaatcgcggacgtattgtaattttcagccctcacgtcattctccacaactccgtcctcagagggcacaccaactctcattgccttgctctcatcaggttcatcctggtttgttttgagtgataggaatatatctgccgtggcatgcaagctgcgagaccagactatgcgaagccgaggaaaatgcaggactagtaatgaaagttttgagattatatttgtcggagatacatcatccccaatttcacttgcagactgaaaggaaaagctcttgtcttgtgagaattctatcagaagcactgggatcttgtaataccgaaccatggtttcaatctgattgtagaga

SEQ ID NO: 22025 - DNA, 193 bp, Oryza sativa
  unsure (1)..(193): unsure at all n locations
  Clone ID: PAT_MRT4530_2723C.1
cccttcgcctgccttaatttcancaggtcggattcgtctaccgtgtgaaccacagatcccccggatactacgagggcgggtactggaccatgtggaagctgcccatgttcgggtgcactgactccactcaggtgctctaggagctggaggacgccatgaaggcgtaccctgatgcattggtgcgtatcatcgg

SEQ ID NO: 22026 - DNA, 216 bp, Oryza sativa
  Clone ID: PAT_MRT4530_27240C.1
atcatttttattgatgatttcacggggtctcatcacaccacacgcaatcaaccacggtcagtagccattttcaccactcacccagctttatctctctcaaccacaggcccttgcatgttcccttttgtcgcaatcggctacattgcatttttcttccacgcacagcatcctcacagtgcatccagcacagcgtttcagttcaacgcatccacacta

SEQ ID NO: 22027 - DNA, 494 bp, Oryza sativa
  Clone ID: PAT_MRT4530_27241C.1
cccgagtcggttgctcgatcagtctgggcttggttttcgccggtgctgcagagcgcttccacagccggaccgtgctcatcacgggcgccaccggattcatagcgaaactacttgtggagaagatcctgcggctgcagccggcggtgaagaggctctaccttctcgtgcgcgctgcggatcaggtttccgcgaacaggagagtcgaatccgagatcatgcaacttccgatatttcaacccttgcgggagaagtatcaaacgcacttcagttcatggttctgggacaaggtttttcctctagcaggagatgtgtccttgaagaatttcggtataggagacgctagactggctgaagatataaggaaagaaacaaatattattgttcacatggctgcgacagtaaacttcgcagaaagatatgatacagcgttggcaataaacactatgggtgtgaagcatatgatagattttgcatcaaaatgcacaaacctagag

SEQ ID NO: 22028 - DNA, 621 bp, Oryza sativa
  Clone ID: PAT_MRT4530_27242C.1
tcagctctggctccccaagatcggtcctctgggtctgtcgtcccaagaaggtcggagaagatattgccaaggcacaccggcgactggaagggtctccgtgtcaccgtcaagctcaccatccagaaccgtcaggccccgtctcggtcgtgcctaccgcctcgtcgctcatcatcagggctctcaaggagcccccacgtgaccgtaagaaggagaagaacatcaagcacaataagtcggtcgccctcgacgagatcattgagatcgctaggacgatgaagttcaagtccttctccaaggaccttgctggtgtcgtcaaggagattctcggaaccgcctacagtgtcggttgccaggttgacggaaagagcccgcgtgagatcaccgacgccatcaatgctggcgagattgatatccccgaggagtaagcgttatgacactgggcgacttggtttttttctagggcatcggttggagttcgggcttgctttgggactgaaatgtccacccgcgccaaacaaaatgggtttcctcacgacgtttcgggtttctgaaataacgaatgctgaacagaacatgacctggtccagacaggtttttgtgccgaaaaaaaaaaaaaaaaaa

SEQ ID NO: 22029 - DNA, 1605 bp, Oryza sativa
  Clone ID: PAT_MRT4530_27243C.1
gaaaacaaaattatctctctctttctcctgcgctcgaacgcagccttagaaaacaccagagatcaaaaaagaaagggaagaacacttatcccaaactaattgcattttacagttactacaccgccattttacagttacccctctcgcccggttgattccaactaagatattcagacaactctggcgctccgtccatggccatacccatggccaatggcgcggttcagcgccactctggtcgtctcgtacaccggcagctcgtcccggtacgcggccccggcgggagcaatggcggcgaagttctcgagctcgaacaggtcggagctcgcgtcgctgcctctcgtccgtcgtcctcgtcgctctccatctccatccgctggagcagcatctgctgcaccgcctccacgggcaccctgaggcggtcgaccaccgtcgacgacgccagggactcccggtcgctgtccaagaaccgcacggtccgcttcgcctgcccgcgcgtgctcgtccatcgacttgtatatcgcgtcgagcagcgtggaggagaaagacggctggtcggcgacgtaccgcctcgccgaaccagccgtcaccttgggcgccgcccacctctccataggaaacaaacgccaagaagagagagcagcaaccaatgcctctgtgaaatggcagctgctgctgctgagccggtggcttggtacgcggtgagttggtggtacggcgcgggccccggcgcaccaccggggacagtcgtgcggatggggcggaggcgtcggtggtgcgacgactccgcctcggacgacgagaacccgccgtagctagaacactccgacgagctcgacgtcgtggcgtgcggacccggcgcgcgcgcccggtagctccccgcgagcgacggcttgtagtagttcccatagtgcagggccgcctcgtgctgcttcttggccgccgcagccaccgcctccaccccggtggcgccgccgccgtgacccggctgctcgtccatcgacttgtatatcgcgtcgagcagcgtggatgagaaagacggctggtcggcgacgtaccgcctcgccgaaccagccgtcaccttgggcgccgcccacctttgtcgcgtgattagcgggcacagccgcatgtacggcgatggcaacccggcacaccgagctgtggtttgccccggacgtgtcgcgcgacaagctagacccgttccatcatccgtcgccatggcaggatgttggttgggctgacaaaatccgggcgattgatagggatactgctcatcccctgcttctcgccttccctagcggaggtgatggccaacggtggcgaggccaccaccaccggccgggagtatggtgctctgagatgtaccgctggttcaggttcagtgtagtgggaaatgctggggatgttggtgtgcgctggccactgggggagtacaagcctacagggttgtggggcctttgcctccacccgcggtcggccgcggcgcggacacgttacaagcgcagcagcgcgcacacgaccgggcagcggtgcaggcggcatatccgtgtgcctctgcctcctcctcctaccgctgccaacctggcgtcgcacgtacgggagtaa

SEQ ID NO: 22030 - DNA, 361 bp, Oryza sativa
  Clone ID: PAT_MRT4530_27244C.1
ggtagtgaatactccacaaagtagcagtgatgtgaaaaatcaaatatggtcaaacaccaatttggtttagagggagcaggatcaaacattgatgatccatatcactggactggtgctacactaacgtggtagaacatagcaagtggtgcactttacattcaaaccattgaaaacaagcaactctagttcagaacagtttaactttcatatacagtttcctggccataaatgcagttcatgaacttcaggtcaggctgcagtgcgaactgtgcaatgttgtcgcgtgcggtatggctttggttgaatgtggttacacaatttcttgcaacatgtagcccgagcgaatgattaattttgcctt

SEQ ID NO: 22031 - DNA, 457 bp, Oryza sativa
  Clone ID: PAT_MRT4530_27245C.1
ttttcttgagccaatcaaccgcttccttttgggggacgagtgagaagaggatcgaccgtttccttcgatcgcttggtctagactcatggggaacctagaagagactaggcccggaacacatggccggcaggcgccccgagcacacgtacccggatgactggtccaccaaggatcagttcatgacccgctggtccttctccgtccgcagctgctacacgctgttttgtgacccgccgcacaccaagtgtttgggcttctcggaggcggcacgcgacgcacactatctacggtggctccttacagcatctatattatcaacagagctccaataaactaagataatgcacaacctggggaactacaccgtcccggtcaggtctacatgttcatgatggacctctaggataggaatgacaggctgttctacaagctgctgatgacaccatcgaggagctgc

SEQ ID NO: 22032 - DNA, 327 bp, Oryza sativa
  Clone ID: PAT_MRT4530_27246C.1
atggcgatggcggccgtctccgccgtgggcctggtgcgtcaccgcgggcggagcagcaaggcaggcgtctccctcctctcctctcctcttccgcagccatcgccatggggcccaaccaacaggggaagaaggacaaaaccctcgatcgccgcctccggcgatggcggcggcggcgccgggatatgcggcggcggaggcgacagatactgcgagctcaatgatgtgaggatcgagttggacctgagggaggaggtcagactctgcttctggctactcctctccagctccgcgaggccttcctctgccatcccttcatcagtggactag

SEQ ID NO: 22033 - DNA, 612 bp, Oryza sativa
  Clone ID: PAT_MRT4530_27247C.1
aataaaaaaaactataattgtaatatgaatgctaagtgtaaaatagatggttggaaagcgatgaatgattgtttgattgaacagcagaaaaacacaccggaatcgaatgagagagctgaaagaatttctttcaagaggttggacctctggctaactttcatccaaaatcattactcatttcataggagttttaaaggatattataggatccaatcccttgtttcaaagggctttatatgaattttttcataggattataatctcaattttttttatatatttttcctacaaaccaaagaggttccctgagcaggcggtgtaccgtggcttttaccttcttgacttcgcatggcctgggttcgatcagtggtggcgtgccgccgacgttggcataacccaccatgacggagaaagagaacaagcctgggtattttcgtcagccgcaaagaaaaacaagacaaaattcattttgattgagaaaaaatggcattgtaacaacttgcccctagttgaaaataaaattttaacgaaaccacttttgagagtgacattgcagtaaaaccttattttagaaatagtaaaatgtcaattttctcggacttgatcgtcgcg

SEQ ID NO: 22034 - DNA, 144 bp, Oryza sativa
  Clone ID: PAT_MRT4530_27248C.1
attttcacggatcattggtgaagatttagcaatgggtaaatttaccatccttcggatggtaccggggaatgccacattttgtaatgttaaacttgataccttcagatctataataattggttatagcttcttcgacggcgtgac

SEQ ID NO: 22035 - DNA, 1899 bp, Oryza sativa
  Clone ID: PAT_MRT4530_27249C.1
atggacggatcggcggagctggaggcggccgagcgggtcgtcatgcgctgggactccacctccgcctccgacgagccgatgctgttcgacggcgcccgcgccgaggccgagcgcttcctccgcgccgtcgacgacctgcgccgcctcgcgccgccgtccccggccgccgtcgggagcccgcgccggctgtcgtccgggtcgtcgtcggtctcggccgggggtggtggcggcgcggcgaccgccgtgcaggtcgcgatggcgcggctcgaggatgagttcaggcatgtgctgtcgtcccgcgcgctcgaccttgagatcgaggcgctcgctgacctcggcggctcgctctccatctccagtgaccggtcgaactcggcctcgtctgctgagctccaggtggtggatgaggatgactccgtgtcgtcgttggttgggcggcggagcagctaccgctcgctccccagcatccgcgagatcgacctcctccccgacgacgccgtctccgacctccgcgccatcgcctcccgcatggctgcggccgggtacggccgcgagtgcgcgcaggtgtacgcctccgtccgcaagccggcggtcgacgcctccctccgccggctcggcgtcgagcggcttagcatcggcgacgtccagcgcctcgagtggaaggccctcgaggccaagatccgccgctggatccgcgcggcccgcgccgccgtccgcggcgtcttcgccagcgagcgccgcctgtgcttcctcatcttccacgacctccccatctcgaacatcaccgtcaccgccgccgcccccgccacgcacgacacccccttcgccgaggccgtcaagggcgccgcgctgcagctgttcggcttcgccgaggccatcagcatcggccgccgctcccccgagaagctcttcaagatcatcgacctccacgacgcgctctccgacctcctcccggacgtctccgacatcttcgccgcctccaaggtcgccgagtcgatatacgtccaggccgccgagatccggtcgcggctcgccgacgccgtgcgcggcatactctccgagttcgagaacgccgtgctccgtgacccgcccaagacggcggtgcccggcggcaccgtgcacccgctcacccggtacgtgatgaactacagcagcctcatctccgattacaaggtgacgctctccgagctgatcgtgtcgcggccatcggcgagcgcgcgcctcgccgccgagggcaatgagctcgcgccgtccttggccgagctcgacctccccgagcctgacaaccagacgccacttgctgctcatatcatctggatcattgttgtcctggaacacaacctcgagggcaaggcctcactctacagggacacggctctctcgcatttgttcttgatgaacaatgtgtactacatcgtgcacaaggtgaaggattcgccggatctatggaatctgattggtgatgattacttgaagcggcttacgggtaaattcacaatggcagccacgaactaccagcgcagcgcatggttgaagatcttgaattgcttgcgagacgaggggctccatgtaagtggtggcttctcgtcagggatatccaagtcagcgctgcgggagcggttcaggtccttcaatgccgcattcgaggaggcgcatagggtgcaatcaggatggtgtgtgccggacacacagctgagggaggagctaaggatctcaatttcagagaagctggtgccggcataccggtcattccttggcaggtttcgacatcatattgagaatgggaagcacccagagttgtacatcaaatactcagcagaggaccttgagattgctgtgaacgatttctttgagggggttcctccttccccacatatcaggaggagatcacatagctga

SEQ ID NO: 22036 - DNA, 1767 bp, Oryza sativa
  Clone ID: PAT_MRT4530_2724C.1
accacgtcctacgaattcgatcgcttcacaccaagaaaacctcgctagctagcttgtagctcgccatgccgggcggcggcgcgatggtggcggcgagcggcgccggccggcctgagtacccgggcgggctcaccatgttcgtgtccatggcgtgcctcgtggcggccaccggcggcctcatcttcggctacgacatcggcgtctccggcggcgtcacctccatggacccgttcctcagcaggttcttcccgtcggtgtaccgcgcgcagtcggcggcggctgcggcggccggcgggaaccagtactgcaggttcgacagccagctgctgaccatgttcacctcgtcgctctacctcgccgcgctcgcctcgtcgctcggcgccgccacggtgacgcgcgtggcgggtcgcaagtggtccatgttcgccggcgggctagtgttcctcgccgggtgcgcgctcaacggcgcggcggcgaacgtggcgatgctcatcgtcggccgcgtcctgctcggcgtcggcatcgggttcgccaaccagagcgtgccggtgtacctgtcggagatggcgccggcgaggatgcgcgggatgctcaacaacgggttccagatgatgatcaccaccggcgtgctcgccgccaacctcatcaactacggcaccgcgaggatcgccggcgggtgggggtggcgcctcagcctggcgctcgcggcggtcccggccgccgtcatgaccgccggcgcgctgttcctcccggagacgcccaactccctcctggagcgcgggaggcgcggcgaggccaggcggatgctccagcgcgtgcgcggcgagggcgtggacatggaggacgagtacaacgacctggtcgccgccggcgaggcgtcccacgccgtggcgagcccgtggcgcgacatcctgcgccgccgcaaccggccgccgctggtgatggcggtggcgatcccgctgttccagcagctgaccggcatcaacgtgatcatgttctacgcgccggtgctgttcaggacgctggggttcggcggcggcgcgtcgctgatgtcggcggtgatcaccggcggcgtgaacatggcggcgacgctggtgtccgtgctcgccgtggaccgggtggggcggcgggcgctgttcctggagggcggcgcgcagatggtagcgagccaggcggcggtgggggcgctgatcggggcgaggctggggtggtcggggacggcggcgatcccggcggggtacgcggcggctgtggtggcggccatgtgcgtgtacgtggcggcgttcgcgtggtcatgggggccattggcgtggctggtgccgagcgaggtgatgccgctggaggtgaggccggcggggcagagcatcacggtggcggtgaacatggccatgacgttcgccgtcgcgcaggccttcctgccgctgctctgccgcctcaggttcgtgctcttcttcttcttcgccgggtgggtcgccgccatgaccgccttcgtcgcgctcttcgtgccggagaccaagggcgtccccatcgaggacatggccgccgtctggagcgaccactggtactggaagcgcttcgtcgacggcgacggcgacggcgcacgacgccggggagacattgagatgggacacaagtagtagtagaatttactcactgcaccgtactacacttcatgtttttcttttgttgttattcagctattattagatgcggattttctttaattactactaaatttcaatgagtgaagatgttgtaacaaggatt

SEQ ID NO: 22037 - DNA, 1308 bp, Oryza sativa
  Clone ID: PAT_MRT4530_27250C.1
atgacgctcccgaggcaatgcgcggcggcgtgtaggacaggcggcggcggcggcggcgtggtgcggtgcagggcggtggcggcggcgggtggggcggtggcggtgagggatgcggtggtggcgccggtggcgaggcgaggggcggcgaggaagacggcggagacggtggcggggatgtggagggaggtgcaggggtgcggggattgggaggggatgctggagccggcgccgcacccggtgctgaggggggaggtggcgcggtacggcgagctggtgggcgcgtgctacaaggcgttcgacctggacccggcgtcgcggaggtacctcaactgcaagtacgggagggagaggatgctggaggaggtcgggatgggcggcgccgggtacgaggtcacccgctacatctacgcggcggcggacgtcagcgtgccgaccatggagccgtcgacgagcgggcgcgggcggtggatcgggtacgtcgcggtgtccaccgacgagatgtcgcggcggctcgggcggcgcgacgtgctcgtctcgttccggggcacggtcacccccgccgagtggatggccaacctcatgagctcgctggaggcggcgcggctcgacccgtgcgacccgcgccccgacgtcaaggtggagtccgggttcctcagcctctacacctccgccgacaagacgtgccgcttcggcggcgccgggagctgccgggagcagctcctccgcgaggtgtcccgcctcgtcgccgcctactccggcggcggcgaggacgtcagcgtcacgctcgccggccacagcatgggcagcgcgctggcgctcctctccgcctacgacctcgccgagctcggcctcaaccgcgccgccccggtcaccgtcttctccttcggcgggccgagggtggggaacgcggcgttcaaggcgcgctgcgacgagctcggcgtcaaggcgctccgcgtcaccaacgtacacgacccgatcaccaagctccccggcgtcttcctcaacgaggccaccgccggcgtgctccgcccgtggcgccactcctgctacacccacgtcggcgtcgagctccccctcgacttcttcaaggtcggcgacctcgcctccgtccacgacctcgccacctacatctccctcctccgtggcgccgacaagaagcagcccgccgccgccgccgccgacgccggcggcgtgctcgccaaggtgatggacttcgtgggtcggcggcgcggcggcggcgcattgccgtggcacgacgcggcgatgatacagatgggcggcttggtgcagacgctcgggctaatctga

SEQ ID NO: 22038 - DNA, 2019 bp, Oryza sativa
  Clone ID: PAT_MRT4530_27251C.1
atggggtatactcatgagattgtggttttcacccatttcttctacggcgactttgctcttccaaccactaagttctttaggggaatccttgaattttacgggattaatatttatcatctcaaccccaactccattgttcacattgcaaattttgttcatctttttgaagcttttctaggcattcggccacacttcgccttgattcgccgaatcttcttcttgaagccccaacctaacaaaaataagccttgcatcgttgggggatctagctttcagcttcatggcaccctatgccagaagtattttactcttcctttaaaaacctccaacaagggctggcatgctagctggttttacatccagaacccagatcctgccttacctgaatattcatgctgcccacacaaataccaagatatatggaattcccttcctatgggcgaggaatctgctcaagcccttgaattactggatagactactgaagttgaaggaacaaggtcttcagggagagcaaatcactcagcattttataaaatgccgactggctcttattaaagagtggtctcgcacggcctttgaatatgatggaaagaatgaccagaaccaagaagaccccgactccatcgaatacaagatcatgaaggagaggatgtataaagtcttctcatatggtattgtgcttagcttctcacatcttcttctagtcgtgccatacaacgcctttaatcctcccccagtgggctgctcccgcgaagaagaagaagacatccagcgcccaatgccaaagatccgaaggtctttcaggaaaccatcgtacattgatccgaccggtaagggcactgacccagctgctaattcagaaacggctggggaagaaaagactggctctactgatgctaccaaggctgatacctccaaggaaaaacctccaactggcagtcagtcggctactggtgaagctgatgctgacaacgagctcccaactggaaaccagtcggcatctgccgagacaagcacaaaccaagagcccctgactggaaaccagccgggtgaaggtacggaggaccctcagcggccacattgggatgaggataaagatatccctgagacagaggagcatgcaagcagtcctcctttgaatcaaaatacagatgctggacctgaagccagcacttttgacaaagtagaaggacctgcgtggccaccaccaaaaattatcacaggcccaatgattggcgacgaagaagaaattcttcgaattaagtcaactgaagattctcaggcacctattttaggcattgtaattaacaagaagaaagaatacgaagaagtggctttactgacaaaaactctcaaccaggccactcgtcttgtaaatagaattcatcatcggaatgaagcaaaaaccgctacccttgagagactggttcctcatcttgatactctggaggaaactagagctaaactgcatgcaaccaaagaagaggccagaagaacagaacatgcgctcagggatcagattgccgagctccaggatgccaactttgaattgagtgtttcctcgaaagttcaagctgccaaaatctctgagctggaaaggcgaatcaaagtcttagaaaatgacaaagccgctttatccaaggagagagatttggcagtcaaagaatttgaagatcataaggggaaaacaaaggcacagttcaacttcttgatcaacaaagtcgaagttgctgaaaaagctagagacgaagtcgccaacactacaaccccaattattcaagccatgtatctgagcagtagtggtacgagctccttagatgtagtagaaatctttaataagttaagaactgctccagatgtgtacttcaagaatatcaaagaggctaggaatatgggagcaagcatggcattggctatgaccaagtctctgtaccccaaaattgatgttgacgccattgacggctttgcagcaaggacaagtgaagaagatgcactttatctgattaatgatgcctag

SEQ ID NO: 22039 - DNA, 2208 bp, Oryza sativa
  Clone ID: PAT_MRT4530_27252C.1
atggggtatactcatgagattgtggttttcacccatttcttctacggcgactttgctcttccaaccactaagttctttaggggaatccttgaattttacgggattaatatttatcatctcaaccccaactccattgttcacattgcaaattttgttcatctttttgaagcttttctaggcattcggccacacttcgccttgattcgccgaatcttcttcttgaagccccaacctaacaaaaataagccttgcatcgttgggggatctagctttcagcttcgtggcaccctatgccagaagtattttactcttccttttaaaacctccaacaagggctggcatgctagctggttttacatccagaacctagatcctgccttacctgaatattcatgttgcccacacaaataccaagatatatggaattcccttcctatgggcgaggaatctgctcaagcccttgaattactggatagactactgaagttgaaggaacaaggtcttcagggagagcaaatcactcagcattttataaaatgccgactggctcttattaaagagtggtctcgcacggcctttgaatatgatggaaagaatgacccgaaccgagaagaccccgactccatcgaatacaagatcatgaaggagaggatgtataaagtcttctcatatggtattgtgctcagcttctcacatcttcttctagtcgtgccatacaacgcctttaatcctcccccagcggaaaatgctttgatgaaatccgatcctccgactgctcaacgtcgttctccttggcgacaacaaagccaggctaccgggggcccaaaaatccagctcgatgcccgaggaagcactgccggcccgactggtcaaacaggttctcgaaagaggaagatgatcttaagcgatgatgatgacagtgaccatgagtcagccggcaaacaacctaaaagggctgctcccgcgaagaagaagaagacatccagcgcccaatgccgaagatccaaaggtctttcagaaacggctggggaagaaaagactggctctactgatgctaccgaggctgatacctccaaggaaaaacctccgactggcagtcagtcggctactggtgaagctgatgctgacaacgagcccccaactggaaaccagtcggcatctgccgagacaagcacaaaccaagagcccctgactggaaaccagccgggtgaaggtacggaggaccctcagcagccacattgggatgaggataaagatatccctgagacagaggagcatgcaagcagtcctcctttgaatcaaaatatagatgctggacctgaagccagcacttttgacaaagtagaaggacctgcgtggccaccaccaaaaattatcacaggcccaatgattggcgacgaagaagaaattcttcgaattaagtcaactgaagattctcaggcacctattttagttaaatggtgggacgacgagatgcagccgcagggcattgtaattaacaagaagaaagaatacgaagaagtggctttactgacaaaaactctcaaccaggccactcgtcttgtaaatagaattcatcatcggaatgaagcaaaaaccgctacccttgagagactggttcctcatcttgatactctggaggaaactagagctaaactgcatgcaaccaaagaagaggccagaagaacagaacatacgctcagggatcagattgccgagctccaggatgccaactttgaattcagtgtttcctcgaaagttcaagctgccaaaatctccgagctggaaaggcgaatcaaagtcttagaaaatgacaaagccgctttatccaaggagagagatttggcagtcaaagaatttgaagatcataaggggaaaacaaaggcacagttcaacttcttgatcaacaaagtcgaagttgctgaaaaagctagagacgaagtcgccaacactacaaccccaattattcaagccatgtatctgagcagtagtggtacgagctccttagatgtagtagaaatctttaataagttaagaactgctccagatgtgtacttcaagaatatcaaagaggctaggaatatgggagcaagcatggcattggctatgaccaagtctctgtaccccaaaattgatgttgacgccattgacggctttgcagcaaggacaagtgaagaagatgcactttatctgattaatgatgcctag

SEQ ID NO: 22040 - DNA, 904 bp, Oryza sativa
  Clone ID: PAT_MRT4530_27253C.1
gctaggaatatgggagcaagcatggcattggctatgaccaagtctctgtaccccaaaattgatgttgacgccattgacggctttgcagcaaggacaagtgaagaagatgcactttatctgattaatgatgcctcaacaagtctagctttatttctcacaattaaaccatcctcatctggtttatttttgaaaaccttcttggttccaataatattatgtctagaaggtggttcaactaaagtccaaactttgtttctctcaaaattttcaagcaagatttggtatccatgtctataaaggtgctcaattggtattcaaatcagcctatcatccacatgctagaggacatattgaaagagtaaatcagatcttatgctcagagcttgcacatttatgtatggatcagcataggagatttgtttgccattcgccgagttcacctataataatagctatcaatttaggaatggcaccttataaagatttatatggaaaaaaaggagtgcatatatttcagatgaaggctatgttagcaccaacatataacgacccatataagatccaagatcgacgaggaaaagtcgcatacaaattggagttaccagatgaactaataaatctacatctagtttttcatgaatcgcaactcagaaaataaattaagtttaatcgatcgagcatattatctgatcagttaatcattaaatcaacactgacaacgtaagattgtttagtacacgtgccaggaatactgacaattaacgtatcagatgatatttttcatgctaaaataattcgatcatcaccgtcagcactatgcaaccattgcatatcgagatctccaatcatcactatgctttatatttattgcagtgaatcacagctatatatgaatcagaacttg

SEQ ID NO: 22041 - DNA, 701 bp, Oryza sativa
  Clone ID: PAT_MRT4530_27254C.1
ctggagcactgagacgcgtggaaccgattcccgattaagccttaagtttgacctgccttcctatcctcaaactttggaagagcttgaaatggagttcaaaagagaagctatggagttagctatagcccgtgacaaagaggaggatgaagagaactacaagcatcgtgagtcattgagtgaaatgagagaaaaccacatgaagagagtaacagccatgaggagtatgcattcaaggaagtgggatgaatttcttgaacaaagctttaaaaggcaccagcaagctcatccgacttcttatgcccaaacttcttatccagactatgatcagagagctacacaatttgctgctactggtccaccaaatgactcgaagagtgaatatccgtatattactgatagctattcagccccaaagcctcatgctgcatacagcgagtttgagcatgagagacatgatgactttgggaggacctatgggcggtattagcttttgcctagtgggcacctatgtgaggaatctgagtcaatggtgtggtactgtcttagcagcttagcgcctattttctgtcatgtagtttcagaaggtaagaaatttggtatattagcagtgatatgtgttccagttgctcattcttttgcagtaccatcacaatgggacttggaactgtcccaatggatttagataatgtatgtctttatct

SEQ ID NO: 22042 - DNA, 288 bp, Oryza sativa
  Clone ID: PAT_MRT4530_27255C.1
atggaagccccagataaaggcttgtcaggcccacccaaaaactatccggatcttctgcggcggcgcgacggcaggtcccgccgccgtcgccgcggcctctggcgatgcttcaaccgccacctccgggagaacgccgcgtccatggccaccggttgcttcttcgttgtcgtcttcgtcttctccgataccgcgagatccgtggaagagatgcgacgtctgaaaaatgttatgcccgctgaagaacgtgctggtgtgtctgcactgcactggatcctactgaaatcctga

SEQ ID NO: 22043 - DNA, 506 bp, Oryza sativa
  Clone ID: PAT_MRT4530_27256C.1
cccacgcgtccgattccatctgttggtgatattgatgtgggcaacaatgcagcaatggttaaaaaggatatgtatgctgacagctccaaggattctggctccgctgagttgagttcagcaagagtaaaggaagaaacgcatcgtgggcacagaagggctgctagtgcccatgctgatatcgggtcatggactatgttatgtccaaatgagagcgagagttctgctgacctaccatatgatgacaagcaccaagaacctttgctgaagatagtgaaaacatgtgcactgacgagtgccttgcaatctaagcctagaacgaagaaaaaaaggtggatctgtgaaatgggccgctgttgatcaacaagatgtggaagagacaatccctctcagttctcagatgggtcagggatcggatagatgctttgaaagaagcaagagttgtgtaagtacttgtgatgagagtacatacaataagaaactttatggttgtcttggagccctgcata

SEQ ID NO: 22044 - DNA, 2597 bp, Oryza sativa
  Clone ID: PAT_MRT4530_27257C.1
gtcagaaaacatcaggatttctcagtggatttacattggagttgcattttattcaggcatgaggggggaaaaatggcagttaaattagttacaggttgataggaaatggagagattattacaggccaaagagatcttattaatctggcctgttttacagtttattttttttctttgatgacaaatttatgggtggctgatgaaactttttgtcagttgcggattgatgctagcatcttacttcacttctttcacctttacaagaccaccactttgcttgcaagaaaccatgggtgatccttctttcttttctcttttttctttcaccaatcagatcaaaacctggatcaaagttatctaactcttcaggaaatgaggtcattttcatagtcggcagatttgcagtatctctaacgaattcgcatcagattggatgcacatcttatgctgaatccctttactctcttgtgtcctaaccaggttttgataggttaacattcatcttcagtagaaggtttcacgttcttacgacgagggaaaagcattcgccttatcttcttctctgctgaacgttcagagagtgcctgcgcattaaacgaaaatctaactgtccgagcttccaaaccagagaaagctcttacatcgataccgagactgtcgatgctaatcaagctagcctcctcgacagtgaggccttttttcctatgacagagggacctgagtgccatagcgcactgatcatcgttttctttaatgcgattttttttttttttttttttgaagcctaattgaaattcccattcttacttcaaatccagatggatattaaatcatacagactagcttgagatacaaatataaacgtggcataggtagatggagatatatacacacaccgtggtcaggccataattgaaataaaaatgcacatgcatattactacgtaaacgtacgtattactccctccatacgaaaatataagacattatattatagaatgagggagtatcttcattttattttggttgcgctgaaacatgcaacacagcatgcatagatggaactaattggcagagaccacagggacaaacggggtggcgcacagcatcagtggcgagcggcggcgaaccccgaggcctggcgcctccgccatgtccacctcatttacaccctccggtagcgaccagtcgaagtggtagagaagacccgtaaacatgagctccatgcttgcgaggccatagttgaaaccggggcacatcctccggcgagagccgaaagggatgaactcatagttggttcccggaagtcaagcgtcctactcgccagcgaggcttttttcctatgacagaggacctgagtgaagcgactgatcatcgtttttaatgcgatttataattgaagcagattgcatatcttctgcatcttgaaaatcttgtggatcaaatatcctacaattgagacaccatttgatggactatccatcttttccctgtgtttatcatgaacagcctttgtcaaacacttcgcaaaataaattggatgtattgcacgcattgttgctggcatcccccactctataagaatgtcagttatttctgtatcgatcttgctgtcgttctcaggcatgtctataaaattttcaacatccatgtagtcgctaaaatcactagtcaccacactagtttctccaataatagggccatccattccaatcaaaactgtcacaggattgtttgcagcatcatcttccaagatgttctcactgtcgggtacttgaaagaaaatgtctccatagtcatctacaatatactgaaagtctgaccaagcaacatgcccatgaggttcattatgcactcttgcagggaacacaagtaatcccttgccaaaaactatccggatcttctgcggcggcgcgacggcaggtcccgccgccgtcgccgcggcctctggcgatgcttcaaccgccacctccgggagaacgccgcgtccatggccaccggttgcttcttcgttgtcgtcttcgtcttctccggtatgtccttggagcccgttgcttgaagttactagttcggcggctgcatttgggaaaaaatcgtaggaatcggcgatgtagaggttttccttctcgtttgtgggaggatcatgctgtttagataccgcgagatccgtggaagagatgcgacgtctgaaaaatgttatgcccgctgaagaacgtgctggtgtgtctgcaacttcaggagcctcatcgctgatgcttatgacagctgatttactggtggcggggattgataggagttcacagatggtgttgtcgatgatatgccagcatgctgcagtggtggcggagggttggttggcttggagcaccacttcctcattggacttcgagtaaacgctaagcccagacaagtttagctcgattggcacgttgcagtcagatcctcctggtgctgaatggagctcaaccttacatgagtcggccccatatgtgctgctgagtggtaagcctgtgatgctcacgctgtacttgccattgtcttgggtatagccgaaacccaccagtgcctggtcattagcctgacaagtaaccttgaccat

SEQ ID NO: 22045 - DNA, 192 bp, Oryza sativa
  Clone ID: PAT_MRT4530_27258C.1
atgaacaagcaaggatcaaggaaggacgcaaacgcaaggaagtggaagaccacaggaaacacaatctgtccatcacagccggctacagagctatttcacaagagggtatccaggagcttaccatcatggcttaccgtctacaccctgaccatccacgcagcaggaggagattcaaaagaaatggcaaactag

SEQ ID NO: 22046 - DNA, 327 bp, Oryza sativa
  Clone ID: PAT_MRT4530_27259C.1
cttgacttcagatttggctctgtaattcacagagcctgtgctatcgaagaacaggcggaaagttatgacgcagccagtgagtgagtgagttattcattgtagcgagacgatgaactcataatgtctcgtcataatgtaatatcaatcatcagatatcagttagattagtaatagtaaaatcctaccacaatattcctagcatttcttgtgactttgccttcgtgcaatattcctctaccaccacgatttaatatatttctgaaaatttggagagccataaaaggggggaaaagcattcaactgctactgaatctctcgtgccgaatt

SEQ ID NO: 22047 - DNA, 3646 bp, Oryza sativa
  Clone ID: PAT_MRT4530_2725C.1
agcgggtaaaacggagccttcctctctagctagggctagaacacacagtataggggtcatagatgcaatgatctgctacagaactttaatggaaaaggaggaggaaacatagccgcgtcaacctccctaatctaggccgtatagacagccattgagtgcaccagctgccgatcctatcctccacgccatcctggcttatccccaagccaatcccccccataaaaactccatccctatctgccttttcctccgtcctctcccgcgccatggccgagctcgccgtgagctccgtgccacccgtccgtcgcgtcatgccccttgtagccgccgcgcctcgttgctgccggcggtgggtctccggtggtgcgccgccgcttccctcaccacggccgagccctctcaccctccctcagcctgcagcccctctctctcttcctccctcttcaggccaccggcccagtccttttgctcctcccttgcctcccatccttctccctcctcctcacttcgccgtcgctgccgctcctcctcgcccgaggccgacgccgccaccgccgaggactccgacgacgccacagccgactccgtcgtcgctcctcctcaccatcgaggccgactccgccgatgcccgaggccgataccgccgccgccgccgactccgccgccgcccgcgtctacctcccctccaccgccgccgccgaggactcctccgccgccgtgcgatctgcctccccgccgccgcccgaggcctccgccgccgccgccgatgtctccgacgacgccgcggccgactccgccgcccgcgtctacctcccctccaccgccgccgccgaggactcctccgccgccgtgcgatctgcctccccgccgccgcccgaggcctccgccgccgccgccgaagtctccgacgacgccgcggccgactccgccgccgcccgtgtctactccccttcgccgccgccgccgccgaggactctgccgtcgccgttgaggccgaatccgtcgccggctcgccgccgaggccgactccgacacagccgaggtcgactcccgcgcgttcgactccgccaccgctcgcgtttgcctccccgccgccgccgggccgccgaggtcgactcagccgccacgcgcgtctgcctcccgcgcatctgcctcctcctccgccgccgcgcgcgtcttccgccgccgccgaggccaacgccgccactgccgccgcgactcctcctccaacggctcatccgccgcggcggtctctcctccctattcccctacctcagcgtcccccggagccccccccccccccccccccgcggcgccctccggcgaaaaagttaccggtggcggcggcgtccaccatgcaatggagcaccgaccatgacagggctctccgctcccgccaccccagtcagtacactagacaagtcccttcacttcatctccctcactcttaaatctcaatctcccccaacccccgccgtgccccccagcccctgtccgggatcggtcagaccggccacacaataccggtcagaccgccctatctacccggtcagaccggtcatgcagagctggtcagaccgccggtaccaccggtcagaccggccgtgcaatgccggtcagaccgcccctggtcagaccgcttagcaagtgtgagttctggttgtccgaagtcaaattcttagggcacgtgatatctgctaaaggagttgctgtggaccccgaaacagtgaccgccgtcactgattggaagcaacccaagacagttactcaggttcgcagctttttgggtttggcaggatactaccggaggttcatcgagaacttctccaaaatcgctcgacccatgacacagttgttgaagaaagaagaaaaatttgtgtggagcccgcaatgcgagaaggcgttccaaactctcaaggaaaagctggtttcctcgccagttttaatcttaccggatactcgcaaggacttcatggaaggtcatgtggtagcctatgcctcacgccagctacggcctcatgaaggcaactaccctacccatgatttcgagttggccgctgtggttcatgctctaaaaatctggcggcattatctcattgggaattgctgtgaaatatataccgatcataagagtttgaaatacatcttcacccagtcggatctgaatcttcggcagagaagatggttagagctcatcaaggattatgatgtgcgaatccactatcaccctggtaaggccaacgtggtcgcagacgcgctgagtcgaaaaagccgttgcaacactcttggcgtccgtggcattccaccggaacttcatcaacagatggaagccctgaacctaagcatggttggtcgtggattcttggctacgctggaagccaagcctaccttactcgatcaaatccgcgaggctcagaagaatgatccagatatgcatgggatcctcaagaatatgaaacaagagttcgtggccctttgtgatgtgtgccagcgtgtcaaggcagagcatcaacgaccggccggacttctccaacctctacaagtaccagaatggaaatgggatgaaattgggatggatttcatcaccggacttccaaaaacccaagacggttatgactctatatgggtagtcgtggaccgactaaccaaggtagctcggttcattcccgtgaagaccacctatggagggaacaaactagctgaactctacttcgctaggatcgtgagtctccatggcgttcctaagaaaattgtatctgatcggggaagccagttcacctctcatttctggaagaagctccaagaagagttgggtacccgcttaaatttcagcaccgcgtatcacccgcagacagatggacagaccgagcgtctaaatcagatcctagaagatatgcttcgcgcatgtgtcctagattttgggaaggcatgggataagagtctcccctacgccgagttctcctacaataacagctaccaagccagcatacaaatggcaccctatgaagcgttgtatggccgcaaatgccggacaccgctattgtgggaccaagttggggaaagccaagtgttcgggactgatatcatgagagaagctgaagcgaaggtcagaaccattcgggataatctaaaggtggcacggtcccggcagaagagttatgcagataaccgatgccgtaacctggaattcgcagtggacgattttgtgtaccttcgagtcacgccattgtggggcgtacacaggtttcagatgaaagggaagctcgcagctcggttcgtgggtcctttccgcatcatttctcgacgcgaagaagtagcttaccagttggagctgcccgcctcattgggcaacgtgcatgatgtgttccatgtgtcgcaactcaagaaatgtcttcgagtgccatccgagcaggccgactcagagcatattgaagttcgcgaagacttgacctacgtagagagaccagtgacaatcctggacaccatggagcgcaggaccaggaaccgggtaatccatttttgcaaggtccaatggagcaaccacgccgaggaagaagccacttgggagcgtgaagacgagctgaaggcagcccatcccgatctcttcgctagttcttccgaatatcggggtcgagattccgtttaa

SEQ ID NO: 22048 - DNA, 1479 bp, Oryza sativa
  Clone ID: PAT_MRT4530_27260C.1
atgggatcgtgcgcgcgggtgcatgcgctggcggtggcgtgggcggtggcggcgctgctgtcccgcgcgacgccggcgggggccctggcggcgaactggggcacccgcgcgctccacccgctccccggcgacgtcaccgtccgcctcctccgcgacaacggcttcgacaaggtcaagctcttcgaggccgacccctcggcgctccgcgcgctcggccacacggggatccaggtcatggtcggcctccccaacgagctcctcgccccggtctcctcctccgtcgccgccgccgagcagtgggtcctccacaacgtctcctcctacatctccaagctcggcgtcgacatccgcgccgtcgccgtcggcaacgagcccttcctcaagtcctacaagggcaagttcgaggccgccacgctgcccgccgtgcagaacgtccaggccgcgctcgtcaaggccgggctcgcccgacaggtgcgcgtcaccgtcccgctcaacgccgacgtctacgagtcgctcgacgggaggccgtcggcgggggacttccggcccgacatcgccggcctcatggtcggcctcgtccgcttcctcctcgacaatggcgggttcctcaccatcaacatctaccccttcctgtcgctccaggccgaccccaacttccccgccgactacgcctacttcccgtcgccggggtcgccgccgtcgcaggccagcgtccaggacggtggcgtgctgtacaccaacgtgttcgacgccaactacgacacgctcatctcggcgctggagaagcacgggctgggcgccatcgccgtcgtggtgggggagatcgggtggccgaccgacggcgacaagagcgccaacgccgccaacgcgcagcgcttcaaccaggggctcttcgaccgcatcctcgccggcaagggcacgccgcggcggccgcagatgcccgacgtctacgtgttcgcgctgctcgacgaggacgccaagagcatcgacccgggcagcttcgagcgccactggggcgtgttcaactacgacggctcgcgcaagtacaacctccgcctcgccggcggccggagcatcgcgccggcgaggggcgtccgctacctgtcgcggcagtggtgcgtgctccggccggacgccagcccggccgacccggcgatcggcggcgccgtcggctacgcgtgccagtacgccgactgcaccagcctcggcgccggctcgtcgtgcggcggcctcgacgcccgcggcaacgtctcgtacgcgttcaatcagttcttccaggcggccaaccagatgaagggctcctgcaacttcaacaacctctccatgatcaccacctccgacccctcccagggcacctgccgcttccagatcgagatcgacaccggccgccacgacctcgccgtcgcctcctccgcatccgccgccgccacgtccgtcgccgccgttctgctcctcgccttgcttggcctcgtcatataa

SEQ ID NO: 22049 - DNA, 969 bp, Oryza sativa
  Clone ID: PAT_MRT4530_27261C.1
atgcagcatgggccacaagcatcctttcttaccgcccctactctctccctcctttgttttctctccatctctgtcccagtgaagcaagatgaggcgaccttcgcaatttcttgtatagccatcgacggctgctccttcactgagctaatcattgtctacccatggtcattaccgtcagtagctatcccgtgccccatcatcgctctgcactatcgctatgcctcagcgataggtaaatgcggagggatcccagagcctatgccgctaatggttgctcgtcgtggtggcacctatccccatagctcagtgcctcagtcaactggaggggcaacgacaatggtgctgcaaacagagcgaagaaaagtgaatgggaagctaggtccctactttaggacttctagaggtctgaggcaaggggatccctggtcccctttcctcttcaatcttgtaggtgatgctttgtctgttattctggaagaggctgtaagaaatggggtgctgggaggcattgttcctcatttagttgaaggggggctttctcatatgcagtatgcagatgataccattctctttactaccattgaggagggggacatcttggctttaaaattcctacttttctgttttgaagaaatgccaggaatgaagataaactatcagaaaagtgaggtttatgtcttaggggttgagaaagaagaggaactgaggattgctgatatattaaattgtaaagtgggggagatgtcttttgtttaccttggtttgtctatgggagtcgacaagctcaagaagaaggatcttattcctgccatgcaaaaggctagaaaaagacttgagtcttggcatagtggtcacctctcttttgggggagggagatcaggattaattcctgtctcacaagcattcctttatattacatgggctttttctatttacctggttactttcataagaaaatggacagtttga

SEQ ID NO: 22050 - DNA, 1113 bp, Oryza sativa
  Clone ID: PAT_MRT4530_27262C.1
atgcagctccgccgcctccttggtctctccggtgaggtctccggccgcctccgccgctcccactcgacggtcgcctctccctcgcgccctgcgtgggccatgatagacatcgcgcggcaggacccgccggagctacacgcgacctcccgcatcgccgagcccccagcgaccagcgacggcttcctcctccgcggggtgtacgagaacgacgtcgcccgcgtcgtctgcaacccgctcaccggccagctgttccgcctcccggacatcggcggcgcgagaagcgaggcctcgcccggcggcgcggcggggctcctcacccaggccgatcgcggggacgggcacgggccgcctgatcggtacgcggtgatcgaggtcggcgtcaacggccacgtcatgcaccgtttcctctcggagacggggaggtgggaggcgatgccgagcttcttctcctcgctgccgttcgggcgttccactatcatcgaccacccaccggtggcgttcggcgggcggatgtggtggatcgacctgggctggggcgccgtctcattcgacccgttcgccgacgagccggacttccgcatcgtcgcgctgccgaccggcagcgtgctgcccgccgaggcgtcgggcttcgcgacgcgacggaagctgaggctgagcaggtatcggcgagtcggggtcagcgacgggaggctgcgctacgtcgaggtgcccgcgtcggccggggccgagccgttcgagctaaactccttcgttctcgacgaagcgggcaaccgctggacgctggtgtccagcggggagcccttggctgacgggagacagctctgcccggacggaagccacatcttcgcggaggcgccgttcatctgttgcatcgatccgcttaaaggcaacgtcgtgtacctcatggccggtccaggcaaccaggtggttatcggcgtggacatggagacggggttggtgactggggccactctgttagaccaactcaactggctgacaccctgcttgctcccgccgtggcttggatcatgccagattccttcttcaggcaagaacaatgtgaaaaatgaggcgttggctgaaattctggttcgttcagacagagccaagtag

SEQ ID NO: 22051 - DNA, 426 bp, Oryza sativa
  Clone ID: PAT_MRT4530_27263C.1
atggtttgccgtaaagatccgcttgttgcttgtcaaacccccactgttcagcttgaaattcataagggtgatgacgcattcaatggacagaattttggtcttgatgtgattttcgacgagtccatggataataataaagaggatgaggtaacaatgacctatgcccgttactgttctgcacgagatcatgttcgatccggcaagaaaaacaaagagatatgtcacccctgctttttcaaatttgatcaagtggttccaatccacaagaacgagataaaaagccatatctccaataaacacaacaccgatgggttcttgtgcccatcctctggttgcactgtcagggcgtgcacattgggggatatcgggctccaccacctgttttgccatgagaagaagaatggctggtggacgtattacctgtag

SEQ ID NO: 22052 - DNA, 637 bp, Oryza sativa
  Clone ID: PAT_MRT4530_27264C.1
gagagagagagagagagagagagagagagagagggagggagggagaagacggcgggagagcagcgccaccgcccgcgcggcatggaccggaatgccggttccttcgtcgccatgcgccgcctctccggcggctcctcctgccacgacccctcgccgaacacgtacgcggaggtcgtggcggggtcgacggcgtggatcgggagggggttctcctgcgtctgcgcgcagaggagggacagcgaccagcgcatctccttcgatttgagccccgctcaggagtgttgtctgcagagattacagaaccggatagaggtaccgtacgatggttcaaatggagagcatcaggaagcattaaagaccctttggcatgtttcctttcctggaactgaacttttaggactagtatcagaccagtggaaggagatgggatggcaagggaaagatccatctacagatttcaggggcggtggctttatctctttggagaatttactgtacctttgctaagaactatactaaatccttccaggagctcctttgtaagcagaatggtgatagagcattgtgggaatatccatttgctgttgctggtgtagacattacattcatgctcattcagatgcttgatcttcaagca

SEQ ID NO: 22053 - DNA, 1223 bp, Oryza sativa
  Clone ID: PAT_MRT4530_27265C.1
gtgggaggaggtccggcgagcctggcaggtcttgggcgtcgtcgagctggacggcatggagaaggaggtggacgccatggtgagcagcctgagcagggggggctcgccggagaaggtggcggcggagttcatgacgccggcgatggtgagcatggtggaggaggcgcggaggctgctgccgccgacagcggcgaagaagaaccccgggttcgggtgcgacgatgatgtgcaggacatgatcgggcagcggctggagctgtggtcgaaggtgaggcgggaggtgccgctgatgtacgaggcgtcggcgtcggcggaggaggaggagcagcagcaggtgaccgccgtgttccgggaggcgtcgctggaggccatcggaggtccggtgaggacgacacaggagaaggaggcggcaacggctgcgactgcgacttgagaaagggagaggcggtcgacggcgaagcggggtcggtgcgggcagcggacggcggggaagcagctggctagctgggcgcaagcggcgggcataggcggcggtgggaggagcagcgcggggcgggcggggaggagcggcgcatgggcggcggttcctcgcactctctgccacgaggaggtgtttgtgttggtattggggatgaggaggaagaggagggggtgtgggcgtgtggctaggggcaggcggaggtggaagcagagaaagggaaggatggcgagcaggaagaggcgacggagtgggaggagcaggcggcggtgacggtttggagtggtggtggcggggactggaggagaggagaggagaggaggagatggaggctgtggtggcgctaggatggggagaggcagcgatggcaggagcagatggcagtggcggcggaaggagaggaggcggaggcggaggcgacgacgaacggaagggaagagggggaaaatgaaaatacgcagacttgagtgggaggactggagggatggggatgaggaggaatagggcagggggaggtggaagcggagaaagggggaggtatggattcctttgcttccaacattgggaggagacatggcggcattggagatggggggaggacgattcacatcagcggggaggatgggagcggaggaagcggtgatgggattggggaggaggaggcgagccgagtggcagcagcggaagcgcggagcacacaatccggcgcagtgaccagggaaggggaggcggcctcccgagatgg

SEQ ID NO: 22054 - DNA, 394 bp, Oryza sativa
  Clone ID: PAT_MRT4530_27266C.1
gggggatggaggcagaggctaaacactatgtatgtattttaaactcgttaaaaaagattaggggcttgaataacatgcctaaccaacaaggtgctcaaggccaaatcaatgaagagcaacatataaataactttgctcattggaattaacctggagctgcaacgacacactggttacagagccctccaagtcctcacggattggaatgggatcaggtggccttgcacaactctcccacgataactgtctcgcttggattggaaccacttagttgcgctcttcttgagaaacatgcccttcttggcctcctccgcctccccacgagaaacatactcaccaagctgtgccaagaggttggcctttgggtacatgagcacgttgtactcctccccct

SEQ ID NO: 22055 - DNA, 4494 bp, Oryza sativa
  Clone ID: PAT_MRT4530_27267C.1
atggacatctctagggcaaatgaaggctacacgagctgcggcccggtagtcgagatgtcatggcacagggccgatgtcctgctgctaggggctcagtcctgcctacctgtcccggaggttccggccgtaggtggggttgggtcggtactcttgtgtatggctaggatgggttggaaactatgtcacgtcttccatccgtataccgtggtgatggccggtagcatcaaccgtcgtggcctggacctgactggcttcgttttggagctgcggggcatgtgcgttgtcctggggtatccgcatggagtggactaccaaggcaagcagctcccggagcaggagggtgacgatgcagagccccacgctgcttgggaggtcactgcagtgatcctcactggctcacccgagaggacttcgttggcagtcaccgcgggtggagattctttctccgctgcttgccagaacgccgcactcctcgccattggcactcttcaccagtgctacccggacgagttgcagcactcgccctaccgctaccaccctcgtcgcggaggagcccgtgactacgccaccttcagggatgctagctcggaggatgacgctaccatcatgcacttggcgcgcatggtggaggcgtacgacgcagcccgtatcgacttccatcatatggtgcgccgtgggttggtcgagaacaacatgaagatcctggagctgcgtcaggagaatctgcagctgaagaaggacttggacacggtggaggcgcagctgtgtcagctcaagatcgcccagggagagatggtgacaaccaggagaagtgctgctaccggtgaaggcagtcaccccgaaggcagcaaccacaacaagcatggcagcccacctccacctccttccccgccaccaccaccaccaccagacaccaactccatcctcacccaaatcctcgcccagcaggccaacatgatggctgctttcctccatcacatccaaaatccgccacagcataatgctccacctccaccaccacccccgcaacattctaaactcgctgagttcctccgcatccgtccgcctaccttctctagttccaataaccccgtggatgccttggattggttgcatgccgtggggaaaaagttggataccgtgcagtgcaacgatgaggagaaagtcatctttgctgctcaccaactgcagggacccgcatctctatggtgggaccacttccaggctacgcagccaaaaggacagcctattacttgggcccgcttcaccgccgctttccggaggacccatgtgcccgccggagtcatggcccttaagaaaagggaattccgggagttgaagcaaggcaaccgttccgtgatggagtatttgcatgagtttaacaacttggcccggtacaccccggaggatgttcgggaagatgaggaaaagcaggagaagttcttggcaggaatggaccctgagctgtccgtgcgtctggtctccggggattatcctgatttccagcgtctggtggacaagagcatccgcttggaagccaagcacaaggaactggagtcgcacaagcgtcgcttggcgaatttccgcaatcaacagggggctaaccaaaggcctagtcaaggccgcaaagacgctcaaggtcagcagcgtctgtgcttcaattgcttcgagcccgggcactttgtggataaatgcccgaagccgcggcgccagcaaggccaagcgcctccccgccccaacaacggtggtaaggatgtcattcggggtcgtgtgaaccacgtgactgccgaggatgtgctgacgactccggacgtcatcgttggtacgttcctcattcattctattcctgctaccattttgttcgactctggagcttcccactcatttatatctgtgcccttcatggggagaaatcagttgggggtagaaaggcttaggaaccctctgctcatcaccacccctggaggggttatgacagcaaagtattatagccctgccgttcctatagaaatccagggaatcccttttcccttggatttgattcttctggacaccaataacttggatgtgatccttgggatgaattggttggctcaattccaaggagtagtggattgcgcaaggcgcactgtcactctgtatcgggggccggaacaaccggttgttttctttgcaccctcaacctctgtcggcagttcagaacttcatcagataggactgtcagaaatacccatcgtcagagagttcggagatgtgtttccggaagaactacccggtatgctgcccaagcgagagattgagttccggatagatcttgctccaggaaccactcctctatacaagcggccctaccgtatggccgcgaatgaactggccgaaaaggacaagacaaagaggatgtgtgttgactacagagctctcaatgaagttactataaaaaacaagtaccctcttccccggatcgatgatctgttcgatcagcttaaagctgccactatcttttctaaaatcaatcttcgctccggatatcaccaattgcgtattcgtgaagaagatatcccgaagaccgcattcaccacgcgttatgggctgtatgaattcacggtgatgtcgttcggtctgaccaatgctcctaccttggataagtttgttgtggttttcatcgacgacattctggtgtactcacaatcagaggaagaccatcagcagcatctccgtctagtgttgggaaagctgcgggaacatcaactttatgccaagtttagcaagtgtgagttctggttgtccgaagtcaagttcttagggcacgtgatatctgctaaaggagttgctgtggaccccgaaacagtgaccgccgtcactgattggaagcaacccaagacagtcactcaagtccgcagctttttgggtttggccgggtactatcggaggttcatcgagaacttctccaaaatcgctcgacccatgacacagttgctgaagaaagaagaaaaatttgtgtggagcccgcaatgcgagaaggcattccaaactctcaaggaaaagctggccaacgtggtcgccgacgctctaagtcgaaaaagccgttgcaacactctcggcgtctgtggcattccaccggaacttaatcaacagatggaagccctgaacctaagcatagttggtcgtggattcttggctacgctggaagccaagcctaccttactcgatcaaatccgcgaggctcagaagaatgatccagatatgcatggactcctcaagaatatgaaacagggtaaagccgctggtttcacagaggatgaacacggaatcctatggaacggaaatcgggtatgcgttccagacgacagggaacttaaacagttgatacttcaggaagctcacgaaagtccttattccatccaccctggctgtacgaagatgtacttggacttgaaagagaaatattggtggggcggttatgattctatatgggtagtcgtggatcgactaaccaaggtagctcggtttattcctgtgaagaccacctatggagggaacaaactagccgaactctacttcgctaggatcgtaagtctccatggcattcctaagaaaattgtatctgatcggggaagccaattcacctctcatttctggaagaagctccaagaagagttgggtacccgattaaatttcagcaccgcgtatcacccgcagacagatggacagaccgagcgtctaaatcagatcctagaagatatgcttcgcgcatgtgtcctagatttcaggaagacctgggataagagtctcccctatgccgagttctcctacaataacagctaccaagccagcatacaaatggcaccctacgaagcgttgtatggccgcaaatgccggacaccgctattgtgggaccaagttggggaaagccaagtgttcgggactgatatcctgagagaagctgaagctaaagtcagaaccattcgggataatctaaaggtggcacagtcccggcaaaagagttatgcagataaccgacgccgtaacctagaattcacagtggacgattttgtgtacctacgggtcacgccattgcgaggagtacacaggtttcagacgaaagggaagctcgcacctcggttcatgggtcctttccgtatcattgctcgacgcggagaagtcgcttaccagttggagctgcccgcatccttgggcaacgtgcatgatgtgttccatgtgtcgcaactcaagaaatgtcttcgagtgccatcggagcaggccgattcagagcaaattgaagttcgcgaagacttgacctacgtggagaggccagtgaaaatcctggacaccatggagcgcaggaccaggaaccgggtaatccgtttttgcaaggtccaatggagcaaccacgctgaggaagaagctacttgggaacgtgaagacgagctgaaggcagcccatcccgatctcttcgccagttcttccgaatctcggggtcgagattccgtttaa

SEQ ID NO: 22056 - DNA, 1365 bp, Oryza sativa
  Clone ID: PAT_MRT4530_27268C.1
atggctaggatgagttggaaactatgtcatgtcttccgtccgtatgccgtggtgtttgtagatggccggcagcatcaaccgtcgtggtctggacctgactggcttcgttttggagctgcggggcatgtcactgcagtgatcctcactggctcacccgagaggacttcattggcagtcaccgcgggtggagattctttctccgccgcttgccagaacgccgctctcctcgccatctgcactcttcaccagcgctacccggacgagttgcagcactcgccctaccgctaccaccctcgccgcggaggagcccgtgactacgccaccttccgggatgctagctcggagtatgacgctaccatcatgcacctggcgcgcatggtggaggcgtacgacgcggctcgtatcgacttccatcagatggtgcgtcgcgggttggtcgagaacaacatgaagatcttggagctgcgtcaggagaatctgcagctgaagaaggacctggacacagtggaggcgcagctgtgtcagctcaagatcgcccagggagagatggtgacaaccaggagaagtgctgctaccggtgaaggcagtcaccccgaaggcagcaatcacaacaaccatggcaggccacctccacctcctcccctgcctccaccaccaccaccagacaccaactccatcctcacccaaatcctcgcccagcaggccaacatgatggccgctttccttcatcacatccaaaatccgccacaacataatgctccacctccaccaccacccccacaacactctaaactcgccgagttcctccgcatccgtccgcctaccttctctagctccaataaccccgtggatgcgttggattggttgcatgccgtggggaaaaagttagacaccgtgcggtgcaacaatgaggagaaagtcatcttcgccgcccaccaactgcaggggcccgcgtctctatggtgggaccattttcaggctacgcagccagaaggacagcctattacttgggcccgcttcaccgccgctttccggaggacccatgtgcctgccggagtcatggcccttaagagaagggaattccgagagttgaagcaaggcaaccgctctgtgatggagtatttgcatgagtttaataacctggcccgatacgccccggaggatgttcgtgaagatgaggaaaagcaggagaagttcttggcaggaatggaccctgagctgtccgtgcgtctggtctccggggactatccggatttccaacgtctggtggacaagagcatccgcttggaagccaagcacaaggaactagagtcgcacaagcgtcgcttggcgaatttccgcaatcaacagggggctaaccaaagg

SEQ ID NO: 22057 - DNA, 4410 bp, Oryza sativa
  Clone ID: PAT_MRT4530_27269C.1
atggttatgccgatggtgacgaccaggagaagtgctaacaccggtgatggcaaccaacccgaaggcagcaaccacaacaaccatggcagcccacctccacctcctcctccgcctccaccaccaccaccagacaccaacgccattctcacccaaatcctcgcccagcaggccaacatgatgactgctttcctccaccacctccaaaatccgccacaacagaatgctccaccaccacccccacaacactctaaactcgccgagttcctccgcatccgtccacctaccttctctagctccaacaaccccgtggatgtgttggattggttgcatgccgtggggaaaaagctagacaccgtgcagtgcagcgatgaggagaaagtcatcttcgccgcccaccaactgcaggggcccgcatctctatggtgggaccatttccaggctacgcagccagagggacagcctattacttgggcccgcttcaccgccgccttccggagaacccatgtgcccgccggagtcatggcccttaagaaaagggaattccgggagttgaagcaaggcaaccgctccgtgatggagtatttgcatgagttcaacaacctggcccggtacgccccggaggatgtacgggaagatgaggaaaggcagaagaagttcttggcaggaatggaccctgagctgtccgtgcgtctagtctccggtgactatccggatttccaacgtctggtggacaagagcatccgcttggaagccaagcacaaggaactggagtcgcacaagcgccgcttggcgaatttccgcaatcaacagggagctaaccaaaggatccgctacaccaatccctatccagggggatcgtcctcgcagcagcagcagcaaccacgctccgcgccccgacctcaattcgtggtgcgcgtcccacagccgcagcaacagcagagccagcaagggacctgtgcgccccgtcctcctacgccagccgcgcagtctggtcaaggccgcagggacgttcaaggtccgcagcgtctgtgcttcaactgcttcgagcctgggcactttgcggataaatgcccaaagccgaggcgccagcaaggccaagcgcctccccgctccaacaacggtggtaaggatgtcattcggggtcgtgtgaaccacgtgacggccgaggacgtgctgacaactccagacgtcatcgttgaactccatcagataggactgtcagaaatccccatcgtcagagagttcggagacgtgtttccggaagaactacccggtatgccgcccaagcgagagattgagttccggatagatcttgctccaggaaccactcctcggtacaagcgaccctaccgtatggcagcaaatgaactggccgaagtcaagaaacagttggaagagttgaaagaaaaggggtacatacgtccgagtacttccccctggggtgctcctgtgatttttgtggagaagaaagacaagacgaagaggatgtgcgttgactacagagctctcaatgaagtcaccatcaaaaacaagtaccctcttccccggatcgatgatctgttcgatcagcttaaaggtgccacggtattctccaagattgatcttcattccggatatcaccagttgcgcatccgtgaagaagatattccgaagaccgcattcaccacgcgatacggactgtatgaattcacggtgatgtcattcggtttaaccaatgctcctgccttcttcatgaacttaatgaacaaagtgttcatggaatacttggataagtttgttgtggttttcattgatgacattctggagaaatactggtgggttagtatgaagcgggaaattgcagagttcgtggccctttgtgatgtgtgccagcgtgtcaaggcagagcaccaacgaccggccggacttctccaacctctccaagtaccagaatggaaatgggatgaaattgggatggatttcatcaccggactcccaaaaacccaaggtggatatgattctatatgggtagttgtggaccgattaaccaaggtagctcggtttattcctatgaagaccacctatggagggaacaaactagccgagctctacttcgctaggatcgtgagtctccatggcgttcctaagaaaattgtatctgataggggaagccaattcacctctcacttttggaagaagctccaagaagagctgggtacccgattaaatttcagcaccgcgtatcacccgcagacagatggacagaccgagcgtctaaatcagatcctagaagatatgcttcgcgcatgtgtcctagatatcgggaagacctgggataagagtctcccctatgccgagttctcctacaataacagctaccaagccagtatacaaatggcaccttatgaagcgttgtatgggtgcaaatgccggacaccgctcttgtgggaccaagttggggaaagccaagtgttcgggactgatatactgagagaagctgaagcgaaggccgacttagagcaaattgaagttcgcgaagacttgacctacgtggagaggccagtgaaaatcctggacaccatggagcgcaggaccaggaaccgggggcgcgggcgcaccgcctcctgccgctgcgccggcgtggtcgccttcgggcgcaccgagcggctgccgcgtggggcccggctgtcagccgcccgcgcccttaggaccatgatcatcaccagttcagaatttactcctgaagacgcagcaaggatacccaagcttcaagttcttggccaagcacttttgctgatagctttcggctcgggagaaaacagacgcgaagagcaagtactgttcgatgtcgtcgacatcccgtacaactacaatgccatcctcggccgtgcgaccctgaaccagttcgaagccatttcccaccacaactatctcaagctcaagatacccggcccagcgggagtgatagtggtcaaggggcttcagccttcggccacgtcaaaaggcgatctggccataatcaacagggctgtgcacaatgtcgaagccgaattgcacagccggccgaaacacgcgccaaaacccacccctcacagcaagatagtaaaagtgcagattgacgatgccgaccccgcaaagctcatatcgctgggggacggcatgggcgaacaagaagctgagggcatcctagcggtgctcaagaagaacattgatatcttcgcctggagccccgacgaagtgggggttgtttcaacagacctcatcatgcatcaactggcaatcaagccggatgccaagccaagaaagcagaagttgtgtaagatgtccgccgatcgtcaagaggcggcgaaagccgaagtccaaaaactactcagggctggggtcattcaagagattgaccacccagagtggctggcgaatccagtactggtgcggaagtcaaacggcaaatggcgcatgtgtgtagatttcacggacctgaacaaagcatgtccgaaagacgatttccctttgccgcggattgatcagctcgtggattcaacagctggctacgaactcatgagtttcctggacgcatattccagctatcaccagatccatatgaacccgcccgacatcccgaaaacagcattcatcaccctgttgggcattttctgtcacctcaggatgcctttcggcctgaggaacgccggagcaaccttcgccagactagtgtacaaggagaccttcgacaacttgcgcgcagcgggcataaaactgaatcctgagaagtgtgtcttcggcattcgcgcgggcaagttgctgggtttcctggtttccgaaagaggcatcgaagcgaaccccgagaaaatcgacgccattcagcaaatgaagcccccgtcaagtgtacatgaggtacaaaagcttgcaggccgaattacggcacttagccggttcctcccaaaggtggccgaaagaggtctgccattcttcaagaccctccggggcatgggaaagttcagttggacaccagaatgccaagcagcattcgacgagctaaagcaatacttgcaaagcccaccagccctcataagcccaacactaggaagcgaactgctgctatacttagcagcttcaccagtggcagtcagtgctgccctcgtccaagaaacagagttcggccagaaaccggtttattttgtctccgaagcactgcaaggggcgaaggcaagatacatcgaaatggaaaagctcgcttacgccctggtgatggcttcgcgcaagctcaagcactacttccaggcccacaaagtaatagtgccttcacagtaccccttgggcgaaatactccgaggcaaggaaatctcaggcaggcttagcaaatgggcggcagagctatccccgttcgacttgcattttgttgcacgcactgctgttaagtctcaagcctaa

SEQ ID NO: 22058 - DNA, 1190 bp, Oryza sativa
  Clone ID: PAT_MRT4530_2726C.1
cccacgcgaaaggtgcgacatctgtgccagtaccaacttcaaatggcaacccctcagttaatggacctatgcttacccgccaaccaaatggtgttgttgcaaatattaaaacggagccaacaactttaccgcccatggtttctgcacctgctttctcgcatgtaacacctgttgcaaatggtgtttcacaaggattatcatcagtacaaagtccctcaccgtcccttatttcacaggaaactaatcttgcaaatgatagtgtgcaagaacataagcctttaataaaccctatccaacagtcaattcgacctggtggtccagcaaatgtcagcatcctcaacaatctatcacagcatcggtcagtggcaaccattatatcaggtggaatgcctggcatccctatgtctggaacaggacagtcaattggtagtcaacaagtcgtacaaaacactgcttttggatcaaacacacccataacaggcaattcaaatattgctgtgtcatcttctttgggtggcatccaaagcaatatcggtatatcagggcctcctgtgacacagggaggttcaatgggtagtacgcaattgggacaaggtggaatcaatacaaaccaaaatatgataagtagccttgggacaacaactgtctcttctgcacctgcaatgatgccaacaccagggaatggctcaacaggcaggtgtaaattctcttggtgtgaccaacagttctgccatgaacatgcctatagtgcagcatcctaatgcgcagcagcagcaacagcaacagcaacagcagcagcagcagcagccaccgccgaagtacgtcaaaatttgggagggaactttatctgggcaaaggcaaggacaacctgtatttatctgtaaacttgaaggttacaggagtggaacagcatctgaaacacttgcagcagactggcctgaaacaatgcagattgtgcgccttatagctcaggagcatatgaacaataaacaatatgttggaaaagcagactttctagtatttcggacattaaatcagcacggcttccttgggcaactgcaggaaaagaagctgtgcgcagtgattcaactgccttcgcaaactttgttgttgtcagtgtcagacaaagctgggcgcctcattggcatgctgttccctggggatatggtggtgtttaaccgaggacccaa

SEQ ID NO: 22059 - DNA, 429 bp, Oryza sativa
  Clone ID: PAT_MRT4530_27270C.1
atggatggtcgcatggatcagagagcaatcatccatggagagaaaatggaagaagcagcaaagaaagaaaatcaaatgtggagagcctcatatggagggcgattttctgccaagcgcgaccatcatcatcatggatggtggtcgcagagcagcagcttcgccgccacggacggaccagatcgttcgcctctgttttgtacctgcgacaccggggacatcgggacacgtgccgttctcgaattggctggattttcaaattcattgtttgaaaaatcaaaaactgaatcaagttcaaacgcggccaaaaggtgcttcagggtcttcaacggaaaacccgagaacgttggtcacaaatcctctggcacaaaggaagccgatcaaaaagcaaaccaagaacggggagagtacagacaaggcgccgaacagtaa

SEQ ID NO: 22060 - DNA, 1818 bp, Oryza sativa
  Clone ID: PAT_MRT4530_27271C.1
atggaggtggacgaagtcgggggttcgatggacatctctaggacaaatgaaggctactcgagctgcggcccgatggccggcagcatcaaccgtcgtggtctggacttgactggcttcgttttggagctgcggggcatgtgcgttgtcttggggtatccacatggagtggactaccagggcaagccgctcccggagcaggagggtgacgatgcagagccccacgctgcttgggaggtcactgcagtgatcctctctggctcacccgagaggacttcgttggcagtcaccgcgggtggagattccttctccgccgcttgccagaatgccgcactcctcgccatcggcactcttcagcagcgctacccggacgagttgcagcactcgccctaccgctaccaccctcgccgcggaggagcccgcgactacgccaccttcggggatgctagctcggaggatgacgctaccatcatgcacctggcgcgcatggtggaggcgtacgacgcggcccgtatcgacttccaccagatggtgcgccgtgggatggtcgagaacaacatgaagatcctggagctgcgtcaggagaatctgcagctgaaaaaggatctggacgcgctggaggcgcagctctgtcagctcaggatcgcccagggagaggtctgccgtcccaagcgccgccgcgtctgccgtagccagaagatcaccgcccgcaagagtacctccaggcccgagcttattcgtcagtccctagcgtggacctgcttcgtggagacccctcgtgccgagcccgtgctcgtgctctctctgtttgctggttccgtgtggggttttcagatggtgacaaccaggagaaccgctgctaccggtgaaggcagccaacccgaaggcagcaacctcaacgaccatggcagcccacctccacctcctcctccgcctccaccaccaccaccagacaccaacgccatcctcacccaaatcctcgtccagcaagccaacatgatggctgctttcctctaccacatccaaaatccaccacagcataatgctccacctccaccaccacccccacaacactctaagctcgccgagttcctccgcatccgcccacctaccttctctagcaccaacaaccccgtggatgcgttggattggttgcacgccgtggggaagaagttagacactgtgcagtgcaatgatgaggagaaagtcatctttgccacccaccagctgcaggggcccgcatctctatggtgggaccacttccaggctacgcagcccgaggggcagcctatcacctgggcccgcttcaccgccgctttccagagaacccatgtgcccgccggagtcatggctcttaagaagagggaattccgggaattgaagcaaggcaaccgctccgtgatggagtatttgcatgagtttaacaacctggcccggtacgccccggaggatgttcgggaagatgaggagaagcaagagaagttcttggtgggaatggaccctgagctgtccgtacgtctggtctccggggactatccggatttccaacgcctggtggacaagagcatccgcttggaagccaagcacaaggaactggagtcgcacaagcgtcacttggcgaatttccgcaaccaacagagggctaaccaaagggtccgctacaccaacccctatccagggggatcgtcctcgcagcagcaacagcagcagcaacctcgctccgcgccccgacctcaattcgtggtgcgcgtcccacagccgcagcaacagcagagtcagcaagggactcgtgcgccccgtcctcctacgccagccgtgtag

SEQ ID NO: 22061 - DNA, 1932 bp, Oryza sativa
  Clone ID: PAT_MRT4530_27272C.1
ctcgcaggaggggttgtattgatgccccggtgcttcgcttcttcgctgagctattctattatggccgtctcgctgagacaccggttgtcgtatcatgcaccatattacgggattccgacgttgccggagagtccgaatttgcaggagaagactctgaagagttccaaggccatcaagggtgtgacagatggtgtggaggattacgtgtagccttggtcaagctgcctgtggagtggagccgtctgcgccgtttatcttattttccgctgcttagatctttattgattgagaggaactatctacctctgtaatgacatttgattcgcttattaattagagtaataattgtactctattatcaatttgttattgtgtgcctcggctgattcctggacgagggttcacacacatgtaagcgtttggaattttggatagaaattccgggcgtgacaaggatccccctggatagggattggtgtagcggaccctttggttagccccctgttgattgaggaaattcgccaagtgacgcttgtgcgactccagttccttgtgcttggcttccaagcggatgctcttgtccaccagacgctggaaatccggataatccccggagaccagacgcacagatagctcagggtccattcctgccaagaacttctcctgcttttcctcatcttcccgaacatcctccggggcgtaccgggccaggttgttgaactcatgcaaatactccatcacagagcggttgccttgcttcaactcccggaattcccttttcttaagggccatgactctggcaggcacatgggtcctccggaaagcggcggtgaagcgggcccaggtaataggctgcccctcgggctgcgtagcctggaagtggtcccaccatagagatgcgggcccctgcagctggtgggtggcaaagatgactttctcctcatcgttgcactgcacggtgtctaacttcttccccacggcatgcaaccaatccaaggcatccacggggttattggagctagagaaggtaggcgggcggatgcgaaggaactcggcgagcttagaatgctgcgggggtggtggtggaggtggagcattatgctgtggtggattttggatgtggtggaggaaagcagccatcatgttggcctgctgggcgaggatttgagtgaggatggggttggtgtctggtggtggtggtggtggcgggggaggaggtagaggtgggccaccttggatgttggggttgctaccttcgggttggttgccatcaccagtagcagcagttctcctggttgtcaccatctctccctgggcgaccttgagctgacacagctgcgcctccagcgcgtctaggtccttcttcagctgcagattctcctgacgcagctccaggatcttcatgttgttctcgaccatcccacggcgcaccatatgatggaagtcgatacgggccgcgtcgtacgcctccaccatgcgcgccaggtgcatgatggtagcgtcatcctccgagctagcatcccggaaggtggcgtagtcgcgggctcctccgcgacgagggtggtagcggtagggcgagtgctgcaactcgtccgggtagcgctggtgaagagtgccgatggcgaggagtgcggcgttctggcaagcagcggagaaggaatctcctcccgtggtgactgccaacgaagtcctctcgggagagccagtgaggatcactgcagtgacctcccaagcagcatgcgactctgcatcgtcaccctcctgctccgggagctgcttgccttggtagtccactccatgcggataccccaggacaacgcacatgccccgcagctccagaacaaagccggtcaggtccaggccacgacggttgatgctgccggccatcgggccgcagcccgtgtagccttcatttgtcctagagatgtccat

SEQ ID NO: 22062 - DNA, 534 bp, Oryza sativa
  Clone ID: PAT_MRT4530_27273C.1
atgtcgctgtcgtcgagctccaactcgctgccgtactcgacggaccagggcgggtacagcacgcacgacacgctcgtcctcctcggcatcggcttcttcgccaccgccgtctccgtcctcatgatcgtgctctgcgagtgcctctgctgccgccgccgccgccgcggcggcggcaccgtcgtctacgtggcggccaggccgttcttcctcggcggcggcgggctcagcgcgtccgccgtcgccacgctgccgtcgttcgtgtaccgcagagaagagtgggccgaggcggcgccccgcggcgacggcagcggcagcgggcgcggcggcggcggtgggtgggcgcagtgcgcggtgtgcctgagcatcgtgcaggaaggggagacggtgcggcagctgccggcgtgcaagcacctgttccacgtcggatgcatcgacatgtggctccactcccactccacgtgtcctctctgcagggccagcgtggagcctcttggcaaggagactcctctcaaggatcaggcacctccagtgtag

SEQ ID NO: 22063 - DNA, 720 bp, Oryza sativa
  Clone ID: PAT_MRT4530_27274C.1
atgaatttatcaggacgtgacaattaccagggcaagcagctcccggagcaggagggtgacgatgcagagccccacgctgcttgggaggttactgcagtgatcctcactggctcacccgagaggacgtcgttggcggtcaccgcgggtggagattccttctccgccgcttgccagaacgccgcactcctcgccatcggcactcttcaccagcgctacccggacgagttgcagcactcgccctactgctaccaccctcgtcgtggaggagcccgcgactacgccaccttccgggatgctagctcgaaggatgacgctaccatcatgcacctggcgcgcatggtggaggcgtacgacgcggcccgtatcgacttccatcagatggtgcgtcgcgggttggtcgagaacagcatgaagatcctggagctgcgtcaggagaatctgcagctgaagaaggacctagacgcagtggaggcgcagctgcgacagcttaagatcgcccagggagaggtctgtcgccccaagcgtcaccgcgtctgccgcagcctgaagatcaccgcccgcaagagtacctccgggcccgagcttgttcgtcagtccctgtcaaccatcatagccttctcaaagataataatccgagtgcttcaaacttttcatgccaaggcctgccgagtagcgaagacgaagactgtaaagggcgaaaagataaagaatatggcctaa

SEQ ID NO: 22064 - DNA, 1946 bp, Oryza sativa
  Clone ID: PAT_MRT4530_27275C.1
gcccaaacaaaaatattttcttaataagtatgagcaaagtactcggagaagttacacggagagaattattaccaccttgtatatatatgtaagtattctaagagtaaagtttgaagcctcgtccttattatatgtagctacaacgatgaggtatacatgtgctcaggctctcagagcttgcacggcgacgatgctccggggtggtgcaccacgatgaggttgtacgcgtcgagcgtgaggaagtcgtccagctccggcgcggtgcactgccggctgaagatcctgccggcctccgcgtaccggccgcgccggaacctctcggcgcccacctcggcctccaccctcgccatctccacctccacgacgcgcgccagcagctcgggcgtggcccggacctccacgccgccggcgtccagcaccgcgccgtgccggagccactgccagttctgcacccggctgatctccgcggtggcggcgtcctccatcaggttgtacagcggcacggagcccgacccggatagccacgccgcgacgtactgcacgccgacgcgcgtgttgtggcgcaggccctccaccgtgcgcgccccgcgcggcggctggagcaggtcctcctccgtgacggcgacgccggcacgggcggcgtcgccagccgccgcgtcgatctggttcggcctccctccgaggtgtccctcgaacacctcccggatcgccgggatgagccccgggtgcgccgcccacgtcccgtcgtgcccggcgcgcacctcccgcagcttgtccttgcgcaccagctccagcgccgcctcgttcgccgccgcgtcgtccttgatcgggatctgcgccgccatgccgcccatggcgtggacgccgcggcggtggcaggtctggatgaggaggtgggagtaggagcgcatgaagtgctgggccatgccgacgagggcgcggtcggggaggaggcggtcggggcgggcgcggaacgtcttgacgtagctgaagatgtagtcccagcggccgcagttgagccccgccgagtggtcgcgcagctcgtgcaggatctcctccatctggaacaccgccggcagcgtctccaccagcaccgtcgccctgatgctccccctccctatccccgcctccttctccgccctctcgaacacccccttccatatcctcgcctccctagagtgctccatcttggggaggtagaagaaggggccgaagccggcgccctggccggagcggaaggcggcgtggctgtggaagaagtagaggccgaagtcgacgaggcagccgatggccggctcgccgtcgacgaggacgtgcgcctcggggaggtgccagccgcgcggcctcacgaagagcgtcgcggggcggtcgccgagcctgtactcccgccctcgcgccgcgtcgcggtaggtgatcgtgccggcaaccgcgtcgcgcaggttcacctgcccgcgcatcaggttctcccacgtcggcgacagcgcgtcctcgaagtcagccatgaagaccttggcgccggagttgagggcgttgatgaccatcttgcgcggctcggcggggccggtgatctcgacggtgcggtcggcgatggccggcggcacgggggcgcacgcccagccgcctgcctcgcggacgggcctcgtggccgggtcgaaccgggggagctcgccggcgtcgtaccgccgctgcgcctcccgcctgcgctccatggcgtaccggacggcgccgcggaactcgcgctgcaggccggccacgaaggccagcgcgtcgcgggtgaggatggccgcgaactccgggtcgtaccggccgaggatgtccacgccctccggcgtgtcgtagcacgggcacggcggcgctgcggcgttggtggccatggagtcagtcgagtggaattcgttcgagcaccgatcccaagtgtgactagaaaatgggcctcggcctcgtgc

SEQ ID NO: 22065 - DNA, 776 bp, Oryza sativa
  unsure (1)..(776): unsure at all n locations
  Clone ID: PAT_MRT4530_27276C.1
aggacgagccgtagatcccaagccttagcaatattatcaaaaataaaaatcctttgctatttgtgaaaactctctagtctctctctgtcctgctgcttcatttatcgccaaaatctgacttttaaatgttgcttttctttttgtttttgtttgtagatggccggcagcgtcagccgtcgtggtctggacctgactggtttcgtcttggagctgcggggcatgtgcgttgtcttggggtattcgcatggagtggactaccagggcagaacgctcccggagcaggagggtgacgatgcagagccccacgctgcttgggaggttactgtagtgatcctcactggctcacccgagaggacttcgttggcagtcaccgcgggtggagattctttctccgccgcttgccagagcgccgctctcttcgccatgggcactcttcaccagcgctacccggacgagctacagcactcgccctaccgctaccacccttgtcgcgaaggagcccgcgattacgccaccttccgggatgccagctcggaggatgacactaccatcatgcacctggcgcgcagaagaaggcgtcgacacggctcgatcgacttccatcagatggtgccccgtggtgtggtcgggtnccgagctngnnttcgcgctntcgtgagggagtcgatcaacaacacgccnnnnnnnnnnnnaaanaaatagaagaaaaaaagacaaaaatatantcttacaattgagagaagagngataaaacaacaacatcagtaccaagcatt

SEQ ID NO: 22066 - DNA, 1019 bp, Oryza sativa
  Clone ID: PAT_MRT4530_27277C.1
ccacgcgtccgatcctgtagcttctgatcaaactgagagggagagagatcagagagagcgcatataaatacaatgagcaggtcgagcatggccgctgtcttcctggtggtgttgatagccatcaacgtcgtctgcttatccccacaaggtgcaactgcagcgccagagggggaacttcataaactcaaccttgagctgccaccgccgttgccgcctgggaaggaaccctcaacggaggcgtaccggttcacccaacaagtctgcgattttggaactagcaccttcacggaacagatgatcggtgcccgctgctacgatgtactcatcccgtatggcgagtcattcaagggcaaccaagtgaaggccactcaggtggccaccatcatcttagtcaccaagatccaagccctcactagtgaggcgtacgcgataagagacatgggcatcagggacgaaaacatcaataactgcgggtctttctttgccattggcgaaaccttttcggacaccaccaactcgacgctatacgcgctcgagcgcctcactgccgccggagaaggtaaacgcagtaaggaggacctggaaactgtgcacaagtggaccaagaatttggagacccaatacgatgagaccgcgagcaagtgcaagttaggtgatctgttcaagtacggtgacaagaaggttcccaccgtttgggtcatagacctgctcacgaccacagccatccgcctcctcaatgccataaagccatgattgatcgatcgatcatcccttcaatcttagctatatataccttccactaaattttttttatttatattttggataattcccatgatatatatgtaataagtgcgtgatgcgcatggatatcgcatgcatgctgcatttgtaacattgttatcaatatttgaaaatatttttttcaatattgtaattaaaaacaaagtgtgtcgatcggttgtaacggaccgaaaaaccaaaatgcaataatggttaagctgaaaaaaaaaaaaaaa

SEQ ID NO: 22067 - DNA, 732 bp, Oryza sativa
  Clone ID: PAT_MRT4530_27278C.1
atgtcatggcacagggctggtgtcctgctgctaggggctcagtcctgcctacctgtccggggggttccggccgtaggtggggttgggtcggtactcttgtctatggctaggatgggttggaaactatgtcacgtcttccgtccgtataccgtggtgatggccggcagcatcaaccatcgtggcttggacctgactggcttcgttttggagctgcggggcatgtgcgttgtcctggggtatccgcatggagtggactaccagggcaagcagctctcgaagcaggagggtgacgatgcagagccccacgctgcttgggaggtcactgcagtgatcctcactggctcacccgagaggacttcgttggcagtcaccgcgggtggagattccttctccgccgcttgccagaacgccgcactcctcaccatcggcactcttcaccagcgctacccggatgagttgcagcactcgccctaccgctaccaccctcgtcgcggaggagcccgcgactacgccaccttcagggatgctagctcggaggatgacgctaccatcatgcacctagcgcgcatcgtggaggcgtacgatgtggctcgtatcgacttccatcagatggtgcgccgtgggttggtcgagaacaacatgaagatcctggagctacgtcaggagaatctgcagctgaagaaggacctagacgcaggggaggcgcagctgtgtcagctcaagatcgcctag

SEQ ID NO: 22068 - DNA, 1481 bp, Oryza sativa
  Clone ID: PAT_MRT4530_27279C.1
atggctgacaagaccctccgcgaattcgctgctccctctactggcaatgtggccattgggccgcagatcaacatgggagacgttgatttcgacttgaagtctagcctcatcatgatggcgcaagcttgcccattctgtggcgagcctaacgaggatgccaatgctcatctacagcagttcctagagatctgtatcacgtacactataaagggtataaagggtgtcagtccagacgccgtcaggctgcggctgttcctgttcttccttctcgggaaaacgaagcaatggtttatgccaaccgtgctgtgtcaacatctgggacaaatgctctacggcattcctctcgaaaatttctataatggactcactccaatgtcccgtgaccacctggacgcggcagctgaaggatcgttcttctctaaggtggttcgaggagccgttgatttaatagagaagatggtctccaatatgggttggagcgaggaacgactccaaacccatcagcgaggtatgtgcttcgtcaaggaaacggaactactcgctgccaagctggacctcctcatgaaacgactggacgaccacgacaaacggccacaaggcaccatcaaggccttggactcacacgtcacgtgtgagatggccggcagcatcaaccgtcatggtctgcacctgactggcttcgttttggagctgcggggcatgtgcgttgtcctggggtatctgcatggagtggactaccagggcaagcagctcccggagcaggagggtgacgatgcagagccccacgctgcttgggaggttactgcagtgatcctcactggctcacccgagaggatttcgttggcagtcaccgcgggtggagattccttctccgccgcttgccagaacgccgcactcctcgccatcggcactctgcaccagcgctacccggacgagttgcagcactcgccctaccgctaccaccctcgtcgcggaggagcccgcgactacgccaccttccgggatgctagctcggaggatgacgctaccatcatgcacctggcgcgcatggtggaggcgtacgacgcggcccatatcgacttccatcagatgatgcgtcgagggttggttgagaacaacatgaagatcctggagctacgtcaggagaatctgcagctgaagaaggacctagacgcagtggaggcgcagctgcgtcagctcaagatcgcccagggagaggtctgtcgccccaagcgtcgccgcgtctgccacagcctgaagatcaccgcccgcaagagtacctccaggcccgagcttgttcgtcagtccctagcgtggacctgcttcgtcgagacccctcgtgccgagcccgcccccgtggttcctcaggaggagggagcctctggcgttggcagcacggaggatgcgctgctgctcaccttccgccctggctcatcgcagcacgcccccccccccccctccttggagcacgacctatgtca

SEQ ID NO: 22069 - DNA, 1353 bp, Oryza sativa
  Clone ID: PAT_MRT4530_2727C.1
atggagagctcaccggcgtgcgatggaaacggcgcttcggcgacgtttggcggcaagcgagcggcggccgaggtagctctagctgcggcggcggttgcgcggcgcggcggcgagcctagcagcgacggcgtgcggccgaaggtcggcagcgggcggcggaggcaagaaaaaggggaaacttcagggcgtgacaagaagccttccatgagcccaccaccctcttgcctcaccttcctcggctccggcctactccgactcagctccctcttcctcaccgcgcgccatctccttgccgccaacagctacgccaccctccgtttcgcggggaaatcaccggagacgcgccctcgccggcgtccagtggcgtcgccaccacttctccgcctccggccgcctctgccacgtccccggagcgccggccgacgtcgccaccaccttcctcggctccacgacgccgctctcatccccggcatcacctccgcctcgcccgaacttcgccggaacaccgtcgcccgcgccggtttctccttcctcctcggcggcatctcctccggctgccccggtcgccgcgccagagcgtcggccgacgtcgccgtctcctccctcggcgtcgccgcatcgccctccaccccggcctgccctcggtttcgccggaacgtcgccgcgaacctctccgtccgcctcaccggagttgttcggccgcccgtccctcctcgccgtgcatcggtcggccacctccaccaccatcttcggcatcgcagcggcaaggtcgtcctcggcatcgtttcccctccatccaaacccctccgcggtccatcatcgtcgtctccgatcgttctcgtcgtcgacgtcccgttcatcctcgctcggctcgtcgtctcgcggcgccgcctccgtcatcgtcatcgctgcggcgtgttccgcgtcgtccccgtctctgtgcagccactgccggctgccctcgtcgccccctcgccggtcccggtcgctgcagcccccgtcatcgtcttcgtcctcgcctccgcgtcgtcaagcctcgtgccggccgcgtctcgccttcgtccaaggatcgccgccgaagccgtcccctcgccgttcgtctccgttgtgcccgtctgtctccgccgcgcccgttcgtcgttgtcgttcccgcgcctcgtcgcgtggtggacaaatgaaggctacacgagctgcggcccggtagtcgagatgtcatacggcggagggttggtgcccaatgctaggggctcagttctgcctgcctgtcccgggtatcccggccgtaggctgagcccatccaactctgttcccatcctggcccctgccctgccagactggcctctggccctatga

SEQ ID NO: 22070 - DNA, 308 bp, Oryza sativa
  Clone ID: PAT_MRT4530_27280C.1
ctttttgaggccctccagcgcccccgcgcggggcaatagaggggaagccgaaagctccggcacgcatcctacgagagaggaggtggcgaagatggctgacgagtctctggagaagggggagatgtacgggatccgattatgcaacgtagggtaccagagcactatgaccttcaagcggttacgccgaaagatgatactgggccagagccccctatgcctcggccaaagagggaacgaaggatgccagatactgttcacaggctcaatgctgtgcatattacaggccctgaggatgatgacacatgtgg

SEQ ID NO: 22071 - DNA, 1201 bp, Oryza sativa
  Clone ID: PAT_MRT4530_27281C.1
tcgacccacgccgtccggctccccgggctaagggaatccagaacaaaagccgccgtgacgaagcagatcgaagcatcgcgcccgagccaaacctaaatccctcggagagagagagagatagagaggaggaaaaaatcaaatctttttgaggaagaaatcatggcgtggcagcaacccatggacggatcccacgcgagcgggagcaaggcggcggcggcggtggcggatggcccgggaacccagaggacgcagtatccttatgtgactggctcatcaattattgcactgaaatacaaggatggtgtcatcatggcatccgacactggagcctcatatggctcaactttgcgatacaagagcgtggagcgcattaaggctgttggtaagcatagccttattggagcaagtggggagttcagtgatttccaggagattttgcgctatttggatgaattaaccctgtccgatcatatgtgggatgatggaaactccttgggtcccaaggaggtccatagctacctgacgagagtgatgtacaacaggcgcaacaagtttgatcccctctggaactcccttgtaattggtggggtgaaaaagggtccaaagggtgaagagaaatatcttggcatggttaacatgattggtacacactttgaggaaaaccacattgccactgggtttgggaaccatatggcaatcccaatacttcgtactgaatggcgcgaggacatgacatttgaggaagctgtcaagcttgttgagaagtgcttgcttgtcctgctgtaccgtgaccgatcatctattaacaagttccagattgccaagatcacaactgagggagcgaccatctacccgccatactcattgaagacttactggggcttcgctgcctttgaaaatccggcccagggtgctgtaggatcatggtagatttatttatgctgcagaggctgaatgtcaggccatgaaccaggatgaagaaacaggctctgttgctgagaggccttgtgaaatgttttatctgaacatcaatgaaactccagatttgctttgtatgacattctgatcgtgcaacttagatttctaccttctgtggccgttaagcctggaactatattatatatgatgaaagtctgttttgtttcgaaaaaaaaaaaaaaaaaaaaaaaaaaaaaaaaaaaaaaaaaaaaaaggggcggcc

SEQ ID NO: 22072 - DNA, 550 bp, Oryza sativa
  Clone ID: PAT_MRT4530_27282C.1
tagtggatccccgggctgcagctgatctccctctctctcatcctagccgttgccccgcctctccaattgccgctgctgcccgtggagatgactggtgccaaccaccacagaactcctggcggctacatcctatccccattgatgagtaaactcttccttccctatatcattcttatgatgatgttttgtgtggtgttctctcttgtatgatgttgtgctgtgaactgtgatgcattggggataattatggactagcgctaatactcaacttggtgatgtgctgtgctcatggtctctgttggttgtagtgattttatttagttgatgcctatatgctatgaatggataaatgaatgctcataattctgatgcaagtgcagtactgaaattagaaaggataataaaaaaaagttgcactaacatgattaagtccttctatatgctagcatataaaagtaactgaaatactggaatcagtagcacactagaatgatcagaaccatatatatatgtttgaatgttgatattatctaatttcttaaattagtga

SEQ ID NO: 22073 - DNA, 1752 bp, Oryza sativa
  Clone ID: PAT_MRT4530_27283C.1
atggcagcagcatccgccgtcgcctcgtcgtcgtcgtcaccggcgctggagccccaccccgacctctccccggtattctcgtcgccgtccgcggcttcctcctcctcgtcctcgtcgcgcgacgagggagcgcgcggggtctcgtgcgaggggggcggcggtgatgacgtgttcgacctggacgccccgtgggtggcggcggccgaggcggagtcgaggctggaggaggccgtgacggcggcggccgcggcgcgggttggtctctgctgcaccgaggagaaggggaaggggaagggggagaaggaggaagatgagatacgaaacaaccggcagcggcaggaggacgagatttacatacattacgatttgaatgatggcgctgaagtgtgtgctaagctttcttcagctaatgagaaaaatccaaaagatggaagatgttgcgttggaatagaagggcatggtgacgaaccagaagatttttcttacacttgtaattttgagtacttgcctcctttggtcttgacatgcttgcttccactgtcctatcctagcaaagaacccccatattttacagtcactgttaagtggatggatgggcctaatgtttcgcagctctgtaagatgcttgacaccatttgggcagagttaccagggcaggaagtggtataccggtgggttgagtcgctaagaaattcttctcggtcatatctctggtttgatggaaaaataacgttaggtccagatactccaatgcagaaaggagataatcgtgcaatctcaagaagtctctccttggagtctgtaattccatccatgctcagttacagtagtaagaagcgctatcaagcatttcttgaggatctccacatgtgcatgatatgcctcagccagagcaaaggttcaaacttcatcaggcttccatgccaacacctcttttgtgtgaagtgcttggggacgttatgcaggatgcatgtcaaggaaggtagtgtgtttcagttggtatgccctgataccaagtgcaatgcttcaattccaccctatgtgttgaagagacttcttacagaagatgaatttgaacgttgggataggcttactcttgagaaagcactggactccatgtcagatgtggtttactgtccaagatgcgtgatcggttgcttggaagatgaggataataatgcacaatgtccaaaatgctcctttttcttctgctcgttttgtaaggagccatgccatcctaggaggcagtgcttgactccagaggaaaagctccagcgccggcaggcgtcagggaggatgtctgagagagaggtggcacaggaaatactgaacatcaaagcattatataatgatgtccgattatgtccaaagtgccgaatggccatcagcaaaactgcagggtgcaacaaaatggtgtgcggcaactgcggtcagttcttctgcttccgctgtggcaaggccataaagggttatgatcatttcagcgaatgtaagctctttgcgcctagagacatatcagcgtgggagagacaaatggaagagcagtatggaaatcatgtacggctttcactgcgccctgtaggcggtacaatcaggtgtccaaaatgccgtgaaagaaatttcaaggatgatgagaaatatatcttctgctgggcatgccgagccaactactgcacaatgtgcagacgtgaagtccaggacaagagggggcactttgggtcaccggaatgcgtggggcttgaagatttctag

SEQ ID NO: 22074 - DNA, 555 bp, Oryza sativa
  Clone ID: PAT_MRT4530_27284C.1
ggaacgagttccttggattttgttcgattaaagtaccgggtaacattaaccggcacttttacagtttgccatttgatgggcccttgttttttcaaaaaccatgtcggcgatcactttacactggtgaacattttacacagggcatgggggtgtttacccaaaaaaacagcccggaaaaagctcatctgtttagttcttcacattggggaaaaaaattttacatttttaaaaaaggaatgggggttctgaaataatagggacctccaaatttggattgatgacttccagtttcaccaaaaagggtgcctttttttgcccttgggggtgaaaggaacttccccaaaaatcccccgggaagggccgccaaaaaaaacccccgtaaaaacaaaatccaccctagggcgatgccccaaaacggaaacggagggtccctgatggggaccccctccacaaagaccaactgttgcacaatgcacgggaagggaacaaccccctgagctgggtaccctgaaaaacagcgttgggaaccaatcaaatttcagtttccagtttcca

SEQ ID NO: 22075 - DNA, 371 bp, Oryza sativa
  Clone ID: PAT_MRT4530_27285C.1
gaggaagcggcggcttaagacattgaattgaatcgtgaacgataaacaccacaagccggctgcaatatgaggcaggcactgcccaaaatactccaaaagcactgaatccttagacatagaacacatgcatggctaacatggatgccagatgacaactaccgaaagctatcaaactacaatgctgctgacggcttgtactgctgaaaatgcatatgttcccctccattacttggatgcgctctcttcatcgacagccattgggacggtgctggtcaggctgagcgatttgaaagcatagaacatgtcaatgtagcggtgagtctccggcctgtcaaggttgctgacgtacttgcagaattcgtatacaccaa

SEQ ID NO: 22076 - DNA, 1458 bp, Oryza sativa
  Clone ID: PAT_MRT4530_27286C.1
atggccgattatccccgtacgcaccgtggtgaaagcatggaaggatttgttgctgagctcgcgaatatgacattggttgccggttaccttgaagctccggagtacatagttattgagcccccagtggagagttgccacatagagttcgcttggaagttcatagtattttgggtacccctctcgttattatggtagttgagacttctggaggaatagcagagcatgcttgccaggaagcttcttatttggtgatgaccaggatttgagagaagtttgctttcatcttcgatggaacagcttaccgttatcgtcccaaccgttcagccggaggcactaccagtactttcagttcagcttcaagtgataatgacactacttctggtcacataaggacggtgatgagagcgcttgacaagatgcacgtggatcttcaccgagcttcgaagacgttgaatgacaggaagcttgtgcaaatagctcgtctgcaaggtcgtccagtgccaagaagagccagaatccgtacgatgccaaggaagaggtctacaactctcgttctcttgaagttggcatccaaagatgttccagccacctttgccccaatcgccgtcccagccgtcgatcccgttcccaccccatttcgtgcatgttcgccattgccgatgctctccaccgccgaagccacagttgtttgtgatgcagtgaagtggatcgtgtcaatctccagtagcaacaacgataccatgtgcctatggtatggtgttgaataaaaaataaaagatggtgaacacaaggactaaccgttttagaaacaacaccaatgaggaacatcagtcaggaacatctgtaaggaagtggttcaggagctatgccagagaaccctacgcttgcccaggcgacagcaggtcagactcggatgatgacagctatgatgaatcaaatgcaacaacagtaccatcagatgatgcaacatatgatgcagcagcagcagtagactcagcagaacaatggtacctctctgtccaagttgccaggatttatacgtgttcgtccgccgactttctcgagcacaactaacccaatggagactagcaattggttgtacaccattgagaagaaacttaatctactttagtgcactaatcaggtgaaggttgcatacgccacacattagttgcaaggtctagctttagcttggtgggataattacatggttacccgttcagccggaacagaagacttgggatgagttttagcgtgttttcgggaaagcataggttcctgatggaattgttgcacagaagaagcgagattttaggtctctacatcaaggaaacaagactgttactgagtatctgcatgagtttaatcatctggcacattatgcccctgaggatgtgtgtactgatgctgagagacaggagaagttcatagcaggtttggatgatgagttgactattg

SEQ ID NO: 22077 - DNA, 616 bp, Oryza sativa
  Clone ID: PAT_MRT4530_27287C.1
catgtaggacccacccgtcagttctctcttctcctctcctcgtctcctctcttctctcttttcttctcttctcttctccacggatcggcgagagggagagcaggcgccgatggggcggcgacttgcggcggcggcattgttagggcggcggcggcggcgctctgaggaggcggagggaggaggcggcagcggcggctgacgaaggggcgagttacggtggcagcgcacggagggggcgagcagccgcgccggctcgtggagggatggaggcggcggcgccggcgccggcgcaggcgggtggaaggagggagaaggcggcggcggcggtcccgatgcaggcgcgcgggtggagggaggaggcggcggcggcggccccggcgcaggcgcgcgggtggagagaggaggcggcggcgtcgccgccggatccgcgtctcgccattcactgcctctcctgtggtggatccgtggaggagaggagaagaactcgccgccgccactcctcgtcgtcgtcgtgaccaaggccggcgccggctcgccgtctccgccgccccatcagcgcagccgccgccccattagagcaccagcaccgccgcaaggagagagagaaagtgtgtag

SEQ ID NO: 22078 - DNA, 781 bp, Oryza sativa
  Clone ID: PAT_MRT4530_27288C.1
ggtcgagttttgtttaggtatttgatcctgtttcggaaatctttatgagggggtacgagattcgggtgccatcggtggagatttctgcgtaattctgaccttctggatgtgatgtttggcattgatcaatgctgccgatgttggtggaggagtgatctgtggaaatagggcttttcgtgattgcttgctgatagatttgcaagtgagggtagtagaagatggctattaggaatagatagagccattttttgtttgtttggctgatgcttgatgtaaaatttgtgtgtaatagattgctcattgttaagagccgcatgtactccatattcttttatggatcttgctgtataatttcttattaaagttcttatttttgagtttattacattgtgggcttatagttattttacggttctatattttagaatattgtttaattatttcaattctctcatggaaatagtaaagtcagagtaactagtgttatactgatgagattgtttgtgtggcagatatctggctgagttgcttgccgagaggcagaaattagctccatttgtacaagttcttcccttctgcaccaggctcttgaaccaagagattctgcgggcgtcttctttgccacctaaccataattttgttgatcctgagagaatcgagcatggtagcccattgaggttacctggcctcccagtgaatggtcagccaatggatctggagggatggtcagggatgcaaacagagaatatgaaggttctgcaagcatcatctatgggctgga

SEQ ID NO: 22079 - DNA, 150 bp, Oryza sativa
  Clone ID: PAT_MRT4530_27289C.1
atggccacgccgcatcagttgaacggcccaacaaaccgcgtggggtgccgctggcattggctgcgagccgtcgataggcaagcttcaacgctcttggagcgcgcgtgcagcgggcgacaatttagtcactggctcaccctctctcttcca

SEQ ID NO: 22080 - DNA, 294 bp, Oryza sativa
  Clone ID: PAT_MRT4530_2728C.1
atgccggctcggcgccgcggggccagggctgtgggagtgggagcgggctggcgtccacagcggcgtcatctcggcggtggccagcgccacggcggcggcgtcgtcgtcgttgaagaggtgccccgtgggggaattcagtcgatcgcaatagttcagggggtgctccaatgttggagagtggagatggtggcagacatggaggtgactagaaggcgaggagtcgacaacgatgatggtgatgacggagaggttgaaggggaagataaggcatgggttccaacgatgccgtcgtga

SEQ ID NO: 22081 - DNA, 369 bp, Oryza sativa
  Clone ID: PAT_MRT4530_27290C.1
atggcctctagcttcaacgatgatgacactgccacactgtcgggcgtcgtcgagtggggcggagcaggcaagccagcaaggcggtggcgcgcgaagccggcaggtgggcgggtggcgaagccggcggcgtggagcgggcgggtgggcgtgacgcgcaccacctcttcctcttccccatcttcctccatcttcgtgccgccgtccctcgccacatccaccgccgcggaccgggttggatccagggcgggtccgtgcctgagggcggcccccacgctgctccgcaccatcagccccgacggagagccgcgcgctacccacggttggccgacagctgcgcccccacaccgtgccggggcagcccgccgttag

SEQ ID NO: 22082 - DNA, 420 bp, Oryza sativa
  Clone ID: PAT_MRT4530_27291C.1
cccacctgttgttgtgctcacgaacaaacgcatgtttagatgcacaactgtacgagtctcacggcgcaagcatagccatatgaccacaaaaaatctggagccgctgaccacggagcacggtacgtagtcgcattcacaacatacctagtttctttttaggaggtaaaactctaccagtctcacagcatactaaaacgtataccagctattgctagacacaatgagcattttttaagtcgtaaacaaaagggatacagtaccggcttaaggggcgtaaaatccggtacactatctatatgtgtcgccgaaacgggaaacagagcacaatgatctctgggtgcaaagatttaccgggaacctttgccacgactgtcatttgagaaccaatgacgagattgctagatgacatactctgattac

SEQ ID NO: 22083 - DNA, 880 bp, Oryza sativa
  Clone ID: PAT_MRT4530_27292C.1
gtcaaaatggccaacgagtccatcctcgtcctcctccacctccgcctacagaaccctgaccggggtcttccccaaaaccctcgccgagtcgccgggctccgccgccgtccccatcgcgaactactcgcaggctactcctccggccatgaggggctcggatccggaccggggcggaggcgagccggacatctccaagctcttctgccactacaacgccctctacttccacgactccctcggcacctgcgccgtctcctgggccaccgacgaggatccactccccaatcgtgaagtaggtggctgtgaatattatctggtggtggtggctgtattatacttctttccagatccttgtatgaacaccacacagatttggatttaaagaatgcgctgctttatgaaatgattcatgcttatatgtgcatcaaagatagtaatgatacggacgcgtgggatgggccaaaattccagaaactgatgaatacaatcaatttaaactctgtagccgatcctcatcgtcctcttggtggctacagcataactgtgttccatgagatcagaaagaaattttatatacacaaatgtgaaagctgtggagatttgatcaagtcaaccaaaatcaaaggaccatcacaggatgactgcattgaggcaatgggtgctaatgacttgtgtgacagtttaatttgtcactggcattggcacaagaagcggtgcactggtagctatcacagagttcaaggatcatcatcaggttgtgtagagggttcaaaagctttatctgtagaagcacctgattgcaaagttgaagaatcacgcccctgaagttggcacaatgcgcatgcatcaattaagggtggaaaaggaataagcatgaact

SEQ ID NO: 22084 - DNA, 135 bp, Oryza sativa
  Clone ID: PAT_MRT4530_27293C.1
atggatcacggaatggtgctcggaattgcagagcacatcaaccatgtctatgtcggtcaggatgtcttgatggcttgggagagtattgctggtgatggattgggagtcggcttggggataagacgatgtccgtga

SEQ ID NO: 22085 - DNA, 450 bp, Oryza sativa
  Clone ID: PAT_MRT4530_27294C.1
atgatgctaagagacatgtggattcgccggggtggtgtcggggaggacccctgggcttcctggcacaaggttgttaaaactgttcgaacagccgtgcccacggtcatgggcggatttgctgaaaaagatgaagcggatcccgctgacgaggagttcttccaggagcaagccggctacgatgattgtgagctcgagatctgtccgcagcccaacatgactgttaatttggagcgtcacgggctagttccgctcaggactagttcggggcgtgacacgtcgccgccgcgcccatcccccaccgccgccgcgcccgtcccccgctaccgccgccgtcaccgcgcccgtcctctgccgccgccgtcgccgtcctcgtctacaagggatggctgcagggggcgaccgcgcgtgtcgggttgctcctccccaaacgggatgcccagctatatctag

SEQ ID NO: 22086 - DNA, 216 bp, Oryza sativa
  Clone ID: PAT_MRT4530_27295C.1
ttcacttagattagtagtatattattattattatcttgttcctccaattttaggttcgatatgtgtgtatcgtaggtttttatgtgctgtgaagttgggtgttgggtgactggctcagtggttggtcgtaagttgtctgtgctgtcgcatttgtgagtccggggcattcgtcggtctcgtgtttgatctttcttggtttggggagaggttaaaccc

SEQ ID NO: 22087 - DNA, 1407 bp, Oryza sativa
  Clone ID: PAT_MRT4530_27296C.1
ctgcaggaattctggcacgaggtcgagcacccagaaggccagaagcccggggccagtctcacaccctcctcctcctctcgtccatactagcaccaccgctgctgctgttgctcctgctgctgtgctgccgccgcctgctcgtccaagaatcttccagctttccccaatactgagcagccaactcctgctaccgcttcttgatctgtgggattttcttcttgtttcgaatccaagatcacttccaatccatagttttggcttttggcttccctccagcatcagtgaaaattggttctttggaggggaagaaatggatagcggctggatacgcttcttgagccagattgctgatttgatgcaataagatttctatcttatttcttgctgcagtatcacaaatcaaactaggagaactgactgagaagtgaaatattctgcttccaagaagcaatcagataaactgattccaagaaaataacaagaagtaatcagataacagaagcagctgcagctgcagcagtagcatctttctgttcccagtaattgcccaatccaactccagctagatttaatcagatagagaagtaatctgctggattgaaatccatgggtaggggaagaggcagagggaggaagctcaccaatggcaggagccatgaggacaagggcagcagcggcgaggaggttgtgcctgcgaggaagaggaggggaaggccgcagaagcgcattgtcgacaaggtggtggatcaagcagaggccaagaatctaaccgagggcgacgacggtgatgctgactaccaacaaggcgaaggagaagacggcggtgcgaagccgaaggtgtcaagaacggagaagagctctgcagggaagggcaacaagaggaacaggctgcccaaggaggaagaaagctcaaaccttgaccttgaggagaacagctcaagcacccggtccagcaacgatgaatccaccaggtccaatggcttccggcagaatggcagccggcgtaagagcacgccgcggcgagccgcggaggcggggatatagcttggaaactttggaatagggtggggaggacagtttcatcagggattggttcttgggttatatcatcagttaggcaagctgctcttcagttttgtcatcttcagattcggcaagttttccttcaaaattttgtcatgttcatgtttgctaggcaccaacatgaatgtaatgtaaacatatactaatccgcgagacatcggagttttgcttctggtgatgaaaattgtatgaactagcatcggcttatggtactactatagctagcatcacccaaaaaaaaaaaaaacacaaaaaaaaaaaaaaaaaaaaaaaaaaaaaaaaaaaaaaaaaaaaaaaaaggggcctcgtgccgattcctgcagc

SEQ ID NO: 22088 - DNA, 355 bp, Oryza sativa
  Clone ID: PAT_MRT4530_27297C.1
aaggagcaggagagaaggccatggcgatgaaggaggaggtggccgaggagacgggggagggcggagcggcggcggataaggccccgaacggggaccacacaacagcgccgaagctggacacgagcgagctgagaaagcggacgacatacccagcccacaaagcggagatcaaggagacgccaaggttccacgacgtgagcatacccaccgcgaacggatacaagaaccagagggccacgcaccgacaccagcaccggcgagggctacctaagaggggcgcgccagatcggagccaccataatcatccacacttaccggacagaaggggtgaaaggcgggcacataaacccgacgg

SEQ ID NO: 22089 - DNA, 545 bp, Oryza sativa
  unsure (1)..(545): unsure at all n locations
  Clone ID: PAT_MRT4530_27298C.1
ccctgcgagccggccgggccaaacagaaccgagaccgggaanactactactactacggagtcaataagactagctcaatagactacgtggacagtgtggccccgaccgtgatggcgcaacggggccactagccgaggatccattacaagggcagcaagagcaccggcggcgcgccctggcagccgaagctccaccgactgcagcttcgatagcgtgagggagggcgaaaggatcaagagcatgcaggcgtaagcaagcgcaggcaagaagaaggatgagaccatagagcacctgcaaccaaccaccgtagaggatgttcggaaggagatcgagaacatgggcctatccaaacgggagcacagtaacgaggcaagtatggtagagatcatccaccggaaaagccacacagggccaacatactaagacggcacggagtgcaacaagcagcagctgcaacagttaggccagagcccaagccacccaaaggcaaaggcgaggtcaaggaggccaggaaggacaaccctggagccaccgtccgaaacaag

SEQ ID NO: 22090 - DNA, 156 bp, Oryza sativa
  Clone ID: PAT_MRT4530_27299C.1
atgttgtattggcgaaaaacaggcgacatcgaggttctttcagcgcccttccaggacgttggatgtcacacaaaccctcctctccgcagggagcttgcacccgctgctcgcttccccctcctcctcctcctcccctgcgccccgcaggtgaggtga

SEQ ID NO: 22091 - DNA, 753 bp, Oryza sativa
  Clone ID: PAT_MRT4530_2729C.1
cctcgccccggctcgtctctctcgcccgccccccagtgtccgcgcgggttgcgccgcgctggtcgacatcttccgtcccggcccccccccggccgggattttagggttcagggttctcctctctgcggcggcggcggcggctattttctctcgcctactccgaagatttggctttggttgagcggagaaggtctagatcttccgtcggggagtcgccatgagccgatcggggcagcctccggatctgaagaagtacatggacaagaagctccaaatcaagctgaatgcgaaccgtgttgtcattggcactcttcgaggattcgatcagtttatgaatttggtcgtggacaacacagtggaggtcaatggaaacgagaagaatgacatagggatggtggttatcaggggaaacagtgttgtgatgattgaagccctcgaacctgttcccaagccgcagtgaactttcagctcgcctagtttgcttcggtacttgatttggacatttggtagtgccatgtcaaacctaattgttattccagatgtttatgcccgcgggcattttgtatcctgacctggtttatatgcaagctcgtgcacctttgtatagtctagccagcgttacgatttatgcgctctaaaaaaaaaaaaaaaaaattgctgtgatgattttccggagcattttgaggtcaaaaaaaaaaaaaaaaaaaaaaaaaaaaaaaaaaaaaaaaaaaaaaaaaaaaaaaaaaaaaaaaa

SEQ ID NO: 22092 - DNA, 745 bp, Oryza sativa
  Clone ID: PAT_MRT4530_272C.1
caaagctcagacgcacagatctacaaagcttctccgacaaatggcgtcacgggtcgtcgtcctcctcgtggtcgcggcggcgtgcgtgctcggcgccgcagacgcgaagctcggcaggctggtcgtcaccggcgtcgtgccctgcaacaccggcagcctcatcgatatcgccacgtcccccgccttcccaaacgcggacgtggagctgaggtgcgcggggaagctggtggcgggggcgacgacgaacagcaacgggtcgttcgcgatggaggcggacctgacgagcgggctggcgatgctcatcggcgggtgcaagctggtggtggacacgccgctgatcaagtgcgacgccaacctgccggcggcggggagcctcgtctcctacctgcagggcccgctcaccaggctgctcggcggcatcttccgcctcttccccgccggcttctccttccacgcccactaatatacaacatctcattatgcaaatctcgatttggtcctatcttgtctatggaaactggatgtaccgtaatttctactagtagaatactagtagtacgtagtactgatctcatctgtatcgcctgtacgctgaagctcattggcctgcttagagcaggagttgcgaatgttttcttggtcagatgaatgctgtatgggtctaaaattactgttaccttgttctgaacctaagttaatgtcaatgatcgactgaatatacatgttagtctccttcaatttgggc

SEQ ID NO: 22093 - DNA, 282 bp, Oryza sativa
  unsure (1)..(282): unsure at all n locations
  Clone ID: PAT_MRT4530_27300C.1
atattncccgggaaggttgattatttatttcccacttatttcatcatatacaaatactaacacatcctcaaaattatcaacctaaaaagttccttacaaattcattcaaacaaacaagtgtaaaaaacctttttttttcccatttcccccttaaactatccttaaaaaccaccatttcaccaaactccctttttttttttaccacaaataattttttcaacccagtaacttataattaattccagacagatttcccaacatataatggtaaaaatcaatttt

SEQ ID NO: 22094 - DNA, 341 bp, Oryza sativa
  Clone ID: PAT_MRT4530_27301C.1
ccggtcctgatttccctgttcgtccctcgcgtccggtgttctctgctgccgcggcggtggctccaggcggtgtcacgtctgattaggaggtggatggctactccacacaatatgggcggactggttggtgatcctcgtggcggttgccatttagcttctcttatcctcttatttttcctcttctccactccctctttttttttatctttcctctttccttctttctctctcttcctttcttccttcctcttcaattaatttttttctctctatttttttcttttttttttccttctcttctcttcttcctatattatctttcttctctcttttttttctac

SEQ ID NO: 22095 - DNA, 1095 bp, Oryza sativa
  Clone ID: PAT_MRT4530_27302C.1
atggccgacacctctccactccaccggatcatcggcgccgccatgtgggacgccgagcccctgctcggccgcctcgtaatcctcgcccacgccgccttcctcgacgcgggtttcgtgtccaccggcgccgccaatgacgacggcgcccaaagctccgtccgacttccgaggcaggtgggcgcgacggcctccgcgctctcgctccggtacaccgcgccgcagctgctgcaccggcaccggcaagacgccgccgcggcggcggcggcgacggttgcgctgagggtgtgcgcgcacgggcggcgccacgtcgtgttctacgtgtgcgtcaggttcgccaacccgtggctggacacgtactggatctgcctcgacgcgcccgccgccgcggcgctcctcgccggcgggctggacgacacggcgcgcgcgctggcgaggcgcgagcgcggcgcgcgcctcgccgcgctctggagcgcgctcgccgacaggctgtgccggcgcgtcctcgtcgacctgtgcgccaagaacggcgtgccggtggagcccgagcacgagctcatgtcgctccccgacgacgtcaaggtcgccatcctcgccaggctcgccgccggcgaggacctcgcgagggtggagtgcacgtgcgtcgggcttaacctcctcgtcgcggagcacgactccacgctctggaagcccatgtacacgaagctgcgttcccagctgcggcggcggctgcggtttctcggagtcagctatggcgagccgacggcggtgagctggaaggctaggtacgtggcggtgaggcggcggcgtgttccggcggcgcatgacgtgttcatgggagaaatactactgccggtgatgacagagtggatgagagttccatggatacgtaggtatccatttgtgccgcctccgccgccggagtcgccggaggaggaggagacggtcgtacctcgtcggaggaggaggcggagagcaatgccaagggacgccggccatggccgtgcggcgccgggacatggcggcgacaagaagcagtggcgtggcgccggcgcggttcattcgccgtcttccgggttccgatggaaacaccggtga

SEQ ID NO: 22096 - DNA, 225 bp, Oryza sativa
  Clone ID: PAT_MRT4530_27303C.1
atgcggcaacggagcagcactggcatcgggcatgcggcagcggaggaagaagggagagaagggagctcactggagaaggcccccgctgcctcgcctcactgcttcgtcggggagcacatcaccggagaagatatgcagcaccacggccaccggcgaccagccctggcgtggggcgtgacaacagaggacgcggtcgccggcatcgagccccagcatggggcttag

SEQ ID NO: 22097 - DNA, 213 bp, Oryza sativa
  Clone ID: PAT_MRT4530_27305C.1
atggggatgaacttgaggactgaacaaggcaaactgacacacctgtgcttctccacgaaccgtccgatgtacaagcagcggtctagattgatcaggagccaagtatggcggcatctaatccaaattgcgctctctagagttgaagctggtagaaatacatcagtacgagacaagatgaaagtgtgccgatcgaaaagaactgggagctcagag

SEQ ID NO: 22098 - DNA, 264 bp, Oryza sativa
  Clone ID: PAT_MRT4530_27306C.1
atggcgatgaagaccaaggactctcaaaaggaaaagaaaaggaaacacctgaagaatcatagggtataccagatcagttgtgcactctgttatggaccgcaagtgaagcaccaaggaaaagttcttcaagaacattttatatgcttgttccgtgctttaatttgttctccactgatattatccctagtaaagaaggcatttctaagttctaacttctccatgaatcaaaagatcaaagcaatgaaaatattgcccccggtgtaa

SEQ ID NO: 22099 - DNA, 584 bp, Oryza sativa
  Clone ID: PAT_MRT4530_27307C.1
ttattacatatgattgcaacattgcacaagatcaaggtcctttatattgggtaagctacagaaacaagattgaatcacaagcatggcgtagagccgtggagctccggtcgacgaacgccggaagccacaggagaaggcccgcgcccgcggctccgtcggctggacgacgtgctccccggcggtgttgtcgatgagggagggagtcgcggtcgcgacgtcgtcaagcttcctttaacagcgccatcccgccgccaagctatcctgctcgctgcctgctgctcgctgtccgacggagccgccgctcctctccgccgtgcgttggccgccgcgcctccctgcgcgtggcatccgcgtcgcgcatccctgcgcgctgtcctcggtgggcgccacgcctccctgccccgcgcgcccaccggtcctccaccgcgcctccctgcccgcgcccgactccaccgactccgccgcgcgctggcccgcggcagctgccccgcgctgccgccgccgccgccgcttgcaacccagctatagcgtttggagtggaaatcgggagttcgggacatggattggggatttgcctctttcat

SEQ ID NO: 22100 - DNA, 623 bp, Oryza sativa
  Clone ID: PAT_MRT4530_27308C.1
acatacttattacatatgattgcaacattgcacaagatcaaggtcctttatattgggtagctacagaaacaagattgaatcacaagcatggcgtgaagccgtggagctccggtcgacgaacgccggaagccacaggagaaggcccgcgcccgcggctccgtcggctggacgacgtgctccccggcggtgttgtcgatgagggagggagtagcggtcgcgacgtcgtcaagcttcctttaacagcgccatcccgccgccaagcttcctgctcgctgcttgctggctcgctggccgacggagccgccgctcctctccgccgtgcgctggccgcggggccgccggccgccgcgcctccctgcgcgtggcagccgcgtcgcgcatccctgcgcgctggccgcggggggcgccacgcctccctgccccgcgcgcccgccgatccgccgccgcgcctccctgcccgcgcccgactccaccgactccgccgcgcgctggcccgcggcagctgccccgcgctgccgccgccgcttgtcgcgtgcgccgccgccaccgcttgcaacttagctatagcgtttggagtggaaatcgggagttcgggacagggattggggatttgcctctttcat

SEQ ID NO: 22101 - DNA, 1353 bp, Oryza sativa
  Clone ID: PAT_MRT4530_27309C.1
atggaggacgtcgatgagagggttgacctgcaccaaggggaggctgctcttcaggctgcagagaaacccttctatgatattcttggccagtcctgggaggcgacagagaagcccttctatgatattcttgggaaggcatacccatcttcatctaaggagacagcaattaacggtgacagtcaagcagattaccctgataatggtagcagcagttatcatgaacaggcatgtagtggtagctttgttagtgatctccttgggtcacaggatgcgcattcgataaccaccgactggtcttctgaatttgaccgtttggctttgcaattcaggagaggtgttgaggaagcaaagaggttcattccaaatattgaaaagttggtggatgatccagagaagaatggtctttatgcttgcaaacaaacaacagagacaacagaacagaagggcaagcatgagaacaaaataaggaatcatcctcatgatcctcatgttgagcacatagagttgatggaagcaaggaacagtaagcatatggccatctccactagtgaaacaatacgggatgaaatgtttgatagtattctgctctgcaataggcagctccctggtgaagttgctaaccttagaggaatgatggcaaaagaagcaagcgacaacccaaagaaatttcaaagcaaaggatatggaaaagggcaaaggaagccacacagtagtaagaagaaacagaaagaggcaatagatctcagtgttcttctcatccaatgtgcacaagcgatagcatctaacaaccatccctttgctagtgagctactgaggaaaataaggcatcacgctttgccagatggagatggttctcagaggctagcaaactgctttgcagatggcctcgaggctcgcttggctgggactgggagtcaaatcgacttgcaaatgaagaagggggtccacccaagcttaggatcacagggcattgcttcacggtgggaaaccgtacaaattgaggacctgaacattgacaaggatgaggttttcattcttggtgttgtgaatggattgtacagctccccattctttctgactagattcagagaggttttattccattactcatcactttttgatatgctcgacaacaatgttcctaggaaccatgaagcaaggatattggtagagaaggatctctttgggaatgatgcacttaatgctgtagcatgcgaaggtgcagaaaggattgagaggccagaaagctacaaacagtggcaaatgaggatcctcagggctgggttcaagcaacgtcctggatggaaggggaggataatacaggcactgtcaacatggaaagtggaaacctag

SEQ ID NO: 22102 - DNA, 278 bp, Oryza sativa
  unsure (1)..(278): unsure at all n locations
  Clone ID: PAT_MRT4530_2730C.1
gttaaaatactctctctggtttgaagcacaatgaaaataatacacttccctannatacacaatatcataatcaacaaaacaaatagtcgaataaacaaaaaattcaacagctggttattattcttacctttctcccaacaacaaaataaaatctattaattactttgctgtctcattaattcatgcaactctcgtattctttattactatccaaaacctcccactacaacaattatattcccttttacctacttaccctctccagaatccagttacac

SEQ ID NO: 22103 - DNA, 171 bp, Oryza sativa
  unsure (1)..(171): unsure at all n locations
  Clone ID: PAT_MRT4530_27310C.1
gcgggtcccacttccnccaccaaactccgctcggatcacccaccggcggcgaggctgcggagatggccggcggcgaggacgatagggnagtaggagcgcatcgagtgagcgcactgattcactacacgggcaccccgtctccgcgtatctcgatcgcccgtacatcctcta

SEQ ID NO: 22104 - DNA, 4092 bp, Oryza sativa
  Clone ID: PAT_MRT4530_27311C.1
atggtgattgagcttccctttgacaatcaatacaccaccacagaaacagaacagccacatgatgggtcttcctgttcttcccagcagcaactcagcttgtacaactacagccccagcgatccgcagctgttttcccagccaaccacaggatcaagaacgtatttgtcaggtgcagtcaccatccctgggatttgcaatgacaaaagtaatcttggacaacaacaatttcagattgatgcagcgcttagtctagggtaccagaggatcagatcaagcgatgccctttgctacataagtcgggtgctgatggaggacgtcgatgagagggttgacctgcaccaaggggaggctgctcttcaggctgcagagaaacccttctatgatattcttggccaggtatatccaccatcgctaaaccggctagcactccatagcgcaaatgaaccagatacgcctgatgagagcagtagcagaaacaattatcataataggtaccatagtagccattccagtttcaacatgttacagcccttgccaaccccattgagtccatatagctatggcaggagtctttttcttccaaaccaacacttggtaagcactgcctggacttctacctttggcatccctggcttccaaattagaagaggtgccgaggaggcaaagagatttgttccaattattgataagttggtgatcgatttggacactgaccgggggctctccatttcaaaaatgaccacgaaggcaaaagtaggagacaagaaaagatatgcaatctttgagttgacagatcaaaggcacagcccttacaccacagacttggatatcttggaagggaggaacagcaaacgctatgccatcacttactgtgaaataatccggaatgatatgtttgacagggttctgctctgctatggtgtggagaatttcgccgaagcatcaaatcttcgaaaaataatgacgaagcaagcacgcaagaattcactgaatggacaaaccagaggatctgcacaacggaaattacggggtatgaaacaactcaagaaggatgtagttgatctcaggaatctcctcatccactgtgcacaagcagtagcagctgacgaccgcatttcggccagtgaactagtgaagaagataagacagcattcttcaccagatggagatagtaaccagaggttggcattttacttggtggatggtctggaggcgcgcttggctgggatcgggagccaggtgtatcgcaagctcatggcaagccgaaccagtgctgagagtttgttgaaggcttacagcctctacctttcagcttgccctttcgaaagggcgtcattcgcctatgcaaaccaaactattcttgatgcatcaaaggggcagcaaccaagaaaggtgcacattgttcatttcggcatttgcactggctttcagtggccatcattgattcagcggcttgcaaatgaagaagggggtccacccaagcttaggatcacaggtatagatatgccccagccaggtttccacccctgtgaaataattgaggagacagggaagcggttggctgattatgcaaacttgttcaaggtgccttttcaatatcagggcattgcttcacggtgggaaaccgtacaaattgaggacctgaacattgacaaggatgaagtgctcatagtcaactgtatgttcaggatgaagaatcttggtgatgagatggtatctatgaatagcgcaagggatagggtgctgaaaataatgaggatgatgaacccaagggtttttattctcggtattgtcaatggatcatacagctctcccttcttcatcacacgtttcaaagaggttctgttccattactcttcattgtttgacatgattgatgcaaatgttccacgggataacgaggcgaggaagatgatagaggggggactctttgggcaggaagcacttaacatcatagcatgcgagggtgcagaaaggactgagaggccagaaagttacaagcagtggcaagcacggtgcctcaaggctgggttcaagcagctccctgtcgatccagccaccttgaaagagataataaatatgaagaaagggatttaccatgaggactttgtagctgatgaagatggtgcctggctactacaaggatggaaagggagagtaatttatgccatatccacatggaagccaaatgaatcatatttggatcagtgtcttccagagtttggaggttatccatgtcaaaagtatgatttacatagcagaatattgatggaggaggatattgatgaaaagatcagcataaaaaaaggacaggatgcacttcaggcgacagagaagcccttctatgatattcttgggaaggcatacccatcttcatctaaggagacagcaattaacggtgacagtcaagcagattaccctgataatggtagcagcagttatcatgaacaggcatgtagtggtagctttgttagtgatctccttgggtcacaggatgcgcattcgataaccaccgactggtcttctgaatttgaccgtttggctttgcaattcaggagaggtgttgaggaagcaaagaggttcattccaaatattgaaaagttggtggatgatccagagaagaatggtctttatgcttgcaaacaaacaacagagacaacagaacagaagggcaagcatgagaacaaaataaggaatcatcctcatgatcctcatgttgagcacatagagttgatggaagcaaggaacagtaagcatatggccatctccactagtgaaacaatacgggatgaaatgtttgatagtattctgctctgcaataggcagctccctggtgaagttgctaaccttagaggaatgatggcaaaagaagcaagcgacaacccaaagaaatttcaaagcaaaggatatggaaaagggcaaaggaagccacacagtagtaagaagaaacagaaagaggcaatagatctcagtgttcttctcatccaatgtgcacaagcgatagcatctaacaaccatccctttgctagtgagctactgaggaaaataaggcatcacgctttgccagatggagatggttctcagaggctagcaaactgctttgcagatggcctcgaggctcgcttggctgggactgggagtcaaatgtacgaaaaactgatggcgaaacaaacgagcaccagagacatgctaaaggcctatcatctatattttgtagcatgcccttttgagatggtaacatactacttctccaacaaaaccatcattgatgcattggaggggaaaacaacattgcatatcgttgattttggcatcctcttcggctttcagtggccatgtctaattcagcgacttgcaaagcgagaaggtggcccccctaagcttcgtatcacaggtgtagatgtaccccagcctggttttcgccctcatgaaaggattgaggagactggaaagcggttggcagagtatgcaaatatgttcaacgtacctttccagtatcatggcattgcttcaagatgggaaactatctgcatcgaggatctcagtattgacaaggatgaggtactcataatcaactgcatgtcacgaatgagaaagctaggtgatgagacagaaaacattgatagtgcaagggatagggtactacacatgatgaagaggatgaacccgcaggttttcattcttggtgttgtgaatggattgtacagctccccattctttctgactagattcagagaggttttattccattactcatcactttttgatatgctcgacaacaatgttcctaggaaccatgaagcaaggatattggtagagaaggatctctttgggaatgatgcacttaatgctgtagcatgcgaaggtgcagaaaggattgagaggccagaaagctacaaacagtggcaaatgaggatcctcagggctgggttcaagcaacgtcctgttaatcaagccattctgaatagatcagtacattacaaggaattttatcatgaagactttgtaattgatgaagatagtggctggctgctgcagggatggaaggggaggataatacaggcactgtcaacatggaaagtggaaacctag

SEQ ID NO: 22105 - DNA, 220 bp, Oryza sativa
  Clone ID: PAT_MRT4530_27312C.1
aaggggattaaaaggatggaaaaattatatggggggaaatcattttggggggctagacctaccttccttaataaccaggggatatttaccattacctggcgatttacctttcaaatttttggttcctggaattaaagttggcgatctaaaggggaagggttattaaataccccaaatcttcaatgctgggaatgggatcaggttgcccttcaaaaatttt

SEQ ID NO: 22106 - DNA, 384 bp, Oryza sativa
  Clone ID: PAT_MRT4530_27313C.1
acggcgaacggcgcgacggacggcggttgcagacggcgagagtcggacgggcttcgagaggacctaaggaacaaaatgggggaagttagagagggagagagagatcatcgagggtaggaacgccggccgaagggggtggccatggccgaactcaccggcgcatgggacggacggggttccggcgacggacggcgacgatcgggcgatggccagggtgcttcacgcgatggcgaatgcggtggtgtcgacggcgaggtttggcgtggcggcttgcgatggctagcggcggccggagagcggaaaagtggcggcggcggtgggtgcacgctgctagagcgaaagagggcacaggggagctcggtgaaatggggaaaaagagagagg

SEQ ID NO: 22107 - DNA, 349 bp, Oryza sativa
  unsure (1)..(349): unsure at all n locations
  Clone ID: PAT_MRT4530_27314C.1
atgccggtggccgaccgtacggcccgcccggtgtcccacccgtcgttccggccgtgacacccagcaatgacaccctcccgccacggagcctacggtttccactagccgccggaccacggattcactgccatcacgnctatgctcgcttcagattggtgaaacagccaatcccccggatgcaaatctcaatcgaattagcttaatccacgtgaattcgcttgagtgattagcgacgcagcagaattggtgcccgttcttggccgatgcgaaatttgaactcgagggaatgcttggataaaaacgtctgaatagaacgacactgaaatctgagtttaaaaaaaaaaaaaaa

SEQ ID NO: 22108 - DNA, 546 bp, Oryza sativa
  Clone ID: PAT_MRT4530_27315C.1
atggccaagcccaagactagggggaggaggtcggcccccgcgccaccgcctccgcccacgcctccccctccgcccgcgccgccggcgaacgtgatcgacctcacctcctcccccgacgcctccaccaccaagggcggcggcagcggaaaccggaccaagcgggctcccccctcgctgctcgacatcgaactcgacgggatcgagatgtggaccccgggccagaagcgccgcctcgacgaggactgctgcatcctctccgccgacccgctctcccccgacgtcgtcgctgccaccgccgccgccgccgcgaacgatgacgtcgccgtcgtcgccgagcgcggcaaggtggcgtgccgtgactacccccatccgagatctgcctgcgccaagtttccattcggcactacaccccatgatgatcattgcgagcagtgcttctgctacgtatgcgacgtgcctgccccatgttcctcatggaagggagaaaaagggcattgccatgcgtcggacaaggacaagaaatggaagtctgttcgtctactttaa

SEQ ID NO: 22109 - DNA, 601 bp, Oryza sativa
  Clone ID: PAT_MRT4530_27316C.1
ccggccgggagtcgcctcaagggttttgccacccgaatcgccgccgcctccgttttctccaggggattctgagatatggccttcttgcggaaggttgggaacctcgtcaggcagtccgcaggctcgggctcgccgctgttccaggcggtccgatgcatgtcctcctcgaagctcttcatcggaggaatctcttatggtactgatgaccagagtctgaaggaagcgtttgctaactacggtgaagtcattgaagctagggtgattgtggaccgtaccactggacggtcgaggggatttggttttgtaacctacacatccacggatgaggctgcagctgccattactggcatggacgggaaggatctgcagggccggattgtgcgggtgagttatgctcatgaccgtggtagccgtgctggtggctatggtggtggaggctacggtggacagggtacgtatggtggtggcggtggctatggaggtggaggctatggtggacaggatgcatatggtggtcgtggtgttggaggctatagtgagggtggccgtgggtatggtggtcgtggataccgtgacggtaacattacggggggaataacac

SEQ ID NO: 22110 - DNA, 205 bp, Oryza sativa
  Clone ID: PAT_MRT4530_27317C.1
agtcgataaaggaagaaactttgtacttttcgaagggctaatcctagaccaagctgcgccccccacgatgactcagtgagaatcatattaaatcatcttcagcattctacaaaacttcaactacataaaagccaattacaatctctaattcacccaaaatacactctccacacaatacacttacactaatccaaacataacataa

SEQ ID NO: 22111 - DNA, 334 bp, Oryza sativa
  unsure (1)..(334): unsure at all n locations
  Clone ID: PAT_MRT4530_27318C.1
attgcacgatgcggcggtggtgcgccgcgcggcctcggcctcggtcgccgcctcctctcctcctctgtctccggccctncccaccgccctcttccggcgcacctnangcccanncccaggccattgcccttntannncngccaccacctnttgactnctnctctgggtctccanncntannnnnnacngncgatgcaatggcagacgcagcaggtgcgncacttngncgncaaggacagatcgtgngngnnanggacgtcnatnangttcaaggtnaagaagtacaagatnaagnggtggntgtnatgaagtttngattnagagttatgaatga

SEQ ID NO: 22112 - DNA, 204 bp, Oryza sativa
  unsure (1)..(204): unsure at all n locations
  Clone ID: PAT_MRT4530_27319C.1
ccacaanattgtaggatntggggtgtanctttttgttanatgggcacctttgcttcctatttgtgganttttgggcgncggantttttgagttctgggaatttnacttccnaanagatgatgctttcgttgntcatnnatanatattcttangncctgtaganttgatgttggcaactgcatggttctnnnaaaaaaanaaaaa

SEQ ID NO: 22113 - DNA, 3257 bp, Oryza sativa
  Clone ID: PAT_MRT4530_2731C.1
atgatgttcacggaggggctcgacgagtcggcgatcagctggatcaagcagggcacgggctctcctgcgccgccgccgccgaggtcgccgctggcggagcggctgcccgcggggcagatcgcggcgccgaggagccccgcgctgtacgggaggggctgctccggcgtcggcgtcggcgtcggcggaggtgtggggaatgggctgttctcccccaagagcctccccccggtgcggaccacggcgcggcactccgggctgcttgggcggcaccaccactccgtgcttctcgcggcggcggactccgaggaggaggatggggaggaaggggaggagagcgtggcgtcgtggggggtgcccgatgactgctactacggcaacttctccgacacgctcgaggaggaggaggaggacggggcgtgctccagcggcgactccagcctgctccggagggccatggaccgcggcggggtagcgttcgacgacgaggtcacctcgcagctcagccggaggggcgggggcggcgggttggttcgcgggcagtccaaggagaacctgcgggtggaggtgcgggccgcgagcgccttcgccgggaaatgctccagcggcaacaataccgtggattccacctcgcatgaacattattttggtgagcaaaaatttcaagccattgggacaccaagtgcccctccaattgcaggagatggggttgaggccatttttgacactgttgctgaaacgaaaggaggccttgaaagggctggggtatcatcagtggcagatatactggcccaggatgttcatgagcctgagcttcctacgagatcaaatgttcaagaagatggtgttcatgtgccgtacgtcgagagcaatttgttagctcagatgccgagtttcacggctaagatacagagttttttgcttcatcccaagcacaagagtcaagatgacggaaaaagtatctatgataaggacgggagttgcaatatgaagggaagaaaacttgttaaacagattgagattgaagaaatgttcacatgcacgctagaattgcaaagctcctgcaaggataaccagagagattccatttctccacaatatttgaaaccaggcactggtgaatctcaactcttttatctagagagccagggggattctattcttgtcgaagtacaagacaataatagggttgtcataggccgcgcaaaaattcaagtttcatcgatcactgatactcatctttgtataaacttctctgtctcttctgacaatcaaggagctgcgaagatgctgcaaggcggtccagctgtggatactattgtatatgacatggttctggaagcagcaatgagagctcagaatttcaatagcaaaatgttgcatgtcagtggttcatggaaatggctattggacgagttttcagattactatggggtatcagacgcatatagaaaattgagatacttgtcttacattttgaatgttgcaacaccaacaaaagattgcttggaacttgcatatgaactgcttctccctgtaatgaaagcacgtgatgataggactttgacgagacaagagagaagcatactattagattgcgaagatcggatcaagagtctccttgcagttgtgtttgaaaattacaagtccttggatgagaattctcctactggtttgtctgacctatttggtcccatatcagattgtgctgccccagctttagcacctgcagttcagatattcagtgtactgcatgacatactctccaatgaagcacaaaacatactccggaactatttacagactgctgcggcaaaaaggtgcaggaggcatatgattgagacagacgaattcatgtcaagcaacaatgacagccttcttacggaccctatggctatttctgctgcatatctcaaaatgaagactatatgtattaacataagtcgtgaaattcaagcagatattaagattcacaatcagaatatacttccaagttcaatagatctgccaaatatagcagcatccctgtacagtaccgagctctgcaaacgattgaagggttttctttctgcaagtcccccatcaagaccactagagcatgttgctgaactgctcattgctactgcagattttgagagagatcttgactcttggcaagtgagacctgtgcatgggggtgtggtttcaagggatttatttcatggctacatcatggtgtggattgaagatacccgattgcagttacttgacaattgcagagctgataaggctattgctgatgtggagagagaaattatgaaggcactggagaagcaatacatggaaactctactacctctgagagacggcataccgaaaattcttgagaagcaggttcaaagattgacaagaaggcaatctataagcccttatgttgtaccgaatcagttaggaacattcatgaacacagttaaaagaatgttagacgtgttacactgccgagttgaagatagtctcaaatcatgggcagcatatctaacaataacaaatgggaatgctgttttcggagagcaaatgaactccatcacagtaatgctgaggaagaagtacaagaaatacctgcaagcaattgtggagaagcttgtcagtaatgcacaagctaaccggaccactaggctaaaacggattcttgaagaaacgagagaaagcgaaggagaaagcgatatacgtgagaggatgcaggctctccgtgttcatctctctgattccatttacaatctacatgaagtcttttccagcagaatatttgttgctatttgccgaggattctgggacaggttgggtcagattgtgttgaggtttcttgagagcagaaaagagaacaggatttggtacagaggatctgattatgcattagggatcctggacgatgtctttgcatcagaaatgcaaaagcatctaggcaactccctgcaggacagggacctcgatccaccgcagtcggtggtcgatgcccgatctatcctctgttgatgtgtgggagggagctgcgaactctcttagattatctcttctggcaatgcagcgtattatacagttgctgaaagtttggtctttggtttggtttattccttggtgtgcagatgatatatacaggtcccgatgccttaattcttttttgtctatagttattttttggaaaggagaacactagttgtaacggccaaattggtaagcaaaatttgcttaccatatggaatatataatgtgtgatttcttgt

SEQ ID NO: 22114 - DNA, 207 bp, Oryza sativa
  Clone ID: PAT_MRT4530_27320C.1
gacggacgcgtccgccgacgcgtgggcggacgcgtgggcggacgcgtgggcgcacacagccgcagcagcagcagtcgcgcacacacgagccacgaagacgatggccacggccacggcgctctccctgagcggcggcagaggccgcagctacggcgtcaggtaccctgacgccgagacgaggcacttctggagcgccgtcccgcggtc

SEQ ID NO: 22115 - DNA, 1170 bp, Oryza sativa
  Clone ID: PAT_MRT4530_27321C.1
ctagagtggtggcggccggtaggagctgaagtggcggcggtggcagaagctggagcgactgtggcggcgagagcggtgggctggaccatccggctgccaccctccccccatctcctcctcctcgtcatcctcctcctccttgtagtcgtcgccgacctccccgaccacaccgagatcggcgtcgaaggcgatgtcgtcctcgtccgcaccggagcgcatggaggtctcggctaggctccgcgcgccgcccgcctcggcggctccgcgccgcggccgaggatccctgccattgccagggtggttcgcgtcggcccggcccgcctctcgtgcggtttccgccaaggtgaggtgacctcccctctcgcttccttcctctacgatttctccagctggtttagatttggaaaagaagaacgttgggaagaatcctccttgcataagctgtgaaactaagggtgcagtgctgtgtgcaacttgtgctggttcaggcttgtacgtcgactccatattagaaagccagggaatcatcgtaaaagtcagatgtctaggctgcgggggcactgggagcattatgtgctcaaagtgtggaggccgtggacacacgtgaattgacatggtttgggtctcaaaagcaaggcaatgcagttcaagtaacatcttctaaggctacttcggtagggaattctgttgatgtaaagaagcaaagatattcatagttgattttcacatagtgctgttcgaacaatttctttgtatcaattaatctgatgctgaggccccagctgtaaaatgacttttgtgagagcacctgttacaaaggcaacgaacgataccggggttgtttaagaaaacaaaaaaaaaaagtgattttcgactgttcaaaaaaaaaaaaaaaaaaaaaaaaaaaaaaaaaagcggccgcgtgggcggacgcgtgggcacgagtagtctattgttagattgggagtccctaaacccatagagagtaatatgaacgatattacaaagcttagaatgttgaatgtccagttttaaagttagttgctaatggattttcatccaaagtttatggggaggttattgggacttcttcctattattattgagaagttcatgcgtaataatactggatttccagttttgcaataaaagaagatgtgcccgatcccc

SEQ ID NO: 22116 - DNA, 816 bp, Oryza sativa
  Clone ID: PAT_MRT4530_27322C.1
atgcggcagcacagcggcctgggcagcctcttgggcggggggccgcgcgcggcggcggcggccggcggggccgcgccccgcggcgacgggcaggcggccggcggggccacgcctcccggcggcggcgccccgcggcggcgggcaggcggccgacggccggagagaagggagggcgtcggcatcggcggcggtgacgacggcgacgtgggagaaggagagggcgttgccgtgcgggcgaggtcgaggacggagaccccggcggcggcccggcggagcatcggcggcggcggcggtggcggtgcgcagtctgccaatcatggattcttggatgcatccaagtacacaatcatacaggccgaggttccagcggaggaggtcgacgatgtggaagcgacgaggcgggagaggaggcaaaggcggcggcgggcggcggcggtggctgcgaggcgggagaggagatccggcgcccggcgacgcggcgccgggcgacgaggcggtggcgggtgcgccctcgccttcctcaagctccggcacccagcgctcgcccacgacgcacgcgcacggccgctgcacgcccacgtcgttcccgcctcgctacgcctccccgggcccatcttcgccaccgccgacgctccgccgggccgctgccggtgtctccgtcctcgacctcgcccgcacgacgtcgccctctccttctcccacgtcgccgccgccgccgatgccgacgccctcccttctaccccgtcaccgcccccgtcgctgccgccgccacggcgccgccctcctctctcgcctcgcgcccaacggccggcctag

SEQ ID NO: 22117 - DNA, 156 bp, Oryza sativa
  Clone ID: PAT_MRT4530_27323C.1
atggtacatatcgcgccgcgccacgaggtgttcgacacgggaccgaggcgtgtgtccgtgtcggagaaggattctcaaccagaggaaggagaccaagagtcccaagacaggccccgattacctttctcgctcaacgagaggaaattactggcctaa

SEQ ID NO: 22118 - DNA, 571 bp, Oryza sativa
  Clone ID: PAT_MRT4530_27324C.1
gccctatgacgcaaaaccgcctgtgccccgcagcgttggccgatgtcattggaatggcagctgggcacagacaggttgtgcccgactgggaaacgcgggcagtgacgctgcaaaccgcaattgaatggtggagttgagctgccactgcattgaggcaaccccagggctgttgacactgttatcgcttgcacgggctgcgtgatgagtgtggtagtgggacttgtggagcggatgcactaatttgcaccccatgcgaatacagctgatgagacccatggattgacgccaagctgctgaatgacgactgccactgatgagggaaagctgggtgacgcctggcagtgaccggtgccggaatatgcccgggtgcgacccacgcgtgccggagatcacagtgctgtttgcattgcagataatgatttgctgcatagttagcaaacttagcagaactgtataatatagtatatacaatcaaaggaggaggaaacacccagctgattcctggctttctcatgtttgggacacctttttttttattaacataatttcatatggtaaaaaaaaaaaaaaa

SEQ ID NO: 22119 - DNA, 1908 bp, Oryza sativa
  Clone ID: PAT_MRT4530_27325C.1
gcgcatcgcgagcgagacgactttatttttattttcttttataggccacatctgcgaagtcaaccacgataggttacagctcaagacctccgatcagtgtattattgtgtaggctacatagtacacaacacaccattgaaatacatgtgtgagactacattcctccataatttaatatgatacagttaagacagattcagacaatgcataggctcataaacctgaattcaggtaggaaatcagatgtgattgatcatttaaatggaatggcacaatcgtcgtactttcaccaagaacagcagtcaagtatccgactgacagacctagctgctagaaacgaaatcagaatgagaacttgaatcctccagtattggcatctaccgcagattcccagaacgagactttcttcttgcgagcagcagccttctgctgagcttcaagttcaagctgtttaatcatcccaggataagtcatatcgatggcattgcggaacttgtcatgcaggtttaccctgtctgtagtccctgatacaagttcacttgcattgggcctcttgagaaagtcaagaacattcaacagattcctcctgctcacataattctgagtaatcgcaatagattcctccagattgataaccaaatgccaccatccattaggcacaaaaaccacctctccagcccggcatatacactcaacaggcctcttttcccaggtcttacatgccccataaaaattcatgaaccattccatgatagatacagggctagtgacttctgctccatccgcacttggatgaactcctggcggcaccacctccggtgggaacatcacccacttcttggctcccttgatcacagcattccacgccgatgtcgagtttggatcaacatgaaacgacgaccctgaacctgccggcccaatgataacccatcggtggtccggcctttcctccccaagcaccccgaataggtcctctcggaagtacgccggcacctcatagtccctccccatctccggcaccttctcggtgaacttggcatcgaacaggtacaatggcctctcctcctgcacattgtcggcatactggaggtacctatccagcgtcatgctcaccggcccgacggcgaactccttcccggccgagaccttcagcaagtgctccctggtccacttctgcaatgctggccagctctcgaggcagccttccagaagcaccggcctattgggctcctcgaattcggagacgaattgctcgacggacatgccgcggcggcgatcgatggtgtcccggtggagccactccggccgcatctccatgttggcgcagagccagctctggaagaggtagtcggagtagaaccccctgatctctaggccccgcggggggaggtgggcgcggccgcccgacgcggcggcgatgtaggtggcgcgccacgagcccgagaaggcgaagtccccgccgagctcgtcgaggacgagcgcccgccagagcgggtcgtgggaggcgacgacgtagagcgccctcgacgccgcggagagcctagcgaggtcgcgcgccgcgagcaggccgagcacgtcgaggaggacgtcgtcggggagcgggcggagcgcgccgagccccgcgtcgcggaggttgccgccgccgccgaggaggaggaggttgccgagcggctgcacgaggcatcccccatcgcctcgccggccgctcccggcaccccccggaccggcgcgcgcggaggtcttcaggtggaaggcggtggcgtctccggcggcggcgtcggcgaggcggttcttggatttggtggtcttcttggggcgtttgctgccgccgcggccgcggccgcggcgacggctaggtttggggttgcgaatggcggggaggaggagggagtggaaggcgctcggcat

SEQ ID NO: 22120 - DNA, 1368 bp, Oryza sativa
  Clone ID: PAT_MRT4530_27326C.1
atgcccgtgaagaagaacgtcctcgtcccggccgccgccgccacgtcgcggccggccgtcggacctcctcgccccggcaacgacctccccaccaccggccggcttgcccaatccagagagaagatcccatgttccagtgaattcacaaggtacaccatgacacctactaaaaaacaaactttagcacatgaaggacttgtggctgccgttaatgaagccatcggaagttcacaaaaaagaggccgtcgtcaaatcttgtgccaaacatcctgtttcgttacagagagagggggaggacatttcaacgtgcaggcgttgccgccacaagcgtactaccctgtctgccgaaccggtcgagttgaagatcccgtccaatgtagcgcgcagtacacaaacatcttatcccgtcgatcggcacacatcggcagtacagtcggatcctgttcctccatcgccgtgaacagcgagcggccgacggaccacgagaacagcccgcgggcagcgactcctgagccgacggatgacggatcgacgagactcgacggaaatgccgctttgccgtgcgggggcgcaagcacatggcacatggcaggcagcagcaacaggacgcgcaaccgcgacccgcgcgccgctggtgcatcgcgtgcggccatccgtctcatcctccgggatcgcgcgcctaacgcaattgatgagatgtttaagcgagcgaagagcacgattctcctcgacaatcatggacaaccaccgaccggggcaaagaaaaccttccttccaaccgtcattaaccagtgctgtaacaaccacgaaatgcatgatggtgtctctgatgatcgaggcggttggatggatgaagaagattttgcagcgccctactgctacgagagattctcttcagacgaaagtgccttagaatttaagactcgtgtacgctctacgcggttcctacatactttatcgaaccaaaggaagcaggaatcacgatacgcgacactgtcgaaagaaaaggaggcacgaggttacatcgataaaatcaggatcagagtaggtttggagcgagtcagcgagagacgtgttattgcagccacctgtcactctgccacatgtcacaggaaaaagaacagtactatatgcagaggagatgaacgaagaatgcccattcagtttatagcctgctattgtacctgctcttacaacatcgaccggctccgatttttcggagattatccaatgaacgagaggttcttaaccgaagaatgcaaccttcgaatcttgcgctacgtcggaaaggtgcgagaggcatccacgaacatggttcacactttagaacgattggttgtcattcggtctctttttcgtttctcgcat

SEQ ID NO: 22121 - DNA, 600 bp, Oryza sativa
  Clone ID: PAT_MRT4530_27327C.1
gtacttctagtttacgccatcaacacggtggtggagtctgtgtagtaccagtttacgcctcctgctccgcctccgatccaaccgcatccctcccagatctccgacttctttcctcctccgacgatcttcttcttcttcttcttccttcatccaagacaacaagacaaagagaaaggcaagcgatggagctggaggcgccgtcaccggcgaggtacctggtcggcgccgccatcatgatggccggcgttgtcctcccgctcgcctacatgatcttccgcagcaagcgctcttcctcctcctccaccgccgtcgccgcttcctccgctccatcctcctccttctccaagcagacgtaggaccaagggcctcatctgatctcaccaactccttctgctgctgcaacatcatcttcttttccaatttttgtcaagcaactttgccttcagctgctgctgctgctgccattcgatccatgtactactactactagatgcaaccattaatcagtcatctgtgtttgctctgctcctgtcatgccatgagtaaaaaaaaaacaacatatgagatagtaccaaaaaaaaaaaaaaaaaatttgcggcc

SEQ ID NO: 22122 - DNA, 595 bp, Oryza sativa
  Clone ID: PAT_MRT4530_27328C.1
atgtcatcttccaccagccccccgagcacatcaactgcagaatatgtcgagttaagtccccatcggctaaaactcctctttttccgcactagattggttcttcttcttctctcaatcttcaattccccttctactacagcatcttgcccaccaaattgatgttcctagtatcgccgacaaccttcagcttttccttggcccaatcggtaacttagaccctaccgagtttataaatggtgaaaccaatagaatcctcttcagatttgccaacccagatctcagccaatggaaaggcaccttcaaatcttggccatcggccgagattacctggcctgcttggttcaaaaggatgcgagctagcaaattagatcactggttagagatcggcatatcccaagctctagcactaactgcagcaaatatggcaaggaatgaacccatgatgatagcagcagcatatttctggtccacggccatgtatgccttcctattctcccaagggccgatgaccccaactcttctggacatcatcatgatcaccggtctagatatcacctcatcggccaacttatctagcctcgacatccaaatcact

SEQ ID NO: 22123 - DNA, 2651 bp, Oryza sativa
  Clone ID: PAT_MRT4530_27329C.1
cgggctgaggactttcctttcggcatctctcctgcgcgggcgagtcgtcctcctcgtcctcgtcgtcccctttctctgctcccgcgagatctcacccccgctgcggcgacgcggccatggcggggaggaactaccacggctacggcggcggcggcggcgggggcatgtccatggtggtggcgagcacgccggggcaggagctggccctcaccaactgcgcgtacgtctcctccgccgacatccgccgcttccccaacgccctcgccctcgtcggcgacgccttcgtcttcaccctgcgtgcccatgatgctgtttctgctggaagcatcgcattgaatgccattcagcgtcgccagacgaaggtttcagctggggattcaatcactgttagcagttttgcccctcccgatgatttcaaattggcattgctcacattagaactagagtataccaaggcaagaaccaaccgaaatgaggagctggatgctgttgtgcttgcccaacaacttcgaaggagatttcttgatcaggtcatgacatctgggcaaagagtaccatttgaattttgtgggacaaactatatattcactgtcaatcaagctttgctagatggccaagaaaattccacacctttggacagaggattcctgtcaagtgatacatacatcatatttgaggctgcgcctaattcaggaattaaggtagtaaaccaaaaggaagctgctagcagcaagcttttcaagcacaaagagtttaaccttgaaaagttggggataggtggattaagtgctgaattcacagacatatttagaagggcatttgcttcaagggtgtttcctcctcatgttgttaataaattgggcatcaagcatgttaaaggtatattgctgtatggcccccctggtactggcaaaactcttatggcccgtcaaattgggaaactgctgaacggaaatgaacccaagattgtaaatggacctgaagtcttgagcaagtttgttggagaaactgagaagaatgtgagagatttgttcgctgatgctgaaaatgaccagaagacacgaggtgatcagagtgacctccacgttatcattttcgatgaaattgatgctatctgcaagtctagaggatctaccagagatggtacgggtgtacatgatagcattgtaaatcagctccttacaaagatagatggtgttgaggcattgaataatgtgctcctcattggaatgaccaatcgtaaggatttacttgatgaagctttactgaggcctggacgattggaagttcatattgagataaacctgcctgatgaaaatggccgtttgcagattcttcaaattcatacgaataagatgaaagaaagctctttcctttccccgaatgttaatcttcaggagctagctgcacggacaaagaactacagtggagcagagctggaaggtgtcgtcaaaagtgcagtctcatatgctttgaacaggcagataagcatggatgaccttaccaagcctttggatgaagaaagcattaaggttactatggatgattttgtgaatgcacttcatgaaattacccctgcatttggtgcttccactgatgaccttgaaagatgcaggctaaggggtatggttgattgtggcaaggcacataggcacttgtatgagagaggtatgcttcttgttgagcaagttaaagttagcaaaggtagtccacttgtgacatgcctcttggaaggtcctgctggaagtggtaaatcggctttggctgctactgttggcattgacagtgattttgcttacgtcaaaattatatcagcagagacaatgattggtttcagtgaaagcagcaaatgtgcacagatttgcaaggtttttgaggatgcatacaaatctcagtttggcatcataattctagatgacatcgaaaggttactggaatatgttgccattggaccacgcttttcaaacataatctcacaaactctactagtccttctcaagagggttcctcctaagggcaagaacttgcttgttattggaacaacaagtgaagtaggctttctagaatccattggtatgtgcgacgtgttctccgtgacataccatgtccccaaactgaaaaaggaggatgctacaaaggtgttgcggcatctcaatgtgttcgatgaagcggacattgatgcggctgcagaagcactggacgatatgccaatcaagaagctgtacacactcgttgagatggctgcacaagggccatcaggaggaagcgcggaagcagtctatggtggagaggaaaagatagatatcaaccacttctttagcatcttgagtgatattatccgctattaactacacggcgtcggaatgaaccctaggtgacaccataggaatttaattgcacatttcttcttacttcaagttctcccttttgccaccgtcgccagggtatagggttgtttgatctttgaggttcgtgtctccttgttgtgccgctttgagcttttgttggaatgttgttatgattcggacagaggttataccttacacgatgtagcatgtttcaaccgtatgtttcgatactttcccagcacagagttgcacgaatatgattttgggtggctcctttccggctaaaaaaaaaaaaaaaaaaaa

SEQ ID NO: 22124 - DNA, 156 bp, Oryza sativa
  Clone ID: PAT_MRT4530_2732C.1
atgccgccaaatcgccgcgccacccgcgcgcgcgcgccgtggtggccgaccggccagtcgccgccgctgtcagcacctgccgcgcctgccccgctttcggagcctgaagacccgcagtgcgaggatttcgaggatcaagctcaagatctcgagtaa

SEQ ID NO: 22125 - DNA, 943 bp, Oryza sativa
  unsure (1)..(943): unsure at all n locations
  Clone ID: PAT_MRT4530_27330C.1
ccaaagctccccacctncccttttcggtctctgcctgccctgcttcttgcccaccaccacctgtgtcctcttcctctcctctccttgcattgcagccttctccttgcttcactgcctccctcacctcctatatatccttcccccttgcctcctncanccacccacacttcacacttcttgtttgatcaatcacagagacagagagagagagatggcttggaatggcaggtttggagaggatggagaggaagagaggagccttgagctcagccttgccctccctggatacttctccagctcaggtttgcaggggaacacgagcactgctgctgatggagccaagggaaacgatgggttcaaggcaagcaaaaagatgctaaaatttgcccctaaattctctgcgattcgcagcaggccggcggctccggtggtcgggtggccgccggtgcggtcgttccggcggaacctcgcctcgtcgtcgtcgtcgtcgaagccgccgcgtggaggccgagacgccgccgccgccgccacgggaggcaaggtggcccggttcgtcaaggtgaacatggacggcgtcccgatcggccggaaggtcgacctggcggcgcacggcggctacggcgagctctccgccgccgtcgaccgtctcttccgcggcctcctcgccgctcaaagggacccaaccatggccaccgccgccgccgccgccgctgccggcgagagctgcacaggagaggaggaggcgatcgccgggctcctcgacggcggcagcggcgagtacacgctcgtctacgaggacgacgagggcgaccagatgctcgtcggcgacgtgccatggaacatgttcatcgccgcggcgaggaggctgcgcgtgctcaggagctccgacctgaacgcctccacgatacgagcagggagcaggaagagggcagctgccgagtga

SEQ ID NO: 22126 - DNA, 505 bp, Oryza sativa
  Clone ID: PAT_MRT4530_27331C.1
gctttggaaaacccaattacagcagaggagaggacagcaagacaacaaatagtatatcaagctaaacagatgggtaggcgaagtataagcaatgccaaaacctttgcagtcatgggcctgattttctctgccgctgaatgtgtcatagagaaggctcgcgcaaagcatgacactaccaattcagcggtggctggctgtgtcacaggaggggctttagctgcaaaaggtggtcctaaagctacatgtgttggatgccaagaggtttgccaccttctcggttagcaaccaagaggtggattcagcatccaaaacaacctttagtcattttaagacattcactcattgacatgtcttctgaggtcttgcagagcaagattttttcattttacgaggctgacccaacatcgttcgcattactggagtaactggctgttatacagaaatacgttactcctattctttatttctactgatctctgctatatcaaaaaacattctaacaaaa

SEQ ID NO: 22127 - DNA, 4509 bp, Oryza sativa
  Clone ID: PAT_MRT4530_27332C.1
atggatgtagtcccgggaagagttatgctgcgagctttttatgatgatgttgatatggttcctagaacaatagtgatcaagcaaatacccaatcagggtggtcagggggagtcttggactttctctgtttttgtcctcaacaatgattttgccggcattcaggctccggatgaagatttaccaccaatgggtgccctagatcctgatcttgaaaataatcatagcaatgggccggttcaggaggagcatcttgataatcatgctggtggttggggagattgggagcagcaaggggagaatcaggatcagcatgtgataggggattctggagtgagtcagcagaatcagaatcagaatcagaattcagattctaatggtaatatgcagatagtgccttttgtccctttggttgatcctgctttggaggttgtgttcactgttgctgaagaaggccctttatattttatttctgatgaaacacaaggaaggattcaagaatttttcctcaggaaggagcttctggaaaagttggttaatagtttatcttcctcttttattccgggtttggtgaccccctctgctccatttagtcagttggtactcccaaaaaggaagttgagtaaagatatctcaatacccagctccaccggatttgatggggaggatcggaaaaggtcgaggacaattgggggcaatctggaaaaggtcgaggacaatggtggaattcaggcagaggtagaggacgatggtggaacaatgaaagaggaaaaggaagagaaaataaacctgaccaaaccaaattttgtcaaacacatggaccaggaggtcattccacagaagaatgttacaaacaagtatgaaggagctcgtgatcaacgaggacaaaacgccatagaagcaccgcaagttatgaagatagaggcaattgaagaagtgccaaagagagtgataaatgccataactgggggctcttcattaggagttgagtcaaaaaggcaaagaaaagcatatgtcagacaggtaaatcatgtcgggacaagctatcagtcaaatccaccagtatactcaaaaacggtaatttcctttgggcctgaagatgcagaaggaatacttttccctcatcaagatcctttagtggtctcagtggaaatagcacaatgcgaagtgcaaagagtgttaatcgatggaggaagttcagcggatgtgctgttttatgatgctttcaagaaaatgcaaatacgagaagataggttaacaaacgcaggagtacctttacaaggttttggtggacaacaagtacatgcaattggaaaaatatctttacaagtggtctttggaaaaggcactaatgtgagaaaagaagagatactatttgatgtggtcgatatgccatatcagtacaatgcaattcttggaaggtcaacaatcaatatttttgaggccataatacaccacaactacatatgtatgaagctcccaggaccaaggggagtaataacgggagaatacataaaaatacaaaagccaattcctgaagggaaaacaaagaaagtacagttggatgaacatgaccctggaaagttcattctgataggagaaaacttggaaaaacatgttgaggaagaaatcttaaaggtagtaaaagaaaacatggctgtatttgcatggtcaccagatgagttgcagggagttgatagaagtctaattgagcacaacctagcgattaagtcaggatacaagcccaaaaaacaaaaattgagaagaatgtctacagacagacaacaagctgcaaaaattgaacttgaaaagttgttgaaggcgaaagtcataagagaagtgatgcacccagaatggctggcaaatccagtgttagtaaagaaggcaaatggcaagtggagaatgtgcattgactttacagacctcaacaaggcatgcccaaaagatgattttcctttgccacggatagaccagttggtagatgccacagctggatgcgaactaatgagtttcttagacgcatactctggctatcaccaagtttttatggtgaaggaggatgaggaaaagacatcatttataacaccatttggaacttattgttttatcagaatgccatttggtttgaagaatgtaggagcgacttttgccaggctgataggaaaagttttggctaagcagttaggacggaatgtcgaggcatacgtagatgacattgtggtaaagagtaaacaagcatttacccatggcaaagatttgcaagaaatatttgaaaacctgagaaaatgctcagttaagcttaatccagaaaagtgtgtttttggcgttagagcaggaaagttacttggtttcttggtgtccaaaagaggaatagaggcaaatcctgacaaaatcgcagcaatccatcaaatggagccgccaaaaaacacaagagaagtgcagaggttgacaggccgaatggcatctttgagtagatttctatctaaatcagcagaaaagggattacccttcttcaagactttgaggggggcaaacaccttcgagtggactgctgaatgccaacaagctttcgatgacttgaagaaatacttgcatgaaatgccaacattagcaagtccgccaaaaggtcaacctctgttaatgtatgtggcagcaactccagcgacagttagcgcagttttggtacaagaagaagaaaataggcaagtgccggtatactttgtctcagaagcattacaaggaccaaaaacacgatactcagaagtagaaaagttgatttatgcaattgtgatggcttcaagaaagttgaggcattattttctgtcgcatgacataacaataccatcggcatacccgataggagaagtgttaacaaacaaggaagtcgcggggagaatagcaaaatgggcaatggaactcttaccttttgacctgaaatacatattaagaacagccataaagtcacaagtactagcagattttgtggcagaatggactcccaatgaggtagaacaacaggaagaagtcgaaaaaccatggatagtattctccgatggagcatgcaatgccgccggagcaggagccgctgcaattgtgaaaacaccaatgaagcaaacgttgaagtattctgttcaattagcttttccttcaacaaacaacacagcagagtatgaaggcgttttattggctatgagaaaggcaagagcgctaggggctcggcggttaatagtcaaaactgactcaaagttggtagcaggtcacttttccaaatcctttgaagcaaaggaggaaactatggctaaatatctggaagaagcaaggctgaatgagaaacatttcttgggaataacggtaaaagccataacaagggaagaaaatggagaagctgatgagctagctaaggcagccgcaacaggtcaaccattggaaaattcatttttcgatataatcacccagccaagttacgaaaagaaagaagtagcatgcatacagagagaaggagattggagagaaccgatcttgaaataccttgtcagtgcacaacttccagaaaaggaagaagaagcaaagagaatacaactaacgtccaaaaaatacaaggtggtagagggacagttgtataaaagtggagttactgctcctttgttaaagtgtgtaacaagggaagatggcatgaagatggtggtagaaatacatgaaggcttgtgtggagctcatcaagcaccacggtcagtggcttcaaaagtcataagacaaggaatctattggccaacaattatgaaagatacagagaaatacatcaagacgtgcaaagcatgtcagaagttcggtccaatgacaaaagcaccacccaaagaactgcaaccaatcccgccagtctggcctttttacagatggggaatagatatagtaggtcctcttccaagagcgaagggagatttgcgctttgtcattgttgcaattgaatacttttcaagatggattgaggcagaagcagtggcaagaataacttctgcagcagtacaaaagtttgtttggaagaacataatatgtcgatttggaatcccaaagcaaatagtatgtgacaatggaaagaaattcgaatctggaaaatttcaagacatgtgtaaaggccttaatttgcaaatcaactttgcctctgtaggccatcctcagacaaatggagctgtggaaagggcaaatggtaaaatcatggaagctatcaagaagaggttagaaggatcagcaaaaggaaaatggccggaggatttgctatcagtgctttggacactaagaactacggtagtaaggtcgactggcatgacccctttcagattggtttatggcgatgaagcaatgactccaagcgaagtaggggcacattctccaagaatgatatttgaccaaaaagatgaagaaggaagagagataactcttgaaatgctagatgaaataagggttgaagctttggagaagatggcatcatacacagaaggaacaaagagctattag

SEQ ID NO: 22128 - DNA, 1806 bp, Oryza sativa
  Clone ID: PAT_MRT4530_27333C.1
atggcgcttccgcttcgcctcctcggccgcctcgccggcggcggcggcggcggcggtcggcgcctcccgcggccgctggccgtgctccaccaccaccacctctccgcctcggatccaagccccaccacccgcgcgccgctgctcccgtcaccccctcgcttgccgccgctgctagtccctttcgctgccgtccccgcgcgaagcttctcctggtacccccgctcgccgccgccggccggccccgccgcggcggagaaggctcccgaggaggacgtgcgcgccgagggggaaggcgcgtacctgcacgacgcgggtggtgctgatttcggggaagtggtcgccaccagcgcggcgtcggcggatgcagccggagtagccgccgcaggagatggcggaagcgcgtcggggttcgctgtcagctcgctgattgacatcctcgacggatttcataacctcaccgggatcccatggtggataacaatttctctgtcaactgtggccatgagactgttgatacttccagtacttataacacaaattaagaaggctgctaaaattggcaaactattaccagaattgcctcctccattcccacctcctctatcaggaaggagctttcgtgaccagttctctctctatcagaagaaaaggcgagaacttggttgcccttcctttctttggaactgggcctacttttcaatccagttcccgtgctttatactgtggatgtcaacaataaggactatgtgtttgagcaatcaccctggactagataatgtatgtacaaggaaaccttgtgaacagagcatgggtggtattctgtggtttcataacttgaccgagtttccacatggttcttcgggccttgtttttcctaccctagttgcaggtctccattacttaaatattcagattgcctttcatggaacccataccaagcattatccaggtatttttggcgtactggcaaagtactacagggtataccttgaaatcctgactatccctttgtttcttattgggtatgtgattcctcagatcacaattcagggtagcctggtctactggactacaaatggtttaattactgtagctcagcaattgtccctcaaaaatgacgctgtcaagaaggtgttgggattgcctgatactagagctcaccagaagtttcctcgtgtgggtcataagatgatgcaggaacggcctcttgaagatgctcacatgcacactaatttgacatcaacaaataatgaaaccgccaataacattatggaaggaaaagtatctgcgtccagttcacctgaggaactacttgaacaagcattacaacatttggaaactggaaaccaggatcaagctattccactgatcagaacagcaatagagaaagactctagtctttatgtagcactgattggtatgggacagacattgttctcaaacaggttgtttcctgaagccacagtgtgttttgaacatgctataccaaagattgaagagcaggatccacttcttgtgcttgcatgctacggtgcagggctttcacgtatgcggcagggtgatagcaaaatggcgatcgaaaacctccaaagattagcagagctcaaggaaccagaaaaacccattaacaaaaaatgctattaccaaggattggttgctctaggaagtatactaattaatgagggacggaaatctgaggctgtcaaattcgtgcaacgagcggttgcttatgatccaaattgtgagatatatctgaaagaatgtgatgacacaacagaagataagccgaaatctgcagaacactga

SEQ ID NO: 22129 - DNA, 4596 bp, Oryza sativa
  Clone ID: PAT_MRT4530_27334C.1
atggatgtagtcccgggaagagttatgctgcgagctttttatgatgatgttgatatggttcctagaacaatagtgatcaagcaaatacccaatcagggtggtcagggggagtcttggactttctctgtttttgtcctcaacaatgattttgccggcattcaggctccggatgaagatttaccaccaatgggtgccctagatcctgatcttgaaaataatcatagcaatgggccggttcaggaggagcatcttgataatcatgctggtggttggggagattgggagcagcaaggggagaatcaggatcagcatgtgataggggattctggagtgagtcagcagaatcagaatcagaatcagaattcagattctaatggtaatatgcagatagtgccttttgtccctttggttgatcctgctttggaggttgtgttcactgttgctgaagaaggccctttatattttatttctgatgaaacacaaggaaggattcaagaatttttcctcaggaaggagcttctggaaaagttggttaatagtttatcttcctcttttattccgggtttggtgaccccctctgctccatttagtcagttggtactcccaaaaaggaagttgagtaaagatatctcaatacccagctccaccggatttgatggggaggatcggaaaaggtcgaggacaattgggggcaatctggaaaaggtcgaggacaatggtggaattcaggcagaggtagaggacgatggtggaacaatgaaagaggaaaaggaagagaaaataaacctgaccaaaccaaattttgtcaaacacatggaccaggaggtcattccacagaagaatgttacaaacaagtatgaaggagctcgtgatcaacgaggacaaaacgccatagaagcaccgcaagttatgaagatagaggcaattgaagaagtgccaaagagagtgataaatgccataactgggggctcttcattaggagttgagtcaaaaaggcaaagaaaagcatatgtcagacaggtaaatcatgtcgggacaagctatcagtcaaatccaccagtatactcaaaaacggtaatttcctttgggcctgaagatgcagaaggaatacttttccctcatcaagatcctttagtggtctcagtggaaatagcacaatgcgaagtgcaaagagtgttaatcgatggaggaagttcagcggatgtgctgttttatgatgctttcaagaaaatgcaaatacgagaagataggttaacaaacgcaggagtacctttacaaggttttggtggacaacaagtacatgcaattggaaaaatatctttacaagtggtctttggaaaaggcactaatgtgagaaaagaagagatactatttgatgtggtcgatatgccatatcagtacaatgcaattcttggaaggtcaacaatcaatatttttgaggccataatacaccacaactacatatgtatgaagctcccaggaccaaggggagtaataacggtccgaggagaacagcttgcagcaagaaagtatgagcttcaaggaacaccaagtgtgaaaggagtacatgtggttgaccaaaaacagggagaatacataaaaatacaaaagccaattcctgaagggaaaacaaagaaagtacagttggatgaacatgaccctggaaagttcattctgataggagaaaacttggaaaaacatgttgaggaagaaatcttaaaggtagtaaaagaaaacatggctgtatttgcatggtcaccagatgagttgcagggagttgatagaagtctaattgagcacaacctagcgattaagtcaggatacaagcccaaaaaacaaaaattgagaagaatgtctacagacagacaacaagctgcaaaaattgaacttgaaaagttgttgaaggcgaaagtcataagagaagtgatgcacccagaatggctggcaaatccagtgttagtaaagaaggcaaatggcaagtggagaatgtgcattgactttacagacctcaacaaggcatgcccaaaagatgattttcctttgccacggatagaccagttggtagatgccacagctggatgcgaactaatgagtttcttagacgcatactctggctatcaccaagtttttatggtgaaggaggatgaggaaaagacatcatttataacaccatttggaacttattgttttatcagaatgccatttggtttgaagaatgtaggagcgacttttgccaggctgataggaaaagttttggctaagcagttaggacggaatgtcgaggcatacgtagatgacattgtggtaaagagtaaacaagcatttacccatggcaaagatttgcaagaaatatttgaaaacctgagaaaatgctcagttaagcttaatccagaaaagtgtgtttttggcgttagagcaggaaagttacttggtttcttggtgtccaaaagaggaatagaggcaaatcctgacaaaatcgcagcaatccatcaaatggagccgccaaaaaacacaagagaagtgcagaggttgacaggccgaatggcatctttgagtagatttctatctaaatcagcagaaaagggattacccttcttcaagactttgaggggggcaaacaccttcgagtggactgctgaatgccaacaagctttcgatgacttgaagaaatacttgcatgaaatgccaacattagcaagtccgccaaaaggtcaacctctgttaatgtatgtggcagcaactccagcgacagttagcgcagttttggtacaagaagaagaaaataggcaagtgccggtatactttgtctcagaagcattacaaggaccaaaaacacgatactcagaagtagaaaagttgatttatgcaattgtgatggcttcaagaaagttgaggcattattttctgtcgcatgacataacaataccatcggcatacccgataggagaagtgttaacaaacaaggaagtcgcggggagaatagcaaaatgggcaatggaactcttaccttttgacctgaaatacatattaagaacagccataaagtcacaagtactagcagattttgtggcagaatggactcccaatgaggtagaacaacaggaagaagtcgaaaaaccatggatagtattctccgatggagcatgcaatgccgccggagcaggagccgctgcaattgtgaaaacaccaatgaagcaaacgttgaagtattctgttcaattagcttttccttcaacaaacaacacagcagagtatgaaggcgttttattggctatgagaaaggcaagagcgctaggggctcggcggttaatagtcaaaactgactcaaagttggtagcaggtcacttttccaaatcctttgaagcaaaggaggaaactatggctaaatatctggaagaagcaaggctgaatgagaaacatttcttgggaataacggtaaaagccataacaagggaagaaaatggagaagctgatgagctagctaaggcagccgcaacaggtcaaccattggaaaattcatttttcgatataatcacccagccaagttacgaaaagaaagaagtagcatgcatacagagagaaggagattggagagaaccgatcttgaaataccttgtcagtgcacaacttccagaaaaggaagaagaagcaaagagaatacaactaacgtccaaaaaatacaaggtggtagagggacagttgtataaaagtggagttactgctcctttgttaaagtgtgtaacaagggaagatggcatgaagatggtggtagaaatacatgaaggcttgtgtggagctcatcaagcaccacggtcagtggcttcaaaagtcataagacaaggaatctattggccaacaattatgaaagatacagagaaatacatcaagacgtgcaaagcatgtcagaagttcggtccaatgacaaaagcaccacccaaagaactgcaaccaatcccgccagtctggcctttttacagatggggaatagatatagtaggtcctcttccaagagcgaagggagatttgcgctttgtcattgttgcaattgaatacttttcaagatggattgaggcagaagcagtggcaagaataacttctgcagcagtacaaaagtttgtttggaagaacataatatgtcgatttggaatcccaaagcaaatagtatgtgacaatggaaagaaattcgaatctggaaaatttcaagacatgtgtaaaggccttaatttgcaaatcaactttgcctctgtaggccatcctcagacaaatggagctgtggaaagggcaaatggtaaaatcatggaagctatcaagaagaggttagaaggatcagcaaaaggaaaatggccggaggatttgctatcagtgctttggacactaagaactacggtagtaaggtcgactggcatgacccctttcagattggtttatggcgatgaagcaatgactccaagcgaagtaggggcacattctccaagaatgatatttgaccaaaaagatgaagaaggaagagagataactcttgaaatgctagatgaaataagggttgaagctttggagaagatggcatcatacacagaaggaacaaagagctattag

SEQ ID NO: 22130 - DNA, 186 bp, Oryza sativa
  unsure (1)..(186): unsure at all n locations
  Clone ID: PAT_MRT4530_27335C.1
ggcacgagcggccatggtggttatctccggcgcgcagtgagcgagtcggagatcaggttcatgagacagcnactgccaacggcgaggtgcaaaacagcccgttttcagcggggccgataggtaatctcccgccagcgcacggccctatccactttacacagtacctcacgacgccccattgacgct

SEQ ID NO: 22131 - DNA, 180 bp, Oryza sativa
  Clone ID: PAT_MRT4530_27336C.1
atggctcctccaacccgcccctccttctcgtcttctttgccagtgcctaggcttgacaccgcatcttccgacgaggagctcatcgtgaaggccttcttcaagtccgagaaggttcaccctggtcaggtaattgagtattttgatttgcttggtgttacaataatcagtccagattcctga

SEQ ID NO: 22132 - DNA, 341 bp, Oryza sativa
  Clone ID: PAT_MRT4530_27337C.1
ttttggggtttttttgtatgtctggttttttttttttttcttttttttttttttttgacaggagcacagttttttttaaaaaagtccccgattcataaagtgtgggagggtcaggagttttgaccggcggggaaatattggggaaaaattactcaaaagagggttaaaacagagggaaaggcattcctaaaccaaagttggaaaggggaaaagctttctgaaggaacgcgggggggcgcgccatccacggaagtccagaccctaccaagggtgggctattttataaacattttgggttatgagccccaaggcccaggtttgcctgccagttcgaaaagggg

SEQ ID NO: 22133 - DNA, 1858 bp, Oryza sativa
  Clone ID: PAT_MRT4530_27338C.1
gtcccaagattggggaacagtatggtgctccattcaatgaagatgattggaatgaagcgaacggggagctatcctcttttgccttttctgtgcccccttgtgcgctggaatcaagtaatggcaggttaaacacagctggtcagcagctggctgttagtgataatattggatcttctttggaccattgttcagaaactaatgacaagatcgctgttggtggctgtgggacgactagtcctagcgttccttttgataccatacatacccagcagctagatgagattatcagttgtttctcgacagatcttttgaactccgttagtcgagatggttcattgcctgactcaactgctgactatgataatgacaatgaagtatcgtccgatgatggtgaagcaatatttaatgaacttgatgaacttgattcccaatcagatgagagcatttccaaccattgtaactcatgtggtgaagacttgattcctcctacgctggaagtacttaaaactgaacagtacttggagctgaatgacttgtccttttctcttgccgatgatcctgatccatgtaacctgctgctgacaactaatctatctgatcagaaccatccagaattagagaccaggtttgagcaggggtctcttgttgacatctgcaataccactaatgctaccatatccaatgctgcctgttcagcgtcaacagttggtgatcatgagaattcgtggttcatggacatttcgcttaccctagtttgcgaagaagattttgtcaccaataagggatcgggctgcacctctttcgcgttcgctttcccttttccagcttttcttctcctcctcctccgcaaccagatcaaaccctagatcagatctcatccccccaccttcgtcatcccatacgaggaggttattatggattcttcgtcttcatcgtcgtccacccaggcgcagagccagccggattttgattacctctttaagctgctcctcatcggcgactcgggcgtcggcaagagcagtctcctcctccgcttcacctccgactctttcgaggatctctcgcccaccataggtgtcgacttcaaggtcaagatggttaacaccggtggcaaaaaactcaagcttgccatctgggacacagctggacaggagcgatttagaaccttgaccagctcatactacagaggtgcacagggtattattatggtgtacgatgtcactcgacgggaaacattcaccaatctttctgacatatgggctaaggaaattgacctctattctacaaaccaggattgtattaagatgcttgtcggaaacaaagttgacaaggaaagtgagagagctgtgacaaaaaaagagggcattgaatttgccagggaatacgggtgtttatttctagaatgcagtgctaaaaccaaagtgaatgttgaacaatgctttgaggaactcgtcctgaagatattggacacaccaagcctcttggctgatgcttcctcaggtgcgaagaagaacatcttcaagcagaagccgccagaagccgatgctgccgctagcagctgctgttaacatgctggtgatgctaatctgggctctttgttgatgaaatattggttgctgaaagtgataagcttggtttgtgtcgatttgtttttgctttctgtatatttccatgttgaaccgcccaccccaatgatgcatacaaaaaaaacatataatctccattacgtcagcagctatataatgtattaagttcaatttactgaatatctacgaaaggatgtttcctcttttattgttagtgttgttcaatgaaaatatgtttcactttcaccctcaaaaaaaaaaaaaaaaaaaaa

SEQ ID NO: 22134 - DNA, 475 bp, Oryza sativa
  Clone ID: PAT_MRT4530_27339C.1
gtccgaggatgtggatctggaggccattgccgcgcagacgcacggctttgtgggcgctgatatggcccagctatgctccgaggccgcgctgggctgcatccgcgagcagatggacatcatcgacatcgaggaccaggagatcgacgctgagatcctggcgtccatggccgtgcggcaagagcacttcaccacggcgctcaagatggtcaacccgtccgtgctgcgcagcacgaccgtgagcgtacccaacgtcaagtgggaggacattggcggtttggaggacgtgaagaagcagctcattgagatggtgcagtggccgttcgagcaccctgagattttcctcaagtacggccagaagccgtcgcgcggtgtgctcttctttgggccccccggctgcggcaagacgctgctggccaaggccgtcgccagcgagagcacggccaacttcatttccatcaagggccccgagctgctc

SEQ ID NO: 22135 - DNA, 397 bp, Oryza sativa
  Clone ID: PAT_MRT4530_2733C.1
ctatccagttatagttcctggaaactctaagattgagatacaaagccgagtcagaaacttgactgtttatgctatcaaaattcctggcagcgtggcatataatgctatgttgttatattcagagggtcaacaagagaaatgtctagcagtacgacgaagatcagaacacgcccatactctttatgaaatccttcgaaattgctctcacagaaacatcatacagcctatgggagtctgggaagaaatggagacgaacctggcatttattgttttcccttgctctgatggagttgtgacttcaattccaaaagaagctttatttgatgtggaagatgctacaaatgctgaatcttatacatttggtttcagtgaccaaggttgcaggatctttaggtaa

SEQ ID NO: 22136 - DNA, 567 bp, Oryza sativa
  Clone ID: PAT_MRT4530_27340C.1
gtttataggcggctttattattattattattattattattattattattattattattaggagtagactactactactaataataataataaactaccctgagtgcatgccttgcctccacagggatctcggcgggaaagcggctatcggaggccgggataaccgacgtgctgatcctggaggcgacggaccacgtcggcgggcggatgcacaagcagaacttcgccggcatcaacgtggagatcggcgccaactgggtggagggcgtcaatggcgaaaagatgaaccctatctggcccatcgtcaactccacgctcaagcttaggaacttccgctccgactacgattacctctcccaaaacgtctacaaggaggagtacgtacgcgtatacatatatctatatgactatatatggattatttggatcggattgattaaacgcctccacatatatgatatgatcgatgatgtgttgactgattcaaacagctaataatccgtgtgtaataacagacgacggtatagtaatattaaagtacgcagtatttgtttgtacatggacgttc

SEQ ID NO: 22137 - DNA, 213 bp, Oryza sativa
  Clone ID: PAT_MRT4530_27341C.1
atggagcactccatccatgagctccacaatgattcttctggtgcagattccggcttcaaaccttcgatgacaaagttggcggcggaagggaagaagacgcaaggagaagagaaggatgcaggcactacggttcgtcagaggagtcgcttgaggagctacgtcatcggcctcatccagttggcgcttctggcggtctgccacgtttacttctag

SEQ ID NO: 22138 - DNA, 281 bp, Oryza sativa
  Clone ID: PAT_MRT4530_27342C.1
ttgtgttctctgcaacaatgcccagttggattagaaaaatcacaagcaagtacttgaaagatccaatcattattgacctagttggtgatgaggaccagaaattacctgaaggaatctctctttattcaattgcctctgagcactatgggaagccatcaattcttggtccattgatcaaagtgagcactcttctgaatgtatgatgtgttttatagtttgcaccagaagcgactgtcttgtatacacttccacaggagcatgcttatggagggaaatgtatt

SEQ ID NO: 22139 - DNA, 3237 bp, Oryza sativa
  Clone ID: PAT_MRT4530_27343C.1
gcaagaatgtaacaatttctcagataaatgaacagatgtttacacacgaaaacaaaataatcacatgttactgagattttacagtgttggcactctgctgtacatacttctcgttccctcatgcccattagaaaaaaaaataaaaaaggacacaccagggtagattaatacaaaactgcaagcctcaaaaccaaacctgtgtgaccctcgaaccagtactgaacgcttggtaaaatgggagatggtaagagggcacacctatgaatcgaaagaataagccgaaactagcaaaggcaaactcagactaaggaaaaatggaggactcatcccacacaatgtgaaaatagacacattgcacaacgaccatggctgccaagggctattcaggcatatacaagttgacttgtacgatcaaacagtgctttagctggaggttgaatgaggaaattttaagcatgattcaagctaaaaaagttggagagcgatcttcattctattttgcttccactttggaagcttgctgaatgcttcctttgtcattccaaacttgtctttgaattcagccgaagattagtcttgccctctctgtctcaagaagcaatttaggatgtgtttaggagtaaggtttgggaaccattctctccagtgtgacgctagagccatttcacaacgcttggaaaaatgggaaaatgtatgaggttacccctctcgcctggtaacgtcaatttcagtgacaggatcagcagctgtagttatcaggcgatcatatgggtatactgggagcccctcgtcctcttatggttcattttctcttagatcttcattaaatgtgagggagtcaaccctattggtcaaggtaataatgcctacctttcaatcttcctcttgctttggcttctccaactcagatccatcttttactgatttagggcgatcaaaagaaccagtgagagaagcagttgctgatgaggtatacggtgcacttgatgagtcaggtgtggcagattttgggtaaagttttttaactacgggtggaggggtggaaagatttctgctgtttgcactttcaaagttagcagccaatgcagtgaatgccggagatcttcccctaacacggacacgttcagggctgaaagacatactcctcgagcgctgagatttgtcttgtacagtgcttctccctgaatatgttggtgttcgtcgctttggtttatccaaagcaggagaacctccaccctttacaatggaaagcttcctctggtatgaattgccatgcataagtgactttgctgagtcccaagtgaagaaccttgtgaaaaatgtaggctcacttccttccatgataacaaaaattggtgtgtcgctggatagattttccatcaggaaatcaagcttaacgaatttctcaccaatgtccagagcttgtaatcgcactttgacatctacctgctggccaacccaaacaaatatatctgagtgacagtccagaatgaatacatcttctgtcatcagatcatcttgagtgaagtggtatatttctttgatctttaaattgccttcatggaccccaataggtgttgttggcagaatagaagagcagatatatatcagaaaactcgaagagcaatgtgaccatgtcatctgccacgtcctgtgtgttagtcctttctcttccttaattatgtctagctgcctctcaactacctcttgatctaatgacgtagtaaggtttccagtccaagtgaatacagtatttccatcatgtaggatgtacgaataggatgaattcaaagacgatgccgcagcatcaacttgaattgcctgcatgttttctggtcctgaaccttgaattcggaagagcgcaagtccatcttccaaataagtgtcatcatcaataccattttcagcaataaatttcttgtatccagagcttagaccacccttaaacacttggaagctttgaaatatgacgaagaattgaattggttcttttccctcatatagtcgtgtctggacagcctgaaatttcgcagactcaaccatcttgcttgcaagtgaaatagcagttaccctatcctcctcaatgctcttcttcccaaaccaacttccaataagacactcctccttgtcatctccagggtacatatattgaaatatgtagcaatcgccagtgtaaaattttgattggtcagcagatggcagaagtatcttgtccttatcatttatgcgccagacctgcaaactgccagtgcaatcaatgcaagcttggggttcttcttttgcaggagcagctttcatcaggcccttaacatttaagccctggcgtttcagaagagctgcaacttttcctcttccatcctcagatgacaatttcaagtcaggtgtctgtggccactctttaaattttgacttgaacataactgtctcaaacccctcaattactttgattacatgtgtttttgttcggttatcatcagagagcaatttctcagcagcttcactggcactcttcctctcctgcaaagatgtggttctgcccatccaaacaaataattcgacaccacaatcaacagctgcaacttcacacttgccctcgtgaaatgtatctttgatgtactgcacgacttcaagagcctttgcacgctcttgaatagacgaattggagccattgaactggaaaattttggacttcgtgtccagaataaatatgtcatcatgattcagggacgatcgagcaaaaggaacctcaacatgcttgaacccagatgccactcctcctggctgtggcatgatgcatggtctaaaatatgagaggaacttatctgtttcattgccttgtatctctcggtattgaacagcgcgtccaccaagtgcagcatcaagctcaactgttaaaattgctgcagttccagattcatcctgactagtatctttgccaatccagtaatgaatgtcatgtcgaagagaaccatttttcaaggcagttgtcttcaagatgatgtaagaatcacccatgaaaaattttccatatgaagacgcaggaataggaactggcttgaagttctcgatgcgccatatttccaagcctcctgtgatcattgttatctcattaacttctactctgctaatgctaatgtctagcatattgtcaagaagcttgcacctgtcaggatacttcatatgtgtgcacagtagcattgcaaattcatgatcatctccggatacctccacgcgcat

SEQ ID NO: 22140 - DNA, 1062 bp, Oryza sativa
  Clone ID: PAT_MRT4530_27344C.1
gcaagaatgtgaacaattctcagataaatgaacagatgtttacacacgaaaacaaaataatcacatgttactgagattttacagtgttggcactctgctgtacatacttctcgttccctcatgcccattagaaaaaaaaataaaaaaggacacaccagggtagattaatacaaaactgcaagcctcaaaaccaaacctgtgtgaccctcgaaccagtactgaacgcttggtaaaatgggagatggtaagagggcacacctatgaatcgaaagaataagccgaaactagcaaaggcaaactcagactaaggaaaaatggaggactcatcccacacaatgtgaaaatagacacattgcacaacgaccatggctgccaagggctattcaggcatatacaagttgacttgtacgatcaaacagtgctttagctggaggttgaatgaggaaattttaagcatgattcaagctaaaaaagttggagagcgatcttcattctattttgcttccactttggaagcttgctgaatgcttcctttgtcattccaaacttgtctttgaattcagccgaagataagtaggtctctcgcctggtaacgtcaatttcagtgacaggatcagcagctgtagttatcaggcgatcatatgggtatactgggagcccctcgtcatcttctggttcattttcttttacatcttcattaatagtgagagattcaactctactggtcatggtgttaatgccttcttttgcatcttcctcttgctttggcttctccaactcagatccatagaccacagacttacaactagaaatgttataaataggtggttccatgattgtacacacaaaagataaacagaacactgttgtatccaaagcaggagaacctccaccctttacaatggaaagcttcctctggtatgaattgccatgcataagtgactttgctgagtcccaagtgaagaaccttgtgaaaaatgtaggctcacttccttccatgataacaaaaattggtgtgtcgctggatagattttccatcaggaaatcaagcttaacgaattt

SEQ ID NO: 22141 - DNA, 1168 bp, Oryza sativa
  Clone ID: PAT_MRT4530_27345C.1
gtttttattggtgcaacgctccctcctcacgcatcactcgtttcccatcgacgatcgagcgagcgcgcggtgcgagcccgttccgttccttgttccttgcgatgagaggttttaaaagcaagcgtgcgaagtgggtgctctcggaattggactcggctcgtccgcacccctattaaaaccacgcgaggaagttttcttccccgtcgtcacctcccgcttcgcgaaccacccacccgtccgtttctcgcctcgcctcgcctcgccctccctctcttccttcttaacaatggcggtacaggcccagtacccttccagtctcctcttccacgatagaggtgagccggagaggacgaaggagatggacctgcccaggccgcagatgttcgccggagtctcgccggaggtgtactttcccagcggaggagcgagtgggattaatcggaggaataagcgctcgagggaggccattgccatggcgccgccgccggccaaggaggagttggtcaatctgttcacgctccagccgcagcagtctacgtcgtttgtcaacatggcgcagctccacaacagggtatcggcgtcgccgtcccgcgcgccggcggcactcgtgtccactggccttcgcctggcattggatgagcagcagcagcagcagcagcaacaacaagagagcaaacgcctgaaagccttgtgctactcgtcgtcgcccatgccgttcgtctcgttctccgacgagcttgccggacagatgaagcggcaagatgaggagctcgaccgattcatcaaagagcagggcgagcagctcaggcgggcgatggccgatcgggtgcggcgccataacagggcgctgcttgtcgcggcagagcgatccgcggcgcgccggctcagggagaaggcgttggaggcggagcgcgaggcgcggcgcggcgcggaactcgaggagcggctggcgcgcctccgcagcgaggcggcggcgtggcaggcgaaggccctctcggagcaggccgccgccgtgtccctccacgcgcagctccagcaggcccgccgctctagagtatccctcgaggggcccaagctacgcgtacccagcttttctcctcttcttcgttagggcggctacttgttttaaaggcttggcctccttagggctgatggattattctgtcgt

SEQ ID NO: 22142 - DNA, 490 bp, Oryza sativa
  unsure (1)..(490): unsure at all n locations
  Clone ID: PAT_MRT4530_27346C.1
tttccctttcctttctctctcgagccttcctcttcctcttcctcttcctcctctactccacctcccctctcgccgctccagatcgattcccccccccacctcgcccgcgcgaattccccgctccgatctccgccgcctccctcccagcatactattagctctcctgtgaaagagaagaattgagaggtttctttaacatcaaggatgtcggtttctatgaaggatttggatccagcttttcgtggtgctgggcaaaaggaaggcttggaaatatggcgcatcgagaacttcaagccagttcctattcctgcgtcttcatatggaaaatttttcatgggtgattcttacatcatcttgaagacaactgccttgaaaaatggttctcttcgacatgacattcattactggattggcaaagatactagtcaggatgaatctggaactgcagcaattttaacagntgagcttgatgctgcacttggtggacgcg

SEQ ID NO: 22143 - DNA, 1553 bp, Oryza sativa
  Clone ID: PAT_MRT4530_27347C.1
caacccaaacaaatatatctgagtgacagtccagaatgaatacatcttctgtcatcagatcatcctgagtgaagtggtatatttctttgatctttaaattgcctttgggtaggatacatgagaaaagatggggatcactttcatttgcccttcctatcttttgacttggatactcagatttgcctccaagtaagctccaaaattgatctgtttctgacccttctttctgcgatctggactgcgaatttggcttaattatgtctagctgcctctcaactacctcttgatctaatgacgtagtaaggtttccagtccaagtgaatacagtatttccatcatgtaggatgtacgaataggatgaattcaaagacgatgccgcagcatcaacttgaattgcctgcatgttttctggtcctgaaccttgaattcggaagagcgcaagtccatcttccaaataagtgtcatcatcaataccattttcagcaataaatttcttgtatccagagcttagaccacccttaaacacttggaagctttgaaatatgacgaagaattgaattggttcttttccctcatatagtcgtgtctggacagcctgaaatttcgcagactcaaccatcttgcttgcaagtaaaatagcagttaccccggacgcgtggatgtcttcttcccaaaccaacttccaataagacactcctcctgtcatctccagggtacatatattgaaatatgtagcaatcgccagtgtaaaattttgattggtcagcagatggcagaagtatcttgtccttatcatttatgcgccagacctgcaaactgccagtgcaatcaatgtaagcttggggttcttcttttgcaggagcagctttcatcaggcccttaacatttaagccctggcgtttcagaagagctgcaacttttcctcttccatcctcagatgacaatttcaagtcaggtgtctgtggccactctttaaattttgacttgaacataactgtctcaaacccctcaattactttgattacatgtgtttttgttcggttatcatcagagagcaatttctcagcagcttcactggcactcttcctctcctgcaaagatgtggttctgcccatccaaacaaataattcgacaccacaatctaacaagtaacacttatttgtcttgagcaactcgtgcaataaggattcataattgataggctccaactttccttggttaaaacagagcaatttgaaaacagtttcttcatatttctcattatcttcaggggctctccttggtagaggggcaaagccaccaaaaaaaccccaaaattcaccagcttcagcatcggccatcaacctgccatcctcaacagctgcaacttcacacttgccctcgtgaaatgtatctttgatgtactgcacgacttcaagagcctttgcacgctcttgaatagacgaattggagccattgaactggaaaattttggacttcgtgtccagaataaatatgtcatcatgattcagggacgatcgagcaaaaggaacctctttgacatgaacaacaca

SEQ ID NO: 22144 - DNA, 1312 bp, Oryza sativa
  unsure (1)..(1312): unsure at all n locations
  Clone ID: PAT_MRT4530_27348C.1
tgagctcaccgcgtgcggccgccccttttttttttttttttttgttccctacgatccccggcttacataattataagacttaaaagtatctcggttcacatctcatgtcaacaatcatggtcattaacatcaggtacgtactgcacatgcagccttaagaatctagaccatattccatagaatacaaagatgtccgccttaagtccttaacaaccatatcagtgcgactgaaaacacagcgaggaaatggaccagacaaatccaacttcctgatcatctcttcttaaaaccatacttctttcgttcatagaagagatcggtcttggcgcttccaagattgacaatcttgggacatccatctcggtccttttcctgctgagtgcactccttgcagtagtaggcatctgagatgccgacccccccacagatgacacacctcccctggaaggaaccatagttgcactcatcacagactcggacaagcgtacatgggcgcacatacgagtcacagatgacacacttgccatcacatttctcgcacaaacgaccaatagcaatgccaggctgcttcctgcacatgatgagatcaggatgatgctttgccatggctgtcgaatgctaaccgaagagtatgagacgcggcggcgatctgcgcgaaggaaccgacgacgaggtggcggcgttctggtcgcggatccgacgaggacgaggcggcgtggtcgaagccggcggtcggtggccttcaactcctcgccgccactccgatggcgaggcccgattccggcggcggcggagacgaagtcgcagctgcgtatagcgagtagctcgaccgaccgcctctcancagtggcagctcgatcgttgatgtgaccgcgctgtacggctcataactgctgcggtgtggtgctacctccactgatgctcactagcactgcctangccgctctntngttnttacattcttattcgctgtngggtgctcctgcagctatatggggctcttcagttcgatagcgtatgacctacacaacatcgtatggttgtcggcgtatgtaaagagtgtgttgttgatcaaactggagtcccgctcgaccctctcaatcgcgcgcctgtcgatacctccaagcttgtagatcagatggaccgtggtggtcgccttggcagagtcaacgtggccaagtgaccacaatgttgatgtgcgtcttctccttacccatggttgattaagcaggtagctgacttgaaggagaggacgggagatggcgagaggaggaggctgcggcggcggcggctgggatgagatcccggccgg

SEQ ID NO: 22145 - DNA, 1037 bp, Oryza sativa
  Clone ID: PAT_MRT4530_27349C.1
cgggctgcaggaatcggcacgaggggccggcccaccgcactctcgtcgtcgccgacgtgacgtactcccccgatctcatggctgccagcgaacttggcatccgctcttgctcgctagaggatttggatggaatgagcggctccaggaaaacacattcgtcatggacaacttcctgcacagtccagcatagtggttatggtctccaagtgaaatctgacgctccgaaacagctatccaacgctacaataaccaccatggatcgcttttgtttcgagatggctttgaaagagttgctctatgaagaaattgatactgacgatgatggcatggacgacattgacggagctcaggaggaggacgaggtggctctgcagagcgatgattgtagtgttgattacattgctgatggcctccgcgagcttgacatggagaattacgacgacgaggatggagtaattaaggatctctgctctgggtcaagcgacttgtactatccaagtaacgacatggatccttatcttaagaacaagaacaatggcctggtgtcgatacttgaagaaatggaggatggacatccatatctgtacccttatgatgagattgttcttttgggcatcccattatgcgttccatggtcggactgtggtcttatggacggtcagaaagatgaaaagatacaagactggaagccagagactctgtacttaattggtattgattggaacaaggagtatacgaatattctagccagcgctagcgcagacaaaacagtcaaaatttgggatgttgcagctggtaaatgtgtaacaacattagaacatcacgatgcaaaggtgaagctctgggatatatcaagcaaccagccgtctgtcattgcttcgctgaatccgaaagttggtgctattttctcaatatcattttcaaaagacaatcccttcttgttggctgtgggagggcagaagggcaacttgaaagtctggaatacattaaccgaaccattggtggccaataagattggcaagcatggaagttcataa

SEQ ID NO: 22146 - DNA, 345 bp, Oryza sativa
  Clone ID: PAT_MRT4530_2734C.1
atggacctcgctggcgtcagcaaggggcggccggcgccgacacgtgggccccacatccaggggcacaggcgcggcacgaagccggcccggccgagccaaggcgcggcggcggcatgcggccaccggcggcagcagctggcgacgtggaatggcggcgggccggccggcgaaaaggaaaaggaggagggaggcggctcaccgagaggcgcggcgacggaaagaagcgccgcggagggagacgacggcggcgattcggcggtctccaatgaaggtggaggagcggccggggtacgggggagcgcggcgaacgcagtagaggcggtggcgtggcttgttggtggctag

SEQ ID NO: 22147 - DNA, 145 bp, Oryza sativa
  unsure (1)..(145): unsure at all n locations
  Clone ID: PAT_MRT4530_27350C.1
gccacatgtacggcgaccggatgagtcaaccttacggccagacaagcgtttggttggggggatcatgacgctcgcgcanggcaatgcatactctgtacgacaaggcgctcggactcggaactgtcgtgtcggacggccggatgcc

SEQ ID NO: 22148 - DNA, 3540 bp, Oryza sativa
  Clone ID: PAT_MRT4530_27351C.1
atgccgtcgccgtgggccgtgcttctcctggacctgaaatggccagctgacaatgtgatcatgaattttatctatcttggtgttggagcaggacttgtttcagcacttcaagtatcatgctggacaatcactggagagagacaggcagcacggattagggcgttgtatctcaaagcaatactgaggcaggatattgccttttttgacaaggaaatgaacactgggcaactagttgagaggatgtcaggagatgcattcctcattcaagatgccattggagaaaaggctggcaagtgcatccaactgctttctactttctttggaggcttcattattgcgtttgtgagaggatggctgttggcacttgttatgctttcaagcattcctccagttgctgtggctggtgcaattatgtcaaggttgatggtaaaactgaccatccgcatgcaagcaaaatatggtgatgctggaatcgtggtcgaacaaaccattggggccattagaacagttgttgcattcaatggtgagaagaaagctataaacacatataacaagttcataaaaaaggcatatgaatctgctctacaacaaggtgttattaatggccttggattaggttccataatctcagtctttttttccagctatgggttggcggtttggtatggatctagattgatagtcgagcgaggctacaatggtggcattgttattaatgttataatggctataatgatcagtgcaatgtccttaggtcatgcgacatcatcaataacagcccttgcaggaggtcaaggagcagcatatagactgtttaggacaattgaaagacaaccagatattgatgcatgttgtaccacaggtgacatatttgaagatgtcaagggtgatgttgaactcaagaatgtgtactttagttatccttccagacctgaacatttggtatttgatggattctccttgcaagtaccaagtggcacaagaatggccctagttggagaaagtggcagtgggaaatcaactgttatcagtttggtggagagattctatgatccacagtctggggaagtgttaattgatggagttgatattagaagaataaatcttggatcgataagaagaaaaattggtcttgtcagccaagaaccagtgctgttcgcaggtacaatcagggaaaatatcacgtatggaaaggaggacccaactcttgaagaaatcaatagagcaatcgagcttgcaaatgcagcaaagttcattgataagttgccaaatggtcttgaaacgatggttggtgagcgtggaattcaactgtctggaggtcagaagcaaagaatagcaattgctagagtgattataaaaaaccctaggatcttactgcttgatgaagcaactagtgcattggatatggaatctgagagggtagttcaagaagccttgaataaggtaatgttagaaaggacaacaattattgttgcacatcgcctgagcacagtaaagaacgccgatatgatatctgttctacagcacgggaagctggtggagcaaggttcacatgaagaattgatgaagaagcctgaaggttcttactgtaagctgattcatctccaggagactcggcaggaagctgtggcacctaatgatgaccctgatatgataataagaaatgattttgactctaggattataaatagcaaaacaagaagccaaaatatctcatttaggaaatcaaccagtaaaagctcctcttttgggcacagtggtacccatcctttcacatctacttgtgacttatctgatcccatggaggtccacgatgatcagcacataaaggagaccacagacaaaatgtctaattgccaagagaaagcttcgatcctccgccttttctctctgaacaagccggaggcctttgttcttgcacttggttctataactgctgcaatgcatggagtcatttttcctgtattcggcatactggtttcaagtgcaataaagatgttttatgagccacgttcagaattactgaagaactccaggttattgggcagcatgtttccggtgcttggaatttccacatttcttcttattccaacagagtacttcctatttggactagcaggtgggaagcttgtggagcgcatacgatcattgacatttaaaagtgtcatgtaccaggagatcagctggtttgataaacctgaaaactctagtggatcaattggtgcaaggctatctactgatgctttgaacgtgaagcgcctcgttggggacaatttggcactaaatttccagactttgtcgaccataatatcaggttttacaatagcaatggtagcaaactggaagctggcattgattataacagtggtagttcctttggtgggtttccaggcctatgctcaaatgatgttcctgaaaggtttcaacaaaaatgcaaagtcaatgtttgaagatgcaactcaagtagcaactgaggcagttggaggcatcagaaccatcacgtcgttctgtgctgaacagaaggtgatgaacgcctatgagaagaaatgtgcatctccaataattcaaggaataagggacggagttgttggtgccttgggttttggcttctccttccttgtgttctactttgcgtatgctctctgcttttatgtcggagcaaagtttgttcaccaaggaacagcaacattcgctgaagtgtttagggtcttcttcgtgttagttttgggtattaatgaaatctcacgaacaagtgcaataggatcagaaagcagacgtgttaatgaatcggtagtttctgtcttcaaaattcttgatcgtaaatccaagattgattcgagcaatgatgagggtgtggtcattgcaagtgtcaggggtgacattgagttccagaatactgctgcgctggttggggagagtggaagcgggaagtctacggtgatttcactgcttgagaggttctatgaacctgatgctggcaggatcctttttgacggtgtggagcttgagactctcaaagttagctggcttcgtctacagattggccttgtggcgcaggaaccggtattgttcaacgacaccatccgtgcgaacatagcttatgggaagcaaggtgatgcatctgaagaagagatcattgctgctgctgaagcagccaatgcgcaccagttcatctccgggctgcctgatgggtacaacaccattgttggcgaaagagggatccaattgtcaggtgggcagaagcagcgtgtcgccatagcgagagccgttataaaggaccccaaggtgctgctgctggatgaggcaacaagtgctctggattcagaatcagagcgcgtggttcaggaggcgctggaccgggaggtggttggtaggactaccgtggtggtggcgcatcgcctgtcgacaataaaaggagcggatatcatcggtgtcctcgaaaacgggacgatagtggagaaaggcaggcatgaagaactgatgcagataaagggtggaatatattcttcacttgttgagcttagctcaagctcaatgtaa

SEQ ID NO: 22149 - DNA, 343 bp, Oryza sativa
  Clone ID: PAT_MRT4530_27352C.1
atggcgaagtcgtctcccttcagcatacacgcttcgccttacattcttcgcccaagaggcctttggcttcgcgaggtttggtcgaagggcctcatgtcataccgccaacaagcccctcacgggcaagggtgagataggagcttcggccgagaccgtgcaaaccatgtggtatggtatgtggcgccccctttcgaccgatgctcctgccgaaacctacattatacatgcaaataaagcgtgttgttgggctttccctttgtgggcttattactgtacggcttggtagatgggaatttgccgtttcgcctatccttgcaacacgtggcgctttattactggtggg

SEQ ID NO: 22150 - DNA, 1222 bp, Oryza sativa
  Clone ID: PAT_MRT4530_27353C.1
ctatacaagtgttctcacctgcttctgaactctcaagcctgtgtctcgtcgtggatgggcggaggtgtcgaactgcggtggcggcaggaggacgccggagttggcacggcgcccgccgtcaaactgccgccgccggttaccttttcttctcaatccgagcaagacggccggcggggcgagggcgccaggcaggagaggaggatgtcgggaggccggcgaccggcggcagccgcgacgatgtgggagcaggacgtcctcgcgctccccgtcggcaccatccgcatccgcctcgtcctcccgcgcccgccctcccacgccgccggcctccgtcgcctttccacgtgtcgccatggatgacgacggcggcgacttccctctccccgtcggcgccatccgcctccgcctcgtccacccatgccgccagcctccatcgtctctccaagtgcggacatggatgacgacggcggcgacctccctctccctgttggcgccatctgcctccgcctcgtcaacccgtgcttgccctcccacaccgccagcctccatcgtctctccacgtgcggccatggatgacgacggcggcatccttcctctccccgtcggcgccatccgcctccgcctcgtcctcccacgccgccggagcaggagggcctccccaacaccgccgccgttgaggcgcgggcgccagatctgcagcgggcggcgtccagcaggggagcaactgcacggcatcctcgcgctggtcgggtcctggcaggccgtgcggacgagcgtcctgccgcgtgcaggagcgagggtgtggcggtggtgggctgcgatggcttacaggacttcgccgacggttccgcctcacctcgcaggcctcctccccaccagccgaccaacctctgcagagctcgcgtgctctgacctcgtcgaccggggggacttcgatggggcacgccgtgtcgcggatgccgtgcttgccgccgccggccctcggggcgaggttagtgaccgcctcgtgcatcacttcgcccgcacgctcctcgctctacgcggtgaagacaagggaggccatagcggtgatgaaggcgcgtcagagacaagggaggccatggcggcgctcgaccgcgacgtgctcctctgttgcaccgacgaccgcgctcgtcacactgtcctgtcgcgccctggctgctctccgccggccatcgacgtggagaggagaggagagaggaagtga

SEQ ID NO: 22151 - DNA, 273 bp, Oryza sativa
  Clone ID: PAT_MRT4530_27354C.1
atggtgcacacggggcggcggcggtggctcccctccccctccctcgcagatctggccggaggagggaggagggaggccggtgggggcggcggtggctctcctccccctccctcccagatccggccggagggaggcttgggtggtgtttttaacctgactctggcaagagatatcaagcatcttttaggaggttggctttgtgatttaataaagaagataaaaagagatcggaggacgcacaagaaaagctatgaatgggaacggctctgctaa

SEQ ID NO: 22152 - DNA, 558 bp, Oryza sativa
  Clone ID: PAT_MRT4530_27355C.1
catggtgttggccggagttgatgaggtccggacgatggcagcagacacgaaaatggcttggcgacagcgcttcactccgggatgacgtcgacggcttgatcggacaatggctcaccggagaaggcagaatcgaccatggctacggcggcggattcaaatcggcaccggggaagaaaagatgcgttctccgtgttcttgatgccttcggctagggttcttgaggcgttttaaagagtaggttgaggtgagattcttggcgcagcggcttgctccgagatggtcgaggatggctagacgacgacgatgattgaagcggcggcgctccggtgcgtgctccagggcgtcgtcggcgtggttgcgttccggtggctgtgaagcacaaaacgggaggtggtcaaaagagaaatggttcggcactcgactcaatcggcgttggcgaaggtcatcgtcactacgaccggcggcgaggttgaggatgacggagaagctgaggacctctccctcggcttctttagctccagactgatgtgtggagttgggcgactcggtctggaggag

SEQ ID NO: 22153 - DNA, 291 bp, Oryza sativa
  Clone ID: PAT_MRT4530_27356C.1
atggcgagtgtgagcggaagggcgtcgtcggcgtggttgcgttccggtggctgtgaagcacaaaacgggaggtggtcaaaagagaaatggttcggcattgtgtggagagaagggaacgcgaaaaacatagagatgacctcgactcaatcggcgttggcgaaggtcatcgtcactacgaccggcggcgaggttgaggatgacggagaagctgaggacctctccctcggcttctttagctccagactgatgtgtggagttgggcgactcggtctggaggagatggaggcatga

SEQ ID NO: 22154 - DNA, 1859 bp, Oryza sativa
  Clone ID: PAT_MRT4530_27357C.1
gttttcttggtttggggacatcggagtagcgccgatggctagtgtgagcggaaggtgttcatggtgttggccagagttgatgaggtccagacgatggcggcagcacacgaaaatggcttggcgacggcgcttcactccgggatgacgtcgacggcttgatctaccaatccatctggcatgaatgaggtcatacgttgttagcgaggtctcagggatgcttcatgtgcaaagaatcagacaatggctcaccggagaaggcggaatcgaccatggcgacggcggcggattcaaattggcgccggggaagaaaagatgcgttctccgtgttctagatgtcttgggctggggttcttgaggcgttttgaagagtaggtcgaggtgagattcttggcgcagcggcttgctccgagatggtcgaggatggctagacgacgacgatgattgaagcggcggtgctccagtgcgtgctccagggcgccgtcggcgtggtcgcgttccgatggatagagatgacctcgacccaatcggcgttggcgaaggtcgtcgccactacgaccggcggcgaggttgaggatgacggagaggctgaggacctctccctcggcttcttcagctctagagtgatgtgcggagttgggcgactcggtcatacggcagaagggtgatagagctgggccaggcaaaggtagggcgaacacatggttcggttgacctagcctggacttggttctaactgctgaattttgtgggcggccgtgggcaagtgtcgacgggggatacccggcgacttggctcctgtaggctccggcttcgtaggttgtggtggatgtgttggtgataagattcgatgccttaggtcctcccggggggtcccttttataccgcagatcagttggtctccaagtagaactcggagacatcggatccttatctgtaaccctgacagtagcccccgacttctgcttaaatgagctcatgtcatcgatcgcgacttctgatgtcggaattgttgtcgttctcatctggtcgatctcggtgtgaaaaccgtagagacgaagagccatcgacaacaccgcatgaagttcaacggtcatgagtgaatttaaattgaagtctaaaaactgccgcgcgcaatggacccaggattttccaatggcaatctctctcctttccttgggatacgcactgtcggaagtgtacctatttaaagggattttgggaatccatttgaagtctgtttgccaaaaactctcctgcttcctagcgctcttcgtcttctccgcttcccgcaaagaaaaccctagctcatttcctccgtcttgttcttcggtgatcctccggcggcaatggatcttgaaaagtctacctccaccatcgcgtccatgaagaagctgcaagacgacggtgccctccctggtcgggggaccatgcagagggaggcaggaggtatagaacctgaacccatcttgggccgcatggttgtggtcgaagattatatttcttgcggttttattcctccgccttccgagtttcttcttcttgtcttgaacttctatggtctttctttgcttcacttgaacctcaactccatcgcattctttagcatcttttctcatctttgcgaggcctgtcgggtcatccctaacctcccgccgccgccgcctgctccagccgcccacgtcgtccgcccactccgtgcccactccgtgccccgcgctcgcgcccacgtcgccgcccacctcctccacctctcccgtgcgcgcgcgcccgtttagaggccgggattcggtttgaatcccgtctctcctatctctcttttcctccccactcccccacgtcgctggcgcaataggggccat

SEQ ID NO: 22155 - DNA, 297 bp, Oryza sativa
  Clone ID: PAT_MRT4530_27358C.1
ttacagcgccccgtccggccaccggcgcaccactacgaagccgctcgtgaagcctggttggaaaaggccgccatccacgccggagacagcccatgcaccgattccacggacgccccctcccgaaaacccggtgcgccaatccagcgacaagcccaccacgagagaagtaataaacaatccgacggcccgtattccgtggtccacggccacgaccgggcccaccctagtcccccattgatgacctccgccgccaccgccgtagatgcacaggctctccttcctccaggccaccatcat

SEQ ID NO: 22156 - DNA, 606 bp, Oryza sativa
  Clone ID: PAT_MRT4530_27359C.1
atggcgcagaaatacttctggcatattatggttattcaccaacaagcgcacagatataccattgtagcatttcaactgagagtattccaagggtgcaagagcatggaaagtatcaacacaagtcacaaggacttgacaaagttcaatgaaattgcaaataaccaaaatgaatttatatcaagtgaggaacttccaaagtttatcatttttgaaaataaaacatccgatgcaattggaaaaataaacatgcatatggaaagggaaatatgtaatgatacaagttacctcagtggggcgagagacgtctcccccaagcttggctttcactcagagtccttgataaggattgaatccgtgaaagcggaagtaagcttgaagatcatcgtgctgttgctgcatcaggttgttgatgttggtgaactgagcattagtattttgctgctattcttgcgtctgtgctatgtgttcctcgaggttgtatttgatctctcccatttgcatatcaagggtatccattctcctggtgattcacccaagttccaacgagaggaacttgagcgccattcagcgggagatggaggcatactgcttgatccgggggattga

SEQ ID NO: 22157 - DNA, 1287 bp, Oryza sativa
  Clone ID: PAT_MRT4530_2735C.1
gggcagctcagctttgtggggggcgaaaaagaggagctttcccttctccttcttctccttctcctccctcggtgatctgcctcgctggggcatctctaaaagcatccgactccgacgccaccaccaccagttcaccaccgctgaaagaatcagcagcagcagcagagaccacacgaggagatgaagaagtgcccgtcggagctgaacttcgaggcgttcttccacggcgagaggggggaggacgacgccgacgccgccgccgaccagaagcccggcggcggcccgcacccgccgccgttcgccatgttctccgccgccgacctctccagcttcggcttcgcggactcggtgacgagcaccatcactggggtcattcccaatcacatatggccccagtcccagagcctcaacgcacggcatcctgcagtctacacaattgagtcgcaatcatcaatctgtgcagcagcaagtcccacgtcagctaccactctgaacatgaaggagagccaaactctgggaggcacaagtggttcagattctgacagtgagtcgctgttggatatagagggcggtccatgcgaacaaagcacaaacccactggacgttaagagaatgagaaggatggtttccaaccgggagtctgctcgtcgatcaaggaagagaaagcaagctcacttagctgatctcgagacgcaggttgaccagctccggggcgaaaacgcatcgcttttcaagcagttgacagatgccaatcagcaattcacgacggcggtcacggacaacagaatcctcaaatcagacgtggaggccctccgggtcaaggtgaagatggcggaggacatggtggcgcggggggcgctgtcgtgcggcctcggccacctgggcgggctgtcgccggcgctgaacccccggcagggggcgtgccgcgtccccgacgtgctcaccgggctggactacgccggcgacgaccccttcaccgggctgtccccgccggagcaggtgcagatgcccggcggtggcgaggtgggtgacgcctggggctgggacaaccactccaatggcgccatgtccaagtgaaaactacttcttactgctttgtcagctcagctacgtataaaaatgtgatgtcccaagtgaacggacttgagtttttcagagtcctcgtgtcgtgtcaagtgtcgtcctgtaatagaactgactagctatatatagtacacagtatttggtaagagactgaaaaactacgaagtataaatgttgtggaggttagagcttttctctgatttt

SEQ ID NO: 22158 - DNA, 345 bp, Oryza sativa
  unsure (1)..(345): unsure at all n locations
  Clone ID: PAT_MRT4530_27360C.1
ggagatagatggacaactgcgggacggagaggagaatgccgtcgtcgcggcgcacgccaaggtattcttcacttcctccttttcctcggattgatttctttaggggatttcccagggattgtttcttgggatgctggttgttgggatgggatctcgggttggatgatctgaatttcatcaaaaaaaattgatcttggtggttatttctgggttcccctgatctctaggactctaggttggtgggttcagtggggaattgacaaaagcactgtctttcctttttgctatatatgatgacctatggcttattggggaccctttgaatgggtgttctgggttcaaatn

SEQ ID NO: 22159 - DNA, 1303 bp, Oryza sativa
  Clone ID: PAT_MRT4530_27361C.1
tccccgggctgcaggctccccgcacacccgcgacaagctcgccccggctggccccggccggcggcgagcggcggcgacctggtgctctgcttgggttgagttcttgattttgccgaggtgtatcgatggagacgacggcggcgaagaagctgccgccggggttcaggttcaggcccaccgacgaggagcttgtggtgcactacctccgccgccgcgcgctcggctcccctctcccgcccgccgtcgacatccccgatgtccgcctcctcgcgcatgacccctccgacctgcttcctccagggtggagtgagcaggagaggtacttcttcacgtgcaaggaggccaagtatgtcaaggggcgccgcgccaaccgcgccacgggcgccgggtactggaaggcgacggggaaggagaagccggtggcggtgtccgtggcggcggcgccgaggagccaggccgccgccgtcgtcgtcggcatgaagcgctccctcgtgttctaccgcgggaagccgccgaccggcaagaagacggactgggtcatgcacgagtaccgcctcgccggcgccggcctcgccccgtgccgccgcgccgccaccgccgaccacccggcgcgccccgccgagggctgggtgctctgccgcgtgttccggaagaaaggctccgcggccgcgtcgacagccagccccaccgccgacgccgacgacgacgacgccaccacggagcgcgccgacgacgccgcggcgggcgtccggttcatcgacttcttcgcccgcgccgacgcgcggcggcgccgcgcggcgtcgccggtgtcgtcgagctgcgtgacggatgcgtcggcggagcattgcagggagcaggagacgacgagccggaacggcggcgccgccgccggcgacgcctccgactaagctaggcaaggcaaggcaagccttgcaagtttgtagcaagaaagaggcagggttaagctttgtttgtaagtttgcttaacgaaatcgcccccccaaaaaaaaaaatgcaggaggacaagacagagagtagctcaagagtgttcagtgtagctcaagatctgttaaaactaatgtatctgatttttaatctgctgttttttgttttcggttttatgtcacagtgccacacgcacccggtgctcgtcccaaattcggtgagctcaatcgcaaattcgcattaaattggattagttttttttttttttttacaaaattcagtttgacttaagttggtcccaagcaaatgtgtaaattgtgatttgtgggagattcagtttgacacgtcctaggttctt

SEQ ID NO: 22160 - DNA, 343 bp, Oryza sativa
  Clone ID: PAT_MRT4530_27362C.1
cccacgcgtccgcacacgcgcgaccgtagccctgaacgcctacgaggtgaccgccgtcaccgcacagcaggtggttgagacgcgcagtaaatgcccacaagcgaaggacgaccaggtccgcgccaggctactgggcggaggatccgagcttcggaacggaggacaaggccgtggacatggctcaacaaactactgacactaatatgcacacagcgcgaggcatgggacactaggcccgtgctatggcgggtcataccaaggtcacagagaaggacgcaggcgcagcgcatggcgcagaataccagcgacactatcgctgaggcatggcacggagcatgtgaag

SEQ ID NO: 22161 - DNA, 3501 bp, Oryza sativa
  Clone ID: PAT_MRT4530_27363C.1
cccacgcgtccgcccacgcgtccggtctcgttctcgtctccaatcactctcctcctcatcttcgtcacggtctcctcgcttcgctagctcgcttgcttgctggctgagctgtggtacgctcgccatggcgtcctcgacgggggggttggaccacgggttcacgttcacgccgcctgcgccgacgacctcgcggcgcccggcgcgggcgcggaccagtactccgccgcgacgagcccgaagccaagcgctggaaggaggatgctgacaacgagggcagctccggcggcatgggcggcggcgccggcggcaagccggtgcgcgagccgaggcttgtggtgcagacgctgagcgacatcgacatcctcgacgacggcttccggtggaggaagtacggccagaaggtcgtcaagggcaaccccaacccccacggctactacaagtcgtgggcggtgggctgcccggtgcggaagcacgtggagcgggcgtcgcacgacacgcgcgccgtgatcaccacctacgagggcaagcggacgcgtgggcggacggacgaccgcgacgccggatcggccgccgcctccccgcctcatcgccggctccctcctcggcgacgatcccgacgctggatctgccgcctcctcctctcctcgctggctcccccgggcgcgcggatccaccgtcggctcccctcctcgccggggaggggaggagaggggaggggaggcggcgacgaggaggaaaggcaacagctcctgtcctgacgacgacgatgactgccgcaacgacgagggcgactgccgcaacgacgacgactcccgcgacgatgatgtgggggcggcgacggatgcaggaggagacgcggcggctcttctctcgatgtggatgatgactgccacgacgaaggcgcccatgactatcgaagcagcggtggacggatgagaaatgatgtcgtctaccggaaggagaggccagcgaacagtaactctactgcttgcgaatatagtgtgcacctacgtaaatcatctattttcgcaggcccttgcttgcagggaagatgaatggatcatcgagaagcttgcggtcatcgctgctagacgctcatcatttgtgtctgaagaatccttgtgctctgttccccctgcgggtttggtctctgtggccagtccccatttgccgcccagcaggggccctacaccctcgagatgctccccaaccccgccggcctctacggcggctacggcgccggcgccggcggcgccgcgttcccgcgcaccaaggacgagcggcgggacgacctgttcgtcgagtcgctcctctgctagtcgagccgagccgagccgagctgagctgagctgggccccacatccccctgctcgccacgtggcgtattttcgcctcgccgtatacgtacggccgtatagcgtacgtatacacgctcgcacgccctgcccaacacggcaatacacacatacatactctcgtacacacgtagtagcatacatatacagtatagtaggtggtagtggtagctagctagggagtgagatccaatttgttgattcgttgcaggccactgccacgtgggccacaccggaaacagtacacgcgtatacaccacacttgggatacgcgtacgtacgcacatgtacacgtagttttgtgcctttgtaactgctgagagacaggtcaaataagactgatgaatttttcatttcttaaaaaaaaaaaaaaaaaaaatactagtagtattcttatctatattttatgtttttacaatatgtcccgtactgagaataaggagataaagagagagcgaattttttttccaaaaaaaaaaaaaagtcgctaccgatttctgtcaagactgaagctactagcattcaaaccgcacaagatgaagcagcagccaaccaactgatgcagccgcagttcaacggcggcaagcggagccgcgctgcacctgacaacggcggcgacggcgagggccagccggcggagggcgacgcgaaggctgactcctcctccggcgcggccgcggtcgccgtcgtcgccgccgccgcggcggcggtggcggaggacgggtacagctggaggaagtacgggcagaagcaggtgaagcacagcgagtacccgaggagctactacaagtgcacgcacgccagctgcgcggtgaagaagaaggtggagcgctcgcacgagggccacgtcacggagatcatctacaagggcacccacaaccaccccaagccggcggcgagccgccgcccccccgtccatcctccgccgccgtcgccggcgacgacgacgacgacgccgctgccgccaggcgacgcgcaggccgaccacgcgcccgacggcggcggcggcagtaccccagttggcgccggacaggcgggcgcggagtggcacaacggcggcgtggttggcggcgaggggctggtggacgcgacgtcgtctccctccgtccccggcgagctctgcgagtcgacggcgtcgatgcaggtccatgaaggcgcggcggcggcgcagctgggggaatcccccgagggcgtcgacgtcacgtctgcggtgtccgacgaggtggacagggatgacaaggcgacgcacgtgttgcccctggccgccgccgccgccgacggcgagagcgacgagctggagcgaaagagaaggaagctggactcctgcgccaccatggacatgagcacggcgtcgagggcggtgcgcgagccgcgggtggtgatccagacgacgagcgaggtggacatcctcgacgacggctaccgctggcgcaagtacgggcagaaggtcgtcaaggggaaccccaacccaaggagctactacaagtgcacgcacccggggtgcctggtgcggaagcacgtggagcgcgcgtcgcacgacctcaagtcggtgatcaccacgtacgaggggaagcacaaccacgaggtccccgcggcgaggaacagcggccacccggcgggctcggcttcgcccggcggcggcgcggggtcgtcgtcgcagccccacggcgtcggcgtcggcgggcgcaggccggaggtgccgtcggtgcaggagagcctgatgaggctcggcggcggctgcggcgcggcgccgttcccgccccacttcggcctgcacctgccgccgccgccgccgagggacccgctcgcgccgatgagcaacttcccctactcgctcggccacgcgccgtcgccggcgctgcggggcctgccgccgcccccgcccccgccgccgtcggcgtcggcgctggcggtggcggggctcggcggcgtggtggaggggctcaagtacccgatgctggcgccgccgtcggtgcactcgctgctgaggcaccgccagggcggcggcatggaggcggtggtggtccccaaggcggaggtgaagcaggaggcgatgcggcccgccgccgccgtcgccggcgcggggcgcggcgcggcggtgtatcagcaggcgatgagcagggtgtcgctggggaatcaactgtag

SEQ ID NO: 22162 - DNA, 113 bp, Oryza sativa
  Clone ID: PAT_MRT4530_27364C.1
ggctgcaggtggtgtgctgtagcctgagcaggcatgtttcagctctaggccatttgttgaaactaacctggcagtatagaaactatagctagatcattgttttttcatgcaaa

SEQ ID NO: 22163 - DNA, 853 bp, Oryza sativa
  Clone ID: PAT_MRT4530_27365C.1
atcgcaggagctactacaagtgcacgacggtgggctgcccggtgcggaagcacgtggagcgggcgtcgcacgacacgcgcgccgtgatcaccacctacgagggcaagcacaaccacgacgtcccggtcggccgcggcggcggcggcggacgcgccccggcgccggcgccgccgacgtcgggggcgatccggccgtcggccgtcgccgccgcccagcaggggccctacaccctcgagatgctccccaaccccgccggcctctacggcggctacggcgccggcgccggcggcgccgcgttcccgcgcaccaaggacgagcggcgggacgacctgttcgtcgagtcgctcctctgctagtcgagccgagccgagccgagctgagctgggccccacatccccctgctcgccacgtggcgtattttcgcctcgccgtatacgtacggccgtatagcgtacgtatacacgctcgcacgccctgcccaacacggcaatacacacatacatactctcgtacacacgtagtagcatacatatacagtatagtaggtggtagtggtagctagctagggagtgagatccaatttgttgattcgttgcaggccactgccacgtgggccacaccggaaacagtacacgcgtatacaccacacttgggatacgcgtacgtacgcacatgtacacgtagttttgtgcctttgtaactgctgagagacaggtcaaataagactgatgaatttttcatttcttaaaattccactcgtgtgaattactagtagtataaatatctatacatgatgtttttacaatctgtaccgaactgagaaagaggaaaaaaaagagagagattttttttt

SEQ ID NO: 22164 - DNA, 1124 bp, Oryza sativa
  Clone ID: PAT_MRT4530_27366C.1
gcacgaggctcgttctcgtctccgatcactctcctcctcgtcttcgtcacggtctcctcgcttcgctagctcgcttgcttgctggctgagctgtggtacgctcgccatggcgtcctcgacgggggggttggaccacgggttcacgttcacgccgccgccgttcatcacgtcgttcaccgagctgctgtcggggggcggtggggacctgctcggcgccggcggtgaggagcgctcgccgagggggttctccagaggcggagcgagggtgggcggcggggtgcccaagttcaagtccgcgcagccgccgagcctgccgctctcgccgccgccggtgtcgccgtcgtcctacttcgccatcccgccggggctcagccccaccgagctgctcgactcccccgtcctcctcagctcctcccatatcttggcgtccccgaccaccggtgcaatcccggctcagaggtacgactggaaggccagcgccgatctcatcgcttctcagcaagatgacagccgcggcgacttctccttccacaccaactccgacgccatggccgcgcaaccggcctctttcccttccttcaaggagcaagagcagcaagtggtcgagtcgagcaagaacggcggcgccgccgcgtcgagcaacaagagcggcggcggcgggaacaacaagctggaggacgggtacaactggaggaagtacgggcagaagcaggtgaaggggagcgagaacccgaggagctactacaagtgcacctacaacggctgctccatgaagaagaaggtggagcgctcgctcgccgacggccgcatcacccagatcgtctacaagggcgcacacaaccaccccaagccgctctccacccgccgcaacgcctcctcctgcgccaccgccgccgcctgcgccgacgacctcgcggcgcccggcgcgggcgcggaccagtactccgccgcgacgcccgagaactcctccgtcacgttcggcgacgacgaggccgacaacgcatcgcaccgcagcgagggcgacgagcccgaagccaagcgctggaaggaggacgctgacaacgagggcagctccggcggcatgggcggcggcgccggcggcaagccggtgcgcgagccgaggc

SEQ ID NO: 22165 - DNA, 553 bp, Oryza sativa
  Clone ID: PAT_MRT4530_27367C.1
ttttttttttttttttttttaacaagttgagggtcctctgtggttcttattccaaggaaaaaaccatcactaggttaaagtgtttatgtaggccttctttagcaaggccgaatacaccggtccatcccccggatatgggctttacatactagacaaaaggccgtgcctgaaaatttaattcctgtagccgaacagcatgtttaattctcaacgctattttctctgcagtctgcactgcatagcgtgcgtactgatctttggggctctgctgatgcagtgtcaaattgcctttgaaagaaacccatatggtacacgattttgcgcacattattctcataataagatagtaaactttgattcagtgatgaccacgccggcattttttcttccttcattgcagttcgcctaccggagcttcgttgagccacaagaagtggatgaaatcgtacagcttagcactcacgctaaccttgtacggggttggattcagcctcctcatgtggtctgggctcatacgggccagatagcccatgcgaccgaatccttatttcgt

SEQ ID NO: 22166 - DNA, 390 bp, Oryza sativa
  Clone ID: PAT_MRT4530_27368C.1
atgggtgacaacagcatcacaaaggaggatggggagaagaagtggaaggatgtggtggagatgagtcgtcggcaggcggctccgctccgccgcctactgccgggttcgcctccaccacccgtcgcccgggcgaggtccgcctccgtcgcctgctgccgggttcacctccaccacccgccgcccgggcgaggtctgcctccgccgctggctgttgggttcatctccgtcacccgccgcccagatgaggtccgcctccgccaccggctgcccggtacgcctccgccacccaccacccaggcgaggtccgcctccaccgccggctgcctgccgcctccgctgacatacgcaagagagagcaggggggaatcacaggattgggttgagggatag

SEQ ID NO: 22167 - DNA, 109 bp, Oryza sativa
  Clone ID: PAT_MRT4530_27369C.1
tttgtgcaggatgcagacggagaaggagtctgcctggcgcctgccggcgagaagccgccgagcttctgtgacagtgctccagagagctttccacgccctgcccggcgtt

SEQ ID NO: 22168 - DNA, 573 bp, Oryza sativa
  Clone ID: PAT_MRT4530_2736C.1
atgtctcccttctactgctgcctcgccgccgtcctgtcgctggcgtcggcgtcgccggccgcggcgtccatctcggtgtccgccgccgcggagcctccggccaacagtttgttgccggcggagcagttcctgcgggctcacaacgaggcccgcgcggcggtgggcgtgccgccgctggcgtggaacgcgacgatcgcgctggacgcgcagcggtacgccggcgagctccgggcgagctgcgaggcgcggccggtgtgggcgtggggcaccgacggcttgtacgggcggaacctgtacagggggagcggcccgcgggtgcgcgcgggcgcggacgcgtcggcgcactgggcggagggcgcgcggtggtacgaccgcgacggcgactcgtgcgcggcgccgccggggcggtgctgcggcgagtacacgcagatggtgtggcgcgccacgacgcagatcgggtgcgcgcgctggttgtgccgctgcctgggcgacacgtgccctctcgtgttggacaccgtcgccgtctgcgagtactacccgccgggcaacatcgccggccagcgcccttactaa

SEQ ID NO: 22169 - DNA, 391 bp, Oryza sativa
  Clone ID: PAT_MRT4530_27370C.1
gctccggcgagctccccgccttgtgctcctccctccctcactcgactccctacatccccagcccctcctctattcctactgccaacgtcatcaaggatcagcgggcatggctgtccggcaatgtgatgccattgctggtgcctcactccatcatcgatgtcatcgttgtcctctgagcacagagcgtcgtcctcctctcggatcttctccactctcccccgacgtcgacggctgcgtcagacccagccttagggcttcccctgcctcattgttcgctgcccgatgcaggagcgggacgctcgaggtcctcttcacgtcgtcctggccttggcttgatggtttggcattggtggtgatggcatcaccagctcatgcgcaggaagaaggttga

SEQ ID NO: 22170 - DNA, 1313 bp, Oryza sativa
  Clone ID: PAT_MRT4530_27371C.1
gcggccttctcgctttcgatttctctctctcgcggacagcgtgaattcgagggatttcttggctggtttggttgtggattggattggattgggtttctgtgtgtggaggtgtgtgtgattagaagcttttgcgactggaggaggaggagagatgggggcgggggtgtcgggcctgttcggattgggcggcgacgagggggagacgtcggcggcggttggtggtgccgcggcggcgggtctgggcgacctgccggagctgtgcgcggcggaggtgctgctccggctcgacgcgccggagatctgccggctcgcgcggctcaaccacgcgttccgcggcgcggccggcggcggatttcgtgtgggaggccaagctgccggagaactaccggtatctgatgagcttcgtggagggcggcggcggcggcgacgacgggaggcagctgcggcggcggcggtggcggccggctgggaagaaggagatctacgcgaggctggctaggcctgtgcccttcgatggcggctcaaaggagttctggctggagaagagcaaaggcagggtttgcatggcgctatcctccaaatctctggtgataactgggattgatgataggagatactggcaacacattccaactgccgaatcgagattttattctgtggcataccttcagcaaatctggtggtttgaagtggttggagagatcgatttcagcttccctgttggaacctacagcttatacttcaggattcatctcgggaagttctacaagcgatttggacgccgagtttgcagcactgagcatgtccatggttgggacaagaagcctgttcgcttccagctctccacctctgatgggcagcactcattatctcagtgctccctgggtgagcccgggagttgggtactttaccatgcaggcgattttgtggtctcaaagcctgaccaaacaatcaagctgaagttctcgatggcgcagatcgattgcacacacacaaaaggtggtctttgtgtcgactcggcgttcatatacccaaagggctttcagcaggagaggatggtcaggtctcagaaatgtagatgttgagaaggaacttacattagattgtagactaaatgcagcttgcagcctaattctatttttaatctgggctcatgtatgcgcggcgaaaggtgtatataattgtaggcttcaattttgtgtgatcggtaacatgaatgtgctttgtgtgtccattttcccatggtttttccccctccctggagctaaatgggtcttcaagttacccatgaaagattctaccaaattgagatc

SEQ ID NO: 22171 - DNA, 233 bp, Oryza sativa
  Clone ID: PAT_MRT4530_27372C.1
aataatctctttgttctagagggatcattagagagggcacacaggaacagatccaaaatgcgatctgcctactactgccccgggcaacaatgggagataaagtgcatgacctgacaatcaactaattctcaaagctgtagcgagaagcctagacccatcaggtgagggttgactcaataccgacatcggtaattgaccctacgttgtgggagaaagccctcccctggcggttg

SEQ ID NO: 22172 - DNA, 359 bp, Oryza sativa
  Clone ID: PAT_MRT4530_27373C.1
gctgtttgtccaaagcttgcaatctgccgtgcggtttcaggatagaggacacattgcccttgagtctgcacatgcatcattccacttcgtatgtccggcacttgcttgaatgatgtctagacctgctctttggagacgtcaacccatccttacagccaagacggaggtcctcgactaactcatgcatcattccatgtagtccgtctgtccttatcactcatccacaaaagacgggtaagctggccgtctgctaactttgcttgaggcatttagaaccttcattgattactggaggggagatgagcttttacagttgactggaattcctgttgttcatcagaatggttcgccatgcgtag

SEQ ID NO: 22173 - DNA, 772 bp, Oryza sativa
  Clone ID: PAT_MRT4530_27374C.1
tcccgggtcgacccacgcgtccgcgcgccgccgtgcggaggtcgtcggaagcggaagcggagcgcgctcctccggtcaccttggttggcaccctcgcacaccaactactcgattgaatgcccctgataaagtaagctcttccagagagagagagatatgtcccagtctagcaggcgaacgagtgtctgtgacaggatcagtgctctgcctgacgaacttttgcaccatgtcatgacattcctaacagcgaaggaggctgtgcagacttgtgtgctatctcggaggtggcagaacgtctgggcatctgtgggatacctcaatgttgactcgtgcaacttcattacagtgaaacattttaagaagtttgttgacaatttgctcctgcagcgcagctgtgccctgttggatatgttctgtatccatacctcctatgacagctctgatgattcccttgattattctgacatccatccatgggtctgccatgcccttaggtgcaacgttaaaactctcggcatactcaattattgtgatggcaagctcctttctgtagatggatatcctgtccccttcactttcttgcacttgaagagtgtatacctttgcaaattttctattgataaccgttttgtcgagaaactcttttctggttgcccggagctactgcatctggagttgagacattgtgccatcaaggccaccatgttttgctctgctacattgaagattctgaccattacagctgcagatagaactcaagatgacccagaag

SEQ ID NO: 22174 - DNA, 456 bp, Oryza sativa
  Clone ID: PAT_MRT4530_27375C.1
atggcgacgaattccgaagtcgaagccagcggcaataaccctaagcttcggctagaacggctccgccgacggcgagcgcaacggcaaaccaacctcgccaccctcgcggcgacgacaacgccactgccgccattgttgagcaggccgtgtaccatgcgcaacaccagtagcacgtcgagcagcttggcaacgcagtgggacagcagggacgtgaacctgttggggcgcaacgacgcagacgtgttcgccgctgccgccgccgccccgagccacggctccgaggaccacatgcgcacttgtttcaacaatgagctccttgaggcgtgccccgcctcggcctcgccggtaaacatgccgagccacacgcagtcgcgccgctctcggccggagtctcctcgatgcccaggacacaaccgcgtccatcactgcgctggcgctgatgcccacacgctgtag

SEQ ID NO: 22175 - DNA, 568 bp, Oryza sativa
  Clone ID: PAT_MRT4530_27376C.1
gatgtgcttcagatactagccatgcatctagatccaatattacctcttcctcgaccgaggatgctatcagttctttatcatgtgctaagtaccgttcctgcttatcatccttctgttggacctatgctgaatgagttatgtctgggtctaaaaagcaatgatttggcacaggctcttgttggggtatatgcaaaagaagtgcatgttaggcttgcctgcttaactgctataaagtgcattcctagccactctgtacaacgggatttacaggtatcaacaagcctctggattgctgcccatgatccggaaaaggtggttgctgaattagcagaggagttatgggatcgctttggttttgatgtttttactgactattccggtatctttgatgcgctttcccataaaaattacaatgttcgagctgctgcagctgaagctctggctgctgcactggatgaaaatcttgacaaaatgcaagattttcatccaggaggaggagatgttccccggcctgatccaccaccaccgcctcctcgacgccgatgtcggcggcggcggcggggggagc

SEQ ID NO: 22176 - DNA, 477 bp, Oryza sativa
  Clone ID: PAT_MRT4530_27377C.1
atgcgctgctcttgcatggtctgtctcctcctcttcttcctcctccacctctccgtctgccacgccaccagccgcaaccaccgccgcctcttcgccgccgctccggccgcttcgccgtcgacggcggcgctgtacggcgacgacgacattaccgccgccatgcacgtgtggaggtctccccggaggtacatgcgggcggcggcggaggagcagcggggatcgccggcgccggcgccgctgccggacggcgccctggggctgcagcccggcggcgtcgagggcgcggcggcggcggcgaggacgacggaggaagaggccgccggagccggagccgcgatggcgccgttcccggcggccgcggacgtcggcgggaaagatgatggcgattccggcggcggcggcggcagcgatggcgcggcggacgacgccggcgtcgactacgcgccgcccaagacgcatcctccgtctcacaactga

SEQ ID NO: 22177 - DNA, 379 bp, Oryza sativa
  Clone ID: PAT_MRT4530_27378C.1
gccacgcgtacgcccacgcgtacggcaagtcgttcgcccacgcgttcggggcatcgaggtagcaatagagaataagaatgctgaacagcagaatatacgaggctcagagaatggtaccaaaggtccatctaatttcctcgttaagaaggcggaggctgaaactgcaaaggagagagatttgaatcaggcggacactgaggatgcgaaaaaggttgatgcgcaagatgcagttgcaattgaacaaaagaataccaaggacacccgaaagtgaagatgtcaacagggctgaagctcacgccaacgcaagaaaagcctctgtcaagggtccatccgagaaggagataaagattagaacaccatttcggtgaaaccggaattg

SEQ ID NO: 22178 - DNA, 1717 bp, Oryza sativa
  Clone ID: PAT_MRT4530_27379C.1
tttttttttttttttttttgcatcgaagacatttctcagtataatgtcatacaagaagttcctcactgttgttaaataaattgtaaaaggagcacctatacctgcaggtttccgttcagaacttacaaacttaacacctcattgttctatctcaataaacaagctcgcctgcggatgcaaacctgcttcctccagcgtttgggagagtttttctggaccgtatgtcaccctcgggaagttcgaaactaggctgtacttctctgctttcaagcagtccaaagaatcaacatagtcatacagtgaagtgatggtagtggaactgttgaatctcctttctttgcgctctccagttggaaatcttataagaactcgagtaacatctggtcctttctcaggttctgctccaagagccatggccttctcttgtctcctccttgcaagagcggcttctttctcagctgcttcttgggcagccctttcttgagcctcctcttcttctttgcgctttctctcagcctctgcagcctctctttcacgcttttcctgctcctctctccgttggcgttccctggcctgatcagcttcaagtgcagctctataagcagcatcttgttcctcacgcaagcgttgattgtttagcctctcttcagcatcaatcctagcagcaacgagtgatgcactgcattcttcaactgccccttgaagagttgttatcatctcttcaggtgatttgggcccctcaatctgccgcaacaacacaattctctggttcgtagacgccatgaccaccgcgcagaaagggaacctcgatgcattcaggctgttgctcatcttgaacccttcagtcctcctgatgctaccaccccacgcaacgaagttctcatctatgaaggccgcgactggctcagcgcagaggcagccaccgcagaaggcaggggtgtccgggtgatcaggggagtgcaggtacacgaagagaagcttgtactcgcgctgcgcacgctgcaacgcatccgcgaagccctcggcgacgaagtgggggccacggccggcgccgaactcgcgctcgaactccgccacgaagtcagccgcctcggccgccgacgggggcagctcgagaagccggtcgcctcctccgcccccgccctgcgcgaggccgaggatggagagggagcgagacagcacacctccggcgacccaggcaccgagacggatcgaaccggcgatgagcccaaccccaccggagaccacgtagaaggggagcgtcacgagcttccacgcgatccccggctgctgctgctgctgctgctgctgcggaggcggaggcaggtgcggcgcgaccaaatccgcctccctcggtgccagcgggggcaggggcgcggagggggccgggtcgggggaggaggggttggcggtgatggaggagacggcgagctggaggtcccagttgtgggcggcgaggatctcggtgcagaggtcgtggtcggagatgccggtgaccgcctggaagtagctgaccttgtcgtcgacggtctccgccatggcggcgggcggcggcgaggccgagggcggagctagggtttggggatttggcgtcggcggcggcggcggcggcggtagtagttagcacgaaggaagaggcgagaaggggcggagttaatcgtggggcgcgaccgaggtgggaggaagacgagtcagtagtggtgacgtctgatcttcc

SEQ ID NO: 22179 - DNA, 1661 bp, Oryza sativa
  Clone ID: PAT_MRT4530_2737C.1
ccccccccgtgggcacgcggtcagcgctcgctcacgcgacacgcaccaacccctctccccgccgccgccgccgccaccaaacgccgcctccgaagaagaagaagaagcctccctcgcaggcagcagggtatttaatacgccgccctgctcgtctcggttcctgggaacttctcttctcctccgatttggcctgtcagtgcgctccgctccgctcgcgcctatccgcggattatcatgggatcgacggcgctcggtggcggggctcctgctcgcctcggcttggcccccaaggatggagtctttggatctaatctgaagcaatgcggtggtttcatgctcaaaacaacccctaaggttggatcctcttcagtccgtgtgagggcatctgttgcttcttcaccgcagaaacagcactctcccaagacatcaggagttaaatcaggggaggagattgtcaggcttctagcaaaccatcctcaatttcgtatcaaagtgatgactgcagatagaaaagctggcgaacagtttggatctgtatttcctcacttaataacacaggacctgccaaatttagttgcagtaaaagatgcagatttttcaaatgtggatgcagttttttgttgcttgccacatggtacaacccaggaaattattaaaggtttaccgcaggaactgaagattgttgatctctctgcagattttcgattgcgtgatatcaatgagtacgctgagtggtatggccattctcatagggcaccagaacttcagcaagaagctgtgtatggcttgactgaagttcttcgcaatgaaataaggaatgcacggcttgttgcaaatccgggatgttatcccacatctattcaacttcctcttgttcctctaataaaggcaaaactgatcaaagtgagcaacattatcattgatgcaaaatctggggttagtggggcaggacgtggagctaaggaagccaatctctacaccgagatagctgaaggcattcatgcttatggaataaaaggccaccggcatgttcctgagattgaacaaggactttcagaggctgctgagtctaaagtcactatcagctttactccaaatctgatttgtatgaaacgtgggatgcaatctactatgttcgttgaaatggcacctggagtgactgccaatgatttgtatcagcatctcaagtctacatatgagggtgaagaatttgtgaaactgttaaatggtagcagcgttcctcacacacgccatgttgtgggatcaaattactgcttcatgaatgtctttgaggacagaattcctggacgtgccatcatcatatctgttatagataatcttgtgaagggagcatcaggtcaggctgttcagaaccttaatctgatgatgggtctgccagagaacactgggctgcaatatcaacccctatttccttgatcctctatgtctgtgttccgtatgttctttgtcgggatgatactttggagttcagctacccatttccctctgtttactgttgagacaaggtgctcaacatcagaatgtaaccaagacaaattttctcaaagagtagcttggtttgtgctgttgtagtttttatagagataaatgacaatttagtagtttaatgagaatattagctcggtggatttgggcattga

SEQ ID NO: 22180 - DNA, 654 bp, Oryza sativa
  Clone ID: PAT_MRT4530_27380C.1
agtgaagggaagggaaggcgaaaaaaaaaaagataagagggggggaagaaggaaaaaaaaagaggggaaggaaaaaagtaaaaaaacgacagagagaaaggaaggaaaacacaaaaaaagaggaggaaaggaaagaaaagggaggggaaaaaaaaaaaaaacgacagtggcagaaaacaaaaaaatgggacgggaaaaaacaaagaaaaaaaaataaaaacggcacaaaagagatcaagcaaagcgaaagaaaagaacaacggcgaaaaaaaaaaaagaaaagaaaacgcctacggagcgcgaaagaaaaaacaaaaaaagggagtgagaagaaaggaagaagcaaaaggagggagggaaagacacaaaaaaaaagagaaggaacgcagcgaacaggcggaggaaagaggggaagaaaaaaaagcggaagaaaagcagcaaaagcgaccggaaaacgcaagtagcacaaaagaaaaaaaagcggaaaacacgaacataggcggaccacgaaacgaaagcgccatacggagaagaaagggaaaaccaacgacaaaaacaaaacgatgggacgaacaaaaaacgcagacgctgggatgacacgagataagaatccaatttcatcggatacctctaacgcggaatcatacagtcata

SEQ ID NO: 22181 - DNA, 258 bp, Oryza sativa
  Clone ID: PAT_MRT4530_27381C.1
atgtccaggcgcagggaagcaagacgaggagcactgataaccaaaccaccacagatccctccacctctcggacagcacgcacgtctgcaccgcctgccgggtggagagggaggacaagatggcgtggaggaggccatccggcagagcgctcagccgatcgccggcggatccggctccgacgaggctaggtttacttacatgactccgccggcctcagcaccgccgctccagaccagccgcaccgccgccgtcgattag

SEQ ID NO: 22182 - DNA, 504 bp, Oryza sativa
  unsure (1)..(504): unsure at all n locations
  Clone ID: PAT_MRT4530_27382C.1
taatgttgcaagagattttccccccngaatcccaatgagattggttggatgcccccgatgctacaaggcgaaatcaaggtaacacagtggatggcagaattgcatcattccgttggttagaataggtctctgctgctcccatggcatctcctaaggaccgatgggaaatgggacaagtttctgctgaaatccttaggatcatagcatgaatgtttcaagcataccatggtgtatgaaacnatagcatcagcaagatgcggtagtntcctacttcctcccgtgttgcacattataagatgttttgggtttttaatagattcgtgccctggatgatggatccatgcttgtgcttcgtatatgtgccaaaattcatatgaacgttagtggaatctatacgatgaatggtatcgccccccaacatcttataatggggaaccagaggaagtatttaaaggananaagaccccccggganggagangngagagaagaaaaaaaaaaaaaa

SEQ ID NO: 22183 - DNA, 2079 bp, Oryza sativa
  Clone ID: PAT_MRT4530_27383C.1
tttttccaattgaaccagctctctctcccgtcgaagcttccccaccggcaccgattcccgccgccgccctttcaaatttctgccacgccctcgcatccgcgcgcgcgctcgcgcgtggccgaccacccggtcgccgcccgtgcccgcgctgccgcctgcgtcgcgtgctgcaacccgcccccactccctgtgcgcgtgcttccaaaacacggagctagagctcgcccccccccctctctccctccccaaaacggcatggtcaagcttccgttttccccattctttttctctctttcccaacgctagctccgagcacgaccgctagccgagctcccatgaccacctaagtcggtttcctcccccaaaaccgctcgcgcccataactcttcttccccttccccggcccaaggccggagagctcgccccgcgccgtcgaccgtccatcactgcccgcccggctcggtagtgccttccttctgttccttttttctcgctcgctctcgcccctccttggctcgcgttgtagctcggctagcctcttgaacacgcgtagacgctgccgctagccccgccgccgcccggcatggcctcgccgccgttgccgcccgctcccggaggccgccgttcatcgccggccctcctcggtgctcttccaccccatccgacgccggaaatggactccttgaaccccggagatgctcccacctccttgaattgaatcctcgtcgcccctccgccgtttcccccttttctcgccgccggcgtgcgccgccgcgattcgtcgtcgccggcccctcttcgaaggatccaagccgttggctcatcccctcccgtggccccccttgtaccggtgaactccctctcgattgaatcgccgcgttgtgcttccggtgaagtcggccgccgcccgccgtccattttccggctggcctcgtcttcctcctctcgccggcccgcgtggcagccacgaaggcggcacgttggcgccacctcagcatggaccgggtcgggctaaccccggtcagccgcctccctccgctcccgctcgcacgcgcgcagtccaccgcgagccatgaggctgcgcgtgggcccgccgcacccgcgtccaccgcgcgccgcgcccctcccccaaaccctagcgccacccctcccgtgagcccttccttcggtgaacccgtcaacaactgggtagccttcctcctcgaatccgtgcccggcgagatcagagagagcgctttcgtctctcctgacagtatccggagacaccgtaggggactagccgtgcttatccctgaagtcgatatccggcggcgtgtcttggcttatgttcgcttctatgttgtggcttctatgtcgattgtgttctatgtttctctgcccatttctcttccccttcggactcacacggggagcgggggctggatctggcggcggtggcggcgggcggggcctttctgcgagccgtggtcggagctgcacgtctacgggtacaacagcaacagcggcggctgggtggacccgacgcgtgcagccgtgcaacctcgagcggagtggcggcgaggtggcctggacgcttcacggcaccgagaggcagagaagccggttgttctcccctctccttcctgccaccacggcgacaacgttgagatgacggtcagcccaaatagtggcgcaggcgacatcaccatcgtgtacaccgactggtatggcggcacgtcttccagcttaagggtggacgtggtccaggacactgaacaggctgagcgcgacaccccttcctctggcggtggtggcgcgagcgccccttcctctcaccgtctcacggcggcggcgaggcgcccatcaagcgcggaggcggcgaggttcagcttcctctcatggtggcgccgctccatcgtgcctgtcggtcccccttccccactagcaccagcgtcaccgctggccgagccgcgcctcttcactaccatcctgtcgtccaccaacctccttgactccctacttgctaccctcctttgccacctctccctgcgcctatctccgccgcctccttcatggcgatggcgacacgacctcatctag

SEQ ID NO: 22184 - DNA, 555 bp, Oryza sativa
  Clone ID: PAT_MRT4530_27384C.1
atggaacaagaaagaggtgctagaggagaatatgataatgaggttggagttcttcgtaagtttggcccttggggtgggaaaggagggagcgcttatgacatcgaggtgccaccccaccgtctgtatagtgtgacaatttgtagcggtgaaatcatcgattcgcttgcattctcatatattggacctaatggtcaaagtatcactattggtccttggggtggaaatcctggccctagtccttatacaattcagctcggtccctcagagtttctattggaggtgtctggaacaattggtcgatttgccaattcacgttctaatgttataacatcacttacactggtcactaatgaggacagatatggccattttggaacagaaagaggggatcctttctgcaccacactgcaaacaaattgcagcattgttggcttctttgctcgtgcaagtagatacatgcatgcaattggtgtctatgtgaacaccaaccaactaaaccttgctgtcagtagacgacgctttagaacggataatttagggaatgcaaaccaaaag

SEQ ID NO: 22185 - DNA, 431 bp, Oryza sativa
  Clone ID: PAT_MRT4530_27385C.1
ggagggctgagggttgcagcaaggagtatgtgaaggacaaataagtatttgtgatggtatcaaggacgagggaggttgggatagtggtaggatgttgtcttgtgccttgatgcctatcggataggataaaatattgcatgcaacaattcacatggttagcgtggtacctgcaggttccaacagaataaaatttccactaatacatacttgctgcagaaatatgatttaacttgctgtaacaattaacattgaacggtaagcttaccaaaacaaaagattcttctctcgctcagtttttcttgtatagttttatgcaagctgttgtaaacaaattaagcttcagtgcttcaccaagcaggatacaagttgattgtactccttaagaacagcctattcaattgtgtctattttcatttctggagaattatatg

SEQ ID NO: 22186 - DNA, 1365 bp, Oryza sativa
  Clone ID: PAT_MRT4530_27386C.1
atgggaggcgggcgggtgcggttcaacgtgggcgggcaggtgttcgagacgaccaccaccacgctcgccaacgccgggagggagtccatgctcggggcgctgctggactcgtcctggaaccttgcccccaccgccggcggcggcggcggcggtggtggtggaggaggaggaggaggcgtggcggagtatttcatcgaccggaacccggcgtgcttcgcggtgctgctcgacctgctccgcacggggagcctgcacgtgccgccgcagctgccggagaagctgctctacagggaagcgctctactacggcctcctcgaccacgtccgcgccgcgcggtggggcgcgttcgacggcgaccgcctccgcctcgcggcgtcggtgccagggcgggcgcccggggacggcacggccatccgcgccgcgcccgacggggggtgctgcgtcgcgcacgggggcgccgtgcacgtctacaactggatgctcgacgagcgccgcccggtgtcgctcgaccactcgcaggtcaacgacgtggcgtacctcgacgaggccacgctcctgatcgccgcgcgcgagcgcctggggaagtgcgacggcgggatggccgcgttctccgccgtctccggggacctgcggcaccgcttccgcgtcgcgcacgaccgccaggccaagtccttcaccgccggcgcgctggcgttcgaccaggactcgagcatcttcgccagctgcaagggcaggctcaacgagtacggcatcggcgtctgggaccgcgccaccggcgagcaggccgacttcttctacgagccgcctggctgcgccttgggcgacgccgacaagctccaatggctggacgccaccaacgcgctcatggtggcgaccctgttccccaagaccgacaactgtttcatcggcctgctcgatttccgggacaagaacgtggcctggtcgtggtccgacgccggcatggccgcgtcgctcgacgacaagcgcgtgctccacgccatcgccatggaggacgagcggtccgtctgcgtgatcaaccagtacgacgacctcgggttcctcgacctgaggagcaacgccggcggcgtgcggtggagctcccggagcaagttcatgaaccggaaggtgcccagcgaggagagctgctacccgaagctcgccacgcacggcgggcagctcttctcgtcgatgaacgacagcatctccgtcttcagtggccccgagtgcgtcctgacgtccacgctgcggaggagccacggcggcgccatctgcgacttctccatcggaggcgatcgcctcttcgccctgcacaacgaggagaatgtgttcgacgtctgggagacgccgccgccgccgatcatctga

SEQ ID NO: 22187 - DNA, 552 bp, Oryza sativa
  Clone ID: PAT_MRT4530_27387C.1
cgctcccatcgatccctccttctccttcctccgcctccgcgggcacgacgcaaggccgcctcgcgccgcccctggtcgaggatcgatctccccttcccctcctcggctcccgtctccttcgcccgcttgccggcagcgccggtctccgtcccgcgagctgcggtggtgccgccgtctctgtccctgctgctgctgctgcttccgccgccgatctggaagcttgtagcagtttatgtgttccccagaaagtttgggggttcaactgaccccttgcctgaagggagggagtatttgattcttgaagaagagagagagagagagagtatttgattcttgaattctactagtttggaaggaggggagctgcgttattattattattattattattattattattattattattattattattattattattattattattattattattattattattatttttggttcgtttggttcatggagtcgaaggaagtgcatggccgggatgtgctggttgatctggagacagggaattgcttgctaatgagagagggg

SEQ ID NO: 22188 - DNA, 621 bp, Oryza sativa
  unsure (1)..(621): unsure at all n locations
  Clone ID: PAT_MRT4530_27388C.1
ggcttgttttctttttttttttttttttttttttttttttttttttgcgnggcnccctttggtttgggttaagcgcgggaaatttgggcccttgttttgagccttgacctggcccatcccacccccttgattcacccaagtttagttttaggtttcgggggggggggggccctcccgaatttaaaatttattctcgggagaggcttcatctactcttctctggggggaaacacatctcccctgtttctgcgggcctccttgaggagggctcgttttgttggggctgggcctgggacggatcaggtgcgtcccccgggggctgtgtccccattcgttggcggtccgggacacaagcttggcgaacgggtcgctcagggcggtgccagccttggcgtcttgggtgcgggacctggtgtcaccctggaagtcgggggaagcaggggcctcctgggggggtccaggggtgcccttgggcttggccctgggctccctcttggtgcggcctgtgtctgggcgtagggtggggggttgtggggcctaacgggggggtctcgagcgggaactggggcggtgggggaccccgggagggccttcccgggccggctttcccttgggggggcg

SEQ ID NO: 22189 - DNA, 353 bp, Oryza sativa
  Clone ID: PAT_MRT4530_27389C.1
ggggggacagacaaaaattaattaagctagaaatctcctgggtcggtcacacccccccccccatttaagggacatacatacatgccctggtggaactggaactggagggggggggcggggcttctacaaggggacacatgggacgtggggtggcaccatctcgatcgggggggtgggctcacttgccggggacaaaattgggggggtttgcccaggcgttgttgggaaaggggtcgggaacatggtcaaaaaggttctagatggggcccttgccggggacaatggcctggacaaaaaaccccaacatggaaaacatggggagggggccgttcttgagctccttaaccttgagc

SEQ ID NO: 22190 - DNA, 1843 bp, Oryza sativa
  Clone ID: PAT_MRT4530_2738C.1
accaacccacccagccatgaagaatgacgacgacgtcgagtcgccgctcctcgccgccgccgccgacgccgaccaccacgacgtcgacaacagccaccccgccgccggctcctccttcgccctcgcctgcgccgtcgccgcctccctcacctccatcatctacggctacaatcggggcgtgatgagcggggcgcagaagttcgtgcagctggacctgggcgtgagcgacgcggagatcgaggtgctcatcggggcgacgagcatctactccctcgtcggctcgctggcggcggggtgggcgtgcgaccgcgcggggcgccgccgcaccatcgcgctgtcggcggccatgttcctcgccggctccgccgccaccgccgcggcgagcggctacgccgcgctcatggccggccagctcgtcgccggcgtcgcctgcgggttcggcctcgtcgtggcgcccgtctacatcgccgagatcgcgccgccgtcgtcgcgcggcttcctcgcctccatccccgagatcgccggcaactccggcatcctgctgagctacatcgccgacttcgcgctcgccggcctccccatgtcgctcaactggcgcctcatgatcggcatcggcgccgtcccgccgctcttcctcgccgccgccgcgctgctcgccatgccggagacgccgcgctggctcgtcctgcacggccaccacgacgacgcgcgccaggtgctcgtccgcaccaccggcggcgacgccgccctcgccgagcgccgcctccaggagatcgtgtcgtccgtcaaggagagcgcgacgaagcagcagctgtcctccgccgccgccgccggcggcggcggtgcgtcaacgggcgtgtggcgcgacatcctggtccggccgacgccggcggtgcggcgcgtgctgttcgccatcctcggcctgcagttcttccagcaggcgtcgggcgtggcggcgatggtgctgtacgcgccgcgggtgttcaaccacgtcggcgtgacgtcggagcgcgcggtgctcggcgccaccgtcctcctcggcgccaccaagaccgcctccatcgtcgtgccgctcttcctcgccgaccgcctcggccgccgcccgatgctgctctccagcgcgggcggcatggccgtgtcgctcctcgtcctcggcttctccctgcgcgtgtcgtcgtcttccggctccggctccgagtggtgggcggcggcgacgagcgtggcggcggcggcggcgttcatggcgacgttctcgctggggttcgggccggtgatatggatgtacgggtcggagatcctgccgctgcggctgcgggcgcagggcacgggaatcgggacggcggcgaaccgggtgatgagcgcggcggtggggatgagcttcatctcgctgtacgaggcggcgggcatggccggcacgttctacctcttcgcggcgtgctccgcggcggcgtgggtgttcgtctacgcctgcctcccggagaccaaggggaggagcctcgaggagatggaggcgctcttcgacgccgcccacccatcctcgccgccgccggcgtcgtgatcgatcacgcgcgcgcgggaagacgaggttttgtgtggtcgtcgccctcctcgccggcgacggcgccgccggcgtcgtcgtgatcgggaaaaaggttgtaaaatgtgggatagggtgtggtaaattggtaattaattaaggaatgcagtaagcaggatgggtaaatgttaatttgttggtgtgtaatataatttttatggcaaggtcaccaccaagatcatcagccaatgtttgtaatgctctccatgaaacgatagggattacagtccaaaaaaaaaaaaaaaa

SEQ ID NO: 22191 - DNA, 1084 bp, Oryza sativa
  Clone ID: PAT_MRT4530_27390C.1
ggaatgagtcaacgaactacatcgcaagcaacctcgtcatgtccgcatccaccccctcctcttcctcctctctctccccaactcccctccatctctctctcccctctcctctctccgctctccgcgaggcaacggacaacggctgctgtgccgagcgcgcgcgggcccacctcgccgccgtcgcctcctcctccccacggctttataaccatcaactccgcctccgccaccgccaacccctcgaatccccctccattccccacctcttccccgtcgcctccaccacccgccactgcgcccgtatccccatccctcgccgccgccgacgttgcgcgcgcctcgccttccccaccaaggaaagatgagggagcggcgcggcggccatcgccagactcggggagctcccgaggcacacgcgcgcctcccccgccacgctcctccggctggaggacacggccgcggtgggcgcggccaggagggtccgatcgcaatcgccgcgggccacgggcgagggcatcgcggcggagggcacggtggtcctgcttcgccgcggcaccacctccgcggccgcggccaagcgggcccgaaccaccaccaccgcggccgcggccaagcgagccccagctccgccgatcacgccgcgtctcgcgggcgcgggcgctgcggcggggacgccaattccagttcgccgcgcgtcgcaggccaggccagccgcttcgccgaccacgcggcgtccgccgagtctcccaatcgggagacaatccgttctatagtcagtacagtcctctcccaccttgcttcgtatgacagagtggatgccgaagcgactgagctcagagcccagcttcagcacccagttccgcgaccccccgagctggacggacacccacgagacagtctccccccgtccgtgacgaggccagtgccaacacctccctaccagatttgcgccccccccccctcaaaaaaaaaaaaaaccaaattctccctcgctggtaagcccattagtaaaaactgtctgccttttttatcgagtgcccatcgcttcagcttcgcaagttcacgcacagtagcgagagcagca

SEQ ID NO: 22192 - DNA, 273 bp, Oryza sativa
  Clone ID: PAT_MRT4530_27391C.1
ccgtaccccacccgaattaccgagtccacccacacataccaccacacgtgcgaaggaatactggtggagaaaacaaagaaggcggagaggtgtataggtagagtgatgtcagatgccagaagaatgagatgcgaaagtgttttcatctgtctgaaggtgataatgccagattcttttgtgctgacatacacgaatatgatcagatgctaccagaggactatacagactacagaatgatcgagaccaaggaactataacactgtgtattctagc

SEQ ID NO: 22193 - DNA, 504 bp, Oryza sativa
  Clone ID: PAT_MRT4530_27392C.1
atgtgcccggttaccaaaggtgacctccgcgtcgacgacctcatccccaaccacgccctccgctgcatcatccaggcgtggtgcgtcgccaaccactgccgtggcgtcgagcggatccccacgccgcgggtgcctgtcacgctggcacaggcgggcgaggtgttgagcttgggcgaggtcgaggccgccgcgcgggcgggcgacgcggcgaggtgcggcgcggcggtgcgcgaggtcggccgcctcgcgcgggagtccgatagggaccggtggtgcctcgcgtcatctggcgccgccagcgcactcgccgcggcggtcgcatcgttcgccgcagcgtcgctggtgctcgtcatgccgctcgacgagaaggccatcatggccatcggctcatcgaccgcgtcggtggcgctgctcgccaacgtcgccaagcacgacgacctgcagaggaggctccaggcggtggtcatcatcagggagatcgttgtgttgtcctcgtgctgctaa

SEQ ID NO: 22194 - DNA, 774 bp, Oryza sativa
  Clone ID: PAT_MRT4530_27393C.1
atggtcatggtcctcctcccgccgccagccacggcctcccgccgtgagctgccgaattttcgtggcttcggcgtcggtcttcctcccacctcggccacggtgaagaccggtattgagctgccggattgtgcagccgcagcaacagtcctcctcccgccgccgttcacggcctcaagaggagcatcctggtggaggttgccggcgtcgtgcggcggcggcacggtcgacggcgacctcacctccgtgtcggccggtgaccgggcgtggtggaccgtcgttgaccaccacgacgaccttgtcctctacgacgtctactggggtagccgcctcttcgtctgcaacccagcaacgcggcggtgggcaatgctgccgccgccgtggccagaaccggagcacgagcccagcgcctcgccagcgcccaacaccgccatcgtatgttgcgttgccgcggcgctggctgctagtggctacgctgccgtgtgcccgcgtccgccagccaccgtgtcgtacgtcgccgcgtgggactttgatactaatctcggggggtcgcggaactgggtgctgaagctgggctctgagctcagtcgcttcggcatccactctgtcatacgaagcaaggtcagcgtcagcttcggcgggaacaccagcagcagcacgagccggggcctcagcgccgccatcgttcagagcggcacgccgcgcgttcctctcacgcctgatgcgacgacggcctggctgcgcacacatcaaacataccaacaattaatttgctag

SEQ ID NO: 22195 - DNA, 1287 bp, Oryza sativa
  Clone ID: PAT_MRT4530_27394C.1
atgaagaaacctcaaaataaaattacacttaagctcgctggagctaacctggcggcggatgagagtgagacggtgtctaagatgtacgggcaacatggagagctggtgctctccgcgctgcccggctcccaggtcgatctcgtcgccgcgcatcgtccgcccgtcgtggacaaagggcatccagaaacgtacgtcgaggtttgcgtttgcggttgtgagcaccggaacccaaacctcacggtgacggtccgcgcggggagggcgtcgtccgcctctcgcctggagctccaggtcgacgccgacgccgcgcgctcctgtcccgacgaacggaacagagtcctgatcgctcgccgaaggagggccacagcgctcgctccctcgagccgcgccatggcctccatcgttcggcgtgcccccgtctctcgcctggagccccaggtcgacgccgacgccgcgcgctcctcccccgacgaacagaggagagtcccatccccatctcccgcacccgcgcccaggggacgccgcgtggtcggcgaagcggctggcctggcctgcgacgcgcggcgaactggaattggcgtccccgccgcagcgcccgcgcccgcgagacgcggcgtgatcggcggagctggggctcgcttggccgcggccgcggtggtggtgctgttgcgtcgaaacattgccaccgcgacgcacgtcacgcacagcgtgcgtgatcggcggagttcgggcccgcttggccgcggccgcggaggtggtgccgcggcgaagcaggaccaccgtgccctccgccgcgatgccctcgcccgtggcccgcggcgattgcgatcggaccctcctggccgcgcccaccgcggccgtgtcctccagccggaggagcgtggcgggggaggcgcgcgtgtgcctcgggagctccccgagtctggcgatggccgccgcgccgctccctcatctttccttggtggggaaggcgaggcgcgcgcaacgtcggcggcggcgagggatggggatacgggcgcagtggcgggtggtggaggcgacggggaagaggtggggaatggagggggattcgaggggttggcggtggcggaggcggagttgatggttataaagccgtggggaggaggaggcgacgcgaagacgaaaggcaacacggcgacgatttcgctcggcgatgcgaatgcggctgtttcttctagcacgagattctacaactccggcaatgactgctgtgacgcagcgctctgctcagctgcatcagaacttgacgcggtggcaaattttctg

SEQ ID NO: 22196 - DNA, 1803 bp, Oryza sativa
  Clone ID: PAT_MRT4530_27395C.1
atggccgccgacgaccgcctgtccgtcctctccgacgacctcctccgccgcatcctccacttcgtcccctccagggaggccgcgtccaccagcttgctctcgcggcggtggggctcgctctggcgctccaccggcaccgtcaacctcgccgtgcgcgtcgtctacgacgatgtctccggcgacgacgaggccttctcatcccgccgcgacgccttcgtccgcgcctcccaggcggcgcttgcggccgccgccgccggcgccggcgtcaccaggctcaccctcaacgtggcgggacgctgcctctccggggtagacaagttcctgaactacggcggcggcggcggcggcgaggagatcggcattgtcgacgccgtggtctcccacccggcggcgcgccatgtcgaggagctccgcgtaggcgtcgcgggtcccatgtaccgcaccgacggcgccgagcagcgcccctggcaggaggccagacgatggaggagcgacgacatctacacctacaccctcagcttcgcctccctgccgtcggcgacactccgggtgctcgacatcaccgagtgcaacttcagcgacagcaagctcgctctgccggacgctggcgtcgcgttcccgcgtctcgacacgctgcgcctgcggctctgcgccgtgaggttggcgcacctgcagcgcctcatcgacgccgcgccggcgctcgccaccgtgcacctcgagtccgtctacttcgagttcaacatatacctcgactactacggggtctacggcggcctcgtcgccgtagaatcgcgcctcctcctccgctgcccggcggccaccgagctcgccatggaattctgcggctctagtagctacatcaactcccacctcgacggcggcatcggcatcgacgccccgaagctgcgctccttcaggtacacggggcatccccggcgattctacctcgagtcgccggcgccggagatgacggcggtgaacattcacttcatcgacggcgaccacagattcgccgacagactttggcgattcttgggcaacttcaccaacgtcaagatcctcaagttgacggtgcaggagctcggccacctcgccgtcgccggcaaggcgaggcgagccgagctcctctgcaagttcggcaacctcgagcgcctcgagctggaagcagtgaggaagccgacgaagacgaaggcgccggcgccgccgccggcggtggcgatcgccaacctactccattgctgccctgctctggtcgacctcagtctgaagctcaagatgctcaactacgcatggtcgaagaataatagtatgtacttgagttcatttcatgcgaaattcaagccagatttcgacaaatccgttggtctgttcatgcgtcacaaatcgaagatgacagcggtttcatcatccttgatcgatgaacaccatgatgataagttttctaacatctctggattgagtggaaaatcattcgcctgcttgaatagaagtctcagaagagtaaatctgcagtttcagttgggttcggcctccaactgttttggagtccggcttatcagattcttcgctcaaaatgcgatggttttggaagaaatgtgcatcgacagtggtaacagaaaactctgtgagcacatgaatctcaatgttgaaagatgggttggagttgattcgtccaagattcgtttgaaagacaagaatttaacagggagttcatgggagttttcaagaattcatccagattcggcaccagagttcgagaggaatgcaacaagctttaaggtgttaccccttgaaagacgatga

SEQ ID NO: 22197 - DNA, 1434 bp, Oryza sativa
  Clone ID: PAT_MRT4530_27396C.1
atgagggagcggcgcggcggccatcgccagactcggggagctcccgaggcacacgcgcgcctcccccgccacgctcctccggctggaggacacggccgcggtgggcgcggccaggagggtccgatcgcaatcgccgcgggccacgggcgagggcatcgcggcggagggcacggtggtcctgcttcgccgcggcaccacctccgcggccgcggccaagcgggcccgaactccgccgatcacgctgcgtctcgcggccgcgggcgccgcagcggggacgctacttccgcttcatctcggcacggcggaggccacgccgaccacgctgtgcgtgacgtgcgtcgcggtggcaatgtttcgacgcaacagcaccaccaccgcggccgcggccaagcgagccccagctccgccgatcacgccgcgtctcgcgggcgcgggcgctgcggcggggacgccaattccagttcgccgcgcgtcgcaggccaggccagccgcttcgccgaccacgcggcgtcccctgggcgcgggtgcgggagatggggatgggactctcctctgttcgtcgggggaggagcgcgcggcgtcggcgtcgacctggggctccaggcgagagacgggggcacgccgaacgatggaggccatggcgcggctcgagggagcgagcgctgtggccctccttcggcgagcgatcaggactctgttccgttcgtcgggacaggagcgcgcggcgtcggcgtcgacctggagctccaggcgagaggcggacgacgccctccccgcgcggaccgtcaccgtgaggtttgggttccggtgctcacaaccgcaaacgcaaacctcgacctgttcttccacggtggcgatgagggcgaggccgtggcggccgcagcacatgccccacgcccaccagctagaggaggcggtggtgatcaagacgctgccgtggcgggcgcagcagatgccccacgcccaccagctataggtggcggcgctgtcggccgagagccaggccgtcgtcgcatcaggcgtgagaggaacgcgcggcgtgccgctctgaacgatggcggcgctgaggccccggctcgtgctgctgctggtgttcccgccgaagctgacgctgacctgtcccccaccaacaagaagcttcaaagcctttactcgtctttactgaaggaaaaagaactgattcaggagctgcttcaaggtcttcggggagtcgaggaatgtgccagggcacaggccgagtctcccaatcgggagacaatccgttctatagtcagtacagtcctctcccaccttgcttcgtatgacagagtggatgccgaagcgactgagctcagagcccagcttcagcacccagttccgcgaccccccgagctggacggacacccacgagacagtctccccccgtccgtgacgaggcgtctgtcccgtgattag

SEQ ID NO: 22198 - DNA, 372 bp, Oryza sativa
  Clone ID: PAT_MRT4530_27397C.1
ctccacggacagtaaaggccatgctatgatttactgaacataaaatagttcttacattaaatgaaacgaaatggagcggacctcttaactcaagggcaaagcggaatggcatgccatgcccaatctaatgtgaagtgaaaattcaatcttaacggagtggtatgcaaagtaaggtaattatattacacttaaatagcagatctgatgggggggtggttttgttgggaagcaacccaatcaactgaacttggaatgccaatccaaactgatctgatcacggaaagaaacagactcacgtttgggttgcggcattctatgcaaggcaagcatgacatgggcttggaatgaggggggctcatcatatcctggccc

SEQ ID NO: 22199 - DNA, 3165 bp, Oryza sativa
  Clone ID: PAT_MRT4530_27398C.1
atggatcaagatcctaggctaaccgaacgtgccggaggtatatttaccatgctacccctaaagggaatgctcgtagtgcagcgatttcctgatgtgttcgcagaagatttacctagaatgccaccagatcgtgacatagagttcattattgacctgatacccggaactgcccccatatccaagagaccatatcgaatgccagtcaatgagttagaagaacttaaaaagcaaattagggagttgcaagaaaagggatttgtatgccccagttcgtcaccttggggagccccagtgctattcgtcaagaagaaagatggtagcatgagaatgtgtgtggactaccgctcactgaacgaagtaactatcaaaaacaagtatccactaccacggattgatgatctttttgatcaactcaaaggagctaaggtgttctctaagattgaccttcggtcaggataccaccaattgaaaattagaaccggggacatacccaaaaccgcgttctcaacacgctatggattatatgagttcaccgtaatgtcgtttggcttaaccaacgctccggcatactttatgaatcttatgaacaaagtgttcatggactacttggacaaatttgtggtggtattcatcgatgatattctaatctactccaaagatgaggaagaacatgcggaacacttgcgattggtactcgagaaacttcggaagcataagttatatgcgaaattcagcaagtgtgagttctggttaaaagaactcgcttttctaggccacgtgatctcggccggtggggtagcagtggatcctgctaaagtggaggctgtcacggaatggaaagcacccaaatctgtgactgaaattcggagttttctaggcttggctggatactaccgaaggttcattgaagggttctctaagatagcccgaccaatgacacaactacttaagaaggaaaagaagtttgtgtggtcagaacagtgtcaggaaagctttgagcagctcaaagaaaagctgacctcggcacctattttagttcttcccgacatcaggaaagactttgttatatattgtgatgcttcaaggcaaggactaggaggagtactgatgcaagacggaaaagttgtggcctatgcgtcgcgacaattgcgaccacatgaggaaaactaccctacccatgacctagaactcgcagctgtggttcatgcgctaaagatttggagacattatctaattggaaatcattgcgatatctacactgaccacaagagtctaaagtacatcttcacccagtcagatctcaacttgaggcaaaggcgatggttagaattaatcaaggactatgatttagaggttcactatcacccaggcaaagcaaacgttgtggccgacgctctgagtcgtaagagccattgcaatcatctgagaatggaagggatggtccctgagcttaaggaggaaatagctcagctgaacttacatattgtaccctgtggacagataaacaccctggacattcaacctcttttgagaacccaaatggaagaagcccagaaggacaacgaggaagtccgagagacagatggccagacggagagaaccaaccaggtcctagaggacatgctgagggcatgtgctctggattttagcaaggactgggagagatgtttgccctacgccgaattctcctacaacaacagctttcaagcaagcctaaagatgtcacccaatgagacattgtttggtcgacgatgtcgtaccccgctaatgtggtccgagactggagaacgggcggtatttggacctgacattattcaagaagcagaagaaaaggttcgcttgatccgtgaccgtctaaaagtagcacaatcacgacaaaagagttacgccgacacccgaagaagaaacctggaatttaaggagggagattatgtttatctaaaggtttctccgatgaggggaacaaaaaggtttaagttaccagagaatatcgcggatgtacacccagtcttccatgtgtctcagctaaagaaatgtttacgagtgccggaagagcaagctccgctggaagagattcacattagcaatgatctcacatatccagaacacccaatccggatattggatgaagccgaaaagaggattaggagcaaagtgtggtgtatgtacaaggtacaatggagcaatcacactgaggatgaagccacatgggaaagcgaagaattcttgagaacggagtacccacatctattcgaaaactgctcctcctttttccccctctctctgtcgccaccgtcaccgcgcgtcgccgcctcgcgccgcgagccgccgcgcgccgtcgccatcgtcgccagccgccgcgcgccgtcgccctcgtcgcctgccgccgcgccaccgtcgccatcgccatctcatcgccgcggccgcgccgtcaccgtcgcgtcccgccccgcgccgcgcgtgcatcccatcgccgcctcgcgccgcgcgccaccactgccgcgccgtcgccgtcgctatcccgtcgccgcgtgcgtcccatcgccgctgccgcgccgcgcgccatctcgtcgcctcgcgccgcgagcccgccacctcgcgccccatgccgcgctgctcccccgagccccgtgccgccgctgctaccgcgccgcgccgcccgttccatcgcctcgcgccgtcaccgttcggccgtcgcgtcaccgctgccgctcctcgcgccccgcgccctgctgcgccgcgtcgtcgtcacatcgccgcgtcgagccccgcgccgcgccaccccgccgacgccatgaggccgccgcccctcttccctcttccctcttccccattatctcttcccccttcccttatataattccccccctactcccactcttcccctccatcctcacctcctctcctctacccacgctaccgcgtcgccgcctccacgccgccgtgccgccgtcgtcgcgccgccacgccgccgttatcgtgccgccgcgccgccaccttcgaagccgccgcgccgtcgccccggagccgccgcgccgtgcgtcgccgccttgcaccgccgtcgccgtcgtcgccgccaccgccgccaccgaagcgggagatgaagcctcggaggatccctatgcctactaccaggagggagatgaagacgatggtgctcagtag

SEQ ID NO: 22200 - DNA, 493 bp, Oryza sativa
  Clone ID: PAT_MRT4530_27399C.1
ttttcctgtttgttacgaatcgatgtacaatctctgtatacactacatttcattgcatgtacaaataacttgataagagttcagaacatggatactacttctatcggttggatgtggcagaatacacgggaaactcttctgccgtttttcatggtaaagaacaaaaggtcgtacctgcactagtgtacactgcggcttccatgtccatgctctgacggcacacaatcctgacctaaccaccagttaacaaccgcggcaagtccgctaatccatgaggcgtatatctccatggaaccaatcatcaactgatcaccctaaacatactattcggtagggtgatcaacattgcaacggccaaggtcagctgcagcctgattcccaattcccctgcgccgctgagttcacgtagaggcgattggatgtcctgcattcaagtaggaccgatgcttggagataatctcaatcgacttttgtttgctcattatctacaccg

SEQ ID NO: 22201 - DNA, 343 bp, Oryza sativa
  Clone ID: PAT_MRT4530_2739C.1
tgttgtagggatgcgcgctgattcgttcattttgtgccgcgattgggatggaaagctttgttttgcggctatttcttgtttgtgtatgctgtagttgttagttttccgtaggatttggttggttgctgctaaaggcgccttaactttgagttcatttaatgcagtatgagtgaatacacgagtaatttcgtggctctttacaccgcgatttctagcgtgttgttgtgcattagccaggatgtcacagttttccctcttttgctgtttggttttccatgttttgaaccgtggtgacattctataatatgtaagtcgtgtaggattcatgatggtatatgggtta

SEQ ID NO: 22202 - DNA, 198 bp, Oryza sativa
  Clone ID: PAT_MRT4530_273C.1
taaaaatttgattgatcgatatatttacttacaccggttaccagacggccctatcacaattgaagttacttgtggcacctcaactccaaacaaggtagataacgatgcgtgacaaaaagtgcctgagacctatcgccatggaagttttataggccatttacattttcctcaggttacggcaccctagctgatggcttg

SEQ ID NO: 22203 - DNA, 4740 bp, Oryza sativa
  Clone ID: PAT_MRT4530_27400C.1
atgggcgtaccccgctcggagggatacgtcattgagctgcatcagttgatgaggcgtctacggtaccccagatttccgatctaccgagtgagacagtgtggacccgtttgggaggtcctggtcgaggttctcacacgagttccgtcagagtcagactacagctttccgacacgccactgtcacgacttaccggagaccgcgatgcaggatgcagcctgggaggccttcctccaacttagctctatccaccgagctgagttggcaatagacgacttctacgaggaggctctgttagagatcgacgaccagcagaggcgtgtaggagagttagagaccgaggtgactgacctcacagtgcagcagcttcagctagaggaggagcaccaggcttggggcagtgagataaacttactgaaggcacagcttcaggtccacggcgaccagttccagcagctatctgatcagtacaacgatcgccgtgggatgatggatacacttgaggagcagttgagagagagtcaggagcatgttagccagctggaggagcagcttcgagcagccacggtcaacaccacaggagcttctacttccacagcagtagggcgtgaccgctacttcttcctcaccccgccgtacccacccgcgttccacgctcttctgggagagctgggttctagcatggagactccgatccaggtcgactccgagacggaggggactgacaccgagccagagatagagccagacatcactgatccttcggaggacgagactcctgttccccgcatcacctttatcggaggccctcgcaccctcagcaccgcccacaagagcacccgacccccgggtaagaagcccaagccagatccagaggccactacctccgagccgtggggactcagcaatgaagagacccaagcacccgacctaaccaccctggccggagtcatggctgctcaaacccaacttctgcaagccatcgcaaataatcaaggcaaccgtggaggatcaagctttggggaattcatgagaactaagccacccacgttcgctacagctgatgaacctatggaggctgaagattggttaaggattattgagaagaagctgacccttgttcgagtacgtgaagccgataaagtgatctttgcggcgaaccaattggaagaagcccgagaagaagatgctggagaaccaaactgggaggaatttaccacagccttccgtaacaacttcgtgcctgccgcggaccacgataatttctacagtttaatcaataaggtcgttagaatggaaaacgaccggaaggttgtggagcacaatcgcaaaaggaggtttgccatgaaccgcctgtctcaggccgcaccccagcgtcctaaaggaacaacctcctcagtatggagaccaacagtggtgacaaccaatcgtcttgccgcatctagcaatttccataggccggttaccattcagaaccgagctcctgcgccgaatcaggccgccactggatcagtgaggccaggaagctgtttcaactgtggagagtatgggcatttcgccaacaagtgcccccatccaaaaaagacaccagttcgtactggagctaatacaacggctattcacgggactactacccctgccgctggacgaggtctattcaagactccgcaaactaacaggaccgctaccggatttggacgcgggcaggtgaaccacgttcgggccgaagaggcccaggaagaccagggcgtactgatgggtatgttttctatcaactccactccagttaaagttctcttcgattcaggagcatcgcattcatttatatctttgaaagcaagccaacaacacaagttgaccagagttaaactaaggcaaccaatgttagtacattcacctgggggtgagatagccgtggatacagcttgcattgatgtacccattcgccttagggatgtggtatttccctccaaccttatggtgctgatacctcaaactctttatgtcgtattgggtatggattggttaacaaagcatagaggagtaatcgactgtagacgtagagaagttaccctgaccacaccctggggatcggatatgagagcaactatggatcaagatcctagactggctgaacgtgccgaaggcatattcaccatgctacccatgaagggaatgcccgtagtgcagcgattccccgatgtgtttctagaagatttacctggaatgccactagatcgtgacatagagtttattattgacctgatacccggaactgcccccatatccaagagaccatatcggatgccggtcaatgagttggaggaacttaaaaagcaaatcagagagttgcaggagaagggatttgtacgtcccagttcgtcaccttggggagccccagtgttattcgtcaggaagaaagatggtagcatgaggatgtgtgtagactaccgctcactgaacgaagtcactatcaaaaacaagtatccattaccacgaatcgatgatctttttgatcaactcaaaggagctaaggtgttctctaagattgaccttcgatcaggataccaccaattgaaaattaggaccgagaatatacccaagaccgcgttctcaacgcgctatggattgtatgagttcacagtaatgtcgtttggattaaccaatgccccggcatactttatgaatcttatgaacaaagtgttcatggattacttggacaaatttgtggtagtattcatcgatgatattttaatatactccaaggatgaggaagagcatgcggagcacttgcgattggtactcgagaaattacggaagcataagttatatgcaaaatttggcaagtgtgagttctggttgaaggaagtcgcttttctaggccacgtgatctcagccggtggagtagcagtggatcctgctaaagtggaggccgttacggaatggaaggcacccaaatcggtaactgaaattcggagttttctaggtttggccggatactatcgaaggaaagactttgttatatattgtgatgcatcaaggcaagggctaggaggagtactgatgcaggacggaaaggttgtggcctatgcattgcgacaattgcgaccacatgaggaaaattaccctactcatgacctagaactagcagccgtggttcatgcgctaaagatttggagacactacttgattggaaaccattgcgatatctacattgaccacaagagtctgaagtatattttcacccagtcagatctcaacttgaggcaaaggcgatggctggaattaatcaaggactatgatctagaggttcactaccaccccggcaaagcaaacgttgtggccgacgctttgagtcgtaagagccattgcaatcatctgagaatggaaggaatggctcccgagcttaaagaggaaatagcccagctgaacctacatatagtacctcatgggcagataaacaccctggatattcaacctcttttgagaacccaaatagaagaagctcagaaggacaacgaagaaatccaagaggtgaaggaacgcttagctgcagggttcgcaaaggaattttcgaccgatgagaaagacgtcttgtggtacaaaaagaggatctatgtacccgaacggggtggactgagaggattaatcttaaaggaagctcacgaatcggcatattcattgcaccccggaaatacgaaaatgtaccaggatctaaaggaaggatactggtggcccaacatgaagagagatgtggcagaatacgtagcgctctgtgacgtatgccaaaagaccgcaacggggtatgattccatttgggtgatcgtggatcgacttaccaagacggcgaggttcattcccgtcaagacaaattatagcggtgccaagctcgccgagttgtacatgaccaggatagtatatcttcatggtgtgcctaagagaattgtatccgatcgaggcacacagtttacctcgcatttctgggaaaaagtacatgaaaccctaggaagttatcttgcttttagcacagcttatcatccacagacagatggccagacggagaggacaaaccaggtcctggaggacatgctgagagcttgtgcattggatttcagcaaagactgggagagatgtttgccctacgccgaattctcctacaacaacagctttcaagcaagcctaaagatgtcacccaatgaggcattgtttggtcgacgatgtcgaaccccactgatgtggtccgagacatgtgaacgggcggtatttggacctgacattatcaaagaggccaaagaaaaggttcgcctgattcgagaccgtctaaaagtggcacaatcacgacagaagagttacgccgacacccgaaaaagaaacctggaatttaaggaaggagattacgtttatctaaaggtttctccgatcaggggaacaaaaaggtttaaggtcaaaggaaaactagcgccaagatatgtgggaccttttcaaatcacggctagacgaggagaagtcgcatatcagttacagctaccagagaatatcgctgatgtgcacctagtcttccatgtgtctcaattaaagaaatgcttacgagtgccagaagaacaagctccgttggaagaaattcacattagcaatgatctcacgtatccagaacacccagtccggatattggatgaagcagaaaagaggactaggaacaaagtatggcgtatgtacaaggtacagtggagtaatcacacttag

SEQ ID NO: 22204 - DNA, 1520 bp, Oryza sativa
  Clone ID: PAT_MRT4530_27401C.1
tttttttttttttttggtggatacgtgaccttgatgatttttttttgaaagttcaaaccttgaaaatcttaaatccgagcacaatcccattttgacaggttgattcataaatcatcaaaattctttacaagtgtgcagaagttttatatcatgcatttcctattgaattctgtgatcgtccgttctcatccatataccatctgtttaatctctctcgagtaatctctacctgttttttccaatcggtcctaagtgtgatgaatagaagcacaagagtctggactagtgttccaagaagcatgccgatccaaataccctttgcttgaaatcctagcacatagcctagtattgcaccaagagggataccaataaagtagtacgatgtaacattaacataggcaactacactctgccaacccgatccgatagcgacacctgagagcactggttgaacactattcaacaaaatagagaaagctagaaggggagcaagatcagcgacttcatctgctactgccttactttcagtaaatatgtatgcaaggcttccacggaagaaaaggaagagcacaaacaacacaaatcctatcaagaaagaagtggtgaccacattgaaaatggcaaacttagctcttcttgcactcccggctccaagttcatttgccacccgcactctgcattcttcatataaccagtgaggagcaccaatatggtgttgtaccacaattctaaacatggatcccatgaccccagcaagaccaagttggaacttgactgttaggagccatgacaagaagaggtgaatcccaagattgaggaaggcaaggtaagtgacaatcatgttcttgctctgcgcttgtaggtacatttggagcgtgaatgcccatatgtaagagaacattacggggatgtaccatagagagatggtgccagcgacggcagagatctcaggatcttgaccgagagcaatcaggagtggagttgtgaagatatagaccgggagaaggatgactgcacaacagaagagaactagccatgagcgttgtagatagatgcccaacatgtgatattgcttggcgccatatgattgtccacacaacgtttctaatgcgctcgccatgccaagcaggatgccattgctgaagcgcatgaggacggtggagacgagggcgtaggcggcgagctcggtggcgccgatgtgtccgatgaacgcctggctgatgacggtgacgccgaaggaggagaagcgggcgcagatggaaggacccgccaccacccacagcttcttgttctcctccaccactcgccgcctcaccgatccaacctcatcctcctctgcatcatcatcttcctgatgcttgtaggtagccggcttaggctccaacagaggaaccgtcagcttctcatcatcacccggcttctccattttgctaattaattagtggcggcttgtagtttgcagcaatggagatggagtggtggtgtttcagattcagtagcaatggcgctgctggaggaaa

SEQ ID NO: 22205 - DNA, 786 bp, Oryza sativa
  Clone ID: PAT_MRT4530_27402C.1
atgatgtgcatagttgtatatctcgattacttcctgctcatcaataatcatgccgagaaggtgatgatatgcctcgcctatgtcccatggcaggcgttgctacatgcataccttcatgggcggccaaaggcgaggatggagctcggcctcctcctggagcctggcccgggggcttcgaacgcggatctcgccgcggccgacatgtccaaggtgctccaggtgaagatcacggcggagcaggcggagatggcctcgctggtcgacaagcccttcaccaacaagcccttcggcctcttctccggcgagttcgcgcggcgccacgggttccacctcctgggcacgacgtcgacgtggctcctggacgcggtcctgctcctctcacggcatctcctcgcagccttcctttcttcctccttaacaacggcggcagccttcctttcttcctccttaacaacggcggcagtagaggcggtccagacatcattgagctgggctaggaaggttgcaggtagcatgggcctacgtattcaactagcccacacaaacacaaatgggccgagtgtctgcagttgcagcgccacagcggtcagccggtcgcaacttgaaacatcgatgcctcgacggtggatggtagcctgggactgtggctgggcgctcggtgcctcgtcactagagagtgcagcagtagtccccaccaccaggagcggatctaacgtggatgcgaggatgctaaggagaaatgaaggtggaagaagaggaaggaaaaagaataagggtctggagtag

SEQ ID NO: 22206 - DNA, 2724 bp, Oryza sativa
  Clone ID: PAT_MRT4530_27403C.1
ttaggaaacaaagcgatccttcttgcgctccggcgccgccgtctccccctcgcgcggttgcctgagccaagaacaggatcggaggccaggccccatgcatgcatgttaattagtctgtcactgatcacttcatcccattagccattagctgtttctcatccagacggacgcgccatccaacacacatcgatcgatcggaggttgattggccggccatgacgacgacggccgccggcggagccaccctgtgcgcggcgagggaggagcaggagctcctggccacccgcctgaatgtgaacggcatccggccgccgcattgcgccgcggaatctatcctcatctacctcaccgcgccggggctctccatgatgcccatgcgggtgatggcctccgactccatcgcctccgtcaagctccgcgtccagacctccaagggcttcgtcgtccgcaagcagaagctcgtcttcgatggccgggagctcgcccggaacgacagccgcatcatggactacggcgtctcccacggcaacgtcctccacctcgtcatccgcatctccgacctccgcctcatcaccgtccagaccgtccacggcaacaagttcaggttccgcgtcgagcccggccgcaccgtcggctacgtcaagcagcagatcgccaagaactccacccacgacgacgaccaccacagcctcgtcctccagggcgaggtgctcgacgacgcccacctcatccacgacgtctgcaggaccgacggcgccgtcatccacctgctcgtccaccgctccgccaagctcgccgccaggcccgtcgaccgggacttcgaggtctccatcgtcgcgcgcaaccgcaacgccgccgccgacgctgctcaaccgacgttgcacctgcagagggacttcgccatcgagccggtcatcgtcaaccccaaggccgcgcttccgccagtgatcgagaacctggtgggcgccgtgctggccgggatggagaaggggaacgccccgatcatgtcgtcggagggcaccgggggggcgtatttcatgcaggacgcgtcggggcaggagcacgtcgccgtgttcaagccggtggacgaggagcccatggcggccaacaacccacgcggcctcccaccctcgcccaccggcgaggggctcaagaaggggacacgcgtcggcgagggcgccatcagagaggtcgccgcctacatcctcgaccaccctcccggtggccgccgttcgttcgcaggacatcatggctccgccaccgtgggcttcgccggtgtcgcgccaaccgcgctggtccgttgcatgcacaggagcttcaagcaacctgcagcttccgaacaaggtcctccattgttcaaggtggggtcattgcaagcgttcgtgaagaacagcggcagctgcgaggacatgggacctcgtgcgttcccggtgcacgaagttcacaagatctgcgtgctggacatcaggctggccaacgccgacaggcacgccggcaacatcctcacctgcagagacgaacaaggccatggcctcaccctggttccgatcgaccatggatactgtcttcctgagagttttgaggattgcacattcgagtggctctactggccgcagtgtcgggagccattcagcgaggagacggtggagtacataaggtcactggacgcggaggaggacatcgccattctgaggttccatgggtgggagatgccagccaagtgcgagcgcgtcctgcgcgtcaccaccatgctgctcaagaagggcgtcgactcgggcctcgccgcgttcgacatggggagcatcttgtgcagggagacgctcaccaaggagtctgtcatcgaggagatcatccgtgaggttgaagacgatgttggtgatgaagctgccttcctgcagtctgtctctcaatccatggatcgccgtctgggtgaattatccaagaaaaaaaaaagtaatttgctgtccataaaaaaccttccatcgcgacctcgctcgttgttcgatgtttgctgtggcctcaacgaagacgaagatgacgccgcctgcctgacgaggagttcctggttgtctttgcgaccagcagctggggcctatgtggcggtggctcccgtggtgctagcagctgcacggggcgcgctggtggctagccgacgcgccacgacgacgctagtggtgagcggccgatgccgatgccgccgcccaggtgtgaccgctaggggagaggagaagaaagagtatgcgaaaagacaaaaataccctcccatacatggtaccgcatcaatccattctgcagtaccacgcggtacagaggctcagctattggattgggctagacggacggcgaggattcgatactgcacaggctcaaggacaataaaaaagctcttccctgtatgtataccaccattatgtaataatattgtctcttacaagggtaaagccagtgacgggtggctaagggcctggcctctctcaaggacaccttaagaaaaaaaaagtaatgtaagtagacaagattaactggttgcccgccctctgctcatatcatagataaataacgtcaataaaaagggccgagctaaactaattaaaagggacagaggaaaaggttgtactagtggacttgagttataaactttttgtgcagctgacaattgagtgtacatgtaatcagcggtggtttttaaggcctttagggtgcccccctttgtttaaaaaccaa

SEQ ID NO: 22207 - DNA, 3666 bp, Oryza sativa
  Clone ID: PAT_MRT4530_27404C.1
atggcaagccgacgtcgggcaacaaccagcaatgacgaaactcagacacccgacttaaccactcttgctggagttatggccacccaaactcaacttctgcaagctatcgcgaacaaccaaggcaaccgcggaaggtcaagctttggagagtttatgaggaccaagccacccacattcgccacagctgaagaacctatggatgctgaagattggttaaggatcattgagaagaagctaactcttgttcgagtacgtgaggccgataaagtgatctttgcggcaaaccaattggaaggaccagccggagattggtgggacacgtacaaagaagcccgagaagaagatgctgtagaaccaaactgggaggaatttaccacagccttccgtgacaacttcgtgcctgccgcagtgatgcggatgaagaacaatgagttcaggagactacagcaagggaataccacagtacaagagtacctgaaccgtttcactcagctggcgcgctacgcgactagagatcttgccgacgaggaggaaaagatcgacaaattcattgaaggcttgaatgacgagttacgcgggcccatgattggacaagaccacgatagtttccagagtttaatcaataaggtcgttaggttggagaacgaccggaaggtcgtggagcacaatcgtaaaaggaggcttgccatgaaccgctcgcctcagaccgcaccccagcgtcctaaagggacaacctcctcggcatggagaccaacagtggtgacaaccagtcgacctgccgcctccagcaatttccacaggccggttaccattcagaaccgcgctcctgcaccgaatcaggccgccactggatcagtaaggcctggaagctgtttcaactgtggagagtatgggcatttcgccaataaatgtcctcatccaaacaagacacccatttgcaccggagctaatgcaacggctattcacgggactgctacccctgccgttggacgaggtctattcaggactccgcagactaacaggaccgctaccggatttggacgcgggcaagtgaaccacgttcgagctgaagaggcccaggaagaccaaggcgtactgatggaagatttacctggaatgccaccagatcgtgacatagagttcattattgacctgatacccggaactgcccccatatccaagagaccatatcggatgccggtcaatgagttagaagaacttaaaaagcaaattagggagttgcaagaaaagggatttgtacgccccagttcgtcaccttggggagccccagtgctattcgtcaagaagaaagatggtagcatgagaatgtgtgtggactaccgctcactgaacgaagtaactatcaaaaacaagtatccactaccacggattgatgatctcttcgatcaacttaagggagctaaggtgttttcaaagattgaccttcggtcaggataccaccaattgaaaattagaaccggggacatacccaaaaccgcgttctcaacacgctatgggttatatgagttcaccgtaatgtcgtttggtttaaccaacgctccggcatactttatgaatcttatgaacaaagtgttcatggactacttggacaaatttgtggtggtattcatcgatgatattttaatctactccaaagatgaggaagaacatgcggaacacttgcgattggtactcgagaaacttcggaagcataagttatatgcaaaattcagcaagtgtgagttctggttaaaagaagtcgcttttctaggccacgtaatctcggccggtggagtagcagtggatcctgctaaagtggaggctgtcacggaatggaaagcacccaaatctgtgactgaaattcggagttttctaggcttggctagatactaccgaaggttcattgaagggttctctaagatagcccgaccaatgacacaactactcaagaaggaaaagaagtttgtgtggtcagagcagtgtcaggaaagctttgagcagctcaaagaaaagctgacctcggcgcctattttagttcttcccgacatcaggaaagactttgttatatattgtgatgcttcaaggcaaggactaggaggagtactgatgcaggacggaaaagttgtggcctatgcgtcgcgacaattgcgaccacatgaggaaaactaccctacccatgacctagaactcgcagctgtggttcatgcgctaaagatttggagacattatctgattggaaaccattgcgatatctacactgaccacaagagtctgaagtatatcttcacccagtcagatctcaacttgaggcaaaggcgatggttagaattaatcaaggactatgatctagaggttcactatcacccaggcaaagcaaacgttgtggccgacgctctgagtcgtaagagccattgcaattatctgagaatggaagggatggtccctgagcttagggaggaaatagctcagctgaacctacctcgtgggcagataaacaccctggacattcaatctcttttgagaacccaaatagaagaagcccagaaggacaacgaggaaatccgagaggtgaaggaacgcttagctgcaggacgtgcaaaggaattttcaaccgacgaaaaagatgtcctatggtataaaaagaggatttacgtacccgaacagggtggactgaggggattaattttaaaggaagctcacgaatcggcatattcattgcaccccggaagtacgaagatgtaccaagatctgaaggaaggatactggtggcccaacatgaagagagatgtggcggaatacgtagcactctgtgatgtgtgccaaaaggtgaaggctgagcatcagcgaccggcaggcttgctgcaaccccttaggattcccgaatggaaatgggatgagacagatggccagacggagagaaccaaccaggtcctagaagacatgctgagggcttgtgctctggattttagcaaggactgggagagatgtttgccctacgccgaattctcctacaacaacagctttcaagcaagcctaaaaatgtcacccaatgaggcattgtttggtcgacgatgtcgtaccccgctaatgtggtccgagactggagaacaggcggtatttgggcctgacattattcaagaagccgaagaaaaggttcgcttgatccgtgaccgtctaaaagtagcacaatcacgccaaaagagttatgccgacacccgaagaagaaacctggaatttaaggagggagattacgtttatctaaaggtttccccgatgaggggaacaaaaaggtttaaggtcaaaggaaaactggcaccaagatatgtggggccattccagatcatcgccaggcgaggagaagttgcatatcagttacagttaccagagaatatcgcggatgtgcacccagtcttccatgtgtctcagctgaagaaatgtttacgagtgccggaagagcaagccccgctggaagagattcacattagcaatgatctcacatatccagaacacccgatccggatattggatgaagccgaaaagaggactaggagcaaagtgtggcgtatgtacaaggtacaatggagcaatcacactgaggatgaagccacatgggaaagcgaagaattcttgaggacggagtacccacatctattcgaaaactggtaa

SEQ ID NO: 22208 - DNA, 3417 bp, Oryza sativa
  Clone ID: PAT_MRT4530_27405C.1
atggcaagccgacgtcgggcgtcaaccagcaatgatgaaacccagacacctgacctaaccaccctggccggagttatggccactcaaacccaacttctgcaagccattgcaaacaatcaaggcaaccacgaaggatcaagctttggagagtttatgagcaccaagccacccacgttcactacgacagacgagcctatggaggcagaagattggctacgtatcatagagaagaaactgacccttatccgggtgcgcgaagccgacaaagtgatcttcgcagtaaaccaactggagggacccgctggtgattggtgggatacttacaaggaagctcgggaagaggatgctggagaacccacttgggaagagttcactgcagcatttcgcgagaacttcgtgcctgctgcggtaatgcgtatgaagaagaacgagttcagaaggctgcgacaagggaacacaacggtgcaggaatatctgaaccggttcactcagctggcccgctatgcaattggagaccttgcaaatgaagaggaaaagatcgacaagttcatagaagggctgaatgatgaattgcgtggacctatgattgggcaagaccatgagagcttccagagcctgatcaacaaagtcgttaggctggagaatgaccaaaggactgtagagcacaaccgcaagaggaggcttgctatgaatcgcccacctcagggagtgcctcagcgactcaagggagccacttcgtctgggtggaaaccccctattgtggcgaccaaccgccccgccgcacctagcaatttcaacaggccggttgcaattcagaaccgcacccctacaccaactctggctgcccctggagccaagaagaatgtggactgcttcaattgcgaggagtatgggcactacgccaacaactgccctcatccacgcaaaactcctgtccgtactagcgctaatgcaatgactgttcgtgggactactatccctattgccggacgaggtctattcaagactccgcaaactaacaggaccgctaccagatttgggcgcggacaagtgaaccatgtccgagctgaagaggcccaggaagatcagggcatactaatggactaccgttcactgaacgaagtaactatcaagaataagtatccactaccacggattgatgatctcttcgatcaacttaaaggagctaaggtgttctctaagatcgacctccgatcaggatatcaccaactgaaaattaggaccggggatatacccaagaccacgttctcaacgcgctatggattgtatgagttcacagtaatgtcatttggattaaccaacgccccggcatactttatgaatcttatgaacaaagtgttcatggattacttggacaaatttgtggtagtattcatcgatgatattttaatctactccaaggatgaggaagagcatgtggagcacttgcgattggtactcgagaaacttcgaaagcataagttatatgcaaaatttagcaaatgtgagttctggttgaaggaagttgcttttctaggccacgtgatctcagccggtggagtagcagtggatcctgctaaagtggaggctgttacgaaatggaaagcacccaagtctgtgactgaaattcggagttttctaggcttggccggatactaccgaaggttcattgaggggttctctaagatagcccgaccgatgacacaactactcaagaaggaaaagaagtttgtgtggtcagaacagtgtcaggaaagctttgagcagctcaaagaaaagctgacctcggcgcctattctagttcttcccgacatcaggaaagactttgttatatattgtgatgcatcaaggcaaggactaggaggagtactgatgcaggacagaaaggttgtggcctatgcgtcacgacaattgcgaccacacgaggaaaactaccccacccatgacctagaactcgcagctgtggttcatgcgctaaagatttggagacactatctgattggaaaccattgcgatatctacactgaccacaagagtctgaagtatattttcacccagtcagatctcaacttgaggctaaggcgatggctggaattaatcaaggactacgatctagaggttcactatcaccccggcaaggcaaacgttgtggccgatgctttgagtcggaagagccattgccatcatctgaggacggaagggatggatgtgcaaaggaattttcaaccgatgaaaaaggtgttctatggtacaaaaagaggatctatgtacccgaacagggatctgaaggagggttactggtggcccaacatgaagagagatgtgaccgaatacgtagcgctctgcgacgtatgccagatggtgaaggctgagcaccagaggccggcaggtgaacgtgcggtatttggacccgacattatcaaagaggccgaagagaagctaccagaaaacatcgccgatgtgcatccagtcttccatgtgtcccaattaaagaagtgcttgcgagtgccggaggagcaagctccgttggaggaaattcatattagcaatgatctcacgtacccagagcatccagttcggatactggatgaagtagaaaagaggactagggccaaagtgtggcatatgtacaaggtacaattgagtaatcacactgaggataaagccacttgggaaagtgaagaattcttgaagacagaatacccgcatctgttcgaagaccgccctaacccccctcccactctgccccgcgcgtggccgccccgagccccgcgctgccgttccatcgcctcgagccccgcgccgccgtcacgtcgccgcccgtcgccgcgtgtcatcgccgtcgccgtcgccgtcgcgttatctcgcgccccgtgccgccgttgctgcgccgtcgccgtcggccgtcctatcgccgctcgcccgtcgggtcaccgcctcgcgccacgcgccccgcgcgccgctcgcccgtcgcgtcgccgcctcgcgccccgcaccctgccgcgccgctcgcccgtcatcgttgcatcgccgtcgccgtcgcgccgagccccgcgccgcgccgcccgcccgtcgccatcgccgccagccacaccgcgcaccgcctgtcgcgtcgccatgaggccgcccacccctcccccgcgcccttatagaactcggcccctccccttctccaccccacacccatcctcaccatttcccccccctctcctccttctccacgcgccgccgccgtcgtgccgccgcgccgccgccttcgtgcgccgcgccgtcgcctcgaagccgccgcgccgcgccaggtgtggtgccgagcgttgccgccttgcgccgccgccgccgactggcaccgacggtaagattgggtggtatctgggaaaggctagtaccgtccccggtcaattaaagaccgagccatga

SEQ ID NO: 22209 - DNA, 556 bp, Oryza sativa
  Clone ID: PAT_MRT4530_27406C.1
atggctcctgagcttaaagaggaaatagcccagctaaacctacatatagtacctcgtggacagataaacaccctggacattcaccctcttttgagaacccagatagaggaagcccagaaggacaacgaagtgatccaagaagtgaaggagcgcatggccgctggacgtgcgaaagaattctcaattgatgagaaggaaacgctatgcccaagaatcagcatattcattgcaccccggaagtacgaagatgtaccaggatctgaaggaaggatactggtggccaacatgaaaagagacatagcagaatatgtagcactttgcgacgtatgccagaaggtgaaggctgagcaccagcgaccggcagcttaccacccacaaacggacggccagactgagagaacaaaccaggtcttggaggacatgttgagagcttgtgcgttggattttagcaaggattgggagaaatgtttgccctacgccgaactcttctacgacaacagtttccaagctagcctaaagatgtcgccaaatgaggcattatttggtcgacgatgcc

SEQ ID NO: 22210 - DNA, 3759 bp, Oryza sativa
  Clone ID: PAT_MRT4530_27407C.1
atggcaagccgacgtcgggcgtcaactagcaatgaagaaactcaaacacccgacctaaacaccctggccagagtcatgactactcaaacccaacttctgcaagccatcgcaaataatcaaggcaaccgtggaggatcaagctttggagaattcatgaggactaagccacccacgttcgccacagctgaagaacctatggatgctgaggattggttaaggatcattgagaagaagctgacccttgttcgagtacgtgaagccgataaagtgatctttgcggcgaaccaactggaaggaccagccggagactggtgggacacctacaaagaagcccgagaagaagatgctggagaaccaagctgggaggaattcactatagccttccgtgacaacttcgtgcctactgctgtgatgcgaatgaagaagaatgagttcaggagactacggcaaggaaatacctctatacaagagtacctgaaccgtttcactcagctggcgcgttacgcgactggagatcttgccgacgaggaggaaaagatcgacaagttcatcgaaggcctgaacgacgagttgcgtgggcccatgattggacaggaccacgatagtttccagagtttaatcaataaggtcgttagactggaaaacgaccggaaggttgtggagcacaatcgcaagaggaggcttgccatgaaccgcccgcctcaggccgcaccccagcgtcctaaaggaactacctcgtcagtatggaaaccagcagtggtaacaaccaattgtccttctgcacctagcaacttccacaggccggttaccactcagaaccgagctcctgcaccgaatcaggccgctactggatcagtgaggccaggaagctgtttcaactatggagagtacgggcatttcgccaacaagtgcccccatccaaacaagacacccattcgcaccggagctaatgcaacggctattcacgggactgctacccctgctgctggacgaggtctattcaggactccgcagactaacaggacctctaccggatttggacccgggcaaacccttgatgtcatattgggtatggattggttaacaaagaatagaggagtaatcaactgtagacgtagagaggttaccctaaccacaccctggggatcggatatgagagcaaccatggatcaagatcctagactaaccgaacatgccggaggcatatttaccatgctacccctgaaaggaatgcccgtagtgcagcgattccccgatgtgttcccacaagatttacctggaatgccaccagatcgtgacatagagttcattattgacctgatactcggaactgcccccatatccaagagaccatatcggatgccggtcaatgagttggaggaacttaaaaagcaaatcagagagttgcaagagaagggatttgtacgtcctagtttgtcaccttggggagctccagtgttattcgtcaagaagaaggatggtagcatgagaatgtgtgtggactaccgctcactgaatgaagtcactatcaagaacaagtatccactaccacggattgatgatctttttgatcaactcaaaggagctaaggtgttctctaagattgaccttcgatcaggctaccaccaactgaaaattaggaccggggatatacccaagaccgcgttctcaacacgctatgggttgtatgagttcacagtaatgtcgtttgggttaaccaacgccccggcatactttatgaatcttatgaacaaagtgttcatggattacttggataaatttgtggtagtattcatcgatgatatcttaatctactccaaagacgaggaggagcatgcggagcacttgcgattggtactcgagaaacttcggaagcataaattatatgcaaagtttagtaaatgtgagttctggttaaaagaagtcacttttctaggccacgtaatctcagccggtggagtagcagtggatcctgctaaagttgaagccgctacggaatggaaggcacccaaatctgtgactgagattcggagttttctaggtttggctggatactatcgaaggttcattgaaggattctctaagatagctcgaccaatgacacaactactcaagaaggaaaagaagtttgtgttgtcagaacagtgccaggaaagctttgagcagctcaaagaaaagttgacctctgcgcctattctagttctccccgacaataggaaagactttgttatatattgtgatgcatcaaggcaaggactaggaggagtactgatgcaggacggaaaggttgtggcctatgcatcgcgacaactgcgaccacacgaggaaaattaccctacccatgacctagagctagcagccgtggttcatgcgctaaagatttggagacactatttgattggaaaccattgcgatatctacactgaccacaagagtctgaagtatattttcacccagtcagatctcaacttgaggcaaagaatggaagggatggctcctgagcttaaagaggacatagcccagttaaacctacatatagtacctcgtggacagataaacaccctggacattcaacctcttttgagaacccaaatagaagaagcccagaaggacaatgaagaaatccaagaggtgaaggaacgcctagctacagggtttgcaaaggaattttcgaccgatgagaaagatgtattatggtataaaaagatgatctatgtacccgaacagggtggactgagaggattaatcctaaaggaagctcacgaatcagcatattcattgcaccccggaagtatgaaaatgtaccaggatctgaaggaaggatactggtggcccaatatgaagagagatgtggcagaatacgtagcactctgtgacgtatgccagaaggtgaaggctgagcaccagcgaccggcaggtttgctgcaaccccttaggattcccgagtggaaatgggatgagataggtatggattttattgttgggttgcccaagactgcaacagggtatgattccatttgggtgatcgtggatcgactcaccaagacggcgagattcatccccgttaagaccaattatagtggtgccaagctcgccgagttgtacatgaccaggatagtatgtcttcatggtgtgcctaagagaattatatccgatcgaggcacacagtttacttcgcatttctgggagaaaactggagaacgggcggtatttggacctgacattatcaaagaggccgaagaaaaggttcgcctgatccgtgatcatctaaaagtggcacaatcacgacaaaagagttacgctgacacccgaagaagaaacctggaatttaaggaagaagattacgtttatctgaaggtttctacgatgagaggcacgaaaaggtttaaggtcaaagggaaactcgcgccaagatatgtgggaccttttcaaatcatggctagacgaggagaagtcgcatatcagttacagctaccagaaaatatcgccgatgtgcacctagtcttccatgtgtctcaattaaagaagtgcttacgagtgccgaaggaacaagctccgttggaagaaattcataatagcaatgatctcacgtatccagaacacccagtccggatattggatgaagcagaaaagaggactaggaccaaagtgtggcatatgtataaggtacaatggagtaatcacactgaggatgaagccacttgggaaagcgaagaattcttgaagacggaatacccgcatctattcgaaaaccggtaa

SEQ ID NO: 22211 - DNA, 147 bp, Oryza sativa
  Clone ID: PAT_MRT4530_27408C.1
tcgcggggtgggtgtcagggagaacccttgggcttcctggcacagtatggtctggacctaaacctgttgttggtctgggacccctctcgtcggcatatgcttggagttctcccaacgtggctgatccccatgggctgggtgatccgg

SEQ ID NO: 22212 - DNA, 921 bp, Oryza sativa
  Clone ID: PAT_MRT4530_27409C.1
atgggtggtgttgaaaaaataggtcatttgcaggacctaattagggaacacaagtttgattttctaggtattctagaaacaataaaacatgacttctctgctgagatgcttcaaaaactaagtgtagggaggggtatggtttggaaatggatgcctgccactggcagatcaggagggatactagtgggaattgatagtgagaaattgaacatcattggggaggtaattgggagatactttatcagacttaagctgtctaatgtggataacaaaaaagtttgggatttgatgatagtatatggtgcagctcaagtggaacagaaagctgattttttgactgaactggccaaggaagtgtactcacaaagtcatcctcttatggtgggaggtgattttaatatacttagaaaagaaagtgaaaagaataaatcgggtggctacacaaaatggagttttatctttaatgccattattgaacaagcaaatttaagggaaattcaaatgggagggagacaatttacctggtgcaataaccaggagtcccctactttagagaaattggatagggttttcattaacattgattgggaggtggcacatcctcttacctcagttaggcctttagtgagagctatgtctgatcataatcccatgctgatggagacagggcagtttctccaacctcataaattattcagatttgaacagagttggtttttgagggaggatctggtgtcaattgtgtcagaagtttggaattccagttataatggtagcaacttagagagatggcaaaaaaggatgaaacacatgaggaaaaagctgaagggctggaataaaaattgggagggtgaatataatagaaggaaaaaatttattctagataagattgatgcaattgatattcaagctgagacatga

SEQ ID NO: 22213 - DNA, 564 bp, Oryza sativa
  Clone ID: PAT_MRT4530_2740C.1
atggagacgggtaaggcgatcgagttggtgttgaagcggttggatgagggaggagaagcgagcgaaggttgggaggaggaggaggaggtcgacaagatgcagatggtgacggcggcggcaggtggcggtagcagcagcaggaggaggaaagccatcaagagaaactttaaggctaaagaagcagaccgcaaggagacggaagaggagggcaatcaggtgaagaagatcaccagccagcagctgaagaggaagaggaagaaggaagaagacgccagcgagaagaagaagaagaagaagcggcagacggaggaagcagaagcggagaagaagattgaggcgaggaaagccaaaaaagaggcgtacgagcggtacctggcgaatttctttgattttgagcccttcccacgcacacccgaccacatcctcaacgagatgcccgaggaagagcgtgccggagaaaatcaacttgctgccttcgctgatagtattatggaacgtcgcaggctcctataccagagatgcatcaaggactacatggacaaggacaaggacgatcacgaatag

SEQ ID NO: 22214 - DNA, 507 bp, Oryza sativa
  Clone ID: PAT_MRT4530_27410C.1
atggcggcggcgcacggtggctgcgacggcggcggcgcacggcgactgcgacggcggcggggaatgcggcacggccaaggcgcggcgcggcgcggtggcgtcgtggcggcggcgcggcagctctatgcgacgacgcggcggcgtcgaggcggcggcgtggtggagtgggtagaggagaggagcggggtggcgcggcgcggggctcgactcggcgatgtgacgacgacgcggcgcggcagggcgcggggcgcgaggagcggcagcggcgacgcgacggccgaacggcgacggcgcgaggcgatggaacgggcggcgcggcgcggtggcttcatcctcagtgtgattgctccattgtaccttgtacatacgccacactttgctcttagtcctcttttcggcttcatccaatatccggatcgggtgttctggatatgtgagatccttgctaatgtgactcttccagcggagcttgctcttccggcactcgtaaacatttctttagcttag

SEQ ID NO: 22215 - DNA, 4809 bp, Oryza sativa
  Clone ID: PAT_MRT4530_27411C.1
atggcagattcggattcacccgctacctgggagttgagcttaccccaatcggaggggtatgtcattgtgctgcaccagatgttgaggcgtctgcgataccctggttttccgtcataccgagtgaggcagtgtggcccagtttgggaggctcgggtcgagattcacccccgagtcccttccgagttggactacagctttcagacacgtcaccaccgagacctgccagagaccgcgatgcaggatgccgcccgggaggccttcctccgactcagctctatccaccgagccgagttagtgagtaccgagtttgctcaccacccgttccgggaggagggcaactcagtttgcacagttcagaacacgccctgctgctacaacccgatagtgactcggttgtcacgatgggctgaggcagtagatgactactacgaggaggctctgttggagattgacgaccaccagagacgtatgggagagttagagactgaggtgaccgacctcacagcgcagcagcttcagttggaggaggagcaccaggcttggggcagtgagatagactcactgaaggcacagctccaggtccacggcgaccagtaccagcagttgtctgaccagtacaacgatcgccgcgggatgatggatactcttgaggagcagctgagagagagtcaggagcacgtcagccagttggaggagcagcttcgagcagccaagatcagcactacaggggcttctacttccacagcagcaggccgtgaccgctacttcttcctcaccccgccgtacccaccagcgttccacgctctcctgggagaggctagtatgctagctaccgagtcagcaccctacctagtggaccctacagcagcacagccacctgttccggagttggtgcacactccactggtccctacaccttccccgcagctgggttccggtttggagactccgatccagatcgactcggagacagaggagaccgacaccgagccggagatcgagccagacatcactgatccttcagaggatgaggctcctgttccccgcatcaccttccttggaggccctcgcaccctcagcactgctcgcaagagcacacgacctccgggcaagaggcccaagccagatccagaggccactacttctgagccgtggggactcagggtcattgagaaaaagctaactcttgttcgagtacgtgaggccgataaagtgatctttgcggcaaaccaattggaaggaccagccggagactggtgggatacctacaaggaagcccgagaagacggatcacgagagtttccagagcctgatcaacaaggtcgtcaggctagagaacgatcaaaggacggggaacacaaccgcaagaggaggcttgctatgagtcgcccacctcagacagtgcctcagcgactcaagggagccactccgtccggatggaagccccctgtcgtggtgaccaaccgtcccgctgcacctagcaacttcaacaggccagttgcacttcagaaccgcacccctacaccaactttggctgcccctggagccaagaagaatgtggactgcttcaactgtggggaatacgggcactacgctaacaactgccctcatccacgcaaaacccctgtccgaactggcgcgaatgcaatgactgttcgcggcactactacccctactgtcgggcgaggcctattcaagactccgcaatcgaacaggaccaccactggatttgggcgcggacaagtgaaccatgtccgagctgaagaggcccaggaagatcagggcgtactaatgggtatgttctctatcaattccaccccggttaaagttctcttcgattctggtgcatcgcattcatttatatctctgaaggctagtcaaaagcacaacttgaccctcgtgggacttagaaagcctatgatagtacactcacctgggggcgagataactgtgagtcatgcttgcatagacgtaccaattctccttagggatgtggtatttccctccaatcttatggtgctaataccccaaactcttgatgtcattttgggtatggattggttagcaaagcatacaggagtaattgactgtagacgtagagaagttaccctgaccacaccctggggatcggatatgcgagcaaccatggatcaagatcctaggctaaccgaacgtgccggaggtatatttaccatgctacccctaaagggaatgcccgtagtgcagcgatttcctgatgtgttcccagaagatttacctgggatgccaccagatcgtgacatagagttcattatcgacctgatacccggaactacccccatatccaagagaccatatcggatgccggtcaatgagttagaagaacttaaaaagcaaatcagggagttgcaagagaagggatttgtacgccccagttcgtcaccttggggagccccagtgttgtttgttaaaaagaaagacggtagcatgagaatatgtgtagactaccgatcactgaacgaagtaactatcaaaaacaagtatccactaccacggattgatgacctcttcgaccaacttaagggagctaaggtgttttcaacgatagaccttcgatcaggataccaccaactgaagattaggaccgaggatatccccaaaaccgcgttttcaacacgctatgggttgtatgaattcacagtaatgtcgtttggtctaaccaatgccccggcatacttcatgaatcttatgaacaaagtattcatggattacttggataagtttgtggtggtattcatcgatgacattctgatctactccaaagatgaagaagaacatgcggaacacttaagattggttctccagaaactccgaaagcacaagttatacaaaaaattcagcaagtgcgaattttggttgaaggaagtcgcttttctgggtcacgtaatctcagccggtggagtagcagtggaccctgctaaagtggaggctgtcacggaatggaaagcacccaaatctgtgactgaaattcggagttttctaggcttggctggatactaccgaaggttcattgaagggttctctaagatagcccgaccgatgacacaactactcaagaaggaaaagaagtttgtatggtcagaacaatgtcaggaaagctttgaacagcttaaagaaaagctgacctcggcacctattttagttcttcccgacatcaggaaagactttgttatatattgtgatgcgtcaaggcaaggactaggaggagtactgatgcaggacggaaaagttgtggcctatgcgtcgcgacaattacgaccacatgaggaaaactaccctacccatgacctagaactcgcagctgtggttcatgcgctaaagatttggagacattacctaattggaaaccattgcgatatctacactgaccacaagagtctaaagtatatcttcacccagtcagatctcaacttgaggcaaagacgatggttagaattaatcaaggactatgatttagaggttcactatcacccaggcaaagcaaacgttgtggccgacgctctgagtcgtaagagccattacaatcatctgagaatggaagggatggtccctgagcttagggaggaaatagctcagctgaacctacatatagtgcctcatggacggataaacaccctggacattcaacctcttttgagaacccaaatagaagaagcccagaaggacaacgaggaggtccgagaggtgaaggaacgcttagctgcaggacgtgcaaaagaattttcaaccgacggaaaagacgttctatggtataaaaagagaatttacgtacccgaacagggtggactgaggggattaattttaaaggaagctcacgagtcggcatactcattacaccccggaagtaccaaaatgtaccaggatttgaaggagggctactggtggcccaacatgaagagagatgtggccgaatacgtagcactttgcgacgtatgccaaaaggtgaaggctgaacaccagaggccggcaggtttgttgcaacctctcaggattcccgaatggaaatgggatgagataggcatggattttattgttggattgcccaaaaccgcaacaggatatgattccatttgggtgatcgtggatcgactcaacaagacggcaagattcatccccgtcaagacaaactatagcagtgcaaaactcgccgagttgtacatgaccaggatagtgtgtcttcatggtatacctaagaagattatatctgatcgaggcacacaatttacctcacatttctgggagaaagtccatgaagccctgggaagttacctcgcatttagcaccgcttatcatccacagacagatggccagacggagagaaccaaccagactggagaacgggcggtatttgggcctgacattattcaagaagcagaagaaaaggttcgcttgatccgtgatcgtctaaaagtagcacaatcacgacaaaagagttacgccgacactcgaagaagaaacctggaatttaaggaaggagattacgtttatctaaaggtttctccgatgagaggaacaaaaaggtttaaggttaaaggaaaactggcaccaagatatgtggggccattccagatcattgccaggcgaggagaagtcgcatatcagttacagctaccagaatatatcgccgatgtgcacccagtcttccatgtgtcccaattaaagaaatgcttacgagtgccggaagaacaagctccgctggaagagattcacattagcaatgatctcacatatccagaacacccgatccggatattggatgaagcagattag

SEQ ID NO: 22216 - DNA, 699 bp, Oryza sativa
  Clone ID: PAT_MRT4530_27412C.1
tggatcccccgggctgcaggtttttttttttttttttttttttttttgggaagcacaaataagagagcagatttatatgctttttagtgcatgtacaattcgtacaacagaagttaaacaccactatatttgccaatatattcttgagaagttaaatacatttcctttgtatggaatcccaacttcgcctaagcatctgtagctagaagtgctcatctcgtccctttcctatgtggactttctcaaaaagactcgccagagatggttgcagtagtgattaactttctgaacttatgtcatatcttaccaagattcttctctagcaagctcatttttgccatataattcctcatatttgagctccctttggtgcatccgcttgttgccctcctccaaaactatggctagaggtgccaccatcccgagtaggttgcctcctcttgcatgcaaagatgaaaaaaaaagtctattaagaactcgttgaaatgcggaaataatccaaagagcaatgcatatatagaaatccctatataaattacactgatagcacacattgtgccaccagttaaagaacacagaaagtaagtgagagaatctctgaatctgtgatgttgaacctgatcatcacctaattctttgatatttatactaccaattagattactcttgactgaccagtaggatgagactgcctacctg

SEQ ID NO: 22217 - DNA, 402 bp, Oryza sativa
  Clone ID: PAT_MRT4530_27413C.1
ggaatatgaaccctgagatttccccttttgggcacgattcaatcactggggctgataatgatgggagagaatcgggagtaataaacaaatgtacacatttactttacatacaatgcattctattctgccaaagccaaaccaccagaggataattcgtcagtcaatacgttgccttactgaactgctgttgggaatgtggcgaatcatgtctgaagctactgaattctgattctggctcttgaactgaacacactccagcttcagtgctacgagggattgaattgatggcctaacagcataaccattttattccgtaaatccagatcattagagcttactgctggaacttacagaagccatcatagaactcttaaatggaggtggggatatccagtttaagtt

SEQ ID NO: 22218 - DNA, 508 bp, Oryza sativa
  Clone ID: PAT_MRT4530_27414C.1
gttgattcctcccctccaccgtctccgcctctctcgctcgcgccgccggccgccggcgatcctcccgccggagcacgctcgcctgacctggctgcctccgccgcttcgaatcgaagcccgcagctccccctccctctcttcctctccagacagtcccctactcccctctgctgcactggacttggggtggggtggagcgggagatccatccaagatagctcggagtgagtgatttccccttttttctgaaggttgtagaagcttggaggatgccgaggcgggagggtggtcgctctcgctccgccgcctacctcgtcctcttcgcttcctgccttttagctgttgcggcggcatcacaccaggaatttcatgaagctgctggatccagaactcttcttatgtcacatgaacacacaaatcaagtgcattgctcaagggaaagaagccgtgcagcttggaaagctattgatgagaatttgatgccctttgtggaaaaagagaaatatga

SEQ ID NO: 22219 - DNA, 1763 bp, Oryza sativa
  Clone ID: PAT_MRT4530_27415C.1
ctgcaggaattcggcacgagggctgattcctcccctccaccgtctccgcctctctcgctcgcgccgccggccgccggcgatcctcccgccggagcacgctcgcctgacctggctgcctccgccgcttcgaatcgaagcccgcagctccccctccctctcttcctctccagacagtcccctactcccctctgctgcactggacttggggtggggtggagcgggagatccatccaagatagctccggctcgcgctgtgccgccgtttgctgaggggggtgctggctgggatggggccgaggcgggtgatttggctctctcggtccgccgcaggcctcgccgccgtcgccggcggcgcggtagccggtccccccgtcgtccaccagcgcggcaacgacgctcttggagccacatcgctcaacatggcccatgcagtcccccatcacggggctggctccgcggtgagccaccggggccgcctcccgccccagggcagggcgtttgatgacctgtgcggcaaattcaaaatctcgttcccctcgctagtgtacacctccgcggggagatcccatgaccagggtcgcacgggcagcatagtcgttttgggcttatctgggttggaaatccgattcccctcgtcctgcaatttttgcaatgtccaacccaactactaaagccgaatgtactcctgaagatgtattcaaatatgttggagacaatgcagtatttgccagtggaagccctttcagtaatgtcactttaggcaatggtagacaagggtacgctaatcaagcaaacaatatgtatctgtttcctggtatcggtttaggagcccttctttcaggtgctcggcatattacagatggcatgctccaatcagcagctgagtgccttgcgtcatacatcacagacgatgaaattcgaaaaggcatcctctttccatcaatctcaagtatcaggcacatcaccgcacgtgtcggcgccgcagtcgtccgtgccgctgttgatgaagatctggccgaggggcgttgtgatgtagacgctagggacctcaagagcatgactgaggcggacacagtcgactttgtggctcggaagatgtggtaccctatttacagccccctcgtgaacgataagtgaagctcgatgaagtgaaaaatctgacgttgcatgaaccagatgtagcacctgaacaactatcagtcacatatttgttcagacttattttttttgttgctattttcatttagctgcgctactggagggtaattcagcagataccgatgcccacgtctatggctatgttatcacgccacgccatttttttgttctgttttgacagcttccgtcatcaaacgttgctcaatttcaagattagttgagctacataaatttacatctcgtgctttactacattctactaatatattttttttggatattacccacaggttgcagttgctgaagtgacacggcaatcctttaactcggagtgagggatttccccttttttctgaaggttgtagaagcttggaggatgccgaggcgggagggtggtcgctctcgctccgccgcctacctcgtcctcttcgattcctgccttttagctgttgcggcggcatcacaccaggaaattcatgaagctgctggatccagaactcttcttatgtcacatgaacacacaaatcaagtgcattgctcaagggaaagaagccgtgcagcttggaaagctattgatgagtatttgatgccctttggggaaaaag

SEQ ID NO: 22220 - DNA, 1004 bp, Oryza sativa
  Clone ID: PAT_MRT4530_27416C.1
tttttttttttttttttttgaaattccaatagctcggcattcttgaaaacactataaatcagagcatggtcatttaatgcttggactatagcaaaaaatagaaatattcagagtaaatgactattaagcaaagaatgttatgatttctaatataacaaagatgggaatatgtagagaactttcgagtttcgtttttcatcaagacctcaaccaaactgctacaaaatatgtggtactaactactaaaataggagaatccttcattgataaaaaaaaatctaaaaagatattgtaggtagaagcagaattacagcaaccatgtgcttgatcttcctcacaagcaactcacagtgcttcatccacaacatttcaaagatagtagcataccactaaatagtgcctctttaatcataccaacaaatgtgatattattaccaggatcccacaacgtgatgacactgtcagctgcaaccaaaaaacagatccctcacttgaaaaagttgcgaatgtcataggtttattcctgcaattttttacttttctatgtcatcatttacatcatttgccagaaatggcaaatcattttatggcagcctaagcacgtggtatacaagtgccaacagtatatatggtatggcatccttgaccattaaatattagaggtattgtttagaggaaattaaataatcaaatcaactcacttgtatgaaccaaccaattgacatccccaaccagattgttttttttttcatcacttggttgcgaaagcatactttggacccaaacctacagattaattggtcacaagagaagcaaatgaagacctcacggcttgagccgtgttttttccagggcgggaagcaacaatagaaatagcaacattgctgtgtgaaagaactaaaccaaatgatagtaaaaacacaagaaatatattccatttgaccttataaacatgtgccaacctatgcggcaggttgaagcccacgcgtccgcccacgcgtccg

SEQ ID NO: 22221 - DNA, 386 bp, Oryza sativa
  Clone ID: PAT_MRT4530_27417C.1
gggggccaaaccgaagattttttagtaaaaacaccagaaaaataaacttgcagtagggggattggccaagggccaaaccaacaacaggtttacaaccccatacaggatttttttggggggcctaaacccaaaaaaggggggcagggagcccccgcttcattttaagagggaaaaaaaaccgaaggggtgccacacaggattatgcaggggtggtttttccactttcaaaagaaaagccctatttgaacccacccactcaagaaggccacaccaacaagggcacattattgggtcaagaatagaaaaccccagtttcatccttgggggatgaaagggtttttccgggggtcgctccctttgcaatttcccgggcaagggaagcgaaa

SEQ ID NO: 22222 - DNA, 501 bp, Oryza sativa
  Clone ID: PAT_MRT4530_27418C.1
atgcggaggatgttgcccaagaagtgctacttgcttgggttgcagaagcttacccttattctggatcacaatcatgaagcccttgccagattagcttcatgcttgctcaacagttctccaaacctcaaggaccttgaaatcatggatcctcttgatatccgctactctgatcacttagctgcagagttctgggagaagcatataactgcgggttgcatcctgaatcacctgtcagttgtcgccttctacatgcgtgagacgctcttcgaaggctaccctcgcaccagcctttgtcagttcctggtgatgaacgctagggctctcaaaagaatgagcattaagtatcattgctcactgtacgagaccgaacatgtcgcaaccgtgcttgaagcagttcaaagtgaactgcatctctggccgggggcttctccggatgtgctgctggagttgtctgaggttgattgcatccgatcgatctatgaagtctggaggatccaatga

SEQ ID NO: 22223 - DNA, 261 bp, Oryza sativa
  unsure (1)..(261): unsure at all n locations
  Clone ID: PAT_MRT4530_27419C.1
gaacgcaccacctcctcctcctttntnattactcccgcggccgactccccagccctgctccagtttggtccaatccaaccaagcagaggctgcagcctgcggagcagaggagaaagaaacagagtttcagtttccgacatgccgcggctgctgcctggaactggaagggcctcctccttgtcctcttctttgctactgctcctgctgctcggtgccgcgatggcggcggcgcggagggctgcgtttatgttaactaagacc

SEQ ID NO: 22224 - DNA, 612 bp, Oryza sativa
  Clone ID: PAT_MRT4530_2741C.1
atgcacgaccgcagccttgccgccgccaccgcgctgtgcagcggcatcaaagaatccacgctcgccagcgccgctgccaccgccacgaaggacctgaaacagtcaggatctaggtactttgggcgtgacctgcggaggcggggaggagagaccggatgcttcgccgcctggaacgagctcgtaaccggagatctcgactggcgcgcggcggcgcggtctgtagtgccctccgattccgtgttcccggaggtggagctggccgaggacgacgccgtggtgtgctcccgggtcaccccggatggcggcggggaggtggtcgcgtggtgcaagattaggcgcggcggcgacgtgtcggcggcgacgatttggaatctgagatgtgagcccctgaagacagggaataggcagagtggccatgggacgacagtgcaattagttggtgggaatcacttcctacataatattgaagagcggtctgatgaggagattgcattgttggagtcatatgccccggtcaagacaaatattctaatcaaggccatctacaccatccgatgtaccacgcggcaacgatccgtcccctcttctgcttctaccctcccatatccttga

SEQ ID NO: 22225 - DNA, 1246 bp, Oryza sativa
  Clone ID: PAT_MRT4530_27420C.1
gcacgagggagtagtccacaactccggccggccactacgactctacgagtacgtacactggcaattaaagctcaagatggccgcaacagcgggcgcattggccgtcctgcagctcgcctccatcgtcgccgctgccgtcctcctctcctccccacctgcggctgctgctgagccgtctgtggacttcattgacgtggtggcgtgctcgcagtcgcaggtggactccatcggctgtgacgcgtcggtttacttgagtggcgccaactcggagcaggggatgccgcccaacgccaactcgctgcagccgcgggcgctgcagctggtggaggacatccgcgccaaggtgcacgccgcatgcgggcccaccgtctcctgcaccgacatctccgcgctggccacccgcgcggccgtcgtcctctccggcgggcccacctaccccgttcccctcggccagctcgacagcctcgccccggccccgctgcgcctcgtcaaccagctcccgggcccgggcacctccagcgtccaggctctcatcgacctgttcgggagcaggggcatgggagacgccgccgacctggtggcgctctccggcggccacaccgtggggaagtcaaagtgcgccttcgtgaggcccgtggacgacgccttctcccggaagatggccgccaactgcagcgccaaccccaacacgaagcaggacctggacgtcgtcacccccatcaccttcgacaacggctactacatagcgctcaccaggaagcagggggtgttcacctccgacatggcgctcatcctggacccccaaactgcggccatcgtcaggcggttcgcgcaggacaaggccgccttcttcacgcagttcgttacgtccatcgtcaagctgagcaaggtgccgaggcccggcgggaacaaaggcgagatccgccgcaactgcttcaagaccaacagcggagcacgcctcgtggacgtcgtggagggcttcgctgcctctgcttaattcatgtcatgtcgctcatcgagatgaatatctagggtcgacatcattatgccgttgtatgtgtgacctagtactagtatgtatagtacgtctgccccttttgggcccggtcggtcggtctcgccagtatggcctttgtatgtttcgttacggccgtgcgcgcgttaataagacgtactcccgcaccgtaataattatttttttaattttttttatctttaataaaaaaatcttctccaaaaaaaaaaa

SEQ ID NO: 22226 - DNA, 341 bp, Oryza sativa
  Clone ID: PAT_MRT4530_27421C.1
ggctaaaggggggtggaaaaaaattaaaaaaaataaaaacccccggcaaaacggttttttctcgaacattttttttattttacaggccaccaaaacccacaagaaccccggccggttttggtgggttcgcccatggcccccggggggggggggaccccccggggggggccgtgcttgagcccccccttccaaacaacggtaaaccggcagaaggacatggggcccacctccgggggcccccccccttccaggaagggcaccacccccccggggaggaacccgggcaccaccccggggtacaatgggtcccccaaagaacccgggccccggacccccttggg

SEQ ID NO: 22227 - DNA, 3432 bp, Oryza sativa
  Clone ID: PAT_MRT4530_27422C.1
caaaaaaactcccataaacccctcctcttcgagaaaatccctttttgttcaaccacgacgcgaattcccaagcaacccccccacacccagctgagtagctgacgcagcaccagcagtcgcggggaaagggacacgtctcgccgccccagcttcccgcctccctcccatcccgccgccgcggacgcgtccaagccacagcaacagcaaccactccgacgaacacctcgcctgcgcgatggtggcggcggcgctggacgcgatggcggggacgaggtgggggaggtggctggggctcgtgacggcggtgtgggtgcagtgcatctccggcaacaactacaccttctccaactactcccactccatcaagacgctcatgggcctcacccagctgcagctcaacggcctctccgtcgccaaggacgtcggcaaggcgttcggcctcctcgccggcctcgcctccgaccgcgtccccacctggcttctcctcgccgtcggctccctcgagggcctcctcggctacggcgcgcagtggctcgtcgtgtcccgggccgtcgcgccgctgccctactggcagatgtgcgtcttcctctgcctcggcgggaacagcacgacgtggatgaacaccgccgtgctcgtcacctgcatccgcaacttccgccggagcagggggccggtgtccgggttgctcaagggctatgtggggctcagcacggcgatcttcaccgacgtctgctccgcgctcttcgccgacgacccggcctcgttcctcgtcatgctcgccgtcgtgccggccgcggtgtgcgcggtcgccatggtgttcctccgcgagggggaggttggcggcggcggcgcggacgggcgggaggaggaggaggaggatgggtggtgcttcgccgcaatcaacacgctcgccgtcgccatcgcgctgtacctcctcgccgccgacctcaccggcgtcgggggaggcggcggggtcgtgtcggccgtcttcgtggccgtcctccttgtgctcctcgcgtcccccgccgcggtgccggcgcacgtggcgtggaagtcctggatgaagacgcggaagctcgcgaacgccgacgtcgaggaggcggaggagtgcgcgtccgccccgctcctcgtggcgaaggcgacggcggcggcggcggcggaggcgcgcggccccggcgagaagccggtgctcggggaggagcacacgatcgcgcaggcgctcatgtcgctggacttctggctcatgttcgcgtcgttcctgatgggcgtcggcacggggctcgccgtgatgaacaacctggggcagatgggcgtcgccatgggctactccgacgtctccctcttcgtctccatgaccagcatctggggattcttcggccgcatcgcctccgggaccatctccgagcacttcatcaagacaagagcaattccacgccccttgtggaatgcagcttcgcaaatcctgatggccgtgggctatgttgtgatggcagttggtatgccaggctccctcttcgtcggctccgttgtggttggcatctgctacggtgtccgcctggcggtcaccgtgccaacagcatctgaactgttcggtctcaagtactacggcctcatctacaacatcctcattctcaacttaccactcggctccttcctcttctctggccttcttgctggcctcctctacgacgcgcaggccaccaaggtacccggtggtggcaacacctgtgttggtgcgcactgctaccgcctcgtgttcgtggtcatggcgattgcctgcgtcgtcgggttcggtttggatgtcttgctgtgcttcaggaccaagagggtgtatgccaagatccatgagagcaagaggcagagcaggtcggcagttgtgcagagggtaagctagccaaaacctacagctatgagaaaaatggtacagattcgcgcaattgcatcaagattcaatgattcaacgagtgcaggttctgtaaattttgtgcaaataagaggatcccatgtcttgattctttggaattagatggatggatccattcaatcggtatagtttaactgccacggaggtttctaggggctgattcgagcaatgtttgccctgtgtgtgtaattcagtactagtactgactactactgactgagaggctgcagattgtggagttgtctgatccctcggtgtaatcagtttagtcagtgtatccttgaggaaatgtattctcggttttagcctgtacgatgaattgttgtgcaattagcctgttggcatataaattcagatcaattcaagccattctttttggaaaaaaaaaaaaaaaaaaaaaaaaaactcgagcctcgtgccgaattcggcacgaggcctcgccgccggcctcatccgtatcttcttccacgactgcttcccgcagggctgtgacgcgtcggtttacttgagtggcgccaactcggagcaggggatgccgcccaacgccaactcgctgcagccgcgggcgctgcagctggtggaggacatccgcgccaaggtgcacgccgcatgcgggcccaccgtctcctgcaccgacatctccgcgctggccacccgcgcggccgtcgtcctctccggcgggcccacctaccccgttcccctcggccagctcgacagcctcgccccggccccgctgcgcctcgtcaaccagctcccgggcccgggcacctccagcgtccaggctctcatcgacctgttcgggagcaggggcatgggagacgccgccgacctggtggcgctctccggcggccacaccgtggggaagtcaaagtgcgccttcgtgaggcccgtggacgacgccttctcccggaagatggccgccaactgcagcgccaaccccaacacgaagcaggacctggacgtcgtcacccccatcaccttcgacaacggctactacatagcgctcaccaggaagcagggggtgttcacctccgacatggcgctcatcctggacccccaaactgcggccatcgtcaggcggttcgcgcaggacaaggccgccttcttcacgcagttcgttacgtccatcgtcaagctgagccaaggtgccgaggcccggcgggaacaaaggcgagatccgccgcaactgcttcaagaccaacagcggagcacgcctcgtggacgtcgtggagggcttcgctgcctctgcttaattcatgtcatgtcgctcatcgatcataatcgagatgaatatctagggtcgacatcattatgccgttgtatgtgtgacctagtacgtccgccccttttgggcccggtcggtcggtctcgccagtatggcctttgtatgtttcgttacggccgtgcgcgcgttaataaaatgtactcccgcaccgtaataattatgttgttttaattttttttatctttaagtaaaaaaaaatcttctccaaaaaaaaaaaaaaaaa

SEQ ID NO: 22228 - DNA, 481 bp, Oryza sativa
  Clone ID: PAT_MRT4530_27423C.1
aaagttcgcacttctccccctctcgcacgcgcctcgccgccgccgcatcgcatcccctcgtcgtcgcagccgctacctcctccgcttagtcgcctcccccccaccccggcacccccacctctcctctccgcctcgctgttgcctcttccatgatgtccctagtgagagcacggcgagggcatctcctcagacctcacacatgccggcgagccgccatctgctcctcgtcgttgctggatggggaggaagaactcggtgacctcctcggcgcccacgccgtcgccgaacgccgatgaggtccagcaggagatggccgtgggccgctcggcgtcggccaggatccgcgaccgggcgtctcgttcgctgctggggcaggagccatacatgaccatgtaacttattcttctcatgattttggtgggtgaatagccaatgattttggttttttggtccagtaaatgggaaaattggtctggttact

SEQ ID NO: 22229 - DNA, 180 bp, Oryza sativa
  Clone ID: PAT_MRT4530_27424C.1
gccggccgggctccataccggcttccagacgcttctcggggcgctctaatctcaagtctctggctcgtcgtcctcgcatctccactcgccatgggcaagattaagaccggaatcaacggtttcggaaggatcgggaggctggtggtcagagtggtgctacagagcgaggatgatgagctc

SEQ ID NO: 22230 - DNA, 1616 bp, Oryza sativa
  Clone ID: PAT_MRT4530_27425C.1
tgtccatctgcagattgcagaaaagacaagatgtttgatagcagagtggacgtacacgctcatctgatacgtcgaggattcatgaatggccacacatgttgggtgaagcatggagagcaagaatcagtcgacgatgttgcaggtgtaggcattagtagtgcacaaaatcaagaagattaagatgaccatgacatgtttgtacattctccattaggcggtgaaatggttgatgtggatcacgatatgctgcaagacatgttgcgtgacgttgagaacctaccttacaacgagagagatttcatgaagttcaccaggttgatcagtgattcggagacacctctatacgtcggatgccaggaaaaatacaccaaattgtcagctaccttggacttaatgaagctgaaggcaagtagtggacggacagacaagagtcacagaccttttgggaatatttaaagccatgcttctcgagaagaacacattgcctatgacaacatatgaagcaaagcaggttttgtgtcctctgaggttagaggttcgtagaattcacgcttgtccaaacgactacatattgtacctcaagcaatatgcggacttagatgcttgtcctgtctgcaagacttcttgatacaagcgaaagaaaagtgttgacaaaggaaagaattcaaagcggggtggtccggcgaaggttgtgtgatattacctatcattgattgtttcaatataatctttgccaaccccaaggaagcggagttaatacgttggcacgccatagagataaggaacaaaggtatgctaagataccctgcagattcgattcaatgaaggaatatcgataagaaatacctagaattcatagccgaccctaaaaacatgaggatatgtttgtgtacgaatggcatgaatccttttggagacatgagcagttctcatagcacttggctagtgcttattgcaaattataacctaccgccatggttgtgcttcaaaaagaaaatacattatgttgtgcttgttaatccaaggaccgaaacaatccagcaatgatattgatgtgttcttggagcatgttatcgatgaccaagaaattctttggaagaaaggtgtggaaacttgggatgcgtatggtcaggagtacttcaagctacaagttctattgttctgcaccattaatgagtactttgtacttggtaatctttcaggacaaactgtcaaaggaaagaaggcttgctccgactgtatggaagatacacgtagtaggtggctgaagaaatcacgaaagatagattacatgggttataggagatggctcccactacgtcacgcatttagaagaaagaagaaaaatttcaaacgataagagagaacttcagtctgctgctaataatttgtccggagataaggtccatgacatggtcaaggacataactaatgagtttgggaagaaaaggaaggggattcctaacgcttacacgctccgaaggccgacgcgtatgttacgcccccgtcgctaaccatcacgggccgacaccaaaggacaaagacggggcaacgaagagaaggaacctttacaccacgcaacgagcgcgggaaccgacaacgaaaaaaggcgccga

SEQ ID NO: 22231 - DNA, 438 bp, Oryza sativa
  Clone ID: PAT_MRT4530_27426C.1
atgccgtgcagcctgatgaagggcgcgtcggactactgcaacatctatgtggtggcgaagggcaagtcggtgaacgtgaggcttgccaagtgcggcgtagctgcgctgccgttgctgcccacccgctcgccgcttgccagtgaacgttgtagccttttcgccgctcgcctctccgacggtacgatccgtcgacgccgctgtcgggcgccgccgcgctgccggacaggacgatggccaccaccggcactccaatctgaaagaaaaacaacgcacaatctacattccgtcagtgtcgaaaaagagaaaaaagaaactcctggtgcagatcaaatcagcgaccttaaaattcccaatttgatgtacacaggctacaacgtttgcaagcactctaaaaaggagcaaaagcacgaagagaacaatgaacaacaccactggtag

SEQ ID NO: 22232 - DNA, 301 bp, Oryza sativa
  Clone ID: PAT_MRT4530_27427C.1
ctgttcgtgcaagcacaaccagaaccagttgcagtgtcaactggtctgcatcataatataaatggctctttgcaatggagcaaccgcgtgaacgcccaaattgcgaaccccgcgaaccttccaccgccgccgccgccgccggcggattcgaacggtgtgggcgccgcggcgccgcagcgccgccggctggagctcgctacggcgcggcgcggcggcaatgcccttccgggctccggccttcccctatctgatccttcgcctctccttctcttcttccttttagcgggccgagcaaacctat

SEQ ID NO: 22233 - DNA, 884 bp, Oryza sativa
  Clone ID: PAT_MRT4530_27428C.1
tcagactctccgggaaggtcggaatctaagcagaaaagagcaaaatcaccaaaaaacggacggcctacgaaacggacggccgagatctaatctaatccaaaacggatggccgagatctaatcggtctaccgtgggtctacgggtaacgcaatgctgacgtcggcgatgacgtcatcaccaacggcggcttggcaactcacgctcgccggcgtacgacggcggtgctcctgcggtcttcggcggaaacggagggctggacgaggacgacgacgacttggcgatcccgacggtggccttcctgagcgacaacaatgaccagagcggcggcggtgcacggctggtctcccttcggcggcggcggcgcacgacttgacgcggaatcggcactacaagcggtggcgagctaaagcgagggtggcggcggatagaggaggtcccgggggtccttttataggggctagggggcggcgacggaggcccacggcggccggcgaaggcgaaggaaagcttagggttcgggaggaaaaacgaatccgaatcgagctcgaatcctacgatttccaaacgaaattagatgaagattccaaaacagaaaaggaagaggggatcccggggatcattacccctctactgattcgattggatcgggaaaagagtggtcgaatttggaaggaggcggcggcggcttgcgcgcggctagggcacggctgcggcgggaggaggaagacgaccctgacaggtgggccccacctgtcagagggagagaggagggagagcggcggctcggctcggcgggctgacttgggccgggcgcgcttgcaggccaaggagagagagagaggggttttgggccgactttcggcccaaagccaaaagaggacttt

SEQ ID NO: 22234 - DNA, 297 bp, Oryza sativa
  Clone ID: PAT_MRT4530_27429C.1
cttaaacgtgggccccaaccccattcattaattgacccgccccggggcaatttcaggggattccacatcccaccatccccatgtccccccattcaagggaaacaaaggtttaaccctcagccctaaggttttgcccacaaaaacatttttttttcatcgaacccaaaacaaaaaaaaagcgtgggcccggaacaaaccccccccccgggggaaccggggggggaaaggaagtcccacatccccattgcagggggggctcgaaataccgggaggccccagggctggggccccgaaacg

SEQ ID NO: 22235 - DNA, 693 bp, Oryza sativa
  Clone ID: PAT_MRT4530_2742C.1
aagttgcggcgatcctcataaggcatacattaaacacgcatggatctcacctgagtacaacactgaaaaaggctatactctttgtgaatgtaaatagactgaccacaatttgcctggatgagcaactaattttgtccaaaagagacactgaaacaaggggggtaaaaggaacaaacgcttaagacatgactgcaatgaatctgactgttgaaattagtgttctctgcaatgagatcccgcgagttttatccgaaaaggtcagatactgggatggcgtgtcattcatcagttcatcctaaagctcggaagggtatctctgtagcatgttaacttcagtagttttaggggatcggcatctgagagaatttcaaaacttcatacctggttgccagcataagttctgcaggtgttgaaaagttgttgatcagagtagcaatttaaggtctgatgtttctggggaacagtaggagagaaaaaaatgacaaaaaaaagagagagtaggttgtaaatacatgaaaagttttcatcagaaattagtgttgtaacattgtacactgtgattacatcctgtgcaatactcccataattcagatctgtgttgtaatacactacatacatcctacaattttctggtgataatagagatctaattctcacctaatatcaattcgaaatagttctctcctaaataag

SEQ ID NO: 22236 - DNA, 363 bp, Oryza sativa
  Clone ID: PAT_MRT4530_27430C.1
ctcttctttttttttgagagaactgataatactcgatttcccgcttgctgaaaaagcgcagtagcacagacatccgtccattaacagccttacacagactgtactccatataataccgaactggttcaggtttctgtacaacggcatgcatccacccaagcagaaggatgctttcgcatggctagaagttcctacggctacttaggaatatgggagtcttagctatcgtggatgagcaggagactgtatggcaagccccacttctcaatgtataagccgaggctgcggatttgaagatggccgggttgagtatatacatcatgtaagggagtgctgcgtccacctccttctcaagctcaaatt

SEQ ID NO: 22237 - DNA, 465 bp, Oryza sativa
  Clone ID: PAT_MRT4530_27431C.1
atgtctcctgcttggaaacatcatggaaggaaacaaaagttgtccctacccgacggttggaaaattgaaaagaagaaatatcgttatagaacagataagttctacagagaggaaagcacaggaaaactatgtaggtccattcctgaggtcaaaaggtatctggaacaaaatagtgttgcaaatctcaagcctccacttgacatggatgggtcaacctccagcactgctcctgtagaatcaactatttcctgtttgggtcgccaaaacttgatgaagccaaaggctacttcattcagtgatgaacatatttctcaagataataacaagagcagcggtggacaccgtaacgatgggcaacgagagatggtacaacttgaatcagcccaagaaaagaaaccagtgaagaagatgaacaaattcaatctaaaggaacttccagaatcgatggatgatgactacctttga

SEQ ID NO: 22238 - DNA, 524 bp, Oryza sativa
  Clone ID: PAT_MRT4530_27432C.1
cttgggtaaaaattttcactttattcaaacaaacagccaaaaacttttccaaattttattacaggacccacccgaagaggggggaccctttatttatccaactatataaatagggggggccccccccccaaaaaccgcaaggaccaggagcaactttggagggggggcggcagaccccaggggaaaccccccacaggggggggaaatggaaaacccccggggcccgggcccgaacttggggcccgccaacaaagccaggataaaacgggccttgggggaggaaaaaccggcccatggggcaaaaaaccgggcaaagatattggggggccataaaccccatttggggacaaaattgggggcgcataacctggaaagtggtcaattggaacccgggggaccggccccaagggaggcccaacgggcgggacgggggccccacaaacccattggacgggttcatgaacgggggcaaaaacgggggggggggggattgcccaaaggggcaagcataaaactgggcccag

SEQ ID NO: 22239 - DNA, 338 bp, Oryza sativa
  Clone ID: PAT_MRT4530_27433C.1
atgtgttgggttttttttttttttttcttttttttttttttcaaaccaccataattaaaatcgacaccattaaatagcttaaacacttcttctaccattaaataatttatccccctttagtgctcatacattaaaaatttaccattaaattcacccccttacccatgcattcaaatccatgcttgcaggaaacaatttccacaacacacacagtaagtctgaatttaataaaatccatcttttttttttttctccccccaattcattaacattttatacatgcatactccccaaaaaaaaaaagaagaaactggaagggaactttttccattgcccaa

SEQ ID NO: 22240 - DNA, 3717 bp, Oryza sativa
  Clone ID: PAT_MRT4530_27434C.1
ccacgcgtccgggtgtatggaggtttcctgggaggtggacgcggcggggccgccgtggaggccgagtgagtccacggcgttccttccgttcgctgctgctgcggcggccggggaccgggcgggggcgtcgttgtccggtcgacgcaatgggcttgccgcccgctcaagcaacctcagctccgtcaggaagaggccttttgttgcaagattaaccacagacattgtccaaactttcggaaaatgcaatcctgagtttaagtactcagattcactgaaccccaagcgctttctcaccaacccttcagttccagctcacaatgatggccttgataatgcaaattctgacctcatcttgtatgtcaacttggaattggttaataaaaagtcggaccggaggtacgttattaaagaaatgcttggccaaggtacgtttggacaggttgctaaatgctgggatggagaaactaacagctatgttgcagtaaaggttataaaaaatcagcctgccttttatcagcaagctatcatggaggtctcactgttgagcatgctgaatgagaaatatgatcctgatgatcaacaccacattgtccggatgctggatttttttctctaccaaaatcatttgtgtatagcatttgaaatgcttggccataacctttatgagctgctaaaaaggaatagtctatggacctcgacttcgggacgcttgtcgacgaaggggaggagcatgacaaggacggggttacggtcggggtcgcagtgcacaacgccgagccggtggcctcacccctccccccgctgctcttggagatgtcgtccgccaccgcctgcatcaggccccgttaaccctgccagcagactcgcgccatatgcaaagccatgctattacaaactcaacctctttatccatgaatcagagagtcgaccccctgtgccatgcatcaactcttacagagactagtgcctctacaggccatgtgacctatgatggttaccataatgcatactattcctcagctgaattttcaaaggtcgccatggacaaccatttcagcggtataaccatatgactgcgagctacctacgtccaatggggaatcatcacaatggtcagcctgtatggcctaattatggcatggcagaacctccacctgctactatggctgacggaatgccttggggaggaaggcctggtcactcttttacagcaggcggactgccgtcttcctttgcaggaaaggattttgcgaagtgattttctagtatggatctggaggaatgccattcaattgggtgcattagtagtgtgtatttgcaactcttggttgcattgctgacgggctgttgattttgcagtttgttgcattcctctaattgatcccttcgcaagtgctccggctcatagaacatgtatggcatgggtctgtaattgaagcattattggttggtaaaatcttaaaatattcggataatttgaaatacatcaagcggcagcttgcgttctgctaattgaatccagcggggaatggaaggagagcaaccccttttacccgaaaattcagagtaggtaatacagatctccggaagtacttcttggttacccatataccacggccattgatatgtggtcatttggctgtatagtcgctgaactatatataggattgcctttatttcctggagcgtcagaatacgatgtgctatgccgtatgattgagattctcggtggacaaccaccagatgatctgctacgggaggctaggtttgcaactgaaatatgtccgaactttctctagacagatattggatgcattggttgtcatgaaggacgctggcattattcattgtgatctaaaaccggaaaatattctcataactccaaatgtaaaaacagcagctggggttaaagtaattgattttggatcagcatgcttggaggtggacaaccaccagatgatctgctacgggaggctaaaaatactgggagattttttaagcaagttggaagtatttatcctgagggagtccaaaaaaccaaaagtaggaagatggtatttccctcgtggaaggcttgacaaactcatatatacatacccttggaagaattcgtccgtgaatggggaaaacttgccagagacagaaaagacagatcgcttagcactggttgatttcttgagagggcttgttgagtttgatcctaataagcggtggtcaccattgcaggcttcatatcatcccttcataactggtgaagcgtttactggtccatatgagcctatccaggagactccaagaattcctgttggtcgtgttgcagcagttgatcataatcctggaggaggtcactggttagctgctggtctttcccctcaggttggaagcattaacagaggcctaccatttaataacgcttttgcaccaaagattcccttttcatatggaagcagctgtggcagcttcggtagccatggtagctttaatgacaatgtaggtcttgcaagcagctatggaagctatgatgtcaacagtgtgaacatgtatcattcaccactaggcccttctggattcaatttacattcacaagccggaggaacatttttgggatctagtccagatattagacgacgatcttatctctatcatggtggtggcattcgattaagccctgggtgtccagggcctatgtctcttggggcaagtccatcacaatttactccaccaaattctcagatgcaaatcccaagtactgctacaggaaagtatggttccacttctcctgcaaggagcagtcatggctcattgggaaaagctgctgctgtaggccaatacaatagaagaagaaatcttggtcacccacctatatcaatgccgcctcatgaatacacatctcagctgactcagggacaccatggggatggcaccattagtaatcactttgatggctatgctcgtggacattctggttacccacaaagtgcactccctaatcctggtcatttcagttggagaccacatacatgcgctggcagtggtttatcaacagacacttcgaaccatgggtcctttccaccatctcgatacggtggttttcctcctacgcactcatccaatgtgtcagcagatacactggcttccacctcatcaataccggatccagctgattgggatccaaactatagcgaagagtcacttctgcaagaggacacttcactatcagatgcgttgagcgatctccacctgaaggatgcaagtggtcaaacaaaccaatccagcagattggcccatatccaaagccatgctattgcaaactcaaactctttatccatgaatcaaagaggtgaccgcctgttccatgcatcaactcttacagagagtagtgcctctacaggccatgtgacctatgatggttaccataatgcaaactattctcagctgaattttcaaagtcgccatggacaaccatttcagcggaggaaggcctggtcactcttttacagcaggcggactgccgtcttcctttgcaggaaaggattttggaaggattttctagtatggatctggaggaatgccattcaattggttgcattagtagtttgtatttgcaactcttggttgcattgcttacgggctgttgattttgcagtttgttgcattcctctaattgatcccttcgcaatgctccggctcatagaactgtatggtatgggtctgtaa

SEQ ID NO: 22241 - DNA, 105 bp, Oryza sativa
  Clone ID: PAT_MRT4530_27435C.1
atggagaagatcaatggcgtaggtaaccttgttggagatcgccaggagtggaggttgggaatgacttgcctcactggtgaagcaagcgaaaagtatgccgtttga

SEQ ID NO: 22242 - DNA, 664 bp, Oryza sativa
  Clone ID: PAT_MRT4530_27436C.1
cgttattaaagaaatgcttggccaggtacgtttggacaggttgctaaatgctgggatggagaaactaacagctatgttgcagtaaaggttataaaaaatcagcctgccttttatcagcaagctatcatggaggtctcactgttgagcatgctgaatgagaaatatgatcctgatgatcaacaccacattgtccggatgctggatttttttctctaccaaaatcatttgtgtatagcatttgaaatgcttggccataacctgtaagattgtcgtacttctcttcgctaatctattatataccatgtaactaattcatgtatcacttaaactcccacatctagttatgagctgctaaaaaggaatagtctaagaggtttgcaactgaaatatgtccgaactttctctagacaggtaaggttttattttcatatggtgcttgaatttttgaattttaaatgcattgattaccatattatctatgtctaattctttattggtcagatattggatgcattgggttgtcatgaaggacgctggcattattcatttgtgatctaaaaccggaaaatattctcataactccaaatgtaaaaacagcagctggggttaaagtaattgattttggatcagcatgcttgggagggtaaaaccatttactcgtata

SEQ ID NO: 22243 - DNA, 703 bp, Oryza sativa
  Clone ID: PAT_MRT4530_27437C.1
gggttccatattgttatatttagtattattaactgatcattgttcatgcttttctcaaagaggtgaccgccttgttccatgcatcaactcttacagagagtagtgcctctacaggccatgtgacctatgatggttaccataatgcaaactattctcagctgaattttcaaagtcgccatggacaaccatttcagcggtataaccatatgactgcgagctacctacgtccaatggggaatcatcacaatggtcagcctgtatggcctaattatggcatggcagaacctccacctgctactatggctgacggaatgccttggggaggaaggcctggtcactcttttacagcaggcggactgccgtcttcctttgcaggaaaggattttggaaggattttctagtatggatctggaggaatgccattcaattggttgcattagtagtttgtatttgcaactcttggttgcattgcttacgggctgttgattttgcagtttgttgcattcctctaattgatcccttcgcaatgctccggctcatagaactgtatggtatgggtctgtaattgtagcattctctgttggtttcttcttttcgtttttggtttatttgttatacatcgagcggaggcttctgcctgctgcaaaaacccagcgggaaaaagaagttgagcagcccctactttcagaccccccaaaaccag

SEQ ID NO: 22244 - DNA, 214 bp, Oryza sativa
  Clone ID: PAT_MRT4530_27438C.1
aagatgctataattggtaataatttgattagctcctggtttggaatggtatattcctggtttggagattgatctgtacagccgggtatggttgttcagaatggttgggcctatgcaacagggtatgttgtatagcgttggtttaatattgtttaattattacttaactgttttattaaaattctcaaatgtttgctaaatgctgcttttgcaaa

SEQ ID NO: 22245 - DNA, 279 bp, Oryza sativa
  Clone ID: PAT_MRT4530_27439C.1
atgtctagtggtttggttggggggaaagagatatcaggtgacagcgagaaaagtttcgtggggggaggcaagtggtcggcgtgctgcatgtgccgccgcggccgcgcgcccgtgcgcgacgtcgctttggccttcgccgtggtccgtgagccggttaaagcggaggaggaggacgagaccgacaggggcccgtcgatgggtgagatcaccaaggtctgcaagcgacttggaatggcgaagccagaatttagagatggggggtgccatttacgagacgtg

SEQ ID NO: 22246 - DNA, 1403 bp, Oryza sativa
  unsure (1)..(1403): unsure at all n locations
  Clone ID: PAT_MRT4530_2743C.1
cgtaatacgnactcactattagggncganatnntgggtacccactagttggaccggccgggaagccaaacaccaagattcagaaacccaccgtttctctctcaaaaccgcgggaatcaatcaatcgccgttcgcgtcgcgccacgagatattttcccccaagaaaagttggagtgagggatgagtgctatggcgatgtcgtcgctgaacccgaacgcggcgccgttcatcccggcggcgttcaggagggtggaggacttctcgccggagtggtgggagctcgtcaagaccacggcgtggttccgcgaccactggttcaggcagcaaccagatgtacgaggacgctgcggcggaggaggaccaccacccgccaggttgttcgacgacgacctcgccgcgctcctgcccgacgactcgctcgaactcctcgacatgttcgacaccgacggcctcttctcacccccgacccccccggccaccacaaccgacgacctccccccctcgacgccggcgtgctcgggccgccaccatcaaacaccagtacggtcggcccagatggtgagccaggaggaatcccgggacagtacttctccactgcgagcgccttagatgttgctcgcgtacctgacgactctgccctcgccccatggaagcggggggcaggttggattgaacttggcgcgacgacgccggagttgccatggggggggaccttgccccagatgcagcggtagttcgtgccgccgctcttggtcttggctgtacacgtagccatcccttcccggttcgacgacgacctcgccgcgctcctgcccgacgactcgctcgacctcctcgacatggtcgacaccgacgacctcttctacacccccgacccccccgtccaccacaagccgacgacgactcccaccctcgacgccgacgtgctcagggcgctcagcctcaactcgccgaggttgggcggcgccgggatggtgaggcacgccgagaagccggcccagttcgtcgccgccaagggcggcgccgcccgccacgtcatccaccagcctcgctagagcgccatgggtgagtggtgatgctgctgctgctgctgtctagtgtataaccttggagttttcagagtttagtctctctgcttttcttcactgtgtataaaaactgaaaaaaaaagggggaaaaattgcagctttctggtgctgcatcccttgtagtagtaaagcagcttctgttcagtttcaggtgcatcatctaaaatgtgttagaaaaaaaaaagcaaaaatagagagtgatgtagaatcatgtgtactaatgattctactaccgcccttgttaatgttggatatattaagatggcaagcagtctaatgtttagaatctttcaacttctgattaaaaaaaaaccaa

SEQ ID NO: 22247 - DNA, 645 bp, Oryza sativa
  Clone ID: PAT_MRT4530_27440C.1
atgtcttctgccaatccctcaagcgctccggtggtcgagttccccgagggaacatgtggccttcctgatgatgtggttacaaaagttcctgttttgtggtccaagttgtgggcctacctccaactggcagcatctggtgtggctctagtggacaagaagcaacttcctttgggcaagtacctcctggtggctctgtatcaaactcttggttctgcatcagctaagactgttgtcgataccgtcatcggcactggtggtccctggtggcttttccaagtttgtttgaatttgcataccatcaaggtatcaaaaaggtcagccctgactgaagcaagatttccttctgccgacgatccaactgaagatgatgacggaaataaagtttccaccagtcgatgcatgtcctttggagaggcggcatcttatgctggatcacagttgtcggctgagcttttttctgatcggttcggtaatttttgtgatgggtatccaagggactccagaatatggtttgcttatgatcattccgaaaattttgagcttccggctaattttagatttgacaaaatcaatcatgaagttcttacagcagccatttccccctgcatactccctgtcggcatccatcaaggcaggaatatttag

SEQ ID NO: 22248 - DNA, 182 bp, Oryza sativa
  unsure (1)..(182): unsure at all n locations
  Clone ID: PAT_MRT4530_27441C.1
gagaaancaaagngggccngacgnncactccagaggangancgcgancggggnnnancngaggaagacannggnggacggaagcagncancnngaggaagaagcaganaccccgacgncgcacagcancgcgangggaaggcgngngcnggaagccnggaacaaagccnanngaaaagagca

SEQ ID NO: 22249 - DNA, 303 bp, Oryza sativa
  Clone ID: PAT_MRT4530_27442C.1
atgtccaggccgcacgcctcagcgtgctctctgggtctgaagggcggagcggagcgccttccgactccgaggtttcgggcctgcccggcaggtgttcgacgaaatgtcgcacttccgcccgtgagcgttcggcgacattcctcgcctctgggaggctacactggagtctactatgggagccatggtcgtcggagcacggcgatgtgcccatgcctcgcgtctgtgcctggtgcacacgctcggatttccagctgtgttgcccatcgtgatgctgatatactccctccgtttcaaaatgtttaa

SEQ ID NO: 22250 - DNA, 567 bp, Oryza sativa
  Clone ID: PAT_MRT4530_27443C.1
gtgttgttgttgtggaggtaaacaagaggaggatagtgaagactgaagagaggagtagtactagtgaatagtgagtggtgagaggggagagagatggaagtggaggctcaccatggcttcctaccaccagcagcagggaggcagcacctttatggccatccccactatcaactttcaggagatgatgagtggtgggagtacatcccttgccccttctgctacattgaggtggaggttcatttcctttgtgaccatctccaggaggagcattgctttgacatgaaaaatgctattggtgatactgttgggatcagttcctctatgatgatgatctgatcgaatgactttcctccaggtgtgtccaatctgcgccgacaaccttgacaaggacactgatgaacatttcagggttcagcactcacatctactcaagaggaggaagtcttcttctttttcttgcaagccaagctcagggggggctgacaagggatcatatgaagaggactcctactttgaagcaccctgacactgggtgggcaggccggatgctgattactgtactgaccc

SEQ ID NO: 22251 - DNA, 558 bp, Oryza sativa
  Clone ID: PAT_MRT4530_27444C.1
atggcagtggtcgagctgttgccactgagacattgtcttcgagccgttgccgccgacatgctgccatcgcccgaggtcgatctgaagccacctctctcgatccgcgcaaccaatggcatggcaccgccagcaacttggcagccaggggagggggatgtgaggggaccgagcggaggtgaggatgtcgtcggctttatcaggctcccaccggatcccccaaggtcgccagccgagagggagctgagtccgagccagatatgcctcgagctccaatccggcgggaggataggagctcgacgacggttgggtgtggcgtcgacaggagctaggcggcggttgggtgcagcggcgacaggagctcgggcacaattgggtgtggcggcgattaggtgtgaaggtggtgaagcggcggcaccccaaccccgacggatggatctggctggcccgtcgctgctctgcccggtgccgtcgccgcttgggccactgcgcccagcgccttggcttcatctaccggtggggaaaggaggagaggagagagaggggggagatgaagagtga

SEQ ID NO: 22252 - DNA, 955 bp, Oryza sativa
  Clone ID: PAT_MRT4530_27445C.1
gcacgaggctcctctctttgcatgtgttgttgttgtggaggtaaacaagaggaggatagtgaagactgaagagaggagtagtactagtgaatagtgagtggtgagaggggagagagatggaagtggaggctcaccatggcttcctaccaccagcagcagggaggcagcacctttatggccatccccactatcaactttacattgaggtggaggttcatttcagatgatgagtggtgggagtacatcccttgccccttctgctacattgaggtggaggttcatttcctttgtgaccatctccaggaggagcattgctttgacatgaaaaatgctgtgtgtccaatctgcgccgacaaccttgacaaggacactgatgaacatttcagggttcagcactcacatctactcaagaggaggaagtcttcttctttttcttgcaagccaagctcagcagcagctgacaagggatcatatgaagaggactcctactttgaagcaccctcacactgcatgggcaggccggctcctgattcctctcctgaccctcttctctcccagttcatctgctgcagcctcgctcctccggtcgattcgccgcgccgcagcgaagccgatgccgagggccatggttcatcttcctcagatgatcaaaaaaggagagagcagggtgtgatggatgatgcatcaaaggaggagcttgaggagaggttgcagagaatcgagttcgtgaagcagatgctgatgacaacaattgcttattagaagactgtttctctagggttcatttcggcagtttgggtaggcttttcaggatttgggacaagtgcagaatgatgtgccatttaatttatgctgaccttcggcacatgtatacctacaatgtttggatatctatataatcatcaatcgtaatcctatcaatttaaccttaaaaaaaaaaaaaaaaaaccaagtt

SEQ ID NO: 22253 - DNA, 1131 bp, Oryza sativa
  Clone ID: PAT_MRT4530_27446C.1
aggtctgagtgcaccatatgaaagggcatcacatattcatgaaagacctgttgtgaatcggttgtgggctgctggatgccatccctttggaccattctcaaactcctctaagatcagtcaaatccttcaggatgttgcactgagaactacaatttatgctcaagttgatgctgctcttcacaaaataagggacacatcggagtttgttcaatcctttgcatcagagcatcttaagacgccattaggagaacctgttaaaggtaaacaaaacaagtccaacacagagttatgggtagagaaattctataagaaggtaacaactatgccagaacctttccctcatgagcttgttgaacgtttggaagaatacctggataggcttgaaggacaacttgtggatttatcctccttgctctatgaccatcgtctagttgatgcttatcaaaacagttctgatatcctgcagagcactatatttacacagcagtacgtagaacgtgtattgtctgcggaaagagacaagatgaagtgttgcactattgaatataatcaccccaagcagtcatcacaggcgtttgtttacggagggatccttctggctggatttcttgtctactctttggttattttcttctcttcaccagtccgctaattcacatgcgtccagatgaagatgaccctgaattctctctagtatgacaagatggctaagcatgatagaatttgaaacgattgctgaaaagctgtcactgcgatatgcaaggtgtgcccggcctcataaggatgtcaatctgcattcagccatgactagacaatctgctgtatacgttgggggctttctcggcacagttttgtctatgagaatgtttgctctttagtacctacaggcaaccccatagttagatgattcattcggccatcataaatggccgatataatccagaggggagttcagataaggtctaatgcaggccatttacggttttcccctttgccggtatgttacgaaaaacctggtatgttaataaaacccataatcctcatgatgcaaacaattgttttcctttctctaacaatgatttcactctagtgttctacgctcctttgtggtttatttgattcactgcaact

SEQ ID NO: 22254 - DNA, 795 bp, Oryza sativa
  Clone ID: PAT_MRT4530_27447C.1
ctgcaggaatcggcacgtggatccacataagaacactcgcgccggccgggacttgtgctcggggaagttcgatcgatccctcaccatggcgtcggagaaggaggcggcgctcgccgccgtgcccaacgacaaccccaccatatttgacaagatcatcaagaaggaaataccttccactgtggtatttgacgatgagaaggttctggctttcagagacataaatcctcaagctccgacccacattgtgatcattcccaaagtgaaggatggattaactggcctatcaaaggcagaagagaggcatgtagaaatactcggttacctcctctatgttgccaaagttgttgcaaagcaggagggacttgaagatggctaccgtattgtcatcaatgatggccccagtggatgccaatctgtttaccacatacatgtacatctcctcggaggcaggcagatgaactggccgccgggctaacgagtgcccgtctgttgaactgccttcatggcaaggatgtcacactgcctctccgttgaataattcctgtaactggcataacaattggtgccctgaacttatgctatatgtttgtggatgttaccaggacaggacatgaccatcctgctatgatttatggacaagatacattgcgttctcactagttaaaaaaaaaatttttttccatgttgaaaacatgctgttgcctgcattgcttctgcatgatgcgtctgtatttcaagagcagtgcagtgaaagatgatcttcagatggagttgataaaaaaaaaaaaaaaaaaa

SEQ ID NO: 22255 - DNA, 1400 bp, Oryza sativa
  unsure (1)..(1400): unsure at all n locations
  Clone ID: PAT_MRT4530_27448C.1
ccggccgggataacgcgtcgccttcccttcgccatgtccgtctccgccgccgtcgccgccgcctccacctcccgtaccctcgtcctcgcccgccaccgctcgccgccggcgtctagggtcgcggcgacaagccgcgggcgtccgttctcctccggcccccatcccctcgccgtctctcccgccacccgcgcccccgccatggccaccgacggcgccgccgccgccgccgcggcagggtcgaagaagaagaaggaggtgctcatcttcgacgccgaggaggacctcgcggtgtccctggcgaagtacacggcggagctgtccgcgaagctcgccgccgagaggggcgccttcaccgtcgtgctctccggcggatccctcatcaagaacatcaggaagctcgcggagccaccgtacctggattcggtggattggagcaagtggcatgtgttctgggtggacgagagggtggtgcccaaggaccatgaggatagcaactacaagctcgccttggatgggtttctctccaaggtcccaattcctactggccaagtttatgctataaatgatgccttgtcagctgagggagcagcggatgactatgaaacttgcttgaagcaacttgtcaagaatggtgtgattgcaatgtcgcaatcgactgggtttcctaggtttgatgtcatgctcctgggaatgggccctgatggccatattgcatctcttttcccaggccaccctcttgttaatgaaaacaagaagtgggtcacctacatcaaggattctccaaatccaccacctgagaatatttcgtttacattttggggaatctcctttggttcgtatgcaagccagcagggtcaatgttccagaacaaatgaggtccatgcctggatattgtttaagctttcatcttaaataaagatccaggggctaatcccagcctggatactgcttaagctttcaatccaaaactgggttgtaatgcatcttctgtctaaaaaaggatccaggtgactgcatagttgcattcctcttttatgcatcacttgtaaggaaaacatgagcatgtatgttgtatgttgttcaaagtgatgtatttgagacgctcctggtttcggcttagtaaataacctttcctggccaaatgaaaaaatctaaaaaggaaaacttgtgctcttttcgtagtattatgcagcataagtgtctgagactccagtttcagtcaattgattaccnctttatggggtatttgtcatgcgcttggaaatatctagatcagtacctgtacaatttgatgttacctatttgtttcctttgtacaaagacacttttgttcagcatttgctagtttttttttttgcggttttctctgttgctttaaaaaaaaaaaaaaaaaaaaaaaa

SEQ ID NO: 22256 - DNA, 219 bp, Oryza sativa
  Clone ID: PAT_MRT4530_27449C.1
atgcacatggttggtgaagattccatatggcatacgatggaggtattgtgtgcatttggaatgcggagtcgaatttggaaggagtccgaatttggtataattggttatgtaaagtttgtttcttatacgagaaggtttcctatggggattagaacttctagtatgagtttggttcgtggctttaggctgcctacctcttgtataaatagagagggagcg

SEQ ID NO: 22257 - DNA, 251 bp, Oryza sativa
  Clone ID: PAT_MRT4530_2744C.1
atactgtatgttattattgagtttcatgcacgaaccatttaaactcaaaggcttaagctaaaaatctaatgcggtcaattcaggacatatacattgttgctaaaatcaacgatcatatttttatcaccctgcacatatccaaactttgacaacgtttaaaaattttaaatgaaacattaaaaaaataaccaaaaaaaacctttttatcctatatctttctatccttacctcttaaccttcacaaactttat

SEQ ID NO: 22258 - DNA, 1139 bp, Oryza sativa
  Clone ID: PAT_MRT4530_27450C.1
atggccaccgacggcgccgccgccgccgccgcggcagggtcgaagaagaagaaggaggtgctcatcttcgacgccgaggaggacctcgcggtgtccctggcgaagtacacggcggagctgtccgcgaagctcgccgccgagaggggcgccttcaccgtcgtgctctccggcggatccctcatcaagaacatcaggaagctcgcggagccaccgtacctggattcggtggattggagcaagtggcatgtgttctgggtggacgagagggtggtgcccaaggaccatgaggatagcaactacaagctcgccttggatgggtttctctccaagtgtactagatctgtaacaaaaacacttgtgcttctcatccagtttacagaacctctactgctctctgtcccaattcctactggccaagtttatgctataaatgatgccttgtcagctgagggagcagcggatgactatgaaacttgcttgaagcaacttgtcaagaatggtgtgattgcaatgtcgcaatcgactgggtttcctaggtttgatgtcatgctcctgggaatgggccctgatggccatattgcatctcttttcccaggccaccctcttgttaatgaaaacaagaagtgggtcacctacatcaaggattctccaaagccaccacctgagagaattacgtttacatttcctgtgatcaactcatctgcgtatgtcgcaatggtggtcactggagctgggaaagctggtgcagtgcagaaagcactttcagataagcagacttcgtctgatttgctgcctgtagaaatggctgtacttcaagatggggaattcacttggttcactgacaagccagcagtgtcaatgttacagaacaaatgaggtccatgcctggatattgtttaagctttcatcttaaataaagatccaggggctaatcccagcctggatactgcttaagctttcaatccaaagctgggttgtaatgatcttctgtctaaaaaaggatccaggtgactgcatagttgcattcctcttttatgcatcacttgtaaggaaaacatgagcatgtatgttgtatgttgttcagagtgatgtatctgagacactcctggtttcgacttagtaaataacctttcctggcc

SEQ ID NO: 22259 - DNA, 471 bp, Oryza sativa
  Clone ID: PAT_MRT4530_27451C.1
atgacgtcagcggtgacgcaacggcgaaggggcggacgaggacggcgacgcgacggtgaccacgacggcggtcttcccgagcgacggcgacaactggagcgacagcggcgcacggctggagcagcggcgacgacagcggcgcgaggttacactgtgctagggcgctacggacgacgagagacgaaggcaagggtggcgacgggtagcggcggacttggggatccttttatagggacaaggaggcggcggcgaaggcccacggcgaccggcgacgagaaggaaagattagggttcggaggagagagatcgatccgaatcgaactcgaatccacggattttcaaatgaaattagctgacgattccataagagaaaagatagagtggatcgcgaggatcatttcccctctatcgattcggccggagatggaaaggagcgacggaatttggaaagagacggcggcacggctcggc

SEQ ID NO: 22260 - DNA, 7782 bp, Oryza sativa
  unsure (1)..(7782): unsure at all n locations
  Clone ID: PAT_MRT4530_27452C.1
ttttctctctctctcccgtttccagatcgccaaaaaaagattccgcgtagcggcgagaggggagggggcgcgcgtgcccagatctgcggggtctcgccggcggagatggcgtgcatcaagagcgcgcagagggcggcgctgacggcgctggcgccggaggcgccctacctcgccgccggcaccatgagcggcgccgtcgacatgctcttctccgcgtcggccaacatcgagatcttccgcctcgacttccagtccgactcgcccgacctccccctcctcgcctccgccccttcccccgaccgcttcaaccgcctctcctggtcccgccccggcgccgctgacggcgactccttctccctcggcctcctcgccggtggcctcagcgacggctccgtcgccgtgtggaatccgctgagcatgatcaactccgaggggaaagcggaggatgccttggttgcgaggctcgagaagcacaccgggccggtttgcggactggagtttagcgagctcacaccgaatcggctcgcctcaggggctgaacagggggagctttgcatctgggatctcaagaacccctccgagccagtcgtgtttccgccactcaagagtgttggctccagtgctcaagctgaaatatcttatttaacctggaacccgaagtttcagcatattctagcaaccgcttccagtaatgggatgacagttgtttgggatttaagaaaccaaaaaccgttgactagcttttcagattcaaacagaacgaaatgctctgttcttcaatggaaccctgacatgtccacccagctaattgttgcatcagatgatgataactctccatctttgagagtttgggatgtgaggaaaaccatttcaccagtaagagaatttgtgggacactcaaaaggtgtaattgctatgtcgtggtgcccctatgatagttcatacttgcttacctgttctaaagataatagaacaatatgctgggatactgttagtggagagattatgagtgagctaccagcaagctcaaacggtaacttcgacattcactggtatcgaaaaataccaggtgttgttgcagcatcctcatttgatgtgaaaatcggcatatacaacttagagttctctggcctttatgcagctggtgatagtgctattggtgccccagcacgcccaagagctccagctccaaaatggttgaaatgccccactggcgcatctttcggctttgggggcaaacttgtttctttccaccaagcagcgcccacccaaggtgcacaagtgactacttcagaggcaagtctactctgccacttccctgttgcatgcgatacttcatgtttctctgtgttaagatctgatgaggagagagaaacatggggcttcctaagggtaatgtttgaggatggggatgctgccaggacaaagctgcttgctcatcttggctttaaccctcctcaagaacagacttctagttcaacagatgaactgaacagaacattggcagatactcttaaccttgatcatggcgcgccaactgatacatcagattctcaatttatggttgataatggggaagattttttcaacaatcctcaaccttcggaggctagtttggcagaagaatcaatttctacaaatggtcaacagatcgagcaggaaatgcctgtaaatgttgaaccatcagatctatcagttgacaaaagtattcaacatgcactggtagttggtgattataaaggagcagtcaatctgtgccttgctgccaatcgaatggctgatgctctggttattgcccatgctggtggttctgctctatgggaaagcacaagaaaccagtatcttaagaatactgtatcaccctatctaaaggttgtttctgctatggttggcaatgatttgatgagttttgtgagtacatggccattgaatgcttggaaggaaacacttgcgctactgtgcacatttgccaggaaagaggaatggaatgttctatgcgatacccttgcatctagactgttgggagttggagatacactagctgcgactctctgttatatttgtgctggaaatatcgacaaagctgtggaaatatggtctcgcgacttgaagtctgaagatggtgggaagacttatgttgatcttctccaggatttgatggagaagaccattactcttgcccttgctacagggcataagagctttagcgcgtcactgtctaagcttgtggaaaactatgcagaacttttggccagtcaaggccttcttaaaactgcaatggaatacttaaaattgttgggatcagatgaacattcacacgagctggcaatattgagagaccggattgcattttctacagaagacctattctttccagagaatcatgctgccagtacttcagttcatgcgggcagtattaacagttccgcgtaccctacaattcaaccgagctatagcaccccagacccttctcagaacctttaccaggggacttcacaatatgctgtgccaagtaaccagtatcaagattaccagcaacaatctaatacagcatatggaacatacaacagtacatattctcaacaaccaacccagatgtttgttccatcaaacaccactccagtgatctcccagccaaatgcaactccagcaccagttccacaacaaccagtgaaggcatttactcctaccaacttgccaggtctaaaaaatcctgagcaataccagcaaccaactttgggctcccagctttatgcgggtgctaatccaccatatacttctggacaatcgactccatatcaaggtgtacctcccaccacataccatcagcctagaccacctacacaattccaaacagttcccacagcacctccagctgtttctagtgccactgtaccaggaacgaccccaagtcagatgttccctggtccagttgctaataacccgacttccaggtttatgccatcaaacaatccaggttttgttcaaaggccaggtttgagtcctgtacagccctcaagtccaacacaggcacaaggacaaccgcagcctgttgttgcacctcctgcacctcccgcaactgtgcagacagctgacacatcgaaggtgtctgctgagctgaaaccagttattgctacattgactagactatttgatgaaacatctaaagctatgggtggatcacaagttaaaaaacgtgaaatcgaagacaactcaagaaagatcggaacactatttgcaaaactcaattctggggatatatctccaaacgtttcatcaaaactcattcagctttgcagtgcacttgatagcggtgattttgccactgcgatgcaccttcaggtacttctgacaacgagcgactgggacgagtgcaacttctggcttgccgcattgaagcgtatgatcaagacgaggcagaattgcagggggcgcgcgtgccccgcgctgcgcggcctcgccggcggacacgccccgcttcgactgcgcgcggtcccccccgcccacggcgctggcgccggtcgcgccctaccgcgccgccggctccgcgagcgccgccggcgacttcctcacggggaaacttaccaggtccagacatagcaaggattgacagactgagagctctttcttgattctatgggtggtggtgcatggccgttcttagttggtggagcgatttgcctggtcccgccccggcgccgctgacggcgactccttctccctcggcctcctcgccggtggcctcagcgacggctccgtcgccgtgtggaatccgctgagcatgatcaactccgaggggaaagcggaggatgccttggttgcgaggctcgagaagcacaccgggccggtttgcggactggagtttagcgagctcacaccgaatcggctcgcctcaggggctgaacagggggagctttgcatctgggatctcaagaacccctccgagccagtcgtgtttccgccactcaagagtgttggctccagtgctcaagctgaaatatcttatttaacctggaacccgaagtttcagcatattctagcaaccgcttccagtaatgggatgacagttgtttgggatttaagaaaccaaaaaccgttgactagcttttcagattcaaacagaacgaaatgctctgttcttcaatggaaccctgacatgtccacccagctaattgttgcatcagatgatgataactctccatctttgagagtttgggatgtgaggaaaaccatttcaccagtaagagaatttgtgggacactcaaaaggtgtaattgctatgtcgtggtgcccctatgatagttcatacttgcttacctgttctaaagataatagaacaatatgctgggatactgttagtggagagattatgagtgagctaccagcaagctcaaacggtaacttcgacattcactggtatcgaaaaataccaggtgttgttgcagcatcctcatttgatgtgaaaatcggcatatacaacttagagttctctggcctttatgcagctggtgatagtgctattggtgccccagcacgcccaagagctccagctccaaaatggttgaaatgccccactggcgcatctttcggctttgggggcaaacttgtttctttccaccaagcagcgcccacccaaggtgcacaagtgactacttcagaggtgcatgtacataatttggtgattgagcaaagtctggtaagccggtcgactgaatttgaagctgctatacagaatggggacaaaagttcactgcgtgctctgtgcgataaaaaagcacaagaatctctatctgatgaggagagagaaacatggggcttcctaagggtaatgtttgaggatggggatgctgccaggacaaagctgcttgctcatcttggctttaaccctcctcaagaacagacttctagttcaacagatgaactgaacagaacattggcagatactcttaaccttgatcatggcgcgccaactgatacatcagattctcaatttatggttgataatggggaagattttttcaacaatcctcaaccttcggaggctagtttggcagaagaatcaatttctacaaatggtcaacagatcgagcaggaaatgcctgtaaatgttgaaccatcagatctatcagttgacaaaagtattcaacatgcactggtagttggtgattataaaggagcagtcaatctgtgccttgctgccaatcgaatggctgatgctctggttattgcccatgctggtggttctgctctatgggaaagcacaagaaaccagtatcttaagaatactgtatcaccctatctaaaggttgtttctgctatggttggcaatgatttgatgagttttgtgagtacatggccattgaatgcttggaaggaaacacttgcgctactgtgcacatttgccaggaaagaggaatggaatgttctatgcgatacccttgcatctagactgttgggagttggagatacactagctgcgactctctgttatatttgtgctggaaatatcgacaaagctgtggaaatatggtctcgcgacttgaagtctgaagatggtgggaagacttatgttgatcttctccaggatttgatggagaagaccattactcttgcccttgctacagggcataagagctttagcgcgtcactgtctaagcttgtggaaaactatgcagaacttttggccagtcaaggccttcttaaaactgcaatggaatacttaaaattgttgggatcagatgaacattcacacgagctggcaatattgagagaccggattgcattttctacagaagagaatcatgctgccagtacttcagttcatgcgggcagtattaacagttccgcgtaccctacaattcaaccgagctatagcaccccagacccttctcagaacctttaccaggggacttcacaatatgctgtgccaagtaaccagtatcaagattaccagcaacaatctaatacagcatatggaacatacaacagtacatattctcaacaaccaacccagatgtttgttccatcaaacaccactccagtgatctcccagccaaatgcaactccagcaccagttccacaacaaccagtgaaggcatttactcctaccaacttgccaggtctaaaaaatcctgagcaataccagcaaccaactttgggctcccagctttatgcgggtgctaatccaccatatacttctggacaatcgactccatatcaaggtgtacctcccaccacataccatcagcctagaccacctacacaattccaaacagttcccacagcacctccagctgtttctagtgccactgtaccaggaacgaccccaagtcagatgttccctggtccagttgctaataacccgacttccaggtttatgccatcaaacaatccaggttttgttcaaaggccaggtttgagtcctgtacagccctcaagtccaacacaggcacaaggacaaccgcagcctgttgttgcacctcctgcacctcccgcaactgtgcagacagctgacacatcgaaggtgtctgctgagctgaaaccagttattgctacattgactagactatttgatgaaacatctaaagctatgggtggatcacaagttaaaaaacgtgaaatcgaagacaactcaagaaagatcggaacactatttgcaaaactcaattctggggatatatctccaaacgtttcatcaaaactcattcagctttgcagtgcacttgatagcggtgattttgccactgcgatgcaccttcaggtacttctgacaacgagcgactgggacgagtgcaacttctggcttgccgcattgaagcgtatgatcaagacgaggcagaatttcagaatgtaaacgagtgccgcgttttgcagctagttctgtatacacacaccttttcgacttcttacaaaagttgttagtgttagcaacttatgagggtttgtctgcacagtagtgctatcttgcttcttgtgttccctcctgccaattatactgaagcttgtcgcttaaaagtggtctgttgtctgggcgattactttttgatagttcttcgacattcctttgtgaggatcagttcttgggtgatggtggttggatttcacgaggattacttgtaagtgggcatctagttgttatagctggcccattttgttttaccttataagttagattttacctgtttggacattggaagtactctcgataattaatacaaggatattggcttgtttattgcaaaaaaaaaaaaaaaaaaaaaaaaaaaccataaaaaaaaaaaaaaaaaaactccgagcctnnnnaaaccaannnannaaaataaaaattaaaaaaatttgtggggggggccgccgccccccctctccctttttaaagtggggtaacctccgcgcccccctctcccgtcctttatttataaacctggttggaaggagaaaaccctgtgcgccacaaccaaatataaagcgggtgggagacacctcccctttttaccctgtttggggaaaaaaaaaaaagagggggcggcgcctctgttctcctctctccaccatattgtgcccccttaggtgggggggtggatggggcccccctcgttttagcttatatttataaggcggggggagggtggggtttacctcccagttttttccttttttttttttggccctccctcccccgcctccccctcttagcctcttcaccctctttttgggagcgcagggtggggtgttccccgggaaagtttataagggggcgcccctcttgaaggcctctaatgtgta

SEQ ID NO: 22261 - DNA, 264 bp, Oryza sativa
  Clone ID: PAT_MRT4530_27453C.1
tgcggctcgtcgacgtgggtcaggcgcaaggtggccgggcggcgcgttgcgacggagagaggtagccgtgcggcggcagtgatgcgggagagcgcacggcggtggcacgacgcggtcacggaggcctttgcggcgtggtgcgcggcggccgccggcaaggccaacggccggcgatgcgggcgcggcgtggacggcgatgtggctagggagtttgtcgccggcgctgcttgtcacacaggccccttctttggcaacgtatcatga

SEQ ID NO: 22262 - DNA, 161 bp, Oryza sativa
  Clone ID: PAT_MRT4530_27454C.1
tcggcacgagggagaacgtgagcgtcttcaacctcaagctcaagctcgcccatggcgagtgcgtgcgtttccactcctcgctcacccacttctcctcctctagcataaaaggcgtgtcctctttcagcccaagcaaagccagcaggcaggtcaggcagcag

SEQ ID NO: 22263 - DNA, 355 bp, Oryza sativa
  Clone ID: PAT_MRT4530_27455C.1
aataaaaaaagaaaaataaaaaaaaaggaattaacaaaagaagaaagagacggaaaaaaaggagaagcggaagaaacaatagggaaaaaaggatagtgggtgtacacacaggcgaagaaaagaaaagccaatataaggaaaacatcagcagagtagaaagggcagaagattagacaaacaggaaaataacgcaggaaaagccgaaaggagaaggataagaaggaagccttttcaatggtaagggtagggctaagtaggaaacaatagggaaggggccagaaagtgggcaatatagagggggggcacaaacgccgggggctagtaaaacggagtaaggacaaaccggggaatgggc

SEQ ID NO: 22264 - DNA, 285 bp, Oryza sativa
  Clone ID: PAT_MRT4530_27456C.1
ttgctttttcagaataaccaagttctccgccggactgttctccatttgcttagagctgccgttccgcacgcgtgcgcgcctcaacctttatgtgaggaatggggagcaatacacgttccaggtgagaaagcaggatgtattagtgggaggcatgagcacgaactagctacttctcgtcgctgagtctgacagcattttggccggcggatgtcgcccccagccgactgtggtggccgagagtgagacggggctgctgatgccaggcaagatggctgcggatcatcc

SEQ ID NO: 22265 - DNA, 1654 bp, Oryza sativa
  Clone ID: PAT_MRT4530_27457C.1
ccggccgggaccacctgccgcattctcccccccaagatccagatcgccggtcacccccacgaactcgctcgagatccagagagagagagagaggcagtttcttggttgattttcgaggatgaagaggaagactcggaacaagataatcctgacgacgctgctggtgtcggcggcggcgatcctgatcggcgggacggtggcgctgatcctgacggcggggacatggaaggtgaagatgaaggagtcgcgcgagaagatctgcgacaaggggtgggagtgctcgggtagcaagtactgctgcaacgacaccatcaccgacttcttcaaggtgtaccagttcgagaacctcttctccaagcgcaacagccccgtcgcccacgccgtcggcttctgggactaccagtccttcatcaccgccgccgccctcttcgagcccctcggcttttgcaccaccggcggcaagcagatgcagatgatggagctctgcgccttcctcggccatgtcggctccaagacctcatgtggatttggtgtggcgaccggcgggccgacggcgtgggggctctgctacaaccacgagatgagccctaaggaggattactgcgacaagacgaacctgcagtatccctgcgtcgagggcgccgagtactacggccgcggcgccatccccgtcttctggaactacaactatggcgcggcgggcgacgggatacacgaggacctgctccaccacccggagtacctggagcagaacgcgacgatggcgttcatggcggcgatgtggcggtggatgacgccgatgaagaagaagcagccgtcggcgcacgacgtgttcgtgggcaactggaagcccaccaagaacgacacgctcgccaagcgcctccccgggttcggcgccaccatgaacgtgctctacggcgaccagatctgcggcaagggctacatcgacgacatgaacgtcatcatctcgcactaccagtactacctcgacctcatgggcgtcggccgcgagcactccggcgacaaccgcgactgcgccgagcaggccgccttcaacccctcctacaagaagcccgacgatcagcagcaacaaagctagaacagatcacccccaattccccccaattccacggtaaagaattcacccaatgtgttgttgtatacatcttcttgctactgcaatcgctattgccaatgcaaaccaaccattgccattgctgttgcctcgtgagctatacagattaacggattcttcatcagtgtgaggagctgtggtttgcattggtgtatttctgagtagcggattttgagggaagtgtcaactgtgtgtgtgatgcctatgggatttgggaaatttgttgtagcccttgttgtaccatagtgtacattttcattccatttgatttttgtcacatatacatgtttaaagaggaggattcaggataaacataccatgattttgatgaaaaaaaaaaaaaaaaattattgaggtgtgtgtagctgtttagcatgcatcccatagttttcatgcatcagtgcgtgataatgctgtgtgtcataatttggccggggctagttctctcagtcctcagttacttctcgctattgatctttcagctttgatcaaaaaaaaaaaaaaaaaaaaaaaaaaaaa

SEQ ID NO: 22266 - DNA, 297 bp, Oryza sativa
  Clone ID: PAT_MRT4530_27458C.1
atgaggatgaggggctggctgatccgcaatcagccgcgcagggccgcacctgcgtgcgaacaaggagaggagaggcgccgaggaagagcggcgcggacggcggcgtccacggtcacttcggcgccagggaagagcggcgcgggcggtgatgtccatggttacggcgacgttggggaagagcggccgcgtcggcgaccgggaatagcggcgcgggcggcggcgtccacggccgcgccggcgatggggaagagcggcgcgacgcagcggtgtgggcggcggcgtatgcggtggcgttag

SEQ ID NO: 22267 - DNA, 672 bp, Oryza sativa
  Clone ID: PAT_MRT4530_27459C.1
gctgcaggtggctctgttgcaattgatgcacttgatttggtgctggacctcaaactgggcaagactcgcctttgcgtgcgagtgcgccaggaaccaaaagaagggaattggtatacagtggtcatggtggatgagattgaaatggtttgcaattaccaggactaattggtttgacaagtacctctggcaagataagctcggccagtgttcattagctggtaaagcggggagagaatggaagttcctcggcaacagcataacttccatgggtggccatcagatgcatggattgcagtacattggacacgtgctctgggacttgtggggtagcgacgccaacaaaggtgtcgcgtttaggttggacgacgacgtaagggcgtccattactgattttcttggccagatcaggagtgacatgatagatcaccattggttatctgagttgcgtgagaatggagtggacatagacgaacttccctatatgattgtcgaggacaaaaactcgttcgtgcacgtcatgttcctgaatactgcctcatttggcttcatttatgcccacagtgtaatggtgtggcatgttgccacatgctactgtgaactagcagagcaggagaagcaagatgccatgttgaaccagagcacggaggacacagcagcagaagcaggttgttt

SEQ ID NO: 22268 - DNA, 344 bp, Oryza sativa
  Clone ID: PAT_MRT4530_2745C.1
gaaatatcaccgtacgtgtagcattagcatatcatgtcgtcgtcgctgctgctgctgtctagtgtataaccttggagttttcagagtttagtctctctgcttttcttcactgtgtataaaaactgaaaaaaaaagggggaaaaattgcagctttctggtgctgcatcccttgtagtagtaaagcagcttctgttcagtttcaggtgcatcatctaaaatgtgttagaaaaaaaaaagcaaaaatagagagtgatgtagaatcatgtgtactaatgattctactaccgcccttgttaatgttggatatattaagatggcaagcagtctaatgtttagaatctttc

SEQ ID NO: 22269 - DNA, 2121 bp, Oryza sativa
  Clone ID: PAT_MRT4530_27460C.1
atggcactcgtcgatatggttcacgggctcaacagcccaaagttgcgattgatccgcatcgaggttctcgtgttcctgggcgtcgtcgggctgtttgtgctcctcatcctcggctcctaccgccggcggtccagctgtgaagctgtcaaaatgaccatctgggtggcgtacgctgcttccatccccatggtgagctacaccctggggctgatgcagtcgtccccttacaagaacagcctcttctccgtctgggccatcatcctcttcatcttcctcggcagcgccgattctttctctgcttatagcctactagacaacgacgactggaagaggttctacttgaagcagctcatcgagtctttctgggtgggttggctggtggtttcctctggtggctcggatttccagtacattctatgggtcatatactgcatagtcatattgaaatccggcacacgggtcgcgtcgttcaagctagccagtagaagctccatgctctccaagagtaccaaatgggtggcagactacatgagctacgagcacctgcgacctgccggcgacggggtccaacgacgagacgccgtcgacatgcaagggtaccactatgtggttgcaggagaggacgagcagaatcctagggtggagcctcccgagtaccatcttaggtacaacgacgatgaccgggcaaagctcgttaccgttcaagatatctggaactgcaatgggagtctgctctccggtggcaatggcggcaggctcaaggacgtgtgcctctccatggccttgtccaagatgctgaaccgcaggtttgccggctttcaggtgctcgccgaatcaaatctccacaagacccgcgacttcctcttcggtggcctgctccatggcgacaggtgcgtcgaacgaaccttcagggtcatcgaggtagaattagcctttgtgcacgactacttctacaccaagtacttccttatctatagcagtcaccatctgttcgtcacgttgtcttttgccatggtcccgacctgcggttggcttgcctacaagctgttccagcatttcctccgggtacccgatgaagatgagctcaaattcctcgtcaatgctaaccacaggaactacgacgctctcttcacctccgtgacagcgatcgcaatcgctctgcttgagggtttacaggtgtacatatacctggcctcggcctggagcaaagtagccatgatatcgaaatatgttaccacagattcatggaacagtagcgtattgttctccaagttgattggatgcatcacgagcctcaggtacttccggagctgggaagataaactcggtcagtacacactgctcaaaagttttgactacaaatcgatgaacatactgtaccatgctaccttctccttggtcaataagaccaagaagggccgcaaggaagataagcgtgtcagattatccatggatgtaaagaaaaccgttatagaaaccctgaagaagaatagaggccttggccaactgggaaactgtgtcatatctctgcacgctaacgaggtatactaccaactttcatggtcatgcaccacactcccaactacaacacatatcataatggcttggcacatcgccactactctttgcgaggtggaagacgaagatcaacatggaatagacagtactactactactactaatcagcacgtagcttgtagcttgtcaaggtactgtgcctacctagtagcctttgctccggaattgttaccggatcatagcttcgtctccgaatccatatttgacgccctggtcgaggaagcccgcgaattgctgaagggtaagaaaacaatgcagcagcggaaggaagcgctaagaagccaggaccatggcgacaaccgtctcctcgttgtgggcggtcggctcgcaaacaatctcatcgagatcgaacacccgggggacagatggaaggtgctgtgtgatttctgggcagagatgatgctgtacattgcaccttcgaatgatgccaaagcgcacctggaaaccctgccaaggggaggagagttcatcacacatctctgggctttgcttgcacatggtggcatcttggagcgacccactggtccagctcaaaacgtatga

SEQ ID NO: 22270 - DNA, 1456 bp, Oryza sativa
  Clone ID: PAT_MRT4530_27461C.1
atgcggaacccgcccgggaggcacctcctccgcgtcgccacccgcgccgtgcgctcctcgtcggcgctcggcagcggcggcggcggagggggcgcctcgacctccgccacgtcccccgtcgccgcctcctcctcatccggtggccgcccgcgcacccgctccggcggccgcctcctgcgcgccacctcgccgcccccgccctccgccatcgccgcggccgcgtgctgggagtcccgcacgatgcgccgcgagggggaggaggagtgggaggaggtcgtcgccggggccgaggaggcggttcatggggcccccgtgcctgttgcggaggaggaggaggagtacagggtggtgttctggtcgccgcccaccggcgacgaggtccgcgcagccttcaccagcatcgaggagctaccatttgcattcagggtatttggtgatccttttcgtgcgcattcttatgaaactgaggagcaatcagcattgtccacctcagtacattcgtcatctggcaattcatcaggatcagatgactggattgaacctgctgcctatgctctcaactcaactgctcttctgacaagggaacatagaaatgttttggatgccttccgtttattgcaaaaagatcctaatgttcagaaaatggtcatgtccttgtcatgcgacagggctgtatgggatgctgttatgaacaacgaggcagtgcaagaattcaggagatctttccaggatgacaaagaagcagcaggtagaaagggaaaccctggtggtcctgctggagtgcttaagtggattctgggcaacacccaagcaaaaataatggaattcatgaataatataatgaagattgtgaacatgcttttccactctgatgatgatgaagcgaagcccgacctttacactgatgcagtgaaggtgtcattcatgctctcagttttcatcttcatcgtggtggccattgctcgtatcaagtgagagccgtgggatttcaaagtgtggtgatgcaagattctgcaagccgtgtgtgcatgttttgtaggacagctcatgatttccaagctatctaacttaaattcacacgaaattgtacatcgatgatttctgtatcatttgaccctgttagtctgttgtaaaggattggtttgtctgtgtcccattttcactgggagattaatatacttaagaatagataaatagttccgcttgcttggacgatgggttggaactcgcccgtcgcgttgccgccttgcagcagcaagttgaccgtggttgtcaagcccaatctctgaagctaccttccccgtccacgctaagaatgtcgagcaacaaatccacaagcacccaccaaccttaggtcaaatcgcaccaaacaaagcatatgcgcttatgtttggaagtttgaattgacactgtaacttttcatccgaataaatctgcaccaagatctcattgcccc

SEQ ID NO: 22271 - DNA, 415 bp, Oryza sativa
  Clone ID: PAT_MRT4530_27462C.1
tgcagtgaaggtgtcattcatgctctcagttttcatcttcatcgtggtggccattgctcgtatcaagtgagcacaacaatccgtcgactttacatttcgttgttttgtggtctcttagctatgcgcaggagcacctctattcatcttagtttagccaacattgatgccaatcctagtttgtcaggctcagaagtttaattgcctgtgttggaatcatgattttatcatagtaaatctcaatatttaagcttcccttcagtcttatctcattaaatttcctggtgcttttgaacacagttttgagccgtgggatttcaaagtgtggtgatgcaagattctgcaagccgtgtgtgcatgttttgtaggacagctcatgatttccaagctatctaacttaaattcacacgaaattgta

SEQ ID NO: 22272 - DNA, 178 bp, Oryza sativa
  Clone ID: PAT_MRT4530_27463C.1
cccaggtggtggtgttgctgttgtttggttggcggcgcccaactggaacttgtgctggcccgaggagaggagaaataaccctgagtggccgataggcttggatgaatgacgcctcacctttggggttcgcccaaatgatgaattataaagaacccgttccccctttttaaaaaaaaaa

SEQ ID NO: 22273 - DNA, 651 bp, Oryza sativa
  Clone ID: PAT_MRT4530_27464C.1
atgatgatgcaactaagcgacctgcaccgacaagccgccgccggcggtggcatcgaggaggacgggagcgacgcattctcacctctgtcactgttcacagaccggaagaacgtgccgccgtgggaggagatggagggtgacttcaagtcgcccaatgttgccgtcgtgtgtgctcccacgttctcggaaacactcgtctccttcattaccatcttcttcttcttctcgggcaacacaacaacgccctcaggagggggaatcatcgttgccagtccggccaaggccgggctgggttttcacccgctgctcaccacctgcaaatccatgggtggtgccccgatgctccaccaccactcaagctctgccaacatgtgggacccctgcattggcgcccccccgccggccagccttcgtgcgccgaagaccgcgccacaaccaccagtagctccttctcacaccaaggtcgcctcctccatcgccggccgcgcctctcgcgccaagccggcctccatctccgccagccgcgcctctcacgccgagccggcctccgctaccatcagctgcgcctctctgcgccaagctggtctccgacccctcctccaaacgatgccacaccagtcagaagtagccgtctgccacgcccttggctag

SEQ ID NO: 22274 - DNA, 655 bp, Oryza sativa
  Clone ID: PAT_MRT4530_27465C.1
aaacggggaaaagggagaggcggagaacaggaaggggaaagggggaacgaaaggggggggaggatgacgggaaacgagatccgaacggaggggagcgacggaagaacacccggaaagaggaaacgaaaaggaagggaacaggaggaaatagaggcgcggggagaggaaacgagggaagagacagacggggggggaagcgcagcggcggcggcgagcgcggcggtaagtgagccagggcggagggatggcggcggcggcgaagcgagcgtggcagcggaggaggcgaggcggcggcgaggcagggcggaggagcgtcggcagcgaggcagggcggaagggcggtagtggcggcgaagcgagcgcaacggcggaggtccacgccggcgacgggatgaggacgacgacggatagggatgaccagcttgctcgtccagacgcccaccgtcacgatgcacttagcgccgtggaactcctcgccgccgctcgtcttcgcgaagactctggcctccccatccttcttgacgaccttcgctctgccgccgccgccgtcgccgccgccctaactcgcgctcgcctcgccgtcgcactcgccgccgccaccgcccctccgctatgcctcgccgccgttgcccctccgccctgctcgccgtgcgcg

SEQ ID NO: 22275 - DNA, 934 bp, Oryza sativa
  unsure (1)..(934): unsure at all n locations
  Clone ID: PAT_MRT4530_27466C.1
ccggccgggatatgggccctcctccttcngtcggcccatttggcctattacaattcacaaatctggctcatttttccgaatcctccctacgacttgggcccgagcgtggaagcctctggctggcccccacaaaagcgaggacgcgaaggaggccgccgccgccgcagagaaggaagagagggagagatcgccggatcgccgcccgccgccgccacgatgtcgtcgatgctgtccgcgttctcgcagtggttcgtgaacccgcgccgcaacccgctcgcccgcctccacatgcaggcgatctcctcgcgcctccggaaatacggcctgaggtacgacgatctgtacgacccgaagcatgatctggacatcaaggaggcgctcgagaggcttcccagggaggtggtcgacgcccgccaccagcgcctcaagcgcgccatggacctctccatgaagcaccagtacctctccgaaaacgaccaggcgcaacagacaccattcagaggctatttgagtgacatgatggatctggtgaagaaggagagattagagcgtgaagaactgggagcccttccccttcaccagaggacccttccctgaagtcttatcttgataggccctgctgttttttcccaccacaatgcatcaaataaaatgcagtggatgactcatgatactgtctctcattttgaagttccattttcatatatattcgtgtgtgatgcattggtcgtcactgattacttcgcatccttttcaaatatgttaatttaacagcaacaatttttcttttacatcattgtcgtaaattcttcatgtattgtgcttcacatgagaagaatgtctgttgtttgctcaaaaaaaaaaaaaaaaaaaaaaaaaaaaaaaaaaaaaaaaaaaataaaaaaaaaaaaaaaaatcatcccctcccgctttt

SEQ ID NO: 22276 - DNA, 211 bp, Oryza sativa
  Clone ID: PAT_MRT4530_27467C.1
ataaaaaaaagggtgcacgaccctcaagggcttttaatccactgctgtttacatgtccactcaagtgtccaatgcgcaaaaagtttataactcatgtacactagaacaacactttgcctgtgccccttttaattagcatttagcttggctcctttttaattgacgcttattctattatatgaatcatgagtcagaggcgagtggccaactc

SEQ ID NO: 22277 - DNA, 336 bp, Oryza sativa
  Clone ID: PAT_MRT4530_27468C.1
atggagagcctaaattgttactttgagggtgtcgtggagggttcaaatttctacaccaaaggcacattagatgatctcgatggcaagttaggacagggtttcatgtcggctgatgatttggaagaagttgatataggtctaggggatagaccaaggtcgacatttatcagatattggccataccaacaaccacccaggagatgcaaagccgatatatatgatgctatcaaagctgaaattactcgtttgtatgatgctggctttattcggccatgccgatatgctgagttggtttccaatatagttctagtcatcaagaaagaatggcaagcttag

SEQ ID NO: 22278 - DNA, 303 bp, Oryza sativa
  Clone ID: PAT_MRT4530_27469C.1
ctgacgcgtggcgccatgtaggtgaaccatgtacagaggatgctggaggaggtgagactgctaatgactaatcaaacatatgaaaagaggatcgaacttattacctagagaactgctacatagtgatggagcccttacaggggcacacgagtgatagcctgatgaagctatggatcaacacctgatgtgtaaaacacagaatgaaactacttctctatagaatgaacttcactagcgacgtacctgagattcacaagttataatgatgatagttgttatacgttgacaattatgctactgacg

SEQ ID NO: 22279 - DNA, 768 bp, Oryza sativa
  unsure (1)..(768): unsure at all n locations
  Clone ID: PAT_MRT4530_2746C.1
gtacnncctcgaggcnncggccgggaagccaaacaagaaacccaccgtttctctctcaaaaccgcgggaatcaatcaatcgccgttcgcgtcgcgccacgagatattttcccccaagaaaaggtagtagtaatcttcgacgatcttgatcgatcgccatgagctagctagctagcgaatttcttgttgtttcttttttgggttattgatggcgttgttgttcttgttcttgtttgttgcagttggagtgagggatgagtgctatggcgatgtcgtcgctgaacccgaacgcggcgccgttcatcccggcggcgttcaggagggtggaggacttctcgccggagtggtgggagctcgtcaagaccacggcgtggttccgcgaccactggttcaggcagcaccagatgtacgaggacgctgcggcggaggaggaccaccaccgccaggtgttcgacgacgacctcgccgcgctcctgcccgacgactcgctcgacctcctcgacatggtcgacaccgacgacctcttctacacccccgacccccccgtccaccacaagccgacgacgactcccaccctcgacgccgacgtgctcagggcgctcagcctcaactcgccgaggttgggcggcgccgggatggtgaggcacgccgagaaagccgcccagttcgtcgccgccaagggcggcgccgcccgccacgtcatccaccagcctcgctagagcccatgggtgaagtggtgatgctgctgctgctgctgtctagtgtatac

SEQ ID NO: 22280 - DNA, 200 bp, Oryza sativa
  Clone ID: PAT_MRT4530_27470C.1
atgcagccccgcgtcgagtgccaagttccgccggaacgtaaaaacaaaagtagaagtagaaagggtggcgatgcactgaattgtattgatcatagcgatagattatatagaccctgggacttcaaagccgatgctgactctaagccgatgactactccgggcttaccaaatttcactgttaacacacacgtgggtgcgat

SEQ ID NO: 22281 - DNA, 528 bp, Oryza sativa
  unsure (1)..(528): unsure at all n locations
  Clone ID: PAT_MRT4530_27471C.1
tagtacagatgtggcatatcctaagactacgaatctgaacagctatctgtccagattcatagtcctaggatatgtcacatctattaggttgcgcttatatagagaccgagggagtagttttcaggctgtcactaaagaagccatccaagtattcaaaatatacagcaactatagatgttaaatttgaacatcttcctatatgtatcatcagaaatgataaacaggcaataaaaccaggttcacaaaatcagaagtcaccactggtaaccaagattaggtgagatatcaatttactctttaatttccatgcttgtcctagcttgttagagaccattccaggtgattgtgtctgaacagtggctaaattaggtagatcctggctgaatttatcctgtttgccaagcaatccatgatttactaaggctgtgtacggccaagtcattttcccaactaccactccctcagttgttccacgtgcatgcttcacccaatngctaaanggggcattttgccaaaaaaaaaaaaaaa

SEQ ID NO: 22282 - DNA, 524 bp, Oryza sativa
  Clone ID: PAT_MRT4530_27472C.1
atggttacatatctcaatttagcaccagaagaggaaggagatggaggagctttacctaacctcaatggaggagaagctgatatggaagaagatggaagacttgctgctggccaaggagataaccttgatcaagttgagtggcaggcacatgtacatgctctacatgtttttgatctcaacctacatccttttgatctcaactttgaggttacagaagaagaagaacaaatacatctagatggtgatgatgctttgcaacttgagctggaagccttggagaactaccttcaagactatggagtgtacgctgatgctgtaaatgttgtctttgatgtagaggagttacccaactcacatgaggttcaacatgcaaatggaaatgagcgaagtcagtcaagagatttgacaaacatagaaaggcgagctatttatgcaaggttgcttgagaagagtatgaatggaaaattagaaaaagacaccacaaataccgtttctatgaaatttaattgaattatagtatttct

SEQ ID NO: 22283 - DNA, 1518 bp, Oryza sativa
  Clone ID: PAT_MRT4530_27473C.1
atggttacagatctcaatttaccgccagaagaggagggagatggaggagctttacctaacctcaatggaggagaagctgatatggaagaagatggaaggcttgctgctggccaaggagataaccttgatcaagttgagtggcaggcacatgtacatgctctacatgtttttgatctcaacctacatccttttgatctcaactttgaggctacagaagaagaagaacaaatacatctagcttatgaccaccaacacatggagcacgacctgcatgtcaatgcacacgtatatgaggaacaacaacaagttgaagatggtgatgatgctttgcaacttgagctggaagcattggagaactaccttcaagactatggagtgtacgctgatgctgtaaatgttgtctttgatgtagaggagttacccaactcacatgaggttcaacatgcaaatggaaatgagcgaagtcagtcaagagatttgaaaaacatggaaagtatgaatgaaaaattagaaaaagacaccacaagtatagttgctcgagagttccatgtcagcatccgtaccgtccaacgtatatggaagaaagcaaaggtttgccgtgaacagggaatagcagtgaatgttgattcaaggaagcatgggagttctgggcgcaaaaaggttgaagtagacttatcacttatagctgctattccattacagcaaaagagtaatatacggtcactagcacaagccctaggtgttccgaaaagcacattacataggtggttcaaagaagggctgatacggcgtcactctaactcactaaagccttatttgaaggaagcaaataaaaaggaaaggttgcggtggtgtgtttctatgttagatccaagcacattgccaaacagccccaagtttattgaaatggaaaatattatccacatagatgagaaatggtttaatggctcaaaaaaggagaaaactttctacctttatccggatgaagaggaaccatacttcacagttcacaacaaaaatgccattgataaagtaatgttcttagcagcagttgcaaaccctaggttcgatgatgagggtaactgcacttttgatggaaagatatgtatttggccttttgttaggaaggaaccagcacaaaggagaagtcgtaatagagaaagggggacactagtgaccaagccaattaaggttgatagaaacaccataagatcattcatgatatctaaagtgctgccagctattagagcatgttggcctcgagaagatgcaggaaaaaccatatggattcagcaggataatgctagaactcatctcccaatcaatgatgagcagtttgctgttgcagtagcccaaactggacttgatattcgcctcgtgaatcagcctccaaattccccggatatgaattgcctagatcttggattctttgcttcacttcagtccttaacatataataggacatctagaaacatggatgagctaatagagaatgttcacaaggaataccgtgactaa

SEQ ID NO: 22284 - DNA, 603 bp, Oryza sativa
  Clone ID: PAT_MRT4530_27474C.1
atgacggattgtcgtaaggaagaaggcaatcaggggtggcttctcgaagcaccaggaggacatcggaaagatggtgatgcagcaccttgtttctgtgattatggaccattaagatggaatatggagatgaggctagatctgttggaaaggggtctccaagagctttccattaagtactcacgggccaaaagcagagctcgtatgcagatttggtggccatttgaagttagcaatgtagcaggtggccgaattggattccagcacatggaggacttgatcttgatgtcttcttgttggtatatgatgaaaggtcgagctatattgcaagcccagccgttggccacgctggcttgtggtacgcatgcagacattggagaggagcaccaacagagcctgaatgagatacctgcagcctggtttcttgctggacgccacctagccactgctcgcccacgatggccaggcgatctagccatccttgaagcaggacaagcagctgaatccaatgaagctgttgatcaggaggaagagcatatgcttttatcaaggcgagaagctccctgtgctgaagaaaatgtgtataaatctccctctgctgaagaa

SEQ ID NO: 22285 - DNA, 1087 bp, Oryza sativa
  Clone ID: PAT_MRT4530_27475C.1
gcacgaggcaggcgcgcaaaaagtcccctggggaacttccagcggcgcacccaccgccagcagcagcagcttcgccgcccgccgacgccgtagcggagggcaagccatgaagttcaaggccttcttcaccgacgacggcatcgctctcctcgacaagcggttcctgccggcgatggacaaggtgggccgcctgtgccacgtctacctcacgcccacgcacgccatgctcctccacaacctcctcggacccacggggacggggcccgacggcggagggccgcagtgcgtcgcgcagttcgccaaggacctcctcttccgggagtacagcgtgtcgtcgcggaacggcaaccgcgtggccttcgccgtcgacgtcgcgctgctccaccgcgccctccgcagcgcgctcgccgtccacgcccagtcgccggccgccggggacgcctcagccgcgatacaggtgaagctcgtcaacaagctgccggccgggtcccggtctgcctcgccgttcctcactttcgagaccaagggagcccgctctgctgtcgtgcaggacgtgcccatctcgcggcccctttcacgctccgacgtcgagcggctgcaggctgccctcgactccgcccaagagctccctcagactctagttcaggttccagatctgccacagttgcagagtttggtcgatcgtctaaaaaatgtcggcgatcttctgacagtagctgttactcaatatggtgacttacatctacacgttgccacttctcttgttactgttggttcagaattcaggaaacttcgtatccttggtgttcgtgcaaccgcacctgttggtgatcaaaatttgagtgcttccactcgtaccaatatggcaattgagagaggggaggcgctctcagtgcaagtgaatatgaagcacctagctaaaagtctacaatgtcatttggctaagcccgactgtaccttctatggtatttctcctggtggtgcttgcttgactgtgatattccagtatttcattccaggaactagactgacggacaagtccattagcttctactgcaggcttccagtccttgaccctggcagttaa

SEQ ID NO: 22286 - DNA, 319 bp, Oryza sativa
  Clone ID: PAT_MRT4530_27476C.1
aacttaaacccttgttcgattctttgccagcactatctagcactaccacaggccaagcaccaacaccaccagcaccagtatcatatactatactatactccgtagatcatgacatgatacccgatgaatgaccatgacctatccaaagagaaatgaaagaaaagagaaaaagaaatacaaaccaaacaccagacccgattgtattacgggtttgcttttagctaccagagctagtacgttgccccagtccagtttccttcttaaatacaaggttttagatcagtaagtacaatatctaaggacaagatggggtgcgaga

SEQ ID NO: 22287 - DNA, 561 bp, Oryza sativa
  Clone ID: PAT_MRT4530_27477C.1
cccttcctctccagcgggtaggcgatggcgtcggcgccgatgatatctgcatggagacggtggcagtggcactgcttgcggaggtcggcgcgggccttgttgtcatcgtcgcagggctgttgcacggcacggtcgacgacgcaggcctgggttatggctccctcgcttagggcctgtttggtacagctccaactcctatatataactccaggagttgagtctggagtggaggtcgaccttgcggagaagtttaggctgccgcttctgcccaggggcggcttcgacttctggcgaggcgcgaccatggcgatcatcggcgtcaccaccatggattttctagtccctcggcatcggcgacaagatcgggaacaacgggcccctcaacacccgcatccagtagttccagcagctcatgccctccatctgtgtctcatcgtgcaagtcatacctgtccaagtcgtcgttcgtcctcagcgatttcgacggtaacgactacaccacgcagtttttcgacgggtacaaaccgaagcaggcggcggcgcagagccccaccattacggc

SEQ ID NO: 22288 - DNA, 697 bp, Oryza sativa
  Clone ID: PAT_MRT4530_27478C.1
cagtgaggaaaagcatgcgagccctcctctccatctcctcctgactccacgacggtcacccggaccaagttcttctctacggccggctggcgagatcgatcgcgcgtggagatcgagccagcacccatggctcagccacggtacttgccacacatcttctccaacgaggcagagaattacatagccaccacagcagtagattctgtcttcctggtagaggttgatatccgacacttccatgtaccggacgaccaaccaagatataaacaaatgtgcaaaaacatgtacgctagtatctcgaatcgagtgttacctaagacacctccagaaaatgaaactggcggtccaagcaaggctagcaaaacgaaccaatctgatggtccaagtgcaagcaggggtaaaggcaagaagaaagggccatctacgactacaagcaaggagatggagagcagcacatcagagttggctccagagacagagccaaagcaaaagccacagccagaaccaaaacagggtcttaccacgaacatcacccaaggtacccgacagagacaagcaacaggatttgtgattgctaggagagcaaacattattaagattcttacatgcgcccacattattgaggatgtttataccaaggataagcatgaggtgaccctgcaggagctcaacgcagcgttcacgtttgatgtccaat

SEQ ID NO: 22289 - DNA, 430 bp, Oryza sativa
  Clone ID: PAT_MRT4530_27479C.1
cccacgcgtccggtacagagaggctctttcaacactgcacataggtgacccgccccgaggcgttaatgatatagatgacctccacctgcccaacactgtgctgcatgtaaccggcattgacgatgtctgaacctttggacatagatacaccatgacccttgacaactacatcaaagccacctgagactgactgatgatgacttatcgattacttactcctgactcttgcagagacaccaaatacgggaagtcttcattccaacactacaccgacctcttgtaacaaaccgactaatgatattatgattgacacacctgccgacatcttttagcctgatgatggcaacactaaagaaactctatgctaaactctactgtgttgaggcacttgctgtaacaatagctctcaacggtctatcattcttgtatt

SEQ ID NO: 22290 - DNA, 369 bp, Oryza sativa
  Clone ID: PAT_MRT4530_2747C.1
atgttggtcccattgatcgagcgatggattcacggtgcaggcggcagttcgctcgcgctgccatggccgcgatctcccgtgagcagcggccgccaagcttcatccaccaaggcaacgagcaaaaccgccgcctcttcctctaccaggctccttccgcctctctgctgctacccctcacgctcccaactagctatggagcagcttcacgaccacattgagcagatcatcccacatgatcacaaccataagagccaaacagggcgttcgtcccagcgcatggccccgatgacggcagctggcatccctactcaccggagctttgctgccaccccgaacgcagaggcgcttggcagcctgcaaggagcatga

SEQ ID NO: 22291 - DNA, 492 bp, Oryza sativa
  Clone ID: PAT_MRT4530_27480C.1
atgttcgtgccgcatcctccacatccgtgccgccgcctccacgccacctcgccgccaccaccggcccagggggtcggcctcccgcgtcagggaggctggaaccggaaagggggccggatctggcgaggggcaccagacccggcgtcgtgccaccgccacaccatcggtgccggatctggcgcggagggtgctagaccggcatcgtcgcctcgccgtcgccacctagtccacccagctgctgatgttgtcaccttcgatgccggcggccaggctgtcgcgctcttcgcccaacgcccgacgctgtcccaggagctggccggggtcgtgggctccgacctcgcggccttggggaggatgccatgttggcgccgtccttgcggtggccgcgcggttttcggtggcctgctcgggtggcggcgaggcggaggagggaggggagcgggggtggtggcgcaccggtggcggttgccagccgtgtcgcccctgccctga

SEQ ID NO: 22292 - DNA, 401 bp, Oryza sativa
  Clone ID: PAT_MRT4530_27481C.1
tttaataatttttttttttttttttttttttttttgggtttttttttttttttttttgtgtttctccccttttttttttttttttccccacaaccgggaacaaatcacgggaattaaaaatggctcctgtttggcgtttacccatgaatttccccattgcccatgggggggggacaattttacccaacgggaaagggccctcccttaaatcaagggggggcctatcagttaaaaagggaccacctttttccaaggaaggggggggggggtgtcattccaaagggggagggggcaaaacactgtttgttcccctgccttctaaaggctgaatcccctgggtttggccggaacggtcttggtcgaaaaaaacaagaaaggatcagggctaaaagctccaaggg

SEQ ID NO: 22293 - DNA, 987 bp, Oryza sativa
  Clone ID: PAT_MRT4530_27482C.1
atgggtcgcgggggcgacgtggacggcgcggcgggcgcgctgcggcggttcgtgcgggaagcgggagggtgcgcggtggtggacggcgggctggccacggagctggaggcgcacggcgcggacctgcatgacgagctctggagcgccagctgcctcgtctccgcccctcacctcatccgcaaggtgcatttggactacctcgacgccggcgccaacatcataacctcggcgtcttaccaggcgacgatacaggggttccaggcgagaggcctgtcgcgtgagcggagcgaggcgctgcttcgtcggagcgtccacatcgcgcaggaggcgcgcgccatcttcgccgagggctggtccaagggcccgtacgccaaccaccgctcctcgccgcgccggcccgtgctcgtggccgcctccatcggcagctacggcgcctatctcgccgacggctccgagtacaccggcgactacggcatatcggtgaccaaggagacgctcaagagcttccaccggaggaggctgcaggtgctcgccgacgcggggcccgatctcatcgcgttcgagacgatcccgaacaagctggaggcgcaggcgagcggcgaccccatcacggagtgcgccgccgtggccgacgcctgcgcgagggtcggcgccgtcggggtgaactgcaccgcccccaggctggtgcacggcctgatcctctccatcaggaaggtgacgagcaagccggtcgtcgtgtaccccaacagcggggagacctacgtggccgagaccaaagaatgggtggagtcggagggcggcgcgtcggagacggacttcgtgtcgtgcgtcggcaagtggaggcaggcgggcgccgccctcgtcgggggttgctgcaggacgagcccggccacggtgagggccatctcgtgggcgctgcgtgaatcggatgacgccgtgggtggtgacggcgatcgcgacgatttccctgcagtggccgtgctctag

SEQ ID NO: 22294 - DNA, 1137 bp, Oryza sativa
  Clone ID: PAT_MRT4530_27483C.1
atgcaaaaagtgttgatgaaggacgtcttctgcatggagggtggacagggggagtcgagttacatcaaaaacagccaagttcagtctcgaaacctgcaaatgatgctgccaaccctcaaggagatactggacaaggtccagctccctcgccggccggggaaacatctcctgacggcggccgaccttggctgctcttgcgggcataacacgctcatcgtcgccgatgcgatcgtcgaacacatgaccagaaagctgcgcagctgcatcttcgacgaccaagatgacggtgacgccgctgatccagaattctgcttctacttctccgatctccccagcaatgacttcaataccctcttccacctcctcccgcaacacgctactgctgctgctggcgacggcagtgagcggcgctacttcgctgccgcggtgcctggatcgttccatgaccgtttgttccccaagcgatccatcaacgtgttcacctccaccttctctttgcactggctctcacaggtcccggaaggtgttgctgacaagcggtcagcggcgtacaacaaggacaaggtgttcgtgcacggggcctcgcaagcgacgggcgcggcctaccggcggcagttccagtccgacatggcgcgcttcttgcggtgccgcgccacggagctgaaggccggcggcgtcatgttcctcgtctgcctcggccgcccgtcactgcacgcctgcccaacaaaccaaggccgcgtccagcttctatacggcgccatgttcgaggagtcgtggggtgacctcgtcgaggaggggacgatcgggcgcgagacgatgggcagcttcaacgtccccgtgtacgccgcgacgctggaggagtttggggaggccgtcggcgccgacggattgtttgagatcaaccggctggagctcgtaattacgagccctctcgctgtggacgaccccatcagagaccgccgcgcggttgcgaactacgtgcgctcgctcctcgggccgctcgtcgacgcgcacgttggcagggcggtggctgacgagattttcgtccggatgcagcgccgcgcggaagcgcgtgccgaggagctcgtggacgagatgcgtttcccccatattgtgtgttccctttcgctggcgtga

SEQ ID NO: 22295 - DNA, 3505 bp, Oryza sativa
  Clone ID: PAT_MRT4530_27484C.1
cccacagcgtccgcggacgcgtgggcaaaccaccacacccagcggcaccatagacaccaagcagaacaggctgctgagctccggccgaccgaaggtgctccattctctctcctcatcattattgatatttgcaggatcgatcacttgaggtaacatgggcctcacgtgtgatacacaaactgcaaaactggccattatactactagcattcatactgctatgtcatgggattggcaacgtcgattgccgtgggaacagagccgatcagctctcactgcttgatttcaagaagggcatcaccaacgatccatatggagccttggccacttggaacaccagcacacatttctgtaggtggcaaggtgtcaagtgcacctccactgggccatggcgcgtcatggcgctcaatctctccagccaaagtttgacaggccaaataaggtcctctctcggaaacctatccttccttaatatacttgacctcggcgataataacttacttggctccttacctcgccttggcaatcttaagcaacttcaggcactctatctgtataaaaacaatttgacagggataattcctgatgaacttacaaattgttccagcttaacgtacatagacctctcaggaaatgccctaactggtgcacttcctccaaatttaggctctctgtccaatctagcttatctttatctttctgcgaacaagctaactggaaccatcccgcaggcccttggcaacatcaccaccttggtagaaatctatcttgatacaaatcgattcgaagggggcattccagacaagctttggcaattgccgaacttgacaattttggccctaggtcaaaacatgctatcgggtgatatcccatttaacttctccagcctttctcttcaacttttaagcttggaatacaatatgttcggcaaggtattgccacaaaacattagtgatatggtacctaatctccaaattcttcgcttggattacaatatgttccaaggtcaaatcccatcttctctaggaaatgctttgcagctaacagaaataagtatggcaaacaactacttcaccgggcaaattcctagctctttcggaaagctttctaaactctcctatattagtctcgaaaataatagcctagaggcttctgatggccaaggctgggagttcctacacgcgttgagaaactgtagtaatctagaactgttgtcactggctcaaaatcagctacaaggagaaataccgaattcaattggggaccttccgctcaaacttcaacagctagtgctgagtgaaaataagctatcaggagaagttccagcaagcataggaaaccttcagggcctgtttaggttaagtctagatttgaacaatcttactggcaaaatagatgagtgggttccaaagcttacaaaactgcaaaaattacttctccacaggaacaactttagcgggtcgattccatcgtctatagcagagcttcctcgtttgtcaacgctttcactagcatataatgcatttgatggtcccataccatcctcattgggaaacctttcaggactccagaagttatatctaagtcataataatctcgaaggtgtcatacctccagagcttagttaccttaaacaactaataaatctaagtttatcagaaaacaagcttactggggagatccctggcactttgagccagtgtaaagacctggcaaacatccaaatgggcaataacttccttactggcaatatcccagtaacttttggcgacctaaagagcctgggcgtactcaatctttcccataacagcttgtcgggcacaattccgactacactaaatgatctaccagtcatgagcaaactggacctttcatacaatcgtctccaaggaaaaataccaatgactggaatatttgcaaatcctactgttgtttcggtccagggaaacataggactatgtggaggagtgatggatctccgtatgcccccatgccaagttgtttcccagagaagaaaaacacagtactatttgattagagtattgatccctatatttggcttcatgtcactcatattagtggtctacttcttacttcttgagaagatgaagccaagagaaaaatatatatcctcgcaatcttttggtgagaatttccttaaagtctcatataatgatctagctcaagccacaagaaacttctcggaggctaaccttattggcaaaggaagctatggtacggtgtacagaggtaagttgaaggaatgtaagttggaagtagccgtgaaggtttttgaccttgagatgcgaggtgccgaaagaagcttcatatcggaatgtgaagctctcagaagcattcaacatagaaatcttcttccaatcataactgcatgctcgaccgtggacagtacgggcaacgttttcaaagctttagtttacgagtacatgcctaatggcaacttggacacttggatacatgacaaagagggtgggaaagctcccggacgtttgggtttaagacaaacaattagcatatgtgttaacatagccgatgcactggactatttacaccatgaatgcggaagaacaactatccattgtgatttgaaacccagcaatatacttttagctgatgacatgaatgctcttttgggagattttggcattgcaagattttatatcgactcttggtcgacatcaacaggttcgaatagtacagtcggtgttaagggtaccatagggtatattcctccagagtacgcgggaggtggtcatccatctacttctggggatgtttatagtttcgggatagtgatcctggagcttataacaggaaaaagaccgactgatcctatgttcaaagacggactcgacattatcagctttgtcgagagtaactttccacaccagatatttcaagtgattgatgctcgactcgcagaaaagtccatggactccaatcaaacaaatatgacactggaaaatgctgtccaccagtgcttgatatctctgctacaacttgcgctttcttgtacgcgcaaattaccaagtgatcgcatgaacatgaaacaaatagccaacaagatgcattcaatcaagacgacatatgttggattggaagctaagaaatatggtccggcatgtaatgaacaagatgcatgaaaccccacgcgttattacaggcgaccctgagtcgcgcacaacaattgcaacatattgataagtgtatagtccaacaagaagaaaatggttcttgtgtgttagaagttaagataattaaggtgataatatgaagcaccaaagcgtaccttctaacggtgataatatgaagattggtgattgtgactttatgtcatggtttatttataacaatatattacttcaataatgtaatagtatatgtatacgtagataatgatgttgtacctagcatgatcttgtattatatgcaagttgaactaataaaaaaccatttctgcaggaaaaaaaaaaaaaaaaaaaaaaaaa

SEQ ID NO: 22296 - DNA, 484 bp, Oryza sativa
  Clone ID: PAT_MRT4530_27485C.1
gtacgggttcggagttcgagcgcacgcgtccgcaacaggttcgaatagtacagtcggtgttaatggtaccatagggtatattcctccaggtggagttaggatggctacttctgagttcagtttcagcttttgttatagacagctaaatagataactgtactttctcttcatacctatgtagagtacgcgggaggtggtcatccatctacttctggggatgtttatagtttcgggatagtgatcctggagcttataacaggaaaaagaccgactgatcctatgttcaaagacggactcgacattatcagctttgtcgagagtaactttccacaccagatatttcaagtgattgatgctcgactcgcagaaaagtccatggactccaatcaaacaaatatgacactggaaaatgctgtccaccagtgcttgatatctctgctacaacttgcgctttcttgtacgcgcaaattaccaagtgatcgca

SEQ ID NO: 22297 - DNA, 333 bp, Oryza sativa
  unsure (1)..(333): unsure at all n locations
  Clone ID: PAT_MRT4530_27486C.1
gtgttggagtcaccgtggatggacgctcgggttacggagaatcgcacgatcgntatttcatgtgaccggtcagactgggctctggtagccggtcagaccggcgtgttatacgcggtcagaccggcgcagcccgcggctgcctaccccatgtttaaattgaaggggagcggtggcatctactttaaaggtctttcacttgggttaccgggtttcgggggtttaacgggacctaccggggggcaaaacgacggcaatcggacgtacaccggtgggaacagggcggtaaaaccgctgggtgcgatgctcaccacaagccaatccgggggtataccg

SEQ ID NO: 22298 - DNA, 272 bp, Oryza sativa
  Clone ID: PAT_MRT4530_27487C.1
cagagaggacaacagggcactcaaagagcgccactgtgtcgctcaggaaatgcctttttttttgctcacctttgaccctctccactattattgctcgacctcagcctctaacggtgcgaccttggaaatcccaatgaactgaagggggctttaattaaccatgacagcgtaaaacaaaaagaagaagccgtcacccctcccattaaaaaaaacgcgtaactcatgggctccctgggtccatacatctctccatgagctgaatcctgggggga

SEQ ID NO: 22299 - DNA, 200 bp, Oryza sativa
  Clone ID: PAT_MRT4530_27488C.1
cccacgcgtccgcccacgcgtccggaattttgatgctgtcatctaagaaaaattctttacacaggtaagtatattacacttgtatttttcgtgggtccacaaaaaaatacaagtgtaatatacttacctgtgtaaagaattttgatgctgtcatctaagaaaaatagatactcttaagtaacccaaaaaaaaaaaaaaaa

SEQ ID NO: 22300 - DNA, 606 bp, Oryza sativa
  Clone ID: PAT_MRT4530_27489C.1
catacagttcaactggagggctcgagtaaatatatgcatcggtgttgccaagggactagcattcctccatgatggtgtccggcctcacattgttcaccgtgacatcaaggcgagcaatatacttcttgataaggacctcacgccaaaaatttctgattttggtttagcgaagcttctgccttcagatgcatcacatgttagtacaagagtcgcaggaacactaggttacttggctcctgaatatgccatccgaggacaagtgacacgcaagtcagatgtttacagctttggtgttcttcttgtggaaatagttagtggaagatgcaacactgacacaaaattgccctacgaagaccagatccttcttgagaagacatggaaatgttatgatcaggggtgtttggagaaggccatagacagctctatggtcgatgacgtggatgtcgacgaagcctgcagattcttgaaagtcggtcttttgtgcacccaggacatctcgaaacgtcgacccaccatgtcaatggtcatcagcatgctgacaggcgagatggaggtcgacaaagagaagatcaccaagcctgatgtaatcaggggatttcagggacc

SEQ ID NO: 22301 - DNA, 2768 bp, Oryza sativa
  Clone ID: PAT_MRT4530_2748C.1
ctcgaccaaacagaccagcgtgggtagggttttaggaggcaacacgccgccctgcgccgccgccgccgccgccgccaccgccaccgccaccgccagattttcctaagcggcgatggccatggcacggcgttccgcctcccgtctcctctcctcgttccgccccttctcgctcctcctccaaccgctcgatgacgccccttcgctctcggccgcggcggcagcagcgtcggcccgccgggggatgttttcggcgtcggcgctgcgggcgcgggacgagaaggaggtggcgaggtggcgcgagtcgatggaccggatgcggaatatcggaatctccgcgcacatcgactccgggaagacgacgctgacggagcgcgtcctgtactacaccggccggatccacgagatccatgaggtgcgtggccgcgacggcgtgggcgcaaagatggactccatggacctcgagcgcgagaagggcatcaccatccagtccgctgcaacctactgcacctggaatggataccaggttaatatcatcgatactccaggtcatgtggatttcactattgaggttgaaagagcactccgtgttcttgatggtgctatacttctgctatgtagtgttggtggtgtaccaagtcaatcaattactgtcgatcggcaaatgagaagatatgaaattccaagggttgcatttttcaacaagttgggtcgcatgggagctgatccatggaaagttctcaaccaggcacgttccaaacttcggcaccacaatgcagctgtacaggtgccgataggattagaagaagagtttgaaggcctggtggatcttgtggagttgaaggcttataagttcgagggtggtagtggccagaatgttgttcgcatctgtgttccatccaacatgcaagacttagtcatggagaagcggcgtgaacttattgaagttgtttctgaagtagatgatcagcttgctgaagcttttctcaatgatgaaccaatacaagctaatcaactcaaggcagctattcgaagagcaacagtagcacgcaagtttataccagtttacatgggaagtgcattcaaaaataagggtgtccagccgcttcttgatggtgtgcttgactatttaccttgtccaatggaagttgaaacgtacgcacttgatcaaaacaaatcagaagagaaggtcttattggctgggactcctgctgagccacttgtggcattagcatttaagctggaggaaggtcggtttggtcaattgacatatctaagaatctatgatggggttataaggaagggtgatttcatttacaatgtgaatacagggaagaagattaaggttcctcgcttggtaaggatgcactccaatgagatggaggatattcaagaagcacatgctggtcaaattgttgctgtctttggtgttgattgtgcgtcaggtgatacatttacagatggatcagtgaaatataccatgacttccatgaatgtccctgaacctgtgatgtccttggctgtctcccctatatctaaagattctggaggacaattttcaaaggctctgaatcgtttccagaaagaggatcctactttccgtgtaggtctggatccagaaagtggagagacaattatttctgggatgggtgagctgcatttggatatctatgttgaacgcatcaggagagagtacaaggttgatgcaaaggtcggaaaacctcgtgtgaacttcagggaaactatcactcagcgtgctgaatttgattacttacacaaaaagcaatctggtggtcaaggtcaatatggacgagtttgcgggtacattgagcctcttccatcagaatctgatggtaaatttgagtttgataacatgatcattggacaagcaattccttcaaacttcataccagcaattgagaagggttttaaggaagcttgcaattctggttcgttgatagggcatcctgtggaaaatattcgaattgtgctgactgatggtgcttcacatgcagtggattccagcgaacttgcttttaagttagcttctatctatgcttttagacagtgttatgctgctgctagacctgtaatattggaaccagtgatgaaagtggaactaaaagttcctacagagttccagggcacggtaaccggtgacatgaacaagagaaagggtatcattgttggaaatgatcaggaaggcgacgacacagttgtggtttgccatgttccactaaacaatatgtttggatattcaacagctcttcggtcaatgacacaggggaaaggtgaattttcgatggagtatctggagcacaataccgtatcgcaggatgtacagatgcaactagtgaatacgtacaaggccagcaggggcacagagtaatacagaaaaaaaagaaacagtcacttagttaacgttgcattttgtggcccttaatgatgctaggacatcactagtagagtgattcttctagattacataaacaaattttggtttcactttgtatgttaacattgtattttacggccccccgttgtgatgagccatgacatcactaataggtttatacatgggtttctcgatacgacgatagaattgtgatacaataatctgcactccttatacgcaaacgtacgtgatgatcgaattagagcaagttctgtttggacaatgaaaatttcgttatttcttcaagaaaaaaaaaaaaaaaaaaaaaaaaaaaaattttttaaggggggggggcctgcagcccggggatccacta

SEQ ID NO: 22302 - DNA, 1892 bp, Oryza sativa
  Clone ID: PAT_MRT4530_27490C.1
cagttggaatgtatgcaacttcctttccaggctttcagcaattcactggagtagtggtttcttgatgacactttgacaattgacagagttaattcaggacagaaatgggctgtatatatatatatatatatgtgtgtgtgtgtgtgtgtgtgtgtgactcagcaatgtgttcaggctcagtgaatggggatgatgcaaattctacataaagatcatgcaagcacaaaaaatgaagatattatcgtttacgctacggttttcctctacacaactttacactttcagaaagagacccatcagtcgcggtccgatatggcggtgaccgtgatggaggtgcgcgtcgtctcctgagacgacgagggagttgagcgcgccatgatggaggtcaacagtgaggaggaggatgtggccttgctcctgagcttgaggtccctgaaatccctgattacatcaggcttgctgatcttctctttgtcgacctccatctcgcctgtcagcatgctgatgaccattgacatggtgggtcgacgtttcgagatgtcctgggtgcacaaaagaccgactttcaagaatctgcaggcttcgtcgacatccacgtcatcgaccatagagctgtctatggccttctccaaacacccctgatcataacatttccatgtcgttggatgacaaaacccaaagttatagcaagatttgtccctgaataacacatgggaatcatgacatttgtggtacttctcaagaaggatctggtcttcgtagggcaattttgtgtcagtgttgcatcttccactaactatttccacaagaagaacaccaaagctgtaaacatctgacttgcgtgtcacttgtcctcggatggcatattcaggagccaagtaacctagtgttcctgcgactcttgtactaacatgtgatgcatctgaaggcagaagcttcgctaaaccaaaatcagaaatttttggcgtgaggtccttatcaagaagtatattgctcgccttgatgtcacggtgaacaatgtgaggccggacaccatcatggaggaatgctagtcccttggcaacaccgatgcatatatttactcgagccctccagttgaactgtatgttactttgcctagaacctagaagggtatgtgcaaggctattgttttcaagataattgtacacaaggattctgtgcctcccttccacacaacagccatgcagtttgacaagattctcatgtgaaatgtcagagattgccataagttcattaaggaactccttcacaccttgtctagattgtaacgacagcaacttcacagcaacatctgttccatccttgagagttcccttgtatacaggtccaaaacctccctcaccaatcttattggattggtcaaaattcagtgttgccttagccagctccttatagctgtatcttgttatgttctcagcaccagagaagacttcattatatggatcactttgttgctgcccggtccttgacctctttcttgtcatcttggtgtaggcatcaacatcatgaccattccctacccaaactggatcaatcaataacaaaagggtatcttccgggaccggaggcacatcatttgctttcatcgtgatgcagaacaagggattgtaacccatgccccatgcccccatggaagtggcactgaacagtcacatgacagaatatctatgctggtatctagtacggagtgattgattactcgatccaagcggcgaaaccgacgatctccagtcgaaaccggcaagcgagaaagatcgaagaacccgacggcttccgcctccggcgccagtcgagacccggccggccctcgccgcgcccggcagagtaaaatatctcccccggcagattgaaaaatggcaggtttttaaaat

SEQ ID NO: 22303 - DNA, 618 bp, Oryza sativa
  Clone ID: PAT_MRT4530_27491C.1
atggcagaagcgttggtgtgtcttcaggcagtgcagctagcgagtgaattgggtgtttcaaagttgttgatcatgacttcattctttcaaaaagaaaatggcatcacccttaaaagccagaacccgacgaaggcagagcagcttggcatggagcaagcatctgaaagttgtctaccacctctgccaatctcgctggaaccaaaaacctccactgcttcgaaagcaacagaaccttacatccagaattcgattccctcagttggctgtactatctgtaaatcaaatttgaagataacaaaagcaacagcttgtttatcaattcaggaactgagaagtctggtttcatggttccattggctgtggcatagaaatcctattggccccaaactaccatcggcgcccaagttcccctcgacttcccgtccacagcgtgggggcaggagtgcttatgttaaaaataggaacaaaatgcaagagcagcattcgaggtgtttcattcaaggaacagaagcagcagaggtgacaccgttgatggagccatacatgctgctattgtcagcgaacgccgagtccggcaacatgacgagggtgaacaatctagctgtttggcaattttga

SEQ ID NO: 22304 - DNA, 1367 bp, Oryza sativa
  Clone ID: PAT_MRT4530_27492C.1
gcacgaggtacgagtatagctagctgcacgtacgccgcaggttttcagttcaacctgtgtgctacagctcacttgttgctccatcagctcctagtggagcgagccccaacactggatgtgtatgcgcgagcgcctataaaacggtacagatccactggggctgatcatcatctctatcatcatttctcatccatcactttctttgtccatctcgacctgagaattgaatactcctatcagagatgggttctctgatggctggctggaactcaccagttcttggtgatgagaagaaagttcggctgatgaggaaccgctcgctgaccagggaggaggtggacgcgttctggaggcgccagcaacggaagcagccaccgtcgtcgtcgacgtcgtcggagcccaacgccaccacctcgccgctcgcctctccccgcgccgccgccaacgtcgtctcgccgctcgcatcaccccgcgccgccggcgacatctcgccgctcgccgcctctcccggccgcgcgcagcaggagatgagtagtagtcgttgcacgttggcgttgaggaggctggagaggatgaactccatgccgtcaccgctggcgcgcaccgtcatgacgagggccgacgatcacccgtaccagtcgtactcccacagcgagccgccgtcgccggcggctcctcacgccggcgaccatcgtcatcagcggtcgtcgttcgctgccgatcatgacgacgacgacgacgacgtcgccagcaccagcagcgagtgctggtggacacggagcagctgggcattcctgaacgagacgccgtcgccggagcagcagatgttcggcaagtcgcagacgtacgcctgcgttcagttccacgtctcccgggtcgtcaccggcaacgcctaggcctcagctagttatagctagccacatgtcagggaatgcatatgcatgtacgtatgtacgtacgtatatacgttagtacttaggctggttagctagctagcttagctttgcagctctgcatcgtcctgatcctctaagagagtagtgtgttctgtagtagtggttaagtacgcatgcaatttgtatgtgtagaatattactatacaaagagcagtagagaagtgtataggatcgggccggcgttcgagagcttttaatccttcagctctccgtgtaaatacagatactgctcatgtatatactctctctagtctctcctatatagatagttaattgtgttaagactgtactttgtgtgtgtgtgtgtgagtagttctgtgacttcttaatgtatgatatatatatatatatatgtaaaaaactaaaaaaaaaaaaaaaaaaaaaaaaaaaaaaaaaactcgagggggggcc

SEQ ID NO: 22305 - DNA, 283 bp, Oryza sativa
  Clone ID: PAT_MRT4530_27493C.1
cggattcgttttgacaaaaaggggcgccccacgaaagggcgggggttgatataaaagggggggcgaaaactcacacaaggatgacgaggaaacacaagaaatgtggcagaagaagcgggagcaccaagaaaaagagggaagagaccagagaccaaccaggctctagctggagggatcctatgacgacaggaaacaaggcgaggaaaggggagaccaaacccccaaagctgaagacccgggagccgaacaaaacatatactcaaagggcgatgaagcctgccga

SEQ ID NO: 22306 - DNA, 947 bp, Oryza sativa
  Clone ID: PAT_MRT4530_27494C.1
tcctccaccggcgtcgcctcgcctcgtctcggcttccaacgccaaccaccgccgcggatctcgccggagccaagaaaagcccagccatgtcgaagcgtctcgcggcggcgctgctcgtgctgtgcgcctgcgccacgcgcgcgcggggcgccgacgactacacggcgttcgtgtacgccgggtgctcgcaggcgcgctacgacgccgggacgcagtacgcggcggacgtcgacaccgcgctctcggcgctcaccaacagcgcgggctacaccgcctacgccaactacacctcgccgtcggccgcctccggcaccggcctcgtcggcgtctaccagtgccgctccgacctccccgccgcgatctgcggcggctgcgtcaggtcggccgccaccaagctcgcgtcgctctgcaactccgcggccggcgccggggtgcagctgcgcgcgtgcttcgtccgctacgggaacgactcgttcctcgggaggcaggacaccacggtgctgttcaagaagtgcggcggcgagggcggcagcgacacgggcgtcgtcgccatgcgcgacgcggcgctcggcgcgctcgtggccgccgcggcgcccgccggcgacggctcgtaccgcgccggcgcggccgggtacgtgcaggccatgtcgcagtgcgtgggcgacctcggcgccaaggcctgcaccgactgcgtctccgccgcgtcgtcgcagctcaaggccggctgcgggtacgcctctgccggcgaggtgtacctcggcaagtgctacgcgcgcttctggtccaatgccggaaccggggacaacaacggaggcggcatcagcggcggcggcggcggcattggcggcggcgggaatggcatcagtggcggcggcggcgctgtgggcggaggcaatggatacgcatatggatttgtgccgcacacgtacagtgaccacgtgacttaa

SEQ ID NO: 22307 - DNA, 356 bp, Oryza sativa
  Clone ID: PAT_MRT4530_27495C.1
tgcttcttttcctaccatataccgactcagttgtcatgtccagattagtggcctttggttcaggatacatttttgcgttgaaggtgtcctgcgatggtgagcttctataacctttttgctgtagaactgcatgagttatgcaatctttacaacagggtttgggaattaaaatcgtagcagcaggtttcgtcctaaagcaaaacagttttgtaatccttgtaacggcagctggtgatgaacagtatcagtgtgtgtggtgtcagccatttgtttattgcaacaacattgtagcctagcatttgaaccaaacaagtacagggcccaagtattactacatttgttgcaaaaaaaaaaaa

SEQ ID NO: 22308 - DNA, 495 bp, Oryza sativa
  Clone ID: PAT_MRT4530_27496C.1
atgggggaaaaaaggaaaagaaaagagcggctctcaccggcagtattccggcaggtcaccggcgggcggcgggtcgggtgccatacggaggtagagcatgtcgcgccagttggccgccggcgactggtacaggtcgaagttgcagttgtacttggcggccctcgccgggtcacgcgagtagagccgcgccttgtcgctgccctcgctgccgcgaccgcggcgccggccacctccgccggatattttgccactttaaaaagttttaagaccagaatacctctgctatggacagagaggaatgtgagcgcctgggagaaggctgagctagtgctcgccggtggcgggcggcgagcacgcgggggcggactgcgatgtgcggaggagggtggcggcgccgaagggggaggacgactgggcgacgaggtggaggtagttccagtcctacacatgtgcaacttgctttgtgagagcgggcaatgcaacgaggctgagtga

SEQ ID NO: 22309 - DNA, 587 bp, Oryza sativa
  unsure (1)..(587): unsure at all n locations
  Clone ID: PAT_MRT4530_27497C.1
ccccggctgcagaattcggcacgaggggaggtcaggcgcttaacaaccgtctggctagattccgacgccctgcggggacgcatgcaagccatccttgtcgctggcatggacgtccagacccttttgttctccgacactcgccctgccggctgcgttctacagtcctggactggcccgccctttgcactcgctccgcctcgacgtcgagcccgagggcgccgccgatggcagggcgctcggcggagtcgacgcaaccaagaaggccgctgccgggctcaagggcaccgcccagagggagggagtcggaaacctaacccggaggaccaacgtactacaacagagaatgtacgtgtgacgggacttactacaggactacacgggtgtcaccaacaccagtatggggatactacaagagggtgcatataaacgggaccacaatctaacccatgcaatncgacgcactgtgcaccagtagatgaaagccgacatgcgggtgaactggtgaacattgttatcaatgctcaaagcgtggctgaggggacacattgtgttaaacggattctgtgagtggccaaagcggtggtggg

SEQ ID NO: 22310 - DNA, 1699 bp, Oryza sativa
  Clone ID: PAT_MRT4530_27498C.1
cgcccacgcgtccgcccacgcgtccgcccacgcgtccggcacgtggcagagtatcgtctagagggaggctgctgaggactgaggtaggggaaagaagagaagagaagcaagcaacaccaacagcaacacgcaaggagtggaggactcttcaaggtctggagagtggagaggaagaggaatcctcctcagtcctcaccttcagatttcagaacacaggcaatcggccctagctgcaatccaacaagatgggcatgcctctgctgctgctgctgctgatcctcgtcgctgctggcccccaggcaggcagagctgcaaagccaatcccaaatctccagctcatgaccaaggagggcggcagttcaagaatcatccaggacgacatcataaaggcaatcaacaagcatcccaatgctggctggacggctgcacggaatccatactttgcaaactatactactgcgcaattcaaacatatccttggagtgaagccaacaccgcatagtgtgctaaatgatgtccctgtcaaaacttatccaagatcgctgatgcttccaaaggagtttgatgccaggtctgcatggtcacagtgtaacacaattgggaccatacttgatcagggtcactgtggctcgtgttgggcatttggtgctgtggagtgtctccaggatcgtttctgcattcatttcaacatgaacatttcgctatctgtcaatgacctagtggcatgctgcggtttcatgtgcggcgatggttgtgatggaggctatcctatcatggcatggcgctactttgttcggaatggtgttgttaccgatgagtgcgatccatactttgatcaggtcggttgtaagcatccaggatgcgaacctgcttatcctacgccagtgtgcgagaagaaatgcaaggtgcagaaccaagtttggctggaaaagaagcatttcagtgtcaatgcatacagagtaaattctgatccacatgacataatggcagaggtctaccaaaatggccctgtagaagttgctttcaccgtttatgaggattttgcacactacaaatcaggagtatacaagcacatcacaggtggcatgatgggtggtcatgctgtcaagttgattggatggggaaccacggatgctggcgaggattactggctgcttgcaaaccagtggaacagaggatggggcgatgatgggtacttcaagatcataaggggcacaaacgaatgtggcatcgaagaagatgttgttgctggtatgccctcgacgaagaacatggtgaggaactatgatagcgccttcggagtcggaacggccatagtttgactttaatcaatgttaatggcctcaaatacggttgggatcatgtaaatttgtcctgggtgatttctggattttgcacacacgggcaggcttctcgagactgatcggagtttaggctacttgtccagaaacacattggaataatatctgaataatagatgtatctctcttctctctctctctctctctctctctctctctctctctctacgtccggttaactacgggatgtgacgtagaggtgttagggaggagcgcacgttaatctcgctgtaatccaagttgagacttgaagaattaatgtgtatgctgtaagtcaaatgatatgcgatctgtgcgctgcttactagtatcccaaaaaaaaaaaaaaaaaaaaaaaa

SEQ ID NO: 22311 - DNA, 4767 bp, Oryza sativa
  Clone ID: PAT_MRT4530_27499C.1
atggacgacgcggcggagcggaggcggcggcagcagcagcagcagcagccaggcgccgcccaccccgcgcgccgcaaggtcgtggaggagcccttcgacccctcccctcccccggccgccgccgtggcgccgccttcctcccgcctcgtcggcgccatcgtcgagaagggcttctcctccggcgcggccgccgccgcgccctcctccgccccgagtcccaccgtcctccccttccccgtcgcccgccaccgctcccacggcccccactggaaaccggcggcgagggatgctgccatggcggagggggagggcgaggaggaggaagggatggatgtggacgagacggactaccagcccgtggccgccgcagctgggcccgttaagaggaaggagaagaagggcatggatttcagcaggtggcgggagttcgtcgctgacgatgcgcccccgaagcgaaggcaggcaaagccgttgcagccgaagaaacagactgcgcagaaaattgacaccggggtcgtggctgcaacgacgggtggcaccgcacaggagaagcgctccgggggaattggtatgcagctggaagttggaaatggtaaggaagaattgggtggagctgctttgatgtctgatgtggcgccaaggaagccgatgaaacaggttgatgctagagatgatgtgaggaatgtggaattgcgaggagagggtatggaatcggataatggggaaccatctcttaccgcagagattaatgcggagaacatggctaggctggcagggatgtcagctggggagattgcagaggcacaggcagagatcctgaataggatggacccggcatttgtggagatgctgaaacgacgggggaaggagaagtctgggagcaggaaagatgggggaaagggcaagggtggggggatttcaggcccagggaagatctcgaaggctatgcctggagaatggttgtcagctggtgagcatagtggacacacttggaaggcatggagtgagagagtagagcggatcaggtcttgtaggttcacattggaaggagatattttggggtttcaatcttgtcaggagcaacaacatgtgttctggtacccgttacatgtcaacctggctttcccacttacaggcaagaaagcacatgtggaaactgtaggtgagcgtgattttcttcgaacagagggagatcccgcagctgttgggtacacaattaatgaagcagtggcacttagcaggagcatggttcctggacagcgcgtgcttgcgcttcagctccttgctttgattcttaatagggccttgcagaacctacataagacggatctaattgataactttaaagaatcaaatgatgatgacaagtttaatgactggcaagcggtttgggcatatgccatcggacctgaacctgagttggttctctctctaaggatgtcattggatgataaccatgattctgtagttttgacttgtgctaaagttatcaatgctatgctgagctatgaaatgaatgagatgtatttcgatgttttagagaaagtagtagatcaagggaaggatatctgtacagctcctgttttccgtagcaaacctgatcagaatgggggttttcttgaaggaggtttctggaaatacaacacaaaaccatccaatatactcccacattatggtgagaatgatgaggaagaaggtgatgagaaacataccattcaagatgatgtggttgtatcaggtcaagatgttgctgctggtcttgttagaatgggaatacttccacggatctgcttccttttggagatggacccacatccaattctagaagataatcttgtttcaattcttttgggattagcgagacactctccacaatctgctgatgctatcttgaactgcccaaggctcgttcaaagtgttgttaagttgttagtcaagcaaggatcaatggaaattcactcctcgcaaattaaaggagtcaatctcttgaaggttttgtccaagtacaacaggcaaacatgcttcaattttgtgaacactggagtttttcatcaggctatgtggcactgcccttcgatgtttcagaagctaagtgaaagcaatgttgtagctgaatttagttccattgcaacagagagttatcttgtattaggagctctggctcaaaggcttccacttcttcattcagttgagcagcttagcaagcaagacatgggactttctggtatccaagttgagacatggtcgtggagccatgcagttccaatggtagatttggcgctatcttggctatgcctgaatgatattccttatgtgtgtttgctaatcagtgggcaaagtaagaatatactagagggaagctactttgctttggttatttcttctgtgctaggcatgcttgattcaatactagaaaggatatctccagatagtacacatgatggtaaaagttactgcttgccttggatacctgactttgtacccaaaattggcctgggagttattactaatggatttttcaacttcttggatgataatgccgttgaacttgagcaacatacatctttccatggttcatcgttggtgcagggactttttcatttgagatcccagggtaatgttgacacatcattgtgttcaattagttgcttccaaaggttattgcagctatcttgctctattgacagagtaatccagaacgccacaacaaattgtacagagcatctgaaagaatcaaaaacagggatagctggcaggatactagaacaaggtatttgcaatttctggcgtaataacttgttggacatgctaacttcattgttgccaatgatttcctcacagtggtccatattacaaaacatagagatgtttggtagaggaggaccagcacctggtgttggttttggttggggagcatatggtggaggattttggtctttgaatttccttcttgcacaattggattcacattttgttctagaattgatgaaaatcttgtccacggggccagaaggccttgtcaccgtcaataaaagtgtgaatccaattgtgcaagaaggaaataatgtgactgattcagttgccatcacttcagagagaatcagttctgtcctcagtgtatctttgatggcaggacctgggcagatatctacactagagaaagcctttgatatcctcttccacccttctgttctgaagtttctcaaatcttcagtactagactcacacatgaaattagcaaaagcttttgaatgggacataactgaagatgagtatctccattttagcagtgtactgaattcacatttcagatccagatggttggtcatcaagaagaagcattcagatgaatttacaagaaataacaatggcacaaatgtgccaaaaataccagagacattggagacgattcaagaagaaacagagttagcagaagctgtaaatccaccttgcagtgtgttagctgtagagtgggcacaccagagattgccccttcctgtgcactggattctaagtgcagtctgttgcattgatgatccaaaagccaacctatcaaccagttatgctgttgacgtttcaaaagctggtctcttctttcttttaggtctggaagccatttcagcggctccatgtcttcatgctcctttggtttggaagatgcatgcactttctgcctctatccgcagtagcatggatttgcttctagaagacagaagtagggatatttttcatgctttgcaagaactgtatggcctgcatttggatagattatgccagaaatatgacagtgctcactctgtcaagaaagaaggatcagcctctgtggacgaagaaaaggtgaccaggactgaagttctcagatttcaggagaaaatccatgcaaactatactacttttgttgagagccttattgagcaatttgcagctgtctcatatggtgatgctctttttggtcgacaagtagccatttatttgcaccggagtgttgaacccacaattcggcttgcggcctggaacgctctgtctaatgcttatgtgcttgaactgttacctccactagacaaatgcgtcggtgatgttcaagggtacttggagcctcttgaggatgacgaaggaattttggagtcttatgctaaatcatggacttctggtgcccttgacaaagcttttcagcgggatgcaatgtctttcacagtagcaaggcatcacctttctggcttcgtcttccagtgcagcggttctggcaaagtgcggaataagctggttaaatcgcttatccggtgctatggccagaagcgccatcacgaggatatgctcaagggttttgttctacaaggcattgcgcaagattcacaacgtaatgatgaagttagccgacgatttgaaatcatgaaggatgcttgtgagatgaattcttctcttttagctgaggttcggagactgaagacatcaattgatagataaatggccccaaaagcatttcacatgcactcagagaaggagcaatttttttggtgattgtaaatagtaacatgtgtcaatgacaaatggctagagaatagttgcattgttcgagtttactttgcattacaaaccaaccaaaggaaaacatcagtgtgtgtaggagtgctcccggttgtggcttgtgggttacattttaaaggacaatgaaacagactggtgttacagagatgctaactccaaccttatgctccagtatccaacattttctccctctcttgtgttcttgaaagaagacatttattc

SEQ ID NO: 22312 - DNA, 828 bp, Oryza sativa
  Clone ID: PAT_MRT4530_2749C.1
atgactaacctgttcccagatactccggcaacgatctccttccaccctgctcaccggccgggtcacaaactgaagcttgtgcgaaccggcggccagaagttcaagtgcgacggatgcatggagcacggcgacggcccgaggtatcggtgcgagcgcgagacgtgcaacttcgacctgcacacgtgctgcgccctcgcgccggcgaccagagagcaccgcctcttcccgggctgcacgttcgtcctcctcccggagcctccgccgccgaccgccgctggtgaacggaggatctgcgacgcgtgcggcgagggcgtgcatgcgcgcggcctggtgtaccactgctccggccgaggcgacggcggcctcggcctcgacctccacccgacgtgcgcgtccctgccggcgcggttcgccgtcggcggcggccgcgtcttcgagctccggaaggaggcgtcgaggcggtgcgccgagtgcggggagatgaggtgcggcggcggccgcaggttctggttctaccggtcgtactcgtacgccgacggcgacggcgaggcgctgtacctgcacgtcgcgtgcctcaagcgcatgcagacgcagtacggcgccgccgccgacgtccggagcgtgcaggtgatgagctcgccggtgatggagggcgtgctgcggagcctgccgccggccaggaggagggcgacggcggcgggcggtggcggtggcttggaccggttcttgacgatcgttgccggtgtcatacgtgccatcatcggggtcatcttcggtgatccgacgttcttgattgaactggcagtaggcgcgatccttaattcctaa

SEQ ID NO: 22313 - DNA, 725 bp, Oryza sativa
  Clone ID: PAT_MRT4530_274C.1
ccggccgggccttcctaccaacccggcccggcctatgatttcaccatccttctctgccatcgaccggccacgctcccgctccgcacaccgccgccgccgacgacgaccgccgcgctcctccacctggtgatcccaggttagcgatctgtacgcagtacccaggtatgcttcgttctctgttcgggccatctttctgcctctccaaacccctctccggacagacggatcggagggctaatacagaaggagaaggggggcaatgcgtgacggagatggggaaatctggttttggggaataggtgtaggtggcggcggagatggtgatagcgatgatcaccatctaggatttccagttcgacggggagatgcagccttttcagaagatgtaaactttgcctgtgcgaagactggagccagaaagacacacagcatatggtaggttaagtggtcatcagttcatcagtaggattcagttcaaaggatgattactgagtgcatctcattagctttgaaatgtgtgtttgattaatttggatattggcacagtgggcaagcatcatgcttccattttattttcccttctgtattctgaaactaacgcttagcatatgttcttgagttcttccattttattttttccttttagagctcataaccattattattcgattatctatgcagatatctgttactaaaaaaaaaaaaaaaagcggcctcgagctcag

SEQ ID NO: 22314 - DNA, 869 bp, Oryza sativa
  Clone ID: PAT_MRT4530_27500C.1
ttagaagtctgatttcctgacagagaagcaaccgctgttcgctgcacgctggcaccgctgcttcgacaacgcgtcatccgtgaaccgtgggccgtccgatctgccacgtcctcggactttcccccctctactccgcttcccttcctctctccttcgtcctctcctctccgttccaatccaagccgcgtcgctgggaaatttgcagcctcgatctccgcccgggaagacgcggatccggaggaggaaagcagcatcggtctccatctcctcgggctcaatctttcgtggtctccctcttctgatctcgcaatggcgagcggcgcctacggttcaagggaagggctgacggccaggccggctgcatcatcaagctccagcgagatttcgctccagatcgacccaattaccgctgatttggatgaccatattgtcggacttcgtgggcaagtccgtaagctaagaggggttgcccaagagatccaaacagaggccaagtaccaaaatgatttcatctctcagctgcaaatgactctgacaaaggcccaggcaggcgtcaagaataacatgaggagaataaacaagaaaatcatacagaatggttcgaaccatctttttcatgtaatcctcttcgctctcgtctgcttctttctagtgtacctcgtgtccaagttctctaggagatgatgaagcaccaagacctgacaaaagggagagatcgagtaaaatgttagttggtacctccgtcaatggcagttggcagacactgtgttttgaggttcatgttacagtactacggtagaatatgttgatagttggtgacaaaaagtgtcattcccctgtatcttgtacaagaattccatattccatga

SEQ ID NO: 22315 - DNA, 214 bp, Oryza sativa
  Clone ID: PAT_MRT4530_27501C.1
atgatgaagaggtttgttttgccgctgatgatggcggtgcttatgctgttggtcgtgtcgggatcggcgcggccgctgggcggcgacaaatgggttggagcggccacctccggcgatcatcctctcatacagttcctcaaacagctgtacctgcagcagctaccatcaaggccctcgtgcacgagcaatgacccaaatattccaccgccaccag

SEQ ID NO: 22316 - DNA, 1262 bp, Oryza sativa
  Clone ID: PAT_MRT4530_27502C.1
gaggcccatttagttttccccatttttcggatctggagagaggtgatgggctaatggctgcggcgctcaggtaagcagttgattggccacgatggcggcttggtggagccgctcagcgacggcagcagcggcagccccggctaagagcggcggcgaccttggctagaaacgtcaaggcggtggccctggttcgaaggagctgctcagcggcggaggcggccgccaacttagtgggctcgagccggaggcgagcggcgtcaatggaagccagctccacgatgacgggtgaccgctgttctccgcccacggtctccaccgggatcccttcagacgccaccaccctcctcgccaacccttgccgacctactccacccaagccaccgtgacgccgctccaccggcttcactggcgttcagctctccaccgccggccccgtcactctgcgaccccctcgccatcttcgacacggtggccgcctcccgctccttaggatccccgagtcaccaccgcccttgatgtccgccttggccatggaccattgaggaggaccgaattctgcattggtcatttgtctttgttttaatctttcacatgctcattgtttttcagggatgaatacagtggatcattgtggtaggcctgctcctagaactgttgtcttcatgatgcattcaacacctcgttccttgctctgatcttaattttaactttagtactgaattcgtctatgcaacgttcaggaaattggaacaagaccaggtgagcttctgtgtaccattatgagattgaggccctaatgattgcgagtggtggtggtcatatacaatttcttttttggattgctacttatagtcctgcggcctggatgttgtttttgcgatgcattaatcacccaattttcatactcatatgaatttttatgtggccagacatgaatttgtgtgtgcagtattgttagaaatctgctcacatctgaattttcatttgttcagttatcaggagttggcgcccttgctgtagaacaacacctgcaacatgcacatactctgttgtttctccgcatcggctgtttttttgccaatgaggcggggatggcaacctccacatctgccgctgcctgactacctaactgctatatctgcatgtttttttttggaatacttggataatttactagtgaatgctctgaattttacttgacaaaaaaaaaaaaaaaaaactcgagactagttctctccctcgtgccgaattcctgcagcccg

SEQ ID NO: 22317 - DNA, 662 bp, Oryza sativa
  unsure (1)..(662): unsure at all n locations
  Clone ID: PAT_MRT4530_27503C.1
gcacgaggcggtaccggcgacggcctcccttccctgacctcccatgggcagtggcgacctcccttccccgacggcggtgggcacggtgacgacgacggccgcggttggccggcacggcggcttaatccggcggtactatcctcgggagggccggattctccaccctacggaggagctcggcgtgtggcgggcacagcgacggccgccggtggcagatactaggacgacgggcgcgcagcgggcacgacgacggccggcggcggcgatcctcccccctcccctcaacgccgcggcggcaggggcggctcggccgcctcgggcagcgctgccccgcgccgattcggtgccatcgacgacggcgggcggcaggggcgacagatccggcgacggcgtgcggtggggacacagcttccggcggcgggctagggtttggggttttttagatttttttttgtttgccgaatttattttcacatgcgtccggtataagcgaccgcatgtaaaaatgggattgcccattttcgcttgcggttgcgccgggcgcatgcaaaaagagcgatttttgcagacgatctcgcccgcatggaaagacccttgtagcctgcatgaaaaaacactttttcagtagtgtgtgatggaatttttanaaaaaaaaaaaaaaa

SEQ ID NO: 22318 - DNA, 309 bp, Oryza sativa
  Clone ID: PAT_MRT4530_27504C.1
ttttggggacttcatgcatctttatctcccatatcggattaaagactgacaactgtacctcatcgccaacgtcattatacatgcatacgcctgtgaaaacgactggttaatggtcacccttaatttttttgacaaatgtttagaggtaagggcagatctcaatcagctaacccaaaaaactaaaggccggtcagtttacccaactgcattatatatcgacatatggagctatttaatagacagggggttgtcgacaaatcctagaattgtgatgggggctgccatataatatataaccgcttcttcaat

SEQ ID NO: 22319 - DNA, 557 bp, Oryza sativa
  Clone ID: PAT_MRT4530_27505C.1
tgaatgtgcatcagatttttctctctctctagaagggtgctgatctgttccagaatgcctaaattttgttgatacatcctttctcaatctttctgatttgcttccaagtattatacttctgcattccattctaggcttctctttgtcaggactttctgaatatgaacctatttttctgttgaaatttgggagtttctgtaggtgcatttcttgatttgtcaggaaggcgaattcccggctattttagggctggaaagggttctggtacatgtggccttgatgctattcgtcaggactacttcggattcaactcactgaaacttttttttgctgcacggcaactcactagaacattggagcaatagccatcgttataaaacaagtgtgttcaacagaagcttaacttagcttaaagctgactagtgataaacaatcagtcaaattgcttagtagcttcatcagcttcaaaatcagcggcagtgctgcgagtcagaaacatgttggaaaagccgaaaaggccacggctgcagattcggagtgcaaatgtgcctctggat

SEQ ID NO: 22320 - DNA, 345 bp, Oryza sativa
  Clone ID: PAT_MRT4530_27506C.1
atgggtgcgactagcaagaccatgcacccacagcccaccatgacgtggcctgacgtcagcaaggggtggggcggcgccgacatgcgggccccactggacagaggcacaagagagagggagagggggcggctggcatgcgggacccaccgggcggcggctcatggggggaggaggagcaatcggcgggcgggccccaccggccagcgtcacaaggggggagggaagcggcgagccgccggtcggtccggcctcggccttcaagccggccgccgttatggcgagggcggcggcggcaagcggcatccgacggcggcgggcgaccggggcgacggcgcttccggctga

SEQ ID NO: 22321 - DNA, 243 bp, Oryza sativa
  Clone ID: PAT_MRT4530_27507C.1
atggagatggacccgggagaaaaagggttagagctgagggtgcgcgcgctccggtgccacttccgtctacctccccgcggcggcgggcggcgctccggcgagagcaaccgcggggagccctaccggcacgtggcggcggcggcacaagcagcagtggcaccagtggaccaagagaccagagccatgaaccacggacaggcctaagaactgcaaatcatgatgtataccaaattgttcgaatag

SEQ ID NO: 22322 - DNA, 135 bp, Oryza sativa
  Clone ID: PAT_MRT4530_27508C.1
atgtgttatcattgccaagcttcatcgcacccaacgaagcagctccgacttcacctactagaaaacgaagaaagctggacgctcgccgcatccaagaatggaacccaggaggcgaaggcctcgccgaacagctag

SEQ ID NO: 22323 - DNA, 1244 bp, Oryza sativa
  Clone ID: PAT_MRT4530_27509C.1
gaagaagctagtttcctgcggccgacctcttgcttctcactttttgagagcaagaagacatggggaggggcaggattgagatcaagaggatcgagaacacgacaagccgccaggtgaccttctgcaagcgccgcaacgggcttctcaagaaggcgtatgagctctccgtcctctgcgatgccgaggtggctctcatcgtcttctccagccgtggccgcctctacgagtactccaacaacaacaatgtgaaggctacaattgacaggtacaagaaggcgcatgcttgtggctcaacttctggtgcacctctcatagaggtcaatgctcagcaatactaccagcaggagtctgccaaactgcgccaccagattcagatgctgcaaaacaccaacaagcacctggttggcgataatgtgagcaacctgtcactgaaggagctgaagcaacttgaaagccgcctggagaaaggcatttcaaagatcagagccaggaagaatgaactgctggcttcagagatcaattacatggccaaaagggagattgagcttcagaacgacaacatggacctcagaaccaagattgctgaggaggagcagcagctgcagcaggtgacggtggcccggtcggccgccatggagctgcaggctgcggcggcggcgcagcagcagcagcagaatccgttcgcggtggcggcggcgcagttggacatgaagtgcttcttcccgttgaacctgttcgaggcggcggcgcaggtgcaggccgtggcggcgcagcgccagcagatcatccccaccgagctcaacctcggctaccaccaccacctcgccattcccggcgccaccgccgccgacgcgccgcctcctcacttctgaacctcatgaacttcattttgcaccggcctgctgccatggatatgatgatcagctcatcttctatatcttatgctgttatgcagacagacactgatgtggctatatatatagtatttgtgtgctgctgcattttgttaatcccttataaattgctacttaattatctcatggagaattggagagaccaaatgggcagagctagctagttagctgtgcccaattaagaagctaaatctatcagaagtgtgtactgatgagtgatgagtatttttcttcatttgggatcaaattaaactaagtaaaacatatatatttaccttattaaacctaagtaaaacaatatatattttgacttaaaaaaaaaaaaaaaaa

SEQ ID NO: 22324 - DNA, 2313 bp, Oryza sativa
  Clone ID: PAT_MRT4530_2750C.1
atggccatggcacggcgttccgcctcccgtctcctctcctcgttccgccccttctcgctcctcctccaaccgctcgatgacgccccttcgctctcggccgcggcggcagcagcgtcggcccgccgggggatgtcttcggcgtcggcgctgcgggcgcgggacgagaaggaggtggcgaggtggcgcgagtcgatggaccggatgcggaatatcggaatctccgcgcacatcgactccgggaagacgacgctgacggagcgcgtcctgtactacaccggccggatccacgagatccatgaggtgcgtggccgcgacggcgtgggcgcaaagatggactccatggacctcgagcgcgagaagggcatcaccatccagtccgctgcaacctactgcacctggaatggataccaggttaatatcatcgatactccaggtcatgtggatttcactattgaggttgaaagagcactccgtgttcttgatggtgctatacttgtgctatgtagtgttggtggtgtacaaagtcaatcaattactgtcgatcggcaaatgagaagatatgaaattccaagggttgcatttatcaacaagttggatcgcatgggagctgatccatggaaagttctcaaccagattgtatcaggcgctgaaactcccgatacacagctgatggcacgttccaaacttcggcaccacaatgcagctgtacaggtgccgataggattagaagaagagtttgaaggcctggtggatcttgtggagttgaaggcttataagttcgagggtggtagtggccagaatgttgttgcatctgatgttccatccaacatgcaagacttagtcatggagaagcggcgtgaacttattgaagttgtttctgaagtagatgatcagcttgctgaagcttttctcaatgatgaaccaatacaagctaatcaactcaaggcagctattcgaagagcaacagtagcacgcaagtttataccagtttacatgggaagtgcattcaaaaataagggtgtccagccgcttcttgatggtgtgcttgactatttaccttgtccaatggaagttgaaagctacgcacttgatcaaaacaaatcagaagagaaggtcttattggctggaactcctgctgagccacttgtggcattagcatttaagctggaggaaggtcggtttggtcaattgacatatctaagaatctatgatggggttataaggaagggtgatttcatttacaatgtgaatacagggaagaagattaaggttcctcgcttggtaaggatgcactccaatgagatggaggatattcaagaagcacatgctggtcaaattgttgctgtctttggtgttgattgtgcgtcaggtgatacatttacagatggatcagtgaaatataccatgacttccatgaatgtccctgaacctgtgatgtccttggctgtctcccctatatctaaagattctggaggacaattttcaaaggctctgaatcgtttccagaaagaggatcctactttccgtgtaggtctggatccagaaagtggagagacaattatttctgggatgggtgagctgcatttggatatctatgttgaacgcatcaggagagagtacaaggttgatgcaaaggtcggaaaacctcgtgtgaacttcagggaaactatcactcagcgtgctgaatttgattacttacacaaaaagcaatctggtggtcaaggtcaatatggacgagtttgcgggtacattgagcctcttccatcagaatctgatggtaaatttgagtttgataacatgatcattggacaagcaattccttcaaacttcataccagcaattgagaagggttttaaggaagcttgcaattctggttcgttgatagggcatcctgtggaaaatattcgaattgtgctgactgatggtgcttcacatgcagtggattccagcgaacttgcttttaagttagcttctatctatgcttttagacagtgttatgctgctgctagacctgtaatattggaaccagtgatgaaagtggaactaaaagttcctacagagttccagggcacggtaaccggtgacatgaacaagagaaagggtatcattgttggaaatgatcaggaaggcgacgacacagttgtggtttgccatgttccactaaacaatatgtttggatattcaacagctcttcggtcaatgacacaggggaaaggtgaattttcgatggagtatctggagcacaataccgtatcgcaggatgtacagatgcaactagtgaatacgtacaaggccagcaggggcacagagtaa

SEQ ID NO: 22325 - DNA, 858 bp, Oryza sativa
  Clone ID: PAT_MRT4530_27510C.1
atggggaggggcaggattgagatcaagaggatcgagaacacgacaagccgccaggtgaccttctgcaagcgccgcaacggacttctcaagaaggcgtatgagctctccgtcctctgcgatgccgaggtggctctcatcgtcttctccagccgtggccgcctctacgagtactccaacaacaacaattacttgaaaaaggactattctgttctaattttcttagtcttatgtgtgaaggctacaattgacaggtacaagaaggcgcatgcttgtggctcaacttctggtgcacctctcatagaggtcaatgctcagcaatactaccagcaggagtctgccaaactgcgccaccagattcagatgctgcaaaacaccaacaagcacctggttggcgataatgtgagcaacctgtcactgaaggagctgaagcaacttgaaagccgcctggagaaaggcatttcaaagatcagagccaggaagaatgaactgctggcttcagagatcaattacatggccaaaagggagattgagcttcagaacgacaacatggacctcagaaccaagattgctgaggaggagcagcagctgcagcaggtgacggtggcccggtcggccgccatggagctgcaggctgcggcggcggcgcagcagcagcagcagaatccgttcgcggtggcggcggcgcagctggacatgaagtgcttcttcccgttgaacctgttcgaggcggcggcgcaggtgcaggccgtggcggcgcagcgccagcagatcatccccaccgagctcaacctcggctaccaccaccaccttgccattcccggcgccgccgccgccgacgcgccgcctcctcacttctga

SEQ ID NO: 22326 - DNA, 240 bp, Oryza sativa
  Clone ID: PAT_MRT4530_27511C.1
atggaggccgcgccgtgcggacgcgtggtcccctcccctctcctccccttcctcctccctgccctggagacggaggccgcaccgcgcggacgcgtggtcccctcccctctcctccccttcctcctccctgccctggagacggaggccacgccgcgcagacgcgtggtggatggacgaacgcgtgacgtgcggttgcaggtaactttaagatttgtgatgtggattgggatgttactttga

SEQ ID NO: 22327 - DNA, 336 bp, Oryza sativa
  Clone ID: PAT_MRT4530_27512C.1
atggcccctgcccttgtgcggcgcacggtggaagaagcaccagtgcaccatgcaatgtctcacggtggtggcaatggagatctcttttgcaaatatgaggaaacaactggaaagaagaaggggaggactgtcaatgggatgtggtcagaggagaggtggaaatgggaatttagaaggcagttatcagtagaggaccagatagaccaaactgatttggaagggagcattgttcaagatttcaagtaccacacccaggtgcttgcacaagataacgaattatgcagacgagcaattaagcaaaagaccagcactatcgactcgaaggctcgaagctaa

SEQ ID NO: 22328 - DNA, 652 bp, Oryza sativa
  Clone ID: PAT_MRT4530_27513C.1
aaaaaaaaaatgggccctgggtttttttcaaacaatttccaaaaatttttgtaatgggcccccttaaaattaaattaaacaattttttttggccgggccacccctttatttttttaggggggggtttagggttttttttatcaacaacccaattttttatttttggccttattttttaacaaaacccaggttttttcccgcttgttttcccctcacgttgggggcctttttttccattaacaaagtgaaaacaatggtttttttctttccaaaaaaaaataaaattggccttttaacaactaattttttggggattgtgcccccaacctcccccccccttttttaaaaaaccccccaaaaaccctttttggggggggcccaaaattggttttttttttttacttattttgcccgggttattttttttggggggaaaattaagattttctttaaagttttccaaaaccaacccggccttttaaatttttttaacctgttttgggggccctttttgggttttttttccctttcccctaaaggggtgggacctgcccaactttaaaaaatttttttttttctggggggtttcccccttggccttttaaaggccttttttttttttgggggaaattaaagaaaccctttttttttt

SEQ ID NO: 22329 - DNA, 551 bp, Oryza sativa
  Clone ID: PAT_MRT4530_27514C.1
gcacgagggcagctcccttacatagagccatggactacctgccccagcacaagagggtcgacgaggaggaggcggcggcggcggataccggcaaggcgaaggagcacgggaaagaggaggagacgcagcacggccacagccgcatagccgacgcggtggagtacgtcgacttcggcgctgttcaagttggaacggcttatctcgaaaagaagtacgaggcggcgactggggagaaggcggtggacaaaatggtgaggttgatcggcaaggaggatacctttaaggatcgtgaccaggaggataaaaataagggcgtcgtataccagttctgatatattaataaatcatgtataatatatactccatccgtaacaaaatataagcatttagctaaaagttgctatattttgggacagtagtagctactgcatgcatacgccatatgtgttcagtgctccctcctagccaaggcgtacgtgttttgaataagtggcagtgtggtaagaaacgtatagatcactctatatatttctcttaaaaaaaaaaaaaaa

SEQ ID NO: 22330 - DNA, 222 bp, Oryza sativa
  Clone ID: PAT_MRT4530_27515C.1
atggaggactcacctgaggatggccggtggggctcggtggcggcggcgcccgggctcggtggagggcggcgccggtcggtggagacgccgattgggcaggtcggcaccgggcgggcggcgtcatgctcggtgggggtcggcgacatgggcttggcgagggaggacgactgcggcggcggcgggctcggtggcgacggtggcgggcttggcgagggaggatga

SEQ ID NO: 22331 - DNA, 356 bp, Oryza sativa
  unsure (1)..(356): unsure at all n locations
  Clone ID: PAT_MRT4530_27516C.1
aggggtgtcgccggcttttcgaagctttctactcgcactaggggcgtaccccggggcagatgatgtcgtcggcatgttaggcggaaaagacgctattttagccggaaaggacggatgcgcgcgtcggtctaccaagaggcctttttgtggatgcggtaggcttaaggtgcaaaccttgtatttacgtggcaggctgggtatccagcgactaggagagctctagctggcctgcccgttagagggtctggtccaaccctgtgactatagtttactgtaggaaatgcaaggctgcccgacctttggtggtaaatgggaagtttgnccgcaaaaaaaaaaaaaaaaaaaaaaaaaaaaaa

SEQ ID NO: 22332 - DNA, 396 bp, Oryza sativa
  Clone ID: PAT_MRT4530_27517C.1
tttgttttttttttttttttgtttttttttttttttttttttttttttttttttttttttttttttttttgggggaaaaggaaaaattaccaaaacccggccccaaaggaaacaggcccaaccgggggaaacacccaaggggggggcccacaaaacaaacgtaaagggaaaagcggggcttattacaggcccaaaaaaccccttacgctccaagggagggatccccccccctttattattccaaggtttgggcacaaaaccctcaggggttcatggaaaccggcccttggccccaacggtgacaaaaacccaaaacgggggggtggaaatttacagggtttttgggggtgggaagaccccctccggggggaagcccaaccccggggagaacttccc

SEQ ID NO: 22333 - DNA, 211 bp, Oryza sativa
  Clone ID: PAT_MRT4530_27518C.1
gcacatgagctacacggaaagccgtagcaaactcatcccaagcaatgttagtgggttcaggccaatcgtcagcctcgacgggctcgacggtctgagagaactctggcggacgagacctcagaaaatctgtcagcttggatctattgttgctcatgtgagggtggccatttccatgcgcattatgctgaaaaccggctacggctgcggctaa

SEQ ID NO: 22334 - DNA, 454 bp, Oryza sativa
  unsure (1)..(454): unsure at all n locations
  Clone ID: PAT_MRT4530_27519C.1
gatacatnccttatgttgatngctgtacggcgtattggaatcacncctgtagttttggtaccgttgcatgacagagccaatgctgacattattgttctcggtgataggccttggctattgcaatcngctagacacagcttggcatattcatccatctcatttctgcctgcttcccatgtgacaccagtgtcttctactgattgccccagtggtcngctgtttgtttcggagaactgtttgcatttggttgaaatggttcatngcaaaagactaaatgcacagaagttttcgattggagggactccaaggaaagtgttataccacagtggatagtagaacactgttggtgctgagaacngggttaaccagtgtatcctgntcttcagatattgttcaaatagatccaagtaatggggcattgctttccagattcaagtgcgaaccgggtgaaacn

SEQ ID NO: 22335 - DNA, 174 bp, Oryza sativa
  Clone ID: PAT_MRT4530_2751C.1
tccacgcgtgcggacacgcgtaagtaaaaaaccatccaaccgccgtcgatgagcctcattagaacgaaggtcagggtcggtacatgcactggaccaccagatttgtaagtaccggccctaggcgggattagctcaatcgtccagtgggggactccggtggccgcatcaccatgc

SEQ ID NO: 22336 - DNA, 457 bp, Oryza sativa
  Clone ID: PAT_MRT4530_27520C.1
aagggggggcccaatggccaaaggctaatcttttattttacaaaaaaaaaaacgggttaaaattggcgccggcaaacaccaagggggcggtaaaaaaaaaaggggaaacaaacaggtttaacacaaagggggtgggggcaaccccaaaagggaaaattaagcctcaaacccatgggggtcaaaacggggacaaaaaaaaagggtcccgggtaaccaacccttccaaaaaaattcaacattttaggggcggggaaaacccggcccggaaacaggaggaagcaattccttgggagggggggggggggggggcaacccgggggaaaaaaggtttttggaggccaaaactggacgaggaaaaaaaacatgtttttggtttggggacaaactcccctcctataaaaaaaccacccgagagttttggggaagggcacaaggaagaaagctggggggggggggg

SEQ ID NO: 22337 - DNA, 211 bp, Oryza sativa
  Clone ID: PAT_MRT4530_27521C.1
gtggctcgatctccctatttctctctcccgtgtggtcggagctcactgcagcggcggcggcggcggcgaacgaggggggagagagagaggtcgaggtagagaggaaagggagaggagggcggatgaagattagcgggaaacggcgtgaagaaagtggcggcagtggccgcgaaggccggaaaggcgaccgcctgggaggggacgggcacga

SEQ ID NO: 22338 - DNA, 273 bp, Oryza sativa
  Clone ID: PAT_MRT4530_27522C.1
gcacgaggagacatttcaaagccaggtaataccagtatctttttacatggatgatagcacttcttctggttcttctaggattaattacccattactgtagtagtacagtccaataactaccgtctcctctctggagtgtcactaattgttcttctttgcatgtggaattgactggtgctccacatgatcttcattaactgatggttcaatctagtggtcaaagatctaggtagctgtttgggccttccagggcttcatttaattaactgtctt

SEQ ID NO: 22339 - DNA, 3066 bp, Oryza sativa
  Clone ID: PAT_MRT4530_27523C.1
ctcccccgccgccgccgccgccgcacccgccgatctccaccctgccagccgcggcggccctcctcctttccccccccaaatttcaagactcgattcgaaatccgccaccctttcctcccgccatctcatcctcacctacccaattgtctcctcctcctcaaatttaggttgaaaaagatattcccggcgcctccccacaatcagctagctctacaaatacctcccgcatgagctccatttgcgccatgagatccctcctcgccgcctccaccttcctccgctccggcgcttcccctctgctgcggcccctttcccgtcctctcccttcccgcctgaatctttcccgattcggtccggtgaggccggtctctgcggcggcggcggcggcggacaagtctcgaaggcggacggcggctccgcgatggaggcccagccgtcgtatcccggtgagattcacgtcatcgtgggccccatgttcgccgggaagaccactgcccttctccgacgcgtgcaggtcgaggccggcactggcaggaacgtggcactcatcaagtctgacaaggacaataggtatggattggattctgtcgtaactcatgatggcacaaagatgccatgctgggctctacctgagctttcaagtttccaagataaattaggaacagaggcttacgataaggttgatgtcataggtattgatgaagcacagttttttgacgatcttcatgatttctgctgcaaagctgctgaccgtgatggaaaaattgttgtagtcgcagggctagatggtgactacaaaaggaacaaatttgggtcagttctggacattatacccttggctgactcggtcaccaagctcaccgcacgctgtgagttgtgcggtcgccgtgcattcttcacgctgaggaagacacgggaaactaagaccgagctcattggaggagctgatgtgtacatgcctgtatgtaggcaacactacctggatggtcagattgtcattgaggccacaaggattgtgctggatcttgaaaaatccacacgcctcagaatcggccagtgcgcagcagcaagcgccggcggcggacgcccgctgacgcctctgccgccacccgcgatgatccatcaccgtgggagtctctgcacgaggatctactggagctgatcgcgtggcgggtgctggccggcgacggcgacctgctggactacgtccgcttccgcgccgtctgcccccactggcggtccagcacgtcctgcccgcgcggccgcggcatcgtagaccggcgattccacccgcggcggtggatgctgctccccgagggccacggcctctacccgggccacggcaagctgcgcggtttcgtccgcttcttcaacctctccaccggcgccttcgtccgcgtccacctcccgctcttcagggaccactgcgtcctcgactccgtcgacggcatcctcctcctccagcgcgaccacgacaccgccatccgcctcctccaccccttcagctgcgacatcctggacttgctgccattggagaccatcctcaggtacgtgagccacaagctggtggatcacaagtgtaactatctcagacgaatcggtgatgcctccatcaacgtaatcgccattcaagtagtgtcgctcttgatgtggtcagccgctatggtcaatgaatcttttgcgacctccggggaacagcaatggagggcttctagctggtacttcaaccaaattttcagtccattggcattccaaggcaagctatacatggtgcggcatgaactaacttatggtgaaccagagattctacagctcgatccacctgagctggaagggatggaaccctggctgccaccaccaacgttgattgccaaatgtccagcaaacacagtaaacacatccgacagccggttctaccatctggtagaatgcgactcggaggttctggtgatcgccttaagcgctggcattcataggaaaatctcagtttacagactagctgactttatgctgggaagaaggactctccgggtgacatgcatcggtggcaatgctctcttcattggccagaggaatctgtgtgtcagctccaaggcgttccctaccgttgtgggtgacaccattgtctttcaccattaccagcaagagtgtcttcgccaaaatgccatcccggacagaaatgcccctggctcttcttcttcctccatctcgcgcgtgaagagctcgccggcggccatggctagctccctccctgccatggctagctcgccacgggctccggcggagggctgcgcggtggcggcaggcgcggtcgacggcggcggccacgggctccggcggagggcggcgtggtggcggctagcgcggtcgacggcggcggccgcgggctccggcgtagggcggcgcggtggcggctggcacggtcgacgccgccgcccgtgggctccggcggagggtggtgcggtggcgactggcgcggtcgacggcggctggctacgcggtggcaacgaggaggcggcgatggccaggagctgcgccaccggctcacgcgcgccggcgggatccacgcgtcgtcgccggagtccttccgcgacgacctcagctgcacaggcgcaggtggggatggcaggggagggcagcgccccaatcgccgtcggcaaggcagcatcggcgcggcggtggagatggccatggccgccggcgagctcttcacgcgcgggatggaggaagaagaagagccaggggcatttccgtccaggatggcattttggcgaagacactctggttgaggatggtattccagcgaagcccgttttcataatggttgtccccacccagccatatccgttcacttttttttgttcagagagtgatttggtcatccagatcataagcaaggagaagaaggagaagaggccagtgggtatatttgaggcttatgcagaagcaaggaagaatggaaaagatggagaggactattgtactgaccgtgtcaagggtaagcttgaagcttattttggagttgttaaggaaaagcatggtgcaagtcctgatttgatgaaataa

SEQ ID NO: 22340 - DNA, 523 bp, Oryza sativa
  Clone ID: PAT_MRT4530_27524C.1
gctttatttctctctttttacatcccatggctagatggtgacgacgattcacgcataaactagggttcccccacaaatcatcttacacgtatcctctattccttccttcctttctccgtcatcatcatttttcccaccgacaacaatctctcggagtttgggtattattacttctctcatcaaccaattgtaccactagatttcttagattccttcattatctctatcaataatggcgttgaagtctagttctgctgatggcaaaaccagaagctctgttcagatcttcattgtgtttagtttatgttgcttcttttacattttgggagcatggcaacgaagtggttttggtaaaggagacagtattgctcttgagatgaccaacagtggagctgattgcaacattgttcctagcttgaatttcgagactcatcacgctggcgaatcaagtcttggtggtgcttctgaagctgcaaaggtcaaggctttcgagccctgtgatggtcgttacacggattacact

SEQ ID NO: 22341 - DNA, 220 bp, Oryza sativa
  unsure (1)..(220): unsure at all n locations
  Clone ID: PAT_MRT4530_27525C.1
tgcttttgtaanancatggccactccttggntccttancttttancgcatttaggaaaaagttcaggaanaanttgctanctaantggctganaagataaanaanttntgttccaanagtttttttttttcatttgcatcatgtaaaactcagaantgtttaaaggcttgaaaanccattcgatctcaaaaaaaaaaaaaaaaaaaaaaaaaaaaaaaaa

SEQ ID NO: 22342 - DNA, 327 bp, Oryza sativa
  Clone ID: PAT_MRT4530_27526C.1
aattcggcacgagaaaatttccacgacgccgaggagatatcttcttctcccttcaagcactccatggaaatctcgcgwggccttcctgcgagcgagccgggacgacgacgrcgmcctcgmgastctacaagmacgccgcggtcgacgactgaagcttctcttctcgccattgattttwgtctstctwctcggctgctcgcttgctagcgctsyccggtatagctctgtctagctaggtagactgcrgccatggcggcggcggtggcgtcgtcttgctgcgcctagacaagcgctcgccctttkkgytccgcgcgcggaaagaagagc

SEQ ID NO: 22343 - DNA, 590 bp, Oryza sativa
  Clone ID: PAT_MRT4530_27527C.1
ttggtcctaccgaaatcaccaaaatttttgctgaaatcgaaagtgtaaactctgcaatgccttttggtggcagctaatgatatactcaaaagtacattttgatcttatggagtacattcaatatttctatatgcgtgcagggacctccttgcaaaagaaattactgggaggtgtgacccatatgttttggcaattagagcaccactccacacttcgaaaagagtactaacccaaagtggaacgatgtctttgccttctccaaggaacaaatccaattctcctatgttgaggccattttcaacgacaaagactttgctaaggatgttttcactgggcgagttgtgcttaaccttaatgaagttgcaaagagggttgcatatcatagccccttggtgccacgctggtgccatctagatggtgacgagaatggggaaactaaaaggagacttatgttagtttttttaggtgggtacgcaagataatttcccagaagcattgcaatctaatgagtaatgccgaaattgtacctagagatggtcaagcaagcatggggcctaaggtgtatcagactcctaagctttggtacatca

SEQ ID NO: 22344 - DNA, 520 bp, Oryza sativa
  Clone ID: PAT_MRT4530_27528C.1
gcacgagggggcccgaacggcaccaagttcgccgcgtccatcaacaacaactccttcgtccgccccagggtggcgctcctggaggcgcactaccagcgccggtacgccggcgtgctgatggccaacttccccaccgcgccgccgcacccgttcaactacaccggcacgccgcccaacaacacgttcgtgacgcacggcacgagggtggtgccgctcgcgttcaacacgtcggtggagctggtgctgcagggcacgagcatccagggcgccgagagccaccccttgcacatgcacggcttcaacttcttcgtcgtcggccaagggttcggcaactacgaccccgtgaacgacccggccaactacaacctcgtcgaccccgtcgagcgcaacaccgtcagcgtgcccaccggcggatgggtcgccgttcggttcctcgccgacaatcccggggtgtggctcatgcactgtcacttcgacgtgcacttgagctggggcctgtccatggcgtggctggtcaacg

SEQ ID NO: 22345 - DNA, 467 bp, Oryza sativa
  Clone ID: PAT_MRT4530_27529C.1
tcgtatgaatttctgacaacaaaacataatggcttccaacatggtagagatctcatggttgctcgtcaaaggaaactccgagcttgcagcaaccacgacactggcgtgccaccaccatgaacaggtggattacactggctggcagctatgtcaggcaggaatggggtacacaacgtatacgctgtcgcgatggcgcacgttcgagaaccgccagagggtcgcccccgggacgttggactagcatgtccggcgaggctggtgcacctaggtcatcggcatccacaggagctggtgcacgttctatgtgctcaagcacatgctgatgatcatgtacagatagagcgtggcccacctcgttgggaacgccatgagctacgtgttgcagggttgccggacatggtacatcaaccggcgcggggcgagcctctgggggttctggaacgcggacattctcaatggcgtatgcg

SEQ ID NO: 22346 - DNA, 165 bp, Oryza sativa
  Clone ID: PAT_MRT4530_2752C.1
atgcaaagattatcttctcctctccccgtatcgctgtcacgtgctcccgcgcaccgacggggcgacttgagaaatttctttgcagcttcttcaaaggccccggacacacataggagctacaagtggcctcaaaatgatgtgtcaccccgtttttttaaggactaa

SEQ ID NO: 22347 - DNA, 380 bp, Oryza sativa
  unsure (1)..(380): unsure at all n locations
  Clone ID: PAT_MRT4530_27530C.1
caagaagaagaagnngttgntggtcgaggcgaggaggaggaggaggaagaaggagtttgtgtgttggtgttatgaggtgctggattagacgagaggaatgcccttcggtgggagcgcgcgagaggggcacgcggtgacactgctgcaacaccacctcatacacggcgttggcctcgccgcggccggcaagctcgtctcctccttctccgccgccgccgccgcccccggagcaggtgggctctgggagccaaggtcggtgctcgaccaccgccacatcccgagccccaacccccctacctcggctctcacgctgtccgtccctctcgccgacttggcggccctcgcccgccccaaccccaagaacctctccctcttccccc

SEQ ID NO: 22348 - DNA, 384 bp, Oryza sativa
  Clone ID: PAT_MRT4530_27532C.1
atgcgccggccgccaccgacgccggatccacacacatcagggcaggggaaagccaccgtcgccggatccgggcaagggctggctgccgtcacccctcactgccttccacgcgcgcatgctggttgctgccggcggatccagccaccgccgcccctagcagtcacgccgctccccgagtttgtcgccgtcaccatcgtcatcacccgctgccgccgtgaccggccgccgccgctcctcccaagcccgccgtgcagctcccgattgggcctggcctctcccgagcccgcagctcccgctcccggctgctcccgcctgccgccgctgctccccgagcgcgtcactgcccccgtttgtcgaagtgaggatgagaggagattagaatga

SEQ ID NO: 22349 - DNA, 1914 bp, Oryza sativa
  Clone ID: PAT_MRT4530_27533C.1
atggcggcggcggcggatgggcttccgccgggcgtcaggttcgaccccgccgacgacgagctcgtctcccgctacctgctccggcgcctccggaagcagcccatcccgctccacggcgtcatccacgaggcggatcccctcggcgcgccgccatggatgctcctcgccgatcacggccggggcggcgacgaggccttcttcttcgccgaggcgcgcgccaagaacgtcaaggggaagcggcagaagcgtaccgtcgagggtggggggttctggcaggggcagcgggtttgcgtcgacggtgagaggctgagcgtcccaggcggcgacggcggcggcgaagtcggcggcgggttggagatcgagtggcggaagtacatgctgagcttcttcgccgagggggagaggggcagctcggggtgggtgatgcacgagtacgccatcacggcgcccgatgatctcgcctcgtggccgatccggctttaccgcgtccgtttcagcggccacggcaagaagcgcaagcgggagccggaacgcctgggcgcccgcgtccatgacgacgacgtcgacggtggacaacgcgccgcgccccggcgcgccgtgacagagaccgccctgttcgtgcagccgagcgccgtggattgcgccgaatccgctggtcagagcttctccggcgcgatcgagcctgtgttccacgatctccccgacatgatgccggagcaagctgatgccggagacactacagagactaccgcagcggtggtgaacctcacggacgccatgtccgagcagcccgttcttccgctagcagcagatggcgacgatcagagctcctacggtgtcatcgatccggcgttccgcgatcttgctgacctgatcgtcttgccacctgagccagatgacggtggcatggaacgcgccacgccctgcactcccatgtcagagaccgccctgttcgagcagcaagggcctcctggcaatgctgattgcgccgatcatcagagctcctacggtgtcatcgatccggcgttctgtgagcaagccgacgccggagaggcagagaccaccgtatccgcagcagtggtgaaccagaactactccatggcgttgtgtgatttcaattttccggaggtactcagctacgtcgacttcaccgccggcatggagccctcctggcaacagcgctggcctcccatgtcagagagcgccccgttcgagcagcaggagcctccgctcgcgcccgtggcaatggtggatctccctcctggcaatgccgattgcgccgatcatcagagctgctctggcgtgatcgacccggcgttccgtgatctccccgacatgaccgtcctgccaccagagcaagctgacaccggaggcggagcagagactaccacagcaatggtgagcctcacggacaagctgaaatactcctcctccatggacggcgaggcagcgcaggcgtggtgtgatttcgattttccagagagcactgatgaggcgctcagctacatcgacttcactgccggcgcccacactgacaacgacggtggcgtgtcagagaccgccatgttcgagcagctggggtctccgccacagcacgatcctctgccgatggatgctgatggcgccgatcagagctcctccggcccgttgatcgacacggtgttccgtgatcacgccgaaccgatcgtcctgccactagagcaagctgacaccggaggtggtgcagcagcggcggtgaacctcatggacaagcagaagtattcctcctccatggacggcgaggcggtgccggcgtggtgtgattcggatttcccggagagcattgacgaggtgctcagctacatcgacgtcagcaccgatgacacgagctgcatcgacttctccatggacgacctcttcgatcttgcagactag

SEQ ID NO: 22350 - DNA, 1882 bp, Oryza sativa
  Clone ID: PAT_MRT4530_27534C.1
gctcaggagaaaattatgctcagacagctagacctgctcccaccctgtgtcaccacgcgcgggcggcacaggaggcgaaacctagccctgctgccacccctttccccccttcccccacctcaccgatggaaagcagggcccgaagccaaccaataccgccgtgctccagccatcgccgcgccgccgccggtctccaactccggtgcacatcctactactctccccctccgtttccacctaatccggtattacttggtctctttctcttccatccattgttcaacgccgccgctaccatcgccgccgacgccgtggcccgtgggggcgcgaacccggactgggaagccggcgggatgttgcgcaatgcccccagccccccaaccctgacgctctcccatgtagccttcccctcctgcccctctccccctcggcgaagaagctcagcatgtacttccgccactcgatctccaattccccgccgacttcgccgccgccgccgtcgccggggacgcgcagcctctcgccgtcgatgcacacccgctgcccctgccagaaccccccagcccggcggaagcccatccgcggccgccgccatagccgcctcccaccgcaactcgtcctccgcgtccagatcgaggaacagcgcagccgccgccgccaccgtcgagccatcgccagatccgcctcatcgccatcgaaccgtcgccggatccgccacatcaccgccgccggaacttcctccgcacgccgccgcagcttcctccgccgagctcccgcacgtcgcctctccctccctccacgaggtggcgccggccaggatccgctcgctccgtgcccctccgccgtcgatccctcccatcatgaggtggcgccgccgcggatttactccctccatgcccctccgccgccgtcgccgctctatccccccacgaggctgcaccggcgtggatccgctccctccgagcccctccgccgccgccgctaccgtcccccacgagccggcacggccggtcgtcccctccgtgcgccgccgccgcttcctctctccacgagccggtgccggcacggacccgctctttccgcgtccctccgctgccgacgcccgtcgcggccccctcgcagccccctcgtcgacgccggccgagcgcccccttgccgacgcccaccgccgccccttcggagctcctccaagcgcactctgagcgccgccgccgtcccctcagatgagctcctccaccgccccgtcagatcaccgccgccgccaaatccagccccgttacacacgcttccgcctctcctcgcctccttccctccttttccccccaaaccctagaattcacccccaaaaccctagaattcgagcgatcgaggcggctatggcggcggcggcggatgggcttccgccgggcgtcaggttcgaccccgccgacgacgagctcgtctcccgctacctgctccggcgcctccggaagcagcccatcccgctccacggcgtcatccacgaggcggatcccctcggcgcgccgccatggatgctcctcgcccgcaagcgggagccggaacgcctgggcgcccgcgtccatgacgacgacgtcgacggtggacaacgcgccgcgccccggcgcgccgtgacagagaccgccctgttcgtgcagccgagcgccgtggattgcgccgaatccgctgccccctcctccagcgtcgtctcgcctccgcgcgctccccgccggcgacggccccgcccccttgcctcctctctcgcgagcacggccgccggcgagcaggtctggagcagcgacgcgcgcggccggcccccccatcgcggtcctcgaatcgaatcggaggtatatatccactcctctctcgtattcctactccccac

SEQ ID NO: 22351 - DNA, 2331 bp, Oryza sativa
  Clone ID: PAT_MRT4530_27535C.1
atggcggcggccgcggatgggcttccgccgggcgtcaggttcgaccccgccgacgacgagctcgtctcccgctacctgctccggcgcctccggaagcagcccatcccgctccacggcgtcatccacgaggcggatcccctcggcgcgccgccatggatgctcctcgccgctcacggccggggcggcgacgaggccttcttcttcgccgaggcgcgcgccaagaacgtcagggggaagcggcagaagcgtaccgtcgagggtggggggttctggcaggggcagcgggtgtgcatcgacggcgagaggctgcgcgtccccggcgacggcggcggcggcgaagtcggcggggaattggagatcgagtggcggaagtacatgctgagcttcttcgccgagggggagaggggcagctcggggtgggtgatgcacgagtacgccatcacggcgcccgctgacctcgcctcgtcgccgatccggctttaccgcgtccggttcagcggccacggcaagaagcgcaagcgggagccggaacgcctgggcgcccgcgtccacgacgacgacgtcgacggtggagaacgcgccgcgccccggcgcgccgtggcagagaccgccctgttcgtgcagcagtcgagcgccgtggattgcgccgaatccgccgatcagagcttctccggcgtgatcgagcctgtgttccacgatctccccgacatgatgccagagcaagctgatgccggagacactgcagagactacagcagcggtggtgaacctcacggacgccatgaccgagcagcccgttcttccgctagcagcagatggcgacgatcagagctcctacggtgtcatcgatccggcgttccgcgatcttgctgacctgatggtcctgccacctgtgctcgcgcagcaggagcctccgctcgcgcccgtggcaatggtggatctccctcctggcaatgctgattgcgccgatcatcagagctgctctggcgtgatcgacccggcgttccgtgatctccccgacatgaccgtgctgccaccagagcaagctgacaccggaggcggagcagagactaccacagcaatggtgagcctcacggacaagctgaaatactcctcctccatggacggcgaggcagcgccggcgtggtgtgatttcgattttccagagagcactgatgaggtgctcagctacatgaacttcaccgccggtgcccacgacaacaatgacggcagtgtgggacgcgccgcgccatggcgtcccgtgtcagagatcgccatgttcgagcagccgagcgccgtggatctccctcctggcgatgctgattgcactgaatccgccgatcagagcttctccggcgtgatcgagccggtgttccatgatctccccgacatgatccgtgagcaagctgatgccggagacaccgcagagactactgcagcggtggtgaaccagaactactccatggcgttgtgtgatttcgacagcggcattgacttcaccgccggcgcccacgacagcggcatggaacgcgccacgccctggactcccatgtcagaggccgccctgttcgagcagcaagggcctccgctcgctcccgcggcagtggtggatctccctcctggcaatgctgattgtgccgatcatcagagctcctacggtgacatgatcgtcctgccatcagagcaagctggcgccggaggcggagcagagactaccgaggccctgttcgaccagcccgttccgccgcttgcagcagattgcgccaatcagggctcctacggcgtgatcgacccggtgttccgcgatctcgccgacttgatcgttctgccaccagagcaggccgacgccatggacggcgaggcggcgccggcgtggtgtgatttcgattttccggagaacattgatgaggcgctcagctacgtcgacttcaccgccggcgcccacgctgacaacgacggtggcgtgtcagagaccgccatgttcgagcagccggggtctccgccacagcacgatcctctgctgatggatgctgatggcgccgatcagagctcctcctccggcgcgctgatcgacacggtgttcggtgatcacgccgaaccgatcgtcctgccactggagcaagctgacaccggaggtggtgcagcagcggcggtgaaactcatggacaagcagaagtactcctcctcctccatggatggcgaggaggcgccggcgtggtgtgattcggatttcccggagagcattgacgaggtgctcagctatgtcgacttcagcaccgatggcgcgagctgcgacttctccatggacgagctcttcgatcttgcagattag

SEQ ID NO: 22352 - DNA, 313 bp, Oryza sativa
  Clone ID: PAT_MRT4530_27536C.1
cccacgcgtgcgcacgattgagggcatgaagaagttctagaccctatcgtacatggcacaggtcatcgtgaaggacctcctgaagcagatcgagtacatgctccgttccaagtgggtgccctgcctggagttaagcaaggacggattcatctaccgagagaaccacagatcccacggatactactatggcatgtactggaccatgtggaagctgtccatgtacggctgccctgacgccaccgaggtgctcaaggagctcgaggaggccaataaggcgtaccctgatgcattcgtccgtatcatcggcttgcac

SEQ ID NO: 22353 - DNA, 626 bp, Oryza sativa
  Clone ID: PAT_MRT4530_27537C.1
atgaccctaaatcgtaaaaccgggctggagctgacggcgggttctagagcggctacgggcagcttgatgaccggcaaggaggcgggagaggatagcagcgccgacgccgacgccgatgacatcgagcggggggacggcgccgattgcaacaacatgatccgggcatccagcatatgcgacaagctgacgacacggccgacatcgagcctgtcaaactggttaggggcgagggccgccatcgagctacgccattcagcattgcaacgacgacgtcgtcaagtcattgctcgagctcgctgcgtggccgtcaactcccgcgccagccccatcatcgccaccaactcatcccccgttgcgtctccttcaactagtgctgctaaggccacaagcatcacaaaaatccggacatcatgtcggcgatgagctagctcaggtcgctggtgaagcagtcggcctgcagggcgagcgccatccgccaccactcccaccgccgccgccgcttcagcttccgccgctctggcccccacccgccgccgctccagctcgtgctcccccggcggcctggccggccaaagaggagagagagaaacaaagagagaagggaggaagaagaacgggtcccacat

SEQ ID NO: 22354 - DNA, 284 bp, Oryza sativa
  Clone ID: PAT_MRT4530_27538C.1
taaagagctatgacgtcgcatgcacgcgtacgtaagcttggatcctctagagcggcgccgccggcgccgcctcccaccgggcaccgctaggctgcacgccgccgacgtgcaggctcctcaccttgaacctcccgccgctgttccccgccgcgccgagcagcctcgccgacgtgcacgacggccaccatcggcgcgcccaccgcctcgatagctgccgcgacgggtctgcgcagctggatggccgccaccaccggtgacgcggccgtctggagccgcgtgactcc

SEQ ID NO: 22355 - DNA, 435 bp, Oryza sativa
  unsure (1)..(435): unsure at all n locations
  Clone ID: PAT_MRT4530_27539C.1
gtgctaattaaattagtctggatgtacggttaatcgatcgcttggtttttactatactgcctgaattactccattcttaatttctcgggacggatgaaacggattggtttaatttgtttgtaataatgtatatcaagctagctagctagcttaatttggtgatgatctggataccacaataagacttttggaactccttgtgatatgatggtgaggtgtgggactgattaagaaaaaaaaaaaaaaaaaaaaaaaaaaaaaaaaaaaaaaaaaaaaaaaaaaaaaaaaaaaaaaaaaaaaaaaaaaaaaaaaaaaaaaaaaaaaaaaanccccaaaaaaaaaaaaaaaaaanaaannnaaaagggggggccttttaaaaaaaaaaaattttaaaacccggggtgtgaaagcaaaatttttttttattggggcccc

SEQ ID NO: 22356 - DNA, 4441 bp, Oryza sativa
  Clone ID: PAT_MRT4530_2753C.1
ctaatgttctgccttgactcgctgacatacatcacacacagctacatactctgctatctcacgcttcataattgcccaccaaaatttctccttgagatcttggtacatcttggtactaccagggtgaatggagtataaagtgtcatgagcttccttcaggattgtatccttcaactccttgttgtctgggacacaaattctctcgcccaaccatatagttccttgctcatcttccaaataaccgatagtctttcctcttctcatatacttcttgagatcttggatatcaggatcattggtttgagcctttctaacctgatcaataagagtgggcttcgcttctaaagctgcaacgaaatctctactgacaattcccaaattcagtctttcaaattccttgcataactcccacggcaactgtcgtccttccgtagcattgcaatagcctttcctgctgagagcatctgctacaacgttagcctttcccaggtggtaatgaattcccatgtcataatccttaattaattccaaccatctccgctgcctcatgttcagatctggctgggtgaagatatacttcaaactcttgtgatccgtgtacacctccgtacgagtaccaaagaggtagtgacgccaaatcttcaaggcatgaaccactgcagctaactcaagatcatgagtagggtaattcatctcatgaggacgtaactgacaagatgcataggcaaccaccttcccatcttgcatcagaacacaacctaacccaagcttagatgcatcgcaatacacttggaaacccttctttggatcaggcaaaatcataatgggtgctgatattatgtgacttttcaactcttgaaaactctgctcacattcttctgacaacttgtacttcacgtctttctgaagcaggcgtgtcatgggcttagcaatcttggaaaaattctctatgaacctccggtaatagcctgcaagacctaggaaactacgaatctctaaaactgtcttcggttgtttccaattggttacagattccgcattactagggtcaacgacaactcctccagattcaaacaacccataccgagtggtaaaagccgtcttaggtatatcttcctttttaatcctcgactggtgataccttgatcgaagatcgatcttggagaaaacagtggcacctttaagctggtcaaacaaatcttcaattctaggcagcgggtacttattcgtgatggtcacatcattcagtgcacaataatccacacacatcctctgggtatgatctttcttctccacaaaaatgactggagctccccatggagatgaacttggtctaatgtatcctttctgaagcaaatcatctacttgtctcttgacctctgctaattcattggttgccattctataaggtctcttatggattggggttgtccctggtaccagatctattctgaattctatatctctcttaggcggcataccaggtaaatcatccgggaacacatctaggtagtcccgtactatgggaatctcttccaaagttatttggttcaaacttgaccttaaaggttcagaaggcaatgcatgaacagttacaacttgaccatcattgctggtgagagtttcttttctattggcacaatctatcacacctttatatctggctaaccagtccatcccttgaatctctattctgacagaagggctacgttgtgatgagagtgcttggttactgggggtactaaccatcaaaggacatctaagatcttctatctccatcccatgatttcccacaaaactcatagataaaaaggaatgtgtagcaccagaatggaaaagcactgttgcaggaactgagttaacaggaaacatacccaaaatcacatctggagcacctttggcttctacagcagcaacatgattgacacgagcctttgacgctggtgcattggagttattctgcacaggaacaatcttcacacgtcgaggcttcagatacttgtcagaataatgacctggttcaccatagttgaaacacacccctggcttgtttccttgctccctcttgacaggcgggtgctggactggagttgcaacaggacgtggagcttggttgcggttgttattgccagcattgttgttgtagaactgacgctgtggacaaacaacagatgaagatcctccctgtgacactacctgaggtcccatagtgagacacggcctctgactattcccttgctgagctttgaactgagcaatcctgagtttcttctgttccattcggttgtacttatcctcctgacgaatggccttatccaccaacttttggaaatcagaataatccccagtcattagcgggtaagaaagctcatcattcagtccttctaagaaattctcttgacgctcttcatctgtgcgcacatcctccggagcataacgggccagacgattgaactcatgcatgtactcggtgacagaacaggatccctgagtgagcgccctgaactccttcttcttgagagacaccactcccgatggtacacgagtcttcctgaaagcagcagtgaactcaagccaagtgattggttcagcagtagcttgttctggggaggagcatgattgttcccctggttctgttggttctggagttgttgcatcatcatgttcatgagttgcgcctgttgagctaggacttgggcaagcgtgggattctctccattgttgttgttgttgttgttgggcccatttccattgctgcgggtgttcaccataagacatgtagttcttcctggcatcggagttgattgaaggctcgttcggctcgttctcatcatcttgagtagcaccccactcaacctttgaatgggtgcgctttgaatcttcttcctcctcatcacttaaattaacgaccggaggatccactgggactaggacagcttctcttgccaccacacgaaccttgggcaccaactggtagcagggaacaaaaagagctctcttccttgcagtaagatgaaccctggccttctgtggtggcgcttctcccttcaattcggccagttccttctctagacgatcaaccttgtcctctagcttgcaaatcttaccacggttccaatcttcacgagcttgagcagctgacacaacttcagcgcgggactcatccatggcccacagcatctcgaccaaatgtcttatggtagcatcattctcaattccttcaggatcaacatagctggcacggtcacttccctggggctgacgaggatggcaacgatactcagtgtcggccaacagatcattgtaacggtcgcggagctctcctatggcgatccttgccgcctcctgacaagcataaggatagcttccccctctagcctcgaacatcatcgatgggatgtcttcacgatcactgttcaaggtgaccatgacacggcacttctcttcatcacgatcatgaggaatctgggcatacaaaggggcagtctcgaatcctatggtaaaggacatcgtacgcagctcctggacaaatccctcaataccgaacaagtactcaggcttgaagcgtggcatcttcagcctcactatagaactcctctgatgaatggttgcaaggtgagtatatgacatactcaataagccatgcagcaaatatgcaagtgcaggggataacaaaggatggcataatatagtctcatttgcataaatggcaatcaataaatacgcgggcacggctattcgaatagttttactctggccagaggtgtaccagtggtctttcgtctctgaaggatcaaacaaggccttatcggctctgggcgtccccagccgaagttcccttaggttcctcggaggccttattgtgtactcgttcgacatcatatgatctgacatcttttggtacgctgcgtatcttgaggcttggatgatctcgatagaccaagttgtcaatgacgatgatggtcctgatctagtcggaagatgtacttggacaagttggatctccccacagccgaagtcatcgagtagcttgttgttggagaatccatcttttgaacccatctcgtcgaaatctgttgtcgacatggcggtctgaaggtctgactcgtagtcgacaacagggtagccttcatcctcgagctcgcgcccgacggaatcagagacagtgctagatccctacggccggcctctgaaggtaccggatagggtcgatccaggcgtatctctgatgtcgatatccggcggcttgtcttggcgtatgttggcttgtatgttgtggcttctggtgggtgtatgttgattgtgttggttctctctggtgggtgtccgctctcttcccctcctagggagtcttgtatttatacccataggtgttcccttgtccaagtagaactaaggaaaccaatatggatacaatccgagtagtacttgtcgtttccat

SEQ ID NO: 22357 - DNA, 268 bp, Oryza sativa
  Clone ID: PAT_MRT4530_27540C.1
tccttttctgcttgcaaatgatcaccctttcctccgctttctatcaattatacaccagtccacagcgcgaccaataaccgacggcgtcgatcacagcgtttccctacgtcgatgagtgggaattctaccttatgacgaccacaatcgaaacaaggcggtatctctgctctaggaagaattttcctcatgcctccatagtggtaaacctaaggtacgaggaagagaaggaaaaaaaaagaaaatggataagtctgcccaaccccattaa

SEQ ID NO: 22358 - DNA, 150 bp, Oryza sativa
  Clone ID: PAT_MRT4530_27541C.1
atgacggatcgtgagcagccctccatggagtttgtgcagtgggctgatgagctctgtggcgccgagggctgctcggctgaaggacgatatgcaaaaacttgcccagcaatggtgcagatatggtgtcaacgtgagcagctgcgtgtctga

SEQ ID NO: 22359 - DNA, 383 bp, Oryza sativa
  Clone ID: PAT_MRT4530_27542C.1
aaaatctgagtcaacgagccaattggagagaagaatagcaaaagccaaagatatatatgcctctggagttcagtgcatgaatcagcttgctaatactctacaccagcgttctattgcacactctgagcagatgggtctaaacatattgtctcatgcaacaagagctgccaattttctagcagtgatggtttcagaggctgagcaagtatcaaatgacgtttttaagtctatttctgaactcaaggaactattagctttttccgctgatcagcaagaagtaatgtttaaaagagatcttgtatcagcacaagtcatgtccaagacatcgattgatttcttcgaagatatcaggggtcatgcgtctaggcttatcgaacatatgg

SEQ ID NO: 22360 - DNA, 2473 bp, Oryza sativa
  Clone ID: PAT_MRT4530_27543C.1
gccgccccgctcccgcgacccctcccgcgctgctcccctcgcccgccgccgccgcatcatcctctcctctcctctcctctcccactaccactccagcgctgctcccctcgccgtcgtcgctgccctccccccgatcgatcgatcgctccccctcccgcgccgccgtggccatggaatccggccaacccaactccgccgccgcagcagataagacgcagaacagttctgtaccacctgtggaaggtgtagctggaggagggactagttatggatgggtagatggaggattacaggcgtcgagtttaggtaatggtgctattgatcctacaaagatacactcagcagatcttttgcatgtctggtctatgccgagcacagcaaatgttagccaacaagaagcacctcgacctctggaacatgttaaccttttggcagcaagaaatgaaagggaaagttttcaaattgctttacgtccaaaggtatcatgggccacttctggtattgcgggatctgtgcaggttcagtgcactgatctttgctcttccgctggagacagttacgttagtggttggtcaatctgtaaccttgcgacgtgtggtgcctatgttaggtgtaccagatgctcttgtgccaattgatccactcaattcacaaataaacctgcttccaggagagacaagtgcaatatgggtctcactaaatgttccttgcggacaacagccgggtctatatgagggtgaaatatttattagtgctgtgagggcagaagcagagtccagaggagaatccttgacaaaatctgaaaggtaccagctttacaaagaattaagaaattgcattgacatcactgaacccagagactactcgtcatcagaggaaatggtacaaagacttacatctgcttcaaccacactgaggaggatgttagctcttccatcattccaggactgccaagagaataatggattaggagatatgatggatgaagatattatgaacaatgtggcagttcgtttgaagttgagcctcactgtttgggattttactctcccactgacaccttctttacctgctgtttttggcatatctgaaactgtgattgaagatcggttttgcttggagcatgggaccaaaggttggtatgatgcactcgatcatcacttcaggtggctcctccaatacagaatcagtccatttttctgcagatggggagatagcatgcgcattctagcatacacatgcccttggcctgctgaccatccaaaggcgaaagaatattactctgatccaagactagcagcatatgctgtaccatatgcacctatcctatcaagcactgatgctgcgaaaaattccctgcgaagagaggttgaaatcttgaaatcagaggctcattggtcgaaatcttacttctatttgtgggatgagccactgaatatggaacagtatgatgtaatctgcagcatctctaatgagttgcgttcatatgcatctgatgtgcgtattttgacaacttattactgtggcccaagtggttctgaactggctccttctacatttgaggcctttgtgaaagttccaaatgttctacgtccacatacgcagatattttgcacaagtgaatgggttcttggcacgagagaggacttggtgaaggatattgttgctgaactacgacctgatcttggtgaagaatggtggacatatgtgtgtatggggccttctgatcctcaaccaaactggcatcttgggatgcgtggaacccagcacagggcagtgatgtggagagtgtggaaggaaggtggaacaggattcctttattggggtaccaactgctacgagaaggctatgattccaagtgctgagatttgtttccgacgtggtcttcctcctggcgatggggttctgttctatcctggtgaagtgttttcttcatcacatgaaccggttgcgtccactaggctagagcgcattctcagtggcatgcaggacatcgaatacctgaagctttattcgtcaaggtacggcagggaggaaggtttagctctccttgagaagacaggcgtgtatcttggcccagatcgttatgcacttgaccatggaccaattgatgtgatgcgtggtgaggtataccgcacttgcaggtcttagggcagagctatcaacttctggtgtttcactgtagcatccatcctgttgttgtacatatgatttctcatgtactgggagttgctagcagcaaatacttatcgttgaacccatcaaagctccgttttcacgctcaaaaaaaaaaaaaaaaaaaaacagtatacctatgatgccgccagcaacagccactggagcaatggcttctttcggaatgcaatcttgggagattacagtgcacgtatcttcccgtttccaatctccagctgatcttaggagatcaggggcgaggatggcttgcaatggtggctgcacggacacttgttga

SEQ ID NO: 22361 - DNA, 3132 bp, Oryza sativa
  Clone ID: PAT_MRT4530_27545C.1
ctatttaaagaagccctcctccttagcttctccctccagccggcgagagggagccagccagccagccagccagacagcttcttcttcctcgtccctgtgttgctgcttctgctgctgctgccgccttgtgtatagccttgtgtatctcctttggcttcttctgggtacctgccggccggctaagctagctgatcgccggccgccggctctcgttgagctcttcttggtcccggccgcggcgttgttagtgtcgtctttgctgggctgcaggaagatcagcagcaagctaagctagtagcctccaaggtgcccggagatgtcgtcggcgctggaggtggagggctcgggctcgccgggcgtcgagccggcggcgacggcgacggcgagcaggctgaagcggcacgactcgctgttcggagacgcggagaaggtgagcggcgggaagcaccacggggggtcggcggtgagctgggcggtgacgctgcacctggcgttccagagcgtgggcatcatctacggcgacatcggcacgtcgccgctgtacgtctactccagcacgttcccggacggcatcggccaccgcgacgacctcgtcggcgtcctctccctcatcctctacaccctcatcatcatccccatgctcaagtacgtcttcatcgtcctctacgccaacgacaatggcgacggtggcacgttcgcgctctactcgctgatctcccggtacgccaagatcaggatgatcccgaaccagcaggcggaggacgccatggtgtccaactacagcatcgaggcgcccagctcgcagctgaggagggcgcagtgggtgaagcacaagctcgagagcagccgtgccgccaagatggcgctcttcttcctcaccatcctcggcacctccatggtcatgggcgacggcaccttgacccccgccatctccgtgctctctgcggtgagcgggatcagggagaaagctccaaacttgactcagacgcaagtcgtgctgatctcggtggccatcctgttcatgctcttctccgtccagcggttcggcaccgacaaggtcggctacaccttcgccccgatcatctcggtgtggttcctcctcatcgccggcatcgggctgtacaacctcgtcgtccacgagatcaccatcctcaaggccttcaatccgtggtacatcgtgcagtacttcaggaggaacggcaagaagggttgggtgtctctcggtggcgtcgtcctctgtgtcacaggcacagagggaatgtttgccgacctgggccatttcaacatcagggccgtgcagatcagcttcaactgcatcctgttcccatcggtggcgctctgctacatcgggcaggcagcgtacctgaggaaattccctgagaatgtcagtgacaccttctacaaatccatcccaggcaagtacagagatcgactgaattttgggccgctgttctggccgacgttcatcgtcgcgatcctcgccgccatcatcgccagccaggccatgctctccggcgcgtttgccatcctctccaaggcgctgtccctcgggtgcttgcccagggtccgggtgatccacacctctaagaagtacgaggggcaggtgtacatccccgaggtgaacttcatgatgggtctcgccagcatcatcgtcaccatcgccttcaggaccaccaccagcatcggcaacgcctacgggatctgtgtggtgacgacgttcatggtgacgacgcacctgatgacggtggtgatgctgctgatatggaagaagcacctggtgttcatcctgctcttctactgcgtgttcgggttcacggaggtggtgtacctgtcgtcgatcctgtccaagttcgtggacggcgggtacctccccttctgcttcgccatggtgctgatgacgatgatggcgacgtggcactacgtccacgtgcggcgctactggtacgagctggaccacatcgtccccacggcggagctggcgtcgctgctggaggagaacggcggcgtgcggcgggtccccggcgtgggcctcctctacacggagctcgtccagggcatcccgccgctgttcccgcgcctcgtccgcaagatcccctcggtccacgccgtcttcgtcttcatctccatcaagcacctccccatcccgcacgtcgccgccgccgagcgcttcctgttccgccaggtcggcccccgcgcccgccgcgtcttccgctgcgtcgcccgctacggctacaccgacgccctcgaggagccccgggagttcgccgccttcctcgtcgacggcctcaagatgttcatccaggaggagtccgccttcgctcctcatcaagagatgatcgatgccgccgccgacgacgacgacgaggcggcggcgaggccgaggcggtcgacgagctcggccgtgcacagcgaggaggcgatccaggcggcgtcgtcggggaggacgacggccagcagcgtccagctccaggcgggcggcgagccgccggcggcgatggacgtggaggaggagaagcggctgatcgacagggaggtgggccgcggcgtggtgtacctgatgggcgaggccaacgtgtcggcggggcccaactcgtccatcctcaagaggatcgcggtgaactacatctacaccttcctgaggaagaacctgacagaagggcacagggcactggcgattccaaacgatcagctgctcaaggttgggatcacgtatgaaatctaggcatttgatacatctgatctgatatcaaagtatacatatatatgtgggaaaaaaaatgagcctagtataaaccatgggttttgttgatgatgctgatgttggaagagagggcaaagtgccttttttgtttgttgaataagtagtttcagctgaaagtgttggcaggcagggagggtttggtttttctttcgcctctgtacagtgtggtttgtgtaaacggcgtgtgccaacttgagtagaaggtttctcactggtggtgtgttgtccatgctaaaaaaaaaaaaaaaaaaagtttatggccatcactcatcacacaccctccggtgaactcccatgcacgcgcttgaaatgcgatgcaaatggcgatgaaaagttataaagtactccaaaaaaaaaaaaaaaaaaaaaaa

SEQ ID NO: 22362 - DNA, 1070 bp, Oryza sativa
  Clone ID: PAT_MRT4530_27546C.1
gcacgaggaaacacggcggcgcaatgcctccctgaaccctccccacctccactttggaaagctcaggaagcgggcgcgcgccgtggcctgccggcggcggacgccagccggctgctgccatggccaagaaggggctcgttggtatcctgtacaagctccgcgacgtgcaccatcgcgcgccgccgacgccgacgtcgccctcgtcgtcgtcgtccccgcactgccacggccggcatcagctctgctacccgccggcgccgtcgtcgtggccgtggccgtcgtgccggcacccgcgcaccagctcgttcaggtggccgacggcgccgcagcaggggcaggcggacgacgacgccgccgccgccgccggctccgtgtaccgcaccgtgaacactgtctacgacacgtcgtcgctggagcacttcaacccgcggcgctcctccctggacgaggcgtcgtcctgcattgctgaccggagcttcttcgccgtggagtcggaggtggaggtggaggaggagaaggagaaggagaaggagctgcagctgcgtgagacggccgtcgtgcgcggcgtccgctcggagcggctctttttcgagcccgccggcgcggagttcttgcccaagcagagaggatttcaggaaatggcgcgaggcaagaacgacgacgaggcgacagccatggacgtcgtcgctcgcaagaacgacgacgtcgacgaggcgacgccgatgaccacgccgcagaccggcaagaacgaagcggaagcggcggaggccgccgcgctgaagggcggcgcggtggtgctgacggtggagtcggaggacccctacggcgacttcaggtcgtcgatggcggacatggtggcggcgcacgggctgcgggactgggagggcctggaggagctcctggcgtggtacctcaagctgaacgccaagggcgtccatggcgtcatcgtgggggccttcatcgacatgctcgtgagcctcgcgtcctcgccgatcccgtcgcagtcgccctcgtcgtcgtgcatcaccttcgaggactactcgtcggcgaccatggaggaggagagctaa

SEQ ID NO: 22363 - DNA, 677 bp, Oryza sativa
  unsure (1)..(677): unsure at all n locations
  Clone ID: PAT_MRT4530_27547C.1
ccacgcgtccggaacgagcaccaaacacaagcgcggaagccgcggcggcggaggcggcgagccgacgagccgccggcgagttccgccgatgccgccgaagcggggcgccgcgcccgcggcggccttcgagtactgcgagctgtgccgccgcaaccacgaccagggccgccgccaccgctacttccccgcccaccgcgccgccctcgccgccgcgctctcccgcttccgctccaagctcctcgacctgcgccgcgcgctccgccacccgtcctccgcggcccgctcccgcctctggtgccccttctgctccgccgacctcgtcgacctcgacagccgcttcgcttgtagcaatgctatttatcatctcgcaagccaggatcacctaaatggcgtgaaggctttcctgcaaaagcatggtggtgggatggatcaggtggattcgtttaggatttcggaggatgagcttgctaagtgggagaagtgctgcgagtcttcgagtacagaacaagagacgtcgaccgaagggttgattggaccatctctggggccactgaaagatatccgaaataaatctacctctaaacatttggataattttgcagaaacttacatcccgtcttctagtaatactgcatctaatgttgntatgcctttacaaagtcctactaatggggcat

SEQ ID NO: 22364 - DNA, 1686 bp, Oryza sativa
  Clone ID: PAT_MRT4530_27548C.1
atggaaacccaaccgacggatggccgtggcgccggcgccggctacccacggtgggtgatcctcgaccgtgaagccgaatacctacacgtcaaccatccctgctccgccgccgcggatgccaagaccgaggcggccacgctctcctccggcggccacaccgtgcgtgtctccctagacctcagggcgccgccggcggcgtcgcgcgtgtgctacacctgctccgttcccgtcgacccggcactagggccaccctacatgagcgtcgccgccgcccatggcgactccctgctcgtgcttgtgtccttcagttaccaagaagggtacgagcaccacacggacacgatagataagtacctctacaacgcaggcgccgccgccgccgccgacccgcctcggccgccgtcgctggtgcatctcccggcttactacaatggagaagagacgacccttccgtcgccgttgccgcacgatcttgatgagaagaccaccggcctcctgcgccgcggcgaggccgaggccgatctggtggtggcagatctcatcgtgaaggatgggggtgaagctgacgcgccgaaggaggccgagctcctcgtgctccgctccggcgagtggagcgtcgtgcgggcgccgatcgtccacgacgacggcaaggccgaggagctgtccttctgggaaaccgacatggtcgtcccagtcggcgaccggcggctgtgctgggtcgacctatgtcgcggcatcatcctctgcgacatgttcgacgacggcgacgagactctccggccgcgatacttctcgctccccattgagccccccgccgacgaccgagaccgacggagatgccagatgtcaaagagaagggtctgcgtcaccaatggcggaaccgtgctgaagctcgtcgacgtctccccgcgctgctgctgcggccgccgcggcgcaacgcagtgcgaccattccagcggtgtcttcgtcatcaacacatggacactacatatggacggcgacgatgatgacatggcagcttattggaccatggacgccatggtcgacgccaccgagctctggtccctcgacgcctacgccggcgtcccacgcatcaatccacaattccccatcgtgagcatggatgaccctgatatcatatgcttccaagtgcccgaagaacacaagattggaagaaaaatgcaatcgtggtacatcatgctcgacacaagcagcaaaacattgatgtcagtctgccgtctcgatgagtcaagctcgcttcaattgtcttatggatatgcttactttgttagcacggtctctcactgctttaattcttctgatgatggggggttcaacaatgatgtaacaaagccggcactgatgatcatcgatgataaggtggcaacaaaaaataatatcatcgctaatgattcattgcaatcttcatgcgagtcatctgccaaaaattccaaggtcaattctcctaaggagattttggctcttctccaagagataccggagttgtctcgtgatgatttgctgagagcgtatagcttgctttgttatgacaataatggccgccggctcagttcacttttggggctcccaatgagtctgaggaagccatggctgttgatggagattaaggctagtgaagcctgttcggtttgttgtgcatgtagagcagacatgcaaaatgtgtga

SEQ ID NO: 22365 - DNA, 193 bp, Oryza sativa
  Clone ID: PAT_MRT4530_27549C.1
ggcacgagattttctgcaacaaaaatatggcttccaacaaggtagtgttctcagtgttgcttctggacgtcgtctccgtgctcgcggcgacgacgtccatgccgtagtaccaacaacaaaaccaggcggtctaacaccttggcaccacccttactaagtaaggactggcttgcctaatgacccttaacatcct

SEQ ID NO: 22366 - DNA, 3631 bp, Oryza sativa
  Clone ID: PAT_MRT4530_2754C.1
atggggaaaaagttagacaccgtgcagtgcaacgatgaggagaaagtcatctttgccgctcaccaactgcaggggcccgcatctctatggtgggaccactaccaggctacgcagccagaaggacagcctattacttgggcccgtttcaccgccgctttccggaggacccatgtgcccgccggagtcatggcccttaagaaaagggaattccgagagttgaagcaaggcaaccgctctgtgatggagtatttgcatgagtttaacaacctggccaggtacgccccggaggatgttcgtgaagatgaggagaagcaagagaagttcttggcaggaatggaccctgagctgtccgtgcgtctggtctccggggactatctggatttccagcgtttggtggacaagagcatccgcttggaagccaagcacaaggaactggagtcgcacaagcgtcgcctgacgaatttccgcaaccaacagggggctaaccaaaggatccgctacaccaatccctatccagggggatcctcctcgcagcagcagcaacagcagcagcaacctcgctccgtgccccaacctcaattcgtggatccccgagctctcctctacccgccacctccctcgccttcgtctctcgccgtcggaagcgccctagcgtcgtgtgacctagcgccgccgtcgtcgccgctccagctgtgcgccgccgccgttccggtcgtcgtcgtcgctcgggaagatcgccattgtgatcgccaagtcgccgccgtcctcgtccaccgcttcgccaccgccggagaccgccggagcaccgtcgccgccgtcgacccgatctccgccgccgcttcttcctcgtcgccggcgccgtccgttgcttttctgccgccgttttggtcaccggtaagttcgccgcaccgcgctctacgtcctggtgccctccgttctcgtcgtcgcgccgtcgttcgccggcgagcttgcgctcccgagctgccgccggtgctgacgtcatcgctgccgtcatcgctgacgtcatcgttgccgttccccagcaccagactgagaagtggcggagataagcccacgggggtcgctggggagtccatgcctctggtttttgaggggggtgattatgatccaggaatggtgcactgtggtggattagtcagcaagggacccgtgcgccccatcctcctacgccagccgtgcagcctggacaaggccgcagagacgttcaatgtcagcagcgtctgtgcttcaactgcttcgagcccgggcactttgcggataaatgcccaaagccgaggcgccagcaaggccaagcgcctccccgccccaacaacggtgataggactgtcggaaaccctcatcgtcagtgagttcggagatgtgtttccggaagaactacctggtatgccgcccaagcgagagattgagttccggatagatcttgctcgaggaaccactcctctgtacaagcgaccctaccgcatggcagcaaatgaactagtcgaagtcaagaaacagttggaagagttgaaagaaaagggagctctcaatgaagttactatcaaaaataagtaccctcttccccggatcgatgatctgttcgatcagcttaaaggtgccactgtcttttcaaaaatcgatcttcgctccggatatcaccagttgcgtattcgtgaagaagatatcccgaagaccgcgttcaccacgcgatacgggctgtatgaattcacggtgatgtcgttcggtctgactaatgctcctgccttcttcatgaacttaatgaacaaagtgttcatggaatacttggataagtttgttgtggtcttcatcgacgacatcctgttgtccgaagtcaagttcttagggcacgtgatctctgctaaaggagttgccgtggatcctgaaacagtgaccgccgtcactgattggaagcaacccaagacagtcactcaggttcgcagctttttgggtttggccgggtactaccgaagattcatcgagaatttctccaaaattgccagacccatgacgcagttgctgaagaaggaagaaaaaattgtgtggagcccgcaatgcgagaaggcgttccaaactctcaaagagaagctggaaggtcatgtggtagcctatgcctcccggcagcttcggcctcatgaaggcaactaccctaccaatgatttggtgttggccgctgtgagaagatggttagagctcatcaaggattatgatgtgggaatccactatcaccctggtaaggccaacgtggtcgccgacgctctaagtcgaaaaagccattgcaacactcttggcgtccgtgacattccatcggaacttaatcaacagatggaagccctgaacctaaacatcgttagccatggattcttggctacgctggaagccaagcctaccttgctcgatcaaatccgcgaggctcagaagaatgatccagatatgcatgggatcctcaagaatatgaaacaagagttcgtggccctttgtgatgtgtgccagcgtgtcaaggcggagcaccagcgaccggccggacttctccaacctctacaagtaccagaatggaaatgggatgaaattgggatggatttcatcaccggacttccaaaaacccaaggcggttatgactctatatgggtagtcgtggatcgactaaccaaggtagcacggtttattcctgtgaagaccacctatggagggagcaaactagccgaactctacttcgctaggatcgtgagtctccatggcgttcctaagaaaattgtatctgatagaggaagccaattcacctctcacttctggaagaagctccaagaagagttgggtacccgcttaaatttcagcaccgcgtatcacccacagacagatggacagaccgagcgtctaaatcagatcctagaagatatgctccgtgcctgtgttctagattttgggaagacctgggataagagtctcccctatgccgagttctcctacaataacagctaccaagccagcatacaaatggcaccctatgaagcgttgtatggacgcaaatgccggacaccgctattgtgggaccaagttggggaaagccaagtgttcgggaccgatatcttgagagaagctgaagcgaaagtcagaaccattcgggagaatctaaaggtggcccagtctcggcagaagagttatgcagataaccgacgccgtaacctggaattcgcagtggatgactttgtgtatctccgggtcacgccgctgcgaggcgtacgctggtttcagacgaaagggaagctcgcacctcggtttgtgggtcctttccgtatcattgctcgacgcggagaagtcgcttaccagttggagctgcccgcctccttgggcaacgtgcatgatgtgttccatgtgtcgcaactcaagaaatgccttcgagtgccgtccgagcaggccgactcagagcagattgaagttcgcgaagacttgacctacgtagagagactagtgaaaatcctggacaacatggagcgcaggaccaggaaccgggtaatccgtttttgcaaggtccaatggagcaaccacgccgaggaagaagctacttgggagcgtgaagacgagctgaaggcagcccatcccgatctcttcgcca

SEQ ID NO: 22367 - DNA, 582 bp, Oryza sativa
  Clone ID: PAT_MRT4530_27550C.1
atggagggaaagaggactaccacttcgatggtgatcatgtgcatggtcatcttgagcctcactgtcgactacgccaccgcagcacagtgcggctgctgcatatcctctcgagcaaaagcatgttgttttggttgtattgctgctggtggctccgactcagtctgcaagaacacttgttgtttcccatgtattctggccgattctgcggcggcctccgcgccgctcgcctcggatccgtgctcccctctggccgcactgccgccgacgcccctcccctctgccagatctagggagggatggaatgggaggggaggggagctggatgccacgcggggggagggcgcccggctgccggatctgtgcggggacgaccgccaccactggatttttgcgttgatggccgccgccgcaggatccgtgcagggacggccgccacccgccggatcccacgcccaccaccgccaccacgtggaggaggccggcgcgcgcctacgcccaccgcagctgtcgccgcgcgccaccgccgctgccgccatcaggaggagaggagaggagagtggagagaggagaggagaggtgtga

SEQ ID NO: 22368 - DNA, 360 bp, Oryza sativa
  Clone ID: PAT_MRT4530_27551C.1
atgcatggcaatcatcatgaagcacgtcaacctaacccgacaacgtatgccgtgtcatattgtcggattcggctcaatcggctaaccctgtccgactcgaactctgtcgatcctagtcgcagccgattcggacttcagccgatccttactctgtttccgggacgatctctatctcgaactccgtctcgattccttcttcatctccgattcttggattaccaaatttggtcattacattactggcatgtactccctccatccccgcatgtggccaccaccatcatcgccgatttgcacagatgcccacgggaactcacagcgggagtccaagtcctgcggcgccaaatctccgcggagcac

SEQ ID NO: 22369 - DNA, 319 bp, Oryza sativa
  Clone ID: PAT_MRT4530_27552C.1
tggttactggtctcctttggctgatccaaaatccagggggatcatatgtggcttgacacttgatacaagtgagaagcacttggcgcttctttatctagcaacaattcaaggcattgcttatggtactcgtcatattgtggagcattgcaatgctcatgggcacaagatcgatactcttcttgcttggggcggacttgcgaagaattccttgtatatccaagagcacgcagatataactggatgtccaataatacttcctagagagaatgagtctgtgcttttaggagctgctgtcctgggagctgttgttgcaaagaag

SEQ ID NO: 22370 - DNA, 170 bp, Oryza sativa
  Clone ID: PAT_MRT4530_27553C.1
tttgggtgtaagagcgcaacgccattattatgatggatatggacattaaactggcagttagcgtagctcggctgttttccggacgtggagttaacgcccaaattatattcggaaattacctactgacatttccgggccgagacaaatagaccctcaagttaaatttgcct

SEQ ID NO: 22371 - DNA, 3432 bp, Oryza sativa
  Clone ID: PAT_MRT4530_27554C.1
ccacgcgtccggcgagcgatagaaatacgagagcgggaggagaggcgaggagagagagacacagataagctcagccctaaccctagctccccgcctcgccgccgccgccgccgccgccgccgcaccgctccccggggagcgggacgtcgccgccgcggcgcctaggtgtggttgactcagcatatttgttccgtctgccagccgccgcccctagggatcgatggctgttgtcgatcctgttatgtttgacaacgacgacgaggaaggtccgatctccttcaagaggtcgagcacctctgtgaagaacaggcccacccccacaaagcaggagggctcatcagggaatgccggacctattaggagccctaaggctgttgcttccaatcaacagaagaatgggctgactggtgtttcgaggcctttgcaacagaggccgcagtcaagcagtccaaaccctcgacctttgggatcaggtcagccgaacagttccaaagaacatagtagccataatagtaactcagtggataagagtaaattgaaaagacctttcgtggaagataagtcggatgactcagaagatgaccataagccaatcggattaaggagaaaggtcgaggatagaaatttgaagaaacctgctgtaggaagtgggacagcaaatgattcagatgatgataaaccattgagtctcaagataaactcaacaaaaacgccttcgagtagtgcaaataaggctattgtactgaaaactacacctaaaattgagcaacctggtgatgattcagaggacgataaaccactggccagcaggttgccaactaatgctgctctgaaaaggggaggtaatgtttctgatgattcagaggatgagaagccattggctgcccgattttcgaaagttactggcaatgcatctgcaagtatctcaagttcaaaggacaaggtcctgtctgcaagtataaaagcaagttcttccagcaagatgtctaacaatgacgcgagcacatcacgaaattcaattaaaaggccaattgacaataataatcaaacaagttcagctctcaagaaggcgaggccttcagatgtttctgcgtctgcaagtgtcaaaagagaacccaaggcggatgacaatgacaatgtacctctttcacaaagactgaaaatgggtgagtcttcaaaaagcaagccacctgcaaagaatatcgtaaagaagagtccttcatctttaaagaaggacaacaagaaaatgaaaatgaaaatgaaaacaaagaaaacaatgaaaaattctcagttctcaaagacaatgaaggtccctcctggatctggtggtggacagaaatggactaccttggtgcacagtggtgttattttcccccctccatacaagcctcatggtgtcaagatgctttacaacgggcaacctgttgatctgacgccagaacaagaagaggttgccaccatgtttgctgtgatgaaagacactgattatgcatccaagcaaacattcattgacaacttcttcactgattggagaaaaattcttggtaaaaaccatgtcatcaagaaatttgagctttgtgatttcaccccgatctatgaatggcacctaagagagaaggagaagaagaagcagatgacatctgaggagaagaaagcattgaaggaagagaaattgaaacaagaggagaagtacatgtgggctattgtagatggtgttaaagagaaggttggcaatttcagagtagaaccacctggcttgttcagggggcgcggagagcatccgaagatgggaaaactgaagcgccgcattaaaccaagcgatattacaataaatatcggaaaaggggctccgatccccgaatgtcccatacctggagaaagttggaaagaagtcaaacacgacaacacagttacatggttggccttttggaatgatccaataagccaaaaagatttcaagtatgttttcttggcagcaagcagtgcattaaagggccaaagtgacaaagagaagtatgagaagtctcgaaaattgaagcatcacgtacacaaaattcgtgacacttacacaaaggatttcagaagcaaagataagacaaagaaacaaattgcagtggcaacataccttatagataagttagcccttagggcaggcaatgagaaggatgaagatgaggctgaaactgttggttgctgtacactgaaggttgataatgttacttgtgttcctccaaataaactgcagttcgacttccttggtaaagattctataagatacttcaatactgtagaggttgaactgcttgtatacaaggcaattgaggaattccgtgctggcaagaaaccaggacaagatctctttgacaaactcgatacaaccaggctaaatgctcatctaaaggacttgatgcctgggcttaccgcaaaagtgttccgtacatataatgcttcaatcaccttggatgatattttgcacaaagaaacagaagatggaactcttcttgaaaaaattgcggtttatcaacgagccaacaaagaggttgctataatctgtaaccatcagcgtagtgtctcaaaatcacatgattcccagatgactagattgaatgagaagattgatgaattgaaggcccaaagggatgaattgaaggcagacttgagcaaagtaaggaaaggaaagaatctaggcaatgacaaagatgggaaaccaaaaagaaatttggcccctgaagcgtttgaaaagaagatatctcagattgaaaccaagatagagaagatggagatggataagaagattaaagaggatttaaagacagtggcactaggaacttcaaagatcaattaccttgatcccagaattactgttgcatggtgcaaacgccatgaagtacccatcgagaagattttcaacaaatcactcattgcgaaattttcgtgggcaatggacgtcgacccggatttcagattttaagagggtacaagagcattggctactggtcatccggcctgtagtaaagttgatccagcttccagtccttgtcccggacactaatttgcagctaggaaaggaagagctcggtgtttgtttttgaagtcccctgctcctggaaagaaggaagcacccggcattctcattgtaggctttttttttcttttactacttgttggtgcctttgccatcggtcctcaagttctgtatgcatttgggctgaggaattttagctcgctgagaacgaatggacattcattttataccgaattaatctcaaatataccatgaggtttcgtttggttgcggaagggaacattgtttgcgtatgtacttgcgaactggtaatggaagaagtgctgaggtgtaaattttgatcaaagatatttttcctgatcctttcatgttatgttagtacataatccatgataacgtttgaggac

SEQ ID NO: 22372 - DNA, 345 bp, Oryza sativa
  Clone ID: PAT_MRT4530_27555C.1
gcataccctttacccttcgatatacgtcacatatcggtatggtatacccacgcgcatacggatacttcctgcgtacactaaggaaatcattcacagaatctacggatgggaaaagtcctactcggacaagactgggtcgtcaatgtatcgtatagggtctgatatctccgatttctacttggagaccgcctgacctgcgatataaaagggaccccccagggagtacctaaggcatcgaatctcagagctaacacaaccgtcacagcctacgaagtcggagcccgcaaggagccaaatcgccgggatctagtcgaaccaactcgaccacgatcttgctggatccgt

SEQ ID NO: 22373 - DNA, 253 bp, Oryza sativa
  Clone ID: PAT_MRT4530_27556C.1
acgcccacgcgtacgggccgcgcgcgccggccgcgcgcgcgccgtagaaatcgacgccgagctcggtatcggacggcggcggcgctccttctccgtcgacttctgccgcaactggcccatgtataggagggagctgactgactttatggccacacctattgtgagagctctcactacaatctttttcatttggcttgcactgccaggatggctattaagagttttcatttttggtacatttgtcctgcctttt

SEQ ID NO: 22374 - DNA, 2940 bp, Oryza sativa
  Clone ID: PAT_MRT4530_27557C.1
atgttccgccgcctcctcctccccctccggcgctgcttctccacctcgacgtcctcgagcgcgacgccaaccctctactcgagcggcaccaccccggtgtccatcctgtcctggggccgcggcgcgtcggggcagctcggcggcggcaaggaggagcgccgcctctacccgtcccccgtcgcgcacctctccctccccgaccccgcgccggtgctctcccccacgcccggacgcctccctgacgccgccgccgcggggacggcagcggggggcgtggaggtggggatctcctgcgggctgttccactccgcggtcgtcgtcgacggcggcgcctgggtgtggggcaagggcgacgggggccgcctcggcctcggggacgagtcctccgccttcgtcccgcgccacaaccccaacctcagcgagctccgcgtcctcgcgctcggcggcatccactccgccgccctgaccgcctccggggaagtcttcacctggggttatggtggatttggtgctttggggcattatgtttaccatagggaattgttgccaaggaaagtgaatggtccttgggaagggaagatatcacacattgctaccagtggagcacatactgcggcaatcactgactcaggtgagctctacacttggggtcgtgatgaaggcgatggtaggttggggcttggaagtggaggtggtcctggtgaagctggatctctcagtgttccttccaaggtgaacgctctgcctgtttcagttgctgctgtggcttgtggtggttttttcactatggctctgacttcagatggtcagctatggagttggggagcaaattcaaacttcgaattgggtagagggagcaattccagtgactggaggccacagcttatccctagcctgaaaaatctccatgtaatccaagtagcatgtggtggatatcattctttagccctgactgatgaaggtgtcgttctctcatggggacatggtggacacggccaacttgggcatccaacccttcagaatcatagagtcccactagctatcaaagctttgtctgaagaacgaattgtctatatagcctgtggaggttcgacttctgctgcaatatcagagaaaggtgacttgtacatgtggggaaatgcaagagattgccagttaggtgtccctggtttgccagaaattcagccgctaccgcttatgctctcatttgcacgcactagctttgggggtcagactgcacatctgcctaagtctaaaagttcaggatataaacattttgtgtccatctccagtggtctcccatgcttcctcgccatcaggcggcaatctcctggctatagttcagttcacacagcttccttcagttcacaacacaatcaattgagcacggataggtcaggtactgttatggcagaaagggagctaatcgacaaggataaacttatacttagaggtttgcagttccatggtttccatggagtgaaacaagaagagaagactctgggccaaaagtttgttgtggatgttgatgcgtggatggatttgagtgctgctggggaaactgacagcatatctgatacagttagctacacagatatttacaggattgccaaggatgttgttgaaggcccatcgcggaaccttttggaggcagtagctcatcgcatcgcgagtgccacattgctgaaattccctcaaatctcagccgtcagagtgaaagttgggaaacctcatgttgcgttacctattctctttgcatttctcaagagcagttgcaggagaggagtcttcttcttcactgaggcaagttcttggccggagacaagaatgccaccagtgaatagcgacggagcaggaccaagctccggcgaggatggctctgcagccgccgtgaagaagcgcaacaggcctaagtaccatcggtttacgcagcaagaacttcaagcatgcaagcctatactgataccccagactgttattcttgtactagtgtttgtgggcctaattttcattccaattggtcttgcttgcattgcagcctcaaataaggtcgttgaattggttgatcgttacgatacaaaatgcgtgccacggaacatgcttcgcaacaaagttgcttttatccaaaactcatcaatagataagacttgcacaagagtcttcaaggtccctaaagatatgaagaagccgatttacatatattatcaacttgacaagttctaccagaaccacagaaggtatgtgaagagcctcaacgatatgcagctgagaaatccgaagaaggtggccgacacgcaatactgcagccctgaagctactgcgaatggcagacctattgttccttgtggtctcatagcttggagcctgttcaacgacacatacagcttcactcgtggtcatggcaacgagacattgagaaatgggactttgattggtggagggcagttaaatccaagcaaacctctgagtgagcaggaagatctgatcgtctggatgagaatagcagcactgccaacattcagaaagctgtacgggagaatcgacatggatctgcaggccggtgaccgtgtagaggtgacgatgcagaacaactacaactcgtacagcttcaacggcaagaagtcgctggtgctgtccaccgccgggtggctcggagggaagaacgccttcctcggccgcgcctacgccatcgtcggcttggcctgcttcctgctggcactgctgctcgcattgctctacttcgtcttccccatgtcagtatctgcaactgcagaattaaaccctcagttcttcatccccttcatgaaatgttcatggattcttatattggaatacatgattcagacatggttgctgaaagaattttttaatacagtgagtgctgtgcaaagtgcaaatttgggagttccaggtgccccatttgttaaagacaccacatga

SEQ ID NO: 22375 - DNA, 1590 bp, Oryza sativa
  Clone ID: PAT_MRT4530_27558C.1
atggggaggctgaccgtcgccgcggcagtggccgcatgggcgatcccgctcgctgctctggtcgcctccatcgtgcccgacccttacatggaaatggacttctctggaagttataaaatttggcaagcaggcgtgttgaatttcttgagcattttcaatttccctgtattgctttcgagttactctactaaatttgcacttattgtcacatcttgccacattctcattggaaatgatgagatcttccatgttccccaggtgcagcgctattgccgtggagatttcttaatatgggatcccatgatcaccacccctcctggcctgtactacatttcactagcatatgttgcttccttgtttcctggtgcatgggtgactagaatagcagaggcatttgatgccctttgcactacagcacttctgagatccactaatgttatcatggcgatgatctgtggtgttctagtccatgacctgcttttgtgcatcaggccaaaaattggcaagaggaaggcaactgcatttgctattttagtagctttgtaccctattcattggttctttactttcctttattatactgatgttgcatcattagcggcagttcttgcgatgtaccttttctgcttgaagaaacaattttgggtcagtgcagcgtttggtgctttttctatacttctccggcagactaatgtaatatggatgatattttttgctgccaatggagccatcgctcatgcacaatatctttatgtcaaggacaatgtttgttacgagaacagtgaactaacagataagtcaaacaaagaggcatctcacatggataataaaaccactgctccaggttttacagaggaaatatgggatgccatcttcaagttatggaattcaaagtgtgaagttttaattgcttttataccatttgcaatggttcttttggtgtttgtggcattcatagtctggaatggtggcatagtgctaggtgctaaggaagctcatgttgtttcaccacactttgcacagtttttgtactttggtctagtgtcagctgctgccctcctgccatggcattttactcctacccgagcatcagacctattccactggtgcagaaagaacaaaacatatagttcttttgcaattttggtggctcttggtttaagccttgttgctgtacatttattcagcattgctcatccatatcttcttgctgacaatagacactacaccttttatatttggaggaaggttatccaagttcactggatgatgaaatacattttgactccagtttatgtgtactcatggttttcaattgttaatatcttagggaagtcacagacaagactttgggtgctgtcctttgttctatcagttgcccttgctctcatccctgccccattggttgaatttagatactatacaattccattggtcatactggttcttcattctccagtgatcagcaatgttaaattgcttgctttggggtttctttatgccgctgttgacttcttcactctggcaatgtttctgttcagacctttccagtggcaacatgagcctgggacacaaaggtttatttggtag

SEQ ID NO: 22376 - DNA, 199 bp, Oryza sativa
  Clone ID: PAT_MRT4530_27559C.1
aattccacacatggctatttcacatatgcacccaaattcaaatctatcggagatcggagcgtttagctgctttcgatgtctgtggctgctggatggtaggcaaggctctgggcaagggcaggctcgaactgccgccgacaggtgctactagactacagtcagatgatatcctagaccaacatacgcttagctccatgcg

SEQ ID NO: 22377 - DNA, 465 bp, Oryza sativa
  Clone ID: PAT_MRT4530_2755C.1
atgtctggagttccccccgccgctgctggaggagatggcacaggtggtgcgccgccaggagctggagccggcggtggtgcgccaggagccggtgccgcgaacaacaacatcaacggaggcaattctgcctcacaatccagtggagggccattctcgaggtgtatccttcttctgttccctttgttagcgctatcgctttactgtcatgtgcgctatgttcctgttcctgaccttcatgatgcctcaagcatgttattgagttactgtaatgtttctgttcctgacattcatgatgcgcatagaaaggaaaatggcgccttcaacacgcggaagcggcgagccttctcggcggcgtccttgtacgtgcgcccgtgctccggcatgcttcggccgccgttgtcgtcggagcttggaggcggcgggagtgaggaagaagagggagagccgagaggggagagggaatga

SEQ ID NO: 22378 - DNA, 2458 bp, Oryza sativa
  Clone ID: PAT_MRT4530_27560C.1
ctagctatcaacgccttcgtcatcgtcatcgtcatcatcttcatcataatcatcatattcatcttcatcacttgattcatcaaaatcatcttggtcctcgtcgtatcttgcagaggaaactgcttcattattctcattttctgaatctgaaccgtcctcttcatattcctcatcaacctcaatgcccaaatccaacttcatctgccttatattgttttccagttcagctatatgctgactgagggcctcatgacgctgcattgcaacagcacgcttcaatgcctttgcttttgttaaaagattcctaggccttatgttaataggcctcctataattctttccacggtaaaatataagtgcatagccctttgtaactctttcaatggcgactagtataccgccactctcatactctagaagccgtgccgtctcctcaacaaagggcagagtcttctgctttgttatcaatttgacaacttccctgtgcttccaatgcaagtgcatattttcaatgacgccatcaaagacaccacgaattccaacaggcaagtatgccttaagacgcaaaccgattctacggaaaacagatctttcctcatctgtaatcatttctttatcatcagatggattagcaaggaccatagaagcttctatctttgatagtaaccgctctgctctatgtatttttgcctgtgcaatggaaagtttgtgctctagtctcttgaaaagcttttccttcactgatctagaagatgcttctttcatttcttcttgctccttagcagttacttcccttccccaacgagcttgagcctcctgaaattcagcaagagtacccgcaagagcatgcccatctaaactgtcatccattgagtgcacaaccggaatgcatcttttctgctcctctacattctggatatcttttgtcaactcctctctttcagccaaagcagctgcaacagatgttggaaggaagtcttttccacgatatattacaatgtagtacttatttcgaagaagcaaggtgccccctgttagattctttatttcttctgacattagcttgttgtttgtattctggattccacgtttcacagctattttcaccaccaaactcttctcccagagcttaacaatagctgctgcaaggccttgatgattccggtttctccctagagcaaaatggcatggaagatcccttgctaacttccgcaaattagtcagctctgcattggttagggtcaaacgcattccagttggaagaagtctaaatggtgttttataaccaggaattgtttgaggcaacaagtcggcatccacaggtaaaatgcctgttccccaccaatccacaaaacgagggcccaactcatcaagcatttgattgaactccagctcctcttcagtcatgtcctcagtattctgcatatttaatctggctgcaatctcacgttgggtgtttacatccttcccctggctatcatgctctgtggggcttgatgcatccgggatgaacaatgtaccgtctgcccctttcaccgctgatgagttaccatccaatgtttcagatttcaaaggccttttgtaattgctccctctgtaaaccaccataacactcccagacctccatatgatcaatcctcctgtccgtcgctcgactagctcatgagcagttttcatgtcgtgcgcgaggtcctcgtggaacttgagccggaccaactctgatttcctccaggcgtcgtggatcttctccgtgacggcttgcgtgacgcccgccttgggcacggtgatgcggtcccgaagagtcatccccagccgccggaggcgacgcagctcctcgtcctcgatcgtgagctcggccagcgagggcgccctaaccctcctcctcttcaccccgtcctcctcgttctctcttcctcgcgcgacctcatccctctcccaggggaggacggactcgtcgaagctggaggcggcgaactgctggtcggggcgcgcccagctgcggtcgagcaggtcgctgaggcgctcgttgccgtcgggaggcgcggtggccgtggcggcggcggcggtgggctcgtcgtcgtcgctggcgaggccgaggttgcggaggcggtggacgattcggtcgatggaggaggtcggggagggagccggaggtggtggcggcggcgcggcggggtcggtgggcccccacttctgcagccacggcgcgcctcgggttggatttggagccggaggggcgcggttgccgccggaggaggaggaggaggacgcggcggcggtggtggaggaggaggaggaggcgtggcgggaggagagaaggcggagcgggaggaggcggaggtgggggcgggaggagaggcggaaggagtggtggagcgggagctcggagagcgccatggatggagtgtggtggggggtttagcgcggtggcgcccacgcgaacacgcccacgcgtccg

SEQ ID NO: 22379 - DNA, 428 bp, Oryza sativa
  unsure (1)..(428): unsure at all n locations
  Clone ID: PAT_MRT4530_27561C.1
gtntacccccnagnctggtggcggagacnccttccaaaagcgtgaacgcgcgcaggaggantacnccatccgccagcgtgagaaggaaaagcttctcgagctcaagaagaagctcgccgagcagcaagctcacctgaacaagctttccgagcacatcgacgagctcacaaagagtcagggaggcgagcagaactaaacagctattcttccaatggttgccagggactagttttgactccgttcaagctgctgctcacaggagcacctgtaagagatttagggaacagaattaccgaagattgcaattctgacatcttgacatcaacagctctcctccatcatatagcccatttccctaactagttttgtacataattcgcgtgtaacaatcagctttgccttttgcttgaaaaaaaaaaaaaaaaaaa

SEQ ID NO: 22380 - DNA, 312 bp, Oryza sativa
  Clone ID: PAT_MRT4530_27562C.1
atgggtgctcggctcgctcggggaggtcggcgtcgtcgcctccacctccgccgcctcgggttcaagtgcaacagcgccgtgtggcgcgccgtccgccggtgccgcttcgctctgccggccgcgcgctcgctcgctgccgccgccaccccactccactccgctggtcgtcgcgagctcgcccgccgcagccgcgctcgcccactgacgccgaaagagaggaagagaagaaggaaaaaagactgggatgcaattgacacgccgatattgggcttggtaaggtaccagcgtccagtggtgcctaggcccagttaa

SEQ ID NO: 22381 - DNA, 1018 bp, Oryza sativa
  Clone ID: PAT_MRT4530_27563C.1
cccacgcgtccgcacgatggagcccgtgacggcggcgtcggcggcggcggcggcgagcgaggagcaggtgacgcggcgcgtggcgagccggatcatccgggcgctgcagcaccagctgcggctgctgcaccgcgcggggcccgagttcttcgtgctgggcgcgacggggaacgtgtacacggtgacgctggcggcggcgccggcgtgcacgtgcccggacccgtccgtgccgtgcaagcacatcctcttcgtcctcctccgcgtgctcggcctctcgctcgacgaggcctgcgtgtggcggcagtcgctccgcccgtgccaggtggcgcggctcgtcgccgcgccgacgtgcgccgaggcggacgtcgtggcggggccccgcgcgcgggagaggttccaccagctgtggtcggcgagggccgccgccaaggccgaggagagccgccgccgccgacgacgcgacgaccaggccgccgcagccggcgcgtcggggaggctcgacggcgcggcctgcccggtgtgcctggaggagatgtcgccgcctggggcggcggcggcggcggcgatgctgctgacgtgcgcgatgtgccggaactcggtgcacggcgagtgcttcgcgcggtggaagcggagccgggggaggcgggcggcgacgtgcgtggtgtgccgggcgcggtggcggcagccgagccgggagcaggagaaggagccgtacatcaacctgtccgcgtacatgaacgacgccggcggcggcgacgtcaacatggtcgccgccgacggcgacgacgggggactgtgcgccgggtagctcagttcggtgacgtcagctgacgtaaacgtgacacggatgtaaattaacgaagttgtacattgtatatagtgctaacaatctcaattcgttgcgtttcatgacatttttttcgttgtttttcgtagaggctgaccttgctacttcagttattcatataatcatattcctgtacataattgatatgttaataaaaggaacatttatttt

SEQ ID NO: 22382 - DNA, 282 bp, Oryza sativa
  Clone ID: PAT_MRT4530_27564C.1
atggcgagctccgtggcggcaggtgaagctgtagtcggtggatcttgtcatgacggcagtggcctccacgatcccacgtggcagcaaggaacctggggtcacagtggtgagaaagaagctgaggtggcccccgctgctcggcctaaaccctaccccgatggtggccttcctgatcccacccaacagtggagccctcccgtactcaccagcaccatcatgtcctcaatttggcatggtagtgcctccattcgtttctgccggtcattaggggtgggcgtttga

SEQ ID NO: 22383 - DNA, 122 bp, Oryza sativa
  Clone ID: PAT_MRT4530_27565C.1
tttttatatcactggtcactgcatcaattaccgggggggagaatttgaaatcttccgcggttataatccaagcaggatccaatacctcctcctaactctatcgtgaatcactccattaacat

SEQ ID NO: 22384 - DNA, 449 bp, Oryza sativa
  Clone ID: PAT_MRT4530_27566C.1
cgtcgagctcctatctagccattccgatgacgaggtctacctcgggcagcgcgactcgccgaactggacgtccgacctggatgccatgaacgcgttcgaccgcttccgtgaacggctcttggaggtggagaagaacatcgtggccaagaacgacaagggcagtggattcaagaacaggacagggccggtcaacatcccctacaatttgctcttcccttatgcctccggcgacgcggaggccaacaccggggtcaccggcaagggcatccccaacagcgcttccatctgatcaagcactatactatacaacaagggcaagcaaggggacacatactccttaattagcaacatttctcttctcgtgtaatgtgataattcagtatgggtcataagtttgtttatgcaataaattaaaataaaatcggactaccaaaaaaaaaaaaaaaaaa

SEQ ID NO: 22385 - DNA, 192 bp, Oryza sativa
  Clone ID: PAT_MRT4530_27567C.1
gctgttggggatttttgaagttgggaacaattgaaggccaagggaaacataaatcacgggagataataacacccccaatattagaacacgggagaataaaaatcccggaataagaaaaaggcatcaacaatgagtaactgggccggggcaagggactggcatctgtactggacaggcactaggacctgggac

SEQ ID NO: 22386 - DNA, 449 bp, Oryza sativa
  Clone ID: PAT_MRT4530_27568C.1
tttaataatttttttttttttttttttttttttttgtgttttttttaatttttttttggggttttttccttttacaaaaattttttgacaggcctaatccatttatttgaaaaatttgggggggccaaaaaaaccccccccccccaacttggttcctggggatgcaacattagggggaggtaaaggttttcccttaacatgacaataaccggggggggttttcctaaaaaaaataaaattttcccaacaaattctcggccccccagttacattacttggggaatgcaaaaacccgggggggaaaaacaccatttttaaaccgccttttcttcgttactgaccccctctttgggaacccccgggcccacatttcccgccatataaataacccgggggtaattataaaattggaattcccaagactcgaagcctccaaagtaacacttttt

SEQ ID NO: 22387 - DNA, 374 bp, Oryza sativa
  Clone ID: PAT_MRT4530_27569C.1
caagcatcatcactagatttaattaaaaattacaacatgccgaaggactggattagaatcatacagcactatcaatgaaaaaataaaggttgctacggaaatacatctaataacctaaacaaaatatttctaagccatcctttcatacatcaacttgcatgcaccaaccctgttcagaaacacaaaggaaagcaaacctagaagaactcaaactctacataattgcctgaacccttctggttgacagccgggacaaccttctcagcaactggagctggctttgacggccgctcaaactcaactaggcttgatatcataagaggccttgcacatcgcaaagaaacgcccaatatcacgccactcaaagaatggaa

SEQ ID NO: 22388 - DNA, 412 bp, Oryza sativa
  Clone ID: PAT_MRT4530_2756C.1
aggaaaatcccccccccgtttttcttttttataccccaattttaaagtttgggagagggggttttataagttttaaaaggtttgaaaccttttacgggtaaatttccgacaacacttcttttgggggttaaattatgcgggggagggttaaccattatttttatttttgtgggggggattccttttaaaagaaaaatggatttttttttttttaaaaaaaattttggaaggggaccttcctggtaggaaaaatttgggttttgacttgaaattcgcaggggatccatctttaggggccggggcttaatgaacccccttccggaggaccctaaaggttaccttagttggggggggtggccggattttgaaagggaaaccaaaaaattttttgttgaagcgaaccctggagggg

SEQ ID NO: 22389 - DNA, 687 bp, Oryza sativa
  Clone ID: PAT_MRT4530_27570C.1
atggcggcagaccacatctccaagaatcgccacaagccgcggctgtctgctgtaggtgcggcgtggtgcacggccaccccaaccgcaacgtccccaccaccggagcttccaccgatgaccgaagaactctgtcacttgcaccgccatgacgggcgtggggagctatcacagcggatgtccgggacgagcttctggagcacgtcctcatcgtggtcctccccttcatcaacgagcctcctgaagtcgaggtggtcgacgatgctaggaatggcatcaccagcgagagaaggggaattggcaaaggaggagatggtttcttggtcgccgtctacctccggcgcacgcaggctgggtgagctcggacgggctcaacaattgcctccccctccctcccgaacttgctggcctcctctccctccctctcatgccttcgcctcccccacaggctgcctctttgccgcgttgtggttgggttgggaatggccccagaagaagtatggccacgaacgcttcggcgatggctgtcctcctccccaatttccccgaaagctgatgctccattgcaagtcgccagtggccgcggcgctctacaccgagggagcgccagaggctgtgccaacgccggcttgggaagaaaagaggagagggcttcgacatgtgggccccacgcactttctttttttctga

SEQ ID NO: 22390 - DNA, 399 bp, Oryza sativa
  Clone ID: PAT_MRT4530_27571C.1
aagcttttttttttactgaactttcttttattttattacattttacaatatttcgactccttcaaacttttcagcgccaatttctacttcaggcatcaaaacttcaccagaaatcacatcaagtacagtaatatatgacgcaattctgtctttgaattcctcgctcttaatcgcaacaatctcagtttctcttcctggaataatcgccaaagacgagaatcctctggtaggatgcaattctcccattcggtgtacttgaacatcgtggaaaaattcggaagcaacaattaccaagttagttccgcgttcttcatcagcaacatcatcatactcttccgtgctaaaacgacgtggcaaaaagaaccatttacgcaacactggattccaagctccaagctt

SEQ ID NO: 22391 - DNA, 200 bp, Oryza sativa
  unsure (1)..(200): unsure at all n locations
  Clone ID: PAT_MRT4530_27572C.1
ccaaccatannctacactnggaataccttnntaccncgcaaaaaagggcangaacanaagaacattntttaaggnaccaaccaccactagctcanagctagaaaagntttacaaaggaggnaanganggnagccntntccggcacacactgtggangccgncaggtgaggtcaagattntttggggntgggaaaaaagaa

SEQ ID NO: 22392 - DNA, 343 bp, Oryza sativa
  Clone ID: PAT_MRT4530_27573C.1
acgcaactgccaatgggaaacttcatcgttatcattgattgctacactgctattgactggatcaacaataccatcatcttcatcataggagttggtacaatgcattttaaaaggtgccaagcagtgaagtttttcatagctgccccgctgacttttttatatagtcaaggcactgtttgggtttataaagcaatcgattggatacaatatcgttgcttttttgccatccctccacagtcttctgatttggtaaaagtacttgggacgtcatggcgaagatgattgaagcactcggctttggagtaatatagttcgagagaagattatcttttcgactgtgaag

SEQ ID NO: 22393 - DNA, 678 bp, Oryza sativa
  unsure (1)..(678): unsure at all n locations
  Clone ID: PAT_MRT4530_27574C.1
cttttctattttggaaattccctccaatcctattcctactccgaatccctctcctccttttcccccttgcgccagcctccccctcccccaccaattcggtcccctccctccctgaccaagtcngcttcccccctctcccccctctcccccctagccggccccacctcattttcccctctcctcctagccaaaaccttaaccaccaccttgcgccgccaccgccctagccgccgccgctcctatcgtcgtcgccgccgaggttgccgccgtcgcctccatcgttttcctcgccgccgtcgtcattttccggtgagatgcccctgtccttcgacgcccagttgccgctgccgccgtcggttgtgccgccgccaccgtcttctgttgccgcgccgccgccgtcttgcgccgccgttgccgctcccacctcccccatactctctcccctacaaaccccgtcccgtacggatcgcctgtccatccatcccctcaccatgtcctcccacatcccaagtcccagtagaccacccccatccaccgccgcctcctccccattccccacggcaaccgcttcctaaaccctccccaccgccatcgcttcgtcctcaccggcgtccgcctcctcttcgtaccaacaagcccacgcccctttcgccaccaatgtcatcttccctgattcac

SEQ ID NO: 22394 - DNA, 1632 bp, Oryza sativa
  Clone ID: PAT_MRT4530_27575C.1
atgcagacgtgcaaggggaacacaaggacgcaaggggaaccagcgccgacaggcgggccccgcacgtcagcggcacaaaggggcggcgcacggtggaccaagtccacacgtggcctcgggtgcgcgtccaccacgtggacggcccagatcggcccgaagccgatcggatggccacgaggcggcgcggctagggcacgggcacggcacaaggccggcctggctgagccatggcgcggcggcggcgcacgagagaaagcggcgacgcggcgcggcaagggggggggtccgggcggcccaggcgagcggagcggcggcaagccggccggccgacctaacagtggcggcgcacggcccggtggtcgcaggcggcggccaccggcgcggcagcgcgcacgggagacagaggagggaggcaaggtgggagaggaggagctcaccaaggacgcggcgacgagggatggggaaaggcggggaagctcggcgtcggcgctcctcggggcgaaggcggaacggcggcccggcggcgttccgcgagcgagaaccggcggacggcggccggaaggaccggcgcgaggggaaccgagcggcgccaagcggcggctggaggtggtaaaggcggtggagagaggtggtgcgcgtggcgacggtgcctcggaagcggggaggggaaaaggagcggatgccggggcggtgaatggcggtggtttcggcttgcacggtgggaatggtgctgcgggggtggaaggagaggacggagcggtggacgaggtgcgcacggcggctgcggtgctggggagggcgacggcgcagtgcggggtggacgggagcggcggcgcggcgctgttggagttcgccggagagcggcggggaggggaggcgggatcgagcccgggagaggcggagtcggggcggcaaccgccggtggcgtgggcggcatcgtggggtgtgggtggcggttttggaggggagaggtgggggaaaacggcgcggacatgggcggcgaggtcccacggacgagcgcgcgcgcgcggggtggaggagagcggcatcatcgagcccctccaccaatgccggctatgtcgtcttggtctccgtggcgttcggccccgtcgtggccttcttcatcaagttctccaagtgggagtcggggacgctagacaacggttctacccggtgctcttcctcgactacctctgctccggcggcggggtcgtcctgtccctgccggtccggtccctctcggtggctagctgtccccaagatccacccgtcttggtggcttgccgtcgagccacgcgcctacttcaactacatgtatggaatctcaactactgggacaaggcgagcatgctcgttggcgaggtggaggagccgaggaagacattcccgaaggcagtgttcgccgccgtggggctcgtcgatggcacgtaccccatcccgctcctcgtcggcatgggggcgttgtcattggagatggtggtggagtggatgggtgggttcttctttgtggttggggaccagatcggggggggtgtttgcgcgtttgaatccaggttgccgcggccatgtatggcgtgcggcgaggagggtctccaatacaggagaatagatgaggaaacaaaagtcgtgtag

SEQ ID NO: 22395 - DNA, 2988 bp, Oryza sativa
  Clone ID: PAT_MRT4530_27576C.1
atggctaataagatgaaaaagatgagagatcaactgagaaagatcaaagagggtcatgaggcttttagactcacacctgactccacaccatataatgagcatcaccgtcctgatccacgagaaacaacatcgaaggtgattcaatcgtccatcattgggagagacaaagaaagaaaacaagttgtgtctttgctatcagcaagtgacgaggaagacacagtaattttgccaatctatgggtttggaggcattgggaaaacagctttagcccaactggttttcaatgatacccagttcagaggttatgaccacagggtatgggtctatgtgtcccaggtatttgacttgaaaaaaatagggaacaccattatttctcaagtgtcaaatgaaggaaataagaatgaatataccagggagaatataaacggacgcctttgtgatctattagaggataagaatactctgattgttttggatgatctatgggaaacaaatgattttcatttaaatgagttgaatcttatgctaaatacaaaaggcaaaataaaagtcttggtgacaacacgcaatgaagacgttgcaaagaaaatttgcacacataaaccatataggctaaatcccctggactctaccatgtgttggaatataattaagcaacgcagtaatttagaagctagaggtgataaagaccaaatcgagcaagtcggatgggtcattgccaagaaatgtggaggcatagcattagcagcccatgcacttggtttcttgctatctggaatggaccttgtggaatggagagcactgagcaatagtgatatttggactgaagctttttctgataattcagtgttgccatccttgaaactaacttacaagaatatgccaccatatttgagattatgctttgcctactgcgccatcttccctaaaggtcacaatatagctaaagcaagtctggttcaccaatggattgctcttggttttattgagccatctaaaacattttcatccgtacgacttggcgagaagtatatcagacaacttgttgggatgtctttccttcagcgttccatattgcacactgaacaagaagttttcaccatgcacgatatggttcatgatgttgcgagatcggtcatggatgaagagttggttttctttaatgacacaaaaattagcagtaccacagaacaaaaattttgccactatgctttgcttgaaaattatagcaagtcatcaaatctatcaactatattgcctgccacgttaagggcagtacatacttcgaattgcagcaaattggtgctccaaggtgatgaattttcattcacaaagttcttgcgtgttctagatttaactgactgctccataaggatcctcccaagctctattggcaaattgaagcagctgaggtttcttatcgctccaaacataggagataatgtgttcccaaagagtattactctgctcccaaaactaaaataccttgacctccatggatcttttcgaatttcagcattgcaaggatcaattagcaaacatgcttgtctgatacatcttgacctatctggttgctctaatatcagagttatacagccagaagctctatgtggcctcaccaaactgcagtttttgaacttatcgtggtgctccattcttcaaatactgccagaaaatattgcaagtcttactgaactgcaatatttaaacttatcaaactgcttccttctcagccaattaccatctcatattgggagcctcactgaactacaatatttgaacttatcaggttgtcagggccttgtaaaattgccaatgtcgtttcggaatctgaagaatttggtacatcttgacctgtcaggctgctccagggtacaagatttcaaacaagtctttggtgggctcaccaaactgcagtacttaaacttatcaaagatatttggtagaaccagagtgggtgataattgggatggttatcctgaaactatcagtactcttaatgatcttgagtatctaaacctttctcggaatagcaggattgattatctaccaagaagccttggaaacctcaaaaagcttcaaacattggacctttcatactgtcggtctctgagatccctcccacacagcatagaattaattgacagtctggagtttctaatagttgtggggtgctcagatcaacttaaggagtatttgagaaaatctcaattcaagaatattccaatatcattaccacacttcattgttcactctatttctggtgattcccgcagcaaccttcatatgcttgaagatataaatcctgtcagacttgaaataagctgtcttgaaaatgtgaagtccatagaagaagcacgaggaattgagttgtcagagaaacaaaatctttcaacattgacatttcattggacttcaagggctgaccgacttttggaggacaaggatgttttgggagaactaatgccaccaagaggtctgtggaatttaagcatacaagggtatgatagcacaaccttcccaacttggtttgtaggcatctcacatcatcttccaagtcttgttaagattgagttgaaggatttgcacagatgcagacacctgccaccactgggacagttgccaaacctgaatgaagtgcatctccaacagatggacagtctcacaaaaattgatggcggtttctgcggtggcgacaaaggcgcattccgcaaactgaaagtcttcaccttgagggatatgaaacagttggaagagtggagcaccacaacacacagtaaaggtggtgaggatagcatagagttcatgttccctatgctagttacactgtcaatagagctttgtccaatgcttagactgaaactatgcccaccgatgtttcacagctggctcatatcagagagcgacaaggctgtcgacacgggtttaacggaggctctgatgaagattttcgctgaagatttcatgcctaccgactcttcagagtaa

SEQ ID NO: 22396 - DNA, 1734 bp, Oryza sativa
  Clone ID: PAT_MRT4530_27577C.1
cggttttgccgacccataagacccttgaggaaggggtacaagtggcggcggcggcggcggagcgggcattacctggaatcctcccggcgaggagaagaaggcttccagcagaggacgcgggagtggagcgggaggtggcagcgctactactactagtagtagtggtggtggggagcttaactatggaggaggaggaggaggagccggcggccgaggcgaacgcgctcgccatcgtgccggcggcggcgggcagcggcccgccggcgccggtggagcaggtgaagaaggaggaggtggaggcgaaggtggcggcgtggcaggcggaggaggtggagaggaagctggaggaggagcgggcgaaggcgacggagaaggctcgcaacgaggcggcggcggcgcggcggaaggcggaggagcggcgggcgtcggcggaggcgcggcgcgggaggaagacggcagaggtggaccagacggcggcgcgcggccggacggccaccggcggcgacaccggcggcggcgcggcgcggcgcgacggcgacacgcatgcggcggccggcgggcaaagagagaaaaagaaagggaggggaggaggagggagatgctcaccgacgcgggaaggacgacgacgacaacggtgatggcggcgtcggcccgacgagcgagggggcggccggggagcggcgaaaacgagcggaggaggcgaaaagggaggcggcggagctcaccgaggggcatggcggcgaaggaggcggctgatggggctcgagcagagggaggcggcagcactccacggggcgaagacgacggcggtgattcggcggtctccaacgaaggtggaagagcggccggggtaccacgcgatgcagcgaagccgacggtggtagggcgcggcttggcagtggctggagcggcgaggagcggcggccggagctcgtcggtgagtggtggagagagggagcgcggtggggaggtggttccggcgatgaaatgggaaaacggagtggggccgaggtgcggcaaggcacggcgaagccggtggtgcaagcggcgcggcgcggggacgtcgacagtggcggcagcggccggctggagggtcgccggcgatcggcggcgcttgggctcgtgtggggagagcgggagagagcgcggggagtgcgggaaagttggggaaaagggagaggatggccgggggattgtttttataggggaggggaggcgggatcgagcccgggagaggcggagtcggggcggcaaccgccggtggcgtgggcggcaccgtggggtgtgggtggcggttttggaggggagaggtggggggaaacggcgcggacgtgggcggcgaggtcccacggacgagcgcgcgcgcgcggggtggaggaggtgggcggaaacggccgcgtcgtggggcggctcgggcggccatggcagcaacggcagctgccggcctgaggttggggatgacagctgtggcgtcgtggcggcggcggaggacaggacaccggcgccgttctcagctgctgtcacgtcggtgcaggcgcagcgtgaggccagccagctcaccacaacagcagcggccacgaccatctcctcgacgacggcggcgagcgacgggccgacagcgcagctggtccctcgtacatgtcgcacaccggctgcctcggccctcggctcccacggatgaggtggcgccatgcgcggcctctccgccagcagcagccgccaagtccaggtcat

SEQ ID NO: 22397 - DNA, 1778 bp, Oryza sativa
  Clone ID: PAT_MRT4530_27578C.1
atggcggcgaaggaggccgctgatggggctcgagcagagggaggcggcagcactccacggggcgaagacgacggcggtgattcggcggtctccaacgaaggtggaagagcggccggggtaccacgcgatgcagcgaagccgacggtggcggggcgcggcttggcagtggctggagcggcgaggagcggcggctggagctcgtcggtgagtggtggagagagggagcgcggtggggaggtggttccggcaatgaaatgggaaaacggagcgggggccgaggtgcggaaaggcacggcgaagccggtggtgcaagcggcgcggcgcggggacgtcgacagcggcggcagcggccggctggagggtcgccggcgatcggcggcgcttgggctcgcaaaaatgcattatttaatgatttttaatcccgaccgaaaatcggggcgttacagtcactctgggaatgactgcccggaaacccgtgaggaggcgatgtacatgggcaacaacgcgtaccgtccacaaggaggtcaggggtggaaccaaccacacccatattatcaaggaggtaacaacaacggtaacttttctaaccagccctccttgaaggatctcgtttttgcgcaagctaaaaccactgatgcgctaagcaaaaagcttgctgccaatgacaagatcctagataatataaatgttaagttagatggcttcgcttctgctttccaaaaccagctgagcttcaataaaatgatagagacccagctagctcagttagcatccttggtctctacaaatgaaactgggaggattccggggcaacccgactcctccgttgaaaatgttaaggcgatcacgacatggggaggtaagtccactcgtgatccgccatatcctaaccctgcaggaactaatgggatatcaaaagaagcgtcatctagtgactcggctgacaaagaggttcagccagagaagaccatgccgcaggagcactgcgacacacggttgctgtcgtttccccaacggagtaggaaaccgtcagtggacgagcagctcgctcgttttgttgaagttatccagaagatccacatcaacgtgccattgttggacgctatgcaagtgccaacatatgcccgttatctcaaagacatactcaacaacgagagaccactcccaacaacggaggtggtcaagctgacggagcaatgcagcaacgtaatactccacaagctcccggagaagaagatctggggtgccctacgatcaactgctcgatcggggcacaacagttcgagcaggccttgtgcgacctaggagccagtgtcagcgtcatgcccaaggacgtcttcgacaagctcaacttcacggtgttggcactgagacggatgcgccttcaactggctgattcgtcagtccgttacctggcagggatagcggaggatttgccagtcaagatacaggatttcttcatccttgttgacttcgtagtgctagatatggacacggagaaggagacgccgctcatcctagggcatccgttccttagcaccgcgagagccaacattgacgtgggaacaggaagtattcgtttccatatcaacgggaaggaggaaaagtttgagtttcaaccaaggacggaacagtgctccatggtcagaatcaagtacgggccaaacctgcagaatattcaagtggtcgaagtggagccacccaaaacggatagcttggtgaaattcatgcagaatttcctggagaaggaaacaacgatgcccaggaaccgttattga

SEQ ID NO: 22398 - DNA, 327 bp, Oryza sativa
  unsure (1)..(327): unsure at all n locations
  Clone ID: PAT_MRT4530_27579C.1
gttcaacagacctataaacattctgtgccgcgtttctttgttcctgagcatggcactatgtttactcttgcgcttgttcgttttccgcctactgcgactaaagagattcagtaccttaacgctaaaggtgctttgacttataccgatattgctggcgaccctgttttgtatggcaacttgcgccgcgtgaaatttctatgaaggatgttttccgttctggtgattcgtctaagaagtttaagattgctgagggtcagtggtatcgttatgcgcctttcgtatgtttctcctgctttatcaccnttctttgaagggcttcccatcaat

SEQ ID NO: 22399 - DNA, 501 bp, Oryza sativa
  Clone ID: PAT_MRT4530_2757C.1
atggagccccagagcgccgcgccggtttccttcccctccggccgccctctcccccttccaaccctatataaaccctccccgcgcttctcccaccacctcccacctcggcaccgcctccttcggcttcgccgcatcgtcgccgacctcgtccacccctccgtttcgctcgccgaccgccggaactccgtcgaccccgtcgacccgagccgcaccgccgcctccctcaactccggccgcctcctccgtcgccgccgtcgccccggggtgagccgtggaccattgcctcctttcccctttccctcccctctctcggccgccgctccgccgcgccggtggtcgccggcggcgaccatcggggcgcgggcgcgccgcctcccgccgaccgcgccggcgtggccgccctcgggagcgccaagtggctgccgcgtggggcccggccgtcagccgcccgcgtcctcgggtgcggctgacgcgtggggcccactgcgccggccggtgtga

SEQ ID NO: 22400 - DNA, 565 bp, Oryza sativa
  Clone ID: PAT_MRT4530_27580C.1
tcgccactggagatacgtcgcaggccccaccaactacggctgccattactggaggaagatcgaagcagtgcatcttgtctgatacagcgacagcgatcttgcggggattctcaacactaacaaaggaacctatggcgtcttcttcttccttggcaacatgactgacatgattcatcacctggcaatcatagaaaaaagatgtggtgttttcgtcttgcgaagctgaatacatcactgacatgactgccacttgccacggtgtgtggttggtgcgccttctcgctaagcttagaggagaggaggctggtgccatcacattgaatattgacaaccaatccataatctcactaagaaccatgttttctatgatcgcagtaaacatattgatactagatactactacatcagagaatgcattgaagaggccaaggtgaaggtcgagttcatcagctccaatgagcagctagtggacatcctaacaaaggcacttgggtacgacaagttcattgagctacgatccaagattggcctcgtcgaaatcaagcaggtggacaaggtttatgtg

SEQ ID NO: 22401 - DNA, 388 bp, Oryza sativa
  Clone ID: PAT_MRT4530_27581C.1
ttgtttttttttttttttttggttttttttttttttttttttttttttttttttggttaatttttttttttttaaccaaagtaaacccaaataatttcttgtagaacaacatgccctaaaaactaaaaagggcaaacaaagttgggaaacaaacccctgcaaaaaagagcctgggctcggcccccggcaccatatggagtctattggggacccccccaatgcccaagttggggggagaccggcacccgcccccggttttgggaaaaattaaaggcggggtttgcccctttggaacaatccgggggtttttttattatcaaacccgggccccccttgggtccccggttgctaaaaaagggaggatgccggggagggggccccccggcat

SEQ ID NO: 22402 - DNA, 2441 bp, Oryza sativa
  unsure (1)..(2441): unsure at all n locations
  Clone ID: PAT_MRT4530_27582C.1
ttttttttttttttttttttttttttttttctggttcttgtttttctgtgccaacatattttttactgatcagtaatccattctggaatttgaacataattaatccttgcaagaaaaatatgtcaaatatagttgttgtcgatgaaacagtgtacaggaggtgtattgaattatatactgctaagtcaaacagaatcgtgaacgtgatgccccaaaagatggctggaaatcaaaacaatgagaaggaaaaggaaaaaaaaacttgttacaaaaatggaaaataaaactcattacaatataggggagggtcaaattcccagcaaaaaatgcgaccaatatatcttcatatgaaacaaggtgctgactgtctgatgaaaaatgataacctatgaggcagctcagtgtccgtgtaaagtggttgttttgcttcaatggcgcgactgataaaaacgaggtctgttggtgaacacccgaccattggctctgacaaaatgtgtgatgccaatgcaaagaccagcccatagaagtgacaacactaaatggcgaacatcattcctggcttgtcttagtgacatcatcatgaacataagagctcccataaccaatgcaaaagcaaggcggaaggacgcataattctctagaagtcctgctttgcttggacctgccatgtcgcggctaacagatataatgtaatgtccttgaagtagatccatggcatcctgtttagtgccatctgcaaagttattcaagtagtatctagcaagtgaattccacagatcattcagaattccctgggtacttctcttcccataccgaacaaaatcgcccttcaatgccggagttccagagtactgagtgcttattgaatctccatggttggcccataaaactttgtattttgcatcaaaagctggatggttgcttatcgtatcattaacaccgagaacccctattcgctgaagttggttttctagtatctttcctccaatcatgctctgagttacattggtgcgatctaagcaatcgacacaatttgtcctgatagtgccagtctgctcctcaattttttcacctttaccattcaaaaggaaatacctatgtttcttgagataatcttcaatttgattgtagagctgagaaaggcgctcaaagtgaatatgaccacagattcgatggaagtcaaaatgcacatatcttatgtcttcactgagaataggttcaatagattttgcatatctgtcatggaggcgaccttcaccaccgtgtgtattgacaagatcaacagccaatacagctccatatttcttctgtaaatcatgaaagtgctgctcaagtatgcgtggcgcctcctcttgtctaaccgggtcaaacctaggtttatatgtcaaatcaacaatctgcacccacaagaatggtatggaccctcgaacttgtacataggatgctgtgaacccttttgattccattatctgctctgattcaacaaagttggcagcataaccctctgggtcagctccacgtctccacattcgtgtacctatcctccgtgtgcacctacgtgcaatcagggtcacatttaccttctccgatccaacttctgcatggatattctgaaagctgccttgaatgactggcaacaagtactggtccagcttgttctcaattagaggttccagcaagtaactgttccatagaaatcttggttctgcctgtctccaaagcggaagtgatttgaactcatcaccaagattatgtagcctctgcaaagtaagtgttaagttgatatcatatgagaagtacaggcctatagtcttctctgcagcatgcaggagttctgaaaattctgtttccattttactctgctgattgccagaagtgctacgtgagttactgcaggggagaacttttagtcctgtcactttaaaaattgcatgtcccaagtaggatcccacacaatcacggcctgttatcactaaaaaatatgatccaactgaaagcttgagaactcctatcacaccatacactgtttgacattttggttttgtagaagagtcacgtggtggcaactcttcaactagattcattgaaccatcagaacggttagctgacagatacaagtcagcaagaccatcaatcggctcaaatacatagcggtctgggaactcccatagtctcagtcttgtgtgaagtttagaggatggacttgagtcatttgccccacccatggaggaatgcccttgggagtcggaaacgaggcggcgagcagctgcggcggcggnagccgatcggggcggggaagaggcgcggcggtggaacggcgggaggaggaggaggaggcggcgccggcgccggcgggtgcgaggcggaggcgatctctcgtcgatggggcgaggcgcagcacgacgagacgactangntnaccacgtccgcggacgcgtggg

SEQ ID NO: 22403 - DNA, 195 bp, Oryza sativa
  Clone ID: PAT_MRT4530_27583C.1
atggaggccgctgtctttgctccccaccaggtcgccatcctggcactgccagcggtggaggcggaggtggctaccgctgctgcaccggggaggatggccgcgaacagcgtgacctcgatatccaagggcggggctgtaatgaggagcaagatcatagacttgagcaggaatgggccagaagctgtggctcgctaa

SEQ ID NO: 22404 - DNA, 249 bp, Oryza sativa
  Clone ID: PAT_MRT4530_27584C.1
acgcgggggctcccatttcaatttcgtgcgtgtggctttctcctctccgcgttttggtttcccgcgcgcggagaagggaaaagattttgccgtgttcttgccggcggcgagcgagccgccatggaggcggccgaatccttggagtatgagctgcagaaggaggtctccaacatcatgatccagagctacattactagcatgcgtcgagagttcgagacaaagttatgggagaatcagaactgcattagt

SEQ ID NO: 22405 - DNA, 420 bp, Oryza sativa
  Clone ID: PAT_MRT4530_27585C.1
ggcccgatttccccggccgacgtggggaggtggaggtggaagaagaggcgggattcgaaattcgaatcccaccatctcggggtcgcgggtgagcgggacagggggttgaggggcgcgggaggggcgggtgtggccaacgtggcgcggggaaggtgggcgcgggcggcggttgccggcccgggggggagcggctggaggttggggaaagggctgacaggtgggccccacctgtcagtgcccgagggagtgaggggggctcaggcgagcggctgggccgtggccttcggccggcccagcaagggcacgggagggggaggaaatgggctggcggcccatttgggaaaaaggagggggaaaaagggaaaaagaaaaagggaaaagaatttccagggattaaatattgcttgtgctcgtttttaa

SEQ ID NO: 22406 - DNA, 426 bp, Oryza sativa
  Clone ID: PAT_MRT4530_27586C.1
atgggagtgggcccggcctgtcagcgacttggccaggagtcgtcttctaccttcgtcttcttcttcctcccgaccaagcgggagcagcatgggaacacggcgcgcacggcaaggccggccgagggtgacccgatggctgccaggggaggcgcggagcagctctggcgatctcccgccggtgaccacggcgcgtggcgacgcggaggcgagcggcgtggcatggctaccattgccgagctcgggctgcaaatggagaggggagctcccgggatagtctacccacggggagcttgccggcggcggaacggcggtcgggccggcacagccataggcattaatcggatggagagtgctcgaggtgacctacccacggcgagcccgccgatggcgaagcggcggccgggatgggacgccgaagggcgctaa

SEQ ID NO: 22407 - DNA, 385 bp, Oryza sativa
  Clone ID: PAT_MRT4530_27587C.1
tggatcccccgggctgcaggttaagtttatttgtaattttggtggtagattcttaccaaggccgagtgatggtcagctccggtatgtcggaggtgagaggcacttgattaaaattagccgggacatttcatggaaagagctcatctgcaagacatcaaagttaataaggcgagctcatatgatcaaataccacctaccaggggagccaatgaacatgctcatttccatcacctgtgatgatgacctccggaatatgattgatgagtgcattgttctagaacgaaccaaagtattgttgaccgtttacctctttgctgataatgatgatgagcgccattgtgcatttcgtattaggaagctcatccagtacagacaaggaagcgca

SEQ ID NO: 22408 - DNA, 151 bp, Oryza sativa
  Clone ID: PAT_MRT4530_27588C.1
tttttttttttcacaaaagcagcatagcaaagcaaaagttccatggtccgtttactctttattctgattgttcaacttttgtaataaaagactttattccgattcgggtactcaatcgaatggccaacacataatttgacagtcgaagctt

SEQ ID NO: 22409 - DNA, 149 bp, Oryza sativa
  Clone ID: PAT_MRT4530_27589C.1
attccttggatctgaaagtaggcaacagagaggtgaagaaaaggggtgacaaactgaggtggcttgctatggcagatcaggaccaactagtcctaatccccaagagaggcagtggttttgagcaccttttcaacgcagatgtagattaa

SEQ ID NO: 22410 - DNA, 585 bp, Oryza sativa
  Clone ID: PAT_MRT4530_2758C.1
atggcgaagggcctgttggtagctggctgcttgaacggcaactcgttcgcgatgttcctcgacatggcctctgagccgtacacaaggaagaagggtgtctccttgttagacgttgtcggtgtgtactatgccgtttgccctctcgacctgttcattgctctgagggtgagaaaccgaggcgaaacagatcttgactcccagcctgatgcagtaatcctggaaatcggcattgatgaactaggagccgttgtctgttatgatacgccgccctgtcctcgtgggaatggcccgagtatatctagcccccagcacgagaacggccaagcgtctttgagggcggttggccagaagaacccttctcgaaaagcttttccgactaatgtccgaccggcggcatgtgacccacagattccttcatgcttctgcgtcgtcctcgggcaactcttcgctgcctacgaatttgatgagtggggtgcgccagtcgtctgtggtctcgatatcggcaacggcgcgctctgcctctgtagcccccgagctgttgttgagggagaccgggctatcttcgccgcctgcgtctttcactga

SEQ ID NO: 22411 - DNA, 1572 bp, Oryza sativa
  Clone ID: PAT_MRT4530_27590C.1
atggtgcagcaccagtatgtcccgcgcaagcggcgggccgagcgctcgttggcgccggcggcgccggcggcgatcttcaacgtggaggcggaggagggcagggccggcgatgtccccttgcacaagcgcgtcaaggaggagctgcagctgcagccgccgccgccgtcactgcagctctggcaacaaatggatttatttccgaacaaacaaaaaaaaaacatcctaattgagttgctagcgttgattttaggagacagactgaaatgggacatgcacatcctcgatggaagtagcccattagggttgagattaagaaaaagtccatctcttttggagctgattcaaatgaagctggcaatggaaaatacaaaaaaggaagacataaaatctaggtctcttattgctagtgaacgagtgaaagcttccaactttgctgcagattttttgaaaattggcacttgggagtgcacgtcacagtatgaaggtgatttggtggcaaaatgctactttgctaagcataagcttgtctgggaagttctggatgctggtctcaagagaaagatagaaattcagtggtcagatattattgctttgaaggcaacttgccctgagaatggaattggaaccctggatcttgtgttggcccgaccaccaactttcttcaaagagactgatcctcaaccaagaaaacatacactgtggcaagttgcatcagatttcactggtgggcaagcaagcataaaaaggaggcatattctacagtgtcaatcaagtttattaagcaagaactttgaaaagcttattcagtgtgatcagcgactaaattatttaagcctccaaccatatatgatagactctcctgttttcagacctaaaacggaaggctctatattcgaaaatccaaataaatcaaagagctatcatggttttagttacttggaaggtgaacatgaatcccacttatccaagtatattgatcatgtatcaccatgtgattttcctttaatgtctaaaaaggatggaatgaaggacgatattgcgaaccaacaacagtcattttctcgaccaatcaattggggagccagtgatgtagatttgcaagttgatgtatctcaagaactaaagagccctcaccccaactcattgagtcaagctagatccttgtccatagatgacttgttaagccatctagatgattgcatagttgagcaaaagcctgcagggaataacccttcattgcccattagtgaggcatcatccaatgaattgttggagaagattacccagcagcttttgagcgactcacatgttgcaccagcctcagatgagaaacgggtgatggcaagggttggttctcttctttctctgcttcagaaagacgcagtgccagccaatttacccaagtttgagcccaatgacagcggcaagattggtgtagttgaagtgggaatcagctcagcacttgatatgggaatcgcaaatggcacaaaccctcctggcatctcaagaaaggattcctacgaggagcttttgtcaaacttgttcaacatatcagaggatttcgatgactga

SEQ ID NO: 22412 - DNA, 1414 bp, Oryza sativa
  Clone ID: PAT_MRT4530_27591C.1
cccgcgtccgggaaaaaaattttctctcgctttctcacgcgggtcgcgaggaactctctctctctctctgtgcacaccccgggaggaggaaccgagggaggaggacaagtcagagcaaggggcctcgacggcggcgaagccctccaactcacaggcgccatgtcgatgtcactgttccctgggatggatcttacgaaaatggatgctcctactcttaccctccttggagcagcctgctgtgtaatgctatcgatgcattttacagtacagttggtgtcgcagcatcttttctattggaagaatcccaaggagcagaaggctatacttattatcgttctcatggctcccttatatgctataaattcctttgttggtcttctggatatcaagggaagcaaaacatttttcactttcttggatgctgtcaaagaatgctacgaggcactggctattgctaagtttatggcactgatgtacagctatttgaatatatctattagtaagaacatagttcctgatgagatcaaagggagggtgcttcatcattccttccctgtttcccttttcctgccccgcaatgttcgattggagcataaaacactgaagcttctgaagtactggacctggcaatttgttgttgttaggcccatatgcgccattctaatgattactcttcagcttcttggtctgtaccccagttgggtcagctggacattcacaatcatactgaacttttcagtctccatggcattatacgcactggttattttctaccacttgtttgcaaaagagctggcacctcacaaacctcttgcaaaattcttatgcatcaaagggattgtcttcttctctttctggcagggttttgcattagaggttttagctgccgtagggatcattcagtcccaccatttctggttggacgtggagcacatccaggaggcaatccagaatgtcttggtgatcatcgaaatggtcttcttctccgttctccaacaatatgcttaccatgttgctccatacagcggggctgacagggcgaaattcgagaagaagaatgaatgatccaggttttgtactgagtaataccctccagctcttgtatgatatctctctgtatggactcacagtgttataaactcagtgtttcttatgcacacgagtagagtaagtacattacaatcattagaaagctagaggtgcctgaataagtggtggtttcgtcttgttgtacacaatatcatgttggactgaggatcttgtgtgtacactgtacagtgcagcctttggaggcaagcaaatccattatcaataaagctatgtacttccaagtgcccaaaaaaaaaaaaaaaaaaaaaaaaactcgagactagttctctcgcgccccctcccgcgtccggctgcccgcggcccg

SEQ ID NO: 22413 - DNA, 410 bp, Oryza sativa
  unsure (1)..(410): unsure at all n locations
  Clone ID: PAT_MRT4530_27592C.1
cccacgcgtccgccgccgccgcatcatcgccgtcgaagcgtagagggagtaaggggaggatggggagaggaagaggggtganncccnccngagggcccanctctctgggctacctcttctgcggcggcgagacagctcccgcggggagggcgaagccctctttattgcggagaaggagactactcctgctccagtgaagaaagctgcggtggcggcggctgcgtcttcgtcggcatcggataagatgaatgagatccccgcggggatacaaagcacccaagccaacaactactttcgggcgcaaggccaaaattgcgggaactttctcacggatcggccgtcaaccaaagtgcacgctgcttccggcggcggctcgttgctcggctacctctttggcgggaagtgatgcg

SEQ ID NO: 22414 - DNA, 185 bp, Oryza sativa
  Clone ID: PAT_MRT4530_27593C.1
atgtcccctcttagcgtcgactatgttgccgcctgcactcctctccgttggcaccatggagaagatgtagggacctccttcgctcttcttgacagctaccatgtgatcggggtcgatcttggtcaacggcggatcgggactagactcagggaggagttgaggtccaaagcgatcaaggatgccgg

SEQ ID NO: 22415 - DNA, 439 bp, Oryza sativa
  Clone ID: PAT_MRT4530_27594C.1
ggtattcgccgaaaactgtgtattcgacccccgtctggaagttggcgaaaccaaaacgagaaatttgtggctttaaaagatttgccgaagatgcgatgcccgtttcggcctgtgtatcgtgaaatgctgataaatggacacagctataaggttttcaaggttgctgggtggcttcggagtcaccctgagcgaaccctggaggattatgatcttgttcattcaagacgtttggacgacatggcttcgcttttggcggaatcatcagaagaccgatcggcaggaagcgatctttcggcgccgttatggcataatttgcgtttcgcccccttctccccttagagtggtgtatgatattagcgacgacgaaccttgttcgcccgatcattctttagccgacaggggagaaaggggacacgagggcgaagatgtaatttatttg

SEQ ID NO: 22416 - DNA, 308 bp, Oryza sativa
  Clone ID: PAT_MRT4530_27595C.1
atggctaagccaaactaccttgatgctcatacccataaggaatactccgagggaatatccttgcgtggcccgctgtcagtgacacgggaggagccggcgcacggcggacagtgtccacaggggcgcgacacagagaggtggtggactgggctcgtggtccaccggccgggcgaagaccggcgtgggcgcggggcgctgcggcggcagccggcgttccgacggcggacgaggcgggaccggtgccggcgcggcaacgacagccgatgcggcgacggggaatgcagcgaggacattatgtacactcatag

SEQ ID NO: 22417 - DNA, 553 bp, Oryza sativa
  unsure (1)..(553): unsure at all n locations
  Clone ID: PAT_MRT4530_27596C.1
aggaccatttttaccattgggggtacaatctatggttttgatttaacctttgttcatgtatatcaaagagagtatctgctttgctcttcaacagttccaatggaggggaacattcacatctgtgaggtgatatgtatgtatataacggacagaaacgagaaaaaaaatgaaatgtacatggctatatctagctggatgaatatggggaaaaaatgaacatatagaaaagaatgcaacagagagaaaaactttcttttgtcaggcttctcacttttcaactgttactagtatgacattatttggaccagatcttggcagagcagcttctcatgatcctggacgctaccaagttcaggaaggcatcattcacactaggatggcaaacaaaaagaggagcagcaggacagttatgttattggcacaacagcatccagattcctctgcagcagccagccaattgggtagttgacttgaggaggttccagttcgaaattccagaccataacacgagtgcaattatccccaagccttccatncgacctcgtgccgaatc

SEQ ID NO: 22418 - DNA, 362 bp, Oryza sativa
  Clone ID: PAT_MRT4530_27597C.1
ctcactacagggtaagcggaagcgccgtgccgtccgcgggcccgaattccgaaaatctaggcacgcctcacgggtcctaaggaggggccacgtcagctaccctaacgggtcctggaaggaaccgtactggttgatttaccggaacatggcaataattggcttgaaggggtcccgggcgctttcaaggaactgattgtaactgtccccgggggtgttatccgttgcggcgatagcagacatgacttgggacttcctatggcgctggcacgggcggaacattccggtgcccatggccatggccacacgggtcctcgtaggctccaggtgtgccattgacatgggcgcccccacactaggggggt

SEQ ID NO: 22419 - DNA, 414 bp, Oryza sativa
  Clone ID: PAT_MRT4530_27598C.1
atggcgacaggcttcggggagcaagaggagggttgcgacgatggcgacaacgagggagagagcggcggccaacggcctaggccttgccaggccagatcggcatcaccgccgtggagccctcatctcgccaagatcgccgagccatcggactccttcgcgtcagcgtcgtcgtcgtcttcctacacctcctcctccttgtcgtcctccgccaagagcactcgccggcggatatcgctgcgtgacctcctcctcagcggcacggcgaacagcaactccgccatcgctgcgggcgccgccgccgccgccgagaggtcatcgggcttctggcacctgtccttttggccatcgtcgcgatccaagaagacaacaatgctagcgctgccctactcatgcccgttcccgccgccgctgtag

SEQ ID NO: 22420 - DNA, 218 bp, Oryza sativa
  unsure (1)..(218): unsure at all n locations
  Clone ID: PAT_MRT4530_27599C.1
ccggccgggatgtcagaactcagaagtgtttcatgangctctgtacatgtaagaaccattaggagtaggtcattttgtctcttttagaagtacagtgtaaataccagactagtgtcagatcctactattaagatggacactctgcttaaatctttaggatagtgaattttatatatggccagggctttccaaccaaaaaaaaaaaaaaaaaagcggcc

SEQ ID NO: 22421 - DNA, 699 bp, Oryza sativa
  Clone ID: PAT_MRT4530_2759C.1
atggcgcccccaatcgccgggaacggacgcgccaactccggccgctttccatggccgccggccgccatttccgccgccgttccccgctcctccctcgcccctgccgccgcgttagagcgccgtccggccgtgccgtcgcctcctccagcgtcgcagccacctcctcttcgccggcctaccctccgtttcgcgcgcgtcgccgcgtcgacctccaccccggcctgctctctgattcgtccggagaccgccgtcgcccgtgccggcctccatcctcgtcgtcgccgacgtcctttcggccgccccgttcatcctcgccggctcgtcgtctcgcggtgccgcctccgtcgtcggattcgcagcggcacgttccacgtcgtccccgtctccgtgcagctgccgccggctgccctcgtcgtctcctcgccggccccggtcgtcgtcgtcgtcgtcgtcctctcgtcgtcctcatcgtcgtggcgttcgtccctccgtcgagccgttctcgtccgtcgtccgcgttcgtcaagtgtgccgctgcagccccgtcgtcgtcttcgtcctcggctccgcgtcgtcaagcctcgtgccggccgcgtctcgccttcgtccaaggatcgccgccgaagtcgttccctcgccgtccgtctccgccgcgcccgttcgtcgttgtcgttcccacgcctcgtcgcgtggtggtaa

SEQ ID NO: 22422 - DNA, 411 bp, Oryza sativa
  Clone ID: PAT_MRT4530_275C.1
atggccggcgagaaggtccagatgccaacggaggcggcggcaccttccctgtctccggcgccggtcgaggggaagccgagggaagccgccgttggtgagaagaggaaggccacggaagagccggctccggcggagagcgacttattatccgatgcttctgaatcagcggcggcggcggcgaccattgctgacgatgggggcaagccagcttctgaagcggcggttgctgaagatgagctgccgtacgacgagtggaaaatacagcgcagagcgcttctggatcggctgtgggaggagaccatgtctaaggtcaagcttccagatgatcccaatctctactacgactactccgatgatcccgatggtctcctcctagattatgattctgaaactgacattgagatggactaa

SEQ ID NO: 22423 - DNA, 504 bp, Oryza sativa
  unsure (1)..(504): unsure at all n locations
  Clone ID: PAT_MRT4530_27600C.1
cgacgccgtcgtggacgcgctcggccgcgcgcgccagttcgacgccgcgtggaggctcgtcgtcgaggccgcggcggacggcgccgccacgccccgcacgttcgcggtgctcgcgaggaggtacgtcgccgccgggatgacgcggcaggcggtgcgcgcgttcgacgacatggaggcgttcgtcgggagggagcccgacgccgccgagttcaccacgctgctcgacaccctctgcaagtacaagtatccaaaggttgcagcggaagtattcaacaaaagaaaatacaagtatgaaccaaacgaaaagatgtacactgttctaatttatggttggtgcaaggcatgcaagcttgcaccctgattaccggttagatagaacagttcgtgcagctgaggatctctngaaagaaatgcatcaaaggggaatcgaacccgatgatacaggctactctgtcatcctgcatggttacagtcgtgcgcatatacctgagctatgtctttgat

SEQ ID NO: 22424 - DNA, 117 bp, Oryza sativa
  Clone ID: PAT_MRT4530_27601C.1
atgcgcgctcccggctatgatcctaacagcctatgtcctcttggaggatccatcgaatacttcgatgttgacgccttgcagccatggacttgttcaaggctgtcccacatcgttgag

SEQ ID NO: 22425 - DNA, 1536 bp, Oryza sativa
  Clone ID: PAT_MRT4530_27602C.1
atgccgcgccatctccccgccgccgccgccagccgccgcctcctctgtaccacgacccacctcctcgccctgccgcccgtcgagccgtccccggccgccgacgagctcgcccgcctcctccttgcgcaccacaaccccttccacccggccgagtcgccgctccagctcctctccggcgggggggtctccctcacgggggacctcctcgtccagctcctcctccgcctccgcggcgcctccaagctcgcgctgtcgctcctccacgccgcgcgcctccaccctccccccgccgcctcttcccgcgccgccgacgcctacgacgccgtcgtggacgcgctcggccgcgcgcgccagttcgacgccgcgtggaggctcgtcgtcgaggccgcggcggacggcgccgccacgccccgcacgttcgcggtgctcgcgaggaggtacgtcgccgccgggatgacgcggcaggcggtgcgcgcgttcgacgacatggaggcgttcgtcgggagggagcccgacgccgccgagttcaccacgctgctcgacaccctctgcaagtacaagtatccaaaggttgcagcggaagtattcaacaaaagaaaatacaagtatgaaccaaacgaaaagatgtacactgttctaatttatggttggtgcaaggtaaaccgaaatgacatggctcagaagttcctaaaagatatgatttatcatgggatagaacccaacatagttacatacaacattctcctcaatggtatctgtaggcatgcaagcttgcaccctgattaccggtttgatagaacagttcgtgcagctgaggatctcttgaaagaaatgcatcaaaggggaatcgaacccaatgttacaagctactctgtcatcctgcatgtttacagtcgtgcgcataaacctgaactatgtctctgtatgttccgctcaatgaaagagagaggcatttgtcccacggtggcaacctacacttctgtgatcaagtgccttgcttcctgtgggagattggatgatgctgagagcttgcttgatgagatggcaagtgagggagtatgcccctcgccggccacatacaattgtttcttcaaagagtatcgagggagaaaagatgtgaatggtgccctacagctgtacaataagatgaaggcccctggttcaccagccacacctgatattcacacttacaacatactgcttggaatgtttatcaagttgaaccaacatgacaccgttatgcaagtttggaatgatatgtgtgagagcactgttggtcctgatctcaattcgtataccttgttggttcatggtttatgtgacaataagaaatggagggaagcatgccagtttttcatggaaatgatagagagaggttttcttccccagaagatcacctttgagacactatatcgtggtttaatacaagcagacatgttgaggacctggagaaggctgaagaaaagggttgatgaagaagcagcaaaatttggtgaagaattcaaaccatatcacattaagccttacaagaggtga

SEQ ID NO: 22426 - DNA, 1982 bp, Oryza sativa
  Clone ID: PAT_MRT4530_27603C.1
agtcgatccccccgctccgggccgtgcgcccccagggctgcccgtcaacgcccgcattccgcacgaggcttccattagcatgtattttaaattattaaatggtaatatatatatatatatatatatatatatatatatatatagagagagagagagagagcgagagagattgggatgggtggcggcaaacgtgtctgtacaccaagttgtggcatagtacttcactagcacatgtagccaccatccatctctttagctttggaccaactaaagatgccgcaattatgcagccggtagtccagtcccgtccccactccacaccctaccaccgtgttgcacgatccgtccatcaatgcgtatcgatgcgatcgttcgtgcacgcacgcacgcatgttgtcctcgtgccaaatgccatggccggtgcgcccagagacaagagaaaaaacaacgacctcaagacatgcagttcgtcccagtcccacctaaccaaagggccgaaccctggttaaataatggccagccagcgcagtgctgcgccaccgcaccgcaccactaccgctgcggcatcaccaatcggcaatcgcagagcaaaagcatcgggaggagcaagctactagtagtagtatagtagtactagtcaaagaaatcaacagcttgattgaccatggccgccgccgccccctcgcgagtctccgtcagggccgcggcgcccgggcaaacggggggcttcgccaagatccggccgcaggtggtggtggcagcggcggcgaggtcggccggggtgagcggccgcagggcgaggagcgttcgggcgtcgctgttctcgccgaagccggcgacgcccaaggacgcgaggccggccaaggtgcaggagatgttcgtgtacgagatcaacgagcgcgaccgcgagagccccgcctacctccgcctcagcgccaagcagacggagaacgccctcggcgatctcgtccccttcaccaacaagctgtacagcggaagcctggacaagcggctggggatctcggcggggatctgcatcctgatccagcacgtgccggagcgcaacggcgaccgctacgaggccatctacagcttctacttcggcgactacggccacatctccgtgcagggcccgtacctgacctacgaggagtcctacctcgccgtcaccggcggctccggcgtcttcgaaggcgcctacggccaggtcaagctcaaccagatcgtcttccccttcaagatcttctacaccttctacctcaagggcatccccgacctgccgcgggagctgctctgcacgcccgtcccgccgtccccgaccgtcgagccaacgccagccgccaaggccaccgagccccacgcctgcctcaacaacttcaccaactagctcaacccgcgctgtacatcacttccaagttccaattgctactgttactactctgccaataattgatggagatgcagatcgagctgcctgattagtttagtgttaattgcggcatgtgcggtgtgtatcgtatcactgataaggaagaggaatcgaggacaagatatttgtttcctccctgcgatgagccgatgaactgatccgaacaagaagaggcttcttggtagtaggtggattggaatatcgaaatgatatgattgtgatccgcaactacaacgaccgccactacggagagctcatgctatttgtttgtttgtttttgtactagtgctcaaatatatactccagctcatgtccatgtgtatgttttgctgctattatttttttctcctgaaaataaaatatataacaacgcgcattggcatgaaaaaaaaaaaaaaaaaaaaaagggcaaaaaaaaaaaaaaaataaaagaaaataaaaaataaatatttaagatagaattatataatttgttatattaaaataaaaggggggggccgttttagaggtacaaaatatatcgtccggttgtatgggaagaataatttttttt

SEQ ID NO: 22427 - DNA, 407 bp, Oryza sativa
  unsure (1)..(407): unsure at all n locations
  Clone ID: PAT_MRT4530_27604C.1
agaaacaacaccattaattttactaacagattttaggcgccaaatagatagaattgctggcgggaaaaagaattatggcgccatttgtctcagttctcccgttaaatcctccagcatccaaacaactcatatctaaacatgcattagcatcctgataaattaatctctcttatcaagcaccggcatcgacgccagatcttggtgctatgccaaacaacagcatgattcctccatcagaggcatcacaactgcatgatgcaggagcaagtcccatgttcttggacaatacatttgctacaacgacgtcattcacaaatcttgttgagcccgatgattcatccgctggcctgggaatgaagcaatagaaacggtnagatcaatatggtctgctctacttttggtaaatt

SEQ ID NO: 22428 - DNA, 1236 bp, Oryza sativa
  Clone ID: PAT_MRT4530_27605C.1
atgcgggcgcgcatgcatcgggcgcccgcgcctcccatgctcccgccgcacctcccgcgccttccacgcttgcgcgccatccccaccaagcgccccaccacagacgccgttgcaacaaatcactcgcatattacgtccgtgttcaaggtgaacccaccagctgtcgtcggcggcggcggcgacgacgacggcgacacccctgtacctctaccgcaacacctcgcccgcttgccctccaagcactgcatgtctttcgttcccgtgcggtcgaggaggcatgccccgtggatcgtcggcgtcggcggcaacacaggcatcagggactatggcccggagaccatcgtcttcgacaccaacgcgtgcaaggtggtatcgggacccaagctcctgtcgacgaagctctgccctatcctggtaccgatgggcgagaggatatacgccctggcaggcatgccctgcgtgacgggggacatcaatttcgtgccctggttcgaggtgctcgatctctccatggctcgagtgatcgacaatgcctcgggctgctgtctgctggattgcgagtggaaacccctgcctcgcccgccctttttcccttgggatctcaccccaactgactacatctttccaccggtggataccgtcaagtcccatgtagcagttggctcctacattctgctgtccataaccgggcacggccagaagggcactcacatgttcgacaccgagacgcagcaatgggccaaactagatgacaaagacctgcctttcatcggacgtgccatccctcttcagggaacactactcttccttggctcatcgaacactagcgacgaaatcactgcttacaagatcgatgtctctgtctcctccgttgcaagcccaagcaccatcacagcagggcacatgtactctttgtcaattgtcgagatccaaatgctgacctacttggaggacgaggaggagattgttaccggttgcaaattaatttcctttgattaccctgctggcaaccctggcttatgttcacttaattgggtcaacaatgaccctcacatatccttcgattttcctcaacacgtgggggagcttgtcaccattagagcatactcaaatgtggattacctcgagtccactcgtgccctagtgatctccaaccaatggaaacaggtttacagcatctatgatccactccggagactttcttcaccctgcctggcaggcgtaatatccttatga

SEQ ID NO: 22429 - DNA, 226 bp, Oryza sativa
  Clone ID: PAT_MRT4530_27606C.1
gctcaggtcgactctagaggatcgtgctcactaatccccggcgatggaagttaattaatacttcccggtaattattctttttggtagaaaaactaacgcaactgggctaccacttgattttccagtaacagcttttgctgcaacaaatactccaccgtcagacgcaggtagcgctggtcatctacccaaaatttgaccttgatgcgatccccgggtaccgagctcg

SEQ ID NO: 22430 - DNA, 918 bp, Oryza sativa
  Clone ID: PAT_MRT4530_27607C.1
atggtcgccgccgaggagaacccggagtccttcttcgcggcggcgccgccgctgcgggactccgcggcggtgcccccgcggcggggggcattcaccgcgcgcacgtgctccggggcgggcgcggcccgcggcgccacgccgatcgtggggctgacggcggccgcgagcacggtgtcgccgtgacagcgctcggtacggtattgtctgaaggccggctatgcagttagtttcctccatcgacgaggacgggcccaggcggcgtcgacgttcctccccgatgattgattcctggcattccttgatttcgactcaaactccgaggttcaagtgacggagagccacgcgccagcggccaagaaagcaactgcagattcttgcatgtcaattgagggcggcaagctgttgtaactcccattcactagaaaatgttaatgaaatcagctattgaatatggttactccatctataagttcggctgggccactcggaatgttctatcttgctgcggctgtgtctgatttctatgtcccttgggatagcatggccaaacataagattcagtcaggtggaggccctctggatatgaggctcagtcaagttccgaaaatgctttcagtgttgcgaaaccaatgggcccccttggcgttctgtatatcatttaagttggagacggattcggacatccttattcagaaagcagatatggctctgaacaagtacaagatgaacatcgttgtggccaatttgcttgcaacgtacaaagaggaagtcattattgtaacagacaaagaaaggagtactatccgaaagatgaacaaggatgaggatctggaaatgcagataatcaaaatcctatcacagaatcactcgaagtacatatgcggaagcacaaacgggtgcgtccagagcccatattga

SEQ ID NO: 22431 - DNA, 342 bp, Oryza sativa
  Clone ID: PAT_MRT4530_27608C.1
gcgcaacatcatattctcaccattctacaaggttctgatggcagatttcttcatggctggagcagctaacgagccagatcccactattacgacacatggagtttgcagcatgctacttcatggctgcaagttttaggactcatgcatatgagaaatgtaccagcagcccacaatacacacacctagcctatgtgattgccttcctgccttactactggagagcaatgcagtgtttaaggaggtacctagaggaaggtcatgatatcaaccaacttgcaaacgctggcaagtacgtatcagcaatggttgcggctgctgtgaggttcaagtacgctgcaacac

SEQ ID NO: 22432 - DNA, 467 bp, Oryza sativa
  unsure (1)..(467): unsure at all n locations
  Clone ID: PAT_MRT4530_27609C.1
gacgtcgcatggcaccgcgtnnnacgtaagnctatggnatncctnctagaagacggcacgcacctcttatttatttatttatttattttatttatttatttttattttttattttttttattttttttttttatttttttttttttttttttttttttttttctttttttcttgggaaaaaaacggaagggaaggggggggcccccctttatcttcaaagggttaaaaaagcaaaccccccggggaaaaaaaaaaaacgggggcaacccgggggggggggacaggaacccaagggttaggggacaaaaaaaacgggcccaacggggcccaaaaggtccaaaccgggaaaaaacccaaggaaccggcccccccggggaacccggcaaaaaacggaaggccaggggggggccccccttattttaaaaccggccctttccctatccaaaaaaaacacgggggctcccccc

SEQ ID NO: 22433 - DNA, 121 bp, Oryza sativa
  unsure (1)..(121): unsure at all n locations
  Clone ID: PAT_MRT4530_2760C.1
gaaaattttgtacctttttacacacataggtccttactgtgggttctcaggatgctttcaacaagaagggaaccttcntcatgtttaccttgcttcattggtacatagagtcctcacccct

SEQ ID NO: 22434 - DNA, 864 bp, Oryza sativa
  Clone ID: PAT_MRT4530_27610C.1
atggaggacgccgacgctccgcgacgtctcctgaacgacgccgacctcgatcttgtcgacgatcgggaaagacaagcttactacatgctgagtaatcgggagtatgctcacacgcgagaatactctccgaagctgctgaaaaagataggtatggaaacagacttttgtgccatctggaaagctgttggttggcagagatttactgtggtagatgagcctggtgatcttagacccattaggggggatgaattaattatcttgtttgccatggttagaaagatcaaagttgctcctgtcaaatgtatgataaggcaatggttagaaagtataagattttttgctcctgttgagtgcacttccttgattactcggatagcaaagggactgggggtcatcaatgaccagattgcttatatcttggccgcttgtccctgtattgataagaattatctagtgcaagggcacattcttaaacatggagtagatggatctttgatatactttttccccggttgtacaaatgaaatcccgctgcctaatgcggggtatcatttgtacaacttccataaactaaccattcccctgcatatcatagaagaatctcgtgtaggtggaacatacagggagacacgcaacgtggcaagaaaggaacgagaaggttcatcatcctcaacaccgtgcagatgtatgaggcaggttgggaggcaacttgggatgcgcccggatggacccaagctccacgccacaacatcggagtctcaagctggacaagtgccagtgaggaccggtggcgtgcacctcatgacatacagtgggggacaaccaaccctccagattaagcagtatgcctccatccccaagtga

SEQ ID NO: 22435 - DNA, 295 bp, Oryza sativa
  Clone ID: PAT_MRT4530_27611C.1
aacatataaaatattattatcaaccaattacgccctatttatataaaaacccagtaattaactacatcattaaacttaaatcctaattacacaaaaccttactcttattccaatcataacctttttaaaaactgaaaaaaccatttatcttattatattttcctactataaaactatatctttaatcaaccaattatttacattttcatttttccctttctacactaaatcaaccccttcaatctacataactatcaaaatatctttctcttcactccttccattcatcaattac

SEQ ID NO: 22436 - DNA, 769 bp, Oryza sativa
  Clone ID: PAT_MRT4530_27612C.1
gatgcatttgacaaatctgttgcacatcttgtgaagaagttgggaggggcagctggtaatggaaaagttcaggttaagcatccttgtctacaaacgggatacaaagaagattatatttgttcttactgccacccgctcaaactagatggaagtcccagtgttggagggaagacaacaggcaaagagaagcagggaatggcagttgaactgatcgggatgcctcagtggaacgaatgtagtgcccttgcaaaattaacagtgaatctttctgagtggtccaatgcaagctcagttgactgcaacactaaaccttgtgctcttcctagtacctttccgcaaccacatgggcagttttatgctatgtctggtttctatgtggtttttaaatttttcaatttgactgccgatgccactctcattgatgttctaaatagaggccaggaattttgtgaaaaaacatggaaggttgcaaagagtagtgttccaccacaaccttttatagaacagtattgtttcagggctccttatattacatcacttctgagagaggggctgcagatcaaagataaccaggtgataattgactctggtagtataacttggactcttggggttgctttgttagaggctggacaggtgttgtctacacgaatcgatattcaaggatacagaatactccaccgagagataaatccaaatattcttaatggggttgtttctgatttcaattgggttagtcatatgtgccatattgtgtgtcagcaattca

SEQ ID NO: 22437 - DNA, 1646 bp, Oryza sativa
  Clone ID: PAT_MRT4530_27613C.1
cgggctgcaggaattcggcacgagggagagagagagagagaactagtctcgagttttttttttttttttttgcaacaaacaacattcccagatcgcacgaaactacgcttaggcatagtaacattgacatacacactaattgtcacccacatccaaggataaaaagatcagctaagtttacatgatgcactacagtcaacaaccatggggcactacactcaaccatatgttgagaaaacaatctagcacagtaaatcatgagatctagaagctcaaaaaacacatgaacttcatcattgcaaagaccctgcaccttcttccttctgtgtgttccctgctgctttggcttcaactttcagctcagcttgaacatccttcacagccatgatctctgaacttatttcgtgctgctttttcgcgctctcctctcgtttatccgcttcgagatcgtgttcgagctgtctcaagaacccttcttcgacgtcgctcagaggatcgacgccttcttgctcgctgtcgaagcaggtgttgtacctcaccagaaaatccacctgtcgaccagacctgctgatctcgctatgcatatcactcatttcacagcttctgtccatgtctctctcactgccatagtactcagcatcgttttgctgactggatgaagctggagatgagtatggagtgtaatctccgctagctgcatcgtcacgctctcgaagtgtcctcaagatcaatgtcttgaggaagttcatgacttggacagcatgcattagggctgtcaaaggatctgacatctgagtcatgttgggggcaaacaccatggctatgttcctagcattcatcttgttcagctcctcctcttcgacaacgtcagccatcagttcaacagcccaattgaggagcgctgcctgagtcgggcgcaatagcgtcacgagctctaggaattctccttcagaattgcactgtagcacttgttcaggggagaggctatcaagcacaccttctggaagttccctgaaccatgccttaatcaggcttgccaaacagtgaacatcaatgtcctcagggacaactcctttgttcagctggtccctcacatgctcctcttggtcattttccgggtttatgcgaaagattccttcagcctttaggcctccctgagcatacaacctctcctgcatgtgcagcagtatagtggggactgagtttcccttcccatcgtaggtgcactgcatcgattcagccgagacaccaaaaacactagcactagcgctggggacgcggcatggcatctcgacctcgaactcgacggggaggccgaggaagccatggaagcggtcgaaggtgacgtgcgccacgtggcgcacgtccgtcggccacccgatctccatctcccccacctccgccgccgcgtccccctcctccgcctccgcctccccctcctccccccacccgccgccgccctcccgctccaccctgcacgccaccaccgacctcctcaccgccgcgagcagcacctccagcaccgacagctgctgcctctctctctccctctcctcctccccgcttcccctcttcttccccacccctcctcctcctcctccgccgcccttgcatcccgacggcgacaccaccaccacccccgtcat

SEQ ID NO: 22438 - DNA, 1092 bp, Oryza sativa
  Clone ID: PAT_MRT4530_27614C.1
ccgcctgccgcattccgcacccagggccctcgcctccgtcccgtcggctcacctcgccgtggccggcgccgccgccgccgccgcggccgcggcgggggcgctgctcggctgcgcgccccgcgccgagcgcgtcgccccggccggggaggggtgccgtgccgtgctgcccgcctccccccgggtcccgcgccgcgtgcctccgcccccctctccctgctcccacgcgctcacttcacgcgctcctcttggttgtgcccctgtgctgccctccgccgccgctgctcctggccacgttcctccgcgtccctcttcccggatccgcggccggaaacatatgctctagtctcagcaatgctagggggattggggctggaatctgtagtttctctacgtctgccccaaaggggatatcgaagggccttctttacaaactccttcgaggacatggggattctcaaggatatgggctttggttctccatgcagctttcaaaggctggaagacgaagttccaggacatcccacctatgaaaaagtatgttatgctcctaggacttgcttgcttgactctccaccttgctcttcattacaagatgaagaagatggagactaacctcaagcaggatatgatcaagtttcgtgctgaagtaaagctggagattgaagcagcagccaacgcgatgcagaaggagatcgcctcagagcttgctaagtctgctcaatttagggcagattcagtggttgcattccagaaatgcaaggctcgtcctgatgtgtggtcggagtattactgcctaacattgctggaggccctcatgaggtccagaatcgatggcaaatagactctggattatcactcgaactgagaaaacgatgatcgtcactcggagcagattgtctggtcacttggtgccttggtggttgtcaaatctcgttgtttggttagtttctatgacagtttgtgtgtggtcataaagggatttagatcgatggggtacacgatctgcatgtaaggaaggatttttacgagtggctatactcatcaattttcccagctcaattcatcttcttattcagtaaaaaaaaaaaaaaa

SEQ ID NO: 22439 - DNA, 1357 bp, Oryza sativa
  Clone ID: PAT_MRT4530_27615C.1
atggccgcgaccgccggcgacgccgccgccgccgccgccgccgcctgccctgcctacccatggccgagcgacggagcccagcgcgggcgcaaggtgttcatgcagagcgactgcacggcgtgccacggcatgttctcctccaacgccggcctcatcagcgacgacgactcggcgtgggagcccaaggtggcggagatcgtcgtcgtggaggaggctcatcagccggtggcggcagcggcgacactccgcggcggcgcgtactacccggcgccggacctcaccttcattgcaaagggcctgcgaggcaataacctctactccggcggcggcgccagcgaggcggcgaggatgctggccgatgccgccgcggcgtgccaggagctgaagaagcgggcactggctagccccggagaaaacggctttgccaccataccatgtcgcattcgcatagctggccgtggcccgtggatccgctaccatccacgtcagcacgacgccatccataatcggagctcctcgttatctgcagagagaggcgtcggtccgctgcgctgcttcacagtcgatcacacgcgcccactcgaccaggtagctagcttgcttgctgcagctctctcgtcggaatcaatggctgcgacttccggcgacggcggcgccgccgcctgcccggcctacccgtggccgaacgacggagtgcagcgagggcgcaaggtgttcatgcagagcgactgcgccgcgtgccacacctcgctcccctacgccggcctcagcgacgacggcgcgcgcgcgcgggcagcggctgtggagcccaaggcggcggagatcgtcgtcgtggaggaggcgcggcagccggcggcggagaccgtcaacggcggcgcgaactctccggacctcaccctcatcaccaaggggctgcgcggcaacctctacgccaccgcggcgccgaggatgttggccggcgccgccgcagcgtgccaggagctgaagaagcgggcaatggctagccccgtttggctgtagtttctgcttgctccatgaagctagcaagcagtgcactaatggcatcagcagttacagccctgcttctgcttgtagcttctggccctgaaataaatcactcccctcgtatggataatggatatatccccacgtattgcatcttgtgttttgctccctgtatcctgctgtaacaataataacatgaagatacaaaataaattgggggaaatgatatggttttgtatcagcatttacatgtaaatgagtggtgtctttagtctggaacttctaaaaggtactcgtgctatgttacaagtgtacaccatcgagagatggataagctaaaaaaaaaaaaaaa

SEQ ID NO: 22440 - DNA, 1404 bp, Oryza sativa
  Clone ID: PAT_MRT4530_27616C.1
atggcagcaaaacgcctacgagacggctcgtgcttcgacgagaatgccatgcagccagcggcaaagcggctacgtgcacgcgcggcggctacggccgaggcgcggacgacgacgactctcccggtcgatctcctgctcgagatcgtcgcgcgcttggacgccgcgaccaccgtccgctgcgccgccgccggcaagtccatccgccgcgccatcctcgacccgtccttccgccgcatccgcctcgccctccgcgccgccgccaacggtgccggcttcgaccctaccctcctcttcgccgtctcctacaagctcgctcgcttggacgatccacccgtgctcatcgtcgaggacccacagtcggcggccggcggcgctgctgctccgttcgccatctccggcaagttcctcggccacatagtcgagccgccgccgccgtcgtcgtaccgacccgtcctccctatctacaagtcatacgactcggaattgaagcactcggagacggtggcgtcgcgcgacgtcctcgtcgtcctccgggagagaccagtcggcgtccgtgcattctgcaccgttcctcgtcagcagctgtgcatctgcaacagcctcaccggcgacaccacccgcctccccatgtcggacgtcgtcgacgactacccgccggccttcctcgccaccggcggcgccggccgcagctacgagctgctcgtcatggacaagaggctgcaaacccagacgttctcgtcggaggacggcaagtggggagccatccgcgccatggaagaactacctcacccgatctcatcgccactctacgcccatcgcccactggtcgtcagccgccgcaacgccgtgtattggctgtgcccgcaaaggctgggcggggtcaccgccgacctccacatcctcgccgtggacgttggcgccgaccgccgtcgtgcgtcgcggatcgagctgccgccggactgcctcagtaggatgaagcccttcgggtggcaatccgacgggatcatcctggcgccctcgccgtcgccggacggggagctgagcttgatcgtcgcggaggtcctcgtgatatcgcagtggacgctgctgccatcgtcgtcgtcgtcatcgtcggagggggggtcgccggcggcgaggtggagcaggcaggtggtgatcagcaggctggcgatcgacaggcaggccgggcacgacatgttcatgggcgtcgtttgcttccatggactggggctcgtgagcggcgccgtgctcatgcaggttcgggtgctggacaccgtgctcatcgccctactccaccttgcgtcgaaagagtgcctcatcctgcggcgctgggacaaaatgagcagaccctcggaactgtgcttgcacgagatagatctggcctctgtgctccaatccatgtaa

SEQ ID NO: 22441 - DNA, 322 bp, Oryza sativa
  Clone ID: PAT_MRT4530_27617C.1
agaacaaatctgtttgttttaactgtccattacatgaggacatcacaaatattggagcaaaaatcactttccctcaccaaaagcaagataaaaggtagtagattcttgagcacaaaaggagggggaggggataaactgggaatctacatgacaaaaacatgcttaaaagacctggttctttagaatctggaagttcaaatcaggataggaactcaacaaattcacttaaatatcaggaaaatataaaggaaaacagttcaactcagatctagtaactcatgatgggaagaatacattcttttaaaaaagcccaaaattataa

SEQ ID NO: 22442 - DNA, 200 bp, Oryza sativa
  unsure (1)..(200): unsure at all n locations
  Clone ID: PAT_MRT4530_27618C.1
gagggganagcagctgcatncgccatggaccgagtgcagnctcgtgctcctcggcctncccatcctcctcttctgctncgacctggtcacgctcttcgggccggagcagntgaccaccccgnagcccnacctgccgccccacccnagcccngacgcgggctncnacgccgtccancccgacnacatcggcgncgatgccg

SEQ ID NO: 22443 - DNA, 828 bp, Oryza sativa
  Clone ID: PAT_MRT4530_27619C.1
atgtcgctgctatcgaagctgagattggtcacggtggatgtgacaggaaccctgatagcatacaaggggcagcttggtgattactactgcatggcagccaaatctgcagggatgccatgccctgattacaagcggatgcatgaaggcttcaaggctgcatacaccgagatgactgtcagacacccttgctttggccatgcttccaacatgcccaacatcgattggtggaagatgtgtgtcaaggactctttcatcagggctgggtatgagtatgatgatgccacatttgagaaaatattcagacggatttactccactttcggttcctctgcaccctactcggtgttccctgatgctcaacaattcctgagatggctgcgcaacaatggctgcaccgtcggtatcgtcagcaacgccgagtaccggtacaaggacgtcgtcctacctgcacttggtctcaatgaggggtcggagtgggatttcggggtgttctcggggatcgtgggcgtggagaagccggacaggaggatgtacgaggcggcgctggagatggccggcggcgtggcggcggcggaggctctgcacatcggcgacagcatgcgcaaggactacgcgccggcgcggcgggccgggatgcacgcgctgctgctggacaggctcccgacgggccgaggcggagggctggtgcgcgtcccgcgccgccgtgctccccgacctccgccccctcccgggaatagcgtcacccccgccgcagccccacacaaaaatggcggcccgatagaaggaaccccctcgtctcacgtcgacacgatgactcgctttcaatag

SEQ ID NO: 22444 - DNA, 279 bp, Oryza sativa
  Clone ID: PAT_MRT4530_2761C.1
atgacgctccgatgggacagcccacacctacctccacttccgccgggggtgagcgcgtcgtgggaacatggctgtgcgctgacgatatgggggtcggggtgccccggccctcggggccagggcaagcgcaacccgacccccccctcgggggaaatcaggaggagggcggacacctcaccctcgggcccgacgtccccgaaggtgccaggccacgtgggcgattgtgtctgcctcaagcctctagtcatgatactcccggtcccatatcaccgacagtag

SEQ ID NO: 22445 - DNA, 329 bp, Oryza sativa
  Clone ID: PAT_MRT4530_27620C.1
aagtaaaaaaacgggaccccaaaaaaaagcgggggaattccattttttttttattccaacaagaaattttggggggaaatgtccgggggacctactttcctatttaagggctttaattaaattttgaggaacaaccttggccttgggggggggggtatgggggttgaaaccactgccctttttttggggggggaaaataaaaaaaacaaagtttgaaaagaaccccttgccaaggggggcggttttggggggctcctcggggaggccccggagagttttccccgaaaaaagaatttggagccccgaatcattgaacgaaacggggggga

SEQ ID NO: 22446 - DNA, 401 bp, Oryza sativa
  unsure (1)..(401): unsure at all n locations
  Clone ID: PAT_MRT4530_27621C.1
cccgggntcgacccatcgcgtccgaaaaaaaaaaaaaaaaaaaaaaaaaaaaagaaaaggggaaaaaaaaaaaaaaaaaaaaaaaaaaaaaaaaaaaaaaaagggaaaaaaaaaggggaggacccaagaaggggggccgcgttctaagggagccaggaggccacccacggggctgcgcaaagagaaacccataaggccagggccacggggggggggggaacgggaaaaccgttggggaaacccaaggaaggggaaaacgcagggcagccccgaattaaatagccgggggaaaaaagtgggcaggccggcagaagggggccgtaccaaaaagggcccccaaacggaagggcaaacgaaaaggggcaaggggaggggcgcctaagggggcgcggcaggggggg

SEQ ID NO: 22447 - DNA, 339 bp, Oryza sativa
  Clone ID: PAT_MRT4530_27622C.1
tcgtataaaaaaaaaaaaaaaaaaaaaaaaaaaaaaaaaaaaaaaaaaaaaaaaaaaaaaaaaaaaaaaaaaaaaaaaaaaaaaaaaggggcggccgttttggggggcccttttttaggtccccgggtttgcgacgcgttagttcttttttagggtcccctaattgggatcccttggccgaattttttgaccgtcttttttgggaaacccctgtggtaaccccctttagtcgccttgcttaacatcctcttttaacaagctggtttattcggttgggggcccgcccaagtgggcctttcccaacggtttttccaacctgattggccactgggactggcc

SEQ ID NO: 22448 - DNA, 2078 bp, Oryza sativa
  Clone ID: PAT_MRT4530_27623C.1
atggcgagagaagccgcggcaccagggcgcaccgcggggaaggcctccgcgccgtcgggacaccaccacgcgggcgctcgcggcggcggcggcgacctgtggtcggagatcatggccagcggcggaggcggaggcgcggcccgcatcggcgtggtgtacgggcggcggcgggcggcgcaggaggcgtcgaggccgaggggcgccgtcgatgtgagaggcgttgcggccggcgagaagagggcgagctttgagccgagcaagaggaccagctggaaccggtcgctctccatcagaggacgggaaagtatcctttttgctcctggaacaaaaattcaacctcagcagaatccttgcagagcacagaaaaggccaccaaagccgggtaaccgagtgaaaagaacttttggggggcctcctgacttgaagaaagaaaaggcttattttgaagaagttgatgcttttgaactgatggaggagagcccttcacctaagaactttggcacttgggcgagaggaatggagcagaattacattgtgcatgatctatctgcaatactggagagatggaaaatctccaagcttgcgaaatttgcagcatccaggcccttgtttgatatcatggagaccccagttgtaccatcagtccgtagtgattgcagtcttcacgacagttgtagaacccctgaaaaggatagggggtctagaacaaatcctatgagaagaacaatcccttcagggctcagtgacaaaaccagcatttttacatcctttagtgagcttaagattaaggaagaacctgatgatagcagcattccatcattgagtgctgaagctatgactgcctttgctcaactccttttggtttgcaatcaatctgcacctataaccctagctgaagcgttttccacttactggctgtattcgtcatttaacgaagatgttcatggaaatagtacaccaggcagcattgtgaagcttggtgaaggaacattcggtgaggccttcagggctggtagtactgtctgtaaagtggttccctttgatggaacatcactagttaatggagagacccaaaagaaagcagaagaagttcttgaggaagttttgctttgtctaacactaaataatctaagagcagaccggggtgataatgtgaaagaaaattcatgccatggtttcattgagacaaaagatttttgggtttgtcaaggtccatatgacccttcacttatttgtgcttgggaagattgggatgccaaatgttgttctgagaatgatcatccaaatgatttttcgaatgaacaatgctatattgtctttgtgcaagctgatggtgggagagaccttgaaaaatttgctttgcttgactacaatgaggcttgcagtttattggttcaagtcactgctgctttagctgttgctgaaagcgcgtgcgaatttgaacatcgagatttgcattggggtaacattctattggatcgagatgaaacacaagacaagaatcatacaatgggtttcactcttcaagggaaaaacatgtgtactagaacttttggtttgaacgtctcaataattgattttacgctttctcggatcaatacaggtgatgctatcctctttttagacctgtcaacggaccctgccttatttgaaggaccaaaacgagataagcaggcagaaacataccgaaaaatgaaacagattaccaatgattactgggagggcagctttccaaagacaaacgtcgtatggctaatttatcttgtcgatatcgtactgcagaagagatactccacatttacttccaaagacgacagggagctccgagcgttcaagaaacgcctagccaagtatgattccgctaaagattgtctcactgattctttcttcagtgacctattattgtccgacgaggatgcacagccctctacagcctgaactgcctcttctttagttcgatccgagagatgacatagccttcctctccatgggagggttaatgttacttgttaattaatcagttaacacaagctcctcttcctgggacgtacaagagctaagataacttgttgcccggt

SEQ ID NO: 22449 - DNA, 391 bp, Oryza sativa
  Clone ID: PAT_MRT4530_27624C.1
ttgttgttttttgatgcttggtggctgttttatttgtattttttcatttgtttttccggaagcggacgggcacacccatggactttttttgccaaacgacacggtcttttaaaatccagggaaaagagcaccattgttgaaagaacaaatgcacacacattccctacttatacaaaaccctagaacctaatgggaatttgtaccatctttccccagaaaagggaaacacggcccccggaccggacgccactactacagtcggatccgggggcaaaagaaaagccccccatgggcaggggaaacccccccttgggtaaacacccgcccggacaaattacttggggggggccggctactcaacgacgcctgaggcgacctgctgtaaaataac

SEQ ID NO: 22450 - DNA, 318 bp, Oryza sativa
  Clone ID: PAT_MRT4530_27625C.1
atgacgtcaccgcctacgaaggccccacccgccagcgcggcgcacacatgggggagtggtggggcccaagacttcgcgatcgcgcgagtacgcgtccacgtggggcggctggcccacctggccgtcatcagcgctgtggatcgacgagcggcgatggcgaaggcgcggaagcagcagccgcagggcccgttcgccggcggggccgccgccggggagaggtcgttcctcgggttccagtaccaccaccaccaccgcggcggctccgtggcgccggcctacggcgacgacgacgacctccccgatttggcggggagctga

SEQ ID NO: 22451 - DNA, 959 bp, Oryza sativa
  Clone ID: PAT_MRT4530_27626C.1
gcacgaggaaggagcttgaggatgccatctcgaagaaagaaggcggcctatagacatgtaccattctatgaccctggggaaacaagtcagactgagcaacttgattcgccgtatttgtttgattcaggtgtgcttaatgagttaagtgaacctggaatccctgagctggagaatctcgcagtgaacattcaggatctggggaagggtaaagtagataaagagaggcagaatcaaactaatggtcaggcagagctcggagataacttctgggcagagctgttggttgaagatttcacaggcaaggaggagcagtcagagttggatggcaaaattgacggcatcgacgaactggctcaacagttggggtatctgagctctactagtccaaaatagagttgattttgtgattgttcatccaacaactactgctgcttcagtgcttttgaagatcatcttgaacaaactgatccaattgactagtggaaatatgaccaactacggaaggtgttcatggtgtttcccagactatggacgccactgtctagaagctgtataagcagtctgtttgccctgacagagctccatgatctgtaatatggtggctgcctccaacctgattagcaaaggatcctaaagaactcaatgactatggaagtagacagctgatgtatataatccagtgaccattagctggtatcagtagctctctgtggaagcagtttactgcttgtagaaccagttgggtgaagttcttgtaggctatgccagtgcatttgtatgggtccttggcctgttattggcatctggctctatgttgcctcagtgtctaagtatggtccctgctatcccatctagtttaggtctccatgtggtcatccatgatgtatccttgaacatctatgctgttcaaataaagatggaattttgcttagttctacctgcagcccggggatccacta

SEQ ID NO: 22452 - DNA, 185 bp, Oryza sativa
  Clone ID: PAT_MRT4530_27627C.1
ccatgcccccccacctaaacttgggttctttaaaaggggccgccttttttttttttttttttacattaaacaaagatatcgtgcatctatttatgccgtcaaggcgttaacacaagacgacccagattccaagcacgccacgcatggatacgattagactcagcaggcgacaaaatccatcacaa

SEQ ID NO: 22453 - DNA, 867 bp, Oryza sativa
  Clone ID: PAT_MRT4530_27628C.1
tcagccgtcaggttcttcttcgtttacttcgagcatcgccgccgcgtctccaagttgccaccttcgccgctctgggttggtggtctcgctacctctcgcccgcgcggtattggcaacaccattgcgcgcgttcgtcccaagttgtccccaggtctggcaaacccggcatgacgtctcatcctccacggttcgacagcatagactctttggtgtcatcttcctcaacgattgccttgatcgcgtcaccgtcatcatcttcagcgcgtcctcacgcacgactactctatggcgccccatgcgcaccttgtagctcggaatggcgtgcgggtcccaaaggataccggtgacgagcggcggtaaacgctgcggaaggagacgggggatgcagggagttggaggctctctaggcatgcaaggtgagggacgacggtcggaggagttcggcggcgccctcaggtcgacgacgatgacgggagtccggtggttttctgtgggaggcgaaaggcggacgggggcgaccatgacctccgtgaggaaaaagctatcctggcagtgggttggggaagcagagtggttggaggtggcggcggcactgttgcgcgaggccccacccatcggcggcgagcgggtgtagcagttgcgggtgacgcggggaagtcggcaaagtgggggcgccggggtgcacgggatggtgttgcccgtggccggctggaggtaggagatggccacgatagatgggccccacaacgcggttaaatccaccagttggtcaatgagaggaagatggaagtggtccttggggcactctttgttaaggtcggtgaagtctacgcacatcctccacttgtcgttggccttgtgcaccat

SEQ ID NO: 22454 - DNA, 275 bp, Oryza sativa
  Clone ID: PAT_MRT4530_27629C.1
cccacgcgtccggtgcaactgaaattggttaaggttcttcgaatccggtggaacacctgcctacttcaaccactggtttagaacctatgctaacgaactacattctgctgatttgattatgttctaagcttttcgtcgagatggcatcaattactttgcatccattcaacgcaagagtatgtacaaatatactgtcttgatgtccgttgctgttttgatgtgcctaaattaaccgacttactccctccgttttatattattaatcttcatattgt

SEQ ID NO: 22455 - DNA, 160 bp, Oryza sativa
  Clone ID: PAT_MRT4530_2762C.1
cccacgcgtccgctcttaagtcacatacctattgttatagaggtcaactttctttcgatcgtctttccttgagtaataaaaatacacaatgtgaacaacatctacatcaacagggctaaagatcaacgatcaccacctgcccaagaagataatattaatg

SEQ ID NO: 22456 - DNA, 208 bp, Oryza sativa
  Clone ID: PAT_MRT4530_27630C.1
ttgttcgtaaggagccacaaaaccaaggagcagtttggggtatggttacgacgcatgggggggcatgcgcaaatagcattaacgttggcaaaggtgctggttcggcgcgaccgatacataatggagcccggcccggacgaggcactgcggtgctcctagagggaagacctgacgaacgcgcgagaagccattgctggttccaagaggg

SEQ ID NO: 22457 - DNA, 208 bp, Oryza sativa
  Clone ID: PAT_MRT4530_27631C.1
agatagatgaaactaaataaaatgtccggaccagatagacactatagctttgggttaattctttttgggcaaacaaagtttcacttgaaattcaactaggcatgctctgataattcgaaggtgcacgttcattgtggactctgctatggtttattggaaaacctaactttatgctgtcggtgtccattatcctgtcgtgcatatgtag

SEQ ID NO: 22458 - DNA, 1424 bp, Oryza sativa
  Clone ID: PAT_MRT4530_27632C.1
gctctccactcatcgtcacacgttttcgtacgttacaccactgatcgatcaataatcgctcatcacccgatcgatcgatcgatatattctggcaaatctgtatatagatcgagcctcttattctgcttcttcaggtaagtcggcgtcgagctgatttgttaacgggtaggacgacgtcaagagcggtagctcgagctccgttcgcagccatggcggatgagcatgagtggtggaatagcccttgctctgcgcgcaccggcgacgacgaagccgcgtgctcgacggcggacgccgatgagtcagcggttgggagtactccgatgagcttcggccatggcggccagcctgctagtttatctgacgccgccgcctcctcgtcgtcgtcatcgttccttcttgccggacaacacatggattattggacgcaggacttcatgggaggtagagcagcggcagcggccaccgcgagcttcgacacgctgctccagctccagctccaaggcggcgacgcggcgagccgccgcttgctgctcggcgaccacgccgcagcgccgccgcgtcacctcgtcgtgccaggggcgccctacggcggcggcggcggtgatgacacggcggcgccgccgcgaggcttgtcaccgacaccgtacgaggcggccgacaacctgcagcagcagcaatcgttccccggcggccaccacgtcgtctccaacacggatcgcctccatgatcatcatcaggacgccggctcgccgtcgccggcgacgagaagctctcctggctcgccggcggcagcgaagaaaccacggatcgaggcgccgtcgccgatgccgactttcaaggtgaggaaagagaagctcggggacagaatcactgcgctccagcaactcgtctcgccttttggaaagacggataccgcatcggttcttcacgaggccatcgaatacatcaagttccttcacgatcaagttgcctctctgagctcaccgtacctgaggtgtgggcgccctgtgcagctacaacaccaacagggttcccataaggtgaatggtaactgtgaggggaagcagctggacttgcgcagccgaggcttgtgccttgttccggttgcgagcacttatactgtggccagtgagacggcgacagagttttggcaccctacctttggaggcacatttaggtagtaattaactagctagatactaactgtggccatgacagtgggagatctaggaaatttttagagcccagcttagctgatgaattaacccaactactacagtggtgcacatgcatggtgcaatgtgtcagctgctctctcttgcatgcatatggtgagctctagcagttgccacaggatcatttggtctagttgttaacagtcgcttgagatatatcaaatatttttttatgtgagagatatatcc

SEQ ID NO: 22459 - DNA, 1284 bp, Oryza sativa
  Clone ID: PAT_MRT4530_27633C.1
gcagaatcaatgcagcgttctacccatgcttttctttctgtacttcctgcctaaactttgcctataaatctgcacatccatgcctcgtttctggcaaccaggccgcagccttcatcatcatcagagagagaaggagagagaggaagagattgcagtgagtgagtgaggagtgaagcagccatggcggcggcggcgagggcaacggcgcgggtcgggcttgcgctgctgctcgcggtggtgggcgtcggcgcgcaggactacgacttcttcttcctggtgctgcagtggcccgggtcgtactgcgacacgaagcagagctgctgctacccgcgctctggcaagccggcggccgacttcggcatccacggcctctggcccaaccgcgacgacggcagctacccgcagaactgcgaccctgacagcgagttcgacccctccaaggtgagcgacctgctggggagcatgcgctcggagtggccgacgctggcgtgcccgagcaacgacggcatccggttctgggcgcacgagtgggagaagcacggcacctgcgccgcggcggcgctcggcgacgagcacggctacttcgaggcggcgctccgcctccggtcgcggctgcccgtgctcgccgcgctgcgcgacggcggcgtgtcgcccgacggcggctactacacgctgtcccagatcaagggcgccatccagcgcggcgtcggcgccgagccgttcgtggagtgcaaccgcgacgagtccggcaacagccagctgtaccagctctacttctgcgtggacgccgccggcgagcgcttcgtcgactgccccgcctcccccggcggccgcccctgcggcaaccggatcgagttcccggcgttctagagctctgagctctctctctctaaccagcctcttctcctagctctacggggaagactctaccttcgaagcatgtgcctttattactgacacatgggttcgatgatccatgggttcacttgttcagtgataaatgtatggtgtctttgaaggtataggatctcaattcgggaaaacgtcgacgacaaagaattgatgatgtgatgatttaatccatttcagtaatccatgttattgattacggagtaattattaatctgaccgtgtttttttttaattctgttgttgcaataaaagtatggccatgtaatgtttctctcttttttccccgcataatttgaacaagtttaggggggaagtggaacatataaatcaaagaaagaaatgaaatttacatgaatttttacaaaaaaaaaa

SEQ ID NO: 22460 - DNA, 420 bp, Oryza sativa
  Clone ID: PAT_MRT4530_27634C.1
atggcgctaggcggcagggcggtgcccgagtgcctcccctcctcctctcccggccgccacgaattgaggggcggagtggtcggggagctacgaccggtgcggatcaggtggcagggtggcaatagtgctctggttggcgcagatcaaagggcagcgcggccggcagcgagctccgtctgttgtgaaggcaggggccgtgatgagccccgtggcggcgctgtcctatctcccagtcggtggtgccactacaatctccggcgagcgggctacgtgatccgggtcaacggggtgcatgaagccaatgatgacaggttgtgggatgcaaagcacggcagcggactatgggatctagtcgagggagtgcgagacctgacagtgcggctgacaactattcaagtacacgttcatggtcgtgaatga

SEQ ID NO: 22461 - DNA, 664 bp, Oryza sativa
  unsure (1)..(664): unsure at all n locations
  Clone ID: PAT_MRT4530_27635C.1
ggctttacactttatgcttccggctcgtatttgtgtggaagttgtgagcggataacnatttcacacaggaaacagctatgaccatgattacgccacagctctaatacgactcactatagggaaagctggtacgcctgcaggtaccgtccggaattcccgggtcgacccacgcgtccggtgaccaaataagttcataccagatctgtccctttttcttgttgaaaataggagaaaggacgtaccatgtctcgttcatttctgcggaatttggcgtgttcgttttcccatagtttttcagtcaaagtatgtgcccactggaggcattgatgttatctgttgaccaaattcaagttcatttctctatcacaccgaaaggaccagaaaagaagttgctcctcgctgggagttctgctgtcttaaatggtctgttaccaatcttcaaccaaattctctgcttgaaattggatcatccaaatacccatctctgttttgaaaaagttgcctctagatgcccccacggtttagggagttagaagtcccctccccaggtaaaaaaaaaaaaacatttctcctattttcaacaagaaacatggacagatcttgtatgaacttatttcctctcctccgctttggtttgctccgatctgcagcgagagcgggaggt

SEQ ID NO: 22462 - DNA, 260 bp, Oryza sativa
  Clone ID: PAT_MRT4530_27636C.1
cgaccacttgttagaggttctgaggcgaacgataccatcatatatgatgtctgtggcatgtgagactatattggaaataacctgaagaagtgcagcctgtaatacgtgcaagaggatcaggatgccttcaaccggctgaccgtgcaggagctccagacgcacatgcacctgcatgcggcatggtaacgatggtatgccgagacctagctgctgttcactgaacagagaccatccacgatggaactgagagaccgctaggc

SEQ ID NO: 22463 - DNA, 342 bp, Oryza sativa
  Clone ID: PAT_MRT4530_27637C.1
caaaagcccgcccgacatggcccggcccaggcacgggctaggcacggcccaatggctatcgggccagcacggcccgagtggcgtttcgggctgtgccgtgccggcccacttccccatactcttgtaccgggcctggttgtgccggcccatcgtgccatgccggcccgaccgtgccgggccaacccagcgtgtcggtggggaggcccaggaacgacccgttggttgggccgggccagcacgggcccaacccctagtcgggccataccgtgcttgggccggaccaaaatatcaagccttgggccgggccgtcgggcctcgggccttatggccatttatagagct

SEQ ID NO: 22464 - DNA, 1698 bp, Oryza sativa
  Clone ID: PAT_MRT4530_27638C.1
taaaagtcgctttcgtaagccaaaggcccaaaaccagcctccgtctccgtgtcacccctggctggccacatcccccaaactccggtgactccggcgatggagggcggccgcggggggaagcgatggcgcttcgcgaccccgaatctggccgtggccgcggccggggaacgcagcatccagcggtacctccttcagctgcacgcgtgcctggacgagaacgggccacggcccgtcatcccgctcagccacggcgacccttcctcctccgcctgcttccgcaccgcgcccgaggcagaggaagccgtcgccgccgccgtccgctccggcgactacaacggctactcctcccccgccaccagcctccctgctcgccggtcggctattgcagagtacctatcctgtgatcttccttacaagctttgcacagatgatattttcctcacatctggaggtacccaagcaatcgagattgttatgtctgtttttggccaaccaggtgccaatatattgcttccaaagcccgggtacccaaaacatgaagcacatgcggtgttccacaggatggaagtgcggctctatgatcttgttccagagagaggatgggagattaatgttgaagctgttgaagctttagcagatgagaatactgttgcaatagtgattactaaccccaataacccttgtggtaatgtgtacacttatgagcatctgtccaagattgcagatacagcaagcaagttcggtctgttagtcattgctgatgaagtatatggtcaccttgtttatggaagcactccttttgtgccaatgggtgtgtttggagagactgttccagtactcacattgggagctatatcaaagagatgggttgtccctggctggagatttggatggatagcaatttgtgatcctaaaggcattctgaaagaaacaaaggtcgtcgattcactcagaagctttcgaaacctaacaacaggtcctgcaacatttattcagggagctattcctcatattatgaagaacacaaatgatgaattcttcagaaagactctcgagttgttaaaggaaactgctgagatatgttttggtgaaataaaagaaataaagtgtatcacctgtcctcacaaacctgaggggtcgttttttatgatggtaaaacttgatatatcacaattatcggacatttgtgacgacatcgatttctgcagcaagttggtaaaggaggagtctgtcgtacttttgcctgggagagccttaggcatggaaaactggttgcgcatcacctttgcattggatcccccaaggctaaagcaaggattagaaagggtcaagtccttttgccggaggcatcagtcacatgctaatatgctcaatataagtgcgtcggcgaaagtggagccccatttcggaatgtcaaagagttagagcaaatacaataacaaactacaaaccagttatcaatacatatcaagaagataagagaggagagatgacaagtgagctacaaattttaaatttatagccagctatgtgtgtataagaggtgggataagataatttagttccagtagttggctatagtattaaagtttctcttgtgtaaagtagttgtacaaattctgcttgtactccgttaataaatataaaaaaaataaagagaggtttttctatttaaaaaaaaaaaaaaaaaaaaaaaaa

SEQ ID NO: 22465 - DNA, 159 bp, Oryza sativa
  unsure (1)..(159): unsure at all n locations
  Clone ID: PAT_MRT4530_27639C.1
gcgcccacgcgtncgggcctgtgtaaggagagggtagtagcaccttgcttttctttggcttcaaaggaacccggagccatggcctttggtgcttttcttaaggtattttttctttccaaggagtcttaattgggtggcaacccgcaaggttgccgcccc

SEQ ID NO: 22466 - DNA, 527 bp, Oryza sativa
  Clone ID: PAT_MRT4530_2763C.1
ttaattacgctcgccgaccgaagcggcgttaccgtatctccgggcgagaccaatctgctcacccagattcgcgcgctgctcaagtggtgtggcagtcagaggcttgaggcagacgcaatcgcccacgtggcctggcaccttcggggacgtcgggcccgagggtgaggtgtccgccctcctcctgatttcccccgaggggggggtcgggttgcgcttgccccggccccgagggccgaggcaccccgaccccttaaggaagtcggtcaaatcacgggttaggtggcgactggcggtctgacgcacgccttgccccatcctgtcaagacgaaagcctctaggcactcgtctctagccggagttagcgtgttacctcttagagatggcacgttagccccggtcagatatatgccaggcttcatcccaaccattacagccgagagagcttgagatttcaccctaagcccccggccgaactggcaaaggggggcctgtgcggtctcccggtgaggagccacgagctccgtcat

SEQ ID NO: 22467 - DNA, 617 bp, Oryza sativa
  unsure (1)..(617): unsure at all n locations
  Clone ID: PAT_MRT4530_27640C.1
ggcggaccaggtcgttgttgagggcagggatggcctgctggggtggcgggaccttgcgcggtgccacgccggggagctgtccgtcgccgtcgtgcaggggaaccacgtgctcgaggaccagtgccgcgtcgagtcgggcccgccgcccctcgccgccacctgcatcggcgtcttcgacggtcacgccggccccgacgccgcccgcttcgcctgcgaccacctcctccccaacctccgagaggccgcgtccgggccggagggcgtcacggccgacgccatcagggacgcgttcctggccacggaggaaggcttcctcgcggtcgtctcgcggatgtgggaggcgcagccggacatggccaccgtcgggacgtgctgcctcgtcggagtcgtgcaccagaggacgctcttcgtcgccaacctcggggattccagggccgttcttgggaagaaggttggtcgcgctggtcagattaccgccgagcaactgtccagtgagcataacgccaatgaagaggatgtcaggcaagagctcatggctcagcacccagatgatcctcagattggtgctcttaaacatggngtttggagagtcaagggcattatacaggtgtccagat

SEQ ID NO: 22468 - DNA, 2934 bp, Oryza sativa
  Clone ID: PAT_MRT4530_27641C.1
atgctgggcgcgctccttaggctgctctccgcgtgcggcggggtctggcccacgtcaccggcgccgcccgcgcggtcgtcgtcgtcttcgtcggcggcggccgcggcggaccaggccgctgctgagggcagggatggcctgctgtggtggcgggacctcgcgcggtgccacgccggggagctgtccgtcgccgtcgtgcaggggaaccacgtgctcgaggaccagtgccgcgtcgagtcgggcccgccgcccctcgccgccacctgcatcggcgtcttcgacggccacgccggccccgacgccgcccgcttcgcctgcgaccacctcctccccaacctccgaggtgagcaccgccccccctcgcccttcctacccgccgccgccccgccggaaacgcgcgacttagggttgatccgtgcagaggccgcgtccgggccggagggcgtcacggccgacgccatcagggacgcgttcctggccacggaggaaggcttcctcgcggtcgtctcgcggatgtgggaggcgcagccggacatggccaccgtcgggacgtgctgcctcgtcggagtcgtgcaccagaggacgctcttcgtcgccaacctcggggattccagggccgttcttgggaagaaggttggtcgcgctggtcagattaccgccgagcaactgtccagtgagcataacgccaatgaagaggatgtcaggcaggagctcatggctcagcacccagatgatcctcagattgttgctcttaaacatggggtttggagagtcaagggcatcatacaggtgtccagatcattaggcgatgcatatctaaagcatagtcagtataacacggaacagatcaaaccaaagttcaggctccctgaaccattcagcaggcctatattgagtgccaacccatctatcatcgcacgttgccttcaaccaagtgattgcttcatcatatttgcctccgatggtttgtgggaacacctgagtaatcagcaggctgttgagattgtgcacaaccatcaacgagctggaagtgcaagaaggctcataaaggcagctctccatgaagcagcacggaaacgtgagatgcgttattcagaccttatgaagattgacaagaagttttcccctcaaacgaatcggataaatgtgcatattcctgaagctggaactttgcctagagttgagggagctttattaaggattatcatagtaaaatataccgttggtatcacaacttgcgagggttccatggattctgccgccgcctccgccgatgggggcgcgttcctcgagttcgtcgactacgccatctccatgctctcctcctcctcctccgggggaaacggcgacgagtcccccggcgccgggccagcgcctgcgcggccgccgtgggggtgggcggtggcgcaagtgctcaagtcgtgctgcgcttattccagcggcgtcaccgccgccatcctgctctccgacctcttccagtcttggacagaacaaagcaagtctctgaccgcaaagaggaaagttgaattgaccaatcttctaaaaacaagaaatagaagaaggcggcttcctaataccatcacaatcgattctatccatgagaagaacttcctatctcctaagagtgtccttgaagctgttgtcattgatgtgtttgtcattcctggtacaaacatatacatgcttaccttgggagacatgtggagcacatcgactatcgatctatatctacaccgaaggtactacaactacattggacagcatgatgtcttgaagaagggtcgagaagttatgctcacgggatgttgcctacgtacagctatggagggatcaggccatgctcgtattttgccaacagaatatatggtgatgttacttgatgaggaggaagatgaagatgccatgttacttgccgcacagttttgcatgtattctttctcatctatgatgctagatgagaacagaaacaatatttcctattcgttttatgccaggatcgaaaagatcgagtctttagaaccatttggatctacagaaagaaagcagattgtacttgttgacaatgatgatgcaaaaataaaatttgttttatggggggagcaggttttgcttgcaaatcttttcagcgtagggagcatgcttgcactgcacagaccttttattgcaaattatgtgcacaataatcatgaggagtctcaggaactttgccttgaatatggcagtgctacacaggtttatttggtgcctattgctcagcaggaggaacaggtacttcttacacctactcaaataaggagtcaagggtctcgattgtcatgtgttccaagtgatcatatggcttcacaagtaacattaccacgtgatttgcatggttcagttgatttcagcaaatatccatttcgagtatacgtaagtgatcttcatgataaaatggttggagttagtctgtttggcatggtaacaagtgtttgcaaagcaagtacatcaggcacttacttttatttggagatagaagatgcaacaggagttgtcctgatgaagcttaacttcattggactctggtcgctaggcagggtaggtgttggtcatatggtgtacatgtctggtttgacttgtaccttgagttcaacaaacaagcttgaagtcgcgtggactgaaaaggaaccagggtctctatttgttaacataagcttgctgccagcgcttcttaattcaacatgcctgcataatttgtcactcttgtcagatcttccccattcaactaatagaacacatatatgccatgttcgacttgaccacatcgatgtcaacagtttgaagaatgagaattttacggtcgctattgcaaataccagccagcggattgaagcgtatattgaaggcgagaaatttcttccagtatgggagatcacaagagcccaaaaatgcgagtga

SEQ ID NO: 22469 - DNA, 3075 bp, Oryza sativa
  Clone ID: PAT_MRT4530_27642C.1
atgctctccgcgtgcggcggggtctggcccacgtcaccggcgccgcccgcgcggtcgtcgtcgtcttcgtcggcggcggccgcggcggaccaggccgctgctgagggcagggatggcctgctgtggtggcgggacctcgcgcggagccacgccggggagctgtccgtcgccgtcgtgcaggggaaccacgtgctcgaggaccagtgccgcgtcgagtcgggcccgccgcccctcgccgccacctgcatcggcgtcttcgacggccacgccggccccgacgccgcccgcttcgcctgcgaccacctcctccccaacctccgaggtgagcaccgccccccctcgcccttcctacccgccgccgccccgccggaaacgcgcgacttagggttgatccgtgcagaggccgcgtccgggccggagggcgtcacggccgacgccatcagggacgcgttcctggccacggaggaaggcttcctcgcggtcgtctcgcggatgtgggaggcgcagccggacatggccaccgtcgggacgtgctgcctcgtcggagtcgtgcaccagaggacgctcttcgtcgccaacctcggggattccagggccgttcttgggaagaaggttggtcgcgctggtcagattaccgccgagcaactgtccagtgagcataacgccaatgaagaggatgtcaggcaggagctcatggctcagcacccagatgatcctcagattgttgctcttaaacatggggtttggagagtcaagggcatcatacaggtgtccagatcattaggcgatgcatatctaaagcatagtcagtataacacggaacagatcaaaccaaagttcaggctccctgaaccattcagcaggcctatattgagtgccaacccatctatcatcgcacgttgccttcaaccaagtgattgcttcatcatatttgcctccgatggtttgtgggaacacctgagtaatcagcaggctgttgagattgtgcacaaccatcaacgagctggaagtgcaagaaggctcataaaggcagctctccatgaagcagcacggaaacgtgagatgcgttattcagaccttatgaagattgacaagaagttttcccctcaaacgaatcggataaatgtgcatattcctgaagctggaactttgcctagagttgagggagctttattaaggattatcatagtaaaatataccgttggtatcacaacttgcgagggttccatggattctgccgccgcctccgccgatgggggcgcgttcctcgagttcgtcgactacgccatctccatgctctcctcctcctcctccgggggaaacggcgacgagtcccccggcgccgggccagcgcctgcgcggccgccgtgggggtgggcggtggcgcaagtgctcaagtcgtgctgcgcttattccagcggcgtcaccgccgccatcctgctctccgacctcttccagtcttggacagaacaaagcaagtctctgaccgcaaagaggaaagttgaattgaccaatcttctaaaaacaagaaatagaagaaggcggcttcctaataccatcacaatcgattctatccatgagaagaacttcctatctcctaagagtgtccttgaagctgttgtcattgatgtgtttgtcattcctggtacaaacatatacatgcttaccttgggagacatgtggagcacatcgactatcgatctatatctacaccgaaggtactacaactacattggacagcatgatgtcttgaagaagggtcgagaagttatgctcacgggatgttgcctacgtacagctatggagggatcaggccatgctcgtattttgccaacagaatatatggtgatgttacttgatgaggaggaagatgaagatgccatgttacttgccgcacagttttgcatgtattctttctcatctatgatgctagatgagaacagaaacaatatttcctattcgttttatgccaggatcgaaaagatcgagtctttagaaccatttggatctacagaaagaaagcagattgtacttgttgacaatgatgatgcaaaaataaaatttgttttatggggggagcaggttttgcttgcaaatcttttcagcgtagggagcatgcttgcactgcacagaccttttattgcaaattatgtgcacaataatcatgaggagtctcaggaactttgccttgaatatggcagtgctacacaggtttatttggtgcctattgctcagcaggaggaacaggtacttcttacacctactcaaataaggagtcaagggtctcgattgtcatgtgttccaagtgatcatatggcttcacaagtaacattaccacgtgatttgcatggttcagttgatttcagcaaatatccatttcgagtatacgtaagtgatcttcatgataaaatggttggagttagtctgtttggcatggtaacaagtgtttgcaaagcaagtacatcaggcacttacttttatttggagatagaagatgcaacaggagttgtcctgatgaagcttaacttcattggactctggtcgctaggcagggtaggtgttggtcatatggtgtacatgtctggtttgacttgtaccttgagttcaacaaacaagcttgaagtcgcgtggactgaaaaggaaccagggtctctatttgttaacataagcttgctgccagcgcttcttaattcaacatgcctgcataatttgtcactcttgtcagatcttccccattcaactaatagaacacatatatgccatgttcgacttgaccacatcgatgtcaacagtttgaaggtattattattccacaatctttgtgggtgtgttgtgagtgatcaatcaggcggacttcagtgttccttctatgacagtgaaaaggtttttgcctggtgcattgggcaaacagccgtagagttccttcaaatatctcctgatgaatatatggaactccctgagaatgagaattttacggtcgctattgcaaataccagccagcggattgaagcgtatattgaaggcgagaaatttcttccagtatgggagatcacaagagcccaaaaatgcgagtga

SEQ ID NO: 22470 - DNA, 461 bp, Oryza sativa
  Clone ID: PAT_MRT4530_27643C.1
tttttttttttttttttttttttttttttttttttttttttttttttttttttttttttttttttttttttttttttttttttttttttttttttttttttggaaaaaacaatatgtttgacagggggcaccaaccaaagggatgcgaagccataaacagttaaattaaaaaccttcccttggaaaagttaaaataaaaaaaaaatttttgggggaaaacaacggggggggaagaaaaaaaaaaatttttcgccccaacaaggggggaaaacccttaagaataagcccacataaagggaatgccagggaaggctccgggtgaaaaccccaaaaattttttggaaagttaaaaggacccggttttaaacggggggggaacaaatgggcagggaggaaaaaatacccccggggcccgaaaaaaaaaatccacccctttttaaatccagggggaaacccggaag

SEQ ID NO: 22471 - DNA, 283 bp, Oryza sativa
  unsure (1)..(283): unsure at all n locations
  Clone ID: PAT_MRT4530_27644C.1
ccgcttttttggataatgatctatctaaggatttgtttgtcccatttcgtctgccgttcaacgactcgccggaggagacggtagtccctcgtcggagatggagagccttgggtttgtttcanactcttttacatgataaagtttgnaatgttttatcaaatctaattttgaacgtgaaatatgctcgtgtcgtgttcgtgtaaggcagttataataacgtcataatagaaggatgtacatgcaaaatcatcatatgaaactgaaaaaaaaaaaaaaaaaaaaa

SEQ ID NO: 22472 - DNA, 376 bp, Oryza sativa
  Clone ID: PAT_MRT4530_27645C.1
cgggctgcaggaatcggcacgaggactagtctcgagtttttttttttttttttttgaattggcatatttgcagtggtatggatccaattaaccattttaaaaacacacaccattttaacattttaacgctaaaaaaatagaaagctatagtttagaacaagagaacacttcaagaacaacataagatacaatctaaatattatgaatagctaattaagcgtaaaagaatggttgcgatttaagtggtagatctaatcaaccgataaatcaatacaccaactattagaggttgtgttgaataattctccgtcataagatttaatgacggttctataaataatgtgctaagagcctgcagaagtctctatgatggatg

SEQ ID NO: 22473 - DNA, 264 bp, Oryza sativa
  unsure (1)..(264): unsure at all n locations
  Clone ID: PAT_MRT4530_27646C.1
agagtggagtgagctgcatcgtattcctgcagccctttgctaggaccatctgaaactctgaacgaccccaacccaacccaacactacccaaaccaaagccagtggatggatgtcgttttcagccaagctaacgatgatgcaaagtacttattcgatcagtataaccaacgcccaacancgcctagagaatcggatccatgtagggtactacccagccaggagacacttttctcgctgccatcagatgcatccaaagttgtagcc

SEQ ID NO: 22474 - DNA, 446 bp, Oryza sativa
  unsure (1)..(446): unsure at all n locations
  Clone ID: PAT_MRT4530_27647C.1
ggccgccgtggggcggggggggttttttttttttncagcggagggtttatgggatggttgcttccgtttcctcaaaacatacccaatggccaaattttacttgtccaaaatgggggttgctcacactggttcaccctacagatatttgtangacaaaaattggtgtagacggggcaaccatttttgtttacaacgctgcaaacattgtaaattgacttttccccctttctacaaaaagaaaaccctggggtttttttacggggctcctcgataaagttcgtttactcagcggtccgctgaataatatgatcggctggatggggggtccaacctagcctttgctcagcctacctggcgggtcctattccttatccactttggccggatgggccttctggggccttcgtttctttgtgcatccccgaccggaaaatgttctttaggct

SEQ ID NO: 22475 - DNA, 331 bp, Oryza sativa
  Clone ID: PAT_MRT4530_27648C.1
ggggagccgggccccgaattaagatttaaaaccccccccaaggggggggggagacccaacccccccgaattggcccaagaaccccgcctaatccaaccaaaccggggggggtcttatttcaccaacccgacccggacttataaaagggctaacacccccccccccttttttttatttgggggctcggcgactcaagacgactggtactgggaaagggggaaggggaacaacccagatttaggggggggggccccaatcggggaagaccaccgggttgggggggcccccgccgggggaacccacctttttggggggcttggcgacgtccatg

SEQ ID NO: 22476 - DNA, 1047 bp, Oryza sativa
  Clone ID: PAT_MRT4530_27649C.1
ggctgcaggagagaagtacaagatatttccatgaaacactttaatttgggcatcctatctcacagagggaatcggcccgcgggcattcggcacgtggatcagtttaattttcgtaggctttggtaaaattctcacgtcaggaaggaacagctataggtagcgcggcgtggccgtgtaagcctgtaaaatatctctatttattctgcaattttatcttgtgaacgtaagtaacacaggattgagcagtagctagtgacgattattaagccatgcacggcggcggcgcccgtgcgctcgcggcggcgttcgtgctggccctcctcgcggcggcgccggcggcgtccgaggtggtctgcagcggccggcgctacgcggcgaacagcagcttcgatgccagcctccagcaggtcgcccgcaccctccccggcaacgcctcctcctccccgctcctcttcgcgacgctcgccgtcgccggcgaggcgtacgcgctcgcgctctgccagggcggcacgagcgcgggctcctgcaactactgcgtcgcgcagaccatgcgcgacggggagcacgcctgcgccggcgacgccgacgtcgccatgtacgacgacatctgcaccgtccgcttctccgaccgggacttcctcgcggccaccaccaactcgccggagaagctcgtcgtggccggctcgcagtcgcagaagctggtcccctccgccgccggccgcttctaccgcctggtcggcgagctcctcgacgccaccgcggactacgcggtggccaactcgacggcgcggttcgccaccggcgacgtcggcgtcggcggctacttcgacggcgagccgttctccaagatctacgccttggctcagtgcacgccggacctgacaccggcgcagtgccgcgcgtgcctagcgtcggccatggaggagatgacccggcaggtcttcgccgccagttcgccgggagggaaggtcatcggcgagcgctgcggcctccggtttgaggtcttctccttctacaccgtcgcggacgcgtgggcggacgcgtggg

SEQ ID NO: 22477 - DNA, 3732 bp, Oryza sativa
  Clone ID: PAT_MRT4530_2764C.1
atgaccacagcctacggagccggagtctacaggagcgaagtcgccagcgtaccccaataccctctatatccggtctacgggtgtcccctgtcgacagtggcgcgccaggtacgggaacttggtgctcaaggttctactactatgacatcaagctttgtcgacaacggcgtcaacaccggccccattcaaggagtccctacttcaacaatgctggtgtggactcaagtcagcgaaattgttttcccggtttacaccacggtaccaatctcggctggtccatcaatgaccggaaacgagaacgccgtagctataacctcaaacgaccctgtgtcgaaggatcctcccgccatagcggagaacagaacatcgacgtcatacgagtccgagaaggttcctagtgcggccaaaccttgtccttccgacaagaaccatgagctgacaaggacaacttccgagcaattcgttgctaacttccaaggaacttacaagcgccacgcaatcgaagacgatttacacacattaacacagaatccgggcgaatctttgagggactatgttcggcgctttaatgaatgcagaaatacgatccccgatatcaccgacgcttctgtgattcgcgctttcaaaaccagtgtcagagatcgctatactacccaggagttggcaacaaggcgaatcacaacaactcgaaggtttttcgaggtcgtcgatcgatgcgctcatgcggacgacgcactgagacgcaagaacgacaagccaaaggcgggaggagagaagaagccagccaaagacgaacctgaaacaagcgagaagaaaagcggcaagagtgggaaaaggaaagctcaagcagaagtcctcgcgtctgaatacgagcgccctcccaaacacccagacctacaaggcaatgatacgaagagaatatggtgccccatacacaagttgggcagacattctctggaggattgcctcatctttaaaaagtcgctggaaaagcaactggctttggagaagggcaaacgagtacgtgtagtcgagaaggccgctgaggcaaccactcaggactcggactcggcgtacccagattttgatcttcatgtctcgcacatcttcggaggggttgcaccgaagatgaagtgttctaaacagaagatcgagttctcagatgaggaccaccccaaggtagctgttatcctaggacgatatccgatcgtggtcgaacccactattcggaatatcaaggtagtgcgagtcctcatcgatggcagcagttccatcaaccttctcttcgccagcaccttggacgcaaaggggattccacgaagcaagttgacaccaaccgatcaacctttccacggaatcactccccagtcttcgtccaaaccattgggcaagatcacgcttcctgtgactttcggccaaatgagcaacttccaaacagagcagataacatttgatgttgttgagtttgacacagcatacaatgccatcatcggaagaaccgcactcgcgaagttcatggccgcatctcactacgcgtatcaagtactcaagatgcccgggccgaagggaacaatcactattcaagggaacgcaaagctggcggtccactgcgacaagcggagcctcgacatggtcgagcatacgcccagcccacccgccacagccgagccacccaagaaaaaacttgcgctcatcaccttcctccgtgacaatgcagacatatttgcttggcaaccgtccgacatgccgggggtccccaaggaggtgattgagcacaaacttatggtgcgacccgacgccaagccagtaaaacaaaaactgcggagatttgcaccagatcggaaacatgccatacgagaagagctcgataagcttctcaaagttagtttcatcaaagaggtactccatccagagtggctagccaacccagtcatggtgcggaaggccaacgggaagtggaggatgtgcgtcggcttcaccgacctcaacaaggcgtgccccaaggatcacttccctctccctcgaatagaccaactagtggactcaacagctggttgggcacttagcgatcagctgggtaacaatgttgaggcctacgtcgatgacattgttgtcaagaccaagacagacgactcattgattgacgatctacgggaaaccttcgacaaccttagacgatatcgtctcatgctcaatcctgagaagtgcacgttcggagtaccatcgggcaaattgctcgggttcctcgtctctggcagaggaatagaagcaaaccccgagaagatcaaggcaatcgagaacatgaagtcgcccacaagactcaaggaggaagccgaagaggcgtttatcgcgctcaagcgctacctgtcaaatccccctgtacttgttgctccccaacctaatgaagacttattcctctatatcgccgccacgccttactctgtgagtactgtcattgttgtcaaaagagaaaacgtgcaaagaccagtctattacgtcagcgaagctctccacgacgcgaagacaagatacccacagatccaaaaactgctctacgtagtaatcatgacgtcaagaaagctacgccactacttcgaagcccatagggtcacagttgtctcctccttccctcttggtgaggtcatgagaaacaaagacgttgtcggccgcattgcgaaatgggtagtcgagctaagccaatttgatgtccacttcgtaccacgaacagccatcaagtcccatgttctcgctgacttcgtagccgattggactacgcctgaaaacaggttagacagtcagaccgacaacgaaacatggacaatggcgttcgatggcgcactcaacagccagggagcaggtgcggggttcatcttgacatcaccttcaggagatcagttcaagtatgcaattcaccttaacttcagggcaaccaacaacacagccgtgtgcgaaggactactcgctgggataagagctgcagctgcacttggagtcaaacgactgatcgtaaaaggggattctgaactagtcgcaaaccaggtgcacaaagattacaagtgctctagccctgagctgtccaagtatctcgcagaagtcaggaagctgaaaaacagatttgatgggatcgaggtccgacacgtatatcgcaaggacaacatcgagccggacaatctagcacggcgtgcatccagacgagagccactagaacccggcacctttctggacatcctgacaaagccatcagtaaaagaggcaaacggcgaagatagcctagtcgcccccgacatcagctcaggggctacagaggcagagcgtgccgttgccgacatcgagaccacggacgactggcggaccccactcattaaattcataagcagcgacgagttgcccaaggacgatgcagaagtcgagaaaataacccgtcaagcaaaaatctcctgtataatcggcaacgatccatacaagaaggcgccaaacaggagcaacggacaggtcgagagggcaaatggcatagtacaacaagggatcaagacccgtgtctacgacaggctgatatcacatgacaagaagtgggtcgaagaactcccctcagtactctgggccgtgcgcaccacaccgacaacgtccaacaaagagacacccttctttctcatgtacgactcagaagccatgctccctaccgagttacgacatcagagtacacgagtgcataagtactccgacgaggattag

SEQ ID NO: 22478 - DNA, 217 bp, Oryza sativa
  Clone ID: PAT_MRT4530_27650C.1
tttgtcgagcctgatccacacgcagagcatgctcggcatctggacgggccaggggggcattattgactgtacacacaggggcgccgtgcttagaacttgtatttttaattgcaatgtttatggacggttaattttcgaggttaactgcagattttttttaatttaatcgttgtttagctttttacattaatatttctgcttttatttttttaaatta

SEQ ID NO: 22479 - DNA, 232 bp, Oryza sativa
  Clone ID: PAT_MRT4530_27651C.1
atgttgtctgtaccccctcttggtgccgtgtgcccgtgtgacagtgtctccccacgcatcggctggagaattggatatgctgggtttagcaccactccgctcggggatggctgccattgcgcggtgccgccgccgggggagaaggacgccgacaaggcgcgggcggagacgacggagggagcgtcgtacaagtggcgtatggtgatcgcctacgacgggaccaagttcaaag

SEQ ID NO: 22480 - DNA, 2456 bp, Oryza sativa
  Clone ID: PAT_MRT4530_27652C.1
atgtcccgggttgcatccgcccgtgtgtggcccttcccttgttggcgtaaaagaaaaatctccccgtctcgtctcctccgctccttgcgccatctcgcggctgaacaggggagggggaggggcgccgatctccatccgacgagcagagcaggggaggggagggggatcctggagatcatggagagtagttcttcagatgttcaaatgtcacattgtgctgaggacttgaatagtgagagtacaatcgagatcaaaataaagacattggattctcaaacatacaatttgcgtgtcaataaacgcgtgccagtgcctctgctaaaggaaaaaattgccactgtaactggaatattgtctgagcaacaacgtctgatttgccgtgggagagttctaaaggatgatgaactcctctctgcgtatcacgtggaagatggccatacattgcatctcgtggttagacaaccaggacaatccgctacatcaggaaatgctggaaatgaaggtaccacatcaaatcccgctcgtcgtcgtggtcccactatgactcgcagtattgtacttgaggctattaatgtgggtcaggggagtgaactcagtgttgcacagttgctccaaagcctgcttcgagctcctaatagcacacaagtttcgagtggaccagcaccttctgatgcccctccttcagagggtacacattcttcaacgcaaaatggtgtcagggctgtacttgatcaaatgccggttccaccaaatggacaaactctgaataatgctgaccatggaactgcaggaagtgcccatggaggtggtactcaaaatcatgaaagccagcctgattcagcttcggcgcatgggcttcctactgcagcattgcttgctgaaactatgcactctactagacaacttcttgttgagcatgctggagcattgctatctctattattcttcaatgatagggaaagtattagtgaagttagatatatcaatttgagctatttgattgagggtaatatgcaactaccaaaccagctaggagatattgtgaatgtaactgatgctacaacacggaggaaccttcaaaacagtgtagtcagatatggagttctcatccaataccttggttcattacttctagaacttggccgcacgacaatgatgctgcgtataaatcctgcaactgtaggaacaggatctgttcaagtgggcccaatattttctagtcttacttcacatcgctctgttctgcacccaagagatattgacatccatgtccgcacgagtgggtctgtgtctttaactggtactaacccacctgagcgggttgaggaacatcaaacacaagatcgtacagatagaagtgcaaatgcttcacctgcaaacagtagtgaagcatttgcaggggttacagctggtgctccattttctgttgaatctggagttaggctggtgccgcatagaacagtggttgctgtgcctgctggcatcagtcatcctccttcaatgtcttctagtggagttggtattatctacccactgtttgccagaattcaacaaagagcatacactaacgctcaagttgcccatagtgctaatcagataccgaatccacagacatctcagtatcatgaagcaggtactctaggatctcctgttgatatcaatgcggaaaacggcactcagacttcccctggggagcagaatggccaggggcctttttctcagttgatggatagtatcccttggattgcatcactcttttctggggaaaattctcgagtaaatggcacaaatcagcatgcaccggcttctgctgagcaggtagatggtagaaatcatggagcaccagaagtgtcaggagtcagtgatgagggtctacggttcgctagcttagttcgccaaattatgccatttatttcccaagttgagtcacatcatcaaagtgcctcagcagtcagtagcagcaccccttcacagtactggcaggctgcacatgggaacttgaatactgcaagagctggtccaagtcattccaggagttcacatcaacataaccgtgatccagttgatggacctaattctaaaaggcaaagaacaagtgagtgataaagatcttcatgtcctccggggtcaccgttttgcaagataagccgagaattttgccgattctcactgcgaggatggactgtcatgaatgtcttgacagagttgagggcagtggattattattatttggcagtgtatagttggcatccggttcattagtcaaggcaccatctttttttttttgcccatttcctgcggatcggttgtaatgttattttactatcctatctgtagaaattcgattcaattggggttaaattatgcctgcaattaaccaaaagcttcgtttggtagtaattgctgtagcatgtggagaatttttgccacttaataataccctctatgatttgtac

SEQ ID NO: 22481 - DNA, 1619 bp, Oryza sativa
  Clone ID: PAT_MRT4530_27653C.1
ggcccttcttcccgcaaattgcaagcaaagtgcctctttggctcgcggttgcactcaagaagcgtggcaaatgtaccatacgcacacctgactggatgactgttgaccgcttgacgcaggtattagatgcagaaagagagtcacccaaagaatttcagccattgccgttccactatattgaaatatctaagcttctctttgatcatgctcgtgatgacatctcagatgcatacctggtaagatctttgattgaggacatccgagatgtcagattccataaggttgagactggtctggagacaatatctggccgtactcatgctgtaaagctaaaaagacgcgtgggcggacgcgtgggcgccgctgttcctcggctcgcctcgcagcctccgcctctcctcgtctttccggctcaatctgcggagagggtggaggcgcgcgcgggccactgccaccgtgaggcagccgcactcgggcaccgggacctcgggaaccctagccggctggccccggtttattgcctgccccttctggctgctagcggccgggctgcttgacgatttgtgggtttccctttcccatttgctcagacactaaatcatcaaatagaggaagcaatttagtgccacggtggtcaagatggctgggcagtctgaccctcatctttctatcttctcaccctcagaggtggagttcgtggcggaggatgagattgtcgagatcgtccctaacattcgcatggaggccctcaacatgatatgcggggattttgggcccttcttcccgcaaattgcaagcaaagtgcctctttggctcgcggttgcactcaagaagcgtggcaaatgtaccatacgcacacctgactggatgactgttgaccgctccagcttgacgcaggtattagatgcagaaagagagtcacccaaagaatttcagccattgccgttccactatattgaaatatctaagcttctctttgatcatgctctacatgacatctcagaatgcataccttggtaagatctttgattgaggacatccgagatgtcagatttcatcatgctgagaccgtgctgaattcaatatctggccgtactcatgctgtaaagctaaaaaatctctctgcaatggaagtgaatatcgtgcgtcctttcatggtgagaactttacaagcacttctataagcatgatagcccacagatgattcagcaggcagataacacaggtagcagaccaacaccagttacagaccgtggtccaagaagagatctaaggcgcaggtaacaagcaggatgtgtatctatcccttgaaaattttactgtgtgtagattgcagtaaatgaaggtacttgtgatctgtatctcactagctagaagccaactgcgtttccccaatttgttgtgtgtgtaccaaaattttataggactaataacatttgacatggttttgtttttgaagaagcgaagatagtaagatacatcaattatctgtcacaaaagggagattcctcatgtattctggatggatgtaacttatgtgatgtatttttactatttctggcataacctaaatttcatacattgagagaacaaaacaagcaaacaaaaagcaagaaagc

SEQ ID NO: 22482 - DNA, 123 bp, Oryza sativa
  Clone ID: PAT_MRT4530_27654C.1
atggcggcttcaggctgccaggccaatcgcgccagggcggcggtagctacaggctacggcgaggctgaggcctccagcaacatgcggcaaggcaactggaactctggaagcagacaaatttag

SEQ ID NO: 22483 - DNA, 3413 bp, Oryza sativa
  Clone ID: PAT_MRT4530_27655C.1
atgctccattttggcagaacaatccgacatgttcgccattggagatcacagacattcagacgtctgatcagccgatgaattcgacgttgtccagccaactaacaatgtcctgtatcgccggccggctcaacggcgtcgagtcgacgcagaggcatgcgaggtcgagcacgtacagcatctgtgcctcgtcgcccttgcccctcagccgctggtcgagcacctcgccgtgcctcccctgcgacctcatctggagcacccaccggacgagctcccgctgctgcccgtgcggcaaagcctcgacgggccgcctccctgtcagtagctccagcaacacgacgccgaagctgtacacgtcgccgcgcagcgtcgccgccaacgcctggccgtactccggcgggatgtaccccagcgtgccgaccagctccgtcgtgacgtgcgtccggtcggggaggatgaggcgcgccagcccgaagtcggcgacgcgggcctcgccggcctcgtcgaggaggatgttgctcgacttgatgtcgcggtgcacgatctgtggcttgcactggtcgtggatgtagagcacgccgcgcgcgatgcggagcctggcgcgccagtccagacgctgcggcgcgccgcggccggcaccggctcgccgctcgtgcagccagtcgtggaggctgccgttcgccatgtacgggtagttcagcagccgcagccgcccgcggatgcagaagcccaggagagggacgaggttctggtggcgcgtcgcggacagcgcctccacctccgcctggaactcccgctccaccaggcacatgtcgccgttgagcttcttcacggcgagccgggtgccgtcctgcagctcggcgaggaacaccaggccgtacccgcccgaaccgatgatgtttcccgcgctgaagttgttcgtcgccttaaggatgtccacgaacgtcactccgctcgccgcctcgccagcggcctccgacatgaacaagatcgtgtccttggagctgtctccgtacatctcagacatggagtcgaacagggtcgactccacgcatttcccgccatcacggacggctccattggacaccactcttctgaaggcgatgacaacgcatccgaggaagacgacgagagcaaccaggccaacgcagacaccaagaacgatggcgaccagggccttcttcccgacgaccttggacgaagtggtgtctgtcgcgtcgaatctgtcaccgcagggaacagagatcacctcgccacagagcttcgggttccccgtgaagtcccgtggcgggaacgcgtcgaactggccgcccgtcgggatcggcccctcgaggtcgttgtacgccacgttgaagacggcgaggaagttgagctccttgagcgcctgaggaatcgtccccgtgaggcggttccagcgcaagttcacaatctgcaacctggtgaggctgctcagctccggcgggatgccgccggagaggttgttgtaactgacgtcgagcacttgcagcgtctttagcttcacgatctccggcgggatcgcgccggtgatgccattgtcgctgaagttgagcgtcgtggcgacgccggacatctggaagtatccgcggccctgccggctcgcggctccgttgttcggcgtcagggtgaacatgagcgggagatggcctgggtataattccgccatggcctgctcggatgtaagcagccgcatctccatcagcgacggcggtatcaccccggacagctggttcccggaggtcgaagacggtgaggttggcgaggccggagaagtcaacgaccgtgagatccccgacgaagctgttcgaccggaggtcgaggcatcggaggctggtccagttgctcaacgccggtgggagagttccggtgaagtcgttatggccaagccggagctcctccagcttcgtgagctggctgatcgactccggcaattcgccggtgaacatattgtaggtaagatcaagcgtgatcagattggtcagcttggcgatgcgctccggatcaagccggccttctatctgattggacggtagctgcagacgctgcagcggcttcacgtcgaagatgtcgccggggagctcgccggtgaggttgttgcggcccacgctgagaacgcgcagccacgagcagttgctgaacccgggggagatggccccactaagcacgttcacggagaggtcgagaacggcgagcgccgggcagctcgcgcacaaggacgggatcgagccatggaagtagttcattgttagaaacattgaatttagaaaggaagtgcatatcagtcagtgcagacggtagttcacctgtgagctgattgcttgataaatctagcaattgcaggtttgtgagattgcatatctgctgtggtatttctccagataacctgttaaagctgatattgaagccgtcgagcattttcaaccgaccaatctctgggggaatcactcctgtgaaaccattgttacctagattcaacgcattaggaaaagcgttgagcaagcggtaaacgcagttgggatatcccctgtaagactgttgtttgttatatctaaatagaaaagaacaggcagatcactaatccaaaatggtatttttccagagagcatattgtttgataaatccaacacctccagttttttgagctttgatatccaagtgggaatttgtccaaccaatccacaggaatctatagtcagtacccgaagattctcaaaaccatcaattgtttcactttttgatatggtttcacccttgaagttggttccaataagaacggcggtaaggtttttgcagctcttgagtatctgaagtgcatttgtgatatttgtgagatggttatcggctattgaaaagaaggacatggacttcagattgcccattcttggtgagagctggccatgaaacttgttgaaagccagccgcaacgcaattagattgctgcatgagtatatgctttctggaactgtaccagtgaagttattaattgagaaatctgcgattctcaaattcaaccgggtaaaattgactttgctaagatctcccacaaatttgttgtttctgaggctgaggtacctcagatttgtgcagttacctacggccgatggcagctcaccagacatgttgttgttgtccagccggagctcctccaatgtgcttagttggccaatagaatctaggttgccattgagtaagttgtgagacaggttgaggtgcaacagcccagtaagattgccgagcaatggcgagatgtgcccttggaggcccttagcagccagcaagacatctgtgactgtgccatcactgctgcaggtgatgccttcccatttacagggacctgaaaccgaatcacatccttcagatcatgaacgaatttggatcagctataacgttggtttcag

SEQ ID NO: 22484 - DNA, 1255 bp, Oryza sativa
  Clone ID: PAT_MRT4530_27656C.1
aaaaaaaaaaaataagaagagagaagatgtgaggtgaagaaagaaaaaggatggaaattagaaaagtaagagagaaaaggtagagaacaaaaatgagaagagaaaaacataaaaaaaaagagaaataacgtatgtaaagaagaaaaatgtaaaatagcaattccccatcaagcatgcgagcagtcgagaagtacttagatggaactgttcactctgaacgatgaagaaggcgtagtgaggcaactgccgcaaagagccccgatgagcatgttgttgggaaggaaaggacgctgccgccggattcgccgcaagcgccggttcaagcgggggccacaaatgcagccttgcccctggtacaggctcaccaccacccacaacagggataactcaccgtgccaatcacctttatcatgccagaccgcgtcttcagcttcagcttctccaatcggaagatcgctgcaatgatgaaggtaacgacggggaccaaatttaggaaattgacggtgtatccagcattggtagcgcgtaggccgtagtagtgtagccccatagccaaaacaattccgaacaaagcgttgaaaaatatccagcccagtaccttgtagttaacctttttcatcatttgcctctcgaaccagaaggcgaagggtaacatggtgacggtgccaatgaggttgcggtatgcgagggggacgaaaggtgccatcccactattgaatgatagcttcgcgaggaggagggcacctatggtgaatagctggaccagtaccatgctcaatgggagcagtaaccgctccgccatccctggcttcgtcttcgtggtcatcgtctcattccattgtagccaccccttctgatcactctcgcatggtctgcaacaacgtcagcatcagttgggaataaaactaattgagcgatttgcaacaaggtcatcagcatcagtggggaaaaccaattgagcaatttttcaggattaagaactgtaatcactcgggccatatccacaccaaagatgatgaggagatgtccacagcgacaacttcagttgagcttaaatctacatgccaccaattcctcaaatactactacttctaagccaggggcctgaattcaactccctaaatggcaaagaaccaagtttcaaaaccggacgtctccagtaataaaaaaagaaaccaattaaatcagatttttctgggggtgggaggggagaggatttcttgttttgaggggtgtagtactgacccgaacgaag

SEQ ID NO: 22485 - DNA, 555 bp, Oryza sativa
  Clone ID: PAT_MRT4530_27657C.1
tttttttttttttttgattcctcaagactaatttcattatttgtactaaaaattacagaagttggatgcaggtaataaggcgcatcagaactagataacataacaacatcaacatatcaacaatgctaatatgcagtttattcatttcattgaccatagcaccaatcttactaatactgtacattttggttccaatcaactagaggggattttccacagataacaaaaccaaaactatggaaagatcaaatgcagattaagtagcattgtagcactacagagagggaaaattacaaccaggataagtatcacaactggtgcaatgcaaactcaactatggtacaagggcaaagccatcatggaaacagagtaaaaatcctacatgtattccctcaggacaagttgttttccatctcatgctagctgctggtctcctctgaatcagcaagcacaaactctgtgtacaggttcttcaatgccatcaccactgtcattataaggggacctaatattgcaccctccagagcattggggaacaatgccatgccaccaatt

SEQ ID NO: 22486 - DNA, 1419 bp, Oryza sativa
  Clone ID: PAT_MRT4530_27658C.1
atggcgtcggaaaccctccttccgccaccgacgacgacggtcgccgccctcaccgacgacaccctactcgacatcctccgccgcctcgcccccgccgacctcctccgcgccgccctcgtctgccaccgctggcgccgcgccgccgcacgctgcgtcatggccgcgcctcccccactcctcggctacttcttccaccccgccgacacgcccctcacggcgcacatcgtcgcgcccatcgccgccctccaccccgccgccttcgtccccctcgactcctcctccccctcctccccgcgcctctccctcgacgggaccaagggcttcaccatctacgacgtccacctcggcctcgtgctcctcctcccggcgtcgctcccctccggctctgcttcgacgccctggagggcgctcccgcaggacaccggagtcacggtcgcgttcgaccccttctggttcgagggccgctgcgtgcacgccgcgggggacatctactggcacatctgcaactccggccgcctgctcaagctcgaccctaccacgctctccttctcctacctgctggcgccgtccgagctgggggacaggaacaagaagtttcgaatcggggaggcgccggaggacgggaggctcggcatggcggccatggaggaccaggagatgcagttctgggtgcgcggggaggcaagcgggagcgacaacggctggttcctgcagaagaggatgaacatgcgcaaggtgttcgacaccgtgcccgggctgcccagggacaagttgagccggaccgtgtccatctggctcagcgacatcgacgcgggccgcacagggaagctattcttcgaaacagaggggtatgggcgctactccttccatatggacacaggcaagctggagcgcttggccactgaagatggaaaggagtatggccaccccatctatgcctacttcatggcctggcctcctgccttcctagctccagaaaaatctgaatttccgctgggacaaagctgcagtgctgcaacagtggggcacgtgccgtctgcaatggagctgcaatgcgtgaacctattattgttgatggaaattggaacagcagctgctctgctaccgataaaagcccggctgcccgggagcacaggagttctcttgactgtctccatgcttcacgacaggacagcagcaggtgagctccgtgatgcagcaaccaagctccttgcagaggctgcagcaatgcgattcgctgcttgccggtgctgctccgagtcgcctcgcgcgcccccacggccgccgcctccgcgccgcgcgcgcgccctggtcgccgccaccacgccgcacgcccttgccgccgcctccgcgccgtgccgccctcgccgcccttgccgctgcctccgccggccgtgggagactcactcagctggttaa

SEQ ID NO: 22487 - DNA, 451 bp, Oryza sativa
  Clone ID: PAT_MRT4530_27659C.1
ttttattcttcgtcgtagcactgatgaaaagaccatgttaccgcaagcacctctaggcaacgcaggcaagaaagttcggttgttccatggaattcctggattccctctctgacgcgccacaagatcttcagaacctcgtaataaccgcgaggtttctgactgtcccacggtggatccgagggctgaaccacctcgcctacttgcagatcacggtctgcaaactaaccccagatgatgtaaaacttcttgggagcttgcacaggttggagtgcctcgtgctgggcttggatttcctcccgaaagaagccaccctgatccaaggtcagggcttcataagtcaagaagaagaagaagaagaagaagaagaagaagatgaagaagaagaagagaacatggggatctggttccgtgagctcctgagattgtccgtcgattgcccggtgccatggct

SEQ ID NO: 22488 - DNA, 2436 bp, Oryza sativa
  Clone ID: PAT_MRT4530_2765C.1
atggccgccgagaagcacgacgcgcgcaagacaacgagaatcgttcccgacatcgtctctcttcacgacgtcgagagaacgaagagcgaggaggacacccgagcgagaaccgagaccatgataaccgccacaaccaccatgaacgcgatgatcgcgaacagcggatgccgggcgatactggtcccggacgccgccatgacgatgacgatgacggagatcggcgccggaacaacaatggtgtacgacgagaggattcccgagaacccgggcgtcatcctcggaatcgagttggcaacaaggtggatcacaactactcgaagattgttcgagatcgtcgatcgatgcattcacgcagacgacgcactgagacgcaagaacgacaagccgaaaacggggggagagaagaaaccagccaaggacacacctgaatcaagcaagaagaaaagtagcaagagtgggaaaaggaaagctcaagcggaagtcctcgcgtcagaatacgagcgccctcccaagcacccagacacacaaggcaacgtcacgaagagaatatggtgccctatacacaagtcagacagacattctctgaaggattgcctagtcttccaaaagtcgttggaaaagcaactggcattagagaagggcaagcgagtacgtgtagtcgagaaggccgctgaggcaaccactcaggactcggactcggcacacccagattccgatctgcatgtctcgcacatgttcggaggttccacggtgtactcctcaaagcgagaatacaagaaagtggagcgtgaagattgttcgacatggcagggggctgcacaaaagatgaagtggtccgaacagaagattgagttctcagatgaggaccatcctaaggctgctgtcatcccaggacgatatccgatcgtggtgcacaaagactacaagtgctctagcccagagttatccaagtacctcgcggaggtcaggaagctggaaaaaagatttgatggaatcgaggtccgacatgtataccgcaaggacaatatcgaaccagacgatctggcgcggcgtgcgtccagacgggagccactagaacctagcacctttctggacgtcctgacaaagccatcgtttcatagcaaacacacaaagctaccagcccaagcactgcaaaccatccctctcacttggccgttctcgtgctgggggctcgacatactcggaccattcccacgaggacagggtggctacaaattcctgttcgtggcgatcgacaagttcaccaaatggatcgaagcaacactcacaggggaaatcaaggccgacaacgccatcaaattcattaaagggatattttgcagatatggattgcctcaccgcatcataacggacaacggcacccagttcatcagtgccgacttccaggattactgcattggactgggagtcaagatctgcttcgcttcggtctctcaccctcagagcaatggacaggtcgagagggcaaacggcatagtactacaaggaatcaagacccgtgtctacgacagactcatgtcacatgacaagaagtgggtcgaagaactcccttctgtactttgggacgtgcgcatcacatcgacaacgtccaataaggagacacatttcttcctcgtgtacggctcagaggccatgctccccaccgagctacgatatcagagtacacgagtacagaagtactccgacgaggatcaggaggaacagcgaaatgacgatgtgaacctactcgaggaacatcaagaacgagttgtcgtcagagcagctagctaccaacaggcccttcgtcgataccacaagaagcgcatccgagcacgtacgctttcgatcgacgactacatcctccgacagatatataaagactaccaggaaggccaatgccaatccatcgactggaagactttctccgccagcggcgccatcgacttcgctaggttgtctatctctgcgggagtcctccgagaacgagaaaacccttcgcggatgaactcgaggtgcagttgcggacgacgatctcactatggccatggttttgcaacaactcctgaggtacgagttgaaccacacctcgcgacctcggagtgcttccacggcccgatgcttcttgacttccagcatagtcctctcgagttcggcgacctcaaacttcgtcctccagtactagatgcgacgatcacgatcggcaagcgcactctcaagattctggtccacgtcgtcctgcggcacatatggctcgagcgcaagtgccggaacgattacaggcaactcaggctgcccgcgctgctggacatcctcgacatctacatctgtacaaacaacaacaaagtacccggaatcaaaatgctaaagaaaactaaggtgatgactgcacacacaaaggcagttggaaccgacaaaagttttacaaagcataattga

SEQ ID NO: 22489 - DNA, 165 bp, Oryza sativa
  Clone ID: PAT_MRT4530_27660C.1
atggcgccatccggagctcctccacggctctccctctgtggcggtaacaacgaacagttgacaacgatagtgacggtgacggtgacggtgatggtgacggtgggaggcacgggagggtgggagccgatggcgatgacagtaggaggcgatgccgacaaggattag

SEQ ID NO: 22490 - DNA, 187 bp, Oryza sativa
  Clone ID: PAT_MRT4530_27661C.1
ggtgacttaaacgttggtagaacctgcacaaataggaggcggcatcttaatacaatgaaaaatggggggaactccacaacagatttgtcaacacaatcaggttttttcgtttatgccaacgcactaaggtgcagccggaaaggagcatccgatgcagtgggggatcgtggtgacgatcctggtggtc

SEQ ID NO: 22491 - DNA, 1044 bp, Oryza sativa
  Clone ID: PAT_MRT4530_27662C.1
atggcgccggcggccggggacgacgcggtggtgccgcgaaagggagctggaggtggggggacgacgacgccgccgccgccgccaccggcgcagcagcagcagcagcagccgctcccgccgccgccgccgcaggagcaggggttgcggtgcccgcggtgcgactcgccgaacaccaagttctgctactacaacaactacagcctcagccagccgcgccacttctgcaagacgtgccggaggtactggaccaagggcggcgcgctccgcaacgtcccagtcggcggcggctgccgcaagaacaagcgatcccgctccgcggcggcggcatcgcgcctctcgctcaacctgccgacggtggagggtatcggcggtgcagcggccgaccccgctgcggcggctgctgccaggctggggtttcttggcggtggaacaacgatgatgatgtcgtcgtcgacgtcgccgctcggtggcgccgccgccgcggtggccgacttccagcagggcggcgccgtcgggatgctgccgctgccgcggctccaatcccccgccggcggcggcgtcgggcatcatcagtacgtgccgttcggggagtggccctcgggggacattgccggcggcaacgcggtgaacggcgccgccggccacggcgcgcagcagaggctcgccaccatgttcctcggcccgccgggctccgcctccgccgccgccgccgccgcccaggccaacgacggtggcggcaacggcgcccaagccacagcgtcagggcatgctgccggaggaggcggtggcgccttcatgcacatggctggtagtgttcccagcatggaggcggccatgccgtcggcgacgtcgtggttcatggacagctgctcctacgggctcccttccccaccgccgcctgccactgccgccgtggccgccaccaccagcagtaacctcaacagcggcggccggagtagcggcggcgatgataacgccacctccaactgcggcagcgcgatcccggcgtggggcgacatctcgacgttcgcgatgctgccctag

SEQ ID NO: 22492 - DNA, 141 bp, Oryza sativa
  Clone ID: PAT_MRT4530_27663C.1
atgtcggcctaccagactaccaccctcctccatcccccgcggcttcaaagctatcgccggaccctaaaccctaacatcattgccttcgtcggggtcaccaaggctagagaagaaggtaccaccagagttggaggagaatag

SEQ ID NO: 22493 - DNA, 1116 bp, Oryza sativa
  Clone ID: PAT_MRT4530_27664C.1
atggcgccggcggccggggacgacgcggtggtgccgcgaaagggagctggaggtggggggacgacgacgccgccgccgccgccaccggcgcagcagcagcagcagcagccgctcccgccgccgccgccgcaggagcaggggttgcggtgcccgcggtgcgactcgccgaacaccaagttctgctactacaacaactacagcctcagccagccgcgccacttctgcaagacgtgccggaggtactggaccaagggcggcgcgctccgcaacgtcccagtcggcggcggctgccgcaagaacaagcgatcccgctccgcggcggcggcatcgcgcctctcgctcaacctgccgacggtggagggtatcggcggtgcagcggccgaccccgctgcggcggctgctgccaggctggggtttcttggcggtggaacaacgatgatgatgtcgtcgtcgacgtcgccgctcggtggcgccgccgccgcggtggccgacttccagcagggcggcgccgtcgggatgctgccgctgccgcggctccaatcccccgccggcggcggcgtcgggcatcatcagtacgtgccgttcggggagtggccctcgggggacattgccggcggcaacgcggtgaacggcggcggcggccacggcgcggtgagcagcaccatcgcgtcgtccatcgagtcgctcagcttcatcaaccaggacctgcactggaagctgcagcagcagaggctcgccaccatgttcctcggcccgccgggctccgcctccgccgccgccgccgccgcccaggccaacgacggtggcggcaacggcgcccaagccacagcgtcagggcatgctgccggaggaggcggtggcgccttcatgcacatggctggtagtgttcccagcatggaggcggccatgccgtcggcgacgtcgtggttcatggacagctgctcctacgggctcccttccccaccgccgcctgccactgccgccgtggccgccaccaccagcagtaacctcaacagcggcggccggagtagcggcggcgatgataacgccacctccaactgcggcagcgcgatcccggcgtggggcgacatctcgacgttcgcgatgctgccctag

SEQ ID NO: 22494 - DNA, 885 bp, Oryza sativa
  Clone ID: PAT_MRT4530_27665C.1
atggcttgctcacctccccatcaccggatccgccgctgcccctcgacctcctcctcgcactccgccgccgctcctccctatcgccgaatccgccgccgccctatcgtcggatctgccgccgcccctcaacctcctcctcgcatgccgccgccgctcctccccatcgccgaatccgccgccgcagtcctccccatcgctggatccgtcgccgccgccctccccaccactggatccatcgtcgccgagtcccccgccatcgctgtcgctgtcgcccgagctgtttgccgttgctctcgagggcgagcgcgcgagtgggacgagttcgtccaccacattttcccggatcggttggacccggatctgagaggaatattcctctctagggaccaacccatcttactcacccctcaaccaaacacccttaaaagtggcgtgtaggtttcacatgcgtacacatacaccgaatccctatcacctatcatcaccatcaccccgatgctatcctacagccgcccggtcgtttacctcctcacctctcttgtgcacgctaacatacaagtagcttgttttaatattacccgcgacgaccagaacacggcgacggcaagggccatcgaccgaccggccgcgtccgccgtacgtactacgttcgtgcggccggcctgccgtctccggcaggaattctccgccgcgcgtggcgggtgcgcacaggatctgcgttcacggcacgcgcgcatgttcggccatgcatgtgtgcacggtgcaggccctcaggccacacgtacgcggtacgcgttaacagctcgatcgatcgccgtcgcgtgtgcgggccggacatctgattgcgaggttggcgatagatgggccgtgtcccgtgggcgtatg

SEQ ID NO: 22495 - DNA, 263 bp, Oryza sativa
  Clone ID: PAT_MRT4530_27666C.1
aagccaaacccaatccgccgtcttggtttttctgggcctttggaatcctctgtttcgtggctcccttcgccaaattgtgtttatgtcttggatcacctggggcccatccaagaaaccatttttgttgtggttatctattccatagggaaagttcatctagaatattaagtccggaaatacgtgcatgtcctattctaggtaatatcctatcgacatgatatccttagataaaaggacaagagtgtaagactaaaaaaaaaaaa

SEQ ID NO: 22496 - DNA, 216 bp, Oryza sativa
  Clone ID: PAT_MRT4530_27667C.1
atggactgcagcgtcgtggaggtccgtgcgtggacgcatcgtgattgcctcgagtgcctcgtcttcctccgtgacgaggaggcggacaccgagaggatggcaggcggacctcttaacgcggtctacctcaacaacctcctctgtggcgactacaacggcgccgtggccattgtccccgctgccaccgtcgcatacgctgagcactgcctccactag

SEQ ID NO: 22497 - DNA, 396 bp, Oryza sativa
  Clone ID: PAT_MRT4530_27668C.1
atgatctccttcctcatccacctcgcggccgccggcgacgacggaaatacggaggcggagaaggcggagaaggaggtggcgtacctgagaatgcacaacaaccgtggggagaccgcgttgcaccatgcggtccgtgcagctgctgctgctgccgacaacgaggacgataagcagctggccctggactgcatcgaccagctgatggccgccgatccacagctggccgccatccaacacccgaatgagaaggctgcttccccattgtacctggccatctcactgggtgaaattggcattgcaaagcatctgttcgacaaaactgaaggcgagctgtcctactccggaccagatggacggaacgtctggcatgcagctgtttcttttcctcaagagtga

SEQ ID NO: 22498 - DNA, 359 bp, Oryza sativa
  Clone ID: PAT_MRT4530_27669C.1
ctgttccaaaaagatcattttatattattaaatgatccgtatttattattctaacacacgcccctagacccgggggaagtaacgtgggccaaaaatggtgcacacaaaagaatatccataaccgagaccaaaagcgcaacaacttttcattatgaaagtacccttaataaataggggttatctttgtcccccaaggaagatgggattaatataaagaagaaagaaaccaactttccattattggaccggaggctaaaagaggcaaccaagggggggcccacgcgcgcgggaaaagccaggaattgcgcgtcgcccactaccgcattagcccccccgaaagctgggtgaccagcttcata

SEQ ID NO: 22499 - DNA, 4884 bp, Oryza sativa
  Clone ID: PAT_MRT4530_2766C.1
atggccgagcaagcaaaggcgcacgacctctctccgagtgtgagcggcgacgacggggagccaaacccacgccgtcgagctcgtactcccccacctcctccacaccaaagtcctaagcagggggaggcgctcgagagggtcgaaaaatccgcagcatcaccggtcgcgggtgatgcaagagaacggcaagatggggagcgtcgcctcctcgtctacggcgacggcagcacgcctcagggcgcgcttcaggctgttggcgcgctcctacgtcacccgcccgtcgtccctgacccggagtctccagcccagcgatggctggacgacgtggccaacttggtcatgacggcacagcagcgcctgggtgctggtggacggtccgccaccaccaagaccttcggcgccgccactaccggctccgtgtcgtcaagacggagggcgcggcgagcggcggctgttgcacgccattcggctgccactccctcgtcggcacctccgactcgggaggatcagcatggagagccggatgcccgcctcgacatcgagcgtaggcgtaatagccggcgtactccccgcgcagcggagggcgcctcttcgtccagagtgtcacctcgacagggacgtgaggaccagccctccgtgcccccggttggtggtgtcggctgtagagcctttgtagcgagtcttcggaatgtccgttggcccccaaggttccggcccaccatcaccgagaagtatgatgggagcgtcaaccccaccgagtttctccaggtctatacgaccgggattgaggccgctgggggtgacgacagggtcatggcgaatttctttcccatggccctgaagggacaggcgcggggttggctaatgaacctgccacccgcgtcggtccactcctgggaggatttgtgccaacagttcactatgaactttcaaggcacttatccacgcccaggtgaagaagcggacttgcacgcagtacagcgaggggatgatgagtcacttcgctcgtacattcagcggttctgccaagtccgtaataccataccatgcatccctgcacacgcggtgatctacgcgttcagggggggtgtgcggcacaaccgcatgctcgaaaagatcgcctccaaagagccccagactaccgcggactctttcagctcgcggaccgagtggctcgtaaggaggaagcgtggacttggaacccctccggttccggtgtggcagcttcggccgcccccgggtccgccgctcagacagggcggcgtgacaggaggagaaagaagagtcaaaaatttggctgagcggacgaggaagtgggaggaggacaggaggcaggaacgccgtgagggcaagtccccggcggttccttccggtaatcggcgaagagaggccaagcagaaggcccccgccgaggacatcgatggtgacgatgatgacctaggattccaggagcctggggccaccattgccaccgtcgatgggggagcatgtgctcatgtttctcgccggagcttcaaggctatgaagcgagagcttctggccgcggtccctattcatgaggcaacgcgtcgggcgcggtggtcggaggttgccctcacctttgaccagaccgaccacccaccgtgtgttgcccggggaggacagattgcgatggtggtttcccccaccatctgcaacgtgaagttggggcgtgtcctcatagatggaggagcggccctcaacatcctttcccccgcggcctttgatgctatcaaggccccggggatggtgctccggccgtcccaaccgattatcggtgtgacgccggggcacacatggccgttaggtcacatcgacctaccggtcacctttggtggatcagccaacttccgcacggagcgggtgaacttcgatgtggcggacctcagtctgccctacaacgcggtcctggggagacccgcgttggtgaagttcatggcggcggtccactacgcctacctccagatgaagatgccgggccccggtggccccatctctgtccatggcgacctcaaagtcgcgcttgcttgcatggagcagcgcgcggaccacctcgctgctgcatccaagcccgagggtggtgacgagaggcttggcccctccgcccccaccgccccgaggcagcggattgacacatgcgacgatgtcccggaagacgcgctcgtctccttcctgcgggcaaacgctgacgtcttcgcatggagaccggcggatatgcccggggtccccagggaggtgattgagcaccgtctcgccgtgcggccgggcgcaaggccggtccggcagaaagtgcggcggcaggccccggaacgtcaagccttcatccgcgaagaggtggcgagacttctggaggccggattcatccgtgaagtcatccatccggagtggctggcgaacccggtggtcgttcccaaggcgaacggcaagcttcggatgtgcatcgactacaccgaccttaacaaggcatgtcctaaggacccttaccccctgcctcgcatagatcagattgtcgactccaccgcggggtgcgaccttttgtgttttctagatgcatattctggttaccatcagattcgcatggctagggaggatgaggaaaaaactgcgttcattacccccgtaggaacctattgttatacatcaatgcccttcgggttaaagaatgtaggtcctacttttcaaccccgaggcatcgaggccaaccccgagaagatacgagctatagagcggatgcgcccccccagcaaacttagggatgtgcagtgcgtcaccggttgcatggccgccctaagtcgtttcatatcgaggctgggagagaaggcgctacccttatttaagctccttaagcgctccgggccgtttacttggacggaggaagctgaacgcgccctcactcagttgaaagcatatctcagctctcctccggttctagtcgccccggagccaaatgagcccttactactctacttagcggcgaccccccaagtagttagtgcagcgttggttgtggagcgcgatgaagacaatcctcatttcgcgcacccccgccctgtgctgacttggcccgggagcgagcagggaggagaggcccccgagtcgaacggtggcctaaggctcctgacgaccggagtcggccctctgcccgcttgtcagaaggtgctgggtgcccccgaccctcaggaaggccccgaggccactgtgggaaggccgcgcctatcgccctttgaccccgaggctaaccctgtgctgactcgacccgggagaaagcagggagaagaggcccccgagccgaacggaggcctgaggcccctgacgaccggagtaggccctttgcccgcttgtctgacgacgccaggagcccccgacccccaggacggccccgaggccactgtgggaaggccgctcctgtcatcctccgaccccgaggtcatcggcacagaagacgagtgcgccccgagaggccacttggacgaagaacgccccagggatgcggcccctagcgaagaggatcggccccgccgaaaggtgcagcggcctgtctactttgttagtgaggccctccgggacgccaagacccgataccctcaggcccagaagatgctttacgctattctgatggcctcgaggaaactgcgccattatttccaggcgcatcgggtcactgtggttacgtcttaccccctcggtcaaatcttgcataatcgagagggtacaggacgagtggtaaaatgggcaatcgagctttctgagttcgatctgcgctttgaaccacgccacgctatcaagagccaggccctcgccgattttgtggcagagtggaccccggctccagagaccgtctcgatccccgaggccagcacggacccctctcagctgcctcacaccgcccactgggtgatgcagttcgacggttctctgtctctccagggcgccggtgcgggggtcatgttgacctctccgaacggagacgtcctcagatacttggtccgtctcgactttcgagcgaccaataatatggcagagtatgagggactccttgccggactcagagtggcggccggactggggatccgccgcctcctggtgttaggcgactctcagctggttgttaaccaagtctgtaaggagtaccggtgctctgacccgcagatggacgcctacgtgcgccaacgggccccgggcgggtttgagtatctgtatgtcgcgatcgacaagttcactaagtggcccgaggcttatccggtcgtcaagatcgataaacactctgctcttaaattcattaagggcatctcggcccgttttggagtgcctaaccgtattattacggataatggcacccaattcactagtgaactcttcggcgactactgcgaagacatgggcatcaagctctgcttcgcctcacctgcccaccccagaagcaatggccaagtggagcgcgccaatgcagaaatcctcaaaggccttaaaaccaagaccttcaatattctcaagaagcacggcgattcatggatcgaggagttgccagcggtgctctgggcgaaccgaaccacaccaagccgagcaaccggggaaacgtctttcttcctcgtctacggcgcagaagcggttctcccatccgagctcaccctgaggtctcctcgggccaccatgtactgcgaagctgatcaagaccagcttcgcagagatgacctcgactacttggaagagcgaagaaggcgcgcggccctccgagccgcgcgctaccagcagagcctgcggcgctaccatcagcgccacgtccgggcccgatcactctgcgtcgacgacctcgtcttacgccgcgtccaaacgcgtgctggattgagcaaactctcaccaacgtga

SEQ ID NO: 22500 - DNA, 436 bp, Oryza sativa
  Clone ID: PAT_MRT4530_27670C.1
ataggaccaaagctgttttttgattcaaaaggggtccaaatataaaacttaacagtaaaactgacaacttggactataaatccataagcataaaaaacgattagttccttggttcacctatcatcaaacacaatattaaccaagggttatgcagctcacagaatactagcaggagagctgaaaaaaggctccctttcaattaaaaaaacaaaaaatgaaaaaaaaatcttggggcagaggggcaaactggcaataaatgcccccaattaaaaggatccaagggaatgacccccattttctgaaagaaaaacactggaacatttcatttgcttccccacttggccttttggtatttttttcagggggcccccaatttctctcttttttgggcccttttcttggggaaaaaaactggcaccttcctccaccactgggg

SEQ ID NO: 22501 - DNA, 176 bp, Oryza sativa
  Clone ID: PAT_MRT4530_27671C.1
atggcttgcaaggtgttcctgcgtttgcgtgctcacaagaagacagagagcttgtctatggtgatggagattcccgggctctacactgagggcagctctacgcgcggtgacgccggcttcacttgcaaagatggcagaagggcagcatcaactagttacagcgacagtacaagacg

SEQ ID NO: 22502 - DNA, 157 bp, Oryza sativa
  unsure (1)..(157): unsure at all n locations
  Clone ID: PAT_MRT4530_27672C.1
aaacaccttcaacaaccttgtatcttactgaggtgttaattacatagtggagcaccacacatactctaaacaatttgacttaaacgctcccaatttccaataatctatagcacagataataaattaaaaattaatataaatctncatcccaaacata

SEQ ID NO: 22503 - DNA, 698 bp, Oryza sativa
  Clone ID: PAT_MRT4530_27673C.1
cagcaattcactactacaccagcgtcccccccaaaaaaaacccaaccagaggtcgtagcagagcgcgcgcgatggcacacgggcgcgtgcagcggatgcaatgctgggtggtggtggcgtgcgtggtggcctcggtctccaccaccgcgtccgcgttcgtgttcaaggcgggcgggacgggcgagtggcgcgtcccggatcagcaggccagcggcaacgtcagcgcctacaaccagtgggccgagcacacccggtttcgcgtgggtgacgccatagcgttctcttaccaacccggcaacgactcggtgctgctcgtcgacaagagctcgtacgacgcctgcaacacgaacacgccgatcgacacgttcgccgacggcaacacggtgttcaccttcacccggtccggcccgtactacttcatcagcggcaacaaggacaactgcaaccgcaacgagaagctcatcgtcgtggtcatgggggagcgcgccgccaatggcacggcgccggcgccggcgctggccccgtcggccggcaccaccagcccgaactcgccaccgtcgccgccgcctcctccgtcgggcatcgagatctcgcccacgccggagcagtcgatcaacgccgcggcgcgccccagggcggcgggcattgccggcgcggccgggctggccattgggacgctgttctatgcactcgtttga

SEQ ID NO: 22504 - DNA, 615 bp, Oryza sativa
  Clone ID: PAT_MRT4530_27674C.1
actccccccccccccccccttttcccctttccttttttttttttttttttttttttttttttttttttttttttggccctcagaaaaggcaaatatggttttactcattttaaattcattttaagctcacaacattttacagttagcgaaaaaagcgagtcaaaaaggccgaaaaacaggggctgacataaaaagctcctttcaaggggaagaaaaacccacttttttacagggttttttttgatcaaacggaaaacacaatttccccgattgcccccccccaaaggccataaaaagggcattgtttttttacataaaaaattgcaggaaccttggttgggtagttaaacaaatccacattaagcaagtttgtcaggtcgaaaagccctacattatcaactttgtccttgatgggggggctcattgttttttcctgaactgcctggtttgacaaaacccttgatgtccccgcactgttcgcaggcttcacaaaaatgccaaacaattttacatcccccccggaggggacggtactcactgaaggatacttcctttgagggctggctccctcattgggaggggccagcacatattctttatagggaggggcaaact

SEQ ID NO: 22505 - DNA, 206 bp, Oryza sativa
  Clone ID: PAT_MRT4530_27675C.1
cagcatcagcacacagtcaccagcacggcacagcaatcccagtgccctccttcccgtccaccgtcagctacaccggagaaagaagaaagcattggatacccagggtccaaaacttgcccattccgttggttgaaagttggaatgggcccaccacccgggcttcccaggggttcagggtggacccaaggttccaagaagttggaaag

SEQ ID NO: 22506 - DNA, 137 bp, Oryza sativa
  Clone ID: PAT_MRT4530_27676C.1
ggaagaataagggggcttaattacttgagcaatagagttgttacatagactgattcggtgagcaatgatcaccaggaaatttcttctggtgaacaattgatccttgataatttatccacaacacaatcacataactg

SEQ ID NO: 22507 - DNA, 219 bp, Oryza sativa
  Clone ID: PAT_MRT4530_27677C.1
atggcgaatatgcaagtgagggatggagttgttgttgctcttgcagttgaggaaccagttgcagtgcgggatggagacgtggccaccggcagctgcggcaacgccagcgagcgtgtccgcggcggagcgagcggctgggtggatctgtggacgaaaaatgagagggagagggaggaggccgccggagattttgatttctctgctgttttttccggctga

SEQ ID NO: 22508 - DNA, 261 bp, Oryza sativa
  Clone ID: PAT_MRT4530_27678C.1
atgaacttaggggttcaatcatacaatgttaagttgagaattgctgtgaagttacatatcgttgtaactcaaggctatagatacagtaatggaaaattcaaagaggaccagaatttgcttcgttccaacttccaaatgcgccgcctggtggtggtgtgcctgacaactgttgcctccccctgggtccttgccacgttcaagctgaagaggaggatcggattgattgggataggagttgcagatccaacaaaatcctactga

SEQ ID NO: 22509 - DNA, 759 bp, Oryza sativa
  Clone ID: PAT_MRT4530_27679C.1
agagaaattgaaatttgcatttccgttttgatgaatgtcatatagaagatctttcatgaaaatcacataattttccagtccatttacagatgtgttgtgcatattaaaaacatatccagtggaagaactgagataacctgcctaatcattctaaaacacattggccattttggtcatcacaaaccaggattaaaattttgtggtgaatgtaccatgttgtatggaaataaataaaagtacaaaatgacgcttctttggcacttgtttgatgttgcatctgggtcttctaccatacgtaccaacactagcatgtgttgtccataggtttgtcattgtagcccagagaataagtcaaacagatagaatgctttcaaaggtcagctttactaacaaggttaaccacattgttaccgattattgctaaaattgcaggtgatatttcctggggggaagctaagtctccctgactcgtccatttcttcatatacatctatagcagtcttgcaagtacttccacatcatttatcagtataaacaagaagtgaaacattaatttccttgtccccctgaatccaatactgcaagagtcatacctgcaacctcctatccatccacaaccttctatccattcacgaaaatattactaaagccgctggcttctatcagttataggataaacccaaaaggatgaccttaggttacccgatcccaaaaccattacagattaaacctccaaaatggataagttaacgccatact

SEQ ID NO: 22510 - DNA, 294 bp, Oryza sativa
  Clone ID: PAT_MRT4530_2767C.1
atgatggctagctatgcagatgttggggctccaatccacgttgggtgggtgcgtctccgcgacggcggcgccaagcttggttcgttcgaccacctcgagctggatttcctttcaggaggcggcgggttgtccgccggctcgtcgtcggggcttggccgatgggagattgcgggggaagaaaggggaattgggccacctaaaactcagcttttccaagggggctccggaggaggaggaggcgggcggtggcaggttgtccgccgcaccggctcgtcgtcgagccgaggccaatga

SEQ ID NO: 22511 - DNA, 281 bp, Oryza sativa
  Clone ID: PAT_MRT4530_27680C.1
tctaggcacacataggctagctccccatactgtgagaccccttggcttctggaggaggaggaggaggctatcgccatggcccctaccaccagcacgggcaccttggccgcggcgaaggcgctgattacgtgcacagcagcaaggtcttggagagcttcttcgtgagccaacccgggggcgttggtatcctcggtggaggaggtggcgtcaagcgacccagcggggccctccagatcctgccgtactccagattcacagactaccctgaggggtaattggac

SEQ ID NO: 22512 - DNA, 1220 bp, Oryza sativa
  Clone ID: PAT_MRT4530_27681C.1
cgacccgagtttctaaaaaaaaaaaaagaaactgcgagaccgcaaaggaagaacaaaacccatcaaaaccctcgttcgccgccgccgccgccgctcgccggcgaagaacccctgaaccctccggtaagccctggtagttagaaaccgagtacctaatctcatggcgctcttcctgcgccgaggcgcggcccttgctgcccgctccatccgcgcagccgccgcatcctccgcttccacctccgtccaccgcctaccgtccgtcggatccctcgccggcgcgagggagttggcccccacgaagctgttcctcctggaggcccggagaggcttcgcgaaggggaagaaatcgaaggatgatggtcgaggcgatacagttcaggatgctcctgacattggaccgactgtcaaatctgctgcaactcagcagatggaggcagccgttgttgcattgtcacgggagcttagtaaattgcgaacgggaagagcttctcctggtatgcttgatcacatcatggtggagactacaggtgttaaggttgcgttgaatcgcttggccgttgtttctgtccttgatgcacataccctatcagtgatgccttatgatccgagttcaatgaagtctattgagcatgcgatcatctcatctccattgggcatcaatccaacacctgatggcaacaggatcatagcaaacatcccaccgttgacaaaggagaatatacaggcactgtgtaaggttgtcactaaatctgccgaggatttcaaacaaagtattagacgagcgcgccaaaaggcacttgatacgataaagaaatctgcgtctggtatgccgaaggatgatgtaaaacgacttgagaaggaggttgaagaattgaccaagaagttcataaagtcagcagatgatatgtgcaaggctaaggagaaggaaatctctggaaactgaggacgttaatctggcagaagttttttcttttacttacacaactttgatgccaacgagttcacgggttgcaattctgcagcagccgggaagatatatcttttttgtttgtgcccgttctaactatgatgttagaaattcgaaacagtgtgataccaagggcggcctgcccagcttgtgacaaaacattgattcggttgcaaggcactcatgaattcacgaatcgagaatgagtttaccctaatgtgtgcaactgcgcattgatgagtttgtttacctt

SEQ ID NO: 22513 - DNA, 376 bp, Oryza sativa
  unsure (1)..(376): unsure at all n locations
  Clone ID: PAT_MRT4530_27682C.1
ttggttttttgaaccccgngggtttttatttttttttttttttttttttttttttcagggcagaaatttttctgaaacaaaaggggtccatcatcctcctttatcatctccctccttaattaaatcatcccagaataatcttttttttcctccgggaggcagtattttagggggggacaaaaaggcggggccgtaaataaataaatccaaagggggaatttacgaagcaggcaagctttaggggttattaatctccttaaattaaggcctcctcctccttaatcaacggcgaggggggaagtgctgcggtttggcggcggccccctccccggggggcttggcttccttaacggttttaaaggggcccacaagcgcc

SEQ ID NO: 22514 - DNA, 437 bp, Oryza sativa
  Clone ID: PAT_MRT4530_27683C.1
cacccggaaccgccaaaaaaaaaaaaattatatattttctcgatcgaccaatttttgggttttacatacaaacgaaacaatcaaaaactaaatagtagtaccacatcggggaaagggggctagttaaaccctaaccgggtttcgccgccggccgccgggcgcgcacgctgacaaagggaaagttgtaaataaccggcccgaaaagggagctcatggcctcgctccgggggctgaaaaacgagctgaaaaacacaacccgggtgccccccgcgggggcccgaaacggaaacacggggcgcttggggggccccccggggccaaccaacttgggcgccaccctgggggactccctcccggggaacgcctccaccaccagggacccctcaaaaacgttgttggggtccccgacggtaaaaaaaagcgcgtactgcctccgg

SEQ ID NO: 22515 - DNA, 544 bp, Oryza sativa
  unsure (1)..(544): unsure at all n locations
  Clone ID: PAT_MRT4530_27684C.1
nnnnnnnnnnnnnnnnnnnnnnnnnnnnnnnnnnnnnnnnnnnnnnnnnnnnnnnnnnnnnnntctttacataaaataaattatataatcttaactgattaagtatacgtatgataaccatctctacatccacagggagcaaaccaccaacaagtgccgttccacagaagtaaataaacccgtatatatctggagtactagcgtatagtgcccccccaatcccaaggccaccgaggtgaccgcgcgcgccacgacacacgtacacccctcactgtactccactaagcccacgaggccacgacccacactgtgcgcgcgcgcggtcaaacgacacgtaccatcaatttgtacagttgtactacaaccgcgaccttattgtccgtggcattcttcacaccccggccggcgacgcgtcgacggggacggtgtgcctgggctgtccgccattcgccgacgacctcccgccctggcgcacgctgttctccgcgaaccgcacgctggccgcgttgaaacccttctagcgctcgtgatccgaccactcccg

SEQ ID NO: 22516 - DNA, 288 bp, Oryza sativa
  Clone ID: PAT_MRT4530_27685C.1
atgtggcgtccgtggaggacggcatcggtgaggacctgcattgaagaggagaaactggaggaggtggatgatagcgacattcggctgccggcggggcaggagatgaaggaggagcatgggtgggccgtccgcggaggaccgtggttatgggcgtcgttccacgcagagtctgcaacgttgacggtgcagcgtctgcgaagctcggaggtgggccaggcatggcaagatagcgtcaggaggagctctcgccggcgtgggaaggaggagctcaccggtggcgacaaatga

SEQ ID NO: 22517 - DNA, 164 bp, Oryza sativa
  Clone ID: PAT_MRT4530_27687C.1
aaattagcgaatcattaaaatttaaagagcggatcaactgctaccaatattaatccacattcatattctacaaatcaaaatataaacactatatattttaattaccagacaatatactaggaaaactaactacatgagaccaactagggtgcaaatctaactac

SEQ ID NO: 22518 - DNA, 474 bp, Oryza sativa
  Clone ID: PAT_MRT4530_27688C.1
atggaggccaagatcgggaggctcgtcggcgccataggcgccttcttctccggcggcgacaacgtcccgtggtgcggccgcgacatcatcgctggtgtcgagagagaggtcgcggaggccgcaaccgaagaacacaagaacgtgagcatcatgaggctatcctgggccctcgtccactcgaggaacacggacgatgtcaaccgtgggatcgccatgctccaagcatctttgggtggctccaagagtccactggaggcaagggagaagctctacttgctggctgttgggcattacaggaatggtgactatcccaggagccggcagcttcttgaacactgtttggagattcaacctggctgggggcaggccctgtctttgaagaagacagttgaagataaaattgctaaaggtatagccacaacagctgttggactgctggttgggatagctgctgctgttgctcggaagaactga

SEQ ID NO: 22519 - DNA, 360 bp, Oryza sativa
  Clone ID: PAT_MRT4530_27689C.1
atgcctgccttcaacaccgcacccttcctacctcaccccatcgccatgcagccgcaccacgccgccttgttaccgctgcctactcgggagccggcctcctatgccggggaggtcagatacggacgagaggtggccagatctggccaggggactccatatccggaggcactgcctccccatcgtcgccctgatcaacaccgcctcaacctcgtcatcccagtcgactccgcctcgccgtcgacgttgccactctcctcaccaccggtagccaaccctcaacctagcaccaccgcggccgtcgcagcccgagaccagattgaggttgtgggctccgacaccgcgacctcggggagaaagtag

SEQ ID NO: 22520 - DNA, 756 bp, Oryza sativa
  Clone ID: PAT_MRT4530_2768C.1
ggcgtaaattcgcaacaaatactaccgattttagttcgtctttcaaatttccgattgggtttctaacctctcaagtctcaactcgatataagcagcggtcgccgtgatccgcaccgatcgtgccctaggctttccttccgatccgcaagctcgcaaacgcaacgccgcgtgcaaatggcgtcgaggacgatgacactggaggtgacggtggtgtccgccgaggaggtcgtgctgccgccgacgaggcgcccgctcggccgcggcgcgtacgcggtggtgcgcacggcggcgtcggcgtcgtcgccggcggcggcggtgtgcacgcgcgtcgacgaggaatcgggcggcgactgcaacgggtacccctactggaaggagacgctgcgggtggcgttgccggagggggcgcgctggctggacgtcgagatctgccggaggaggccgaacggccaggtggaggcggtggcggcggcgagcgtccccgtcggcgacttcaccgtcggcccgccgggccacctgcattgcctcagctacaggctgttcgacgcctccgggtgcaggacgcgccgcaacggcatcgtcaacatcaccgtcaggaggacggacgtcaagtacaccgcgccgccgccgccggtgaaagctccggcgtacgccggcgcgagcgggagcggcggctcttgctacggcgtgccgccggcgggcgcagccatgggcttccccgtcggattcacggccaatggcaaggcctgcgcgtag

SEQ ID NO: 22521 - DNA, 1518 bp, Oryza sativa
  Clone ID: PAT_MRT4530_27690C.1
aatttacataataataatttatgcgggagcgtccccgttagggagggaaacaagaccggcccctcgtcgtcggaggttgcaggatcatcatgctgcgacgaggacgaagcggacttgagctgcctcatgcccacggccgcacggcgcgcttccgccgccgccgccgtcaccgccagaagcagcagcagcagcagcgccgggccggctacttcggcaacctcgtcctctgggcgttcccgcggtgcgccgccggcgagctggcgtcccgccccgtgcagcacgccgccaagctgatccgccgcgccgtggcgcgcgccgacgacgcctacttccgctcgttcgtcgacttcgcgtcgtccggcgccgtcgaggccgaggggctcgccgccaccgccgacgagtcgcaggcccacctcctcgtcgacgagatcctcacgcgcctccccatcgccgccgccgtccgcctccgcgccgtctcccgcgactggaacgccgccctcaccaccgaccacttcatcctcgcccaccgcgccagggccgccgccgcgcgccacccggagctgctcttcttcgcgccgccggaccaccgcaacaccaccaccttctacgcctgctcgctccgcggctgcgagccgccggccgccgcacgcgagctcctaaccatcgactacttcagcgccaagcacgccgtcatgtcgcccacgccgtgcaggggcctcacccccggcgggtggcgcccctgcgccgggagagtgccggcgtccgcggccagcatcctcccagccatgccgccggtgttcgtcaacggctacctctactggctgctccagccagccgcccccggcgacgagcagatccggcgaatcctatcgttctccatcggcgccgagcagttcgggtcggtctctcccgaccacctcctcgtcgacgagatcctcacgcgcctccccatcgccgccgccgtccgactccgcgccgtctcccgcgactggaacgccgccctcacctccgactacttcatcctcgcccaccgcgccagggccgccgccgcgcgccgccacccggagcttctcttcttcgcgccgccggaaccccgcagaaccagcagcaccaccaccttctacgcctgctcgctccgcggcggcgaggcgccggccgccgcccgcgagctcctcaccatcgactgcttcagcgccaagcacgccgtcacgtcgcccaggccgtgcaggggcctcaccctcgtctccgacggccgcgagccgcggtatcacctcctcaacctgtccaccggcgatcacgtcacgcccaacttcctccccggcttgccaccggtgttcgtcaacggctacctctactggctgctccagccagccgcccccggcgactggcagatccggcggatcctgtcgttctccgtcggcgccgagcagttcggcaacgttcttgaagagcaaggatccaaatgatggttcagagaagggctgcaggaattagactgagcttcaggtttaccattct

SEQ ID NO: 22522 - DNA, 1479 bp, Oryza sativa
  Clone ID: PAT_MRT4530_27691C.1
atggactgcatcacggatttcggcaggaacattggccgaaagggggcgcctcgtggtataccattcgatttgcacggtctcggccgaagctccctactcacccttgcccgtgaggggcttgttggaggcttgccatggagggccttcggccgaacctgcggaaaccaaaaagttcaagcaacaggctcatggcgaaggtggggggcaaaggacaagagcgaagccgtacgggcgaaagccgtgactgggggtaacaccaccttcgccaagtggagttctcggcagaaggcggcacgggcgaagatgatgcgacgaaagcctcggcacacgggcacgggtttcgccatagcaccaaaccccgttgacaggaggcttgcctcctcccgcttctccccgtggcagcaccacctctccccgtcgcagccgcctctccttccccggcgtggcctccgtttcgcacggagaccatcggagtcgcgtcctcgttggcaaccagtggtgttgtcaccactccaccgcctccagccgccccggtcgccgcgccagtgtgccggccgacatcgcagcagcaaggtcgccctcggcctcgcctcccctccactcgaaccccgccggtgttcgtcgtcgtcgtctccgtccgacgtcgccatcccctccttcggtcggccattcctcctcgccggctcgttgtctcgctgcgccaccaccgtcgtcggcatcgcagcggcgtgttccacgccgtccttgcatccatgcagctgctgccgccccgtcgtcgtcttcgtcctcggctccgcatcgtcaagcgttgcgccggccgcgtctcgccttcgtccaaggatcactgccgaagtcgttccctcgccattcgcctccgtcgtccccgagccgtctccgccgcgcccgttcgtcgtcgtcgtgccgcgcctcgtcgcgtggtgtgtcggtagtcgttcatgtgtgcgtgtggtgaccgtgttagtgtacccgctcggtagccacgtggcttgtagctttgcttgtgtgcttcgtgtagcttctgtcgttccggaggttcccgaagcgtggtttgcggtcatcgccgaagggaagtcggcgtcatactccaacctctcgggacggtttcgacggaagaatttggatggctaccttagctcccccggtgtcgattctcgaccgacggagatcctcgagtacgacgactttggctaccactacaactacaacaacctcgacgacttcgacgaaggctacagagacaactacacgcctctcttcttcggcgttttcatggctgataacgagacggcagaacagcgtcaagcccgagaagcagaagaacagcacgtggtgtctagattacgagatatcattatttggggttatatattgcggatgagaggtgggccactgatggtgacagctcagtacgggttcctgggcaccctcctcagcccattgggctccgcccctgattag

SEQ ID NO: 22523 - DNA, 304 bp, Oryza sativa
  Clone ID: PAT_MRT4530_27692C.1
tttctctctaccccgatctcctttcgccgtcggcgtcggccgggtcgccgccgccctccgccgcgcagtccgcagatagtaggtgggggggttagccttagcacgagaggcctttgcctgagactgaaaggaaggaagaactattacttgacactgtgatgcgggactgggtactggtacggttgtgcgcgtgaacggtgcttatgggcacattgcgttacttcttggcagggttgttgtgctccgcggctacacggtcctcgccacaatccaagatagctatggccgagcgagaacactacac

SEQ ID NO: 22524 - DNA, 663 bp, Oryza sativa
  unsure (1)..(663): unsure at all n locations
  Clone ID: PAT_MRT4530_27693C.1
ttttttttttttttggctacagaaatggtggtaaacaagctccaagccatcacctctcttatagcatttgcaaatccaattacaagtaaagcacacttggttttataacttctcatttgatttacaatgaaataaacctgacatcactatttacaaggtacattggactacttattatactctaaacctgttgagaaaatattacttgttaaagaaatttaatgtacaagctacacaacatcctctgcattaatccagatcagaaaaaaaataaaaaagaagaagaagaaagctgaaaacatgaccgccaagttggcaatgttaaaaaggcacacatgatctatgcagcttgctcagatgcatttccctcgtcatcatgaaataaatgtggtgaattgccagcatgtggtgtagacgcgggtttgccgtcctggagcaagatcactgtgttcaaaagcaccaactaaagcctttaccttgcttttccgggactcgacaagtttacttgcagtttcttctataacattattaaacagcccctgngcatctttcttctcttggggatcttggnggccgcagtttcacaccaggagattccacatctaggttagaaggtccagcatctattgggctattcatcttatatatttcttctagctgaca

SEQ ID NO: 22525 - DNA, 493 bp, Oryza sativa
  Clone ID: PAT_MRT4530_27694C.1
tggatcccgggctgcaggaattcggcacgagggcctgacaatcttggcatattacccttatatttggatcatgcagttaattttctatgagacgagcctcagggtctttacggctcagtatagacagataattgtgccaatattaaggtaatgatatgatttaatggtgcaggtcttttagcctcctatctggaggaagctccattattctacgaatcatattgtaaccaatacattgggtccacgggtgggtctataagtcaaggcagtaatcacaggttatgttgtacatctagcgaacaaatgtttatttggttcgattgaagatttcagtatttgtgaactttactagaccgcaattactacatttttaaaatcagtgcaggccctatgtatgttagctaacatttttcttgtgctatagtcatttctatatctgctactattgtttaatatttaatggaacattgatttcataggttagcgttgtttg

SEQ ID NO: 22526 - DNA, 258 bp, Oryza sativa
  Clone ID: PAT_MRT4530_27695C.1
atggcggacgagggcacagtggcggcggcggaagagggtgatggcaacagcaagggactaggcagcggcggctacggaggatgtaggacggagactcggagtgtgaagaagacgacggccatggtggacgagggcgcggcggcggcgacaaaggatgagggtggagtttgtcggcagccatgcggacgagggcagcagaggtggcgacagacgaggacagcgacccagtggagtgctacggcggccatggcggagtag

SEQ ID NO: 22527 - DNA, 1383 bp, Oryza sativa
  Clone ID: PAT_MRT4530_27696C.1
atgggtgacgttgttacggccccgcaacgccacaacatcggcacgagagagacgctgtttgcggtctgttggcacgagacagatgcggtctcgcagcaccgcccgagcagcgggaaaacggggttgctgacgtcatcaagggggaggggcagcgccggcaagcgggccccaccggtcagcggcacaagggcgccggtccaccgtggaccgagaccaccgaggcggtccaccgtcggtccacgggaaccgacggcccggatcgacccaaagccgatcgggcggccatggggtggcgcggctgggcacgggcacggcttaggccggcccgaccgagcaatggcgcgcggcaatgtgaccaccggcggcgacggcgcggggagcggcggtgcacgcgagggaggcgcggcaaaggggaccgatcggcccgggcgagcagggcagcggcagccggccggtcgagcacacggcgcggcggcgacgcaccggcctgaggaccatcagcggcgagcggcggcgacgcggggcggcgacgcatgcacggaagcggcagcgcacggcgctaggagggagaggaggaggaaaccggggtgctcaccacggggcgacgccggagagaggcggccgacggagggaggcgagatggcggcggcgcgagaaaagtggtgcgcgaggcggcgatgttccggaggcggagaggggagatggagtaggggcaggggtagagctcggcacagcgatgccgacgacacaaacggcacggcgcggcgacccatagggctgcagggaggggaggcgggatcgagcccgagagaggtggaaaccatccagcgacatgggggcggcatcgaggggcggagtggaggtggctcggtgccgtttttctcgggggaagtgggggaagagggggaggacgagggcggcgaccgcgcccacgtatgcgcgggagaggggggtcgcgcgggaggggcggcgacgtgggcgtatcgggcggccatggcagttgccggcccaagctggaggaaggggaaggagctgacatgtggggccgggtcccacatgtcggccggagagagaagagctggggggggttttgtggactttcaagggagaggaggcaaatgggccaacggcccctttcaccatcatgtcgtcctcgctgctcacctccctctaggctccagctccatcacgccaaccgtgacgcaaccaacaccctgccatctcgtggctgtgcacctgactcgccggccagatccaaatctgcggcgaaccccggccaccgaccctacatcgatagaagctgctccggcaacctcctcctcggcactgctcaacgtcaccgatttccttcgtgtgccgccgatgtcggatcgtcaccattgc

SEQ ID NO: 22528 - DNA, 420 bp, Oryza sativa
  Clone ID: PAT_MRT4530_27697C.1
atggaggagcagctgaagaggcctatgacgatgaagaagatctcggtgcaaaagaagtcgccgtcggggaagttcctgcacatcctccacgcctcgccgacggggaagctctcggtgaccaactcgccggaggcgccggcggtgatgatgaccacaccgacgaagcatgccgccgccgccgcgcagtcgaagcagctgctggggagcccccgggtggcctcgccgtcgtgcctctgctcgccgacgacgcacgccggctcgttccggtgcaggctccaccgcggcggcggcggcgccgccgccgccgccgccgggctcgccggatccatcggctgcggctgcggcgagatggacaagaagcccgggaagggagaagagaatgatgatcttagaagctctgcacctccatttttcttgtaa

SEQ ID NO: 22529 - DNA, 881 bp, Oryza sativa
  Clone ID: PAT_MRT4530_27698C.1
ctttcctatacaagatcggatagagtacttctaatcttctatttaggttgaaaaataattacaaggatccgtaggtaacttatagagtttgttttcaatccaggtgtcaagagggcataccaaagatcgtcgctccggcggcaatggaggagcagctgaagaggcctatgacgatgaagaagatctcggtgcaaaagaagtcgccgtcggggaagttcctgcacatcctccacgcctcgccgacggggaagctctcggtgaccaactcgccggaggcgccggcggtgatgatgaccacaccgacgaagcatgccgccgccgccgcgcagtcgaagcagctgctggggagcccccgggtggcctcgccgtcgtgcctctgctcgccgacgacgcacgccggctcgttccggtgcaggctccaccgcggcggcggcggcgccgccgccgccgccgccgggctcgccggatccatcggctgcggctgcggcgagatggacaagaagcccggtgtatgacaaagtcccgtgcaggtgcaatgcacgtcaaaaattgcgccatgtttgctgttcttcttcagaaatggccgggccttttttctctccctcccttgcttttgtgatgcagggaagggagaagagaatgatgatcttagaagctctgcacctccatttttcttgtaaatgctactcctactattgagaccttgatcattcaagatttcagtcagtttggcggtgttgttttccctatcacatttctctggattgtgtgttctcccttccactgctcctcaaacaacctcttgatcgaaaaaaaagatctatggcaatatataatgacaggtatcaaacggctggtttcattctaaaaaaaaaaaaaaa

SEQ ID NO: 22530 - DNA, 2134 bp, Oryza sativa
  Clone ID: PAT_MRT4530_27699C.1
atggtcgactgcaaaggactcgggggctactgtggagatcatgggtatcccatatctacacggcgatggtttcatcgccccggcgaaaagaggaggaagaagaagaagaagaaaaacaagaagaagcccaagcagcactacacgccgccgccgccgccgccgaactacgaggtgtttccgaccatggagcccgacgatccggactggatgcggcagagcgtgatgtacgcggaggcggcgctggagcactacaacgccgccctcgtcgtcgagggcggcggcggcggcgtcgtcaacgagctcgtcagggccatcatcagcggcgtcatcatcacctgcagagccgactacggccacgtcaacttcatagccagggccgccgccagtggcggcggcaccttgcggcaggaggagcggctcttcttcgccgaggtgcgtaacgacggtgaaggttggataccgacgtgcctccggtccctggacgacgaggccgaccgagttggcggcctcgccgctggcgacgacccgccggtcggccgcttggatctgctctactcaccagatcgtactttcacctgtggcttctacaatatctcccccaatgcctccaccttctccatctggttctcaaactcctccgagaaaactgttgtctggagcgcaaatcctctccaccctgtgtacacatgggaatcaaaatttgagttgaaatccgatggcggcatgctgttgaaagattataatggccaggttgtgtggaccaacaacgtgagctcttcaaatgcggagcaagttcaagctaagctcttgaatactggaaacctcatcgtgaagagcaaaggtgacaccattctatgggaaagctttgcttttcctactgataccttgctacccactcaaaacattactgctcgaattaagctcatatctactaatagattacttgcccctggtcgctttagtttccactttgatgatcaatatctactttcgctgttttatgatgagaaggatctctcgttgatctactggccagatccaactcagaatatctgggagaagcacagaaagccgtttaatagcactgcaaacggtgctgttgatagccagggacattttcttggaagtgatgatgcaaacttcacagctgctgatttgggtcctaggattatgaggagattaacactagattatgatggcaatctcatggtaacaaaccatttccgtagatacacctacagagagctggtgacagccaccagaaggtttcaggatgcgattggacgaggagcatcaggcgttgtatacaagggggtcttgaaggacaagagggcagtagccgtgaaaaagttgctagacataaaccagggggaagaagaattcaagcatgaactgagtgtgattggcaggatctaccacatgaatctagtgagggtttggggattctgttctgatgatccacacaggatattggtttcagaatacgtggagaacggttcattggataaaatattgtttgacagtcaggaatcacaagccttactagaatgggagcaaagatttaagattgctctaggtgtggctaagggattggcatatcttcatcacgagtgcttggagtgggtcatccactgtgacataaaacctgaaaatatactgcttgatgagaatttggagccaaagatagctgactttggccttgcaaagttgctacatagaggaggatccaatttaaacgtgtcacggatccaaggaactagaggctatttagcgcctgaatgggtttctagtcttccgataacagcaaaggttgatgtctacagctttggagtggtgcttctagaactactaaaaggagctcgtgtttcggaccttgaaacaaacaaagatgaggaggtggaaatggttctcggaagaatcattagaatgctagcagagaatctaacgtctgatggggatgaacagtcatggattgctgacttcattgacgccagattaaacactcgattcaacaacttgcaagcaagagtgatgatggagcttgcagtttcatgtctggaagaagacagagcccagaagacccaccatggaaagtgtggtggagatgcttgtttctgttgatgaagccggttga

SEQ ID NO: 22531 - DNA, 405 bp, Oryza sativa
  Clone ID: PAT_MRT4530_2769C.1
tccacacgtacgattggaccatgcggaagctgtccatgttcggctgcaccgatgccacccaggtgctcaaggagctcgtggaggccaataaagcctaccccgatgcctttggccggatgatcgtctaccacatcgtgctgcaggtgcagttgattagcttgatggactacaagcccgcaggttgcgaggagtgtgggggtaactaagctaaaatcaatcttggacctggcggatcgctgcctataataatagtatgcacatatcgtgtgggctatgctgatcatatatcaatatataatatagctatatattggtattttacagtacggtgagaaccatatgaatggcctttcttcttaacacatatttgagaaattgttaccttcctcttcggccggttttatt

SEQ ID NO: 22532 - DNA, 475 bp, Oryza sativa
  Clone ID: PAT_MRT4530_276C.1
tcgttgacgcgtgggatttttcattacatgaatgattgattggagcacaccatgatagtacaactctagttcgttgttacagtgcttgacatgaaaggcatcgttctagaatagcctttagagctaaatctagacttgtctctggtatggatcatacatggactgcacaaatgtaagaaccttgaggatgacagcatcatacagatcgggattgatacagctgtattgcgctgagtccttgtgctccgataataaatgaaactcagcttagttggctaactgacgtacatggtacatgaagaaaataagatccacacaatcaattgtagatgttcaagattctcagacaatgtacagcagttcctgagtgaatgaagctacttatgacgactaaacctaaaacttatctgcttgattctgcagatcctaatcactaggaacagatttcgcagagcaaggaagacgtacatggtcc

SEQ ID NO: 22533 - DNA, 585 bp, Oryza sativa
  Clone ID: PAT_MRT4530_27700C.1
agggcagggccatttttttcccggggagcaagttcttcatgtcgttggcgttccccccggcgaaaattgcatggcctaacggcgcaagtgcggggagggaacgcgcttgtttgtttacagaatcgacgtcgaagctgtaaggctaaagggaggccaaacgcccaagtccctgaagcagcagttcgccgtatgacactcgctgcctggccgttgcagtcggacacacaactgaatgccacggcatggcagggccctgcaatgttcgttcctccggtctcaatttttggttcgagtagatgtgtacaacacgaccgttcactgtacctcaagtgaaaaatagtgtaaagaagatgtaaatacgaaacatttgtgcttcggcctcctgcagtcagtgcaaaaataggatgagccgttcggcagatgcactgcattgtcatttttggtgggtttcccatttgtgagctgtgagacggagggggtggtttcgtcgtgtgaatttccacaggtgcgcatcggtgacgatgcacatgattggatcaattcgaatcatctggctatcaggtcgaaaaaaaaaaaaaaaaaaaa

SEQ ID NO: 22534 - DNA, 648 bp, Oryza sativa
  Clone ID: PAT_MRT4530_27701C.1
attgcagtgcaaaaaaggcctggacggactatttattttcccttagatatacctgacctgcctgatacaaaccaaagtacccgtataaaattattctgcgccacggtatcagtccaaatcaagaaccagtcgctggtaggtatagttgcgtcgttggtgctacacccagagggcacccgcattgcgaagcagcgggacaaggttgccgctgaggtgcagcgacatgaccttgtcggtggagccgacgagcctcccgccgatgaacaccgccggcacggcggggctgcggccgaggagcctcgccagcgccttctccatctccttccccctcgggtcctcgtccagctccaccaccgtcgggttcaccccgagctcgcagaagaggcgcgtcacggtgtggcacatgcagcacgagctcatgctgaagatcaccaccgcccgctgcgccgccagcctgttcaccctgtccattttcttcttgccttcttctcccaagagctaattaattaagctaaactgagagatttttcctctggaaaaatgcagctggtcgcctgctactgctagctaggtatttagcttgagtactagctagctagcttcttgtatgaggctttgattgtggcgtgctttgctttgccctcgtgc

SEQ ID NO: 22535 - DNA, 336 bp, Oryza sativa
  Clone ID: PAT_MRT4530_27702C.1
ctttttgactgccaataagggtttcatcgaggtttcaaccgattaggtatctagacgttgtatcggcttacaagtattgcatccgattggtttctattgtattacattgttgtttttttgcattatcatcagctgattgtctttatatttttatttacatcaagagttagaatctacatcagaattatagccgatagctcaaaaccctatcgctatcggttggatcaaactgactggcacgcccgcatctcaccaacctttggacttgcactggagctaagcagatctcccatgctagtgtgtgtttttcgcatcaacactcctcaacaagtcttt

SEQ ID NO: 22536 - DNA, 1416 bp, Oryza sativa
  Clone ID: PAT_MRT4530_27703C.1
atggcgggttcgaggttcgggtcgttcaagtcggagaagggggacccggccgccacggcggcgcagaggagggacccgtacgaggtgctcggcgtggggcgcaacgccaccgaccaggagatcaagagcgccttccgccgcatggcgctcaagtaccacccggacaagaatggcgatgatcctgttgcatcagacatgttccaggaagtcacattctcctacaacatcctgtcagatcccgataagaggcggcagtacgacacatcaggatttgaggccatcgaagccgatagccaggaattggagctggacctatcgagtctcaataccgtgaacaccgtgtttgctgctcttttcagcaaacttggtgtgccgataaagacaaccgtatcagcaacagttttagaggaggcattgaatggatcggttatggtttctcagctccagcttggaaactctgttcacaggaaggtggaaaagcaatcagctcatttttattctgttgacataacagaaaaggaagctaaaatggggttagtttgtcgtgtgaaatcaactgatagaagcaaatttaagttgctttactttgagcttgaagaaaatggtggcctgagccttgctttgcaggaagacagtgtaaagactgggaaggttacttctgctgggatgtattttcttggctttcctgtgtatcgttttgaacaaaacaacctgtgtcaattacttaagacagtacgaatccccttaaactctacgcttcactcaggtgacaatttcttcagaagtgtgaactatactatagaggttgtatgtggtgaatctttccctgctgaaaaggagaagctccagagtgttgaggcaaagatactcacaaaacgagcagagctatccaaatttgagaccgagtacagagaaccactggtactcacaaaacgagcagagttatccaaatttgagactgagtacagagaagttttggcaaagttcactgagatgaccagcagatacacacaagaaatgcaagcaatcgataatctgctgaaggaaaggaatgaaatccatgcgtcttataccaacaattcaccactgaagaggagttccagcaggagtaaagctaaatcaccttcaaaattttccaaaggtgaggaggacaacaatcagagaaaggaaaagaaagtgaaagaccaacccacgggtggatgcagaagtgcagatgaagattcaaatgaaaagaaaaccaaagagcggttcccaaggaagaaatggttaaacattcctttcaaaattgacaggagaaagccatgctgagtgacgtaattccctgcatcatactgttcaaccaaaatacagagcattttggccctgacctttcataacagaacccctcccttggtttattctagaaagattgggtgt

SEQ ID NO: 22537 - DNA, 328 bp, Oryza sativa
  unsure (1)..(328): unsure at all n locations
  Clone ID: PAT_MRT4530_27704C.1
cgattgcaaattgtcggtgctgtttatgcgggtatatataaccacgatggctactgctaaaattgagagggcgatctatcatggccctaaatatgagtgtggcactatggtaaaatataacgccaattgatcggccgacttgcattgatgatctaaccaggtcgtcaaccatgcgttctgaattccgcaacagaaacatgatggacgagtgctgtcatatgctggtgcttgttgctggatggtgggttccttgtgaatgtgaatgtttgtaatttgtaacaaaaccacntagctaccgaaaggtaaataaaaccacaaaaactgggct

SEQ ID NO: 22538 - DNA, 332 bp, Oryza sativa
  Clone ID: PAT_MRT4530_27705C.1
ggaggaaaagaagttgatttattgtcatgatgggattaattaataagcaggggtggtagtaggtaatatcactttggccggatccatactgggggattactagatcgggttccccaaaaacccaatacgaatttcccatgtagacgtccgtccccaagtttgtttacaatactagggtaattaaaacacgtttttgcccccgtccaaacataagggtacgtccatatgtacgtcccccgcctttggtattccatgggcccttattagcagttagcccgggccaaccggagtaattaattaattattaaactgcttgatgatctgattaacta

SEQ ID NO: 22539 - DNA, 678 bp, Oryza sativa
  Clone ID: PAT_MRT4530_27706C.1
atggcagcaagatcgtcgctgccatccttctgcctccaccagatcaggtcagacagccgccgcggcgcgccgccgtcgatacgcgcctcctccaccggcgctgccaatgatggtggccgcaacgacgacgtcgacggcaaggaggaggaggagaagagcgaggtggggaggaaggtgatggtggtggccgacggcggcagcgacgaggcgcggacggcgctgcagtgggcgctctcgcactccgtccgcccctgcgacaccgtcgtcctcctcgacgtcgtcaagagcggcggcgacggcggcggcaagaacggggatgatccaagcagagggtgccaacatctggagacaatgaggagtatttgccaggctaaaagaccagaggtacgcgtcgagctttccttggtggaagggaaggagagggggccggcgattgtggaggcggcgaggaagcaaggcgtgtcgctcctcgtcatgggccagaagaagaggtcgatcacatggcggctgctggtgatgtggatgaccggcggtaaaggcggcggcggaaggggcaccgccgagtactgcgtgcagaacgcggcgtgcatggcgctcgccgtccggcggaagagccggcgagggggagggtatctcatcaccacgaggcgccagagagatttctggctcctggcttga

SEQ ID NO: 22540 - DNA, 772 bp, Oryza sativa
  Clone ID: PAT_MRT4530_27707C.1
agaccatatgctccccccggatgctctcgctgatgaaatgagaaagatatatttgatcatctctattctcatgtaatcagcacccccgtggaatcaatgcaaactttgaaaatatctctccagttcaatctctacccacacgtagggattgccacaaaaattacacatatcatccctagactagaaaaatggctgacaaccgtctaagctccgatacacatcttggacgcaaaatacatgtatatacttatatatacaacaaacattttcctcatagtacatttggatcatatactagatacattttccactgttctattacacaacccagcattacttgatgacagcagcctgaagaactgtgtgcagtaggatcaaccattataagggattgaggggaagctgtggctttcaccatcctctatatggaatttagttatatattgaaggaggtgaatctcccagccacaacacaaatgatatttgtagaatgatatctcggaaaaaaaatgtcgtttccaaattgatattatcccacatggtatcgataaaaagaaaatcgtttgtgctgctctagtgagcctgaaaattcagcaaaatgttagcctagcaagtaagtactctgctgaacctgaaaattttaaaaattactatgatgtcagcaaaaagttgatagaagttatcaacaagaatcatatatgaatcgagatcctcaacaaggaatgtactaatgagatcatcagagtggtcaatgccaacacccacgcgtccg

SEQ ID NO: 22541 - DNA, 491 bp, Oryza sativa
  Clone ID: PAT_MRT4530_27708C.1
gcattgcgcaactcggcgacggcgacggcggcgtctcctccgagacgcgcgccatggtcctctcacccggtgagctttcctgggccgacgtcgccgttcacccccaccgcctcaacctcgccgccgcctcccgggcgatgcaggcgaacgggtcgctgtactggacgctcgagggcggcgcgagcgtggtggcgctcaacacggcgacgaacgagttctccgtcctcgagctcccgcctccactgaggcagctcagcttcgacgtcgtcgagaagggggaggaggaggacggcggcggcggcggcgggccgctctacctgctcaccatgcgcggcttctgcgtcgaggtgtgggccggcgcgggggacggcggcgccggcgagctgacgtggacgcgggtggagaagtcggtgaggttccacaaggcgatggcgatgctgcagcatgattcgggtggagatgtaccaccatggattggatgtcgtcggcgt

SEQ ID NO: 22542 - DNA, 422 bp, Oryza sativa
  Clone ID: PAT_MRT4530_27709C.1
aaataagaaaggaaaatgatctacatactaatcaagacaatgtatagggatactagtcaaatatcacttgttcaaccttcagcatggaggaacatactaaccaatttggcagtggagcaaagaatgacgcattcaagcctatgcttgctgacttttataactggaaggatttcttaaaagcaacaaaagcaaccaagagtatgggggaaacaaggaagagcacgtacggggtgatctgatcgaagcccatctcaggatcgcttagggcagcgtaggagatcaactggcccccaaacttggggacgtacttgttgaagcccgtggcaccgggcaaaggggagctgatgaccttcatgaagaccatcgcctgaaagcagaacatgaacatggttgctttcttactgagaacagaatttgaatga

SEQ ID NO: 22543 - DNA, 503 bp, Oryza sativa
  Clone ID: PAT_MRT4530_2770C.1
ctactccgccgggagcaacatgtgtcgcggcttttgcttcgcttccacggccacatgccgcgccacgggcacccgcgcgcgcgcgcgcccgcgcgccgtcctcacgccgcgtccgccgcccagatccggcgcacgctcctcccccttttgagccgccatcgccggcaccgccgcgcgcgacggcgcggcgcagccgcaccgatctcgtgaattcccctccctgaccactctcccggccccggccccagccaccacctaaatcgcaatgcctttctccgctagctcccgccgtcccctcccctcgacggtgccggtgcggcgcgcgcgtggtttctcagattcatgcaaggggatggtgacaagcttgtggcagcaactgcacatcttgcaagaaaatctttagggtttttcagaccataccgatgattttcttgcaagttgtgcagttgttgtctcaagcttgctgcctccctttgccaaaactatcaagtgagaaagcaggg

SEQ ID NO: 22544 - DNA, 487 bp, Oryza sativa
  Clone ID: PAT_MRT4530_27710C.1
gaacaggtacatcgaaagtacttattgacttcaaataatttttcaggatattacatatgacatcattcggaacaatttgtggccgaaactggaaagttacaggttgtactgtaatccgagccctagtgtatcttctgtggttcctttgatcattctgaaaaccagaggctttggaagatactgtatcaacaggaactaccggtgaatcagcacagggtggaggaaccgtttttggtcctgaaactcggtcaaaaccatacagctgcgcagggtggaggagcacttgcaatcacagctgaggaatcgatcttttcacaatcccttttgttccggttgagcaatcgggacacacactgctggggaattatgatgttgctggcgtctccgtctcgggtcccagcagtggagcactgacatttccacaggggggcacagccaagggcccagggcttcagccatggtcagacacttttgacggacttttctt

SEQ ID NO: 22545 - DNA, 270 bp, Oryza sativa
  Clone ID: PAT_MRT4530_27711C.1
atggcaatgactgtggagtcactgggagggggattttgcagtcccatgataaaacctcagtttgagaaaggctcggtgccgccgcgcgtgggtctcgccatcaaaccaagcactcatggatgcttgtctacggaacacacggttgccgattcgaacatcattggtgtcatccttgatcttgtagagcagccgccatggacgtcaaaggcagaggttccggagacctgctctcccgatcgctggtgcacgccggcgagcgggatggagtag

SEQ ID NO: 22546 - DNA, 249 bp, Oryza sativa
  Clone ID: PAT_MRT4530_27712C.1
atggaccaggagatctgggagccgtcggtggagggcaacacattggctcaggtcttggacattgctacaaaagaagtgaaagcccacatgcagcccaggccgatcgatccatcgatctgggaggtcgacacggcaacagggctagatggtgaagatcaccagatcggccgggcatgtgcgaggaatgggagggcgacgagctaccagatggagaatggccgcatcctctacggcggcggccatccatga

SEQ ID NO: 22547 - DNA, 196 bp, Oryza sativa
  Clone ID: PAT_MRT4530_27713C.1
atgctctacaagcgatctacggaccgtattgccatagcccctgacctggccagagcatggatattgctaagtgaagagaccttgactgatcgacgtccacagaacgagtacgatcagtgctatctatgcgtactacaactacgcggtgactcaacaattgtggtggcacccggtctggccggaagtgaaggcattg

SEQ ID NO: 22548 - DNA, 562 bp, Oryza sativa
  Clone ID: PAT_MRT4530_27714C.1
ggaaaaaaaacttttaaaggggcaaacaacacgggggctggggggaaactagagtaactaggggataccaggggcatgggttaggaaaccacctaggagaaaccattaagagcaaactttaaaacccaggccccatctaaaaatctacagaatcatcatcagcggcggcccgataaaccctcgaaaaactaaaaaaaacaggacctctaaggttcaggggaagggcagctgcagggctccaaaacagccagcttcacgggggaaggccccctaggggggagggatctttggaaagccaaaaccccttggggaccttccaggaaaaggccccaatcaaggggggggcattggcggatttggcggccgggggtatcacccctaaaaccagtcggaaaagcacccaagggcaagcccccgagggaagctgtcccctcagggatagggcagggcagctcaaccaacctctttacagagaggaaggaggaacccgcccccctctaaagggggggaggcttctcttctcgaatggaccccaaaccggcgggaggggcaaaaatggaaa

SEQ ID NO: 22549 - DNA, 1983 bp, Oryza sativa
  Clone ID: PAT_MRT4530_27715C.1
tcagcgaccggtggcggaggcggatcgagagccgcgccacgcgccgcggaggtgaggcggcggcgcgggtggtcggcacgggggcaggcggtggtcggcggcgcaggacatgaaggctggacgctccagccagtcgtcaccgccgttgcccccaccatcctcctcggcgcggcccaccggccgccaccctccccgcgagcgccgccgtccgccgcctctagtgtcctcctcggcactgcccgtcgcctccaccgttctcctcggctcggcccaccggccgccgtgccctccccgcgacacattcttgagtggcaagaggtccgttaaccgaagcctttgagcttccctgagttcctcgaaagcaccagggccacagctttcataagcatctataacttgttcttggtaatccattgcctgcttgtagcttcccatcaccccatatgcatttgcaatggactggatggtgtcgatagtatcctcatgttttggcccatatgtagcattaataatgtccttcgcaatagtaaagtactttatagctgactctgattggttcatggcaagataagcatctcccaaatgcttataagcaaaccctaatccaaagtgcaatggtccaaagcagttcttcaatttttcaattgcgctctgcagatatggaacagcctcatctactctttcggtcttcagaagaagccaccccattctagctgatatgctcccctgaatgtgctgcatctcagatacgccgtcgagaaacacaagtgttttcttcatcaaacacagcgccacctcaaattctatcattgtctcatacaacatcgacatctctgcatacacctgcgcaacctgtaagggactcacagaaatcttcgtgtcaagaatctcacgagcaatctctaagcaccgctttgagtcggcctttctgtcctggatgcacaaaatatttgccattgcaacgaatgctagtgcacgctcctcactctctttgccagcccgattgatcacccttttaagaacatccattgcctcctcagatctccccaacaaaaccagcaccatggccacatcagtttcagccagagaaagctccacatccaaccccagcctctcatacaccatccgaacgatttcatactgctccagtgcctcctcatttcgacctgatccagcatagatggtcgcgagaagctgccggaccttagccacctcttgggaatctcctccgaaatgattacgggcaatctccaacgcctcaaggcacagtggcaacgctttgtcacaggccagtacgcctctgtaggcctcggcgacatccttgtaagcatttcccaactccaaactccctttctccaggaacacggccttcagctccatggcgcgcatgaggtcagacgccgcgtcccaccggcgccccatggccgtctttgtgcgcgcgagctgctcgtggacagcggcgccaaccgcggccacctccgcgtccccggcctccagggaatcaatgatatccgccgcggcgttgagggagtcgaggctatcggtgaggcggccgaggcgggacgcggcggcgccggcgaggcggagggtgcgcgcgacggggagcgaccagccgccgtgcgacgcctgcagcggctcgagcgccttgatggcgagggcgagggcctcctggtggtcgtccgcggcctcccggagctgggcggcctccaggagcgcgaacccatcggattgagcagccggcgccgcctcgggaggaggagcggccggcgcggctagggttcgtgcggcgaaggggagcacgcgcgggaggggacgcggcggcggccggaggagcgggaggggttcccggttgcggcggaggaagggcttggagagggaggcgagcaggagcgatttgggcagccgcctcatcgccgggattagggttttagcctcgtggtcgacggaagctggcgcgccgccgcccgccgagaaaccctgagt

SEQ ID NO: 22550 - DNA, 393 bp, Oryza sativa
  Clone ID: PAT_MRT4530_27716C.1
atgaggcaggcgactagcgcggcggccagccgaggcagcgctcggcggcgccgcggcgtgcgggacaagcccggtggcggcggcagcggcggtggcggcggaggaggaggaggaggaggaagaggaaggaggggcgtggcgggaaagccgaggggcggggtagcgctcggcggcgcggcggccagccgaggagctgcggcgtgcgggacaagcccggaggaagaaggaggggcgcggcggcaaagcagaggcggaggagcgtggggagggcaacaatgtcatttggctgcgttgtttgacaccgttagagccaaaaatagacggaatggtgtgaagggcgcgataaagttcgacaatggcatagagggtggctcgaactttttagtggcatag

SEQ ID NO: 22551 - DNA, 1227 bp, Oryza sativa
  unsure (1)..(1227): unsure at all n locations
  Clone ID: PAT_MRT4530_27717C.1
cccgggctgcaggaatcggcacgaggctccatcttcggtgtctctcctccgcccgccggccggcgctcgactccaccgagccggaggcgtttcctggcacgcgccgccggcgacaagcccggcaacctcctcctcctcctccgctgcggctgtgcttcctttcctgctcgcgcgcacgggccggcggcggcgagacggttcggaggccgacgcggccgacgccgatcccctttcagcgtcctcattgcggttcgaatcgaaggtttacaatgatgagtgcgaaattgctccggagcatgagcgtgaggaggctcctaggacagcaaagaaactcagttgagttttacagaaaatcgcaagcatggaactcgactgcgtctttttctgatgtcgatgagaagaatcgcaagggtggtgatgccgaagatgatttcacacattccaggccagatcacgttttccgtggtgtgcacagggcaattatttgtggaaaagttggacaagtgccagtacagaaaatactaagaaacgggcatacagtaactgtctttactgttggaacaggtggcatgtttgaccagaggacagtaggtgctgaaaacttgccaatgccagctcagtggcatcgaatatctgttcacaatgagcagcttggtgcatttgccgttcagaagttagtagaagattctgcagtctacgttgagggtgatattgagaccagagtctacnatgacagaattaatgatcaagtgaaaaatataccnnanatctgtgtgcggcgtgatgggaaaattcanttgatgcnatctggtgatagcaatgttggcaaatcnttggaggagttaagggaaggatattcnagttgtgaaacnnagggtgatcngcaaaagtnggcaaanccggggaaatggaatgttttgttcgctccncntgcgccaagatctgggantnatttttgttatttgagcagtantaagattncatgaaggtccacatgcacttctgtntccaaataatgtgcttcangttcttttatgtcattttagcnnatgacgataccgttcnaatttagattatgtagtaaatcattctgtatccnttttttttcctttaccttgtctcttggaanaagacanaactggaggtntcnccntggtccaactttcatgcgtttgtgctgtgcgtgaaantcncatgaaagancagttatgtttgctgttnaaaaaa

SEQ ID NO: 22552 - DNA, 816 bp, Oryza sativa
  Clone ID: PAT_MRT4530_27718C.1
atggtgatgattctcaagctgtcaaagcaacaattccagaccttcctgaggctgcgagtgatagagagcaatgctccaaatctttccagtttaagcttcagcggaaatgtaaaactctcacttggagacccattgcaagtgaagagattaagcatgatccatccaaaggttgtctgttatgctcgtgccgagctgccatccgttatgccaaatcttgagactcttgccatttactccaatgatgaggtatcacaagagcatatgaagcatgaatcggttcttggagattcctcgcctttgaggcagatgccggaacaccgccattgctacctcaagagtgtgaagatgacagggttcagctccgcgaagaacttgattgagctaacatgttatatcctcaagaacgcggtgtcactcgagtgccttacattggacaccctttatgaaagggcatatgccggggaagcccatagggcggtcagggctgttacaacttacatccaggataaagttcctgatacagttaagttcactgttcagagttacttcctcactcccaccaccggagaaggctccggcgagaaagggcggaggggagagagagtccgctccggcgccaccggcggcggcggcggcgatgtccgcccccatggattcccccaggacgatgggagaaatccgcggccgctgtttaccctccagaacccagggggtccagccgaggcttccatggaagcatctgcgacatggttttgcaaatcattttgcggcagtttggatttctccaatctgcgtgcagttttctcactcgtctga

SEQ ID NO: 22553 - DNA, 3565 bp, Oryza sativa
  unsure (1)..(3565): unsure at all n locations
  Clone ID: PAT_MRT4530_27719C.1
cccaattccctagttacccccaccctctcaaaaccctaaccccacctcaccaccctccccggcggcggcggcccttgtggctgtgcacccatcactccaccggataagctctagctatctatcatccaaagcagcttactagtctgtgctctctctgtgtcggaaggcggcggcggcggcgcggcggctggtggtggtgggtgggggaggcggcggtagagcggtggtatctgggcgttttgtggcgggggcggctcggccgtcggcgatggaggagccgaatgtgggcggaggggcggcggcggtggtggcgcctgagggggcggatccggctggcggcggcggcggtggaccgggcgcccccgcgtctccctggaggaagaccacgccgccgcctgtggcgggtgaggcggtggtcatgggggccaagtcgtggcccgcgctggaggaggctaggcagaaggtcgccgccgcggaggccgcggcgaggccgggggcgggcaatgctggcggcggtggcgaaccagcgaagggggcgcaggcgcagcagccgtcccctcccccgccacagtcgcaggcacctaatcgcacgcacaagtttgatggccatggaaatcccaacaagaataatcaagcataccatagaaatggccccaagagacgttctcctgctgcgaatgggactccatcttatcctgccgcgatgccatatcaccaacatccagggcaacctttttactaccctgttattcccagtccagtgatactacatgaatatccttacccaccttttgctgttccggttccaagtcatgacccgcatgctggaaaatctggatatgagaattctatgcctgcttatgttccagtagatcaagctggtggcaatgaaggtaaccggccagtgcctccacaaccaaggggagaccttcatgcttggaggcctcctgttggtgcaagaccccagcctggccttgaaggccgtggccattttaatcacaattggcagaatccccagatgttcggtaccagggaaaacacaagtgtaccacaaggtgctgggccaagagctttcatgagaccaatggcacatctgcctcacactctgggatacataaatggtccaccataccctgggccaatgcctcccatgtattattacatgcctgctgtacccatggagccgatgagaggtccaccacgttttgtccaaaaccaaccacctcctcatcctgttttatctcctgaattaagagctaaaatactgactcaagtggagtactattttagtgatagtaatctggatcatgataattttcttaaatctttaatggacgaacatggctgggttccaatttccaaagttgcagacttcaatcggcttaagaaaatgaccacggatatacaactgattgtagaagcattggcaaactcaagtcttttagaagttcaggatggtaatatgaggcggcgttctgactggtcaaagtgggtttccttgtctgggacatctcttccgagtccatcttcaaccagtatggataacactactggtgaatgtaataaggatgcttattctgaagatgaaaagaagcctcatcctcgcagcgtagattgtgttggtatgggggcttctgatgagccatcacatgatacactcagtagttcagtcacttcactgaataagggcttatcaaacattagtattgataataagcctaagagcatttctgcatgctctctgaactcacaaaaacatgaagctgcttttaggactggtgatgttaaagttcagaaagtaaacacaaagatcaaagtgcctgattctcagagggaaagaggtttctgtaatgatttcataagtgactctcctagcttcagcggcgatcaaagcacattcttgcttgatgaggaattagaattggagcatgcagagctttcacatgatctctattcgcacaaaagggtcgatgatgaggaagatgatttttatgttgatgaccaagatgtgaacaggctaataatcgttacgcaggacggacctcaagcattttcaaaagaggaaatatcaagaatcaatgaggggttatattactatgagaatcacgcttataatcaaagaagttcccaagctggcaccatagatattgattctaaaccagctggtggttcaaaggggaatcccattaatattgtaaacaatggaattgaagattctggacagcctatcccacgaaggaggcacaacagaggcaatagaaaagcacagtcctctcataagcagaggttctttcctggtaactttgcgaataacaccaataatagatctcactatggcggtgtatcagagagccccccaagcaattcaattggatatttctacggatctactccagaaaaccacagaagttcaaggttgagctcatctcctcatggaatccctactggtagctcgcctgttggttctgtgcccaaatctttcccaccatttcaacacccaagtcatcagcttttagagaaaaataaattccagcagcaaaggtacaataagttcaaaaatcgatgcatcgctgaacgcaagaagttagggatcggttgcagtgaggaaatgaattcgttatatcgtttttggtcgtattatctaagagataattttaatgatgatatgtacaaacattttaagaagtttgcactagatgacgcggcagcaaattacagatatggacttgaatgtctcttcagattttatagttatggtttggagaaaaacttccaacgcaatgtgtatgaagatttcgagcagctgacactcgaattccatcacaagggtgatctttatggactcgaaaaatactgggctttccaccatttccgaaatcaagatagcagccccattatcaagcatccagaattggagaggctcctaaaggaggagttccgaaccatcgaggatttcaaggcacggaaggcagcagagaaagaaactggcagcagtactgctgccgccgcaggccataacaaggctgatgcgaagtaggtcctagcatggcatgaaattttggtggtcatcccacaaaaaggagaaagtagcaaaaccgtttttgtttggtgaaaacttaaggatttgagtagacacctgtgcagattttgttttcccctgccgacgatacttgtgtggacttgtccaggaaatttgtcctttgcattgttggcccttacattgctggcgcaacgccctgtgggatttgttcataaagatattattgcctggtggttgaatggacaaattatcgaccctcgggtggattcgcacaaaatacaagactagtttacgttaatgttgccgtcatgcttgttctgtgtcgtcgttggcgctcgccttccccctacnccatcaaaatgttctcctatctcgtttaatgtgactggtatcgaactacctacggtgtgcttcttttagagcttctcgagttatagtattttacgtattgaaaatgtccgtctcccctactattttatgtgcgcgtgatagtggctgttttattctttgtctgcctacagcatt

SEQ ID NO: 22554 - DNA, 197 bp, Oryza sativa
  Clone ID: PAT_MRT4530_2771C.1
tttttcttaccgatattttccagttgatcagaaaagtatcaaccttacaatcttatcataatcatcatcatttcctggaatgtctttacccacccgataactattgagcaccacaagaaatgcccagatattttcagcagcaaccaagtgcgtaatcataccgaaaattgttctgtgtcgcggcataaattcttagc

SEQ ID NO: 22555 - DNA, 1197 bp, Oryza sativa
  Clone ID: PAT_MRT4530_27720C.1
atgacgacagtgcaggcaccgagagctgcgtcggcgggaggcggcggcgcctgcggccagcgggaggaggcgagctcggcattgagagaggaggcgagccggcgacgagagaggaggcgagccggcgacgaccggatctggtgggcgccggcgagagaggtggcgtccctgtgccggaccttcttgctcagcaagaagcccaagttgggcctcgaaagcccactgcgtgagctgcccgtcctccgattctcctcctcgacttcgaacctcgacgcctgcatccgcatccgcctccgcctccgcctccgcctccgccgcgaactcgccgccgcgccggccatgtcgatcttcgagtacaatggttccgccgtggtggcgatggtggggaagaactgcttcgcgatcgccagcgaccggcggctcggggtgcagctgcagaccgtcgcgacggacttccagagggtgttcaagatccacgacaagctctacatcggcctctccggcctcgccaccgacgcgcagacgctgtaccagcgcctggtgttcaggcacaagctgtatcaactgcgggaggagagggacatgaagccccagaccttcgccagcctcgtctccgctctcctctacgagaagagatttggaccatacttctgccagcctgttatcgctggacttggagaggacaatgagccatttatttgtaccatggactgcattggtgcaaaggaactagctaaggatttcgttgtatcggggacagcatcggagtctctatatggtgcttgtgagtccatgtacaaaccaaacatggaacctgaagaactctttgagactatctcacaagctctgcagtcatcagttgatcgtgattgcctcagtggttggggaggctttgttctgcttgtgacaccaaccgaagtaaaagagtgtgtgatcaagggcaggatggactaaatttatcattgcgaagagttcttggaaccatttctgatgcctgctgttcctggtctctcagcattactatccgtgttgtatgtggattccgagggaaccttgtaatatcaaagatgttcattcacccgtagaagaaactgttgttttcttacttttctacgcttcctatgaatgaaaggacttctatttgttgcatgaaaaaaaaaaaaaaaaaaaaaaaaaaaaactcgagaccctcgtgcc

SEQ ID NO: 22556 - DNA, 1004 bp, Oryza sativa
  unsure (1)..(1004): unsure at all n locations
  Clone ID: PAT_MRT4530_27721C.1
ccggccgggattttttttctctcgctcgccggagaccaaccggaatcgccgcgcgccgccgccgccgcctcctcgccgtccgccgcagccgtcgagcccatcggcgccggtcatgtcgatcttcgagtacaacgggagcgccgtggtggcgatgggggggaagaactgcttcgcgatcgccagcgaccggcgcctcggggtgcagctgcagacggtcgccaccgacttccagagggtgttcaagatccacgacaagctctacatcggcctctccggcctcgccaccgacgcccagacgctgtaccagcggctggtgttcaggcacaaactgtaccagctgagggaggagagggacatgaagccccaggcattcgctagcctcgtctccgcgctcctctacgagaagaggtttgggccgtacttctgccaaccagttattgctggattaggagataatgatgagccatttatatgtaccatggattgcattggtgccaaggaactagcgaaagattttgtggtttctggcactgcttcagaatcactatatggtgcttgtgagttcatgtataagccaagcatggaaccggaagaactctttgagacgatctcacaagcgctgcagtcatcagttgatcgtgattgcctcagtggttgggnaggctttgttctgcttgtgacaccaaccgaagtaaaagagtgtgtgatcnagggcaggatggactaaatttatcattgcgaagagttcttggaaccatttctgatgcctgctgttcctggtctctcagcattactatccgtgttgtatgtggattccgagggaaccttgtaatatcaaagatgttcattcacccgtagaagaaactgttgttttcttacttttctacgcttcctatgaatgaaaggacttctatttgttgcatgagatgtgcacttcttggcagtccttggccttgatgatgacgattatactgatcagtaagccggctactggttaattagct

SEQ ID NO: 22557 - DNA, 1599 bp, Oryza sativa
  Clone ID: PAT_MRT4530_27722C.1
ttttcattccagtccttaacccagcttaagaatggcaatgatggatccccattcattaggggatcgtcgtttcagggtttgtgaccggattagctttgggagtaggccaagtgatgttgacaccagtatgagatatggtgggtcatctgatgatgagaatattgacgaggaatcacctagtggtatatacatctcaccaatgccatacggttatggtgctccactatgctatgatgataacaaaagacagttgataaacactagatattgcctagttgccagcaagcaaatggttggtgtttttctcatggtttgggtacgaagtgatataagggaacatgtgaagaacttgaaggtttcatgtgttggcagaggtttgatgggatatctcggaaataagggatcgatatcaatcagcatgtctctgcatcagacaagcttctgctttgtttgcactcacttgacctcagggcaaaaggacggtgatgaacttagaagaaatgcagatgttgtagaaattttgaggaagaccagattcccacatgtccatggtgtaggtgacgagaagtcaccggagacaattcttgaccatgatcgtataatatggcttggggatcttaattaccgaatagctctttcataccgttcggtgaaggctctagttgagatgcacaattggaaacagttactagagaaggaccagcttcgagcggccccttggtatggtcgggtatttgcaccgctggaaagaaagggaggatttattttcctcccacatacaaatactcctacaattctgacagatacgcaggcgacgatatgcgtccgaatgagaagcgaagaacacctgcatggtgcgaccggattctatggtatgggagaggcctgaatcaactatgttatgttcgcggcgagtctagattctcagatcacaggcctgtatacagcattttcactgcggaggttcagataccgagccaaacccaattttgcagctttgctcgttctacctctctaatgggggtggatgaactaccatacccaacttatccacgcagttacacagatatcaatttttattgattgtgtatctcgatggagccaagacattcttcagtcccagaatacaccagatgaacttcatttctcccaagattccagcaattggaatattgtcagccaacagatactcaaggagatgctttctaattgtaaaattaggaagatttgcgcagtcaagcaaagttttgaatctaacaatccgcgagtaccagtttacaacagcaaccaaaaaaaaaagaggagagttttagttccgaaataagctaatcactaacaactgaagctgatttgcagtgtgcttttggataccccttcatcatacagaattcctttttccttcgccaccatttgtactacttgaaaggctttgtttcctcttttgcttttctttcttttttgttcttggtcttctgatgtaacaagagccccttgggccctgatatttaattggaagtagaaacagtgcagtatcatttgtacagcataatgttgatgctatcatgcagtgtttgcagtgtggcatggttcatgcttgcc

SEQ ID NO: 22558 - DNA, 283 bp, Oryza sativa
  Clone ID: PAT_MRT4530_27723C.1
gattctaaatataccataacacattggcatagattgaaacatacaggttttttttgaaggccctaatatctaagggcccaaatggtcgtttatcttgcacatctcgagggatggatcatatacatgtattcgacacaaactctaacatgcaacatcccatatacaggtgtaattattctatttgccgtaatcgacatggatggtgtagctataatatgcaggtgggaacaatcttgcaaccatcatgcagagttacaactagtaccaaacagagttacatacc

SEQ ID NO: 22559 - DNA, 1171 bp, Oryza sativa
  Clone ID: PAT_MRT4530_27724C.1
atccatccttcgtctcctctcctctcctcctccccttccaccccacgcgccccgcacccacccacgcgccgcgccctaaccctaaccctaaccctaaccctactcctctcgctcgccatgtccgagcccgcgtcgcccccaccggccatgcccgaggacgccgcgccgccgcagccgcagccggagccggcggttccagcgggggaggaggccgccccgtctctggagaggaaggaggagttgctgccggtggaggagaagatctcggaattagatgaatcacagtcacagcttatggggagacttcggggactcaaggaggatttgctgaattggaggagcagtttagatacacaagtgacaaaatacaaaagcgaactctctgatatcaaaactgcgctgaatagcgaaattgaacagctgagatcagattttcaagaattgaggaccacccttaagaagcagcaggaagatgtatcaaatagtttgaagaatttggggctacaagatgctactgacaatgatgggaacaaaggaagtggtgaggagaatgcaagtgagggtgtctcagataccctagggaacctgaaattggatgatactccaaaaaaccatgatgaaagcagtgatgccaatgatgaaaagaatgaaaccattgctgaagatggcacggtcgataaaactgttaaggctgagagtgcaagtgatgaatgaagtagcggaggaaccagaagtagaacttgggccgcttctttttcgtggctcagctgtagtaatttttagaacagagataactttggttcctgaaacgagtccacgctctctgatggcttcgtcgtgtagtgttgttaatcgctgtcatgacttgtgaaatcccagttctctggaatggccgtagtaacaattttattgctatcagcaagttatctaaagaatagccactggaattttgcctttaaaaattccagatatttttctctgctcaggtgccttgcgcctgcccgcctgttgaaggccggaaggaatgatgggtttttttttttttggtaggccatggttggtattgttgactgtggctatggatgaaatagtattcatttgaacggtgagtttgaatcaaatcacgcccatataaaattggttagctttgtatacaaaaaaaaaaaaaaaa

SEQ ID NO: 22560 - DNA, 474 bp, Oryza sativa
  Clone ID: PAT_MRT4530_27725C.1
atggcgaagaagacggcggacaaggcaactgcagcgacggcggacaaggcgactgcggagacggcgacgatcggccttctcctctccttggcggcgttcgccacgcggcgagctcggggccggatccaccgccgccaacgaccggggaggccggatctgccgccgccaacgacggagcacccagtcgtttctaacaaagaagacagggttcccagcgagacaaggcggcacgacaggaagaaccggtcaaagagtgggacgagcatggcgaacgacgacattgatgggcaggctgaacccaaacggagcctgacgcatatagccccgggagcacagccatgcgacagcactatgctcgccagcgcgtggaacgagtggagcccatggtgcggtgaggccgacatcgacaagggccccgccatgacatgcatggacaaccgccgaagctctgccaaggacaaaccggccatttga

SEQ ID NO: 22561 - DNA, 619 bp, Oryza sativa
  Clone ID: PAT_MRT4530_27726C.1
tgcagtgaatcggcagagggaggaaggggagtgtggacgcagcagtgagtcctgtgcgcagccgctctcctgctggtgtggaaactaaggtcgcattgtgatcgctcgcgttcaatgtcaaggagcaggagcctgtctgggtcaagatcaaggtctccaccacctatacacaatcgctccccacttgcttccctgtccccaaagcgagagagtaatgcgaagtcccggtcaccctctgtcagttctgaagggaagaaaggtttggtttcgtatggagatggttcccctgattctgctgggaagtaggaatccatgaatgcatgtacaagctttggccgttgctcaacccatctgcattgcagtattgggtttgaaatgctacggttagagaagctattttgaggtgctgcagaagctgtttttgtcatcttagagatgttatatatttatggatggttgtgagttggttgaatcttgtctagacgatcataagccgaggttagctaatggtttcttaaacttgcaacacagtttttctggctgtaattcttgtgcgccgtggcagttaatgagttaaaacctatcgaggtactttggtggaaaaaaaaaaaactcgaga

SEQ ID NO: 22562 - DNA, 217 bp, Oryza sativa
  Clone ID: PAT_MRT4530_27727C.1
gaggatggttgggtctgttgcaacgtggtgtagcgttggacagtggatggtaaatattgtttaattattacaactgttttactgctttcaactactgtttataaatgctcgctttatgcaaatgaaccgctctagctaccctttggttatatcctacatcataccccctctttcggtatgacttgctgagtacggtggttgtactcagtcttgctct

SEQ ID NO: 22563 - DNA, 677 bp, Oryza sativa
  Clone ID: PAT_MRT4530_27728C.1
tttttttttttttctgggagacaaaaattaggaacctactgaaagtgtttctccgtgctctctacctatacgcaggacactgaacacagaacccataccatacatacataaaaaaggggcttcagtatcacagacacctcttacacacacacacaccaaaacatacatgaattaatacattctatctgataagagatgacattgcatctcatcttgtgctgaataattaattaatcacaattaacaaattcttcgtcaagtcatcagctaaacaatgccacatgaacttgagtgatgctgacaacattaattcaagggataggctcatgctgaggtgtggcaggggaatctggtgcgatggtgaaattcatgccccttctttgtcctgactgtagaatgaatgccacctcagttgcagctagagcagccgctacctgcctccgccttcggccctgtaagatattgattgcccaagccatgatgtagaatggtagcagaaacccggtgactcgtagtagaaaaagcaaaaacattgaagaagcgtcgtcttcatcttcatcagttagtaccaacacatgcctcaacactaacagagccattaaaataagcgcagcagagcggcaaagggcagcagagctccgcatttgttactgaataatcatcatagtcagcttcca

SEQ ID NO: 22564 - DNA, 525 bp, Oryza sativa
  unsure (1)..(525): unsure at all n locations
  Clone ID: PAT_MRT4530_27729C.1
cacaatttcctagggaccaaaaaaattgccacatcacatctcatgttgtgtcctccaaaaaaatgttgtaattttctgtcgtgctgatgacaattctctatatntacctcaacaagctattcattttctgtatttgaatctttgtccttgcatatgtgtgaaccttagatgtctaacactttgccagattagtgtttgaacactttcatatattattttctgagcctttggcatattagtttctgacttgtccttatgatgtaggagcatctgaatttagaatctgaacttcgacaagcatctaaatattgttcatgttttaatttgctgtgagctaatgaatgttatgaatttctcatagctcaagtaccggaagtttagaaattctccagtcaatgtaaagtttgtgtgggtttagtgtctgaccttagcccttcatgtgtgtaaacatatactcctattatcatttaaggttgaacctggaatgtatcttttttttagaactaaaaaaaaaaaaaaaaaaaa

SEQ ID NO: 22565 - DNA, 255 bp, Oryza sativa
  Clone ID: PAT_MRT4530_2772C.1
atggtggacagtgacagctccaatggaagcaaacccaatttctggggttttgggccctccctcttctccccctcgtggcagctggctctagaattggtggtcatcctccaggctgtagccaaaattcaaattttgaaacataattttagagcaccacatggtcagccgttgacaggagcaggaatgcacaatgccaagaagggccaggcgacaacgatcgccgtcacggccatcactgacaaaattgagaaatag

SEQ ID NO: 22566 - DNA, 1172 bp, Oryza sativa
  Clone ID: PAT_MRT4530_27730C.1
atccgcccttccggtagaccgcccttgcgatggagcctaccccgcacccgacatggccttataagaggattgacaaccacaacgcctccaaagaacactcgaacaagcatcaacctaagcccagttagactatctatgaggagtatctgccctgtactaggtggccgcgtctagcaagagtgccatcagaagtgtcagcccatcgcgtccgtcaatatcacctgcacaaaatcatggtaggagcccatccaggagtccctctcactcgcgggtcaaagcggttaacaagggggcggtgatttactcatcgctactcatttgcaagacaataccgctcaccttctcctgatcattcattccgttatggtggaagaggtgatcgtgacagacacatgagttatcgaggctcccgtcagcgatcgcctcctagacggtatagaagcagcccacttagaggacgagcatcaccaaggtacaggaggaggagccgaagcatctcacgaagtcctgtttatcgagacagaggaaggggaggtggacgcagcaggagtcctgtgcgcagccgctctcctgctggtgggaaactaaggtcgcatggtgatcgctcgcgttcaatgtcaaggagcaggagcctgtctgggtcaagatcaaggtctccaccaccaatacacaatcgctccccacttgcttccctgtccccaaagcgagagagtaatgcaaagtcccggtcaccctctgccagttctgaagggaagaaaggtttggtttcgtatggagatggttcccctgattctgctgggaagtaggaatccatgaatgcatgtacaagctttggccgttgctcaacccatctgcattgcagtattgggaagctttggccgttgctcaacccatctgcattgcagtattgggtttgaaatgctacggttagagaagctattttgaggtgctgcagaagctgtttttgtcatcttagagatgttatatatttatggatggttgtgagttggttgaatcttgtctagacgatcataagccgaggttagctaatggtttcttaaacttgcaacacagtttttctggctgtaattcttgtgcgccgtggcagttaatgagttaaaacctatcgaggtacttttgttggacttggtggaaaaaaaaaaaaaaaaaaa

SEQ ID NO: 22567 - DNA, 1028 bp, Oryza sativa
  Clone ID: PAT_MRT4530_27731C.1
aaggcgaaggggagagaaaagtcagttgccgccgccgccgtgtttgccgtgaaaagtgaggtggaagcccccgtggtgcggcgcacgaggaggcgcgtgctgctgcggacgccgaagccggcgcctctgctcaagcggcttttcgcggcgtgccgcgacgtgttccgtggccccggcaccgtgccggcgcccgacgacgtcgccctcatccgcggcatcctcgacaagataggccccggagacgtgaacctgagcgcggagcacaacttcttcaaggccaccgacgccgccgcgctgccgcaccctctcgccatcacgcggaccaccatctacacatgcaccaacttctcgatagtgatattcttcctgcccccaacggcggtcatccctctccacaaccacccggggatgaccgtgttcagcaagctgctcctcggctcgctccacatcaagtcctacgactgggccgagcccgccgtcttcgccgccggctccggcgatcgcctgaggctggcggaggtggtgcgcgacggcgggttcagcgcgccgagcgacacgctggtgctgtacccggcggccggcggcaacatgcaccagttcacggcggcgacgccgtgcgcgctcctcgacgtcctcggacctccgtactccgaggaccgggactgcacctactaccaggacttcccctactcccactgcccaagtgacgacattgcagagctgcgtcgccatggcggcggcatggacgacgagcagatcagcaggatgcggcagctggggtggctgaaggagacggccatgcccaaggacctggagatgtacgagatgccgtacagaggcccgcccatcctgtagaacgtaattagtacaatccgcagaggcattaattgcaggagcagtttcatgcggtgcctctcgatctcaaagtcttgatctcatagattttccgtagcgaggcggtaattagtgctgtctcgatcgatctgatcttcttcacttcgatgatcaaaactctgctcaggttaatt

SEQ ID NO: 22568 - DNA, 750 bp, Oryza sativa
  Clone ID: PAT_MRT4530_27732C.1
atgggggacgcacaaccaggaactcgaacgccggtggatagagaccacgcaagcagcgtcacggattcagttgccgctgcttcaccagatcaactcccgccggaagcttgtgccattgaatagcacgggatcctcctcaccggcgccactagtgaggcgccggatcaagaaaggggcaacccgagaagcccgaatacctccggttggttgcggcaggggagggccggtggaatcacagagctagagagagggaagggaatacccggatcccaggaaaagatcatcgttgatgtcagcaaggggcggccggcgccaacatgcggcccccacatgtcagcaagcaaggggacaggcgcacggtggacacggtccaccgcggcctcgggcgcgcgtccaccatgtggatggcccaaatggggccgggccgatccgatggaccagaccggccacggcggggaccaaggggaggcggccagccggcggcggagcgggcgcggcgcgcggcagcggcgacctggccggacagccaccggcggcagcggcgcgacgcggcgctggcacgggaggtgggcggcgaaggctaggagggagagggagggagcgctcaccgagcagcacggcaacggagggaggcaagatggcggcggcatcccacgggcgaggacgacgacgaggattgtgcggcgtccggcacaggaggaagggtggccgagggtcgacgatacctggggaagcgatttgaggaattag

SEQ ID NO: 22569 - DNA, 225 bp, Oryza sativa
  Clone ID: PAT_MRT4530_27733C.1
atggggaacttccttgtcatatttgcagccttcaccgaggagtttgaggtcgaggccgtcatcgatttggagccggcgctggcgccgctcgggctgcccggtactgtcgccgcatggaccaccgcgtcggccgccgccgctcaaccccgacacctcgctttctctggccttggcttcctttgctggtggggaaagaaagagaggagaggcagagatgaaaagtaa

SEQ ID NO: 22570 - DNA, 535 bp, Oryza sativa
  unsure (1)..(535): unsure at all n locations
  Clone ID: PAT_MRT4530_27734C.1
gcgtacgccctcgccgactcggcctcgccaccgtcgacgactcgtcggagatggcctcctacccggcattccaagtaagcccggaggaagcagcgaagggtaaatggtacattgcgactgctgctaccaaccacatgacccgcgaccagagcgtcatctccaacctcaagcccgtgactggccgtgttgttggtggtggcaacggcgcaggattgcaagtgcatggcagtggagctgtgaacacagagacggtggcgatcccagacgtgtggtatgtgccggggatcaattgcaacttggtttctgttggccagctctgtcaactcgggctcgaagtttcgattttccgaggtgtctgcaccgtcactagagctagtgatggatctgtagttggcaaagcgcatagatcaggtgcagtctatgaggtggaattcctcanagttcccgttaattagcactggaaattcctcgctgcagtatcagttgtggtagtcagactcatatggtggctaatatcgcctactctatcgaatgc

SEQ ID NO: 22571 - DNA, 2223 bp, Oryza sativa
  Clone ID: PAT_MRT4530_27735C.1
atggacctcgacaagtccacttccactagtgcgtccctgaagaagttgcaagaggagggcgctctcctcggtcgcgggaccatggagagggaaccaggaggtactgaacctgaacctgttctaggccgtatggttgcggttgaggactatattctctgtggtattctcccccggccttctgagtttctcctgctcgttttgaatttctacggtctttctttgctccatttgaaccccaattccatcgccttcctcagtatcttttcgcatctttgtgaggcctacattggggtagagccgtttctcgacctctttcgcttctactacgagttgcgtcggatagaatccaccagggtatctggatgcgttggtttccgactttgggatggcctgaagttgcgctatatccccttccagtgcccttcttctcgtagcaagtggcaggcgaggtggttctatcttcagatagaggattcagatccaatctttgttgttcctgaggaacaaccagacaagattccgtcttggaccgccaaacccgtcttgaccccttctcttcagtccttcattgatgccatcgatgacctccgagtacggggtttgtcggggtatgaagtcgctgccgacttcattggtaggcggatccagccactccaggctcgagcccacccagcctttgactattctgggccggaggacgcgacccgggtttctcctcggggtatgaacagcgaaaccgtggagcgtcgcgtcggccaattgatgatcagtggcctgacaacggcgagcaatgtccccgtccccctttgcgagaaggagaaggctgagcgtgaagttgcaatcaacgcggcggcctcgttgaaggagggcgtctcccaggaggcatctgacatggccattgctgctgctgccacgaccagtggcagccatgtcccgaggaaggggaggaaattcacctccgtgctcggcagccgtcgaaaagcatcctccccatcggccttggatgcgtctccgccacctccacgacgacagaggctggtgacacttagcgagaagtcggcgcgggcgaaggcggcgcaagacgggtccggcgggaactccagcgcgtctcctgcggtggcctcgacagatgtcgtggtcgtgcctaggagccgtgaggtgacgcccagcggccctgttagcgatcttgtgcccgttcgaggcccgcctgctgacgtcctcacctggggggagctccatgtcgagatggggcgcatcctcgaggccggtgctcgcggcataagtcgcgagattgcggaggcgagggtggcggcgtcgtcggcaaacgagcgtgccgacaagctggtgcatgacctggcggaggttcgtgaggacctccagaaaatgagggaactagtggccggcaatgagcgacaacagcggggactcgagaaccgcatgtcggaactcgagaacaacctgtcagagatccgtggctcgttgcgggtcacctacaccggcctgcaccaactcgccggggaatgtggtgttgcgaccaccatcccggtgaaccccgacgagttctcgctgatgacttcgctcacagaactggccacggcgatggaggcgataccctccaagcatgcggccaggattggggaggagatgtccaacgggatttacaccggggtgtgtcacgtcctcgcgtgcgtaagagatgtcgatgtcgaggatgtccagcagcgcgggcaacctgagttgccagtgatcgttccggcacttgcgttcgagccacatgtgtcgcaggacgatgtagatcaaaatttgcccgtggaaacgggcatggcgacgacttccttagatcttgagagtgcgcttgctgaccaagatcgtcgcatccaatattggaagacgaaatttgaggtagcggaactcaagaggactatgctagatgtgaagaaggagcaggccatggaaacactccggggtcgcgagctcgaaggcatcggcaagcgtattgatgaggctcttaagcaggagtgccgtcgatcgagccgatatgccggatggcatgtattggcttgcatacgagatcatcgcccgcagctacacctcgagtttctccacgaagggttttctcgttcttggagaactcggacggagatagatcacctggcaaagtcaatggcgccgctggcagagaaggtgttccagtctatggactggcgttggccttcctggtag

SEQ ID NO: 22572 - DNA, 1263 bp, Oryza sativa
  Clone ID: PAT_MRT4530_27736C.1
atgaacttgaagttgagtcttgccatcgatggtggtggtggtggtgatgcggcggcggcggtggccaagaagagtaaggtggtggggggcggcgccgtcgtcgtcgatggcgtcggcagcagcgccatttgtggcggcgatcggggtagcagggtgagagatcggatggtcaagaaggcggaggagtttgaccatgaaaatggaatggcggcgacgtcgtcggatggtggcggtcgcggcggcgctggcatggatctggcgtcgccgttctaccagttcgcgcacttcacggcgaaccagacgatcgtcgaggccttcgagtccggcggccggcgccgcctccacgtcgtcgacttcgacgtctcgtacgggttccagtggccttcgctgatccagtccctgtcggacgccgccgccgccgccaccagcagttcatcccacgacgacgacgacaacggaggcggctgcggcgacggtccggtgtccctgcggatcaccggcttcggcgcgagcgccgacgagctacgggaaaccgaggcgcggctccggcggttcgccgccggctgccccaacctacggttcgagttcgagggcatcctgaacaacggatcgaacacccgccatgattgcaccaggatcgacgacgacgcgacggtggtcgtcaacctggtgttcccggcgagctcaagagaagcgtgcgccgccacaagaatggcttacatcaactccctgaacccgtccatggtgttcttgatcgagaaacacgacggcggcggcgggctcaccggcggcgacaacaccactacaggaagaagcgcgagcttgctcccgcggttcgccgccaacctccgatacttcgccgccgtgttcgactcgctccacgagtgcctcccggcggacagcgccgagaggctcgccatcgagagggaccacctcgggagggagatcgccgacgccgtggcctcgctagaccaccaacaccgccgccgccatggcggcggcggcggcggcggcgatcacgcagcagctagctggaactggaaggcggccatggagggcgccgggctcgacggcgtgaagctgagctcgaggacggtgagccaggcgaagctgctgctcaagatgaagagcggctgcggcggcggcgggttccgcgtcgtggagggcgacggcggcatggccatgtcgctggcgtggcgtgacatggctctggctacggcgaccttgtggcggcggcgacggcggcggcggcgatgtcggtga

SEQ ID NO: 22573 - DNA, 1776 bp, Oryza sativa
  Clone ID: PAT_MRT4530_27737C.1
atggacctcgacaagtccacttccactagtgcatccctgaagaagttgcaggaggagggtgctctccccggtcgcgggaccatggagagggaaccaggaggtactgaacctgaacctgtcctaggtcgcatggttgcggttgaggattatattctctgtggttttctccccccgccttctgagtttctccttctcattttgaatttctacggtctttctttgctccatttgaaccccaattccatcgccttcctcagtatcttttcgcatctttgtgaggcctacattggggtagagccgtttctcgacctctttcgcttctactacgagttgcgttggatgggatccaccagggctctccctctgaccgacgtcattggaccgctcgtggaccaccaggcggcggcctcgttgaaggagggcatcgcccaggaggcgtccgacatggccattactgctgctgtcgccacgaccagtggcagccatgtcccgaggaaggggaggaagttcacctccgtgctcggcggtcgccggaaagcgtcctccccgtcggccttggatgcgtctccgtcacctccgcggcggcagaggctggtgacacttggcgaaaagtcagtgcgggcgaagacggcgcaagatgggtccagaggaaactctagcgtgtctcctgcagtggcctcgacagatgtcgtgctcgtgcccaggagccgtgagggggagctccaagtcgacatggggtgcatcctcgaggccagtgctcgcggcataagtcgtgagattgcggaggcgagggcggcggcggcgtcatcggcaaacgagcatgccgacaagctggcgtgtgacctggcggaggttcatgaagacctccagaaaatgagggaactagtggctggcaacgagcgacaacggcggggactcgagaaccgcatgtcggaactcgagaacaacctgtcggagatccgtggctcgtcgcgggtcacctacaccggcctacaccagctcgccggggaatgtggtgttacgaccaccatcccggtgaaccccgacgagttctcgctgacgacttcgctcgcagaactggccacggcgatggaggcgataccctccaagcatgcggccaggatcggagaggagacatctaatgggatttacactggggcatgtcaaatcctcgcgttcataaggttggcgcaccctgaacttgatctccagcggatcttggatcagggagcgactaacgacgtgcgtaagggcgtgatggaagaagtcggcgatctgggagagtctgttctcccactttttgaagaagatgtcgatgtcgaggatgtccagcagcgcgggcagcctgagttgccagtgatcgttccggcacttgcgtttgagccacatgtgtcacaggacgatgtagatcaaaatttgcccgtggaaacgggcttgccgacgacttccttagatttcgagagtgtgcttgctaacgaagatcgtcgcatccaatattggaagacgaaatttgaggtagcggagctcgagaagactatgctagaagtgaagaaggagcaggccgtggaaacactccgaggtcgcgaggtgtggttcaacttgtacctgaagagttgctgcacgtccatgacgagagtctgtagagagctccgagtaccccgtggcgatcccgaggagtcggcggccggatacatctcgtggctgtatggggcctgcacccagctcgaaggcatcgacaagcgtgtaggatcgagatgtcgactagagggagggtga

SEQ ID NO: 22574 - DNA, 477 bp, Oryza sativa
  unsure (1)..(477): unsure at all n locations
  Clone ID: PAT_MRT4530_27738C.1
gtgtttnagtngggngngaggggggncgctaccatggcgctgaaacagctccttcgccgtcgccgcccgctgctgctggtggcgcgccatggcgttggtgtcgtctccgctggccgcgccgcgcctccgccggcgtgtcgcgctcgtcgtcaggggcccaattccnaaaccggaaggtggagccnaccaaaggaagaanncgggcacgtcctccttcgtccccgtctcccggngaacnanccccnactccnnaacccccgcgggnggcgggngccctanggctnnatccggcggcaaacaccaanactgntgggnacttgctgggcgttcaacnggggccgngngccgggaaacggnatcaaacggggcggctggccaantgggtgggggtttccttgttcngcccctnggcccttnaanagccttnccccccggcgggcggggctccttgaaccnangccgggganncntgggaac

SEQ ID NO: 22575 - DNA, 831 bp, Oryza sativa
  Clone ID: PAT_MRT4530_27739C.1
atggaggcgataccctccaagcatgcggccatgatcggggaggagacgtccaacgggatttacaccggggcatgtcacgtcctcgcgtgtgtgaggttagcgcaccctgaacttgatcttcagtggatcttggatcagggagcgactaacgacgcacgtaagggcgtgatggaggaagtcggtgatctgggagagtctgttctcccactttttgaagaagatgtcgatgtcgaggatgtccagcagcgcgggcagcttgagttgccggtgatcgttccgacgcttgcgtttgaaccacgtgtgtcgcaggacgatgtagatcaaaatttgcccgcggacacggatctcgagagtgcacctgctgaccaagatcatcgcatccaatattggaagacgaaatttgaggtagcggaactcgagaggactgtgctggaagtaaagaaggagctggctgtggaaacactccgaggtcgtgaggtgaggttcaactcgtatctgaagagttgctgcacgtccatgacaagagtctgtagggagctccgagtaccccgtggggatcccgaggagtcggcggccggatacatctcgtggttgaatggggcctgcacccagctcgaaggcatcgacaagcgtattgacgaggctctgaagcaggagtgccgtcgatcgagccgatatgccggagggcatgtattggcttgcatacgagatcatcgcccgcaactgcacctcgagttcctccacgaagggttttctcgttctcagagaactccggtggagatagatcacctggcgaagtcgatggcgccgctggcagagaaggtcttctag

SEQ ID NO: 22576 - DNA, 372 bp, Oryza sativa
  Clone ID: PAT_MRT4530_2773C.1
atggcggcgaacttggcgacctcggcagggttcagcgacgagacgagcgtggcgaggcgagagaccaggctccgtgagttgcgcgcccgcgcggccatgggcggaggatgtgaggatagctcgccgcagggatggcgcgacgcggcggagcatcgtttgccctggaagaaggcggcggcggcggcggctgcgaaggcggcggcggctgcgggcggcggcggagttcggggtcgccgatgcggccgtgatgcttctgcaaagcggcagtcgcaaatggccgaaggggtcaacacgttgggagtatctgaaccgtcggatacctggatggacggctctgattttatccttcgtggtacagaagagaactggtga

SEQ ID NO: 22577 - DNA, 729 bp, Oryza sativa
  Clone ID: PAT_MRT4530_27740C.1
atggcgggcggcggggacgtgaggccggggctatgtgtgaccggccctgggtgcccggccgggatcctggtggccattgactccctcgatctcgcccaaaggcagcgcaaggaggagccagcggagggggctgaggacctcgtcgtaggatctccgagcaatggggacagacgaggcgagcactggaggcaacgcagacgacgattgcgacggatggcggtgcagaccacgatgacgatggcagccgcagcagtggctgcgtggatggcgggccagacggacttcagcgaggacaacagccgcaacagtggctgcgtggatggtgggctcaatgataaccgcagcgggcgagacgaccacgagaggcaacacaaacgacagttgcgtggatggcgggctcgaggaggcggcagctatagggcgaccatgaacgcctcgtacgagcagagaggggagggaaaggaggagggtgtgaaggtgggttccactcgggttttatccaacgtgacggctgagtcagcatgggccctacttgtcaggtccacagcgtggcccctgtcccgcggcggcaccttcaccgcccgcgtcggcccggccaatgtcgacgccggcgcagcctccgccgctgtcaccaccacgacggccgccgccacggcgaacagcaacagcagtgaaaccctcctccgtattgcaatgtggcgggagatcgattggcgggtagtactatga

SEQ ID NO: 22578 - DNA, 415 bp, Oryza sativa
  Clone ID: PAT_MRT4530_27741C.1
ggaaaaaacaatttttttgcttacggggggcccaaccgcatgggataattattttcccgggcgggccacttatcctgggcgggcaaattataccccccacatggaacaaaagaaaaccaaaaataaaaaaaaacgaaaattgggggcctggacgcaaccggccaccgaaacttgttggatctgggcggggcccgttcgtcgcccccttgccggtcgttgccttgccacccccgcctggtcgccgttgtcgctgttgggcccgtccccttcgacagcgaaggtgaagggggcccttttgggcccctgcggggagtccgggcggcaaaaccaggggatgatggaggcggccttgcggacccgggggcgcaaaaggaggggccctaagaaccgcccggcaaggggcaacggcaaggtg

SEQ ID NO: 22579 - DNA, 471 bp, Oryza sativa
  Clone ID: PAT_MRT4530_27742C.1
tttgtttttcctatattgaaggaccatttaccaacaacaactgagtccaattacaacccggtcgattgaccatttgacagaaatcagccgtactttcggattctttaattcgccagccgactaattggtcacaatgccctaagagtcggttatgtgtctgtatcatgatgtaattttttttactgccatatatgctaggtcaggccaatgaccgcatccttctttctgccttaaaatatgttaccatctgccaagtgtcaacgaccatacaagcttactcactttccctcttgcagtgagttctctcgtatccacacgctcaagccgaagatggcatcctctgtcatccttttttagagaaaattgattaaaacccggcctctacatccaaaccggatgtacgcagtcaaggcatcctgtgtcatctacctcacccaagtacctttgcagctgtgctagctagttcttgat

SEQ ID NO: 22580 - DNA, 309 bp, Oryza sativa
  Clone ID: PAT_MRT4530_27743C.1
aattcggcacgaagaactggatcctgaagaagtcawttctcgtggacaagcgaacattgtcacacamagcgaaaaatttaattgatgtaatgtctggagagatcctatgagattgcattaggatgtggcasggttcggtaattgtctggtaaatacctgcaggtttttccttttctctygagtatwttgtatgtgcactwaatattctatwcatgttttgtcaacattctattatgtgaagggkgaatcgtcccyacattcgtctataaagtctgttatachacttgtttgatggggctgttgttkcta

SEQ ID NO: 22581 - DNA, 186 bp, Oryza sativa
  unsure (1)..(186): unsure at all n locations
  Clone ID: PAT_MRT4530_27744C.1
ggtgaggattcggcacgagtctccttctnctncctccaccattaattgttcatccatcatcatcatagacataccatatatacgcacgcatatctcatctcatctgtaagatggatcatacatagtctgcagcagtgcatcttgtatctttctacctatagcctatagtttgcttctgaatttaaa

SEQ ID NO: 22582 - DNA, 410 bp, Oryza sativa
  unsure (1)..(410): unsure at all n locations
  Clone ID: PAT_MRT4530_27745C.1
gacccacgcgnccgcggactcngggcggacgcggggtcgggcgcgggggcgcgaccgagaagggctccttcttctggacgaggttcacgccgccgcccgccgccgactacggcgggaactcgcgcgtggtggccgtccactctacggtcacctgggacgagcattggggcgcccccgagagcatccccagcggggggggggggggtggtgtttgctggctcctggtgcgggccctgccgctgctgcgtgccggcctttaaggacttggccgtggcgcttgctgacgccgggttctcgtggatcggtgtgtgcgaacttttatgagtgtcaacccttagcacagagttgtgcacgcccggcctttggggtagcgctgcgcgggtcggcgggtggttgcggcgcctggtgct

SEQ ID NO: 22583 - DNA, 246 bp, Oryza sativa
  Clone ID: PAT_MRT4530_27746C.1
atggcgacggtgaggtctgattttggcacggcgtttcgtcggtgggggcagagtgtggtggagtgtgctgttgtgtgtggtccaacacctaggtaccaggcactggatcttattgaataccgtatggtaacaagtatgacacattataggaagcagggcctagctgcagccctatggtgcagtccagcaaggcttctagcaaaccttgctagcatggtcgtggctacctcgtcgaagaagcgctga

SEQ ID NO: 22584 - DNA, 285 bp, Oryza sativa
  Clone ID: PAT_MRT4530_27747C.1
atggcggcggcggcgggtggaggaggaaacatcctccataacccgcagtcgcgatacgtttttatggtgatcgtcggaggtggtgcaggacacggggagggaggaggaggaggatttggtgatgaggatgacagggagctaggttggagatttctgagtgcttcgtcggagctcgtgggcaagagcgaagtgctgaagcatctgctcgaggccagggagctggtggtgaggttggtggggcgcgggagtgcagtgcctggtgtggctgccagcacgtgcgagtga

SEQ ID NO: 22585 - DNA, 387 bp, Oryza sativa
  Clone ID: PAT_MRT4530_27748C.1
atggcgacaaggactgatgtctccactactcaggatgcatatggctacggccatagtatatatattatattacatgctttttgccccttatttggttcccttccttcccggaaggctcctgtgagttgcttctttctagagttcaattaccatgttggcgctttatcttcaacaccatggacgaatttactatgccatgtcctaagaaggttatgcatgacaagaaggtatcttcaagtttatgaagataacacttttaaggtgccactcacaaattgttcaattataatgggggaattaggttttcttattgttattgggatcaatcagatatgtgttttctatagtttgctcatggctgtgtacactagcaaatttagattgtaa

SEQ ID NO: 22586 - DNA, 3479 bp, Oryza sativa
  Clone ID: PAT_MRT4530_27749C.1
ctgcccggcgccgaagacgacgaagacgacgacagcgccgctgcagcatcatcaggattccccatggggcaggtggccacggcgtcgtccccgtccaggcccagcagcagcagctgcagcagcaggaggagcagcactgccgctgccactgcaactactggccgctgaatcagtgacgaggaggaggaggaaggggacgtgtgccggatctgccggaacccgggggacgacgagcacccgctccggtacccgtgcgcctgcagcggcagcatcaagttcgtgcaccaggactgcctcctccagtggctcgaccacagcaactcccgccagtgcgaggtttgcaaacatgcattctctttctcgcccgtctatgctgacaatgctccgtcaagactccccttccaagaacttattgttggtgttgggatgaaagcgtgccatgtgcttcagtttgtcctccggcttgcctttgttctttcagtttggctcatgattatccccttcatcacttactggatatggaggttaacattcgtgagaagtcttggtgaagcacagaggctattcttgagtcatatcagcgctcagttgatcctaagtgactgtttacatggggactatataagacacttgcgggaacttggagggcatgatgctgagagggatgatgggggccgtgaaaggcatggtgcacgagctgtcagaaggctacctggtcctaataacagggttcctgctgcagatggaaacgttgacgaattagcagaagcccaaggacttggtgctggtgaacttttgagaagaaatgcagaaaatgttgctgctcgattagaacgacttgaagctcaagtcgagcagatgctagatggtttggatgatgcagatggtgcagaggatgttccttttgatgaacttgtaggcatgcaaggccctgttttccacttggttgtagtagtatgtatgtatcatacatcatagcttgcagaagtcacgaatattgttcgattatgttgtatgttttgggcttgtgagaacgttctggcccgcttttcttgtttcctgattgttgttgtctgcttcccatacctatagggaaggattttcctgtactgtctatcatggttcttctctttagcccctcgtctgatgctgacaagaatgatgcaatttacggtagaagctactacagtgtctaacgatgatttacacaagcatgcactcattcctcgtgatcaggaaggagacttgggtctgaggttcaggcgccatatcatgcgtggaaaccaaccgcaatcattgaagataaatgccactggtcttactgtaatgcaggcctctgggaagagtagtctgataaaaggaactgctattggctcatcctatctttctgatctgacaactcttgctgtgggatatatgtttatcttttgccttgtgtttttgtacatggagcttttgcttgtgcttagtaatccgcattgtggagtgaaatgagtccgtcagttagtgataggaaaagtaaggattgttgtacaacaaagtccaagggaagaacagctcaaaaaaaagaatacacaccagaaaactcatggtaagctcacttccctgtggctatgtgttgctgactgtaaatatagacgaactaccccacacaatttattgtggttctgatgtgtaatggacaatgaattactcctacagtagtacataaagatggatagtgctgtgtatggaagcttgattgtgatacttgttttcttacctgtcaaactggccatgcgagtagctccatcgatttttcctctggacatcaccatttttgacccatttacagagatcccagttgatgtgcttctgttccaaatatgcatcccgtttgcaattgagcacttcaagcctcgtgcaacaattaaagcacttctgcgtcattggtttgctgctgttggttgggcattaggcttaactgatttcttactgccaagacatgaagaaaatggtgggcaagagaactggaatggcagagcaggtagagatagggtacatggtggccgggaaatggttgccccacagctggagcagcgtatgatacaacatgttgctgataatctgaatggcaggggtaatgccaatgacagtaacgaggtcgctgaagaatctgatgttgatgaccagggagattcagagtatggtttcgtccttcggattgtgctcttgcttgtactggcatggatgactctgctgatattcaatgctggaatgattgttattccaatctcacttggtcgtttagtttttgaggctattccccgcctgccaatcacacatggcatcaaatatgcaattgattacattcgatcacgacgactggccttcctagtgcaacaaatctgcaagtggtgctctattgttgtgaagagttctgctctcctgtcaatatggatctttgttattcctgtgttgattggactcctgtttgagttactggtcattgtacccatgagggtgcctattgacgagagtccggttttcctgttgtatcaggattgggctcttggattaatattcttaaaaatatggactaggctggttatgttggatcaaatggcacctttggttgatgaaagctggaggacgaagtttgagagggttagagaggatggcttctcccgtttgagaggtctatgggtcctgcatgaaatcataatgcctattgtcaccaagctccttacagctctctgcgttccatatgttcttgcaaggggtgtcttcccagtgcttggttacccactcattgtgaactcagcggtctaccgtttcgcgtggcttggctgcctgatattcagcgcgctgttcttctgtggcaagagattccatgtttggttcaccaatctccacaattccattagggatgaccgttatctgattgggcggaggctgcacaactttggtgaggactcactccattcaagtgaacctggaacaactacagcgtctgacgatgatgaacacgagcaagcactcattcctcgcgatcaggaaggagagttggggctgaggttcaggcgccatatcatgcgtggaaaccaaccgagaatggctgcataagcagggacgagtttttggacaaagcaaggggcatatgcacgatctgacttctgccctggagcttctgcttgtgattagtaatccgcattgtagagtgaaatgagtccgtcagttagtgataggaaaagtaaggattgttgtacaacaaagtccaagggaagaacagctcaaaaaaaaaagaatacacaccagaaaactcatggtaagctcacttccctgtggctatgtgttgctgactgtaaatatagacgaactaccccacacaatttattgtggttctgatgtgtaatggacaatgaattactcctacagtagtacatcaagttggataaaaaaaaaaaaaaaaaaaaaaaaaaaaaaaaaaaaaaaacaaa

SEQ ID NO: 22587 - DNA, 1122 bp, Oryza sativa
  Clone ID: PAT_MRT4530_2774C.1
ctatacgcctacgatccaacggtacagcgtgacgaagcccggctcgtcgtcgtccaccccgcgcggcgccgacatcaccgccgcctccgggtcccaccgccacgagtcctcctgccggttgctgtggtggctctggctccaccgcgcgctccaccgcccgctccaccggccggagagggacgaggcggaggaggcgaggcggtccacgtactcgcgcagccatccccgcgaccccgccgcctccgccagcgcctcgccgggggccggcgtcacggaaccggtcgttgacttggccgccgcggggcgcgcgatgcgggacacgacggcctccacctcctcgtccacgcggtagtcgaaggacccgagcgagtaggtgcgccggtcgtcggccgcggcggaggagcggcggttgctgatgctgccgatctcgacgcggaagctcctcgagttgttgctgctccgcgagtcgaggggatcctgttgcgccgcgttggaggcggcggcggcggcggcggtggggagtggcgggtgcgggagcgagacggtggcgcggcagagcgggcaggacggggtggtgcggagccaggcgtcgacgcaggaggcgtggaacgcgtggcggcacgccgggagcagccgcagctcggcctcgggcgcgaacggcgagaggcagacggcgcagtcgggggagctcttgggcagcgccgccagcgccgacgccatggtgaacaccggcagcgacgcgaccagccgctccttctcgtcgtcgcccccccccccccccccccccccccccccccccccttggctcctccccaccgccgacgcggcggtagcctccccagcctcgacggcggacgccgtcgtcgcgcgttgggccgccgccgacgccctgggcagcgggctcggagccgggtgcgacggccgcgcgaggcagcggaggaggaagtggatcgacacggaggcgaagaagacgaaggcgaggagcgcggtgatgatgagaagcgacggggagaggttgagcgaagacgacgacggcgccggcgacggcaatgagggcggaatggtggcggcgagcgggtcgccgccgatggccggcggcgcgggcggcggcagggaggccat

SEQ ID NO: 22588 - DNA, 473 bp, Oryza sativa
  Clone ID: PAT_MRT4530_27750C.1
gtcagttagtgataggaaaagtaaggattgttgtacaccaaagtccaaggaaagaacagctcaaaaaaaaaagaatacacaccagaaaactcatggtaagctcacttccctgtggctatgtgttgctgactgtaaatatagacgaactaccccacacaatttattgtggttctgatgtgtaatggacaatgaattactcctacagtagtacatcaagttggatagtagctagggttggtagacgatgttgtccacacttcatttcttttcatttcttgtgaactttttgtacctgttggtgttggatctttttttttaccgcgtctctgctgacaaggaaggcacacagcagcggggaggggcaacttgtcggttgacttactcggtcggtacgtgcaaggaaacttcgcctgcatttgttcacatcgagatcgccaaggaacatataaaataaatgcttgctgtgtctttgt

SEQ ID NO: 22589 - DNA, 4305 bp, Oryza sativa
  unsure (1)..(4305): unsure at all n locations
  Clone ID: PAT_MRT4530_27751C.1
tcgtccgcgtcaaccacacattctgttcttccagtgccggtaccagcagtaccatatgctgccccctcaccttcatacgcactaccccctgcaggataccctgcagtaccgccatatcaatcctatcctgctagccatgtcccggcgccatatcctacttcagcatacccacatccaccaccatctctgctagctcgcgatgttgagcatgcggcataccctcctacaagtacaacatatcctccacagccgtacccaccacagccgcatggcggacgtcgccgcggaccggcctcccgcggccgagcaggaggaggcgcggccgccctcatccaccgcggcggtggcggaggaggacgaggaggaggaggaaggggacgtgtgccggatctgccggaacccgggggacgacgagcacccgctccggtacccgtgcgcctgcagcggcagcatcaagttcgtgcaccaggactgcctcctccagtggctcgaccacagcaactcccgccagtgcgaggtttgcaaacatgcattctctttctcgcccgtctatgctgacaatgctccgtcaagactccccttccaagaacttattgttggtgttgggatgaaagcgtgccatgtgcttcagtttgtcctccggcttgcctttgttctttcagtttggctcatgattatccccttcatcacttactggatatggaggttaacattcgtgagaagtcttggtgaagcacagaggctattcttgagtcatatcagcgctcagttgatcctaagtgactgtttacatggttttcttctctcagctattattgtccttatatttcttggagctacctctttaagggactatataagacacttgcgggaacttggagggcatgatgctgagagggatgatgggggccgtgaaaggcatggtgcacgagctgtcagaaggctacctggtcctaataacagggttcctgctgcagatggaaacgttgacgaattagcagaagcccaaggacttggtgctggtgaacttttgagaagaaatgcagaaaatgttgctgctcgattagaacgacttgaagctcaagtcgagcagatgctagatggtttggatgatgcagatggtgcagaggatgttccttttgatgaactttacgacattgccatgttgcagaacttcttgcttcttatgggccaatttggaagtgataaatattacttcctccgtcccacaaaatgtgtcgctttaagttctcgatcctctatcaccattgttgactgcgaatatgtgtggtacaccgagtccatcaagcaagctgcacctcaccacctgctttggaggctccagctgctgccgccacgaatcccgccacccctgattgccggtcacgccgcaccctggttgctggctgctgccacaaatctcgccgcccccctgcaggttgccgttgctgcagctgccgccctttgggttgccgccgtcgccaacgtccagtctaccgcggggaaaatagaaggatcgtggggggcggcgaagattggggatcgcgagaaggttctggccagcaatgctatattcctcattgttgtgatcttcgtaccattctcattgggaaggattgtcctgtactatctatcatggttcttctcttcagcctctagtcctatgctggcaagaatgatgccgtttacggaaactgctatttcattggctaatgatacattgaagagtgcacttaatgccgtgaagaacttatctgctgacagccataatgaaggtgtcattggtcatgtcattgaggtggttactcaatcattgaagataaatgccactggtcttactgtaatgcaggcctctgggaagagtagtctgataaaaggaactgctattggctcatcctatctttctgatctgacaactcttgctgtgggatatatgtttatcttttgccttgtgtttttgtacattggatcattggctttactgcggcaattctttgctggaatgaagcatctcatgactatggtcaaagttgcattccttttggtgattgaacttggtgtatttccccttatcatttttgacccatttacagagatcccagttgatgtgcttctgttccaaatatgcatcccgtttgcaattgagcacttcaagcctcgtgcaacaattaaagcacttctgcgtcattggtttgctgctgttggttgggcattaggcttaactgatttcttactgccaagacatgaagaaaatggtgggcaagagaactggaatggcagagcaggtagagatagggtacatggtggccgggaaatggttgccccacagctggagcagcgtatgatacaacatgttgctgataatctgaatggcaggggtaatgccaatgacagtaacgaggtcgctgaagaatctgatgttgatgaccagggagattcagagtatggtttcgtccttcggattgtgctcttgcttgtactggcatggatgactctgctgatattcaatgctggaatgattgttattccaatctcacttggtcgtttagtttttgaggctattccccgcctgccaatcacacatggcatcaagtgcaatgcagctggaaccagatatgcaattgattacattcgatcacgacgactggccttcctagtgcaacaaatctgcaagtggtgctctattgttgtgaagagttctgctctcctgtcaatatggatctttgttattcctgtgttgattggactcctgtttgagttactggtcattgtacccatgagggtgcctattgacgagagtccggttttcctgttgtatcaggattgggctcttggattaatattcttaaaaatatggactaggctggttatgttggatcaaatggcacctttggttgatgaaagctggaggacgaagtttgagagggttagagaggatggcttctcccgtttgagaggtctatgggtcctgcatgaaatcataatgcctattgtcaccaagctccttacagctctctgcgttccatatgttcttgcaaggggtgtcttcccagtgcttggttacccactcattgtgaactcagcggtctaccgtttcgcgtggcttggctgcctgatattcagcgcgctgttcttctgtggcaagagattccatgtttggttcaccaatctccacaattccattagggatgaccgttatctgattgggcggaggctgcacaactttggtgaggactcactccattcaagtgaacctggaacaactacagcgtctgacgatgatgaacacgagcaagcactcattcctcgcgatcaggaaggagagttggggctgaggaagctgagggacacggagttcttcacgcggcaggatccctacgtctgcatcgagtatgccaccaacaagttccgcacccgcacctgcaccgatgggggaaggaaccctacttttgacgagaagtttcatatacctctcattgaggggcttcgtgagctaaccgtcacagtgtggaacagcaacacgctcacccatgatgatttcattggcaatggcagggacaaacatacccaccgcagccgcagggagaaacataccaaccgcagccgcagcgagaaacatacccaccgcagcctcaagtacaaccatacccaccaaagccacagggacaaccatacccaccgcagccgcagggacaaccatatccaccgcaaccatatggacaaacttacccaccacctccaaaaggacagcccacatatccacctgcgccctatccttcaacttatccaccagcaccatattgatatggcacacttggtggactgaagttgtccacatacaaaagcaagtaagcaacaagtgatgatcagttcttatatttatccagggtatccagccttcatcatccagttaattgaaacaaatgaaatcattcctgaagcgattcatgtcaacatcttagcaaccaatggtagtagttaccatctggtatgtatcatatatcatagcttgcagaatgtcacgaatggaatttgttcgattatgttgtatgttttgggcttgttgtaacagtgatccacctttgttctgttttgaggtcatgtttggctgttctgtgactgtaactactgctttttacaaaggggggaagcagtaattctagttctacctgcaactgcctgataagtgttaactgtgaaaagttgcagtagcttgtcgactttgtaccatgttgtttgagatgctcaataaattgctttgtactctaaanaaaaaaatataaaaaaaataaaaaaattaaaata

SEQ ID NO: 22590 - DNA, 1431 bp, Oryza sativa
  Clone ID: PAT_MRT4530_27752C.1
gctgcttgaaacaatgttaaatctagaaagagtcgctcaaaggcatatggtacctgagtttctgcaatcaattcgaattaatcgattcccttcttttgcatttgcacatctgcagctaatagtacaaactgaataataataagtaagaaaacagaaccccagagggctcgtaaactgaactacagaacattgctactacatatctcctgcttccactaagctcccctcgattcagctcacggctaacactttctcatcgcatctccatttctccatccaagctgctacccacaagtatacatctgttctccaatctgatgaaactcacactgaccattcttgtgcagcatcagaattcagaacacactccttttccttcacataagctgtctcccttccctgtcagattcttcgtcttcttcttcttcctccatacgatcatggagcaacgacagctattgcacggttagtagattgtgacaagtgacaacggctaaaaacgatggaatcagctgctctccagtttcatctcttgccgaatctcaagcacttgttgtgttttacttcggtcatgttattgttcgaggacgacggcgccaactggggcgctttggctgtcttatccttggagagcttctccatcgcgttgatgaacttcctcagatgcctgatgtattcagggtacgtctccaggttgcagtggccgccacctttcacccataagggctcgtacttctccttcgcgagctcccatagccgcttgccgtgggagaaatcgacgatgtcgtctgctgtgccatgtataaccagcactggacagtcaacctgctttattttgtcgatgttcttgaagatatcaaaccaaagtgttacttttaccggatatagaacccgaatgcctgaaagtatagcactgtgaaggacaacccctcttaatttttccaagcgcgaggctaaatgcaatgttggtccacttccaactgattgtccatacaagattagatcctctggttcaatcccgtacaccttcgttaaacagtcataaacagcctctatgtcacagtatgtgttgtattctgatggtttgcctgtagaggccccatatcctgaataatcatagctcatgatgttgacgcggaggtgggcgcggagctcgaggaagaggccgagcatctggccgaggtcggcggcgttgccgtgggagtagagcagcgtgaggcgcgcggaggggtggcgccagaaggcggcgacgacgcgcgtccctcccttggtcggcagcgcgtgcacctccacgccggcgtccgccgacacccccgtcatcctcaccacccctcctccgccgccgccctcctccgccaccagctcgtacgtgggtggctccggcgggaagaaggccagcctcgccgccaccgacgacgtcacgttccccat

SEQ ID NO: 22591 - DNA, 412 bp, Oryza sativa
  Clone ID: PAT_MRT4530_27753C.1
gtttttgttttttttttttttttttttttttttttttttttttttttttttttgtttttttttttttttttttttttttttttttttttttttttttttttccacaagtaactgctttttttggatttttcatggatttttacatttttgggggtggggcataggggttaaacattgttttaataaattgatccctaacaaggttgaaaaggatttttttttttgggtcataaaatgcccggttttttaaaattacccgtgcaaaatgacccccatgcagttgttttccccactttaaagttaaaccttttacaaaataaatttttttttttgtttgaaaacctaaaagctttgaacctaccccaaaatttgttgcaaacgtcattttttgctcctgaggttccaactcaac

SEQ ID NO: 22592 - DNA, 339 bp, Oryza sativa
  Clone ID: PAT_MRT4530_27754C.1
atgaacgaagatcttcacattcttcctgttatcaacaaaagatggtttgtacatcaacaagcattcaggacaaaatactacgccctagcgccgagtagcctcgagccgccgtcgccgccgtcgctccagccgtgcgccgccgccgttccggtcatcgccgtcgctcgggaagaccgccgtcgtggtcgccaagtcgccgccgtcctcgtccgcctcttcgtcgccgccgaagaccgccggagcaccgtcgccgccgtcgacccgatctccgccgccgcttcttcctcgtcgccgtcgccgtccgttgatcttccgccgctcctttggtcaccgggttga

SEQ ID NO: 22593 - DNA, 757 bp, Oryza sativa
  Clone ID: PAT_MRT4530_27755C.1
gtggtgtttccttcctcagcgcgaactggacgggacgaagacgacaaagtcccccaccagcacggtccgaggcggcggatccggcgcccccaaggccggatccggccatcccccacctggatctgcgcggcggcggcgcgagggcttagggtggcgcagcggcgtgcgggcatggtggcggcggcatgtggccggcggcgagacggcaggcagctgcggctcggccggcccggctcgggcgcggagtcggcggcgggcggtggctcggcgaggccggcccgggcgctaaagcggcggacggtcgcggctcggcgacggctcggcgtggccgacccgcgcgcagaggcggcggtggcgtggccggctgcccaaggcggcagcggcagctcggcagcggcgcccccgctcaacctggcagcggcggctcggcagcgcggcggcgtgcgggcgtggtggcagcggctatggtagtgctaagggagctggcggcggtgggttgtcttcctcgttgccggtcggcaccatcgcccttcctggagctcctccccttctttgcggggagattctaggttggattgaggcggcaactcgtcggcgggggaagctcaggctgtcgaagcaatgacacctagtcctgggttcctctttggcaaaaactggcgaggcggccggcgggtggtggaacagaggggtcctgggccagctctcaggggtggtgctcacggtaggggccttgtggatgtgcaggccggaggca

SEQ ID NO: 22594 - DNA, 834 bp, Oryza sativa
  Clone ID: PAT_MRT4530_27756C.1
atgaccgccggcggcggcgggcggcgaaggcggcaaggaggaggggcacagcgcgtcggaggcggtgagcatcgtgctccgcatcgtgacggtggggttgtcgctggcgtcggcgatcacgacggcggcgtcgacgcagtgcgtccgcggcgacgacggccgcgtcgccgccacggactcgtacagcgactaccactcgttcagatacgtggcggcggcggacctggtgtcggcggtgctgcagggggtggcgatctacctggaggcggtgaggaaggaggaggcggcgagggtggtggagctcatcgacaagctcgtccaggcgctgacgtcctcgtcggccgcgctgctgctcgccgtcgccgacatcacctcctgcggcctcccgcgctcctcccgcggcggccgcggcggccgcggcggcggacggcggcagggcggcggcctctgcagccagcccggccggttctgcggccaggtccgcgtgtcgtcggccttctcccttctcgccgcgacctccttctccgtctccgtctacaccaggcacgccgccaagcgcgccgccgccgtcatgccgccgccgacgacgaagaagaagaaaccgcagtcctcccgtcgtccgcccgccaggacacctccaccggaacgacgagagtccccttcgccgccgaggggtcgtccgcgcacgccgccgccgccgcctggttcaccgaagaagccggcgactccgggcgcggtggtggtggagcagccgggccctcccacggatcaccgcgaagcaggcgaactggtcatggtggacgtggtggtgtggccgccgacgatgcctcttag

SEQ ID NO: 22595 - DNA, 555 bp, Oryza sativa
  Clone ID: PAT_MRT4530_27757C.1
ggggggagacagcccaagcttttattaataataatacgcggttacccatacgtacataaacataccccggggttaactggttttttaaacgggggccaagggaagggcccccttcaaaggaacacatatttacttactcgggaaaggaaaaaagggaaaagcccccaagttgccacttggcccaaattacgggggggtacttagcttaacttaacctacttgaatcccaaaagctggtggtggtggggggggtgttaataaaaggtgggggaaaaaaaactcctcaatccccgggatggggcccatgggctcaagggtttttttggggggctccttgtcaaccccgatggccatgaaggcctgtttgccggggaagggccggcccaccctcaaaaaactgatgttgaccttcctctggccgaggatgttgccaaccttgccgataatggcggggtgggggatttggcggcacagagaaagggtgccctccagggtgaggtccaccttttagggccccacaacggggagggggggaacgccgtacttgaccctccc

SEQ ID NO: 22596 - DNA, 476 bp, Oryza sativa
  Clone ID: PAT_MRT4530_27758C.1
gtccgaaaaaaaaaaaaaaaaaaaaaaaaaaaaaaaaaaaaaaaaaaagcttacataacacaagaatgaagacgaaataagctcttccttcagtgcacacataaaatactattcagtggcgcgccatttaacaaagtttactgcgtgggtaaatccctcgacgttacctagtgtaaaacgccttgccgcccatcctcttgtggggggggggggcgtcataccttttaggcccgctgcgatagtcctgaggagcactggcccagcctttctggccaatggcacaccccctttagcggctcattaaccgcgccctgtgtcgtggttacccccacggtggccgttgttctttccagcgccctagctcctgctcttttcgctttcttacctccctctcttgtctctttcgccccttttcttcgcgtcgctttagttcggtggcttcgtggagggtttccgttggagggctttacggtgcc

SEQ ID NO: 22597 - DNA, 1247 bp, Oryza sativa
  Clone ID: PAT_MRT4530_27759C.1
caaaagggcaactccgtgcccttttatgtgttcaagggtaaagaagagcgagcttgaatgatagaggatcaacaaaacccaacttgttttgcagcaatacataatagctgcataaagtcacatccaattaacactgatgttccctccaagggtacaatgcaatttctcagtaacacccgggttattgggattcgacccacggatagatcgagcggccccctttatagcagggactttcaaatttttttttttttttttggtcggtcagcacataagtagggttcgtagaatgatggaaatttatgtgcatgtacaatttggccgtagaagaaagaatacaacggttataagcaagggattatcaagtccacgaggaagaagcagaggcaggcaaattacatagtattatacggattataaagaagaaaccaccaccattacactaatacacacaaagctcgatcaagcagcttaattaatttcttccacatgtacgacatgcatcctctcctcactccgtgatcaatttaagatgattctttgcagctccagctcgacgacgatccatccgaattaaaatcatttgacctcctggatctcgtccagggcgtagttgttggtcgacacgccggcgtagttcaccttggcgaaccgaaccaccaccgggtagcgagtgttgggatcctgatcaacggtgacgacggagccagtgccgttgtaccagtaggactccctcctcaggatcttcaccttggtgcctctcttggggccaatgggaggcggcttggcggcggcgggctccttggtcgccacggccgcctcggcctccgccggcttctcctccgccgcgggcggcgccggcgtgtcggaaagcctacgagtgcatcgcggggggaggcgccaggcggctggggggaggaagagggaggtggcgcggtagggcacgaggatttgggcctgggacagttggagaggcacgaagcccgggaggtgaagctccgccggcgcgtaagggtggggtgggggtgccccattcctggcttcctcccgatctggactggagaggagcggattgtcgaggtggccgacgccacgttaatggtgctcgccatcgccgccgccgccgccgccgcgctcgtgtggatttcgaattccaagtgaagtgggagcaggtggtggaggtggaggtggaggtggaggaggagagtgaggcgtaaaatggcgcggggagattatctcccggccgg

SEQ ID NO: 22598 - DNA, 1959 bp, Oryza sativa
  Clone ID: PAT_MRT4530_2775C.1
atggcggcgcatcggtgggcggtgtgggcggtgctgctgctgcggctgctcgtgccggcggcgcgggtgctcgccaacatggaagttttgccaacaacccttccttgtgtggtcctgggaccacaaaaccttgccctggtgctccccccttttccccacctcctccatataatcctccaactcctgtgcagtcaccagggagttcatctagtactggagcaattgctggtggagtggctgctggagcagccttgctatttgctattcctgctattggttttgcatggtatcggcgcaggaaaccccaagagcatttctttgatgtgcctgctgaggaggatccagaggtccatcttggccagcttaaaagattttcactacgagaactacaagttgcaacagataccttcagcaataaaaacattctcggaagaggtgggtttggcaagggggctgtcctatttacatgatcattgtgacccaaagattatccatcgtgatgtcaaagctgcaaatattttattagatgaagactttgaagctgtagtaggggactttggtttggccaaactaatggattacaaggatacccatgtaacaactgcagttcgtggaacaattgggcatattgcaccagaatatctttcaacaggaaaatcatctgagaaaactgatgtatttggttatgggattatgcttttggagcttataacaggacaacgtgcctttgaccttgctcgtctagccaatgatgatgatgtcatgctactggactgggtaaaaggattactcaaggagaaaaggctggagatgttggttgatccagatttacagagcaactacattgatgttgaggtagaatcactaatccaggttgctcttctttgcacacaaggctcccccacagaacgccccaagatggcggaggttgtgaggatgcttgaaggcctccacctggctcaaagccggtggcatactttcccggtgatggcagcggccggcgagctcgcaaacgacggcggagacgcaagtccggtgaccccatgcccgctagaggtagcggcggcaatgcagcttctcttcctcttcctcccccgccggtctcccctatcctccctcgattgtggcgtcgtcccgcggcagctcgcgagtgcatgcgcggcggaggtccaaaggaccggaggcggggacgaagcgagcaccgccccccgccagatccggaggcggagtgccgcgtgcggcgtcgcccgcggcggcccgccggcgggagtaatgaacaccctcctgtccaagctctccaagattttggaggacaaatacacaaagctcaaaggagtacgccgtcaaatcgcattctttagaaatgagttgagcagcatgaaggctgccttggagatgcttgaaactgtagaggaacttgatcccctccagaaggaatggagggacacagtgcgtgagctggcttatgatatcgaggactgtattgatcccttcttggttcttgttgatcagaagcaagatgaacaatcaacattctttaaggggttctcctacaaactgaagaagatgaaggctcgccatgagatctctaatgagattgaagaactgaagacacgcgtgatagaggcaagcaagaggcacaagagatataattttgttggtctacaatccagccatggcacttctggtattgaccctaggctgcgagcactctacgttgaggttgatgagcttgtgggaatcaaaggaccaaaggagcatgtcatggagtggtttgccaaggggagaggtgatgtagaagtgaaggccatccgccactttgtcaaccaatggcaacaaatcatccttaatggtttgcgagttgtgacggaagggcaagataagagcaaggaaagctcttcacttcacaagaaagctcagtggagagaacttccaagtcttcctcggaacattggatag

SEQ ID NO: 22599 - DNA, 703 bp, Oryza sativa
  Clone ID: PAT_MRT4530_27760C.1
gaagaaagaatacaacggttataagcaagggattatcaagtccacgaggaagaagcagaggcaggcaaattacatagtattatacggattataaagaagaaaccaccaccattacactaatacacacaaagctcgatcaagcagcttaattaatttcttccacatgtacgacatgcatcctctcctcactccgtgatcaatttaagatgattctttgcagctccagctcgacgacgatccatccgaattaaaatcatttgacctcctggatctcgtccagggcgtagttgttggtcgacacgccggcgtagttcaccttggcgaaccgaaccaccaccgggtagcgagtgttgggatcctgatcaacggtgacgacggagccagtgccgttgtaccagtaggactccctcctcaggatcttcaccttggtgcctctcttggggccaatgggaggcggcttggcggcggcgggctccttggtcgccacggccgcctcggcctccgccggcttctcctccgccgcgggcggcggcggcggcggcggcgccgcggcctcctcctcggcgcggaccaccaccctcctcctcccgaccctgttcgccgcgaagctcacgcggctggccccgccgccgccgctgccgccgttcccgccggccagcaggaacctcgaggtggccgacgccacgttaatggtgctcgccat

SEQ ID NO: 22600 - DNA, 905 bp, Oryza sativa
  Clone ID: PAT_MRT4530_27761C.1
ctagtggatccccgggctgcaggctctcatcgactcatttgcttgcatcttccaaatcttgcaaagcaacaacaatcctagcaagtttagctaggcgaggtatagcagccatggcttccaggttccagctgattttgtcgaccttcgttgtcattgccgctgtcaccatgcttccacgcccttgcgcttccatcgagttccaccgcaagctctccagctggtccaatggcggagctacgtggtatggcgctgcaaatggcgccggaagtgatggtggtgcatgtgggtaccagggtgccgtcttccaggcaccgttctcgtctatgatcgccgccggcagtccttccatctacaagtctggcttgggctgcggctcttgctaccaggtgaaatgcactggaaatagcgcttgctcgggcaacccggtgactgtcgtcctcaccgacgagtgccccggaggcccgtgcctcagcgagccggtccacttcgacctgagcggcacggcgttcggtgccatggcgaaccccggccaggccgaccagctgcgcgcggccggcgtcctccaaatccagtacaaccgcgtgccgtgcaactggggcggagtgaagctcaccttcgtcgtggacgtcggctcgaaccccaactacttcgccgtgctcgtcaagtacgagaacggagacggtgacctctccggcgtggagctcatgcagaccggcgccggcgccgcctggacgcagatgcagcagtcgtggggcgccgtctggaagctgaacgccggctcggcactgcaggcgccgttctccatccgcctcacgtccagctccggcaagacgctcgtcgccagcaacgtcatcccttccgggtggaagcccggcatgtcgtacatatcgacggtgaacttctaa

SEQ ID NO: 22601 - DNA, 1254 bp, Oryza sativa
  Clone ID: PAT_MRT4530_27762C.1
acaaaatggcaactccctgcccttttatttcttcaagggtaaagaagagcgagcttgaatgatagaggataaacaaaacccaatttcttttgcagcaatacataatagctgcataaagtcacatccaattaacactgatgttccctccaagggtacaatgcaatttttcagtaacacaagggtttcaattgcaggaacaatgatgttgttcatagcacaaatgtctattaatttccaaccaaactgtgactaaggtgcaccctttgcctatttagtcttcaccttttcaccttgaaatgctgcacaaatcttcttccagctccttatggcgatcatagttggtataacaacccacgagctgtttgcaccaatgaaataagcccagaagtagaacgggctagtccagaagttgaagccatccaagtaggctgtaataaagtacaccaggcatccatagagctgaccaagacagacagtgaactggaggatatggctgtaggacttgcccgatgcgatggcatagacagcaaggagtgaagcagggccttccaagacagctgtaattccttcaactgtaacagtagcagggtctctggcgacatatctggagtcacctttgctgtactctttccaaacttcatcgaagtaagaagggttttggttggagaagaaattaggagcaaagacaaaggttccctcgatgataatgtgggtgaggccggtgaaggcccaccagcacatgagccagcggtcggtgtcggaaagcctacgactgcatctcccggagatgagccagacggcgaggaggaggaagagggaggtggcgaggtagggcacgaggatttgggcctgggacagttggagaggcacgaagcccgggaggtgaagctccgccggcgcgtaagggtgggggtgggggtgccccattcctggcttccttccgatctggactggagaggagcggattggatcggatcgagcaggtcgtcggggaaggagtgagggggagtctctctctctctctgcccacgtgcaaggtaggtcaatgccgccgttcccgccggccagcaggaacctcgaggtggccgacgccacgttaatggtgctcgccatcgccgccgccgcctcctcctcggcgcggaccaccaccatcctcctcccgaccctgttcgccgcgaagctcacgcggctggccccgccgccgcgctcgtgtggatttcgaattccaagcggacgcgtgggcggacgcgtggg

SEQ ID NO: 22602 - DNA, 390 bp, Oryza sativa
  unsure (1)..(390): unsure at all n locations
  Clone ID: PAT_MRT4530_27763C.1
ctcgacatggagaggcagcncgccggcgcggacttcctctgcgacggcgtcggcggcggcggctcggagcgggaggctgcggctgcggctgcanngcggcggccgtgtcggcaccgcgctgttcgaggacgggagggtgcgcccaccgcagccgcagcaacccgccgccgaagaacgtnggcggtggcgtctgcaganagcgacggaggggctcctcctcctcctcctccgncggcnacgcgcttccttcgtcatttggcgaagnttccggtttttgctaaccggaatcttcaagcggctggccccgggtaaaccccggttcggggggtaattnttgtaattaancaacctttttaagggggtaatnttttaaaatnggagttaaacctt

SEQ ID NO: 22603 - DNA, 514 bp, Oryza sativa
  Clone ID: PAT_MRT4530_27764C.1
aattcggcacaggagatttttcggcatgtccctatgctaaatttggagtctggggcttttggtttccatattcagtttatgtcctatgctaaacatggtctaattccaaactagtggtgctagaatagccgtttatagataaatttggacctaatatgaaacacaatgttttttcaatgcttttctgcttgcaatttagacttctacaagtagacagttcttctttgaaagaaattaggactgaataaatttccagttcattaattctgcaggctgaacatttttgtgcttagtgtgtttccatgcctccaagaaatttcatctatgcccttacttggagtagtaatgcaatgcactactttgttcataaatttatggacatatcataatcagatgaaccttggtctaatctcttaatgttgtttggatttttgtcataaatttgccaaaacagttgtgttcaataggaatgagttttatgcacttcttaaaatttcatgtatttatttcattc

SEQ ID NO: 22604 - DNA, 267 bp, Oryza sativa
  Clone ID: PAT_MRT4530_27765C.1
ctgctgatgatgttggaaggtcatgatagactatttgttggctgattgaaagcggatgtgcttggctgtggatgcacagttggtggtgcctgccttgatgcacctaccggcatattatgagtatgtttttctgggatatttccatctaataaagtacttgctatttgactatacactctgttttggttcctgtttctctatcatctggttacttcccacatgctggctacctttgatctgtcatagtaatatttcaacatctggccc

SEQ ID NO: 22605 - DNA, 207 bp, Oryza sativa
  Clone ID: PAT_MRT4530_27766C.1
atgctgccccgaggcccttacccggccaccacgtggcggggtgagtgggcggagcaggaggcgctgttcagcgtcataaatgagcggcaccccaaccgtccctcactgcatttaatgcggcggataggacaggtggtcgtgcccccacgtcccgccctgtgtcaggcggagtgggggcaggtggaggacggcgctggccccacctag

SEQ ID NO: 22606 - DNA, 422 bp, Oryza sativa
  Clone ID: PAT_MRT4530_27767C.1
gcggcgtcgctgtcggtgcacgaggggatcgggaggacgctcaaggggcgcgacctcagccgggtccgggacgcggtctggaagaagaccggcttcgaggactgaccggcgagctagctgatcactcccggtggttggcctcgccgcgcagacgtgcagtaggtttaaaatgagtacttagtagtactaattactttattctcttttgttcttatttctttttctttcgccatggacaagataagaaattgggtagtattcctagtcctagaaggctagatgcaagagaggacaggaagagtgggtggtttgttcaatcaaggtgtgacaattttgagggcacctggagatggttggagttggttgatcagctgatcgatcctgtattttaaaaaaaaaaaaaaaaaaaaaaaaaaaaaaaa

SEQ ID NO: 22607 - DNA, 234 bp, Oryza sativa
  Clone ID: PAT_MRT4530_27768C.1
atgaaccaggttcaacattggaatcgaagcggattcgacaaagagttagattcgaagaacagagtatgcatcggctgtggtggcatcggttggagtctgcatcggctgagatgaatcggacagaggacagctgatacagccgatggagttggtatagccgattctgatgaaaatggcttcggggctgtttctagaatcgattgacgtgcttcacaaggattgccacgataaaga

SEQ ID NO: 22608 - DNA, 995 bp, Oryza sativa
  Clone ID: PAT_MRT4530_27769C.1
ttcgtcttgtacatgatgtgctccaagagcggaggagaccaagcggcgtcggcggcaagacggcggcgacgacggagacatcatcgtcggtgaccccagggaagtcggcatactccctcccgatgtcggaggagcggatgaacgccacggcggcggcagcggcggcggtggcgcgcgcgacgccggcgtcgctggtggtgctgcaacgatcgggcacggcggcgtcgacggtgatgacactgaacactgcggcggcggcggcggcggaggcggcgaggaagctgcggttcgaggacctgctcaggtcgccggcggagctgctggggcgcggcaggttcgggagcgcccggcgcgcctccacatcgcctccaaggtcgccgacggcatggcgttcatgcacggcgccctgcgcggaggcgacggcgacggcgacggcgcgaacgcgaacttgtcgttctcatcctcctacgaggaggacgaggccggcggcgccatcgctcacggcaacctcaaggcctccaacatcctcttcacggccaccatggagccctgcatcagcgagtacggcgtcaccgcgccgccgccgccgtcgtcggcgccagcggcggcgcttcgcgccgacgtgcgcgcgtacggcgtgctgctgctggagctgctcacggggaaggccacggcagcggacggcgccgagctgtcgcggtgggtgacggccgtcatccgggaggagtggacacgagcagcggatggtgcgcctgctgcaggtcgccatgagatgcatcgacgacgcctcctcgccgtcgccgccgcccaccatgagggaggtcgctggcatggtgaacgccatccgcgaggaagacgacatgtcgctctcctcggaggcatgacatgagtgacactgacgcggacgaacaccaagcacttgaccagtgtgtgcagcaatgcaaaattccccataagactaattcaaatctacatgcatggagagtgaaacaaca

SEQ ID NO: 22609 - DNA, 2179 bp, Oryza sativa
  Clone ID: PAT_MRT4530_2776C.1
gcttcaggacaatagttccttgggctcctgctgttttcgggtcaccgatatccaaggcggcacatcaaggagcaaatcaaccaatatacatcaaaccatagttgtagctggctacattgggccaattggttggtatgaacaaatggcgattcgactaggatggctgataaaaatcactcttccgacggacaagaattagcagcaaactaccagtgcgctgtcatcacctcggccctaggtctctctctaaataatgtgtgactattcccaacaagctctaccttcaaatgtccaaatagagtataccagtgaggccaactgcatcatctgaaagttctgaacctttcccagaggaggccaaagtaataataccatggtttttcctcggccctgatagctcaaccgcatgaaggttgtccgtcgagtcgacaatccactctgagttccgatgagggccaagctctacctcctgccgtactacttctatcttctgccactcctcccatctctcggcaaggccatcaccttcaagcatcctcacaacctccgccatcttggggcgttctgtgggggagccttgtgtgcaaagaagagcaacctggattagtgattctacctcaacatcaatgtagttgctctgtaaatctggatcaaccaacatctccagccttttctccttgagtaatccttttacccagtccagtagcatgacatcatcatcattggctagacgagcaaggtcaaaggcacgttgtcctgttataagctccaaaagcataatcccataaccaaatacatcagttttctcagagatatttcctgttgaaagatattctggtgcaatatgcccaattgttccacgaactgcagttgttacatgggtatccttgtaatccattagtttggccaaaccaaagtcccctactacagcttcaaagtcttcatctaataaaatatttgcagctttgacatcacgatggataatctttgggtcacaatgatcatgtaaataggacagccccctggcggaacccaacgcaatccttcttcttgttcgccaatcaagtggaggttccgatggtggccgttctctaagacgtgacgcaacgcttccattagccatgtatggatacacaagcaacctttctgtgggtgtcatacagaaccctcgtaaacgcagcagatttctatgtacagccatgctaatcatctcaacttctgtttgaaactgtagttccccaccaggtgttctctcctcctttagtctcttaacagctactaaagaaccatctgctaatcttcctttatagaccttgccaaacccacctcttccgagaatgtttttattgctgaaggtatctgttgcaacttgtagttctcgtagtgaaaatcttttaagctggccaagatggacctctggatcctcctcagcaggcacatcaaagaaatgctcttggggtttcctgcgccgataccatgcaaaaccaatagcaggaatagcaaatagcaaggctgctccagcagccactccaccagcaattgctccagtactagatgaactccctggtgactgcacaggagttggaggattatatggaggaggtggggaaaaggggggagcaccagggcaaggttttgtggtcccaggaccacacaaggaagggttgttggcaaaactgataggggtgaataatgaaaaggaaccagttgatggaacttctccagacaaattgttgtttgaaagatctagaacttgtagggcagtgatagcagttagtgatttaggaattgaacccgaaaggctgttattgttaagacgcctatccaagtttgtgaggtttccaagttcactaggtatcgttccgcttatgttattactgtagagctccaggtattgcaagttttttagttgcccaagttgtgggaccaaagtgcctgatagtgcagcattcccaagatcaactctgataacactgttgtcgttattgcaagtaacatgaaaccaagtgcacggattgaccagagttgggtcccaactttgtagaacattattaggatcaactaaattagtcctcaagctatgcaatgcatcaccttccatgttggcgagcacccgcgccgccggcacgagcagccgcagcagcagcaccgcccacaccgcccaccgatgcgccgccat

SEQ ID NO: 22610 - DNA, 2499 bp, Oryza sativa
  Clone ID: PAT_MRT4530_27770C.1
atgggtcttctcctcgaccgagggtcttttccaccaccatggatcttttccatagcaaatagtcttttccagctcgaccaccctttccgacttatccgcccctttctgatcgaagtgttaaagatattcaaactcgagttcccacaacttacccccaatgtgcttgtgcgcgtgggaatcttcgaatggatgattcggagttgtggtgggaatcctcgtgccgaggattttgcatatttccacagcatccgccgctacaccaagcaaaattcgaagttcggttgtctcaacttctccccccattcgaagcatggatgcccttggccagccgtacttgccattcgaattaaatgggggaacaaatggcagtctaggtggttttaccatcagatccctgccaaccttcttgctgacaaagagtgtcctttcactttctcttgcaagatcgctaaggttatagtcgaaccgccagcggctcttacagcggattttctttctattcgctctcgaatggaagaacttgtctcaaagttcagcgttcgagacttggtggaagaatttgtttgccttggcattcagccactcacagccgagtggactattctcttaggacaagtgccaagagaagccgcttcgactttgcctccctttgaggttgatccgaatactgttattcctacagacattgtccacccttgtcggaaatatcttagtccttataccaaagatgagcacgcaaagtaccaatccttgcaaaatggtttaaggatgaatcgagtgatgtccgcccttggactcgatattcctgctcgagttcatcctgagattgtccctgactcgggcaagaaaaagaaaaagaagaaagctgcgaggaaaatgtcttctgatgaagacgatattgaagttgaggaaaacgaagaaaatacagataacgacggtaatgatgggaatgaagagcatgtggagaatgaggaaaatgaagggaataaatccggcgaaggtagcttgagcagtgatgatgactcgagtgacagctcaagcgatgactcgaattcatcgtcagatgaggaaattgcctcggtcgtccctcctgcccaagctgctccaagtgttttgaagaggaaaattagtcctagcggttcccttcagattgttgtcgacagtgatgatgagattgacaaagacaacactctagttgacatttgtgccataaacgtcactccccttcgagctgacgccagccttgccacgcctgctaatgctatcgcccctttggatgtgcttgcatcggttgcaacggtggttgagaaaaatgtcgaagctgatctgataatccaagatgttctcggtggatttagtgagcgatgcacgaaaaatggtcgatggctaatgggactacctaatttctccgatttgggggaaaatagccatctcggttcaaatttttgcataaattacctgaaatatcgccacccgctcggttctgttggggatgagctcaagaaaatactcatcactcccgaactggagaaggaatttgtcgaggaaaacgatcttatgtcttcctgggctgcacttgatgtctctgccgctcagacttcgaccatcgcctggcttcaatgtggtgtttccatgaaagcactcacagcaatatgtgtccggcggaagaaatcgctcgaacgcatagctaaacttgagaaagacagagaatttctccgccatgaagtcgagcgtgtctcagatgagaaacaggttgctgccgatcttgttcgaaaacttagcagcgacaaaaagggtttaatcgacgagaaaaggtctttcatcgaagagaataaaaaacttcatgcccacataaagattctcgaacagtcggtggctgatcaccaagaagtttctcgggaaagagccatttctgcagataagcttaaggagcaacttgctgcttcagaaaaagagaacaagcagctcgaactggctcgtctgaaccaagaagagaagaattcctccctcttgaaagaactcgaagattgccgttcgaagcttttggagagttgcaagatggttcaagacgctgtgcaaaaacttggagctaatgtaagccttccggccgacaatagtacattgtctgttcttgccaattgggtcgaagaatcatcgactggtttggttgatggtattgagcccttcgcctctcgttgttcaaagatctccgccgaggctttatcggctagtcttctttcgaacggatgtgaccatttctctggtttaaaggaatccatcaccgacttacttggcgatgagtcaaaatttgctcaacaccgtgcggcaattcgatctgtcgtcaaagcttttcaagtttggtattggaaaaatagaggctatgaagatacccttgcttctctctgggcatcgttggcttcgagctcacacaccacacaatcctcttcgagccagccagacgacggtggtgatgctcacatatctgattcgcaggtgtga

SEQ ID NO: 22611 - DNA, 501 bp, Oryza sativa
  Clone ID: PAT_MRT4530_27771C.1
atggaagacctcgccgccaccctcatgtcgtcgttctcgcaccggcacagcgcgccgctctacctgttctacaacgtcgcaagcttgcccaagcatcacgccggccgcggcggcggcggcggcggaggaggaggaggaggaggcttcgagtttgctacggcggcgggcggtaagcagcagggaggagttgatgatggagaagacggcggcggcgccggggtgcgcgcgtgctccagcgacttgtcggccgcggcgttcgccgacgagctgttccgggaaggcgcgctgctgcgcccgctgaagctgccaccgcgcctgcagacgccctcggcgtcggccgcggcctccgccgcgacgtcgccgacggcagccagcaaggcggcgtcgtcgtcgcggagcccgttcgcgagcaggaggagtaagcacgaaggctttgacccgttcgccgccgcgctggagaaggggtccaaggactatattaagtcgcatgatgatctttag

SEQ ID NO: 22612 - DNA, 1848 bp, Oryza sativa
  Clone ID: PAT_MRT4530_27772C.1
atggagaagagtaaggtcgtcgtctttgccggtcgggtgctcgcgatagtagcgttgctgctggcgtgctgctgcatggcggcggcggcgcagggcggggagggggctagggtgagggagtcgctcatcggattcctgaccgagctcgccggcggcgacaaggagagagcgcgcggcatcgggtgggacgcgtcgggcgaaccgctgacgcacatctacgtcggcgacaaccgcctctccggcagcctcccgccgtcgctcgccgagctcgccagcctccacgtgctcaacgtctccaggaacagcttctccggcgagatccccgccgagctcagcaagctcggcctcgtgagattctgcgtcaacgacaaccgtttcaacggcgccatcccggagttcgagctgtccaggttcgagcacttcagcgtcgcgaacaacaacctcaccggcccgatccccgacgacgccggcgacttcggccgcgacagcttctccggcaactcggacggcctgtgcggccggccggacttcccgccgtgcccgcccccgccgagctccggcgagaacgatgggaagaggaggaggagggcgcggacgatcgtcatgtgcctcggctacgtcctcctcggcgccggcgtggcggccttcgtcttgtacatgatgtgctccaagaggcggaggagaccaagcggcgtcggcggcaagacggcggcgacgacggagacatcatcgtcggtgaccccagggaagtcggcatactccctcccgatgtcggaggagcggatgaacgccacggcggcggcagcggcggcggtggcgcgcgcgacgccggcgtcgctggtggtgctgcaacgatcgggcacggcggcgtcgacggtgatgacactgaacactgcggcggcggcggcggcggaggcggcgaggaagctgcggttcgaggacctgctcaggtcgccggcggagctgctggggcgcggcaggttcgggagcgcgtacaaggtggtggtgcccggcggcgccgcgctggcggtgaagcgggtgaaggacgcggcgggggcggaggaggaggaggagttccggcggcggatggagcgcgtcgggaaggcgaggcacccggccgtgctgccgccgctggcgttctactgcgccatgcaggagaagctggtggtgtacgagttcctcggccatggcagcctcgccaagcttctccatggttctatagagagcagccaggtcgccctggactggccggcgcgcctccacatcgcctccaaggtcgccgacggcatggcgttcatgcacggcgccctgcgcggaggcgacggcgacggcgacggcgcgaacgcgaacttgtcgttctcatcctcctacgaggaggacgaggccggcggcgccatcgctcacggcaacctcaaggcctccaacatcctcttcacggccaccatggagccctgcatcagcgagtacggcgtcaccgcgccgccgccgccgtcgtcggcgccagcggcggcgcttcgcgccgacgtgcgcgcgtacggcgtgctgctgctggagctgctcacggggaaggccacggcagcggacggcgccgagctgtcgcggtgggtgacggccgtcatccgggaggagtggacagccgaggtgttcgaccgcgcgatgctctcctccgccggcgccggcggcgacaccgtcgccagcgagcagcggatggtgcgcctgctgcaggtcgccatgagatgcatcgacgacgcctcctcgccgtcgccgccgcccaccatgagggaggtcgctggcatggtgaacgccatccgcgaggaagacgacatgtcgctctcctcggaggcatga

SEQ ID NO: 22613 - DNA, 696 bp, Oryza sativa
  Clone ID: PAT_MRT4530_27773C.1
atgtcgctgaaactcgtcggcggtggtgactacgatccaaggggggattggccggcgagacttgatggggatggctccgccgttggggaggagcctcaccgtcaccgggagcggcatgtgaggtcggagacggcggcgcgcgataggactcggcgcgtccgacagaccgaccggcggcgactcgctagagaacaaggcggacagaatgagcaggaggcagccgacggcgaggtagcagaggcggtggccggagttgagggcgacgaggctgcgccggtggtgccggcgcgcctccacatcgccgccaaggtcgccgacggcatggcgttcatgcacaacaccctgtgcggcggcggcggcggcgacgccgacgacgtgaacgaaaacttgtcgttctcatcctcctacgaggaggacgaggcctcctcgttctgcggcggcgccatcgtccacggcaatctcaaggcctccaacatcctcttcacgggcaccatggagccctgcatcagcgagtacggcatcactacgccgccgtcggtggcggctccatcctctggcgccgctgtcctccgcaccgacgtgcgcgtgtacgacgtgctactgctggagctgctcacggggaaggccacggcggcggacggcgccgagctggcgcggtgggtgacggccgtcatccgggaggagtggacggtctag

SEQ ID NO: 22614 - DNA, 401 bp, Oryza sativa
  Clone ID: PAT_MRT4530_27774C.1
gcacgaggggcgagctgggagacaatggctggaaaagtgggagcggcgggagggcgcggaagatggacatcaccgatgccggcatggacggcgtggagcgcgatgactgggtcgtcgggtggggccggaagtggagaggaagggaagcagatgccgcggtgcaacgagttgatttttctttttgattggcgcaaagaacaattttgaggttgctagccttttttttcattttcttttcatccgaaggatgtgttttgaggtttgctggatatgtggcgtgatttcactagatgcaaacttgctccaggtttagccacgtggtccaatgagctattaaggtttgtaccctgaattcgtatattaagacatccatgtcgggccaacattggtcataatataaa

SEQ ID NO: 22615 - DNA, 1323 bp, Oryza sativa
  Clone ID: PAT_MRT4530_27775C.1
gcgggcgcgagagggaccggctcctaatggcctccgccgccgaggaggccaagggcgtggaggaaggaggaggaggagccagcgccaacggcggcgacaaccccgccaccgccaccgcctccgcctccgccgcggccgcggcctcgtcgtcttccccacgctgatgacaggggcctccccagatcaagcactatgccaggtgggattaataatgttgaaataaccaatgaaactgctggtccatctaatctggaaagatcaagaacagagaggcgtcgacaaaacaatccagctgatgatcctactaaacagttatttgatgataaaatttccctaaaaaagaagctcgaaatgctaaatcggatagctacagtgaaagatgatggaactgtggtggttgatgtgccaagttctctggaaacaagtacaactgatggtgtagcatatgatggctatagtgatgttactgttgaggaaccattggatggagcagacatatctgtgaggcctcctatggatattgttattcttattgtgggcacaagaggtgatgttcagccattcattgctataggcaaacgcttacaggattatggacaccgtgtgagattggcaacccatgcaaactttaaggagttcgttctaacggctggtctggagtttttccctcttggcggtgatccaaaaatacttgctgaatacatggtgaagaataaaggattcttgccttctggtccttcagaaattcctattcagaggaaacagatgaaagaaattatattctctttgctacctgcgtgcaaggagcctgatcctgacactggtattcctttcaaagtggatgctatcattgctaaccctccagcatatggacatactcatgtggcagaggcactaaaagtacctattcatatattctttaccatgccatggacgccaactagtgaattcccccatcctctttctcgtgtgaaacaagcggctggatatcgatttaagttcaatattttcaagctttcttatcaaattgttgactctatgatttggcttggtatccgagatatgataaatgaatttaggaagaagaagctgaagttgcgtccggtaacatacctaagtggtgcacagggttctgggaatgacattcctcatggttacatctggagtcctcaccttgttccaaaaccgaaagattggggccctaagattgatgttgttggattttgctttcttgatcttgcttccaattatgtgcctcctgaaccacttataaaatggcttgaagctggtgacaagcccatatacgttgggtttggtagtctt

SEQ ID NO: 22616 - DNA, 822 bp, Oryza sativa
  Clone ID: PAT_MRT4530_27776C.1
atggagaagagtaaggtcgtcgtctttgccggtcgggtgctcgcgatagtagcgttgctgctggcgtgctgctgcatggcggcggcggcgcagggcggggagggggctagggtgagggagtcgctcatcggattcctgaccgagctcgccggcggcgacaaggagagagcgcgcggcatcgggtgggacgcgtcggtcgaaccgtgcgacggcaaccggacggtgtggcccggcgtcggctgcaacggcgcccccgccggcgatggccggatcacagccatcgtgctggagcgcaaggggctggacggcaccatcaacgcggcgtcgctctgcgccgccgcgcccgcgctccgcgtgctgagcctggagggcaacgcgctgcgcggcgacctccccgcggccatctccggctgcgccaggctgacgcacatctacgtcggcgacaaccgcctctccggcagcctcccgccgtcgctcgccgagctcgccagcctccacgtgctcaacgtctccaggaacagcttctccggcgagatccccgccgagctcagcaagctcggcctcgtgagattctgcgtcaacgacaaccgtttcaacggcgccatcccggagttcgagctgtccaggttcgagcacttcagcgtcgcgaacaacaacctcaccggcccgatccccgacgacgccggcgacttcggccgcgacagctttctccggcaactcggacggcctgtgcggccggccggacttcccgccgtgcccgcccccgccgagctccggcgagaacgatgggaagaggaggaggagggcgcggacgatcgtcat

SEQ ID NO: 22617 - DNA, 864 bp, Oryza sativa
  Clone ID: PAT_MRT4530_27777C.1
atggcgtacaagaaggcgacggcggtgctggacgaggcggccagggcacggctgcgtggcccgttcgccagcggtgccgcgtccctccggcgtgatcaagacgacgacgacgacgacctcctggtggatctggtgcacgagttctacgacgacggcgagcgcggcgcggacgccacggcgaggggcggcgtgtcgtcgtcgccggagccggagcctaccgagtggaaggacgcgctgcgcgaggcgctagcggacgcgacgtccgacgcggcggccgcccgcatccgcgccgaggccgagcgcgccgtccgggatgccgttcgcaacggcggcgacgtgatccggaagcgagtcgtcgagcggctccgcgcccgagggttcgacgccggcgtgtgcaggtcgtcgtgggaaagaaccggcagcgtgccggcgggcagccacgagtacgtggacgtgacggcggcggcgtcggcgacggggcgtcgcgctcgctacatcgtcgaggtcaacgtcgccggcgagttcgagatcgcgaggccgagcgccgagtaccaggacctcctcctctcgctcccgccggtgctcgtcgcgactcccgaggccttcaggggggtcgccgcggcaatgtgcgccgcggcggcggagtccatccgcggcgcgggcatgcacctgccgccgtggaggcgggcgcggtacgtgcaggccaagtggtccgcaccgtacgagcgagtggcggcggcggcaccgccggagggagctaggacggcgccgtccggcggccggaagcgttgcggaatggagattgggcgcagggagatggccatcggaaaggagagattggtaccatttttcagagggttatga

SEQ ID NO: 22618 - DNA, 660 bp, Oryza sativa
  Clone ID: PAT_MRT4530_27778C.1
ccacgcgtccgaagcacataggactttaccaagcagttaagatagctactggattccccaagattactgccaggaatttgtatctagcatgaactatgatgtttgtttttttaaggagctagatgatgtatattttgagatttggcagcgggttaccaagcaaaagatgagtttcagagatgcaatgaaggaagtctatgaactgaacaggtttccagtacgacaacaaaaaatgaaatatgtactggagatcaatgactgctctcaatgggaagcggagtttcatacttgtacggcttgcattacagaggaagttgcagaggatcaagttctggggctaattgcagacgcagttaagaagctgagggataaaccgcggttctatgatgactacatcaaaaagaagataaacattgcccaagctattggactgatcaccacagaagaggcttagtttcacttttttttttcatctgtttatgtaatattggttaactattggttaagttggtagtggacacgatgtggcttttgtatgatatttgctggttaaggtggtagtggacaccgtatgttttttgtaggatattggttagctgcttgttaaggtggtagtggcaccacatgtcttttgtagtgaacaacaatacttgattgttc

SEQ ID NO: 22619 - DNA, 2170 bp, Oryza sativa
  Clone ID: PAT_MRT4530_27779C.1
acgagttcctttttttcgtgaaccaaatcacacctcgcctgcagtgtctcgtgtcccagaacgcgattgcgttttttttttgcacgtttggtttccatatccctcgtctcttgtactcccttacccacatttggcctagccggaggcggtagccagggcccagggctgcttcttatggccgcgcaggagatggaggttatgatggttgcgatggcggcggaggcgccggtggctgtggaggtggaggcggttccggcggtggcgggggggctaaacgcgacggtgcccgcgttgtacgtgggcgatctccacgaaagcgtgcgggaggagcacctgctcgaggtgttcggcaagattggcaccctcacgtccgtgcgcgtctgccgcgacaatgccacgagcaactccctcagatatggatacgtgaattacctctcccaggctgacgctgcaattgctttggagaaactaaatcatagtcttattttggataagccgatcagagtaatgtggtctaaccgagatccagatgctaggagaagtggggttggaaatgtgtttgttaagaatcttaatgatttagttgacaatgtaagtctacaagaattattttgcaagtttggagatatattatcttgtaaagtcgctaaaaatgaggatgggacaagtagaggctatggatttgttcaatttgcgttgcaagaatcagcagatgcatcaattcaaaatcttaacaactctcatttttgtggcaggcaattgcatgttgctacatttattaagaagagtgaacgatctacaaacaatgatgacaaatatactaacctatacatgaagaaccttgatgatgatataacagaggaacttattaagttaaagttctctcagtatggtttagtaattagtgtaaagataatgaaaagagatgatgggacatctaagggctttgggtttgtaagttttcaaaacccagaaagtgccaaaagagcaaaagaatccatgaacgggatgctacttggatcaaaaaccttgtatgtagcaagagctcaaaagaaagctgaaaggaaacaatatttgcaacgcttacacgaggagaagagaaatgaaataatcaccaagagcaatgggtcgaatgtctatataaaaaatattaatgatgaagttggcgacgatgctctccgtgaacggttcaatgaatttggaaacattacatcagcaaagattatgcgtgatgaaaagggtattagcaaaggatttggatttgtatgttacaacacacctgaggaagcaaaatgtgctatgcgaaatactccacggcaatacagaaacaacaggggaaggatgaatggaaatatgatgcattttcaccacactgtgaactatgttccacatgcgcagccagctaaagaattcatgtccatgtcccgacagcgatttagccatgctaagtatattccaaatgacatcatggccaatggattggctattcatcatggtgactctatttcatcgatgaatgacgcttttaacaacctgctagctactgctccacccgaggaacagaagaacatgcttgggaatagactatatccgttggttgagagacatcatcctgaccttgccagtaaaatcactggaatgttacttgagctaggtaattctgaagtggtcatgctactttactcatcaaacatgttgtctgccaaaatagaggagtgtgtcaaactgctccaagaggtaaaacccaaacctgaagatcaagaggccctgcaccctggtttcctcctagactctgctggtgtaaacgccaactaagaattcaatgccaatccaagcttttgaccgtgctaaatatattatgtatttgtgttttagagatgctaattagatagatgctctttatttcatagtttatggaactatattattgggcttgttatagaacttactaataatgcctaggatttaggtagaaatctcgggagtttttcttaaacggagcttgttacgaatcttagataataaattatatatgatggtgttcttgtgttatatataataaatttggtttagtgggttggttcttaatttttatggatgattcgaaagtgtttggaagttatgctgcctataacttttttaatcgggttgttcgaaaagttagagcccc

SEQ ID NO: 22620 - DNA, 270 bp, Oryza sativa
  Clone ID: PAT_MRT4530_2777C.1
atgctgacgcccctcccctctgctggatctagggaggggagtcggatcccgcgcgggggagggcggctggccgccggatccgtggcggggacagccgccgcgtgccgtatcccgtgcatccactgtcgtcacacgccgccgtcgctgtcgccatgggccgccgccgtcgcctacacccgccgcccgccatcggcgttgtcgccgcggtggagtttcgaggaagaagttatagagaaaatgaaagcaacgagtgataggcttgtcgagtag

SEQ ID NO: 22621 - DNA, 339 bp, Oryza sativa
  Clone ID: PAT_MRT4530_27780C.1
caaggaaaattggattaatcccacccggattgggttcacaagaggacggccccccccagttcaccacggcaaataaccccgggcgaaaaactgaaatcgggggaaaatcccccggtttgggggaaaggcacaaccgttgtttagaatttttttggcccctaaaaaacagggtattaccgggtcttggaaaagagttttttgccagacgggggatttttactttggccctccaccaagaaccccttccccatcttaataacgggtggcagcataatcatcggaatcggggttaggcccacttggaaaaggaggagcggcaaaccgggccaaaggggcctt

SEQ ID NO: 22622 - DNA, 657 bp, Oryza sativa
  Clone ID: PAT_MRT4530_27781C.1
atggagaaaaatgtggaggaagccaatctgatcactcaggagctgaatgacttgggtttgggagaagatattagcactgacaagttccgtggttacttgtgccagttgcctcaagagcgagactctcccgttgatatttccactcaattgaatttcgatcagctcgatgctcaaaatgaactccatgaactgtatcgtgtgaagtactacaagttggaggaggtccttatgtgctttgaaaatgatggcacacttgattctgttgatgacgaggtcctctgggaggttctcaagtgctttgattacacatttgtttggtacttccaccctgagtactgcaagcttgctgcacttgttgactatcaacgtctagtcattaaaaattatgagctagatggtgtgtattttgagatttggcagcgggtcaccaagcaaaaggttgcagaggatgaagttctcgggctgattgcagaggcagttaagaagctgggcgggtggcgggtggggaggaggtccggcagccgccgccacccggcggcggcacgtgtgacctcggaatcggcggcgacgatgacacgggaggacgaggtcaacatgctggcgctcgccggcgtcgggtcggggatgcggaggccgacgaagcagcggccggagtag

SEQ ID NO: 22623 - DNA, 359 bp, Oryza sativa
  Clone ID: PAT_MRT4530_27782C.1
gaatgtaaatattgaaaggtcaacaaatgaatcgaatacaattaattgggcaccccccccactctgaatttttcccccctatccaaaaagaatatttagattttcactggcccatggaaaatggcttatccggttaggcggaggaaggtttcaccttggaaaaaatttgcgggctttcaatttttatttccgggcggcccaaccgggggccaaaccaaacaactgaaggaaggaacgacccccaccgcggggttgtttaaatccccacatgccttcgaataattatgagagggaatttattacccgcgggccggttacaatgctttgcccttgccaatattttgcgggaccagtaacat

SEQ ID NO: 22624 - DNA, 1705 bp, Oryza sativa
  Clone ID: PAT_MRT4530_27783C.1
atgccgcccaagcaccgcgggtccagccgcgggccgccgcccccgagcgggaagaacatgccggccatcggcgcctcagagaagaagacgactccaaatctgcgccgtttggccgtgtcaaccatcaacgacatcgtcgacgtatccgctggtattgactcgaccactccaaaaggtcgtcgtttcgcggtgctaggtgaacttgatgacgatgatgatgatgtaatggattcgtgtgtcccggggctttctggcctctctggtccttcccaagagaaggcggcgccacacaacaagcaggccaagaagaagaagacatgggttccacctaggaggaaaaaaagcttccgtttttctaaggccctcaacagtcctgcagaccaggatgatgataccgaacaagattacagcgttccagttgcaatcgcaaccgaatgcaatgatgctaccatggagaaaaatgtggaggaagccaaccttctcactcaggagctgaatgaattgggtttgggagaagatattagcactgacaagttccgtggttacttgcgccagctgcctcaagaacaagactctcctgttgatacttctactcaattggatttcaatcagctcgatgctcaaaatgaactccatgaactgtatcgtgtgaagtattacaagtcgttacagcaagtgtctggaactaggagtaagctggaccatgatgaaatgataaatcaatacccttttgacatgtctaagcagctggaggaggtccttatatgctttgaaaatgatggcacacttgattctgttgatgatgaggtcctctgggaggttcttaagtgctttgattacatatttgtttggtacttccaccctgagtattgcaagcttgctgcacttgttgactatcaacgtctagtcattaaaaatgatggttgcatgtatgccaattgggataaatatcatatgtattttaatacatatgatgttgaaaaacagtatgtgaaatattatggtgaattatcaaagaaacttaagtggggaagagtaagcaacagaggactttaccaagcagttaagatagctactggattccccaagattactgccaggttagcttatcttggcttccatgaatttgtatctagcatgaactatgatgtttgtttttttaaggagctagatgatgtatattttgagatttggcagcgggttaccaagcaaaagatgagtttcagagatgcaatgaaggaagtctatgaactgaacaggtttccagtacgacaacaaaaaatgaaatatgtactggagatcaatgactgctctcaatgggaagcggagtttcatacttgtacggcttgcattacagaggaaagggataaaccgcggttctatgatgactacatcaaaaagaagataaacattgcccaagctattggactgatcaccacagaagaggcttagtagtttcccttttttttttcatctgtttatggaatattggttaactattggttaagttggtagtggccccaatggggcttttgtataatatttcctggttaagggggtagtggcccccgtatgttttttgtaggatattggttagctccttgttaaggtggtagtggccccccatgtcttttgtagtgaccaccaatacttgattgttgcatgatgccccctgatttgtgatgcatgatggcaaatttggttt

SEQ ID NO: 22625 - DNA, 290 bp, Oryza sativa
  unsure (1)..(290): unsure at all n locations
  Clone ID: PAT_MRT4530_27784C.1
aattcggcacgagcgatatntggntatgangcacgagtttacatttggttgaatntagtgangctcgggatgctcatnaggcaaggtacaacctggatggtcgggactttaanggaagccnaataattgntgcgttatgctaaagggntnccacgtggacctggaggaatcacgtgantatatgnnnagagnnccaccacctggttctnaccgctgctttanctttnggattgatgggcactnggcccnnnactncaaagntaggagacttgaaaaacagatgcttatca

SEQ ID NO: 22626 - DNA, 361 bp, Oryza sativa
  unsure (1)..(361): unsure at all n locations
  Clone ID: PAT_MRT4530_27785C.1
ataaccttagccctcgtgcggctgtcgaagaagctaccacgtgcactggctgctcttcggccgcgagctcgggcattttcaaaactatgaaggaaaacatcatgaagaagagcatcgtgaggcacatgaagctcgagatcgaggacgaccacagggtgggcgcattgtacgacacgatgatctctgacgaggccagtgacgatgctgtgggctaggaattcaaggtctatggctctaggatcatgggggtgctgtgacaaggaccgttagggtatcagcagggtagggctcagtgatgaagngtgtcccccttcttctttacaggggcacaccttgctctcgtgggtatggcaagcttgat

SEQ ID NO: 22627 - DNA, 721 bp, Oryza sativa
  Clone ID: PAT_MRT4530_27786C.1
gcgcttcctcctccttttgccttgtggctgctgtaccggaccgacccggccaatggcaagcgtcttaacgaggggcgtaaaaagccggtaagcataatctcccccgagaaagcacctgagcagcacgccgacgattttccaaaatatatgtgtaaaaccaaagcgtgtttgattgttattttgtgatgaactattggtatatgagattattggttttgatatttggagattattaccgaagtgattttggatataattagaatttttaggtgatgaatagggattactgctgacacagtgtattcggtcagaccgggttgtggtattaggctaaagatcaatgcacgtggttggtgaaaattctatatggcatacaagggagatattgtgtgcgtatggaatgcggagtcgaatttggagggagtccaaatttagtacaattggagtttgtaaagttttctaagggattaggacttcttgtactaggttggctcgtggctttagactgtttacctcagataaatagagagggaggcgggttcaatggtctaatcggtggttagaccaatagatacccggcggtcaaaccggtggcggcaacaggagacagtggcgcattgggcggttagaccggaccaactccatcggtcagaccggaggatattgagcggttagaccggcgcatctactccggttggaccgatcaccgtcgaatttgagg

SEQ ID NO: 22628 - DNA, 582 bp, Oryza sativa
  Clone ID: PAT_MRT4530_27787C.1
aaaacaaaaaaacaacgggccggggggggttattttcttcacaagcaaaaaaggaaacccaggcccatatcatcagcatcgttaacttacaaggggggaaatgggaaaacaaaaggcaactcattaccccaactaacattaacagagggggggggccctgaaaaaccccccccacgttttattttcaaaaaaaacaaaacaaaccggtttctccgggtggggggccagggaaaaccagggcaagcaaaaggattctacggggtcttggccatgggggggaacagggcaaaaacccgggtgctgaaacccccctcgttggcgcaccaggcgacaagcttgacaaagttatcgttaaaaacaattccacccttgggggaaaaaaagcccaacctggtgtcaccaacaaaggcaggaaaaaccaggtcttccccaacaaaaccaaagaaccccttgagctttccctcggaggcaaacttgaaagcactcttgaaagcaacataagaggcagccttctcgattctaacggggaaaccaacaactgaaacatcgacggggggaacacggaaggacattcccggaagc

SEQ ID NO: 22629 - DNA, 604 bp, Oryza sativa
  Clone ID: PAT_MRT4530_27788C.1
tttgtggcccaacatgtgatcaaattcagttcgcaaaaagaaataggcagttgtgtgacatgttccatccatctatgtctatatatgtcagttagctgaatttaaattgttcatatctcctatatcttgactgatcttatgtctacttggtctctcagttatgaaaaaaaaaagtgaatgatattttttccactataattgtatattcgtctttttttccatttagttacatcaattttttactgtatgtttgtagttatatttttagtgcatatagacttagcattttatttctttatttattcatagtttatttcgtttttttcttttttggctgccctgtggcatatggagttcccagttcagggatcagatcaaagccatagttgtgacctaagcctcaacttaaccttaattctcattctgggctggggactgaacctgtgtttcagtatttccaagatgctgccgagcctgctgtgccacaacaggaactctaaacttagctttttaaaattattcaacttggccttttatcattataaattactaatctatttctctagtaatgcttctttcatcaaagactacatcaacagatagt

SEQ ID NO: 22630 - DNA, 870 bp, Oryza sativa
  Clone ID: PAT_MRT4530_27789C.1
atgaagaggacatactcgtggtctgccgtgtcgtcgaactaccaccacccgaatacacgatgcagggctcgccaaacagctcttgccggatactgctcatggcccggttggctggctcccctcgccgccgcaggccgcaggccgccggcgccggcagtgccgcagccgcgaacggacaacaagaggtttcatgggttcacacttgacactaggcaatggggtgggaaggcaacttggatggaggcccagaagttggttctgcgaggtgcaatagttttccacccctactcaaattggaataagttcactttgggtccctctagttgtcgcccagtccgattttcgttccttggtcgcaaaatcgggcgacaacggggcgaagtggtggcagagcagaggggtgaagcggggtggccagagtgggtgacgggcaaggcggggcggcaacggacggagcaaaggggcggagtggccggaggggcggagcggcggcaagccgccgacggagtagaggtgcggagtgggggcgagccgatgtcatcgcggctgtcgaccttaccgggctgggagaggagcggcggagccgggcaggagaggagacacgagcggaggataagaggattcgatggcgacgatgacgtcaaagccgctgtgcgcgtaggaggcgctcgtgctgctcaaccgtgcggccgagtagagctacgccgctctggctgttttcgcctcttcgactatctggtgccagacgacgtcgggagtctgaagtctgataggatacacatgggttttttccgcatcctttggtcacaacaaagagaacttcccttcatctatgtaagctacaacatgaagcacagcttcttccactag

SEQ ID NO: 22631 - DNA, 477 bp, Oryza sativa
  Clone ID: PAT_MRT4530_2778C.1
gctgatttggtgtggaggcggggaaatgcgtgatgtgtgagatctagggcgtggggaggcggatcgcagcaatggcggcgccgcggtgggcggtgtgggcggtgctgctgctgcggctgctcgtgccggcggcgcgggtgctcgccaacatggaaggtgatgcattgcatagcttgaggactaatttagtcgatcctaataatgttctacaaagttgggacccaactctggtcaatccgtgcacttggtttcatgttacttgcaataacgacaacagtgttatcagagttgatcttgggaatgctgcactatcaggcactttggtcccacaacttgggcaactaaaaaacttgcaatacctggagctctacagtaataacataagtggaacgatacctagtgaacttggaaacctcacaaacttggtcagtttggatttgtacttgaacaacttcactggtccaataccagattcac

SEQ ID NO: 22632 - DNA, 777 bp, Oryza sativa
  Clone ID: PAT_MRT4530_27790C.1
atggacagcggcgcacggggacggccccgctgccctcccacgcggcgtcgtcgactctgcccttccactccgaggctccgagactctatcgctgccaccgcgcccaagctcgtcattgtcatcttcaacctgggggtgcggaggatggcgttggtgggagatccggtgcccgccgtcggcgccggtgacgtgcgctgggtgctgcgcctcttcggcatgcctgtcgcgtcgacacttccacctctccaccatggctgctgtcgtgcgcgccgctacctgcctttgcctccgcctccgctgtcggctgcacgagcgagccccgccttccccgccggccgctcgcgctacctcctcctccgctccgccgacggctgcccgagcaacctctgcctctgccgccaccgccgccgcccgagcgtcgtcctccactcctccgtcaccattctcaatgccgctatgctggtgagctgtgtctccacgacgccgccgtccgacgcctgcccgcctgcgctcgcctccatgctctacctgtcgtctcctgtgcgccgccgctgccgcaactcgcacgtgagtcgcgtgctagtgtgctgcttgctactggcgctcgtggcgccgtcggtagcagcgacggcgcgacatgactacggcaaaggatttggggatttttgtgctgtccatggcgcaactgttgcggaggggcttgtttgcaatttggtgcttgcgtggcgtgccacgtcggcgctcagagccggtcaagtggggtttagacctcaatga

SEQ ID NO: 22633 - DNA, 2359 bp, Oryza sativa
  Clone ID: PAT_MRT4530_27791C.1
ttttttttttttttttttttttttttttttttttgttccatgaaataaattatattttccgctcagtttctttgcagtatatatttgtttactactgtaaaatattctagttcaacatctcaaaattacacgtctaaagtcccagtgaccaccgaccaaacaccagcaccaatgcaagtcacatgcttacttctcagtttgaaccaaactggaaaaatcaataatacgttcgctcatgcattacaaaaggcaagcaaactactggcaacttgagaaatgtaaacaaatcagctcatcagcctgtctggcattccaattcagataacacgagctttgtacaggcaaatgtaagccatgtgccagtcgcctccaccagataactttaaaatctcttcctccttgcgtatgctagggttgtcatcatcaaattcaatccatttcccgtcatcttgcttaacccagccaacataatggcctgagtctgcacttctccctttgtgcgtcaaaacagcaattaaatcatagatgccagtcaaatgtttctttggcacagaagaatcggctttgtcaatatccatgctggatgattccccagcattgcttgatgaaccctcattttcttttgagctgctggcctttccttgtgcttttaatccaaacttagcattttctgcatctctcagcatctgtcggggagcttggagtttttgtttcagttcatctgagcaaaagtcataaacatccagttccagcgggtaatcaactttccgtaaaatctttgccttctggtttgattcccttttccaaaagaaacgaacaaactgcacagtcaagtacctaggcaacttcagataacacgagctttgtacaggcaaatgtaagccatgtgccagtcgcctccaccagataactttaaaatctcttcctccttgcgtatgctagggttgtcatcatcaaattcaatccatttcccgtcatcttgcttaacccagccaacataatggcctgagtctgcacttctccctttgtgcgtcaaaacagcaattaaatcatagatgccagtcaaatgtttcagattgaaagtattgaagtatggttcacagcatgctacttgaatagatacactagaaccctcattttcttttgagctgctgccctttccttgtgcttttaatccaaacttagcattttctgcatctctcatcatctgtcggtgagcttggaatttttgtttcagttcatctgagcaaaagtcataaacatccaattccagcgggtaatcaactttcagtaaaatctttgccttctggtttgattcccttttccaaaagaaacgaacaaactgcacagtcaagtactctcttgtataaagagcagtgcgacccagtgaaggtgaagccttctaaagttctgacttcaaaccatgcttaagtccttcatgaaggtggtttacatcatgagatatatgacacttcaaagaataaactgattctctctctaaactctcttcaccactttctgcacaatggacccttgtttctgatgtaagagtttgagaccgtgtatacaccaattgggtccagcattcttctgcatcctgttgcatataaacattattttgttgttgcgcaaactggggatactttttacgcagcgtctgtaagaagagtagaggtgcaacaggccgaacactttgatcaagctctccgaaagtattacgagttgcaacagtcaaattatgggaggcttggtcaacaccattacccctcacattatctgaataactcaataaagctgacttcagctctggaacagaatgcaggcactgcaaagtggaattcatgtaacatgtattccccaagttataaagaccagcactgtgtcccagtgcaaccacttgctcttcttctggtagatcctctacaaatactggtcctttctctggagctttcacaatctcatcagctgtacctatcatcatcaatttttgaccatctttcactcccaaagtagaccaatctgcatcatccttcaatattccacccttcaccataattttttgcctttcaggtggtacaccagtcagagtgtatagctgggtcttaaagacaacaggcggctggctggtgtctatctctatgcctgggaaggtctccttctgccatttcacgcttactaagtatggcaagataactaagatactatgtaattgtggccgagattggacgggttctccatcgttaccggtggaaagtgaggggtgcaggaccttcactgtaggggatagacttgccatataggaagacatgagcatgctcagggagatgaacttaggaagcagagaagtaattggtgccat

SEQ ID NO: 22634 - DNA, 2334 bp, Oryza sativa
  Clone ID: PAT_MRT4530_27792C.1
atggtagctcccagatcacagtctgtagaatcaccagtaaagaggcagcaagatagcattaatggtcaacttgcacgactcagaaaatctatttatgaaatagtgcaagagttggtaatgggacagaaacagacacgtaatgtccgcagagctcttctgcaagatataggttacctgtgttacttcttcggacatagacaaactaacgactttcttcttcccatacttccagcatttctaaatgaccgtgatgagcagctccgtgcagtttattttggtcagattgttgttgtgtgctattttattggttccagaagtgtcgaggagtatctcttgccctatcttgaacaggcactaagtgatgaaatggaggttgtgcttgtgaaagtacttgactgcttgactatgatgtgcaaaagtggttatttgaggaaaagggcgattgttggcctatttggaaaggctcttcccttgctgtgtcatccagtccaatgggttaaacggtccgctgtaagatttgttgttgcttgcagtgagagcatagggcctgtagacacctttgtatacctttttccacatcttaagcattttttacacagggagccaccatcattgtcatcagaaactgctcttctttcatgtattaagcctccggtctcaaaattagtcttgtaccaagctttagaggatgtccatgatgcaggagacattttactgaagggtgatggtaaaaaagaattgacagtgcatggaggaaggtatcctgccatggtacaaagtggttcatcaatcatgattgaagatgattcaaggttgagaggacctaagatgtccaatgatgtgtctttgaacattaaagatttttcttctgctagttcagcatatataagctctgcagtacatggatctagttccttttatgatggcgtacctaaaggaataccattatactccatgcaagggacagcactacatgcaaatttgggatctgaccggcatgggagtttatcaagttcagttccaggcatacgatcgttcaccagaccagcattgtctctggagacaacttggaaaccccgtggagttctgatggcccatcttcaggagcatcgcttatctgtcaatgatattgctgtatcaaccgacaatacctttttcgtaacagcttcagatgactcaagtgtcaagatatgggatacaagaaaattggaaaaggacattgccttcagatctaggttaacatatagcctcggtagtagccgagctctatgtacgacaatgcttcatggtactccccaagttattggtggtgctagtgatggaacattgcacttgttttctgttgactgcgcacgtggtgtagggagtgtcatcgaaaggtattctggcattgctgatgtaaaaaggaaagatttgaaagaaggtgcaattctcagtgttgtgaactgttccacagagagttttagcccaaccattcttttcagcactgaacattgtggcatacataaatgggatacaaggaccaatgctgagtcttggtcatttagatcttcaccagaggagggctatgtatcggcacttgtagtgggccagtgcgggaattggttcatctctgggtcttcaagaggcgttcttacgttgtgggataataggtttttgcttcccgttaactcatggaaatatttgccagcaacccctatagagaaattgggcttgtttataccaccaccgaattcaatttcttctttcgggagacctgtggtttttgttgctgcaggctgcaatgaagttaccctatgggatgctgagaatggaagccgtcaccagatatttagaacagcaagtactgagaatgaagctgttgtaccaaaggcaccatcaatacatccaaataccagagatgagacccggccagcgaattataattaccgaattgaagaattatgtgacccgcctccacgccttccaggcatccgctctttgcttcctttgccaggaggggacctattgaccggaggaacggacttgaagatacgctactgggatcaggccaggcctgagcaaagcttctgtatagccggtccctcggtgaaaggagctggaaacgacgagacgtacgatataagatccagctcttgtgtacaagttgtgcaggaaatatgcagacagcccacgacggcgtcgaggctaacccacaagacgcagctcgccatggccgccgcggattccgcggggtgccaccgagacgcgatcctcgcgctggcctccgtgaacttgtcgagccacaggctcatctcgggaagcagagacggcgccgtcaaggtgtggaagtag

SEQ ID NO: 22635 - DNA, 485 bp, Oryza sativa
  Clone ID: PAT_MRT4530_27793C.1
attattaatttataaaacgaataaaatgattatggtcgcgtgctatgcttgttcttgcaacggtgtgtaattatcatgtgatgggcaataaagagcaggtgatgagtagtatttcataaaaaaaaaaaaaaaaaaaaaaaaaaaaaaaaaaaaaaaaaaaaaaaagaaaaaaaaaaaaaaaaaaaaaaaaaaaaaaaaagaaaacaaacaaaaaaaaaaaaaaaaaaaaaaaaaaaaaaaaaaaaaaaggggggggccgttttaaagaaacaaatttacatgcccggaccttggaagtaaaaaatttttttttggggcaacaaaaacaaaattacggggccgggttttaaaacgatgaggcctggaaaaaccgggctttccccaaattaaacagcttggaaaaaaaaccctttttcgccatgtggggaaaaaaaaaaaaggcccgccccaatggcttttcccaaaatttccccccctctaatgga

SEQ ID NO: 22636 - DNA, 4644 bp, Oryza sativa
  Clone ID: PAT_MRT4530_27794C.1
gcgtggcaattcttgctttgtattggtagaaatcatcatcatcttatgtacatcggtgaggattacatgtaccgtgtctaatgtcatgtgcaacagtgtaagcctaattaagcagaggttaatatgtacatggggacgccatctcttaccagatggacggagcataggagaggcgggctacttccacaccttgacggcgccgtctctgcttcccgagatgagcctgtggctcgacaagttcacggaggccagcgcgaggatcgcgtctcggtggcaccccgcggaatccgcggcggccatggcgagctgcgtcttgtgggttagcctcgacgccgtcgtgggctgtctgcatatttcctgcacaacttgtacacaagagctggatcttatatcgtacgtctcgtcgtttccagctcctttcaccgagggaccggctatacagaagctttgctcaggcctggcctgatcccagtagcgtatcttcaagtccgttcctccggtcaataggtcccctcctggcaaaggaagcaaagagcggatgcctggaaggcgtggaggcgggtcacataattcttcaattcggtaattataattcgctggccgggtctcatctctggtatttggatgtattgatggtgcctttggtacaacagcttcattctcagtacttgctgttctaaatatctggtgacggcttccattctcagcatcccatagggtaacttcattgcagcctgcagcaacaaaaaccacaggtctcccggaagaagaaattgaattcggtggtggtataaacaagcacaatttctctataggggttgctggcaaatatttccatgagttaacgggaagcaaaaacctattatcccacaacgtaagaacgcctcttgaagacccagagatgaaccaattcccgcactggcccactacaagtgccgatacatagccctcctctggtgaagatctaaatgaccaagactcagcattggtccttgtatcccatttatgtatgccacaatgttcagtgctgaaaagaatggttgggctaaaactctctgtggaacagttcacaacactgagaattgcaccttctttcaaatctttcctttttacatcaacaatgccagaatacctttcgatgacactccctacaccacgtgcgcagtcaacagaaaacaagtgcaatgttccatcactagcaccaacaataacttggggagtaccatgaagcattgtcgtacatagagctcggctactaccgaggctatatgttaacctagatctgaaggcaatgtccttttccaattttcttgtatcccatatcttgacacttgagtcatctgaagctgttacgaaaaaggtattgtcggttgatacagcaatatcattgacagataagcgatgctcctgaagatgtgccaccagaactccacggggtttccaacttgtctccagagacaatgctggtctggtgaacgatcctgaattatcagagttggaaatgatatcacctggtatagacgagctgctattcattgagtcactgatgctcccatctcggtgcatgttactgaaatgattttctctagtacgtatgcctggaactgaacttgataaactcccatgccggtcagatcccaaatttgcatgtagtgctgtcccttgcatggagtataatggtattcctttaggtacgccatcataaaaggaactagatccatgtactgcagagcttatatatgctgaactagcagaagaaaaatctttaatgttcaaagacacatcattggacatcttaggtcctctcaaccttgaatcatcttcaatcatgattgatgaaccactttgtaccatggcaggataccttcctccatgcactgtcaattcttttttaccatcacccttcagtaaaatgtctcctgcatcatggacatcctctaaagcttggtacaagactaattttgagaccggaggcttaatacatgaaagaagagcagtttctgatgacaatgatggtggctccctgtgtaaaaaatgcttaagatgtggaaaaaggtatacaaaggtgtctacaggccctatgctctcactgcaagcaacaacaaatcttacagcggaccgtttaacccattggactggatgacacagcaagggaagagcctttccaaataggccaacaatcgcccttttcctcaaataaccacttttgcacatcatagtcaagcagtcaagtactttcacaagcacaacctccatttcatcacttagtgcctgttcaagatagggcaagagatactcctcgacacttctggaaccaataaaatagcacacaacaacaatctgaccaaaataaactgcacggagctgctcatcacggtcatttagaaatgctggaagtatgggaagaagaaagtcgttagtttgtctatgtccgaagaagtaacacaggtaacctatatcttgcagaagagctctgcggacattaggtgtctgtttctgtcccattaccaactcttgcactatttcataaatagattttctgagtcgtgcaagttgaccattaatgctatcttgctgcctctttactggtgattctacagactgtgatctgggagctaccattgattcatctagaggcctagcatcctctatactccgagaacgaagcaggaatctgtaggctgtcaaggccaacttataaatgttgctggcatagcaaaccctaacactctcctctgtatcatctgggagcaaagagagcattggaaggatgtactctgggaatatctttgcatcactgataggaaagtcttgaataagacaaagaacatcagatagagtttccaaagcagcacagcggactatggcagctggatctgaaagcatcgcaataacatatggaataaccagctgtaagcgactatcatcatctatgtatgtagaacaaatcttcagaagtatgagactagcccttctaagctctggctttttgacacttcgtatgcatgagcaaagtaatgaggcaagcaaaaccatgccttcacagctcaccttgtactctgtttgttggaaaatgtcaaaattataggtatctgattgagcatcataactagacactaacgcaagtaggttactctttgagatcttctgcaaatgtgatacacaattgttctggcccatcaaaccactttcagttcttccagcttgacaaacctgctgcaaggactgaataccatttgcatgggaaacattgggagtaacagaccggtctctgtcttgtgtgatctttgtacttgtacggtcgtccttctccagttccttgaggaggaaattgagatctccaacaatatgcttatgctgtgcaggactgtttatcttaactacaggtacacttttggcatattcttttggtgaatttacagtttgccctccgatgcccattttcccagacagttcattatgcacaggcacagtagcagatccttgaattttctcgagtgttgagccacttatcattatatcatgcatcttttcaaaatattcttgagtcttctcgaccctagcatctgagtgaagcggaacaatatctgagaaaaatttgtggagaaatttcgaaaaataaaccgggaatacaacagattcatatttttgcaagtagtttttgcatgatagcctttctttcgggtctaactgaatcatgtgaagtaccatgtcacggataccagtatcttgtatctcctgactattaggcaagaaaactgatggaataaaggacaaggcataactaatagctggaccaataaccagaattatttgtgcaacacaaaaggaacaaggaacaataccagaaaccttttcaagggtatgaatagggtcgtactgaccacgccgataagctagaagttgtgaaagctcaaaaagtggctgaccttctaggaaaagttcagcaagaacacacccaagagagaatatatccatagatcgttgcaaaggtgcatctgctgcgacttgggtttccgcaccatgctcatagaatctctcaggtgctaggtagcatcttcgccttccaccagtatcaaagaagaacgaaaaatcagatggatcatcatccgggatgtaagttggtttgaaagatgcaaagtccgcaagatatagccaattccaggaggtaacaagaacattctcacattttatgtcaccatgacaaatccccttactatggctctgctccacagcatggattaactgaaaagcaagccatttcttctcaattttactgaggaaaggccgtgtgcttagtcgatcatgcaggttgctgtagaaatactgcctaaggagatacgctgccttatccgtttgcaaccaaacctggaagggccagacgtgggatccctccaacccctcgaaggcgttcctaatccgctccagcctccgctcatgctccttgaggtcgaggggctcgccggcgcgcttgaagtagaccttgacgaggagcagcccctcgtcgtgcttgcagcggacggacttgaggaagcggccgcggctgacgacctcgacgagcacgaggttgtacgtggacgggaggtcgtggaggtagtactccgtcgccgacgcctgcgtcgtcttggcgatcttgttccccat

SEQ ID NO: 22637 - DNA, 280 bp, Oryza sativa
  Clone ID: PAT_MRT4530_27795C.1
agccgtacatgcagtaaacgcagataagtcggcggcgaaggcgaacacgaccatgggcctaacctaccgggtcctggccgccaagacccccttactaggccatccgcgacaatacagtgccgccgttcgggacatcgacgacggcgacaccggacgaataagcatgagcacggagcagcggtacgggccggatagggggaaggaccaggagccattctgggcgcatacgcaggaagacctgaagggcgagtcactggacgactacgggtgggacacgacg

SEQ ID NO: 22638 - DNA, 583 bp, Oryza sativa
  Clone ID: PAT_MRT4530_27796C.1
tgtctctgcccaggacggggctaccccgatgtacccagctgcccctccttgccgggctgctggcgaatgctgccctgtgcgtccggcggttccctggtacgagcacagtctcggcatagactgctgccggcagctcgccgccatctgacttgacagcttctgtaggtgcacccgctgcatgagccacatgttggttgtgaatgtatcaaggagcatcggtggcacacctgcgtaaagggcaaacccctggacgatggtgttcccatggctgccaggagaggcgacaatgagaacgcgtggctggcgagcctgcccggcgtgtgtgtggccatgtgagacattgccccttggcacttgggtggtggtgttgctgactgggctgagttgatgcctgatgaaccccgcgactggccaacctgaaagaaatgagctgaccctctggtgcgtggtgtcttggtggtgggtaaccctgatgattaattgagtggtgttgcctctgttggcttgggaaaccataataataatgtggtgaataaatgatgaactctgatattcttatgatgaaaaaaaaaaaaaaaaaaaa

SEQ ID NO: 22639 - DNA, 238 bp, Oryza sativa
  Clone ID: PAT_MRT4530_27797C.1
gccgaaatctcatgttggagttcataaaaacgttttaaagccacggttccataccaataaatactactactacgtttataactttcattaaaaaggtcatgacaaactgcaattgctattaattctctgcagaaatgtggcgtgagtaacagcaaactgctaggagtataagtaatctcctgcatcgcctaaatattacttactccacagaaaaaaaacagacggacggaatgcatgc

SEQ ID NO: 22640 - DNA, 440 bp, Oryza sativa
  Clone ID: PAT_MRT4530_27798C.1
ctggtttttttttttttttttttttttttttttttttttttttatgagaaaccttgtccattttttggacactcttgaaatcactttttgtagttggccttctgaaggaaaattcctataggcaaaaatggcggcggaagagataaaatgccgcattactaccaaggggggagatgaggaaagccataaaaacaaccagcactccggacgcccggcacctaggacggcatggaatactccttatttggaccaaggaatcaaacccggcaaaccagggttggaggggacagaggccccatgagcaagctggttgaagcatggacggccgggggaagagacaaggacatccgaaggagaacacggccaacacaaaccgaagaacattaaggccgtccagaagcacagaagataacattcaaaaggggggaacaacatacaaa

SEQ ID NO: 22641 - DNA, 258 bp, Oryza sativa
  Clone ID: PAT_MRT4530_27799C.1
atggagcgttcttctcccaagccggtcattgcgctcgtgctgttcgtcgtatgcatcgtcagctgttttgaggatgccaccgcccagtacagcggatcgtccaacaacggcgcggcggcgacgggccccatggccgccggtgggagctgctcacttgctgttgctgccgctgaccggtttgtgctgctcatcagggatctccagctgactgttgcagatttgtgtcctaatccagttaatgagttggaaaaatcatga

SEQ ID NO: 22642 - DNA, 482 bp, Oryza sativa
  Clone ID: PAT_MRT4530_2779C.1
gaattcctcgggtccgaccccacctgcgtcccgcatttaatttatgtcactgcactccaggaaccaccaaaagggaagggaaaatgaaaagaaaaggagggggaaaaacctcttctttctttctttctttcttcagtttggttgcgttgcgttgagtagatggtaatgccgcccacgaatccgcggcgagttcttgcgtcggagagtggcaatctgtaggagttttctgggagtttggttttttcaatctttcttgggttaagtttgtaacggaagaacagaatcaaatcgaatcgaatcggaagagaacgtaaattaatctgtggctttttggacgtcgctcggtcggcggcgatcggccggcgatggcgccgccgttgagggattactggctccggctcttccgcggcgcccgggacagcatcttcgacgccatcgacgcggccatagccgtcgcggagtaccgaccaccccgccgggct

SEQ ID NO: 22643 - DNA, 237 bp, Oryza sativa
  unsure (1)..(237): unsure at all n locations
  Clone ID: PAT_MRT4530_277C.1
atgccaccggcccgcgacgacgagtcgccggcggccaccggcgacggctactcgaagaaagttctgcagggcccgtacgagctcgggcgcgtgctcggccagggcgccttcttcaaggtgtaccgcgcgcgcgacgcccgcacgggcgcncacgtngccgtcaaggccattcgcaagcagcagcagncgcaccaccacccgtcgtgccgttcgcccaagcngnncgcccgcgccgaa

SEQ ID NO: 22644 - DNA, 162 bp, Oryza sativa
  Clone ID: PAT_MRT4530_27800C.1
atggggctgacgtgccgagcaattccatgggccgtgcggctacacgaaaccaggagaacaccgttggccagctaccggacacgacccgatgaacatgcccgtctaggcgtccatcgagtccactgctccagtacatccgaacctggacgcctctccgtccag

SEQ ID NO: 22645 - DNA, 410 bp, Oryza sativa
  unsure (1)..(410): unsure at all n locations
  Clone ID: PAT_MRT4530_27801C.1
actggaaaagaagaaagctgaatatgccgagaacatgaagaacaaagtcgcgatcgtccncnagggaanctgangagaaganagcnatggtcgaggcnnaacgcggcgaggaaatccttnaggccgaggagatggcagccnnnttncgtgccnccggccatgctccccanaaactcatcnggtgctttggggcctaaaaaaattttcgattcccaacgancanacgtgaaantgttcntccctggttgctttgcttctttcaccccccccnatgcgtantgtgtttgttngtgcnanaaaagtcctgcccggtgtgtttantctggtgttgctgtttataacatattactccccnacacatatgtttggggccntncatgtttgatgcntgacangcgaccttcctatgt

SEQ ID NO: 22646 - DNA, 1191 bp, Oryza sativa
  Clone ID: PAT_MRT4530_27802C.1
atggcgcagcccaaggccgcctccgccgccgcgcagctcagcctcgccgcctccgcctgcatcgccggagcggaggcggcggcgatggtgggtagggagggggcgccggcgatggtggcggcggcggcggcggcggcgatggtggtgatcgggcaccgggggaaggggatgaacgcgctggggtcggcggacccgcggctgagggaggtgaaggaaaactcgctccgctccttccacgccgccgcccgcgtcgccggcgtctcctacgtcgagttcgacgtccagacaggggcatcgaccattgttcaactgaacttaaaccagatggtgaccaaggatgggtacccggtcatcttccacgacgacttcatcttcaccgaacaagacggcgaaatatgcgggagacgagtgaccgatcttcgcttggacgagttcctctcttatggtccccaaaaggatcaaagcaaggctgggaagccattgttcaggaagctgaacgacggcagggtgctgagatgggacgtgcagtcggacgacgcgctctgcacgctgcaggaggcgttggacggcgtcgaccgccgcgtcgggttcaacgtcgagctcaagttcgacgacgacgtcgtctttgagcatgccaaggagaggccaatcttcttctccagcttccagcccgacgccgcgcgaattatgcgcaaactgcaagatagataccctgtgtacttcctgacgaaaggagggacgcaggtgttcgccgacgagaggcggaactcgctggaggctgccgtgaagctgtgcgtcgccggcagcctgcgggggatcgtgtcggaggcgcgggcggtgctccggcagccgtcggcgatcggccggatcaaggaggccggcctctccctcctcacctacggccagctcaacaacgtgccgaaggcggtgtacttgcagcagctgatgggggtggacggcgtgatcgtcgacctggtggcggagatcgccgcggccgtgtccgagttcgccgccgccgccgccgcggcggtgccggtgccggagcgtgattcttcttcttcttacatggacggtggtggagatgtggggttgctggagatgacgtcgccggcggcgaggacgacggcgagcttctctcggcgggaggacgtctcgttcttgctgaggctcacacccgagcttgtgcagtag

SEQ ID NO: 22647 - DNA, 389 bp, Oryza sativa
  Clone ID: PAT_MRT4530_27803C.1
atggcgaccacgccggcagcgacagtcgcggtgacccagcggcgcgagctgacgaacttggcggcaacggtggcggcgcacgtgctcgtcttcctggcgtcggggcagggccacatcaactgcatgatgcacttcgccatgggcgacatcgtggagctcctggagtcgctggggaccaacggcagccttcggcagcagcaccttgtcgttcttggtgcctccctaggggccttctcgttcttcacctcgccgaagcaagcggtgacgaccacgggcaccaatgccagcggaggctgtggtctctcccttgccttccctgatgccagcgagcacgggctccaccgacaccagcggcttctcctccttcccttcgccctcacccaacaggg

SEQ ID NO: 22648 - DNA, 645 bp, Oryza sativa
  Clone ID: PAT_MRT4530_27804C.1
atgtcgggtgatgagacggaattacccctgttgggtgaggacgaagggaaggaggagaagccgctggtgtcggtggagcccgtgctcgccggcatcagggaaggcaagggagagaccacagcctccgttggcattggtgcccgtggtcgtcaccgcttgcttcggcgagaacgcaaacatgttcccaccctcaccgcctccgccgcggccaccgcccttgtcccgccaaccaccggagcagaaggaggcatcttcttgtgcgggaacgagggcaggaggaagcatcgccgccgggtgcggcgcagcgcgtggagaaggcgaccgcggagtgcgcgtgctttatgcggagctcggcgaggtggtggcacgacgtcgccagcggcttatcgtgctctcttcaggcgctcgctgtccccgccgaccaccttatccttgccaccgtcgaggatcgtcatgccgcccctgccccagccgcatcaatcccctttcacccggctgccgttggtccccagtgactccaggagctccacgatgtcgcccatggcgaagtgcatcatgcagttgatgtggccctgccccgacgccgggaagaagagcacgtgcgccgccaccgttgccgccaagttcatcagctcgcgccgctag

SEQ ID NO: 22649 - DNA, 2101 bp, Oryza sativa
  unsure (1)..(2101): unsure at all n locations
  Clone ID: PAT_MRT4530_27805C.1
gttattttggctgcgtatttagtatcaccaccagtgggattagcatgtctcagcccaatgccctcgcttcgccgccgtcgccggaaccctaggccgacaccgccgccgtcgccgtcgcgggagccggagtcgtcggagctcccgtcgtcggcgggggaggaggaggatgcagctgcggatctcgccgagcatgcgcagcatcaccatctcgagcacctccgttaaccccgttcgttttatttgcgtttacttcgtttcttgggaaggcacttccttcctcttcctaggaaggcttgaggagccaagaggaagaggagagcaatgggggaagctgccggcgaccgcgtcctgagccgcctccacagcgtcagggagcgcatcggcgactccctctccgcccaccccaatgagctcgtcgccgtcttcaccaggctggttaacctcggaaagggaatgcttcaggcccaccagatcattgctgagtacaacaacgcaatctctgaggctgatcgtgagaagctgaaggacggtgcttttgaggatgtcctgaggagtgcacaggaggggattgttatctccccatgggttgcccttgccatccgcccgaggcccggtgtctgggagtatgtgagggtcaatgtgagcgagctcgctgttgagttgctgacagtccccgagtacttgcagttcaaggaacagcttgtggaagaaggcaccaacaacaactttgtgcttgagctggatttcgagccattcaatgcctccttccctcgtccttctctgtcgaagtccattggcaatggtgtgcagttcctcaacaggcatctgtcatcgaagctcttccatgacaaggagagcatgtacccactgctcaacttccttcgtgcacacaactacaagggcatgaccatgatgttgaatgacagaatccgcagtctcagtgctctccaaggtgctctgaggaaggctgaggagcatctttctggtctttcagcagacaccccttactcagaattccaccacaggttccaggaacttggtctggagaagggttggggtgactgtgccaagcgttcccaggagaccattcacctccttttggaccttcttgaggcccctgatccgtccaccctcgagaagttccttggaacaatcccaatggtgttcaatgttgtcattatgtccccacacggttacttcgcgcaagccaatgtcttgggttaccctgacactggagggcaggttgtctacattttggaccaagtccgtgctatggagaatgagatgcttctgaggatcaagcagcaaggtctcaacattacaccacgcatccttattgtcaccagtggagaccttgatgcaactggctaactgggtgatgtctaagcgcttcaggacatatttcaatttttcccaccctgtgatagctcggagtcttgacccagatgaatgtgcatgggcatatgggatgaatatatttgacttggcagcttggaggaagacaaacatcagagagacataccatttctggttgaaagagaatctaaaatctggtcttactctctggaaatttggcactttgccgcctgcgctaatagcattcaggggccacctgcatggcatagatccatcttggcacatgcttggcctaggataccaagaaaatacagacattgagggtgttaggagatctgcagtgatccactacaatggccagtgcaagccatggctagacattgcttttaagaacctacaaccattttggacaaagcacgttggagatgattgtagtagagatgccattgtttgtgagtaatttctgttgcattttactttggtgctcggttcggntttgatgtctgtgacaggaagcgcctgtttggtntgattaatgatcttcccccgatttttgacgttgttcgtgggaagagtaaagccaagcccccgggtgcttgtaccccctgccattgtgggtcctggtcccgccgttaaacgaagtcttctgagcctcgggcgaagctgcctaagccgcagccccagccccctgtggagaacgaaggccgggcggaggaaggcggccccggcgactaggaaggcggcg

SEQ ID NO: 22650 - DNA, 864 bp, Oryza sativa
  Clone ID: PAT_MRT4530_27806C.1
atgaagcgtgcactcatagccactttgccattttggccattttgtgtatttttgaaatcattttcactagaatgtcgggtgatgagacggaattacccctgttgggtgagggcgaagggaaggaggagaagccgctggtgtcggtggagcccgtgctcgctggcatcagggaaggcaagggagagaccacagcctccgctggcattggtgcccgtggtcgtcaccgcttgcttcggcgaggtgaagaacgagaaggcccctagggaggcaccaagaacgacaaggtgctgctgccgctggacccgtgggtgtcgtcggtgtcctcgccgcgtcctccaagaacgcaaacatgttcccaccctcaccgcctccgccgcggccaccgcccttgtcccgccgaccaccggagcagaaggaggcatcttcttgtgcgggaacgagggcaggaggaagcatcgccgccgggtgcggcgcagcgcgcggagaaggcgaccgcggagtgcacgtgctttatgcggagctcggcgaggtggtggcacgacgtcgccggcggcttatcgtgctcccttcaggcgctcgctgtcctcgccgaccaccttatccttgccaccgtcgaggatggtcacaccgcccctgccccagccgcatcaatcccctttcacaaggctgccgttggtccccagcgactccaggagctccacgatgtcgcccatggcgaagtgcatcatgcagttgatgtggccctgccccgacgccaggaagacgagcacgtgcgccgccaccgttgccgccaagttcgtcagctcgcgccgctgggtcaccgcgactgtcgctgccggcgtggtcgccatggccgtatgctaa

SEQ ID NO: 22651 - DNA, 1355 bp, Oryza sativa
  Clone ID: PAT_MRT4530_27807C.1
tccgtctcctgctcccgccgctcttcacacggctaacgcctgcttggctgcgagacaaaccgaaccttttgctcttgcaccgcctgctagcgaactacgtgtgctcccgtgatcgatggggcgggcgccgtgctgcgagaagagcgggctgaagaaggggccgtggacgcccgaggaggacgagaagctcatcgcctacatcaaggagcacggccagggcaactggcgcacgctccccaagaatgccgggctctcgaggtgcgggaagagctgccggctgcggtggacgaactaccttaggccggacatcaagcgtggtcgcttctccttcgaggaggaggaggccatcatccagctccacagcatcctcggcaacaagtggtcagcgatcgcggcgcggctgccgggccggacggacaacgagatcaagaactactggaacacgcacatccgcaagcgcctcctccgcatgggcatagaccccgtgacccacgcgccgcgtctcgacctcctcgatctcacctccctcctcaagcccgccgccgccgccgcgtactaccccacgcaggccgacctcgacacgctccgcgcgctcgagccgctcgccggctacccggacctgctccgcctcgcctccgccatcctccccgccgccacgacgaccggcgcagccgccgccgccgccgccgagcaggcgcagcttctcctgccgtggctgcttcaggcgcagatggcgcagcagcaacagcaggtgacgccgccgccgccgccgccgccgcaggccgcggcgaccgaacagttcttgcaggccaccagcaccgcctgccaccaaatgccaggcctggttcacgccagcccgacgcagcagctggcgcagcaaccgcaggatcacatggcggcggcgacctgccaccgccgcggcgccgtgcagcacccgagctacgacaaccagctcgactacgtgccggcgctgatgcagatggcgtccgacgcgtccaacctgcagcagtggagcagcacggtctcgagtagcaacaaccacaacgtcaactccggcgtgtccacgccgtcgtcgagcccagcagccgccggacagatcaactcatcctctacgacgacgacgacgacgtatggcttgaacgcgagcggtgacgtcgacgacgctgggctgctcatcaacatgcacctatccgagctcctcgacgtgagcgactacatgtaataagatttttccttgcgtggaaacagagccgaatcgaacactccacgccatgtaccaaaggggcaaaacatgatcatcacaagaggcaatttttgtacaggattgtaccaaaaaaaaaaaaaaaaaaaaaaaa

SEQ ID NO: 22652 - DNA, 1329 bp, Oryza sativa
  Clone ID: PAT_MRT4530_27808C.1
ctagtggatcccccgggctctgggcacgcgtgagagtgaggagctcgcgaactccaaaaccctaaccctctcggagcttcacatcggcggcggcggcggcgatggcggagggtggcggcggaggaggagggtcggcggcgtcggcggcgctgaaggatcaggggaacgagcagttcaaggcggggaactacctcaaggccgccgcgctctacacccaggccatcaagctcgaccccgacaaccccaccctctatagcaatcgggctgctgcatttctccatctagttaagcttaataaggcactcgctgatgctgatacgacaataaaactcaagccacaatgggaaaagggtcatttcaggaaagggtgtgttttagagtcgatggaacactatgaggaggcaatatcttcttttcagatagctttgcaacacaatccacaaaatacagaagtttcaagaaaaattaagaggcttactcagttggcaagggaaaagaagcgggctcttgatgtggagaacatgcgttctaatgttgatgttgcaaagaacttggattcactgaaaaccgagctggctggaaaatatggagatgccgaactggggcaaagtatcttcacttttgttgttaatgtgattgaatcagctataaaggtctggcatgacaccggaaaagtagatgcaagagttaattttcttcttgatgaccagaagactgatactgaaaaacatgccccagtggttaacattgacaaggcctttgactcaccccacactcacagcagttgcttcacatttttgcggcaatattccgaggagtctttctcaaaggctgcttgtatggtagcacctaagagcgccatctcgtaccctcaggtctggaaaggacagggatcaagaaaatggaagcttgaccagagtgatggtttctttgtgcaatttgagtcaccaattctgcggaagatatggtttgtccctagcacaactgaaaagggacgagtattatgcaggagtcctgagctcctggacattagcatccacgaagtgcttccccgtatattcaaagaaacggcttgaataaacaacaaatggacagtgaatggctcccaaattcttcccctgttgtggtcatattctttcctagcttacagttgcaaaggggatatttttcatagcgtggtgagagcttagatttgcatgccagattttgtaagctgttgatctgtattgtacaccgaggcacacaaattttgctgatctggttttttaattatatatgccttaagtggtgcaatttccattgtaaaaaaaaaaaaaaaaaaaaactcga

SEQ ID NO: 22653 - DNA, 1098 bp, Oryza sativa
  Clone ID: PAT_MRT4530_27809C.1
atggcggagggtggcggcggaggaggagggtcggcggcgtcggcggcgctgaaggatcaggggaacgagcagttcaaggcggggaactacctcaaggccgccgcgctctacacccaggccatcaagctcgaccccgacaaccccaccctctatagcaatcgggctgctgcatttctccatctagttaagcttaataaggcactcgctgatgctgatacgacaataaaactcaagccacaatgggaaaagggtcatttcaggaaagggtgtgttttagagtcgatggaacactatgaggaggtgagagtaaaggacaattccttgctttttctcaacagggagaaggataattatctcttttttattttctgttatgtaagctttagccaagccttccgtatttggcaagctgagaaaattgtggcaatatcttcttttcagatagctttgcaacacaatccacaaaatacagaagtttcaagaaaaattaagaggcttactcagttggcaagggaaaagaagcgggctcttgatgtggagaacatgcgttctaatgttgatgttgcaaagaacttggattcactgaaaaccgagctggctggaaaatatggagatgccgaactggggcaaagtatcttcacttttgttgttaatgtgattgaatcagctataaaggtctggcatgacaccggaaaagtagatgcaagagttaattttcttcttgatgaccagaagactgatactgaaaaacatgccccagtggttaacattgacaaggcctttgactcaccccacactcacagcagttgcttcacatttttgcggcaatattccgaggagtctttctcaaaggctgcttgtatggtagcacctaagagcgccatctcgtaccctcaggtctggaaaggacagggatcaagaaaatggaagcttgaccagagtgatggtttctttgtgcaatttgagtcaccaattctgcggaagatatggtttgtccctagcacaactgaaaagggacgagtattatgcaggagtcctgagctcctggacattagcatccacgaagtgcttccccgtatattcaaagaaacggcttga

SEQ ID NO: 22654 - DNA, 6079 bp, Oryza sativa
  Clone ID: PAT_MRT4530_2780C.1
ggccgcgggttttttttttttttttttctttttttttttttttttttgcagaaggtacatttgattcagaactgggtatcatttacagtaaacacatcataatcaaatgtccaaatagagtataccagtgaggccaactgcatcatctgaaagttctgaacctttcccagaggaggccaaagtaataataccatggtttttccttacatttggtacaaaatagttagatgtcaccagtcagtacaattttcacaggtccagcaaacagccgcagcaacctcactcctagctgctaccttgtgagctttaacatactgggatcttgttgcaacttgcaagcttcaggacaatagttccttgggctcctgctgttttcgggtcaccgatatccaaggcggcacatcaaggagcaaatcaagcaatatacatcaaaacatagttgtagctggctacattgggccaattggttggtatgaacaaatggcgattcgactaggatggctgataaaaatcactcttccgacggacaagaattagcagcaaactaccagtgcgctgtcatcacctcggccctgatagctcaaccgcatgaaggttgtccgtcgagtcgacaatccactctgagttccgatgagggccaaacgttacctctgcttttgctccagtactagatgaactccctggtgaccgcacgggtgttggtgggtgatgtagggacgtttgattcaaaactaggtatatatcctttacaggaaacacacacataacgaaatacccaaataaaagtacaccatgggcaattgtgtcatatgaagccttcccaaaggaggcaaaaatgacacccagttccatcctacaaaaatctagaattagtagggcggtaatagcaggtagtaatttcgcaggtcaacccgacaggggggttatcgttatccctcgcgactatttggtaaaatatagtgtcctggggcatgcatgaaaaagacaagtataatgatccaagtagaataggacgctgactaaacttgtgagatttccaagaaaagcacgtccgtaacaagagaatcaactcaaattaaccggtgagcattcatcaccttggccctgataactcgtccgcatggaggttctcattggggtccacagtccaaccatgctgatacaggccaagctccacgatcctgctgtactacttctatcttctgccactccttccatctttcagcaaggccatcaccttcatcaagcatcctcaccaccgcagccatcttggggcgttccagaggggagccttgtgtgcaaagaagcgcgacctggattagtgattctacctcagcatcaatgtacttgttctgtagatctggatgaatccacttctcctgctctttctcctggattaatcgtgtgaatttatctgaccctggcacagcagcaaggcacaaaaggtcatgatcatctcgaccagtgcagttgcataacaccgtcacctccgctagcagaacacgatcaaaggcacgttttccttgtaataagctccaaaagcatgattccatagccaaatacatcagttttctcagagagaattgcctgttgaaagatattctggtgcaatatgtccaattgttccatgtactgcagttgttacatgggtatccttgtaatccattagtttggccaaaccaaaatctcctactacagcttcaaagtcttcatctaataaaatatttgcagctttgacatcacgatggataatctttgggtcacaatgatcatgtaaataggacagccccctggcagaacctgctgcgatccttcttcttgtttgccaatcaagtggaggttcagatggtggtcgttctctaagacgtgaagcaacgcttccattagccatgtatggatacacaagcaacctttctgtgggtgtcatacagaacccacgtaaacgcaacagatttctatgtaaagccatgctaatcatctcaacttctgtttgaaactgtagttccccaccaggtgttctctgctcctttagtctcttaacagctactaaagaaccatctgctagtcttcctttatagaccttgctaaaaccgcctgtgccaagaatgtttttattgttgaaggtctttgttgcaacttgaagttctcgtagcgaaaatcttttaagctggccaagatggaccccaggtacaacaggaaaatactcttggggtttcctgcgtcgccaccaggcaaaaccaatagcaggaatattaaatagcaaggctgctccagcagccactccaccagaaattgctccagtacgagatgacctcccagcatatgtaccacatctcactgggggaaaaagaggctgttgcatagcagtgaatctgaatgaatcacctgggttatatggaggcggtgggtgaaggggcggagcactgggggtgccaagaccacacaaggaagtgttgttggcaaaactgttaggtgcagataatgaaaacgaactagttaatggaacctcctgtcgaactacttctatcttccaccacacctcccacctttgtgcaaggccatcaccaccttctagcatcctcaccacctccaccatcttggggcgttttacaggggagacttgtgtgcaaataagcgcaaccttgattagtgattttacctcaacatgaatgtaattgttccgtagatctggatcaaccaacattttcagctttttctccttgagtaaccgtttgacccagtccagtagaaatatatcctcatctctggcacggccatcgtgatataaggcacgctttcctgtaataagctccaaaagcatgatcccatagccatatacatcagttttctcagagagaattcctgctgaaagatattctggtgcgatatgcccaactactccacgtactgccgttctatcatcagtatccatgtcatcctctagtttggccaaacaaaaattccccactaatgcttcaaaatcttcatttaagaaaatatttacagctctgatgtcacgatggataatctttggatcacaatgatcatgtaaataggataaccccctggcagaacccaatgcgatccgtagtctcgtttgccaatcaagcggagcttgagatggtggccgttctgtagaatagcacccacttagtaaatgttctatatcttcatacaggtttctatgcacaggcatctcaacttgtgtttgaaactgtcgtgttctccgactccaatccgctgttggacaatccatgtgaacaactactaaggaaccatcttgtagtcttcctttgtacagtttgctgtcgaatagatcaacaagaacgttgttattactgaagaaatctgttgcatcttgtagttcctgtagtgaaaatattttatgttcatgaggataggcctcatctggaccctggccctcaaattcttgacttgtctcacccaataaacaatttccacaatcatactctaattggaatctgctagtcggacaattgggaagcgtctcgatggtagctttgatgaggcttacaacagacctggtgatgctatcgtccatatcttgtgccggatcatagataccgtcagagcaaatgttgccccatataccgatctcgactttggtaagggcggagaggtgctggatgccgaaatcagaagcaccattcaggcaatccattccatgtaaacggaattccacctggaggtgctcaagctttggcattgaccctgcttcaaactccagcatggtcccacatctcttgattcgtaacgagaaatatgtcagacttctgaatccttggttgccacagatgatgatccttccattgatgccacacagagttctgacttcgagaaaacacaagctgggtattgcgccaaggatctcaacatcattcggtcccattctacggatccagagttgtaattcagtgaggcttccaagagagctcatccagtttgggaccttacggatgtaacagcctatgatatgaagcttccggatgatgcaaggactaggagggtaccacttctccatgatcagtgggccaccggtcaaatatagatgatgaaggttgctagatagcaaagctgacacgtaattttgacactcctcagcatctgaccaccaaaaaagatgaactttcaacgtcctaagctttgatagctgactgaatccttgcagagacttgcctagttcacatgacacgccaaattcctctagttcttccaggctctgcatcttaccaattaaaccatcaggaaatctagtccatctttcaacatatagatgggccaggcactcaagttttgcaatacttagcggaagctcttgaattttggtatcacatatgtccagtgtttgtagataatgcagttgttcaatttttgttgggagcttagttattgatgttgatcgaagagacaaatacttgagatgatgcagcttgtcaatactttcaagatggttttctgtcaaccctgattttgataggtccaacacacgcagagttgggaaaacaaacaaggaagttccattgacatgctggaatatagtaagtgaccggacatgggagagattcaggcttgccgatttgttaaccttttcttcattgtgattcttggcacagagcctacgtactctgaattttgaaatatggccatgctctgcaaaatccaatgtggtgacaaaattttctttagtagccttgcatgtgatgaaatcaagaatgatgtcatgaactcgacatgccttcgcctggccatattttaaatcaactggctggatcaaacttctattgataagatcattaaaatagttctggccaacttcataggtgctccatccttgtttctcatgaacgaatccttcagcaatccatctatttatcaaacgttgcttgttaaccttgtaatcttctggaaatatacacaagtataagaaacatgttctcagatggtggggaagttcaaagtaactaagagataatatctttgtcatgttcccagcatctggattgttagcaagtgcacaaccaatatcatttagcatcctgtcccattcatcttttgcatgcttgcccgctaacaagctagatactgtaataattgccaatggtaatccaccacacttagccaatatctcatcacaaactttttccagatggggattgtataattccctggaacgaaatgctttttggcaaaacaacattttggagtcagcaaaattaaggggttccatttgataaacacaaccaccatcacttgagcaatgtgatgcaactgcggcattacgtgttgtcatgacaattctgctaccacatctattattgaacaacgctaggctgacaactttccatgcttccacatcccatacatcatcaattacaacaaagtaccttttatctttgaggcggtcccttattctgtctatgagttgccgctcatcttcagatgtgtaatcagtgatccccagaccaccagaacccacaatggacaacaccttgacttttacatctcttatccccttggcaaaccactccatgatatgctcctttggtccattgattcccacaagctcatcaacctcaacgtagagtgctggaagcctagggtcaatatcagaagtggtacagctggctaccagaccaataaaattatacctcttgtgcctcttgcttgcctctatcacacgtgtcttgagttcttcgatctcattagagatttcatggcaagccttcatcttcttcagtttgtatgagaatcccttaaagaatgtagattgttcatcttgcttgtgatcaacaaggaccaagaaggaatcaatgaaatcttcgatatcataggccagctcacgcacggtgtccctccaatccttgtgcaggggatcaagttcctctacagattcaagcatctccaaggcagccttcatgctgctcaactcatctctaaagaaggcaatttgactgtgtacacctttgagcttggtgtacttgtcctccaacatcttggagagcttggacaggacggtgttcatcactcttgtagaaacacgcacaagcatcatcgccat

SEQ ID NO: 22655 - DNA, 428 bp, Oryza sativa
  Clone ID: PAT_MRT4530_27810C.1
gtcctattcttttgaattttttttttttttttttttttttctttttattttttttggttttggtttttttttttaaaaaacgggttgcaaaaagggatgctttttggtacatacatagaattggccgggcctaatgccccaattttttttttttaaattttttcttttatccctaaagggccaagcctgtagtttgaaccaattaaaaaaaatgggcctgggccggggaagaaatttcaaattaaggcacaaaatccttctttttttaaggggaaaaacttttcttccacttttcaaatttacagggcccagtatttttttaaacaaggggcccttctttgcattttacgcctacctacattattattaaaaccccccccttgttgggctggggggagccttgggctttatttggggcttttttcccc

SEQ ID NO: 22656 - DNA, 391 bp, Oryza sativa
  Clone ID: PAT_MRT4530_27811C.1
tgccctcgccactgtcgaggcggcttcagtccatggccaccgccgtatagacggccttgatctgcaatgttcaaacgaggtctcccgcccccgcctcatctgtgataatggcatcggtgtgatgaccacagaggatggtcgctggtcggcatcggcggcatggctggacagcatcggcggcaagactggaagctgcccacgcccaggatacatggtggcatgctgatctatggctctaagaatgaaattggcagtagctttgatttttggtctgcattcgatgagatgttcttgattttcgattaccatgttcttgatttccagatgcttgatattatccacccaacggtatatacgaggggttcttttactttaaaaaaaaaaaaaaaaa

SEQ ID NO: 22657 - DNA, 360 bp, Oryza sativa
  Clone ID: PAT_MRT4530_27812C.1
cccgtcccatgggcccccccgaaccccaacaccaccaagtcgcccgtttatagtgcggtcccccgatgtaggccggggggcgggaggagcttgccggggccccgccaccgccgtttcctccttccgcgtgctggcgagctccggcgccgcaataggcactgtttcctccctccccacgcgccgtcacctctcgtcctctgtgcgccggcctccttcctccgtgcgtgtgatgccacagcccaccctccgcacgccggcaagctccggcgccgctccctccctccccgcgcgccggcctccatcttcctccgtgcaagcgccgccgccgggtcggcaacgatgacgacgccgccgtggtga

SEQ ID NO: 22658 - DNA, 413 bp, Oryza sativa
  Clone ID: PAT_MRT4530_27813C.1
aaatacgcgtgcttgagggggggtattgtctgtgtcttttgtagtcacctgaaattgaatctactggctgggggggggggggcgtacaccctgggcaaaaccctggggtttcccaactttatcgcgttgtacttctttggccatttggcctgctggcgaattggtgaagtggtccgactctttcccttttgaaaacttttgcagagcctgaagggctattggggggtgccctgtacggggctttttagcgcggggggtgtggtggttccccccatgttgacggtttcatttccgagggccttttgtcccgctttttttggtttctttactttttttttggccctttgcccctgtttttccctgttctctctgaatggggggctccttttagggttttgttttcgtgttttttg

SEQ ID NO: 22659 - DNA, 591 bp, Oryza sativa
  Clone ID: PAT_MRT4530_27814C.1
atggaaggcgatgcggtgctcgactgcgacgtcttttcgtacaccgacgctgacgacgccaacgcgcacttctcctcctccgtcttcgccagctcagcctctgactcggccatgtactcatactccgacgaggagcagctgctcaccactggcgacggcagcccgagcgagtccctctcgtcgacggcaaagtcgtcttcctcaccgtcatcctcgtcgcggcgcctccagaggccgtcccttcgcatgcagccgcggggccgccgtgcctccctgcgcgagcgcccgccgcgcctccctgcccgcgcccgactccgccacaatcaagcctgggaggggatgaagggaggggcacatgcaatgctcatggtggtcggcgaggtcatcaagcgggagagttttgagctcttctgcgtgctcgagcttgtgctagccactaagttgaggaagcaagagggaggaggtggcctagcaaggaggtggaggaggaaggagcgagaaagagagattggcaccgtcctcgcttcccccatgagtggtctggtccgatggatcaagcatgtggcaacagtgcacatcgagcaagcgtag

SEQ ID NO: 22660 - DNA, 659 bp, Oryza sativa
  Clone ID: PAT_MRT4530_27815C.1
tttatttttttttttttttttttgagaaccaatatgagatttgttttcactgagtaactgaaactttgattgcatcatccttgatgttcatcagatattcagactgaaattcaactgtacaagtttatttcaagaactggggtgaaaaggttgtactccctctgttttttgtatttgacgtttgctaattcaatttaaaatggtagggggtactacaatgatcaactaaacggaataagtttgctccaagatttcttgagaaaaacctgaatcgtcaacttgtggcctatgaagttgcctgctgcttcaactgtggtgatatgcagtatttctttcagcaagaggtacattgtagaactgtgccaggtactccaaagcttcatgattcccattgcaaaccttccaaagagatgctacttctcccggagcaacggttccccactcctcgccggacgccaggaagcccaatagtttggagtagtaaaaatcataattgaggagcaagaatggaactggaagcgtgaaaccgacccgctccagttgaattagcgccatcatctcaaaaagctcatccagcgtccctatcccaccaggtaatgcaatgatggcagttctatcggtagggacagttccgcaccgcggaatcaactaacccatgc

SEQ ID NO: 22661 - DNA, 511 bp, Oryza sativa
  Clone ID: PAT_MRT4530_27816C.1
gttcaagatatcagaaagaacaacacataccaggatgtctcagctcaagtcttctagcctggctgcactgctgatcttcctcctggcagtgttcaccactgcagcagcagcggcaggtacagaatgccagaacgatgtcgaggtgctgaagacaacctgctacaagttcgttgagaaggacgggccgaagctgcagccatcacctgactgctgcacctccatgaagggcgtcaacgtgccctgcgtctgcacctacctgggcagcccaggcgtcagggacaacatcaacatggataaggtgttctatgtcaccaagcagtgtggcatcgccatccccgggaactgcggaggtgagcaggcttcacttgattggccacactgatcacctgggtaagaactgacaataacacgccggctcctctggattgcgacttccagtggggcccaagtgtcggtgtcagctgggatccaaggtctaaaacaagaactgattgacttgtgaagttggctg

SEQ ID NO: 22662 - DNA, 536 bp, Oryza sativa
  Clone ID: PAT_MRT4530_27818C.1
acttcctagttatgattgatgctgcaattgcttcactgactaatatatttgagcagatgaaagcatttgataatgtttttgggtttttgttcaactctgaaaatttaaaatccttagatgaagttgatctttggtcgcactgcaagatttttgcggaaatatttactcatgagaactcatccgatgttgagatcaatgatttttattcagaattaaaggtgttgcaagtgagtttgccagattcctcgatatccgtgcctgagattctgaagtttgttatggatgcagattgctatccaaatgtttcagttgcctatcgaattctcttaactgtacctgtgacggtagcttcagctgaaagaagtttctcaaaattgaagttgttgaagaactatttgagatcaactatgtcgcaagaaaggttaaatggcttggctatgtgctctatcgagaaggatatcttggacactattgatcttagtaccgttcttgatgattttgcatcaagaaatgcccgaagaactttcttttcatga

SEQ ID NO: 22663 - DNA, 804 bp, Oryza sativa
  Clone ID: PAT_MRT4530_27819C.1
cagcaatcgagctagtaatcaggagctcctgaaactccagagagctaatcgctcgtcagcttagtgcgcgtgatccagcagcagcaatggcaggcaaggcctcgatcgcgctattcctcgccgtcaacctggtggtcttctcgttgggcagcgcctgcggcggccactgcccgacgccgacgccgccgaccccgtcgacgcccaccccgactcccgccgcattcggcaagtgcccacgcgacgcgctgaagctgggcgtgtgcgccaacgtgctgggcctcatcaaggccaaggtgggcgtgccgccggcggagccgtgctgcccgctgctggaggggctcgtcgacctcgaggcggcggtgtgcctctgcacggccatcaagggcaacattctcggcatcaaccttaacctccccgtcgacctcagcctcatcctcaactactgcggcaagcgcgtgcccaccggcttcaagtgcttctaaaggctttataaagtagccgcgcgatcgatccatgcacgtctcaacgcaacaggggtttatttggttcctacgtgctagcagcgtgttgtcacttgtcatgcatgggcatgttcatgcatgcgtgcatttggtggcaagaagtacgtatctggtttgattcgatatgattttgtttaatttgtggccttctccgcgcgtacgcgagattatgcatcggggtacatgtttgttttattttttggaaattattgtttgattcatatcacttgtattgtattcagtacgtaaaaataaagtctctctgctctgttatttgtaactg

SEQ ID NO: 22664 - DNA, 304 bp, Oryza sativa
  Clone ID: PAT_MRT4530_2781C.1
cgtaaaaacagttacaaacgcgcacattacacgcagaaatccgcatatcagacaccatggcgaccacgctgtccaacgtctggctgtctaccgaggcgggggtggaatcggacgatccatggcccgctcgccgaacgcgacgcggggtgtgtgcccgactgggacggggtggtttccccacgcgcacggcgagaggaactgtgacgccgccagacatgtcggacaagatgtttgagagcatcaacgaggacaaagaggcgagcgcggaagacacggtgagctgatagtgctcggaagagaaaga

SEQ ID NO: 22665 - DNA, 180 bp, Oryza sativa
  Clone ID: PAT_MRT4530_27820C.1
tgacttgcttggacgaaggaaaagaggccgagcataacaaatgcatggatgatcaaagaagttgattggggaccaaaccaagaccttctccaagtctacttctacctcaccacgtcacttttagtccatataagacaagagataaagttctacatgtcttggactcggatttaggcctct

SEQ ID NO: 22666 - DNA, 486 bp, Oryza sativa
  Clone ID: PAT_MRT4530_27821C.1
ctcctctttgcaaagcccccattgccgccatgccgccgccgtacagtcatatcaaggtggtaagggaagaggatttccgctcgcgtattggggaagatggccactacttcgatctcatcgacttcagcgcaatcgagggattcaacgtcccgcctaccatgaccatcctccgattcaaggagaagctcacggagaaatttggaacccctctgcaatgtcaacgcctgtggtggtgggctagacgtcagaacaacacataccgtgttgacaggccgttgacaaccgaagaggagaatctacctgtagaaagtctaatttcagcattgtgtttcgaaggagatcatctacagctttttctggaggtgctcaacactaattccctaccaacatggagcaacatggatgatgcactggtgtttctaaagcattatgacccagggaaagcacagctaagggttgttggatggctgtccgtgaaagttgctt

SEQ ID NO: 22667 - DNA, 720 bp, Oryza sativa
  Clone ID: PAT_MRT4530_27822C.1
atcgatcgagttatcaagagataattaatatcgtttcggtttagtgcgcgtgatccagcagcagcaatggcaggcaaggcctcgatcgcgctattcctcgccgtcaacctggtggtcttctcgttgggcagcgcctgcggcggccactgcccgacgccgacgccgccgaccccgtcgacgcccaccccgactcccgccgcattcggcaagtgcccacgcgacgcgctgaagctgggcgtgtgcgccaacgtgctgggcctcatcaaggccaaggtgggcgtgccgccggcggagccgtgctgcccgctgctggaggggctcgtcgacctcgaggcggcggtgtgcctctgcacggccatcaagggcaacattctcggcatcaaccttaacctccccgtcgacctcagcctcatcctcaactactgcggcaagcgcgtgcccaccggcttcaacaacaatcgtgtggaagccctcacggcaccttggcatcctcacagtggtggcgcacacaccaacagtggcagcaggctgctgaagttggagatggtggacaaggagggccccatcggcctgaccggtcagaccgacatggggtggccggtcagaccggcctcggctcggtcagaccgccatcagctcggtctgaccgactacggctccgtcggctctgtatcggccatcccgagcagcatcatctcggcctccagggggccggtctga

SEQ ID NO: 22668 - DNA, 228 bp, Oryza sativa
  Clone ID: PAT_MRT4530_27823C.1
atgtggccggtcagaccgtgctactctgcaacggctagaaaactagccgttgtagccctgtcagagggccccatcggcctagccggtcagaccggcatggggcggccggtcagaccggcctcggctcggtcagaccaccatcagctcggtctgaccgactacggctccgtcggctccgtatcggccatcccgagcagcatcatctcggcctccagggggccggtctga

SEQ ID NO: 22669 - DNA, 228 bp, Oryza sativa
  Clone ID: PAT_MRT4530_27824C.1
atgtggccggtcagaccgtgctactctgcaacggctagaaaactagccgttgaagtgttgttagagggccccatcggcctggccggtcagaccggcgttgagtgggcggtcagaccggcctcggctcggttagaccgccatcggctcggtctgactgactacggctccgtcggctctgtatcggccatcccgagcagcaccatctcggcctccagggggccggtctga

SEQ ID NO: 22670 - DNA, 1774 bp, Oryza sativa
  Clone ID: PAT_MRT4530_27825C.1
gttaccacgttcgttataaccatactaggtgtgtcattactatatcaatctttatgtcattgtctgattttttttttttgaagagactcgatcttatgtatctacttattgtctttttgcctttgctcggtagttccgtagccggttttttcggacgttttctaggatctgaaggaaccgctataatgaccaccatgtgtgtttcattttctttgatcttatctttgattgctttttatgaagtcgcactgggagctagtgcttgctatctcagaatagctccatggatctcattggaaatgtttgatgcttcttggggcttcgtgttcgatagcctgaccgtagtaatgttaattgtggttacattcataagtagcttggtccatctttattccatttcatatatgtctgaggatccacatagccctcgatttatgtgttatttatccattttttactttttttatgctaatgttggtgactggagataactttctccaattattcctgggatgggagggtgtaggtcttgcttcatatttgttcattcatttctggtttacacgacttcaggcggataaagcagctataaaagctatgcttctcaatcgagtaggtgattttggattagctcttgggatttttggttgttttactctctttcaaacagtaggcttttccaccatttttgcttgtgctagtgctcccagaaatgaatggattttttgcaatatgagattgaatgccataactctgatttgtattttactttttattggtgctgttgggaaatccgcacagataggattgcatacttggttacccgatgcaatggagggtcccactccagtatctgctttgattcatgcagctactatggtcactgctggcgttttcatgatagcaaggtgctcccctttgtttgaatactcacctacggctttgattgttattacttttgcaggagctatgacgtcattccttgcggcaaccactggaatattacagaacgatctaaagagggtcatagcttattcaacttgcagtcaattaggctatatgatctttgcttgcggcatctctaactattcggttagcgtctttcacttaataaatcacgcgtttttcaaagcattactcttcctgagtgcgggttcggtgattcatgccatgtcggatgagcaagatatgcggaagatggggggggcttgcctcctcctttcctttgacctatgccatgatgctcatgggtagcttatctcttattggatttccttttctaactggattttattctaaagatgtgatcttagagctcgcttacacaaagtataccatcagtgggaactttgctttctggttgggaagtgtctctgtccttttcacttcttattactcctttcgtttactatttctaacatttctagtaccaactaattcattcgggcgagacagattacgttgtcatgatgcgcccattcctatggccattcctttaatacttttggctctcgggagtctctttgtaggatacttggccaaattctggccttgcaccgaccatccaacggaccatggactaaacggccactgcctgaaaggactatgctatgtccaggggaccgccaccctccacgaggtacatcttgcgcctatgggcccacaaagaagagaaaacacatatgttaggttactttgctaactaaatcccaggggaaggcttactaaatagaggagtaaaatagggaaaggctgactaaaaggagaaaggtaa

SEQ ID NO: 22671 - DNA, 204 bp, Oryza sativa
  Clone ID: PAT_MRT4530_27826C.1
tatagtagtataggagactccaatagaagtcatgcatcatcgtgtgtgacaagtttgaaacatcggggtggatacaatctgaataaatgtcatgcaagtttacatatgcctctgtaaggataaatcctagtacattgttgaaattaattatcatcaccgtctactatggttgcatttacaactttaaaaaaaaaaaaaaaaaaa

SEQ ID NO: 22672 - DNA, 1346 bp, Oryza sativa
  Clone ID: PAT_MRT4530_27827C.1
ctcgacctccccgtcgacccccgcctctgccgcggccgctccggcttgcgcgtcccaccccccagccgacccatcatctccagctgatcaagagctcttaattagctagctagtgattagctgcgcttgtgatcgatcgatctcgggtacgtagcaatggcgtccaaggcgttcgctctgttcctggccgtgaacctcgtcgtgctcggggtggcaagcgcctgcggcggcagcccgtcgtgcccgacgccgacgccgtcgaccccgacaccgtcaacgccgacgccgacgccgtcggcgttcgggaggtgcccccgcgacgcgctgaagctgggcgtgtgcgccaacgtgctgggcctgatcaaggccaaggtgggcgtgcctccggcggagccgtgctgcccgctgctggaggggctcgtcgacctcgaggcggcggtgtgcctctgcacggccatcaggggcaacatcctcggaatcaacctcaacctccccatcgacctcagcctcatcctcaactactgcggcaagaccgtccccaccggcttcaagtgctaagcagcgtgcatatgcaatgcctgcatgggttgatcctacgtacggtgattagttggctttgacgactcttgatttgatttgcttgctgctctgtttatttgctactacgttacgtacgtactttgcatgcaacgcaacgcatgatcgatcgtgcatgctggctgtttgtacgtatcacggtaccagtttggattctctctgtactctctcctttgtcttctttgtagtactcttattcccgctatccgtacgtgcgcatttgttgtaagggccggtgctagcttgtgtgccggtaccaacttctaataaagctttggtttgcaacttcagataaaaaaaaaaaaaaaaaaaaaaaagaaaaaaaatccaattaaaactataaacacggtgactccccgccccgcgcccgttgagcccgacaccggccctccatgtcctagcctgcccacctcctggtcgggagtctaaaggctttataaagtagccgcgcgatcgatccatgcacgtctcaacgcaacaggggtttatttggttcctacgtgctagcagcgtgttgtcacttgtcatgcatgggcatgttcatgcatgcgtgcatttggtggcaaaaagtacgtatctggtttgattcgatatgattttgtttaatttgtggccttctccgcgcgtacgcgagattatgcatcggggtacatgtttgttttattttttggaaattattgtttgattcatatcacttgtattgtattcagtacgtaaaaataaagtctctctgctctgttatttgttcc

SEQ ID NO: 22673 - DNA, 2551 bp, Oryza sativa
  Clone ID: PAT_MRT4530_27828C.1
atggccgcggcctccatccccgcgagctcccagcccttcaagctgatcctggggtcatcgtcggtggccaggaagcatatactcgccgagatggggctcgaattcgaagtcatgactgcagatatcgacgagaagagcatcaggagggagaaccccgacgagctagtgacgatccttgcggaggccaaggctgatgctatcatgtccagattgaatatttctgattaccagaaagaaggcgacaggccaacactcctgatcacttctgacatagcagaccttttcctgcgaccggcgcatcagctattcagctcggccatctcggtgatgttcagcggcgaggaggaggacgacgacgcggaggaggcggcgttcaacattcgtcgggaagaattggagaaggtgatccaaaggcagtgggagggtgacgagatcgcgatggcgctagaggagcagacacgggagctaagcaagtcgtgctcccacggcggcgacggctcgggttctgagtgggaaatcaagctgtccagcctcaccggcaagaggtcgtccttctccaacctcaccagcacggaaggagaagggatgagtggggcagagagaatgaacaggaagaggaggagcacagcgagaagaccgtgctactctgcaacggctagaaaactagtcgttgtagccctgtcagaggaccccatcggcctggccggtcagaccggcatggggcggccgcgcaatctcggcctccagagtgccattcttaccgcgcaagtgccgccggtcagaccggccttatgctccggtcagaccgccttcttgcggccggtcagaccggccagggcacgccggtcagaccgccactatgtggccggtctgaccgccctctgctggagtgcttcatgtgcgcacactggcttcaatgtcgttgtcgtcgccatcgaatcgtctgctcctgcgctcgcgtctcctctcccgcccggctccgtcgctcctctccccggcaaggtcgatggccgcgacgacatagatccgctcgcctcgctccggcctgctcgagcggtcaccggcgagtgcgatagatgtgcgcgcacgattgacgccgacgaggaggcctcggcctcaccattcgagctggacgtggtgagtgacgtggttgaagacgacggccgggagactaattctgatgcgattcgacagcggacggatatttggagagtctgtctctttttgccgccgcctatgattcggagcagcaagcgccgccgcctgacgcccatccccagcgacgccggcaagatgtcgccggattgggcttcgcttgaccaggatctggtggggctgatcggggggcgggtgcttgccggcgacgacatgcgggactacgtccggttccgcgccgtctgctctcactggagcgcaagcaccgtccgcccactcggccgcggcgtcaccgaccggcgtttccacccgcggcggtggatgatgctaccggagggccacggcctctaccccggccatcccgacctccgcggctacgtccgcttcttcaacctctccaccgccgccttggtccgtgtccatctaccgctcctacgcgaccacgtcatcatcgactcggtcgacggcctcctgctcctgcaccgcgaccacgacacagccatccgcctcctccaccccttcaccggcgatgtcgccgacctcccgccgctggcttccctcctgccacagatggaatccgagagccgcgaccgcagccagcgaagcaagcacagcagactaatgaaagtttgcgcatctgttaccgtcacctccactggcaccatcaccgtcatgctggcccttgaaatcctgcaccgcgtagcctacgccactcccggtgaccaacggtggactctctctgcctggacgctcaaaccttttgtcaaacccgtatctttccaaggcaaactctatgctttgcagctctcatcttacgacatacataaggtatacatctaccagtttaatccaccatgccaagataacgacaagggattgcttcatctgccattgccagtgaagattgctgaatgcccaatggacaaatttctatacctgctcaactttgctgaatgtggttcagagctcttgctggttgcctataatggtgtttctcgttcaaagctgctagtatacagacttgctgaccttgtcagtggaaggattgagccagtaacgaccattggagaccacgccttgttccttgatgaacgttgtctctgtgtctcactctcaaataacaaggaggggagtaagatccttccctccgatttgtctaactctatcatttgcatgcatagtttgcaggtcgatcctagttcactagatatatttcgttttgagcaatatgacctaggtactgatattggtaagtcgagccctcaactctgcatatttgtttagtgacggagacattttccataaaccaccaccgagtccccatacacttatccatcatatctttacttgctgcaatcgcagatattggaataaaagaatcatgtattgcagtaaa

SEQ ID NO: 22674 - DNA, 714 bp, Oryza sativa
  Clone ID: PAT_MRT4530_27829C.1
atggaggtagtgtgggccaacgacggtggacaagcgaccacctcgacggatctagccgtgaggacccgccattgctcagcatcaatggccgagggccatggcagcttcctagcagctttgaggattacggtgatctacccggcggtggcgagaaggcagcatggaaggaagcagcagtctgaccggccggacaacaccgccctgtcagagggccccatcggcctggccggtcagaccgacatggggtggccggtcagaccggcctcggctcggtcagaccgccatcggctcggtctgaccgactacggctccgtcggctctgtatcggccatcccgagcagcatcatctcggcctccaggaggccgcgggaacaccactccacaggcatcctcgacggcacggacgaagcctactcctcggggaaaccttcatctgacacatacccgtcctctggggttgggaaaaggctgacgtcagcacggaggggtgtggcgccgacatgcgggacccaccgccgaaccgacggccccgatctacccaagggtagatcggacggcggcgggagctcgcggccggacgcgcgggcacggcgcaagccgaaccggcgaccatggcgccggcggcgcagcgctcacgcggcggcggtgcgcatgcggcagcggcgcaaggcgacggccgacggcgaccgaccggcggcggagagcggcggctag

SEQ ID NO: 22675 - DNA, 1376 bp, Oryza sativa
  Clone ID: PAT_MRT4530_2782C.1
gtagctggctacattgggccaattggttggtatgataaaaatcactcttccgacggacaagaactagcaactaccagacaagaattagcagcaaactaccagtgcgcaacaatcatgtccgtcaagtcaacaatccactctgagttccgatggtcaagtcaacaatccactctgagtttcaatgagggccaagctctgagggcccaaaatcaggagacgttggctcaaccggaagaaagtcttgctacatcccaaaagggagaaagccttgctacaccccaaaagctacatcaagaggtgagtgactccccccacttttaagttagttcaactctctctaaataaacaatgtgtgactattcccaacaagctctacctcctgccgtactacttctatcttctgccactcctcccatctttcggcaaggccatcaccttcaagcatcctcaccacctccgccattttagggcgttctgtgggggagccttgtgtgcaaagaagagcaacctggattagtgattctacctcaacatcaatgtagttgctctgtagatctggatcaaccaacatctccagccgttttctccttgagtaatccttttacccagtccagtagcatgacgtcatcatcattggctagaccagcaaggtcaaaggcacgttgtcctgtaataagctccaaaagcataatcccataaccaaatacatcagttttctcagagataattccagttgaaagatattctggtgcgatatgcccaattgttccacgtactgcatttggttcatcggtatccatgtgatccattagtttggccaaaccaaaaccccccactaaggcttcaaagtcttcatctaatgaaatatttgcagctttgacatcacgatggataatctttgggtcacaatgatcatgtaaataggacagtcccctggcggaacccaatgcaatcctcctccttgttcgccaatcaagtggaggttcatatggcggccgttgtgatgcaacggttccattagacatgtatggatagacaaggaacctttttgttggcgttatgcagaatccatgaagacgcatcaggtttctatgcacaggcatctcaacttgtgtttgaaagtgccatgttctccaatcaatgtttggataacccatgcttaaagcccggcttatataatcctttttaacagctactaatgagccatctcctagtcttcctttgtacatgctgccgtcgaatcgaccacgttgaagaacattgctatcgctaaagcaatttgttgcatcttctagttcccgtagtgaaaaaattttatgctggcgaggataggcctcatctggaccctgaccctcaaactcttgacttgtctcacc

SEQ ID NO: 22676 - DNA, 406 bp, Oryza sativa
  Clone ID: PAT_MRT4530_27830C.1
gggttctctctgtttttttttttttttttttttttttttttttttttttttttttttttaacaagagcaacaacaacttcgggataacaacggcttacgagtccaaagcaaaaaaaagggggggacggccggaccaaacaggtgcttagggcttgctagggggggggggtcaaactcccttgcttagggcacaaggggttcctcaacaaactgaaaacaacaacgggggttatcacagggctccaagggggaggaggatgaaacagggctacaagccccatcatatgcgggataccccctagccgaaaagaaaaagggccctttacttctttccctttggggggactttgacgggtttggtcaccccggccattttctcttcgggggcgggccctccttcgggaag

SEQ ID NO: 22677 - DNA, 150 bp, Oryza sativa
  Clone ID: PAT_MRT4530_27831C.1
accgacccggaactgtaccggctggacccacgcacgcgttctgactctaagttcaacattggcgatgctggaggtgacatgagtgtctacttggggtacaccaaggctgacaagaggctcactgccttgcaccctgaaatttgaggagct

SEQ ID NO: 22678 - DNA, 1702 bp, Oryza sativa
  Clone ID: PAT_MRT4530_27832C.1
ctctccctctctctctctatttctcttaccacacaaacggggaaagggtgggtatccttcccaattccccgctgatctctatcccaatccgcgccgcgcctcctcctctccaaggtagggtttctcctctccgctctctatccaatccgcgccgcgcctcctcctctctcaagacaggagatgccgccttggtggtggtggtgggatggatggatgtgagagcagattgattgattttagctgctgctgctgattgattgattgattggattggtgatgataattgctcaatcggatgcatgcgatgatccaattcttcttcttcttcttgtgatctacaaattccaatacatatactagtagtagtaagagtaagcattcatataagataatggaggcgtcggatctgaacacccacttgccgccgcgcaagcgactgctcgccggcctcaggatggccgcccctccctgcgccgatgctcccccacccgcgctcctcaccgccgatctcgccgcccgcctccgccacatgatggcctcctcatcctctcccgacgacatcgtccaggccgccaggtcggctgcctccaccgccgcccaagctgccgcggccgcccgggccaccgccgccgagaaggcggccgtcgctgccaaggctagggctgctgcccgcgctgccatggagttcctcgattccatttccaggcctgcctcatccaggaacggcctccagctcaagctcaaatccaggaagaagcatgtgcaggtcaagctcttgtacaagcccaatggccgccttgaggagggtagaggaggacctcctactactggggatgcttcttccaagccccgcaggcgcggcagggagaccgatgaagaggttgctcgcaaattgcaccgcgccatgaacagctcgccgcgcatttccttcactggaccgaagaggccacgcaccattgctgctgagaatgggggtgtgcttgatgcttgcaatggttcttcaccttatccaccaacgtttgaggtcagcacgataactaacggatgctctttagggcaatctagtgagctccctgtgccattttccgagcatgagggtcttgatgatgataataaagattcttctggtcatgatactacaaagagtagggctatcgttggtaatggagttggagctggaaacctaagtgctggtaggaaagtgaagatcaagagaaaggaactgcttttgaaccaacataatagtaaagatacacaagaggccaaagaaataaaaccgtctatagattctatacgatacgacgaatcaaagcaaaatggagctgaaaagagattgaaccagcttgtagatgcaaaggatcccggtgatggtttggcgccgatgaagatctcatctgtatggaggttcaaaaagttcaaaacatcacactgctcttctgacagtaaggttttgcacaacgtgtgcccctctacttcggcggctgagacctctgcttcggtgaaagctgattagtgaggtaccttagctcatagttggcagatgcttgtcttagctatgtttgttgtgagattttgtatgttgaagctaccattcggacaaacagggagggcaggtgatctctcccggtagattccccaccttctatttgattttcatacaaacgtgcgtgcttttatggtatataagttactggatatttct

SEQ ID NO: 22679 - DNA, 2487 bp, Oryza sativa
  Clone ID: PAT_MRT4530_27833C.1
atggggaagcggccgccggtcgtcgtcctctcctcttcttccgacgaggatgaaggcgggggccgccgcgctgccacccgcggcccgtcggcgcggagggcaaggactcctgcgacggcgcccgcgccggcgcatgcagcgagcggcccgaggaagaagccgcggcgcgtgagtagcgcggagaggggccgccgtcgcgctacgggcgccgcaccgtccggctccctgaaggctgaatttgacatgctttctgaagatttttccgaatgtctaaatgacttgggcatgccagaatttttaattttactattcctaaattactctaatttgttcttcttgagtgttccagcattacatgcaggatctatatgtcaaacagaagagctttgggttgacaagtacaaaccacactcgttggctgagctttctgttcacaaaaaaaaggtcgaagatgtaaagaaatggttggacgaaaagctgagggcaccaaagggaacatttggaggatggactcttgtccttactggccaagctggcgtcggaaaatctgcaactatcaaagcaattgctgctgagcttggagttgagatatgtgagtggacagccccagtaccgacactatggacagaacatttgcatgctaactcaggacttgggtatatatccaagctggaagaatttgaaaactttgtcgagaagatacggaaatattcgttgctttctccaaccaactttggatcgcaaagaaagcatactatcatcctgattgatgacatccctgtaacaagtggaaaagtttcttttgcaagattaggaaaatgtttaacaggtctaattcaaagtactcaagtaccgactgtaatttcacttacccaatatcataaaagtgagaataacgatactgcaatgtggaactctgaggaccttgagtccttacttcaaagtgctggtgctcataagatttctttcaatccagtaaccgtaaattctatcaagaaaattcttgttagaatatgcaaacaagaaggctctgacttaactgacgatttggtgcatcaaatagctacatccagcggaggtgatatcagacatgcaataatgtctctgcagtactactgcctaaatccaagaaggctaaattctgcattggcaagaactgccattctgcctggtttaaagagcggtggctctctagttccagggcaagacagttatggttgcagctctgtaatacctactgcatgtggaagagatgagacacttacattattccatgcactggggaaatttttgcacaataaaagagaaacatatagtgaagtcgatgtcgctgtagatgtggattcgtttcctatgaaagaaaaactaagaagaaatccactcaaaatggatattccagaaaaggttctgtctcaagcgcatggaaaagtgcggacagttgctgactttctgcatgaaaatgttcttgatttcattgacaatgatgctattgatgatgcatggagtgtggcgtcatatttgagtgaggcagattgccttcttgctggtagtccaatttcgtcaacccgttggatggtaaatgaatcgtatgaagcggaaaacatgacacaacttattgctgcttccgttgcagcacgaggaattcttttcggaaatgcacatgtgtcatcatcaaggtggcatacaatccgtagcccaagagtttggcagattgaacagtcatttcgatccagaaaggatctgattcttagagaaagatacgattgttcaagtacatctggttctcgcaatttctctgatgtagtcacagaattcaaaccatttgagagatggattagtcctcataatgatatgcctagaagtaactccttcaaccacaatatagaagcaagcagttctgaagaagatgaagatgagatagaagattggtgatatagaagcaagcagttctgaagaagatgaagatgagatagaagattggtgaaagcggtacaattatgtacccttgcaccagaccctggacgacttttggaaaatctggatgcattgctgcatgctgtagatctgcctaaacagctaacccataagtagttggtcgcatcaattcgttttttgcaagactgccattttgcgtaccgaaccgaaaaggcagcttgaaaatcatagtatcaatcgacaatggctgcaagtcttcgtgaagcatgttcagcctatcaaaccttttttggggagttacacttcaaattcgacccatgaagactggagttgggccttgccgacagcgtcgttcttatcaaatgtgatgagcctttggctttgctgcttcacatgttcatatcgaaccaattgtacctagagtctagttagtagttagtgttcggtagccataggaatcatttagaaactgttcggtgcaaaagaattggaaacacatgtgccatgcaggtttggccttttccaaaaaaaaaaaaaaaaaaaaaaaaaaaa

SEQ ID NO: 22680 - DNA, 418 bp, Oryza sativa
  Clone ID: PAT_MRT4530_27834C.1
ggaagggtaaatttatttcaattggatcatatgccccaaaaaatcccaaggaaggatacccccttggggaaaatttgatggggcttaaaacaacacttgtttaccatgcttattttgatcgaacggattgactgcctacaaaaaaaacctgttggtaaacttatcagggttcctaaaacaaacaaacaaactttccaacccccacttcccagggagtaaactttttttccaaagttgaacttaaagcctcccaaaaagcccccccccgggaatccccctcctccctggaatcccccctcttaatggaatgggttttgttggcccccctccccaaaaggattgaaaccaccccctcccccccctcccctaattctttaataaaaaacctctcctcgggcggattttacacctttttttt

SEQ ID NO: 22681 - DNA, 688 bp, Oryza sativa
  unsure (1)..(688): unsure at all n locations
  Clone ID: PAT_MRT4530_27835C.1
gcatttgtgagacatatttcaagaaagcccagctcgaaagggtttatgcgagttgatgcactgtccctcttgttgtctatggcaaatgttggtccatattcggatgtccttgtggttgatatggttggaggtttagtagttggagctgtagctgaacgcttatgaggtactgggtatgtttgcagcacatatcttggatctgctgctagctccatagacattataaggatgtataatttgagcagtgacatgactaccaggattgttcaggcaccactaagtgacctctgctccttgcaaaactctgtcgatgtgtcttctggtcttaatgatagcattcagggtgaggcacaagagcccactgcagtaccagtggagaatactcagccatctgtaccacaaccaactgacacagcagtaccagatgagaaaacacagtcacctaaagaacaatctattgatatagatatccctgagcccttattggatgagcacattaatcaggatggcaattcttctttagatagtaaaggagatgaggatggaaattcaataggtcccaaatcactcaaggcaggataggcaccatcaccagagaggatgaaatattggagtgaacatggatttagcagtttgattgttgctgcttcgnggcatgatgttggaaagtttggttgctgatctgctt

SEQ ID NO: 22682 - DNA, 861 bp, Oryza sativa
  Clone ID: PAT_MRT4530_27836C.1
atggagagggatgagatcgagggaatcggcaagctcaactcccctgagaagaagaaggagaaggagaagaggaggcgcaagcacaagcccgacgaggcgaaggaggagatggtggtggacgccatacccaaggaggaggagaatctcaagtcccccgaaaagggatcaccgaagaagaaggagaagaggaggcacaagcacaagcacaagcccaagcccgacgggacacaagccgtactcaaggaggaggaggagagcaacagcaagtccaaggccccggcggagggcgagaagaagaggaagaagaagaagctggtgacggtgaagctgagcgacgagctgatgggatacctgcggaccaaggaggtgatggcctacctcgcgcgcgagacgcctcgcccgctcccgatcgatccgggcgtcgcgcagcacatgttcgtcgaccaagaactcaggcaggaaatcgccgcccaggttcacgagaacagggaattcgacgccttcgtcctctaccagtaccgcaccaagggctacgccgagatccagcaggaggtcaccgacgacgacgacgacgacgacgagacgaaaacgacaaatgggctgcctgcctatgctggacctggtggatggaacggtttgggccaggtcactcagcaacaacaggaaggatgtggtactctggaacaggccatcactgcgcattggtcgagcattggactcactgggtcagtggctgtcactgctcgtgatctatgggcgtttgttgtgaaagttgcagcaacaaagcggcattcctgccactatcttataaagaaatatactcgcctgaagacaaatctgtggcaaaagccttcacagtag

SEQ ID NO: 22683 - DNA, 2015 bp, Oryza sativa
  Clone ID: PAT_MRT4530_27837C.1
gccggggctcccccccgctcagccactgcatccccgcccctcacagccgctggatcccatccaaaaataaaaaatggcggcgattccccgggaggcatgggagggctgcagcgtcctcctcgacatcaacgacggcgaccgcctcgccttcttccgcctcacccccgccgcgacggtcaaggtggggaacaggacctgctcgctgcagccgctcgtcggtcgccccttcggctccctcttcagcgtcggcccctccggcctcgtcccctgcgccgacgccccatcttctcgcgatgatacaacgcaagatgctgctgatggtccctcgcaggatgaaactagggacaatagatctcttgtcgataataatacagcacagaatttatctagcgatgacatagaggcaatgaagagagatggtgtaagtggtgatgagattgtagaagctttgatagcaaatagctccacatttgggaagaagacccttttttcccaagagaaatacaaactaaagaaacagaagaaatatgcacccaaagtgcttttacggcgcccctctacccgaagcatttgtgagacatatttcaagaaaagcccagctcgaacagggtttatgcgagttgatgcactgtccctcttgttgactatggcaaatatgggcacatattagaatgtttttgcgggttgtagggctgtccctcttgttgtctatggcaaaggtgggtccttattcggatgtccttgtggttgatatggttggaggtttagtagttggagctgtagctgaacgcttaggaggtactgggtatgtttgcagcacatatcttggatctgctgctagctccatagacattataaggatgtataatttgagcagtgacatgactaccagaggtccatgtgaagcctttgaagttattactaaagtaggaaacacccattatgttgttgaagtggtgcttaagagttgggctatagcaggtaatattttgataagcttacctttcaggattgttcaggcaccactaagtgacctctgctccttgcaaaactctgtcgatgtgtcttctggtcttaatgatagcattcagggtgaggcacaagagcccactgcagtaccagtggagaatactcagccatctgtaccacaaccaactgacacagcagtaccagatgagaaaacacagtcacctaaagaacaatctattgatatagatatccctgagcccttattggatgagcacattaatcaggatggcaattcttctttagatagtaaaggagatgaggatggaagttcaataggtcccaaatcactcaaggcaggaaaggcaccatcaccagagaggatgaaatattggagtgaacatggatttagcagtttgattgttgctgctccggggcatgatgttgaaagttttgttgctgatctgcttcccctcttgtcttattcagctccatttgctatctatcaccaataccttcagcctctcgcaacatgcatgcacagcttgcaagtatcaaaaatggctctcggattacaaatttctgaaccctggcttcgtgaataccaggtccttccatcacgaactcatccacacatgcaaatgaatgcatttggtggttatattttgagtggcattaggatacacaatggcgatgcatgtaatggaagcaagtgaatgaccaagcccgtcaatgcgtgcttctatccttggaattaaaatatggtcaccattttacacggtaacctgaaacaatagacacaattttgtagtccagagaagccaacttttatgctgaagcgacttatgtgattagtagaaattggtgcgcatatagagaataactagtgcgagttctagaagaaaatgaaatgagcatgtacaccaaatccatgtagcttacataacaatgttgtgtttgtttatcaaccaaattgaaacgcttgtggactttgagatatttgttaaggtgtgctacttactatttgttaaaaaaaaaaaaaaaaaaaa

SEQ ID NO: 22684 - DNA, 432 bp, Oryza sativa
  Clone ID: PAT_MRT4530_27838C.1
atggaggagttaatgagaggggaggagatcgagaggtctgtgcgcggatattatcgagatggcagcggctcgggtggctacttggatcctgtggaaacaaaagaaatgatcccatcttccaaaatgtggcacggcgctcggtggggctgcaatggcggcgcgtggagagggcttgggcgctcggtgggaggtgcaaaggtggcggtggtggcggcggcgcagggagagggcttcggtggcggcatgacgctcggtgggggcttcagcgaccgcggtggcgggagttgcggcggtgacacgcggcgagacggtggaggcagcgtgagctgcggaggtggcggcgtggcactcgtgggggcttcggtggcagtgcgcagagagggcttcgacgtcggcggctggcgttgcggtggcgacgacgcgcagcattag

SEQ ID NO: 22685 - DNA, 942 bp, Oryza sativa
  Clone ID: PAT_MRT4530_27839C.1
atggagagggatgagatcgagggaatcggcaagctcaactcccctgagaagaagaaggagaaggagaagaggaggcgcaagcacaagcccgacgaggcgaaggaggagatggtggtggacgccatacccaaggaggaggagaatctcaagtcccccgaaaagggatcaccgaagaagaaggagaagaggaggcacaagcacaagcacaagcccaagcccgacgggacacaagccgtactcaaggaggaggaggagagcaacagcaagtccaaggccccggcggagggcgagaagaagaggaagaagaagaagctggtgacggtgaagctgagcgacgagctgatgggatacctgcggaccaaggaggtgatggcctacctcgcgcgcgagacgcctcgcccgctcccgatcgatccgggcgtcgcgcagcacatgttcgtcgaccaagaactcaggcaggaaatcgccgcccaggttcacgagaacagggaattcgacgccttcgtcctctaccagtaccgcaccaagggctacgccgagatccagcaggaggtcaccgacgacgacgacgacgacgacgagacgaaaacgacaaatgggctgcctgcctatgctggacctggtggatggaacgacagactaggtgtccaaggaaagaaaatgcaagctgacaatggattggaggtttgggccaggtcactcagcaacaacaggaaggatgtggtactctggaacaggccatcactgcgcattggtcgagcattggactcactggaaataagctgtaagcctgtgcatgtaaggtgccgtcaaatgcggtgtattgctgaagtttgttgtgaaagttgcagcaacaaagcggcattcctgccactatcttataaagaaatatactcgcctgaagacaaatctgtggcaaaagccttcacagtaaagagttga

SEQ ID NO: 22686 - DNA, 372 bp, Oryza sativa
  Clone ID: PAT_MRT4530_2783C.1
atggcggcggctgcggcgacggcggcttctcccggccggctccggcgcctcatgggcgcggccaccgacgccgtgctgttcacctccctgtgcgccatgtgggtgaccaacgccggcagcgtcgcctcgatcctcgcgcgcagggccggcgccgacgaccggctcgccccggtggcggcggctcgtggcgccacgagcttctccgtgggcggcttctccgtcctcctcccggccttcgtccccatgttcgtgtcgcgcgtggagagcttgaaaaggatattctggcatatgaaattcttggttcatgttaccacttatcaccattgtttaattggccaaaattggagtcaactgattcacttcgatgtgtag

SEQ ID NO: 22687 - DNA, 456 bp, Oryza sativa
  Clone ID: PAT_MRT4530_27840C.1
atgcggtcacaagttccaccacggctggccagctcccgccaggccgccagccgcgcgcccatccgtggcggcagagccgcgccagcgcccgcgcggccgcgtcctctctccgtcccgccgcgtcgtccggccgtccaggggcgggcccaatggtctggctgtctcccccgtgcgctctctcccctcccactcgacggcgtcacggcgacggcgctgccgcgacccggcgaccgtgacgtgagccggcaggccggccgccggcgcgactccggcgctcccgccgctcctcccgccggccgccgctcctcccggctggccagctcccgccaggccgccaggcgcgcgcccatccgtggcggcggcgccgcgccggcgcccgcgcgctttggtctcaccagatcgctaaacctagcttgggctcgccgcctccgcctccgcctccgccgcgtcggcgat

SEQ ID NO: 22688 - DNA, 735 bp, Oryza sativa
  Clone ID: PAT_MRT4530_27841C.1
tcacctctctgccaacgccgcccgcgtctccgcgccgacgcagcccgcgcctccgcgcatcgcccttcgcctcgccatcaccgccgccgtcgattgcctccaccctctttgatgccctatccccgccacgcgcagctgcctcgccggggatgacctcgcgtcagtgacagtggtccagtgctcaatttgctgctcggtgtgtactgtgttggcttggggtccagtctcctcctcctgcacgtgatgtgtgctgaacacggcggtgcggtcacgggtccccccccgtctggctgtctcccccgtgcgctctctcccctcccactcgacggcgtcacggcgacggcgctcccatgacccggtgacctcgacgcgagccgtcaggctagccgccggcgtgactccggtgctcccgccgctcctccaggctggccagctcccgccaggccgccagccgcgcgcccatccgtggcggcagagccgcgccagcgcccgcgcggccgcgtcctctctccgtcccgccgcgtcgtccggccgtccaggggcgggcccaatgggtagtctaggtaggcccaggaccgcccgcgtctcggccccggcgctcccccgacccggcgaccgtgacgtgagccggcaggccggccgccggcgcgactccggcgctcccgccgctcctcccgccggccgccgctcctcccggctggccagctcccgccaggccgccaggcgcgcgcccat

SEQ ID NO: 22689 - DNA, 357 bp, Oryza sativa
  Clone ID: PAT_MRT4530_27842C.1
atggaggagtggaggtgtcagggtgtgcagccttttgtaagccgcggctttcttggaggaggggatggagaaggttccggagtggcggagaagcccgtgagtgactgcgggccgccccactctccgctgtcttccttgagcgaggagctcgattgcggtgcgcggggattagaggagcagcaaactaaggtcattagcccctgctactaccgccgccacgccgtcgtcggatcgacggtgccgcctcgccatcatgagctcaaggttgagggaactgctgatcccacgcaagggcgggagagcgataccttcttgtacgcgacgagggagggcttgttggtggcgggagaagggtag

SEQ ID NO: 22690 - DNA, 617 bp, Oryza sativa
  unsure (1)..(617): unsure at all n locations
  Clone ID: PAT_MRT4530_27843C.1
ggggggaagtttgttaaaataatttttttttttttttttttttttttttttttttttttttttttttttttttttttttttttttttgggatctaccttaaaacccggaaccgccccccgcaccccacccacctcccctttttcccaaaaggggggggggttaaaccatccagggagggggggtaaaacggggccaaaggggaaacggttaacaaccccaaaaaccaaacaaccgggaagccgaaagcaaaaacccgggggccccgagggccaaaccaaacacccaaaaaacgggtagggccaacggcccacttcccagtgggaaaaccggaaaccccacgggccaaaagaaataagcaaccccccaggggggggggggaggcgtttggggccccgggggccattttttttttcccattaaacagggaaacgggaaatggcccttaccccccgacccccaggacaggaaaaagaggcgnccccccgtgcatgccccaaagccccaaaaagccaaattgcggggggaaaggggggaaaaaaaaaaaaaaccatttccgggtttcgggattcccataaccgantacccngaaaaaccccccaaccgggatccggaaatg

SEQ ID NO: 22691 - DNA, 276 bp, Oryza sativa
  Clone ID: PAT_MRT4530_27844C.1
ctgacgcgtgcgcagacgcgtgggcttcgatgtagaccacagttgttgcaggtgcaaggcgatcagcctcatgctgtgaggcatattcagtgagctcggcgtccctgatgtaggacaccccatgttctatgtgttccgcggatgttgaagaggggacttgtagctctcgtaggctagcctcccggtgttgtgtaactaggacatccacaacggtagaagaggcgtctgctactatttggcaagatctggctgctaactacgctaatgtatctagct

SEQ ID NO: 22692 - DNA, 1669 bp, Oryza sativa
  Clone ID: PAT_MRT4530_27845C.1
atgcagtggccaactgatgattcattcaagaatgcacaaactgagatgatccatgcctcctctcagaccggccaactcaacctccctactaaatcacatccgacatccaccagtgacagaactgagatcgcattggcccgcagctcccagatcatacatacccgatccatccatccaaaccgaattcgccacaccacagcgcccccgcatttcaaacaccgcaaaaaccacaccaccgcaacccaaaaacaagtcgagccgaaacgaagaggaagcgcatatccaagcagctccgcccaccaccaccaccaccaccatccaaggccggagggcgagggcgagggcgagcggctcgggggctgggtggatctgggcccgaggcggaggcggaggcgggggtgggtggctcgtcgagctagttacctgcgcgcgcgcggagagggagatctccgccggctaccgacgacgacgatgccgctggtcactcgccgcggcgcttggggagtcgggcaaggtggtagctggcggtggtgggcgcgactcgctttcctggtggtggtggatctggagcgacggctgcaccggcgccggcaccggcggcaggacgaggatcggagcggcggcggcggcactccttgctgtgtggcagcctctgcttgccggtggcgtcgtcgtcgacgtcgtagagcatgttggggtcggacgacagcgccgcggcaacgaccgcttgctccatgcggcggcggtgacggcggccacctgggtgagcggtctccagaccagcttcttgaacctgtacttcctggtccccgagaggaacacgacgaggccggcaaggatgcccacggcgcagatgtcgtacccccactggcggccgacattgtcctgcacgtacactagcacggtgattgccagcgacgggcgatgctgtggggaagaggccgccgggggggaggggagaggaggaggtccggcggccagcgtcgcgccgatggaggaaacgccgccgtccgcatcctcgttgccaccgtcgtggcacagcgtcgccgaactcatcctggaagctatgcgcgagcacgtagaggccgtagaagtcggtgggctggcgatggcatcgcaccaaatctggagattctttgacgtcgtttcccacgccggcaagctctactgggtggacactgcgacaggcatcctcttctgcaacccgttcgttgacgagctgcacatggagtacgtcccaatccccagggtcgacctcccgctagaacacgacggagactgccacggccgtggctactgcgccgagagagcgctcgcctcccgccactgcgtgcagctgagcgacggcaagttcaggtgcgtggacatgggctctgcaagcgatggtgttactaccaaggtccccatgcacacgcagattgatccagggaccaaggtgtggactcttgagtacgccgtgagcttcgccgacatctgggccagcgagagctacaaggcgactgggatgtcggagaaggccccggtgctcgcgctcgtccaccccaagaaccccaacatggtgtacttcttcgtagaagtcaccagcctgcgcaccaccgacttctacggcctctatgtgctcgcgcacagcctccaggacgagtctggcggtgctgtaccacggcggtga

SEQ ID NO: 22693 - DNA, 544 bp, Oryza sativa
  Clone ID: PAT_MRT4530_27846C.1
acgagggacgcccctgtcactcaccatttaatggacgaagacttaaggacgtgtgtactgggaacacaatctagggcgcatccgatgcagtcatgcctactccggttgggatgagtggctcaaggcccccatcatcacgatgggacagggcatacctgccacacgccgcctgacacacggtcagggcatgggcggctcgccgccgtcccatctgtcatttggcctgcgaccggttggtgaccggttgttggcctgtcaggtacgcaacatgccgcatttagtacggcgtggtgcgcttgctctgcccgcattaaaagcagttaggtgggtgctgggccgcgctcacctaaccccatccatgtggcgaacgcggggaagggttggggcagcccgacccatcagcttagaggaggtggccgccacctatccacgggcccgaccccctcgtgggggggggggagcgccacgtggacactaggggcggcctctcccttctaagcttggtacccctggacctatatcgctgacacatgggtgttgtgca

SEQ ID NO: 22694 - DNA, 324 bp, Oryza sativa
  Clone ID: PAT_MRT4530_27847C.1
atggctatgtatagtttgatacgcttcaagattggtctatgtgattcccttcttcctgagcagtcaaggaagtcgctacacttgccagtgaagttggtccatgcatctgtgtgcagcagctgtaacctatcgacaattcgggacctcatccgcactgctgctattgagctcccaattgtgccactgacaggtacatgtaactgtttcttaacgacattgacgcgctcacgcgcatgcgccgctgcactggacacgcattgcacgctgccgcttgctttctatggacttcagttaaagcttgagcgtatggctgaagaggagtaa

SEQ ID NO: 22695 - DNA, 370 bp, Oryza sativa
  Clone ID: PAT_MRT4530_27848C.1
atgggggacagcgcgaccggtccaagctaccgtcgggaaaggagcgcaagctccgcctccgcctccgcctccgcgatccgcctccgcctcgagcccaaacccacccaccaacccaacccaaatcccatcgagaggaggggacgcggcggcggcggcggatcggcggcggggaaggaaggggatgggatctccaggaaaagaggaggaagcgatatgggctgcttaccatgctgcggagcggaagatgtccgtaagaagaagaagcgcgactatccctacgtcccgatccctgaaccaggtggtaactatggacgtaccaagcccgggcccccaaccccttcgtgttttccccccaccagcagaaatctgc

SEQ ID NO: 22696 - DNA, 2024 bp, Oryza sativa
  Clone ID: PAT_MRT4530_27849C.1
atgagaacatgcagtgttcctcaaaaatgttgcaggtggaggaggcgctggcggccgtgctgtccgcggcggcggcgagcgcggcggcgcgcgccgccgaggccgtgccgctgcacgacgcgctcgggctcgtcctcgcggaggacgtccgcgcgcccgaccccctccctcccttccgcgcctccatcaaggatgggtacgccgtcgtggcctccgacgggcccggggagtacccggtgattacggagtcgagggccggcgacgacgccctcggcgtggtcgtcacccccggcacggtggcgtatgtcacgaccggagggccgattccggatggtgctgacgccgtcgtgcaagtggaggacacggagcagctcgccggcgcgccggatgggtcgaagagggttaggatattggtgcggccaactcaggggcaggatatacgcaatgtgggatgtgacatacaaaaggattcggtagtgctgaagtctagtgagcacataggtcctgcagaaattgggttacttgcaaccgtgggagtgactactgtcaaggtatatcgtcgaccaaccattgctgtattttctacaggggatgaattagtggagccagccacagcatctctcagtcgtggtcagattcgtgattccaaccgggctatgttaattgctgctgctattcagcacaagtgcaaggtagttgacttgggtattgcaaaagacactgaggaaagtcttaaggagcatatggatgcagctctaagttctgatgctgatatcattcttacttctggtggtgtttccatgggcgatagggatcttgtcaaaccttgtttggcaagcatggggaaaattcactttgaaaagattcggatgaaaccagggaaaccattaacatttgctgagatcgtaacagaagattcatcaaaaccatctaaaaaggttcttgcatttgggttgcctggaaacccagtgataccggctgatgaaattggtcttggcagatatgttgctgaaagcacgggccaacaagctagtagccgcctcctaagtatgaaatctgcgaatgctttactggaagtaccattagtggggcagatgttggaggctggaacatctatgcaagctatacttatttctgatatgaccagttcaccttttgacaagctacccactgcttcaaatccgttgccatctcatttatttccttctgcaaaaagtgtttccacagatttgtctcaggttccagcctcacagaatactgaagttaaagtagcaattctgacagtgagcgacactgtttcattgggtgcaggccctgacaggagtgggccaagggcaatatctgtagtgaattcttcatcagagaaattgggtggagcgactgttgttgctactgctgttgttccagacgatgtggaaaaaatcaagaacattttggtgaagtggagtgacattgatcgtgtcagcctcatcttgacactaggtggtactggtttcacacctagagatgtcacaccagaggcaacaaaatctgtcatagagaaagaagcacctggcctcacatatgtcatgcttcaggaaagtttgaagatcatcaacatgcccgggaacccgaacgccgttgcggagtgcatggaggcgcttcttccagcactgaaacacgccctgaagcagataaagggtgataagagggagaagcacccgcgccatgtccctcacgctgaagctgcgcctgtggaccagtgggatcggagtttccgagccgcgtcgtccggcaggggatgctcgtgcgagccatgatcggggccgatgagaatttggtcctcgcgggctatcggcgttcacttcgtcagcttgtcagttccttcgttagcccagccgcgttcagctcggagctaagcagtgacgattttggttctgctcactgttttgttttcacttcacccgaaccttacgaacaccagtgtgacaaataaagtggttacagtatatttgatcttgtaaaaaaaaaaaaaaaaagcggaa

SEQ ID NO: 22697 - DNA, 1509 bp, Oryza sativa
  Clone ID: PAT_MRT4530_2784C.1
aacccattcatcacattcacactgatatttttttttgaatgtaaggtgggtacttttatttttttttttttttctttttttttgacaaccattcttcagtttaccattggaacaggttcctgaacagcattcgccctcacaaccagtatttggggaaaacataacgaaaaatatcaactgaccccacaaagaacaagggcctgttgattttattatcaaggtttccaccacaaattaagttgtcccgagtctaataaacatgaacaaaataacgggaggcagctagatgagtaacaacacaacacagcggctcagctcagataaggcagccaacaatagcaccatatgcttcagagcacagggcatcaccatctctgcttccctaccctgtatgttttatcagcacaacttcaatcctcatcgtcatcatcgtcatccttcttgatgcgagtggttccaccctctttgctaatgggcagcttcatgttcccgaacggagtatcgacatcgatcttgcccttgatggtgtagccagtgcccctccccctgatcatgtcccagacagcagagccgaaatccttgggcctgaagctgaatgggacctgcatggtggtgatcccttgcttctcgatcgttgccgactcggtgagctcggcactggcgacgctgtcgtcgccgagccacatctcatactcgagcatgttgaggcccaggtcgaagtcattcttgttctcgagcttgagatgcagcgtggcggtggtctcctcgaaggagaacctgtggaacttgatcttctcgacgtcgacgtcgggcttgtaggggatggggatctcgccggacttctcgagggggagcttgatcctgccgatgatggggacgtcgatgaggaggacgaccctgacgaggtaggggatgatgctcccgggcttgatgtcgttgtaggtgctcttgatgtcgtcgtagatgagtgagatggggatcttgacggtctcctcgccatgggcgtggattgtgccggcgtccgggatgaggccggagacgagcttgcggccgtcgctctcgatgaggtagtcgatgtcgacgagcgggatagggaccgggttagggttcttgatgagcacgtcgacgacgaggtcggcgcggtggaggctgatgtgcgggatgtggacgccggagacgtcggcagtgggcttgccgaagccgacggccccctcgatcttctccccgatgtcgtggatgaagtccttcaccttctccatgaatcccccgcctccttccttcttttcgccgccgtcgtcgtcccggcggtccttcccgccgccacgctccgtcaccgtggggttctccgacgaagacgacatgctcgctaactgtgggttgatgcggagatctggacgaagcgagtggagatcgcgagcggaatggagaaatttagtgaagagagagaagaacgagccccgtgggcggcgccccactcttgatcacaagaaagattgctttcttttctct

SEQ ID NO: 22698 - DNA, 1748 bp, Oryza sativa
  Clone ID: PAT_MRT4530_27850C.1
cccacgcgtccggtgactactgtcaaggtatatcgtcgaccaaccattgctgtattttctacaggggatgaattagtggagccagccacagcatctctcagtcgtggtcagattcgtgattccaaccgggctatgttaattgctgctgctattcagcacaagtgcaaggtagttgacttgggtattgcaaaagacactgaggaaagtcttaaggagcatatggatgcagctctaagttctgatgctgatatcattcttacttctggtggtgtttccatgggcgatagggatcttgtcaaaccttgtttggcaagcatggggaaaattcactttgaaaagattcggatgaaaccagggaaaccattaacatttgctgagatcgtaacagaagattcatcaaaaccatctaaaaaggttcttgcatttgggttgcctggaaacccagtgagttgtgttgtttgcttcaatctctttgttgttcctgcaatacgttcactctctggctggtcaaatcctcatctaccaagagtgcacgcacgtctactgcatcctttaagaggagacccacatcgtcaagagttccatcgtgcagtgatcagatgggtgcctgatgatggatctggtagacctggatatgttgctgaaagcacgggccaacaagctagtagccgcctcctaagtatgaaatctgcgaatgctttactggaagtaccattagtggggcagatgttggaggctggaacatctatgcaagctatacttatttctgatatgaccagttcaccttttgacaagctacccactgcttcaaatccgttgccatctcatttatttccttctgcaaaaagtgtttccacagatttgtctcaggttccagcctcacagaatactgaagttaaagtagcaattctgacagtgagcgacactgtttcattgggtgcaggccctgacaggagtgggccaagggcaatatctgtagtgaattcttcatcagagaaattgggtggagcgactgttgttgctactgctgttgttccagacgatgtggaaaaaatcaagaacattttggtgaagtggagtgacattgatcgtgtcagcctcatcttgacactaggtggtactggtttcacacctagagatgtcacaccagaggcaacaaaatctgtcatagagaaagaagcacctggcctcacatatgtcatgcttcaggaaagtttgaaggtgacaccattcgcaatgctatctagagccactgcggggatcagaggatcaacacttatcatcaacatgcccgggaacccgaacgccgttgcggagtgcatggaggcgcttcttccagcactgaaacacgccctgaagcagataaagggtgataagagggagaagcacccgcgccatgtccctcacgctgaagctgcgcctgtggaccagtgggatcggagtttccgagccgcgtcgtccggcaggggatgctcgtgcgagccatgatcggggccgatgagaatttggtcctcgcgggctatcggcgttcacttcgtcagcttgtcagttccttcgttagcccagccgcgttcagctcggagctaagcagtgacgattttggttctgctcactgttttgttttcacttcacccgaaccttacgaacaccagtgtgacaaataaagtggttacagtatatttgatcttgtaacttcggcccgtttagttaccaaaaactttttgcaaaagcattacattgaatttttg

SEQ ID NO: 22699 - DNA, 360 bp, Oryza sativa
  unsure (1)..(360): unsure at all n locations
  Clone ID: PAT_MRT4530_27851C.1
gntggctnctcntccccatntttncncttgccgcctcgnttcgtcctccggggntcgtctagggntttgtnngntgcnatgtngttgcgcagtccngtgtancngtgcttngtcgacgntcttganttaggccaccgtcgtagcantcnnnnccaggncgtnttctcgacttnngctgngttnctggnnttccagntcgtgnatnncaganagangtgnagttcnccnananttgnctntgtnancctgnctnagnngcnctcnattcgcgangncgtacagnncatnnacgtnaaantggtcnacggtcntaaccncaancgntantcngnncncattaggannntncnngcgtacncc

SEQ ID NO: 22700 - DNA, 1583 bp, Oryza sativa
  Clone ID: PAT_MRT4530_27852C.1
ttttttttttttttttttttctccgtgttctgcctcaaagccattttcatttccattcgccgtggtcaacgtggcaaaggccataaggcagtttccaacgtgcttacactacgtgcaacttacaaccatatccatcacgcgtggtgcaaccacatcccctacacacaagctcacaaatcacaagtgttggtctgcggccttattctatcaactcattcattgggtttggggtaatctatcaattcattcattgggtttggggtaatcaagggtgtacgatcgggtcgccatttggggtagcaaatgatgtagcttatcacgaattcacgatagggcatggctgcttcaccacctgaaattcacgggttccgtcagaacacccagcacagttttgagttctgacgtcgtagccattgccgagtaacaaccaacagccactgcttgcttgagctgtggtcgctgacagacagaaatcacagcatcgctggataaagtttcgaagtgaaatgggtcagtgaagatcacctcatgatcaggaaatgccttctgaagaacagcacacgcttcttcgtcccacttgtcgccaaaagctggtgctacaattccgccattggctatgtagaagtttacgtacgaggcagccaatctcgtgcctggttccctcggtatagcatgctctgtttttacaacaccctctgactcttcctttgtcatgtacagaggccctgggacgtggattttcacaacttctatctgccgtcctttcgcatcaacggacttggagagagttgagagtgcatcaacggacctttggtactgtgggtcgttctcatcatcggtccatgacaagaggaccaccccaggtttaatgaagcagcatagattgtcaacatgaccatttgtatcatcatcaccataaagcccatgaggtatccagatgacctttgcgactccaagaaaatccttcagctcattctctatctctagtttggtcatgttggggtttctgttaggattcaacaagcattcttctgttgtgatgcatgtaccttctccatctacatgaatgcttccaccttcaagaaccatcgtgtgtggaaatctagggatcctctcaatctcaactattttcttggcaacatagctgtcaaggctccaatcaacatagcaaccatcagtggctcctccccaggcgttaaattcccaatcaattcctgctatatttttttctgtgattcctaaccctggtgcacctttacgaacaataaaagtgggaccaatatcacggaaccagcaatcattcatgctcatctcgaccaccctgatgtttggttgatgtagcattagctcatggacatagggatactgcttggcacttgcacatatagtaacagactcaaactttgaaatggcaatagcagttcttgcaaatacttttcgagctggaccagcaagctctcgccaattgtctcgacgctcaggccagcccatccagcactgctcgtgcggctcccactccgccggcatccggaaccccatcttcgccgggcgcccctccatcgtcgtcgccttcgccatcgtgc

SEQ ID NO: 22701 - DNA, 655 bp, Oryza sativa
  Clone ID: PAT_MRT4530_27853C.1
aaataagacagcctcaaagccattttcatttgggtgggcctgttcaacgttggcaagggccatacggcagtttccaacgtgcttacactactgcaacttacaaccatatccatcacgctggtgcaaccacatcccctacacacaagctcacaaatcacaatgtttgtctgcggccttattctatcaactcattcatttggttttgggtaatctatcaattcattcatttggttttgggtaatcaatggtgtatgatcgggtcgccattttgggtagcaaatgatgtagcttatcacgaattcacgatagggcatggctgctatagtgccatctactccctggacatatagtactacgaatctggactagtcccatgtccaaattcataatactatatacgcagtatcatctacgacgggcgtacaggctgctgctgcgtgatgcaatgtatgtttcctcctgccagcacgatcttcttttgcgccttccaccatcaccacctcatgatcaggaaatgccttctgaagaacagcacacgcttcttcgtcccacttgtcgccaaaagctggtgctacaattccgccattggctatgtagaagtttacgtacgaaggcagccaatcttgtgcctggtttcttggtataggatgctttg

SEQ ID NO: 22702 - DNA, 216 bp, Oryza sativa
  Clone ID: PAT_MRT4530_27854C.1
gggtagggttttttttttttttttccatctttgccaactagagtccaatttaaatatagggaatctggcaatccccacgggcattgaaaacattttaataagccctgcttacccacatgaatttgtctaaccagagtaacatgtcccctcccaattctgatagtgctacaaaatgaatatgatccccccctgattcaatatttccagacccttggc

SEQ ID NO: 22703 - DNA, 672 bp, Oryza sativa
  Clone ID: PAT_MRT4530_27855C.1
atggtgaagttcactgcacgccggggcaaatctgagctagtggcaccagcgagggccacaccaaatgagcgaaagtatctctccgatattgacaaccaacactctctacggttctatgctaccgccgttgagttcttccagctatgcactttcgatggctacaagccacacgatccggtgaaagcaatcaggtccgcgcttgcagaggccttggtacactactaccccatagccggtcggctgagagaacttccacaagaaacaacggtggctgacttgtgcggaaaccctctagggtatgcacttgaccttgttcgtaaggccaaattggaggtgacagatgaatacgttaaatcaactgtggactttctagcatcacgcaagtggccatctcttgttgttgatcgaacatacattgtatcagacataacatccgttggagatgacaaattagactttgggtgggggaagcgtatgggtggtggcataccaatggctggagacatcatgtccaggctaataagctattttaccaagtgcaagaatgctgatggtgaggactgtattgtagtgccaatgtacttgccaagcataaccatggatagattcgcagcagagatctctgtttggtcaatgaaacaaggaagtaaattcattgtcagcgcactttag

SEQ ID NO: 22704 - DNA, 2007 bp, Oryza sativa
  Clone ID: PAT_MRT4530_27856C.1
acgagctagagcgcgcgcgccgccgcgaaacattagctatagctagctagatatagccggccggcgatcgaggagatcgatcgatcgaacgccgccgcgcgcgcgcggtcatgacgccggcgagggtggtgttcatctgctgcgttgttctgctcgccgccgccgccgcggcggcgtcgtcgtcgacggcggcggggatcaccagggccgacttcccgccggagttcatcttcggcgccggctcctccgcttatcaggttgaaggtgcatttgcagaggatggaagaaagcctagtatctgggacacgttttcgcactcaggctattctgttgatggagcaaccggtgatgtaactgcagatcagtatcataagtacaaggaagatgtaaagcttttgcaagacatgggcgttgacgcgtacaggatgtccatttcttggtctcggcttattcctgatgggcgaggagctgtcaatccgaagggactggaatactataacaacctgattgatgaacttctgagccatggaatccaacctcacgtaacgatatatcatttcgattttcctcaggctctccaagatgaatacaatgggatacttagtcctagatttgtagaggacttcacagcatacgcggatgtctgcttcaagaactttggtgatagagtgaagcactggagcactgtcaatgagcctaacatcgagccgattggcggatacgatcaaggaatccttccgccacggcgatgctcattcccctttggtgtcctcagttgtgacaatggcaactctaccacagagccatacatagtagcacatcatcttcttcttgcacattcctcagcagtgtccctctacagagagaagtaccaggccactcaaggaggacaaattgggctcacattgctcggttggtggtacgagcccgggacgcaagatcctgaagatgtagcagcagctgcaaggatgaatgatttccacattggatggtacatgcatcctttggtgtacggtgactaccctccggtaatgaggaagaatgttgggtccaggctaccatctttcacagctgaagaatcaaagagagtacttgaatcctatgattttgtcggatttaaccactatgtcgccatttttgtgagagccgaccttagcaaacttgatcagagcctcagagattacatgggcgatgcagctgtcaaatatgacctcccattcctgaaatcaaataatgagttcccactcgggttgacgagtgacttcatgacgtcgaccccatgggctctgaagaagatgctcaatcatctccaagagaagtacaagaaccctattgtcatgatccatgagaatggagccgctgggcagcctgacccttcaggcggaaacacctacgacgacgatttcaggtcgcaatatctgcaggattacatcgaggccacacttcaatccatcaggaacgggtcgaacgtgcagggctacttcgtgtggtcgttcctggacgtgttcgagtacctgttcggctaccgcctccgcttcggcctctacggcgtcgacttcgcctcgccggagaggaccaggtaccagaggcactcggcgcggtggtacgccggcttcctccgcggcggcgagctccggccggcggcggcggcgctggccggcggcggagcctactcccagtgatcaaggttcttcttcctcgcacgctttcatctcgcgaagaacaggacaggacgggacaataaaatttacctggatagatacagaagaattatacagttcatatggaagttgatcttttgaatagggtcttagaatgaatggtctctcttcttcccctggtttttggttcttctgtttacagaccaatgatgggtcaatgtcagtcaaattgtgtgatttagatcaatgggtcaaagtgtatgatgtgattgtgtaattgtgtcgattatatataaaattttgaagtctctcgtagtttgaaaaaaaaaaaaaaaaaaaaaaaaaa

SEQ ID NO: 22705 - DNA, 711 bp, Oryza sativa
  Clone ID: PAT_MRT4530_27857C.1
cggacgcgtgggcggacgcgtggggtgaaaaaactgaacaataacagttcccactcgggttgacgagtgacttcatgacgtcgaccccatgggctctgaagaagatgctcaatcatctccaagagaagtacaagaaccctattgtcatgatccatgagaatggagccgctgggcagcctgacccttcaggcggaaacacctacgacgacgatttcaggtcgcaatatctgcaggattacatcgaggccacacttcaatccatcaggaacgggtcgaacgtgcagggctacttcgtgtggtcgttcctggacgtgttcgagtacctgttcggctaccgcctccgcttcggcctctacggcgtcgacttcgcctcgccggagaggaccaggtaccagaggcactcggcgcggtggtacgccggcttcctccgcggcggcgagctccggccggcggcggcggcgctggccggcggcggagcctactcccagtgatcaaggttcttcttcctcgcacgctttcatctcgcgaagaacaggacaggacgggacaataaaatttacctggatagatacagaagaattatacagttcatatggaaagttgatcttttgaatagggtcttagaatgaatggtctctcttcttcccctggtttttggttcttctgtttacagaccaatgatgggtcaatgtcagtcaaaatgtgtgattt

SEQ ID NO: 22706 - DNA, 1003 bp, Oryza sativa
  Clone ID: PAT_MRT4530_27858C.1
atgacgccggcgagggtggtgttcatctgctgcgttgttctgctcgccgccgccgccgcggcggcgtcgtcgtcgacggcggcggggatcaccagggccgacttcccgccggagttcatcttcggcgccggctcctccgcttatcagaatatcagagagtacaaaattttactgtcaacgcctgtccaagactgcaacctgttcgtcgagagagtgcataagtgtatcttgctaagtacaagtcgcagtggaggcctgacatttggcagattcagagaaatgcatggcctgaaacctatgttgttagaacagggaaaagttgtggttgaaggtgcatttgcagaggatggaagaaagcctagtatctgggacacgttttcgcactcaggctattctgttgatggagcaaccggtgatgtaactgcagatcagtatcataagtacaaggaagatgtaaagcttttgcaagacatgggcgttgacgcgtacaggatgtccatttcttggtctcggcttattcctgatgggcgaggagctgtcaatccgaagggactggaatactataacaacctgattgatgaacttctgagccatggctctccaagatgaatacaatgggatacttagtcctagatttgtgtactttcttgctacccccctaagccttacccccttactgcaattgcttccatatgaactgaaataatattgcttttgcattcttggccatgatgtagagaggacttcacagcatacgcggatgtctgcttcaagaactttggtgatagagtgaagcactggagcactgtcaatgagcctaacatcgagccgattggcggatacgatcaaggaatccttccgccacggcgatgctcattcccctttggtgtcctcagttgtgacaatggcaactctaccacagagccatacatagtagcacatcatcttcttcttgcacattcctcagcagtgtccctctacagagagaaagtaccagccactc

SEQ ID NO: 22707 - DNA, 780 bp, Oryza sativa
  Clone ID: PAT_MRT4530_27859C.1
ttctttcgcttcgcgagattggttgattcatctcgcgattgatcgagctcgagcggcggtgaggtgaggtggaggaggaggaggaggaggatatttattgttttgtcgggaagatttaaaaatattattatgctatctatgttgtatattatgtgacccaatcatttacttataattgattattgatgattgtctttttgttttttaagtttattttttcttatatttttccttattattttttttcattctgtatattctttttccattttttactatttgttaaatttatgtctttaaacttttttaatttttactcattaattttatttttttattatttcttatatattttttttttatggtcatttctcttatttatttatttttattactattcttttttataatgtttttacatttttattctccttattgaaattttttctatttttttcctttgtttttttttttttttttgtttttaattcatctttttttttttcactattttttcttttatataatactttgtttttttttttggtttattatttatatttttttatactttatttttcattattatttgtttcttttatttttttttattttctttttttttttctttttcctttatattttattaatcttattttttaatttctatgtttttaacttttttccttcttttttttttttttctttttttatttttctaaaaattcccctccttttctttttatttttttttatcctatgtattttttattttttttt

SEQ ID NO: 22708 - DNA, 231 bp, Oryza sativa
  Clone ID: PAT_MRT4530_2785C.1
atggcgctcaagttcctctcgttgggaccttgggtgaaattacttggagaatggacacccttaatgtgcagacgggggagatccagtacaatctcacggaacacatatctcaaacgcaagaaatggcaacaatctgctgatgctcacatcaataacatgatgcagcaacaacatgatgaccttcaggcgtactttcgatttcaggggttcaagccttatcaaggaccctga

SEQ ID NO: 22709 - DNA, 1125 bp, Oryza sativa
  Clone ID: PAT_MRT4530_27860C.1
atggcggggagcaccggcggaaggagaggagctgcgctcagccagcggccggcgggggaggttggggaggaagttgaggtcggtgaagaaggcgatgacggccgtggcgaggagcatggtgacggtggtggagagggggaggagctgcgctcagccagcggccggcgggggaggttggggaggatgttgaggtcggtgaagaaggcgatgacggccgtggcaaggagcatggtgacggtgcggccggcgggggaggttggggaggatgttgaggtcggtgaagaaggcgatgacggccgtggcgaggagcatggtgacggtggtggagagggggaggagctgcgctcagccagcggccggcgggggaggttggggaggatgttgaggtcggtgaagaaggcgatgacagccgtggcgaggagcatggtgacggtggtggagagggcgcggagctggctggcctcagcaacggcccggcgcttcctcgttgtcgccatcgaaccccatggcggcagagatggaggccactgcggaggcgctcacttgagaggaggtgatgcgtcagcggagctgcgggcgcggcaccagcagtacgtatgggagctcgggcgaagcccgctcgaggctgagcagccaccgccgccgtcgccctctgcgtccgagcctggcggggatgggacggggagagcaaggacgtcgccaccgtcgcgccgcgtcggggcctggcggggagggaatggggagagcgaggacgccgccgccgtcgcgccacctccgggcctggtggagaggggacgaggagagcgaggacgccgccaccgtcgcgcacgcggcttcaccgcttctcgttccctaacctcgtttggggcacccatcgcctcctccactgctccaagaaccccgcctcatcgcccccacccgtggcgtcggacaccccgtcaccggacaagaagaaggtcgcccaccgctccgctgacggcgtgggcgtcggcggttcacctcagcggggtccgcagcggccgtggaacctccgcacccgccgctccgccaccgtcgcgccacgtccggagggatcggacgatgcggccgatgccgcgccagaccgagcgccgctgctggcaatga

SEQ ID NO: 22710 - DNA, 486 bp, Oryza sativa
  Clone ID: PAT_MRT4530_27861C.1
atggggaggggcggaggtgggaaccaccgcgcagcgagacggttcctccggcgacctcgtggtctcgcttgcccatgcgtgcacgtcatcctcgggtggacgagaggagtggaggaggcgagcccaacgctgcgcgggggccagcacgtggacatcgtccaccgtgagccagcgagccaaggccaagatccgcctccacccggggggcgcttgatcattttcatctccctctgggccgatatcaagcaatccttcgcctacgacaaagagagctgcaacatggctcaatccatcgagatctccctgcaacaacaacctatgactgcaagcatcgccgacaaggcacccagcgagccacacctcccggcagcgaaggccccgaagcactccatgggcagcagcagcacgcccaccaagaaagtcgccctcgaccccctgaccccagacaagaccgtgatcatcggcgccgagttgggcgacaaatag

SEQ ID NO: 22711 - DNA, 186 bp, Oryza sativa
  Clone ID: PAT_MRT4530_27862C.1
tcctcacattgaataattatttttaataattgtaggtttttttttccgggtccagaggtctgcccgatgcccaacctagcaagtatccgatctgtgccagctctgtacgcatcatggttgtgcagatcgctatcgagaaatgaatataacacatttcttttggggtggccctcttttcctatttct

SEQ ID NO: 22712 - DNA, 1271 bp, Oryza sativa
  unsure (1)..(1271): unsure at all n locations
  Clone ID: PAT_MRT4530_27863C.1
atggctcgccgcgacggcgtcggcggcgacggcggcgcgtcggcggcggagcagcagcggagagtagcgctgcgtgtgctgctgtcccgtgcggaggcttcctcgccgccgccggcgacggtggaggaggaggcgcagcgggggaggagcggtggtggtaacaaggggctcgcgtcggcggcgctgcgcgggctcgggtgcacgtcgacggcggcgctgcgtgcccacgcgccggcttcggcggtggaggtggcgagtagctcggagcggtggcacgggaggcggcggcggaggaaggtgcaggagaggcggagcgcgaggggcggcggcggaggaggaggaggaggcgtggcgccgcccggccccgcgccggcggcggccggggacgtgtggtgcacgtgcgctcccgggataccgttcgccgccgaggcgtcgtcggtggactgcgtcgtggtggcgcgccaccaccacgcccaccacacggcggcggcgatgggctccggccgccgcggggaggcggagcggcgccacagagagaggccggccgctcctcgagctcgaagggtgaccatgcgtgagcacatatcctcgtcgctcatggactcgccgccgttccccgacatgccgctcctcaacgccgacctgctaccaccaccaccctccggccgccaccgccatggataccgccacccccacgtcggcgccgccgaggaagagatcatgatgttaagaacacggctattatggggaagattcggtatgcatgatcagcaccaggattggcgactcgacgttgacaacatgacatatgaggagctgctggatcttgaagacagaattgggtatgtaagcacagggttgcatgacgatgaaatcgctcgcagccttaggatggtcaagtattcagcattcaaccccaagcattttgcaacagaagtagaaaggaattgcagtatttgtcaggaagaatttgaagcaaatgaggaaacagggaggctgatctgtggccacagctatcatgtgcaatgcataaagcagtggctttctaggaagaacacctgccctgtctgcaaaactgttgtatcgaagacatgaaatccaatcagtccctaagcacacttgaactgaaaattgtgaaaaggacttactctttcacagtgtttgtttgtgattgtacagctctgtttgtacatgatgctttgtgtaagcacaagcctgaancaaaccatctcattggcatatagaaatttacatgttttcagtttacccca

SEQ ID NO: 22713 - DNA, 197 bp, Oryza sativa
  Clone ID: PAT_MRT4530_27864C.1
acaaatcctatatttcatttggattgccatatctgaaaatgcggaagaataccaggtgtggtccaaccaatacagtaaggaaaattactggctaattaagtacttaactaaagcgatttcgacaaatagtacaagattgttaccacaataaaaactccaccaatctactcagaaatacattgccctaaaaacaaact

SEQ ID NO: 22714 - DNA, 2535 bp, Oryza sativa
  Clone ID: PAT_MRT4530_27865C.1
ctagcgcgcggagtggcgggggccggcgatgacgacggcgggcggtttggagcggagcggcgacagcggcgactggcgcgggcagagctcgccccctgttgccagcacatccttccccgtcgccagaacgccattctccgtcgccagcacatctttccccgtcgccagaacgtctctccccgccaccagcgccgtgctcgtggcaagcacacgcggcacgacattacacgcagcatcatctcccctccccgccatcctattcccaggctcgccacttgagtgttcctctatcgtatccctgtccgaagcatgcaggcccgagccggcgtgttcagtgtgctcgtcgtcgcgggcggtatccctcagcgcgccggggttggtagggatcatctcggacacccgctgaactgaagatgtcgaccaggtgcgccccggtagcccaccagcaaagccagatgctccgccaaaaggccgacctccgccttgtttcgacgtccacggccctgtgccgtcgattcggccagcccagcaggagaacgtaacctggcgcgggacgtcatcatcatcttcgtcgttggaggccgtggagaggggaacatggaggggcgtcgggtcaatgatctcctcaatgtgcacaatgatattgtacgtcagcgtgcacttgtgcagaggcgcccttggaatcctgattgatcccgccatacgttcccagcacggcgggccgccccccgcgcgctctgggatctccacctccagcgttgttggcaccgcagacgggttcttgagccaggcgaacatggtgagaaccctcgcgtccgccggcggaacaagctccaccaactctccacccagctcacggatcagctgggccatcgcctcctcatcccaggcgtgctggggaagcccttctaatgacagcttggtgaagaattggaacctcgtgctgctggccagcaggcgcctgttccagctcttgaaggcgattggcgccccttggaagaagacttgtttggatttgccgaggacccaatccttttctctggcagaacgaaacacaattaggtagtcctcaggggtcgttacctccacccggaagtgcgcggggaggatgccacagtcgacgatcaccgcaaccagatctctaggtgagagcgctggctggttgccaagcactgtggccaggagcaccttctgctcgaagatggcctccgtctccaccatgcgcggcgtccaggagatggtgcaccgccccgactccggccggatgttggcgtccccggtccgccactccttcatgacccgagagggctgctgagcgcagatctgaaagctagccatgccatcaccagcagccactccctcttctcgccccttctttctgggaggcaaagcttctagcacttctttccgcggtttttcacctcccgctggcttcgttgccacttcttttgaaccagtggccggctgcgccctagccgcacgggaggtagggcaattcctagcgatgtgccctgagtaccagcagttgtagcatcgcgtgcttcctgggcaggcggatttctggtgtcctagccccaggcagttaaagcagcatccttggagccagcgggggactgttcttgccttcttgaatgcctggtcttcttcgccccgttgatccaccgcattaactgcgggacgcgacaggacgatatcacgccaggacgtccttcctagctgcgacatgagagaggatgttgggaggtggtcgccggcgtcggagtgcccaccggcgattagatggtggtcaccgtcgccggagtgacgactggcgatgagtctacggacctctctatccaccaagccacaaccacttttctgccatcttcctgaaaaggggaacatgtccacattgcagctggagccgcagctgcagccatggccggcctcaccggagccggcagccaactcgaaacccggttcgctgtgccccttttcaggtgcaacaccgaggaccatggtcactgaggtggtggtggtgttcttctctgccaggtcagggtacatcttttgtacaagatgtggcaggagctcacgcaaccttctagcgccggccagcatccagagcttggcctcctctatgattttggtaagcagatacgtcgttgtggactccttgtgctcaaaaatccgctgattctgctccttccatatctcccacaccacccatctggccacggtggtgggcttgacggcgtcgcggatgcagcgcctgcgtgaacctactcttgtccaactccggaggtcgccgtccgccggcgtgaactcctccgacgtcttgcagctggagccacagctgcagccatgggcagcctcaccagattcagctgccttgccaaccatcacctcaaagtgccccttctcaggtgcaacgccgaggacagtggttgcagtagtggtggtggtggtgatcttctcagccaggtcagggtacatctttccgcagccaccgccgcatccgcaggaaccgcagttacaacttccaccgcacgacat

SEQ ID NO: 22715 - DNA, 165 bp, Oryza sativa
  Clone ID: PAT_MRT4530_27866C.1
cgatcgaattcaagcgtacgtacgtgcacggggcacccacgtgggaataacttcgaacaatcaactgagcaagttgccacatactcctacaatgtgtgttcatgcggcggctctgcccatcaagcttcacgccattttgaacggacgccgagcgtactacggttc

SEQ ID NO: 22716 - DNA, 647 bp, Oryza sativa
  Clone ID: PAT_MRT4530_27867C.1
ctcatatcatacatcgtgatgcatgacggcataaaccaaacctgcacgctgaggcgtagtcagagcctcactcgcacgcaaggcagagaagatcggcggggggggggggatgagagatcagcgggggattaccgatgaacgtgacgaacgcgacggcggcggtgacgacccagcacctgcctgcggagaggagggggtcatcggattcgacgcccctagtcttctcgctggtaaatgaagtggcctgactggggagagaggcgggggcggtgcaacagcggcgagaggagggtgaggaggtgacacgcgtgaggagaggagggcgaggagggcggatggcgagtggctcacctcaatcgatcttcagaatataaattgatcttcagaacctggaatatgaaggcctgacgacaaagaacgagcaaggaactagcagagcagacatcagcccgaggattcgtgcgccagcggtgacggcgacctgctgctgcgtacctcagctgcgactggcgggcgctacgggcgcgtgcggcggtggtatccggctggagcggcaggcgtgtgcgccctcggcgagcggcgggcttctatggcagcgacgaccagcagtatgtaacctctgccgctgttctttgtttgcttctgcc

SEQ ID NO: 22717 - DNA, 559 bp, Oryza sativa
  unsure (1)..(559): unsure at all n locations
  Clone ID: PAT_MRT4530_27868C.1
ttattaagttgagttttaccacttatctnccccacagaaccgctccaacggtgacttccctttgtgtgtaccacttcaccactggccaacggctatggaagactataaaaaactgctgtaaaatttggttagtgcggttgttccctcggtgctaagattgaatttgtaccagctatatcattcagacgtgaagtaatacttcttaccagggcccctggaagctgggacaagtttcacaaccataattcctcaaaaaggtaactataaataccacctttcagattacttgnttgagactatggaggatcacttcacggatttagtagagtgaattngcagctctggacatgtctctgtgttaccatagtttcactgtgtgaatccgcatttaccttttgcgttcactttgaaccccctttttcttcttctccagctctggaaatagcattatctcctaggtcacacccacttccgcggttctgcagccgctgccataatactggccagtggatatgtgcctgagtttgaggagaagggccaaaaaaaaaaaaaaaaaaaa

SEQ ID NO: 22718 - DNA, 209 bp, Oryza sativa
  Clone ID: PAT_MRT4530_27869C.1
agaagaacattgaagtttattatttatttaccatatgtatatatgctttctgacaaatgaaagtactagttatttattaaccccacatagtcggcacacaaaaagctttaatatcctagtgacgagttgaaaagtaataggacaacctaggaaggggtatataccacccgccccattgtttatttgcaggtggcacaacttctaaaggt

SEQ ID NO: 22719 - DNA, 482 bp, Oryza sativa
  Clone ID: PAT_MRT4530_2786C.1
tcttcctccgcgccggccaccctcggtgaggcatccctcccctcttttccccttcctcccctcctagtaccgcgccgccgcttcaagtcacgcgcggtcgctttcgacagccgctgccgcttcccgtgccgccggtcgctgccgccgtcgaccgcgtgccgtcgccgctagccctggccggccggtcggctttgatgtcgagccgagcccggcggccgcctctatcgccgcccgtccgatcggccccgagggcgatctgggccgtcggtcccgtggaccggcggtggaccacccgcgtggtcccggtccacggtgaaccgcccccccttgagccgctgaccagtggggcccgcctatcggcgccgcgcctcccccttgccttgtatgtcgctagattccggttcctccgacgctccggtgtacttcgaaatagtcgccgaggttcctccagcagcagagcaaggcaagtcatgcttgtcact

SEQ ID NO: 22720 - DNA, 458 bp, Oryza sativa
  Clone ID: PAT_MRT4530_27870C.1
ccaaaagaacttgcgtgaaaattgaagcataagcacaaccggtaaggttaatacatgataacaacacttaatgttgaccatagggacaaaaatactctttactaacaacatttgcattcaggcagggaataaccggggatgcagggactctaacatgataatcggacaagtgcccctacaactaagggagtataccaacatcgcgacctttctcatccaaaaccacaaaaatgacatggatatgtgatcattcactcggtcagagacttgcgtcgggaaaataataacaaccattgtctggactctgctccaactagagaacggaagcaataacgccacatatttccaccctctaaaaggatggcacgactctaccaccttctaatcgaggaccatgcgcgatacaatatggctctcattgacaagaaggtattgacctaaccatgggctcatccaca

SEQ ID NO: 22721 - DNA, 357 bp, Oryza sativa
  Clone ID: PAT_MRT4530_27871C.1
atgccgggagtccctagggaggtgatcgagcacaaactcatggtgcgacccgatgccaagccagttaagcaaaaactgcagagatttgcatcatatcgaaaacaagctatacgagaagaactgtacaaacttctcaaagctggctttacccgagaagttctccttccgaagtggcttgctaatccattcatggtccgcaaggggcaacgaaaagtggagaataggtgtggacttcaccgatctcaacaaggcgtgcccaaacgattacttttctcttcctcgaatagaccaattggtggattcaacaaccagctatgttcagccgatcggaccaatgggcccctagtctgtgtctaa

SEQ ID NO: 22722 - DNA, 150 bp, Oryza sativa
  Clone ID: PAT_MRT4530_27872C.1
cacccggggggccccgccccaatattcccggctcgccctcacgcgccgcctactggtgaggcccacgcgctagccgcagagggggggacttttataataatagggggggatacctcaccatgaccttgttctcgaggatgaatttctacc

SEQ ID NO: 22723 - DNA, 531 bp, Oryza sativa
  Clone ID: PAT_MRT4530_27873C.1
cggcgggaaaaaaaaaaaaaaaaaaaaaaaaaaaacgggatcccttcttcaacgatggaagtaagatctttaaatttgtgcttcctcttggttcttgttttgcttatgagtccagcgccaacggcagtagctttttccccagaggattgcctcgatgatgttggctggatactcatctgcacaaaaccgacatgcaaatttagctgctggacttcacgctctgtgaacaaggggaggaaaatgcaggactactggtgcagtgattcgaacacctgccactgcgtcttttgcaccggcgactaagaattcagtggctgtcttgatatcccacaagatgtagcagcatgaatatccaagggaataatcaataataaacttgttgcttgcatcacctggagctagataattaaccaaaaaaaagaaaaattctgaaatgatcttcatgcggatgtagtcttgcgagttcgattcttgttgcttagaattttaagaaaaatcattgagaagaaaaaaaaaaaaaaaaaagcggcc

SEQ ID NO: 22724 - DNA, 1179 bp, Oryza sativa
  Clone ID: PAT_MRT4530_27874C.1
atggccgccgcctcaaatgtgcccccgtcgtcttccacaagcagcagctcaccacacaacaccacatccacgcactccactgagctggtcaagggtacgcaccggttcaccgtcgccggattcagcctgcagaagagaaacggcgccggacacttcgccaaatcaggctccttcgatgtcggcgggtacagttgggcggtcatgttctacgctgccggcgagaaggaggaagatcaaggacatgtgtccgtgttcctcgagctgcaaagcaccggcgtagagaaagttacggtgaagtacacattcaacatcagtggcagctcgttgctgtcggcagggtggggtgatttcaagcctagcagcaaatgtcgtttggggttcaacaaattcatggagatcgaaaccgtggaggatgtgtacctgatgaacgactgcgtgacgattcactgcgccgtcgaggttgtcagggagaagaaggccagagcaaccgtgagccgccgcatcgcggtgccgccgccggccatctgccgtcatctcgagcagctgctggagagcaagaaaggctcggaccttacggtccaggtcggagagagtaagtacgacgtgcacagggcggtgctcgcggcccggtcgccggtgttccgcgcccagttcttcgggccaatggcggcggcgaacaggcgcgccagcggcggcggcggcaggtgcgtgcgcgtccatgacatgagaccggcggcgttcgaggccgtgctccacttcgtctacacggacacgttgccgccggttaaggaggaagagggcttcctgacgaacaactccgcgagccgccgccacctcgtcaatctcagggacgcggccgccggatgctcgaagggagaggtgagggtgatggtccgcgagtggctggcggcggcggaccggttcggcctggagaggatgcggctgctgtgcgaggacgcgctgtgcgagagcataggcgtggcgaacgcggcggcgacgctgcggctggcggaccggcaccactgcgcgctgctcagggcgttgtgcatggagtacatcgcctcgcccggcatgttggcggccgtgatggcaacaaaggggttcaaggagctcaaggtggcatgtccctctcttctcatcgagatcctggagaaggttggatgctgccgttcggaataa

SEQ ID NO: 22725 - DNA, 618 bp, Oryza sativa
  Clone ID: PAT_MRT4530_27875C.1
atgggggtggcgatgtcggcgtgggctcggggcggctcggcgacgtcggcgcggcggcaggcggcgatggcgacgggcgggaggcgaggcgacggcggcacgcgcggtgatggcgacggcgatggtagaggggaggtggagcggcgcacggctctcctctgcctcaagtcccagctccatgacccctctggagctttaggctcatggagaaatgattccagtgtttcgatgtgtgattggcatggggttacatgcagcacagggcttccagctcgagtagatggattagacctcgagtcagaaaacatcaccggccaaatatttccttgtgttgctaacctcagtttcatctccagaattcacatgcctggtaaccaactcaatggccacatttcacctgagatcggccgtttaacacacctcaggtatctaaatctcagcgtgaatgcacttagtggtgaaataccagagactttatcgtcatgttctcgcctcgaaaccatcaatctgtatagcaactccattgaagagacatcaccaaaagatcgaccgacaatggatgatgtttactatgatatcatttccatcaaagaaaaatattatgcactgatcaactga

SEQ ID NO: 22726 - DNA, 1231 bp, Oryza sativa
  Clone ID: PAT_MRT4530_27876C.1
tggatccccgggctgcaggaggaaacctcgccaccacgcgccgccgccgccgccgccgccgccgccgccgccgccgcccgccgcgctaccacctgttgctcgtacgatcggattcaaattgtcgcttctttcttcttccacagcacaggacggggtgtagaagaagaagaagaagagcatcaagaggatgggttcactgcggcgggttgtgcacctggtgaccgcattgaacggcagcgccaacctccgccacatcgacacgtcgcgtttcttctcccgccggccgccgccgccgttcagcccgtcgtccatggcggtggtgacggaggaatcctccttgccggagccctccatgtcgttctacccagctccggccccgccggagagcaacggcgacatcggggtgatgctcttcggccgcgcccgcgacaggctgctggtgacggaccagtccgacagcgccgccatctacgacgccggcacgcacgccctgctcgcggagaccaccccgctgaaacccaagtactggccagtctccgtccctgtaggcgacgacatctacctcttcgacctgtaccccagggtgccctgcggcggccgccattgcttcgaggctgtcacggcggtggattcctcttcttcttcttactgctcccgtgcgctcccgccgccgccattcctgtttgccccgggctacagccccaagcctatcgagtcctacacggtggtcggcggatcggaggtgtggatctccacggcgcgcgcgggcacctacgccttcgacacggttagctgcagctggagcaagcaggccgactggccgatgccgttcgccggcctagcggagtacgtccccgagcacaagctctggttcgggctctcctcctccaggagggacaagcacccgctctgcgccgtggacctcgccgccgccgcctcgccggagacggggccggagctgaccaacgtgtggatggagctgtcagtgccgagggaatggatcccggtcgaggccttccttgtgcaccttggctctagcaggttcttcgtggccagattcttccaagagctagtcgaggtgcgctgcgacttctcgcagcggttcgacaggttcgctgtcttcaccggcgttgagctggagcgcacctcccgtggtgagctccggatgatcaagcacaagtcggagcgttacagcatcgctcacaaagtcctctgccatagtgttctttga

SEQ ID NO: 22727 - DNA, 1014 bp, Oryza sativa
  Clone ID: PAT_MRT4530_27877C.1
atgggggtggcgatgtcggcgtgggctcggggcggctcggcgacgtcggcgcggcggcaggcggcgatggcgacgggcgggaggcgaggcgacggcggcacgcgcggtgatggcgacggcgatggtagaggggaggtggagcggcgcacggctctcctctgcctcaagtcccagctccatgacccctctggagctttaggctcatggagaaatgattccagtgtttcgatgtgtgattggcatggggttacatgcagcacagggcttccagctcgagtagatggattagacctcgagtcagaaaacatcaccggccaaatatttccttgtgttgctaacctcagtttcatctccagaattcacatgcctggtaaccaactcaatggccacatttcacctgagatcggccgtttaacacacctcaggtatctaaatctcagcgtgaatgcacttagtggtgaaataccagagactttatcgtcatgttctcgcctcgaaaccatcaatctgtatagcaactccattgaagagtatggcttgggatgcaaggtctcagctgagggtgatgtatacagttacggaattattgttctagaaatgataacaggaaagcaaccaactgatgaaatctttcaagatggaatggaccttcacaactttgtggagtcggcatttccggatcaaatcagtgacattttagatcctactatcaccgaatattgtgaaggtgaagacccaaatcatgttgtgcctgaaatactaacatgcgccatacaaatggccaagcttgggctaatgtgcacagagacatcaccaaaagatcgaccgacaatggatgatgtttactatgatatcatttccatcaaagaaaaatattatgcactgatcaactgaggaaatggatggatacaactgaagttcgcctgctgaagcttgtaagatagttttggtactcatctttcaatttatagtagtaaagattatctctctttgatttgaaataaatcatgatga

SEQ ID NO: 22728 - DNA, 2175 bp, Oryza sativa
  Clone ID: PAT_MRT4530_27878C.1
atggcgatggcgagggcgaccgatcgccacccgcctcgtcgtcttcctcgcgaactctccacccccaccaccatggcgatggcgatggcgatgcgacgcgcggcggcgctcggcgcgcgccacatcctcgccgcctcgtccacctcctcctccggcgtcctcctccgccgccacatgagcgtggacgcgggggcggcgatggagaaggtacgggcggcggggctgctccggacgcaggggctcatcggcggcaaatgggtggacgcctacgacggcaagaccatcgaggttcaaaatccagcaactggagagactcttgccaatgtgtcctgtatgggcagcaaagaaacatctgatgcaatagcttcagctcacagtacattctattcttggagcaaactcactgcaaatgagaggagcaaggctctaagaaaatggcatgatttaattatctcacacaaggaagaacttgcacttctcatgacactggagcaagggaaacctatgaaagaggctcttgttgaggtcacatatggtgcaagttttattgaatactttgctgaagaagcaaagcggtatatatggtgatattattcccccaactctatctgatcgtagattattggttttgaagcagcctgttggagtagttggagctgttacaccatggaattttcctttagcgatgataaccagaaaggttggaccagcattggcttgtggctgcactgtcgttgtcaagccatcagagttcacacctttgacagcacttgctgcagcagatcttgctcttcaagctggaataccagctggcgcaataaatgttgtgatgggtaatgctcctgagataggtgatgctctactccagagtacacaggtcagaaagattacattcacagggtcaacagctgttggcaaaaaactgatggctggatcagcaaatactgtgaagaaggtttctttggagcttggtggcaatgcaccttgcattgtttttgatgatgcagacattgatgttgccattaaaggcagtcttgctgctaagttccgtaacagcggacagacatgtgtatgtgcaaacaggatattggtgcaagaaggtatttatgaaaaatttgcaagtgcgtttatcaaggctgttcagagtttgaaggttggtaatgggcttgaagagagtacatcacagggccctctgatcaatgaagctgctgttcagaaggtagagaagttcataaatgacgccacttcaaagggagcaaacatcatgcttggtggtaaaaggcacagccttgggatgtcattctatgagccaactgtagtagggaacgtcagcaatgatatgcttcttttcagggaagaagtctttggtccagttgcaccacttgtaccattcaaaactgaggaagatgcaatccgtatggccaatgataccaacgcaggcttagctgcatatatcttcacaaagagcatacctcgttcatggcgcgtttcggaagctcttgaatatggactagtcggtgtgaacgaggggatcatctcaacagaggttgcgccgtttggcggcgtcaagcaatctggccttgggagagaaggatcaaaatacggcatggacgagtacctggagctcaagtacatttgcatgggaaacctgaactgatccacttgagagtaccgtgcgtcttaaaaccgaagtacctggctggtgatgaatcgaagccgggggcaagagtagctgcaagaactgaagagcactgaggctacttgcacctgcaggacaggttagaaacttagaataataataagaagaaataataaaaataaagtggagtaagctaagccagggagccggaataaaaagttccccaatgagttgtacatgatgtgaaccgtaaagcacggcttcatctccgagctttgtttggtactagtactacctgagaaatcatcacgctactcatatcagtagtgtccatgtccaaagacaacaactttaattctactactaggaaataaaaaaaatggaaagcctctagtcaagcaacaaaaaaaaaaaaaaagtatccaatgggctcgaccatgagctgcatgaaaatcaggccttgcccctttgggaccattttgcatgatctcttgatgtattgaattgagttgcggttcaagaacttttctgaactc

SEQ ID NO: 22729 - DNA, 375 bp, Oryza sativa
  Clone ID: PAT_MRT4530_27879C.1
gtacgccacccgcctcgtcgtcttcctcgcgagctctccacccccaccaccatggcgatggcgatggcgatgcgacgcgcggcggcgctcggcgcgcgccacatcctcgccgcctcgtccacctcctcctccggcgtcctcctccgccgccacgtactctccccctctgccccccccccccttcggatgtgggtttagggcgcttgctgtgaattgggaggtttgtgcagatgagcgtggacgcgggggcggcgatggagaaggtacgggcggcggggctgctccggacgcaggggctcatcggcggcaaatgggtggacgcctacaacggaaggaccatgggggttcaaaatccaccacttggggggactttgg

SEQ ID NO: 22730 - DNA, 429 bp, Oryza sativa
  Clone ID: PAT_MRT4530_2787C.1
atgagggagaggcggccgttgccacgggccgtcgaattgagcttgagtggcgtctgggagttgagaggcgccggcggggaggggggcagcgaagaggagggagagctgctgcggcggtcggggaaggggagctacaccggcaatggtgggaaacgggagctgccatgggctggatccgggcatctggctgccccgccgccactccgcctagcgctgtcgctgctctgctcggcgtcgtcgcggcttcaatcacctcttcgcccaggcatcgttgccgagaaggacgcgtcgacattccagatacgccccaagctccttgccatccacgcatgcacgcggttccgagctcgtcgctacttcgatccgccgatgtcagtggtagggagagcgacgaagggggataggggcgccggcggcgggcctggctga

SEQ ID NO: 22731 - DNA, 1497 bp, Oryza sativa
  Clone ID: PAT_MRT4530_27880C.1
ctaaactgtagttagtgatgtatctgtgatattgatatatgtgtgcctattgttgatgattgattacccgcacagtaaccttgccattatcttcaaccaaggaaaatcaaatatagggataaacgacgcataaggacatacagcatcataggatgttgcctaagaaacacctaatcgatggcgagttcggattgctagacaaatttaacattagctataggtcaaggtgatttcaccggtggcagtagacaacaaaatgccacatcaaccattcaggtgcatccgttttcatccttagattgactcctggaacatccatttgttttgcgactggaggaatctagatgaagaatttacaccttgttgaaataggattagaaaaaaaatgcaagtctaaactgtagttagtgaagtatctttgaatattgatatatgtgttccgaatgcttgatgattgaataccagcacagcaacccaggccttttcagcgtggcataggttcaaaaacaacctacttctcaaaccatgaagtatctaccgccgtcgatgttaatgtttttcttccagtcttctcccgaaaaacctttgagcagcatgctctgacgtaaatgtatgatacttttcctaatgctagtcccagcccacatatggcaaaaccgctgatatgaaggcacctaggagcgaagagggaatagccacgtaggagatatctgcaacgtaacaataaaactttgacggggtgtattcctcaagttgtgggtctctaacaagcaccttcttcacatcgtcgcggttaaaacaaagatttagcgggaactccaacctttcttctgcagaagcttgactgatttgaaagcaggccatgtgtctctcatacatgtttgtaaaatgagattccttcagtccaaatgtgcacaagtaatcgattagtggtaaccatttatcatcaaagtcatattcttcttgaagtttctgaaacaagcttctagagatactttcatttttcaactctacttcattatctatgtccacaagaccagttgatctgctagctttactcttggcatgcagagcatcgactttttttgaagtgtcacatctgtctcgtgttttaggttgtcttccttcccagttttgtttcagcgctggtttttcccggcctggtttcttgattggagcacgaggattgtttgaataaagtacaccaggatactccaaacctgatagatcatcatcggtctcgtagccgtcttcctcctcctcctccccttcctcaaactcgaactccgcctcatcgtcgtcctcgtcctcgtcgtggtcgtagtaggggtaccgggatcgccgggagcggcggttgggcttgaggagccgcacgttggtctgcagcgagaaggcgacggcgccgcggcgggcggcggcggaggcggggcaggggaggaggcgagggagagggaatggcgcggggcggagcgcggcgagcggcggaggcggcgccat

SEQ ID NO: 22732 - DNA, 926 bp, Oryza sativa
  unsure (1)..(926): unsure at all n locations
  Clone ID: PAT_MRT4530_27881C.1
cggaattcccgggtcgacccacgcgtccgattcccccaactctatctgatcgtagattattggttttgaagcagcctgttggagtagttggagctgttacaccatggaattttcctttagcgatgataaccagaaaggttggaccagcattggcttgtggctgcactgtcgttgtcaagccatcagagttcacacctttgacagcacttgctgcagcagatcttgctcttcaagctggaataccagctggcgcaataaatgttgtgatgggtaatgctcctgagataggtgatgctctactccagagtacacaggtcagaaagattacattcacagggtcaacagctgttggcaaaaaactgatggctggatcagcaaatactgtgaagaaggtttctttggagcttggtggcaatgcaccttgcattgtttttgatgatgcagacattgatgttgccattaaaggcagtgtaagcaaaaaaaaaaaaagacttatctaccatttcaacatttttttttgtggtgtacttttgnttctcattgatatactgaccaacatacatcatcattaattgcattttatattctattatgatgcatgtttatcaacactactttctgttcagcttgctgctaagttccgtaacagcggacagacatgtgtatgtgcaaacaggataatggtgcaagaaggtatttatgaaaaatttgcaagtgcgtttatcaaggctgttcagagtttgaaggttggtaatgggcttgaagagagtacatcacagggccctctgatcaatgaagctgctgttcagaaggtagagaagttcataaatgacgccacttcaaagggagcttatgttagcctagtggtgaggatcacattctagctcctcgccagccagagctcaaacccccaaagcagcactttt

SEQ ID NO: 22733 - DNA, 156 bp, Oryza sativa
  Clone ID: PAT_MRT4530_27882C.1
gctgatttagggcgaagcaaggagcagggaacgggtcaggtttcatgcagagacgcatagtagccctcttcgaaatagtaagattgtttcctaattgagcgatgcatgccatgtgttacgtctcctatttacgtggtagatcatatttgatattta

SEQ ID NO: 22734 - DNA, 491 bp, Oryza sativa
  Clone ID: PAT_MRT4530_27883C.1
gaagccacagcaacagggataggtttccaacataacaaaccagaaaagcgcacaaagtacagatcgaactggtgatagaatttctatcatttacaaccgtggaaaataaaatatcgcgcttaacgacgctacagacttacggcaacgtaggatgctgcctaatacatccctaatagatggttagtttgctgtgctagacatatttaacattagctaatggtcaaggtgatgtcaccgtggcagtagacaacaaaatgccacatcaaccattctggtgcatcccttttcatccttagattgactcctggaacatccatttgtttttcgactggaggaatcagatgaagaatttacaccttgttgtaataggagtaaaaaaaaaaaggaagtctaaactgtagttagtgatgtatctgtgatattgatatatgtgtgccgaatgctgatgattgaataccagcacagcaacccaggccttttcagcgtggcat

SEQ ID NO: 22735 - DNA, 264 bp, Oryza sativa
  Clone ID: PAT_MRT4530_27884C.1
atgagtcatgactggaacaggttccagttcatgtggagtgaatcaaatgcagaatacgttctaatgccaatgggtcttcccttgtattcccaatattcttttgcctattgctatgattttcagagactcagaccgatgcttgttcatcgccaggtgcccaggttttccgttcttcttggtgaagttaagtggatctgccgtttggtggctggtaatattgatctgaatctgatacatatcaattatatgctcggtgcttgttga

SEQ ID NO: 22736 - DNA, 5807 bp, Oryza sativa
  Clone ID: PAT_MRT4530_27885C.1
atgcccgacattaggtcagcccctgggcggggcaagtccgacgaggacgagcggcggccgattgggtcgttgtttaaactcaagaggaagcgcagggcaccgggttcggcggaagccaagggggattcaaaccctagcgtggaatcggaggctcccgatggtgtggtgccaggggagatggatgataccttggctattataaagaggaaattgaggaagcctaagaagggcaaagaagggggtgatgctgtggtggttggatctggagccgaaggcgagctcctggtggaggaagaagatgtgcagggtggtgttaatgttggtgatggtgttgcagaggataagagcaatctggaaggtgtgaaagtagaggttgatgaagtcattgggggtgagttgaaggattcaggtggtctagggttggaggactccttgtcgacgctgtttaagagatctggtcgaaagtctcgacaggtctctgtgaaggaggaagaaggtgtggaagttgctggttcacatggtgaggaaattcttgagaagggatctggtttggtttcggatagggttgccaagggcactaaacggagaaggcgacgcacaaaggaagaaatgaaaaatgctgctgcaaaatctgaaagtgcaatggcccatgaaggatcgcccaatcggaaagttggcacctccttgcctagaaaggcaaaggcagaggcaaaggtgaagattagtaattccaataggcgctcaaagaagtctgatgagaaaccgaaggcttcagatgatgtgttatgtcaccgatcattgggagaaacaattgaacaagacgcggagaccaggacagtactggatgatggatctagaaactcatctgatggggccagtcatcgcattgaagtttcagcttgtttaagcaatcagccttgcttgaaaccttgctcaggagagcttgctgaagaagtgtctcttagtgcagcaaatgcagccactgatggtgtttctaatgaacacacatattccgaaacattattgaaggaaagaaatgatgatgcaggttgttcccatggcaagccaccgacattagccataaaaagcatacctggtaaaaaaccaatagagatgcccaagaaacctgtccgacaaaaggatcagttattatctactgatgttgacaataaatgcgtggtgggctcaggtgacactaaagatgtcaatatcgaaaatcagccagcttttgggatccctgagtcccatgtgactgggaagggcttgcatcctcataaaatggcaacatctgtgaaagagctggatgtagttgacgtggtagcacccacagatttcgaggacatggagaatgcatcaaaatcaaagcgtgtgacacgtagctccagaaaacgcaagcatggtgacatggcatatgagggtgatattgactgggaaactctaatgcaggagcaggggctgttctcaaacctctcagcagccttagtagattatcctctcaaatcaaaagacaaaatcaaaatctcggaagttctcgacaatggagatggtagcggtgttgctgcagtgcgtgctggcctaaaggcaaaggctgttactccaattgaaaagataaaattcaaggacatattgaagcgcaggggtggccttcaggaatacctggaatgcaggaacatgattctaagtcgatggtgcaaggatgttaaacatatattggatcttgcagagtgtggtgtatctgatgtttgtttggatgacgagtcaccacgtcaaacacttatacgtgacgtgtatttattcttagatcaaaatggttacataaatgccggaatcgcctcagataaggtgaaaacagaccatgaaagtcctcctgaagatgtagaagtatccaagctaaatgaatcacatgaaaggaaatctgtcagtattcaagattgcattgtcactgaagcagtccaggataagaaagctgttgttaaacagactgattgcgttttgacagaagcatcaaatgaagagagtagctctgctgccattcactgtgatgctcaagacttgctgcctcccttgaagtccgaagagctgatattcaaggaaaagaatcagggtgtattaactgaagttgaaggtggcagtcttcatcaagcagaagcagctgatatagaacattctgaaaacaaacatgaagcaagtgatagagttgaatctggtgggtatggaaaaaagataatagttgttggggctggtccagctggcttaactgctgcacgacatttgcagcgccaaggtttttctgtcactgttcttgaggcacgtaataggattggcggtcgtgtttatacagatcgtgtgtctctttcagttcctgtggatttgggtgctagcattattacaggtgtggaggctgatatagcaacagaaagaagggctgatccatcatctttgatatgttctcagcttggtcttgaactgactgtgttgaacagtgcttgccctctctatgatgtagtaactggcgacaaagttcctgatgatttggatacagatttggaatctgaatacaatggtcttcttgatgagatggcacagctttttgcacaaaatggtgaaagtgcagtgggtttatcccttgaggacggattagagtatgcacttaggaagaatcgtgtgactcgatctgaacaggatgatcagttaagaaatgtatctagtgctggagctgtagacatttctgaaagtgcttccacagaaaaggagatagcccactgtggaaaggaggataagacagatgttctcagcccccttgaaagaagagttatgaactggcactttgcacatttggaatatggttgtgctgcaatgctcaaatccgtttctcttccatattggaaccaggatgatgtgtatggagggtttggaggagctcattgcatgattaaaggtggctacgacacagttctagagagccttgcaaaaggacttgatgttcagttaaatcatgttgtaactgaagtactttatggatctgaggaactaggtgccagtggtaatagcaggaaatttgtcaaaatttccacttcaaatggaaatgaatttgtgggagatgctgtgctgatcactgttcctcttggttgcttgaaagcacagacaattaaattttctccttcgttgccagactggaaattgtcttctattgacaggcttggatttggtcttctcaataaaattgtcttggagtttcctgaggtcttttgggatgataatgtggattattttggtgcaactgctgaacaaactgatttaagaggacaatgctttatgttttggaatctcaaaaagacagttggggtaccagttctgatagcactacttgttgggaaggctgctatagatggacagagtatcagttctgatgatcatgttaagaatgctatagtggttctccgtaagctctttaaggatgcttctgtaccagatccagttgcatctgttgtgacaaactggggacttgatccttttagcagaggagcttactcttatgttgcagtaggagcatcgggaagggactacgacattctaggaaggcctgtttcagactgtttattttttgctggtgaagcaacatgtaaagaacacccagatactgttggtggtgcaattttaagtggtcttcgagaagctgttcggatcattgacttggtacacagtggtaaggattatgtggctgaggttgaagctctacaaacttaccaaatgcagtcagatagtgaaagaaatgaagttaaagacatgtcaaataaacttgatgcatgtgaactttcaactgctctgtgcaaaacctcatctgatgcatcctatccactatttagcaaggagactttactgcaagaaatgttctttagtgcaaaaacaacatcagggcgtctacatttggctaaagagttattgaagcttcctccagatgttctgaaatcatttgccgggtctaaagacggactatctacgctgaactcatggatacttgattctcttgggaaaaatgctactcaactgttgcgacattgtgtacgcttgcttctgcttgtttcaaccgacctgctagctgttcgcttgtctggaattgggagaactgtaaaggaaaaggtttgtgtccatacaagtcgagatatacgtgctatagctcgtcagttggttagtgtgtgggtagaagttttccgtaaagaaaaggctagcaatggtggactcaaattgctgcgtcgcatgccatcaactgaatccagtaagcccaggagtaaggatctactgtcaggaaagcctattgtacgtgcgccaaatcaagtttcatttaaccctaaagttgcttcaaagaatgcaagatctgctggaaaccattcaccacacacagcaatcaagaagcctgagaacaaggctgcaaaactggaggctatgacggctaccaggtctgatggtagttcgcttcgttcccaaaagcaacaacatgctctagaacctaaagttgataatggcctagctatgtctgaagaagaagctgctgcatttgctgctgccgaggctgctcgagctgctgccatagcagctgcacaggcgtatgcatctgtagaggcagagataaatgcacctcgtgaacttccaaagataccatcattccatacttttgcaatgcgtgaccattatttggatgagtctgatacaagaaagaaggtgttaagtgacaaccttgtgagacttgagtgcatatcagaaattgattccaggaatgacaaagctaagaacccatcagttgaccatgccaattgtgccgatgttgacagctcaaaaatgactggtgataactgtactcagaggagctactcaaatgagaatgcctgcctaataaatattagggatcattctacagatagtggagccgtagacagtcggttcacaagggcatgggttgatacagatacaatcttcattgatggtgtcaaggatcctctagccattgagaggtggcaacaacaggcaatggaagcagataaagaattctacagtcggatacgtatacctgatgaagaagactcaagtagccaaaagcagacatgtaggagttctgcctcacaggttgcagaaagcaaacctgcatcagatgggcaatcacgaggtgtagaacatttaaggcagggtcttataaatttcatatccacagtactgatgccactatacagaaacaaaaaggttgacagggaggggtacaagggaataatgcggaaagctgtcaccaagatcattgagacatgcacagaaggagagaagatgatgactgttcatgagtttcttgattcgaaaaggaaaaataaggtaaggctgctttcttcgacatgcaagtcacgtgatgttcactttggcattcaacaggtttcggtgaggagtattggagtgataaaatttctcgatttgcggattggtgctgatacttcaggtttgtcaattcatgattcttgcgcaaagccaaacgattatcccaagttcccaacagcatggcaaggaacagattatcccaacagcatggcaaggatctcccttatctaacgggacatcattgatcagatcagcacattcgtttttgtgatcgttgccatcatcatagcagcggttaatggtctttctgggacaatcgaatgtgtaaacttctgtgcatcgactggcatgttgtgcttgcagttggcttgggtgccaaattgagctatatggcttgactgaagtgccatatgaagatatgggattcagcatggtttcatttgcaatgg

SEQ ID NO: 22737 - DNA, 357 bp, Oryza sativa
  Clone ID: PAT_MRT4530_27886C.1
cagtgttgctcatgttctaataaatattggttttgcaatttggaagaagggagatgtaaagttgctaagacgattgtgcaattctacgctattgaagctgctgttttcttgcgcccgtacgttgggggcgcctaatacgcaaccactctctcgagggcgcggtgggtttctccctctataagtctctcatgtatatacgtatctatatattttatatacatatgtataatacaaattagcagtttaatgcgcattgtataagcgtccatttgtaccattgcacctacaagagatgtagcactttttttttcttgcgaggaatgatggcagggaaatattgaaaaaaaaaaaaaaaaa

SEQ ID NO: 22738 - DNA, 283 bp, Oryza sativa
  unsure (1)..(283): unsure at all n locations
  Clone ID: PAT_MRT4530_27887C.1
aggcagatagctagacttttnagatcagatacngacatatagatttccngtccnttttttttttgctctgtataggatagtgttcccccntttggtttatatccccnaaatgtgtataagcaagcacgtggtgtgtnaatntttttggctcctcgncagtagggagaacctaggaaccaacctgggaagcaatatgtnaaagactagaaggtagctcaatnaaaaggaaaanaaagcgtagaattttttgggcgaaaaaaaaaaaaaaaaaaaaaaaaaaaaa

SEQ ID NO: 22739 - DNA, 133 bp, Oryza sativa
  Clone ID: PAT_MRT4530_27888C.1
ccagtcaaccagccatgtcgcccgcctttccaagactcatgatggcggtccaagaaaaaagggcgacatcgtcccgtcgtacaccagcccacacttacacaggggcaccaaacaggagcaggggtggccttga

SEQ ID NO: 22740 - DNA, 517 bp, Oryza sativa
  Clone ID: PAT_MRT4530_27889C.1
agagaatgcggcatggcaagttatctattaattaggaatagtttgttagtttccttttttcggaaagttttttctttagtttctttcttgtccgacaaggactagtgtctccctatgggtataaatatgtatacccggggtcattgtaatctatcaatctatcgatcaatataactactctcggcacatcgccaccctctttaccgaggtttttacttatcatccgatggaacttggtacctcacgcggggctgcatcggttcagtttgatctccggcgaacgggtaagtcctacgttccgccggccctggtgaatctattggctacattggtgttgttcaaggccgattggtttctactggattatattgctatattatattatcatcagccgattgccttcatatcattatatacattggacatatagccaatagctcaaaaccctatcgctatcagctggcatttgctatcggctggcatcggctatcggctgtaattactacatcggcttgtc

SEQ ID NO: 22741 - DNA, 2240 bp, Oryza sativa
  Clone ID: PAT_MRT4530_2788C.1
atgggctgccttcagctcgtcttcacgctcccaggtagcttcttcttcggcgtggttgctccactggaccatgcaaaaacggattacccggcatttcttgagttgagacacatgaaacacatcatgcacgttgcccaaggaggcgggcagctccaactggtaagcgacttctccgcgccgagcaatgatacggaaaggacccacataccgagccgcctgtgccgcctcgaccgtgcgccggccggtcgcgccgtcgcctcctccaacgtcgccgccacctcctccaccccggcctgccctccgtttcgcgcggtgaccgccggaggcgcgttcccgccgtcgcccttctccttcctccgcgccggccgcctccagccgcctctccctcctcgccggagcgccgtccggccgcgccgtcttctccctcggcctcgcagccacctcctctccctcggtcagccctccgtttcgcggggaaagcaccggagacgcgtcctcgccggcaaaacagtggtgttcccgccactgttccacctccggccgccactgtcgcgtttcccgtgcgccggccgacgtcgccaccacctccctcggctccgcgacgccgccctcatccccggcatcacctcctcctcgcccgaagctcgtcggagtggcctcctcgtcggcgtccagtacctccccacctccggtcggctcctgtacgtcgccggtacgccgatcgacgtcgccgcgttgtcctctcctccagctgctcctctgtttcgccggaacaccgtcgcccgtgctggcctctccatcctcatcgtcgccgacgtcccttcggccgcccgttcatcctcgccggctcgtcgtctcgcggcgccgcctccgtcatcgtcatcgcggcgacgtgttccacaccgtccccgcattcgtgcagccgctgccggctgccctcgtcgcctcctcgccggccccggtcgtcgtcgtcgtcgtcctctcgtcattcccggtcgtcgtggcgttcgtccctccgtcgagccgttctcatccgtcgtccgcatcagtcaagcaagccgcggcagccccgtcctcgtcttcgtcctcgcctccgcgtcatcaagcctcgtgccggccgtgtctcgccttcgttcaaggatcgccgccgaagtcgttccctcgccccgcctgtgccgcctcgaccgtgcgccggccggccgcgccgtcgcctcctccagcgtcgccgccacctcctccaccccggcctgccctccgtttcgcgcggtgaccgccggaggcgcgttcccgccgtcgcccttctccttcctccgcgccggctgccctccagccgcctctccctcctcgccggagcgccgtccggccgcgccgtcttctccctcggcctcgcagccacctcctctccctcggtcagccctccgtttcgcggggaaagcaccggagacgcgtcctcgccggcaaaacagtggcgttgccgccactgttccatctccggccgccactgtcgcgtttcccgtgcgccggccgacgtcgccaccacctccctcggctccgcgacgccgccctcatccccggcatcacctcctcctcgcccgaagctcgccggagtggcctcctcgtcggcgtccagtacctccccgcctccggccggctcctgtacgtcgccggtacgccgatcgacgtcgccgtgttgtcctctcctccagctgctcctctgtttcgccggaacaccgtcgcccgtgctggcctctccatcctcatcgtcgccgacgtcccttcggccgcccgttcatcctcgccggctcgtcgtctcgcggcgccgcctccgtcatcgtcatcacggcgacgtgttccacaccgtccccgcattcgtgcagccgctgccggctgccctcgtcgcctcctcaccggccccggtcgtcgtcgtcgtcgtcctctcgtcattcccggtcgtcgtggcgttcgtccctccgtcgagccgttctcatccgtcgtccgcatcagtcaagcaagccgtggcagccccgtcctcgtcttcgtcctcgcctccgcgtcatcaagcctcgtgccggccgtgtctcgcccgtgtaccggtatcggtagtcgttcacgcgtgcgggtggtgaccgtgtagtgtccgtgttagtgtgcccgctcggtagccgcgtggtttccacgtatgcaggccgtgtggtgtctagtggagtccgtttgtcggccacttgcctcggttgacacac

SEQ ID NO: 22742 - DNA, 496 bp, Oryza sativa
  Clone ID: PAT_MRT4530_27890C.1
cagaaaaataaaacccgttttctataatatatgggcaggataatgtacgccaactccaaatgatatcaacaactgttagttccaaaatgtatctccatcaaaatatgatgcaaaagcaagttgaacgcaataatgcaggtttaagcaatttggtcctaataaaaaatatatatctagacagcctgtacattactctgctgtttacattttgttccctttccagacaaataatattttcggtaccatgagtacttcgtgtatatggcattttaagcgatatttttgttgaattgtgtttgatgaaacagtggcactagtcataatatgttgcaacatattaacatgttggtgaaatcaaattattgcataactatatatttttggaggatagacccctaccattgatgtcatgatggcttgttggtgctcttaataatgtagtagtactagtttttttttaaaagataataatactaccttcgtccaaaataagtgc

SEQ ID NO: 22743 - DNA, 573 bp, Oryza sativa
  Clone ID: PAT_MRT4530_27891C.1
gctgagttggtgtgccaaagagcattcaacgtcgtgctatttggtgttgaggtgtttaagttcagcgccatacgatttggtgctgaacaaaaggtgggacccgatgtcagcctctactacccgttcttcctcatcttttcttcccctctttcccaagccatgtgtggcaacggtgatggcagacagtggatccgaggcaataacgaagccctccctcgccggcccctatgctgcctcgtctcctatcacattggcgccaccgctcccttctcccaccttgacgccgccgccgctcgccccttcttctctctctccggcgctcgagagcaggtggcaagtgggaggccacggcgatgctcagggcaattcttcggcgatggcagccatgcttgcggggggatttcacggtggcagaaatcagcgatggaggtgacgacagaggaaatcggtgatgcaggctggtggcagctcttggttggtgcctatcaccggcactccttggcgctccacggctcaccacaactaggcggattgtggcggcgctcctctgctcaacaaaaggcggcacgatag

SEQ ID NO: 22744 - DNA, 646 bp, Oryza sativa
  Clone ID: PAT_MRT4530_27892C.1
tttaagtttgattcaatggcccatctgtggttgagttgagattttcatcaaaggtagcgtttaattgcaaggataggatgtggtgaaccaacttttagaggtgtttggtttaggggtgagtgggatgggttggtccctgaagaggaatattcctcttatattcgggatcaaccgatccgcaaaaatatggcggatgaactcgtcccacctgggaccagcgaacggcgtcacctcgccatccgccacctccgcaagctccgccacgcgtccgagagtgccgccgcctccacgagcaccacctccgcgagcaccgccatcgctcctctcagatccggaagcctccgcgagcgccgccacctccgtgagcactaccgccgctcctctcagatctgagagcctccgcgaccgctacctcctctgcctcatctgcgactgccaccaccgctcgtccgcgagtgccaccacttcggcgagctctgccgcgtatccacgagcgccgccgccttgcctccgtgactaccaccacccctgcctcatctgcgactaccgccgccgctcgtccgcgagcggcgccatctccacgagcgccgtccgctcctctcagatccgggtgctgccgagctcctccgcccccagacggcactaa

SEQ ID NO: 22745 - DNA, 1092 bp, Oryza sativa
  Clone ID: PAT_MRT4530_27893C.1
atgcgaacacctgacaggggcgaagccagaacaaggctgagccccccctatgctccaaacctggctctgccactgacacctgaagaacagttacagatgacagaggagcagattgaattgttacctcattggaaccttcagcatttgacaatagagtattacctgggtcaatcttgccccagttggctccggccagactgcctgaaaatgctgacttcacttaaactttcttattgcaagaacattcagagcatatcattctttgacccactctttcctgattcggaagattcaaagaacatttgtcaccttgaggtgttggatatccaacattgtcctaacatcaattggcaaggtttggtggctttaccttcttctcttagaaagattatccttggaaactttggccattcgacggatcactttgtgagttgcttttgtggcctcgctctcctgaaatgtctgcaaatacagtgtgaattcttaatgtctattcccctgcaagtttgtaaaaataatcttcaagccttggaggatttgcatatttatcagtgtagctccctcacatccatctatgtctcagaggcaagcagcaggcaccctgttggagtattttcatccctttcaagtgtcaccatttctctttgcaatgcactgttgagtcttgatgagttcctgatgcctgcttatatgcccgtcgtgaagaccattcttgtggaaagttgtcgacaattagcattactgccgattgatgagcttcatcgcttttcttgcttggaggtgctacgtattgaatcatgtcccaatttgaatacacggaggataatgacattaccatcctctcttcggaagctcagtttactcggttgtccaagcatagagttcatcgacaacagccatctggcgagttctgtgacactcaagggactcaacctgaaacttgttagctgtccagacctcatctctattgttggtgctatatctatctctgaaatacagtcgggttatatacatgattgccccaagctgatggagatgacacagcctttcacaagaggtcgctactggtacgtgctaaggaatcacacttga

SEQ ID NO: 22746 - DNA, 452 bp, Oryza sativa
  Clone ID: PAT_MRT4530_27894C.1
tttgtggttttttaatttttggggtttttttttttttttttttttttttaaggacaaggaatggaattaattccatacctacttgatgctgccggaaaaagggcaagggtaaaatataatgcacaggtatttcatgtagcggccagccaaggcgatccaaaaccagagtcacataggaaagaaaagaagggaaatccagaccaacaaacaggcagcatgggaaaactgaaaaactacccaccaaattgtcaaggcagacatcatccttgggggggtattcctttgggacttggttggtaaaggctaacttgcatttgggagggattatccccaccaagcatattacgggcccctggaaccccgggctttaagggaaaccatttccaggggacccctaataactccacttagcacattggagtcctgaagaccttggcaaggatcaggaagtt

SEQ ID NO: 22747 - DNA, 896 bp, Oryza sativa
  Clone ID: PAT_MRT4530_27895C.1
ttatttttgaaaaggaaaagggtattattgcgtcagcggctagggttcgcggtggatcgggtgcacggcggtggctcacggaaacgaacggccgagatcgatcctatccacaacggacggccaagatctaacggtctacgaccggtctacgacggacggcaccgatgacatcggtgatgacgtcatcaccggcggcggctcgggcgcacaagctcgccggcgaacgacggcgcgacgacacgaacggaggacaccaacacgtagagggcgacgcggcgaactcaccggtgaccaaagaagaagcggcggcgaccttcggcttgacgacgacggcagtgctccggcaacctacggcgacgacggaggggtggacgagatcgacgacggcttggtgaccacgacggtgacctcctcgagcagcgacgacgaccagagcgacggcggcgcatggctggagctgcggcggcgacggcggcgacggcggcgcacggctgcacggtgctagggcgctacagacggcggcaggcaatggcgagggtggcgacgggggctaggaggcggcggcgaaggcccacggcgaccggcgacgcgatggaaggtttagggttcggaggagagagatcgatccgaatcgaactcgaatccacggatttccaaaccgaattggcgatcgattccaaaaggaaaaaggtagaggagatcccgggaatcatttcccctctattgatttcaccagagaaggaaaggcgcggcgggccccacctgtcagcgggcggacgcgcccgcgcgggcggcgctcggctgcgggccaacctgggccggggaggagagagagagaggtttgggccgactttcggcccaaagccaaaagagagatttttaaaactttttccaat

SEQ ID NO: 22748 - DNA, 378 bp, Oryza sativa
  Clone ID: PAT_MRT4530_27896C.1
caaaaaggccccacttgtatcacttatgggggtaagccataaaccagcccggtttgaccagacaattaaagggtggctataaagaaaggtaaaaaccataagggttaacaaaacacactagcaattaagttttactcccattggaaaaaaacataataacttttagagaaggattacataacattcatccttccaaatagaggggggctaaaaaaacaccaatcttaaaggtaaaccctactggatagggggaaaaaaccatggaagttccacatgaggcaaagatcatttaaccttcatccgtttggggctttcctaaccctaatttccttccaccattgcctgcatgcctttggagagctccaagtttgcagggaa

SEQ ID NO: 22749 - DNA, 900 bp, Oryza sativa
  Clone ID: PAT_MRT4530_27897C.1
atggccctgttgctctcgaccagcgtgctgctcgtcctgtgccttctccccgtcgacccggctgccccgccggtcgccgccatcccgcaccgccgatcggggcgccacgacgtgccgttcggccgtcacgccgcgttcggcccgttcgccacacgaggacgtgccgcgacacgctcgaccagcctccccgactggtcccacttcgacgccgagctcggccccctggaacggtacttcggttcggacggggagctgaacgtgaaggagcggctgctgtacctgttcccgatgctggaccgggcgcccaaggacgccggcgtcagctgcggcgagctggaggcctggctgcgccggcaggcggcggaccgtctcgacgccgtcgcgcggagggagctcaagaggcacgacaaggacggagacggcgtcgtcacgctgcgcgaatacctcgccgtcgaccacgatcaacacattggtacggacaactgtaattttagtgtcagtgtctgcacggtttttgttgacgcgtcgccacgctttaagcacgttatatgcagtccgcagcggcacccgacaacacgtcgtcgcaagggagagcatagtgctgatgatgatactagttgtgctgaagctgagaagaagtttcgagagctcgattctaacaatgaaggctatttgacagtggaagaagcacgtccagtaatccagagcctcatctcgggagagttttcatatgctaaatcacatgcaaagcttttgatgaaggctgatgataacaaggacaacaagttgtcactagaagagatgctgaaccactacctatctttctacaatattgtttacatggatgatcactatgactacgatgacattggcaacaatatccacgatgagcttaggtga

SEQ ID NO: 22750 - DNA, 1131 bp, Oryza sativa
  Clone ID: PAT_MRT4530_27898C.1
atggccctgttgctctcgaccagcgtgctgctcgtcctgtgccttctccccgtcgacccggctgccccgccggtcgccgccatcccgcaccgccgatcggggcgccacgacgtgccgttcggccgtcacgccgcgttcggcccgttcgccaccgaggtcgagctgctgctccacggcggcggcgccgtcccggacatcaggacgtgccgcgacacgctcgaccgcctccccgactggtcccacttcgacgccgagctcggccccctggaacggtacttcgggtcggacggggagctgaacgtgaaggaccggctgctgtacctgttcccgatgctggaccgggcgcccaaggacggcggcgtcagctgcggcgagctggaggcctggctgcgccggcaggcggcggaccgtctcgacgccgtcgcgcggagggagctcaagaggcacgacaaggacggagacggcgtcgtcacgctgcgcgaatacctcgccgtcgaccacgatcaacacattggtacggacaactgtaattttagtgtcagtgtctgcacggtttttgttgacgcgtcgccacgctttaagcacgttatatgcagtccgcagcggcacccgacaacacgtcgtcgcaagggagattggaccgacacggagcacggcgaaccaggatggtggctgcataagttcataagcgcggatagagatcatagcggcgccatggacttcatagagctcaacgatggaatggatcacgatagagacgggaaattaagtttggatgagtttatcagtcagtttcacatgatcgaccacaactccattgtagagcatagtgctgatgatgatactagttgtgctgaagctgagaagaagtttcgagagctcgattctaacaatgacggctatttgacagtggaagaagcacgtccagtaatccagagcctcatctcgggagagttttcatatgctaaatcacatgcaaagcttttgatgaaggctgatgataacaaggacaacaagttgtcactagaagagatgctgaaccactacctatctttctacaatattgtttacatggatgatcactatgactacgatgacattggcaacaatatccacgatgagcttaggtga

SEQ ID NO: 22751 - DNA, 359 bp, Oryza sativa
  Clone ID: PAT_MRT4530_27899C.1
ccggccgggaacccacctatggtgcgcttctctcctgcgtgactctctatcatgccaagttccgttgtctaccggcattctctaagaatgtaaaacctgcgataaaagcactggtccatcgagacctctcatctattcctggaacggccttgcgcattatacaacagtcctcctcctcatgcgagcatctcccacagatactcctcagctttgatgctgatcgccgaccgcagagactacgttagggaggatcagaatcatgtgaatcccgcaggtgtgagtcgagagctgggcaccattgagacctgaggcgagagctgtctccagcgcttgaggaagcgcaatagccaagtgctgca

SEQ ID NO: 22752 - DNA, 376 bp, Oryza sativa
  Clone ID: PAT_MRT4530_2789C.1
gggactggagctgcaaacttcgttccacagcacgtgaagaaggcaacactatacttggactaaaccctgatggcatatgtttggacagaactgatttagaacccaatccagtattagtttaaattggaacggaatctcgcatactctctgtaatacttgccatactggccaaggatgttcagttctgcagttagattagcgtctactttatttgtggaactgaatgaattttctggaggccaaattcattgcaagacccagttattatctctgaattacatgctgagtagaacacagaatagcatggcaaatgtatctgggaagcaatacattatatggaatcactcattttgggtaaaaaaaaaaaaaaaaaaaa

SEQ ID NO: 22753 - DNA, 372 bp, Oryza sativa
  Clone ID: PAT_MRT4530_278C.1
atgaatgaactcatgcgggaactcaagaacactcaagaaccttcgtccttctcccttgggtcgcctccggcctccttccttgagatccgctgctgtggcacggccgctgccgccgctgtggtgtgccgcagctgcctcctccaggcagccgccggccacaggagctcgccgcctccccctccgccggatctagtggaggggagggcgcagcagccgccgccgccgcctcaggcagccaccggccgcgggagctcgccgcctcccttcccgctggatctggcggaggggagggcgcagccgccgccgccactgcctcaggcagtcgcccgccgcgggagctcgcccgctgcctcaggtgccggttttaactga

SEQ ID NO: 22754 - DNA, 406 bp, Oryza sativa
  Clone ID: PAT_MRT4530_27900C.1
atggggattcaaaacaactaaatttttggttaaaaaaaactgtttttgatgtttaatattggaaattcaaacgtttgcaccttttgttggtcccatttaaacaccaggttatccattcagactattgccaaaaattatgaaattgtagcattaccgttaaaggttaaattccgattttgcgggtaactaaattgccaaaactacaacttgtttgacaattttggtgcctggattaaaaccctgatttccatggcgactccatgttccatttttcttgaaaaaaaccttaatttttttacttaaccctattttttacccggggcggagtaattgacggtttacttttcttagggggagggggggaaactatttgatttttttaaaagaatttgatattagattgggg

SEQ ID NO: 22755 - DNA, 609 bp, Oryza sativa
  unsure (1)..(609): unsure at all n locations
  Clone ID: PAT_MRT4530_27901C.1
ctggatcatctaggttctcctctgggctctaagactgtgtaaccttgggaaaatcatttctggtttgccgtatcagaaaaacaaggtccaattcatctctaaaattattccatacttaacanttctaagatcttaatagtattattttggggagaatgacaaggataatagattgttataagcaaaataattctagccacagaacagcagtcagctgtgtaaatcccactggtatccttttatctacgttgttaacttgaagagggagaaagtgagacaggctgcgagttaaaaaaaaaaaaaaaaaaagagtccactcttctatgatatttaaatatttatttaattttaaaaataattttcatggcaccaatgattttatgctaactacatactgcatatgtagaanaaagtacattgctttgaaggaaaatgtaacctagaatttttggcacacggaaggttaacaactctatattttttaatgaaactaagaaattcacatttgcaggtagtttaccttctactgcttagagatgcagtacactattctttagtaagagttttatttcctctgatagatgaagctatggaaaccgttgctttttc

SEQ ID NO: 22756 - DNA, 308 bp, Oryza sativa
  unsure (1)..(308): unsure at all n locations
  Clone ID: PAT_MRT4530_27902C.1
ctnagccaatgaggtnattccatgggcccgcccgaagcccggaagataccgggtatgctttgtcctagggaagnacaatcaaaagantggcacngctgtgtcatacacngacccacccccttctgtnaaanncctnagtttggggataaatgaagttgcattttggttttccaatctaccttacttgttaaagtttggtaaccgaatgctggatgaatatgggacctggagtctnaccttttttttggcttagctgaaatnaatcangngaggcccgtcccantggccanttagttnatttnttggtt

SEQ ID NO: 22757 - DNA, 1331 bp, Oryza sativa
  Clone ID: PAT_MRT4530_27903C.1
ttcgataacgactgtcaacagtgcctagtcctcactgtagccgatatgaatagagatgagcctgtgctatcggctgcagcttatttctagtccaatactttgaatgcttttttattcaaccaaggaccaataacaccaactctcctggatatagtcatgatcatggacttagacatcacatcatcggctaacccagttagtatgaataccaagggcaaattctcttacaaaactaggagcatcggaggttggattggcttcatcacccagaacatgggaactggttctgtaacccctaaggaacacacagcctttctaatgatgtggttggaaaagttcttgttctgtggtccaagttgtggccctactaccaactggcagcacatagccaaagcccttgtagacaagaagcaattccccttgggcaaatatctgctaggctcattgtatcaaactctgaattctgcatcggctaagattgctgtagattctgtcattggcactggtggcccttggtggcttttgcaagtatggctcaaccttcataccatcaaggtggctaaaagaccaactttatctgaagccgatttcccatctatcaatgagccaactgtagttggcgagggtaatgagatcacaagccgtcgatgcatgtcttttggagaagcaacatctacctacaatggatcagagctgtcggctgaactcttcttaaattggtatggcaacttttatgatggatttccaaaggattccaaaatttggtttgcttatgaacatgctgaaaattttgaactcccagccaatttcagatttgatgagatcagccatgaaagatttgaaaaatccagagaagtatttacagctgccatatccccttgcatacttcctgtcggcatccaccaagacagaaatattcaagtttcatatgagttttaccatccgatgagcacggctagacaacttgaaataggtcagctatcaatcggcttatatttcgtggacaagatccagaccaggggagaaatcacatcagccctcatgatggatagactcctgaacatcccagggcccccactaggcagtatggataatattgtgctagccttgatgaggagttcaacttttaaccgatggtgggcagagtggaaaaaacatctttttcaccaatcagcttccatatacctgactaacatgttctgagagatggttccgcaaaccacggaatcttcacctcctcatactagccaaagtggagaaaccatctgctatgtcgttcttcccttgtcttgcgcatccaacccttttaaaagtttgcatctctataaaat

SEQ ID NO: 22758 - DNA, 563 bp, Oryza sativa
  unsure (1)..(563): unsure at all n locations
  Clone ID: PAT_MRT4530_27904C.1
tcttgattggcttggagtccacgccgtggcggcgctctaaactatggatcccccgggctgcagaattcgggcacgaagggaaaaaccagacagcttgggtcttattggtctgtacggggtacatccggtgatgctttgtatccccccaaccgaatggaaccggaacgaaaattgccaaaccccttccaatctgaatgggtgcataaaccctccctcgaactgaaagggttccccccaaatccacgaatccctggctcccccccattaaaaaaagggccttttggttttttaacccccatgtttaaccccgggtggccacaactcccccttttgaaacccccgggtttccctttaggaaaccccccaaaaattgggggggccgttttcctgttccccccccccacaaaattggaaattttccccgaagaataaatccctgggcgcttggggggtttctgcaaaattattgaaaacccgtcccgttgtaaatgcggccttttttttccggtggcgttgttttctgctctttttttttaattnnttctttatcagggggggggggg

SEQ ID NO: 22759 - DNA, 1140 bp, Oryza sativa
  Clone ID: PAT_MRT4530_27905C.1
atgctactgccgaggcggcttcctcttcttgctggtctcctgcgctcggccggctccgacgcctcctccattccctcgaaacgcatcactgcggccggtggcggcggcgcgcgcagctccggcgaccacccggacggcagccgccatgctactgccgaggagtcttcctattcttgctggtatcctgcgctcggcctcctacgacgcctcctccattcctccaaaccgaaagaatgtctcaggtagagaagggtttctatggagttcatgttattttcacaacacaaggcatcagacatccagagaagggaagcagatggctaaggccgagctgctagaccaccttgcactgattaaagatgaagtatctgaaatctcacatagattgctttcaatggtggtagctgaggtaaatgaattggtcttacttggataattgaacttattaaataaacaagccggaaccatgattagctcctggatgctgctaataacaggcgtgtcaaggactaacagaactgtcttatgggaaagaagcttgcagtgctggctggtgattttctactctccaaggcattttctactgctgcggtgtctcttgacaatgctgagggccataacatcaaggttatcccatttttttctctgcaggttatattgttgctagcaacggctgtaaataaccttgtaactggtgagtttatgcagatgagaataactccaatacaacgttgcagcatggattactatttgcagaagtcatattacaagacagctgcattgatttcaaacagttgcaaagctgttgcggttcttgctggccaaacagctgaagttgcgacgcttgcttatcagtatggcaaacacttgggtatagcttatcagttgatcgatgacatcctcgatttcacagggacatcagcttcactaggcaaaggctccttgtctgatatccatcaagcccttgcataccttgccagaagtaagggaattgagaggacaaggttacttgctgctgaacatgccaaattggcagcagacgcaatcgatgctcttcctgagagcaaggatggatctgtgctgatctcaagacaggcactcaaagatcttacagaaaagctcatcaagagaacaaagtga

SEQ ID NO: 22760 - DNA, 1686 bp, Oryza sativa
  Clone ID: PAT_MRT4530_27906C.1
atgcgtgtggggaaggcaaagaggcggctggatctatcgacgagaagggggacagatgagggcgggcgcaccaactgctggaagacggccacgtcagcaccgtcgttggcgcgcgctacggcggtgcgggtgctggccacggacccagatccaagcggcgtggcgtgtgtgcgatgtgatgtgaacggggaacgagtgcgggcgtggtcgtgtggggcaaaaacatgtggtatgggagctgggcgcaagctcaagacccaccgcaggaaccaaagatgggccgacaaggcatacaagaagagccactttggcaatgagtggaagaaaccctttgctggatcatctcatgccaagggcattgttttggagaagattggtattgaggccaagcagccaaactctgccatctgtaagtgtgctcgtgttcagctggtgaagaatgggaagaagattgctgcctttgtgccgaatgacggttgcttgaacttcatcaaggaaaatgaagttgcgtatgtcgatggcatttatgggattaaagtgcttgtcgatgctctcagctcgagcagattgagaggtcgcgatggatcaggaggtgatcatggcgacgccaccgctgccgccgccgcctcgcgcgaggtggcgccaccacctcgcccgcgcgacgtctaccaccgccccttcaccgcccgcgacgacgacgagctcctgcgcctccactaccgcctcggcgaccgctggaaggagattggccgggccgtttacggccgcacatcgcgcgtcatgaagcaccgctggagggagctccggcgcggcggcttcctcgctgctgccgcaaggaaggagctggcggcgctcgacatggcggacgacatggtggaaactagcgaagtggaggagccagctgatcagtcgctgccgtcgctagagttgcagcgcagtacccttgcggacactcttgcctcgagcttcggttcttgcagccttgccactgaccacgtgatggatcccctggccggcagcctcgcgctaggaaaataccaattctttactattataaaaattgaagatgtttttaccggtactttggtacgtcatccttggttgcctcgcctcgtcaaggagaacggcttccgccactggagtagggtcgccaggatcatgccacgccgctctgcaaggttgtgccgtgacaggtggtgccaccacctcgcccgcgacgtctaccaccgccccttcactgcccgtgacgacgacgagctcctacgcctccactaccgcctgggcgactgctggaagaagattggccacgctgtctacggccggacctcgcgagtcatgaatcaccgctggagggagctccggcgcagcggcttcctcgctgctgctgcaaggacggagcagaagctcgacatggcggacgatatggtggaaagcgaagtggaggaatcagatcagtcgctgcccactactaggaaaagcattatcgcaaccggccgaaaagggtctttgcaggcggggcagccgtccgcctgtaagccaacgactgtgaagatcgccgatcttcgcaggcggggcggccgtccgcctgcgaagataattttcgcaggcggacgttggctagtccggtccgcttgcgaaaagaagaatcggccgcctacaaaaaaaaacttccgcctgcgaagatag

SEQ ID NO: 22761 - DNA, 458 bp, Oryza sativa
  unsure (1)..(458): unsure at all n locations
  Clone ID: PAT_MRT4530_27907C.1
aaaccgggaaaaattcagccccccggggggggccggaccccccggggggggggtaaacttatgctttgggggaaaaaatggcccaaaaagggggttttcagcccaaaacccggggaaaaatgatcccttgggggaaaaaaaaccaaattcaactttggaaatcggcggccaactttggggttcttttgggaagggaggaaagtcaaaaccaaggtttttcaggggaaaatgggcctttggagggggcttcggggccccggaaaacgggggggcccaaaagcccccctcctttgaacccccgttccaacaccaaaagggtttttggcccggattctccctggggccggaataaatggggggaaaacatttgggccccagagggacccccccccttggtgagggcccgggggaaaaaaaaggagaccttgtttccgggggccccccgaacccncgggcgc

SEQ ID NO: 22762 - DNA, 180 bp, Oryza sativa
  Clone ID: PAT_MRT4530_27908C.1
atggaggggatgggggagaggcgggcgcaggcgtccatcgcggagaggcgggacgtcgtggcaccgaccgacagcatcttgaggacaacatctcgcgacggcgaggaaggggacgacgacgatgctcctccgagagattcccgcggagacgcctggtcgcacggaagcggagctcgctag

SEQ ID NO: 22763 - DNA, 573 bp, Oryza sativa
  Clone ID: PAT_MRT4530_27909C.1
atgacggtggcggcaacggcgacgtgcgagggtagcagggcgacgagcggcggggtgcgggttgagcattgtcagcgtcggcaggcggcacgtgggtggagcgacggcggggtcagcggcggcaagccagcaaggcaacgcgcgtgcaggcggagcggcgttggcgtctccgtcgccatcgccgtcgccggatccggcggctgtcgctggctgccaccggccgtcaccacacctacgctagtctccaccaccaccgccgataccgccacctgcggctgccgccaccaggtctccatctcccctctcgccggatctggcggaggggagggtgcggccgccttcaccggaggcagccacagcttcccatcccgccgctgccgccttcatcggaggccaccacggcctcccatcccgccgcctccctcccgccactacacgccgctgctgccgtcaggccgccatcgggtcacgccgggtgggaaggaagaagtggagaggaatgaggaggaagagaaagagagaagaagagagaagaaccgagagagtttgagaggaagagataagaacaagtga

SEQ ID NO: 22764 - DNA, 481 bp, Oryza sativa
  Clone ID: PAT_MRT4530_2790C.1
gctcatgtcacacgacaagaagtgggtcgaagaacttccatcagtactatgggccgtgcgtaccacaccgacaacttccaacaaggagacattcttcttcctcgtgtacggctcagaggccatgctccccaccgagctacgacatcaaaccagctaccaacaagccctttgccgttaccacgagaagcgcatccgagcacgcacactttcgatcggcgactacgtcctccgacgggttcaaagccaagcagggcgcaacaagctctcacccaaatgggaaggaccgtacacgatcacacaagttctgcggccaggcgcattcaaaatcgcagacagcgatggtcgcgagttggcaaattcctggaacattgatcaattacgacatgggaactaccaggaaggccaacgccaatccatcgactggaagaccttctccgtcagcggcgccatcgacttcgccaggccatctatctccacaggg

SEQ ID NO: 22765 - DNA, 492 bp, Oryza sativa
  unsure (1)..(492): unsure at all n locations
  Clone ID: PAT_MRT4530_27910C.1
cggccgcttgggcggncgcgtgggnaaaaaaaaaaaaaaaaaaaaaaaaaaaaaaaaaaaaaaaaaaaaaaaaaaaaaaaaaaaaaaaaaaaaaaaaaaaaaaaaaaaaaaaaaaaaaaaaaaaaaaaaaaaaaaaaaaaaaaaaaaaaaaaaaaaaggggggccgtttttaaaaaaaacaaaatttatttacccgtgcttcccaaactaaaaattttttttttggggcccctaaaataaaataaattggcccccgttttaaaacaccggaattggaaaaaccctggggttcccaaattaaatagctttgaaaaaaatcccctttttcccagttggcgaaaaaacaaaaaggcccgaaccaatcgccttttcaaaaaattgcccaccctaaatggcaaatggaacgccccttttagcggccaataaaacccggcgggtgtggggtttattttaaggggaacctttaaattttcaaggcccttaacccccccc

SEQ ID NO: 22766 - DNA, 1333 bp, Oryza sativa
  Clone ID: PAT_MRT4530_27911C.1
ctactccccatccacgcgcgaagacttcgcccatccacgcgcaaagacttcgctcctctgtactgccgccgcgccgccgcatcctcgccggagccgccttcttctccgtccgccgccggagccgaggtccccttccggcaccgccgccgctgcccacgccgacctcttctcctgccgccgccggatcctaccatcgctggcgagccgacgtcctccccatccgccgccgccgatggagccgaggtcgtccccagccaccgttgccgctgtgcactccaccgctggcgagccgacgtcctccccatcagccgccgccgatggagccgaggttgtccccagccgtcgccgctgccgtgcactccaccgctggcgagagccgccgaactccaccgctgtcacagcaatgatcgctacaatgaacactatggcaaggtacggcaacaagtatggcaacgactctgtccctcctgtgaatccatcggctaaccccaatctggagctctgcaaagcatttccatttctcagcgtttcttgtttaccactttaccaatatataattttcaagtttcagaagcttcttgagatattattgagatattattgtgagttttaccggcatgttcatacgatggagaggatagtggagtatgtcacaatgatgacaagagaccattctacgtcagcaaaggaattaaaaatgaccgtttcggtcctaataaaagggaacgggccgaacacaatcaatgggttagatcatttacctggtgatattactgacagtggaacaattgaccttatggcactttatctgaccaagaagtatgaaaatctgaccaaaaaacggaacgaagatctggccaagctcaagaaggagaaggaagatatggagaaggagatacgagggcttcgggagaggatcaaagagctagaggaacaggtaattagttcttcttcgtcaggaaaatcgttaacaaacaatgctgctgaaaacataatggaaggcatcaacaaacaaatccttggagctgagcagtacaagatggagaatagagatcttaagaggcaaaacaaagagctgtcgaagcaaaacaaggagctgatggagcagagcaaagagctgatggagctgcctgctcttcgaaaaaagcacgaagaactgaccaagaggtatgagagcctgactaagaagcgaaacgaagatctggccaagctcaggaaggagaaggaagatcagcaggtcgatttcaagaaagagaaagaagatctggagagggagatacgacaacttaaggaggagatcaaacagctagagtgttgttgtgtcatactatga

SEQ ID NO: 22767 - DNA, 266 bp, Oryza sativa
  Clone ID: PAT_MRT4530_27912C.1
actaagtgctgcattccattccaaaacgatagaatgaccttcagagctatgttgaatcttattaggctgccaaaaagaaaacaggccgatcactaaatgattcttctggagacaaaagacacttggcaaaccaccatagaagttaccagggcacaaaacactggaagtaacttgaacttaactggaatgatattcaaggccctccggtggtaccggtcccttcaggggaatcatgggcctcttttcaaacgattgggacaaaactt

SEQ ID NO: 22768 - DNA, 174 bp, Oryza sativa
  Clone ID: PAT_MRT4530_27913C.1
ttatacttgatcagattagctctcttgctcctggggctgactcactctactatacacgcacatatatacttttttctgggcgtactagtaaggacacctaatcgacatcaatgggtcaccgtagagggtgagaccccgaccaccgtgctggcctaggtggccccagttgaggct

SEQ ID NO: 22769 - DNA, 2424 bp, Oryza sativa
  Clone ID: PAT_MRT4530_27914C.1
gcccggtgcttgcacctcgtcgaagcatcctgccccatcagggtcttcaagaatgagaagacaactataatcaccataatgctaaatccatctcaatatttgcaaagatgtgtatataatgtataatagaagtttatggaaaacatactcatcaaagaatcttgcaccaagtttatagctgaccttggagaagttccataaaattttgtatcagcattcgcagttagacgagctgctcccgaagcagctgttcttgggcgtcatcttcctgacgctgtcctgcaggaactggagcgtgctgggcgagatgtaggaggtcctgtccatggtgttcaccttcggcgcctcgagtatggttcttggaggagacaatgcatactgcattgcccagattgcaaggggccgcatgtatatcagcgacctgtagtggccgtcgatcgtccatgcttcaggggtttggaaccagtacccatagccttcttcggaccatcctgcggtgaaaatgccttctgcagtagtgaaagccttaccatttggatgcataccgttcacagctcccatacgccctccttttaccctcatcacattatagtcaaatattttctgaagggtgcattttatcctaccctcatcaaacagaggcggcaaacctgacgatgcagtataccattgtccagccagttgatccgcatggatggagcgactgttgtaacttgttccgctgtcataattaaaatatgaaccattccataactttgcttcaaatacgggcttagcttttgcaaacttcaacatgcacctctcagcataatcatggtgtccaagggtgcgggccagcgctgctgcagtttgaagggcagcaagccaaaggcaaccacagtaggcacttactccacgaactgtccaagcatcatatgtttgatcaggaaagccatcattctcaatcataccatcatcgtcatggtcaaactgttccatgtactccatagcagtacaaaccgcaggccagacatccttgccaaatgacatgtcacctgttgccgcgaaatctctgtaaacctgtagcacgaacttgggattgagatctttccatctacttgtgtcatgtatgttgtacgcattcaattcatgccaaggatcatgggccccaaggtcatgggcaacagcaccgattactttgcgagtgccccaagtaccatcagcaagaaacctgactctacttttatcttcgcgcagaacagctgtagcaaaatcacgttgaatgctcagctcaatcttaggaaacagttccagaagagcaaaagaggcatagaagtgtacatcataagtgcaccacatgaagtactctattccttccaggtataaaaacttccctacattttccctgtcatcaattatatgtgggctaaaaccaatgagtggaactgcagaattgcgactgctatgatgaagtggcaaatcattgtcctcagatagccttgagttcatcatttcatcagcatcagccatcaaagatgcactatctatccaaacagttcctccagcaactaggaagtacagctcattgaagagagtaaccttgtaccttggagaagttccataaaattttgtatacctcctgtagtatgcatttcccttcttaaatttgaccttaggggatgaccaagccagggaaaatacgactgtacatcttccatgtggttcaacccaggtggatgcacaaactgctgcacaaactgtatcacccagcgaagaaggcatgctagggccggcactgaaattatctcggtcgaagcaaccatcctggctcaatgtgccccacatttccctagctgtaacagaactttctccagaaagcccaaaagcaggcaacacagtgacatttacattttggttctcacatgcagtgttcactatagtgtaaacaaaaacagaggtaggaagactgctctcttgatagttatggggaataaaaggagatatttgccggcaagatactttcaattcaggatcaggttcaccatcatagacagtccatgctcgaggaaacaacgcatggtatgtagaacgatcacctcttagtttccaatcccaggatgatataccatcatcattagatttccccatcccaccaagaggtacaccttgcgaggctgaaggtttgtcgctctccctcgtgaatggatcaattggtgctttccttccatgagaagcttcttcccgaatatatgaccagaggcgcagaccaagtttcatcatcttaattgcttctctaaaggtaacattgaactccttcaatctattggcatgactacttagttttcttctccaagcatattctggtggtgagccatcatcaaagtccaggagatcaccggcacgccatgagcgcttcctccggtagaacatgttgctgctcaccat

SEQ ID NO: 22770 - DNA, 192 bp, Oryza sativa
  Clone ID: PAT_MRT4530_27915C.1
atggcggccgggggcaacttggaagaagcgaggtcatcgggaactagaaggatgaggcccaacgtgtgctcctcggcctcctccttccactatcgttgcctacgacactgcgggcactacctcaaggcatgggggtgcgagcacgtggaagttgtggggggggtgacgctagacttatggggagaaagctga

SEQ ID NO: 22771 - DNA, 411 bp, Oryza sativa
  unsure (1)..(411): unsure at all n locations
  Clone ID: PAT_MRT4530_27916C.1
ccnccccngaaaaggnaacgccaaccccntcttaaaaanganntgtgggaaaactngtccgtagtcactgaaaaccgnntccggnccaatatcgtttntanccggtnaaaantngnaaaaatttagacattctngggtngnnctgggntntacaggggtnngatccgccaaancanntntccnggnnnaatttgttntnatggnttatgggaggcccatgtnttaggtttatgcagcaaaagttctntccntagcaatnttgcttttatctcgatgaanaacaccagtattgtngcnngcctgacggtgagtntnggnggnancnctnttggtaaaannntgacncnccanaaatntgtgantntttgatccacagcattngttccggttaaaaaaaaaaaaaaaaaaaaa

SEQ ID NO: 22772 - DNA, 189 bp, Oryza sativa
  Clone ID: PAT_MRT4530_27917C.1
tcccgattagcaattgacattgctctgcactctaaaatgatcttatccttacgcaactggcacttgatcaacaacaccttcttccggcgacttcaagacaaggacgagcttagacaatccatggggatgcctagcgtgcaagccgaattgcgcagcttcccgctgcactgcactgcctcctaccgctaa

SEQ ID NO: 22773 - DNA, 314 bp, Oryza sativa
  Clone ID: PAT_MRT4530_27918C.1
tttttaaccagtgttggcagcatgtgccatgggggtagcttatatgtattgacacgaataaagtatcctcagatgtttgtctgacttgcaattggacagcctggtttgattcctatcgttgctatttgctttgactgccgccaggatcattctctgtgcgatcactttcctaggatcccctgtccagatagcttcatcagcctatgatcaataatgtatagtttacccattggcctcacaccagtgccggcgagtgctctatatatgtatttgcacttggacgcgctgtcggctcactatgtgtatatgatctt

SEQ ID NO: 22774 - DNA, 1345 bp, Oryza sativa
  Clone ID: PAT_MRT4530_27919C.1
agagaaacaagttcatccacaggagtataagagaaatccatgcagagaattgcagtaacaaattatagctcgatgaaattagtaggtggtaaaacagcctcaacaggaaactaagataatgagacatacttcagttttacaagcaaaactgtttgggaagtaaattcccaggtaaaactttggtacactcaaggactcgaccatcattgattgacgagaagatggaaacacaacagcagctgtaagcaagtcatccattgtgttaagagacggttatcactggatgactggaaaacatatcatactgagaccaagactgttaaatttctttttttccccttttagataactaagcaggaaccaccgagttgtagtgctcaccaagaccataggcatgtctgtgataggacaacctaatgctagggccatctttaccacctgaatccaatttgtattctttgcccatttccacatctggaaatgagcccgagtatacaacaatgcgcttcttcaggcagtgggttagagcaccaagctcaagttgcccaccccaagcagcagttgactcaacctcctcacagtacctcttgaagctctccaagggatctggtccagactcgaccttgccctctgataggaaaaatgggagaaaatctgccgcatgctctttcatataattggcagtcatttgccgcagctcctggtaattgtattgtgtggtttctctggaatagagtgacagctggttctcaacagcacggtacaggcagtggccatctggctttatctcctgaatggtcagtcccatgggctcaagcttcttctcaagcttttcattttctatcatgcggtcactgacaagattgttttgctcttcttgaatccgctgctctctagcggcctcttcctttgccttcttctctcgacgccgtgcacccttgctaggcttcgcggaatccgcgttgctggtcacagaaacaccagctatagcctttactaaggtgtccatgttccccttttctgagctgcctgaggatttgtacccaaaagtagcgagctctgcggcatgtttcgcctctaactcagctgagaggcgtgaaatctcctcctctacctgcttcttcttggccttctgctcagctttgctgcctttagcggctgctttcttgaggcttgtttccttatcctggagtttggatttctctttcctatgcctcgagagcacctcctcgagcgtctcttgctgcgattcctgcgctggctccgccgcggctgcctcgccgccgccggcggcggattcgtcggctagggtttcgtccattggcaaacgatgcaaaactcagtt

SEQ ID NO: 22775 - DNA, 165 bp, Oryza sativa
  Clone ID: PAT_MRT4530_2791C.1
atgcctggttgctgcaacgtggtgaaccaacatggtgcggacgagggcgccatggactgcgttattactgcagggaacaatgcaccggataaaggtagcgacggcaagacctgcagccagcaaggtcttggtcagtgggcatatctaggatttttatatgggtga

SEQ ID NO: 22776 - DNA, 380 bp, Oryza sativa
  Clone ID: PAT_MRT4530_27920C.1
gaaaggaaattcaactgatttattactggttccgttaaaaccattacactctggtacgtggagaaaccgtgagggttcaaaaacaaatacaagcgttcgaagagtgaggccctgctagatgatacatgagaggagcactaacaaccagcacattagcagagcatataaccgagacacgcaacggaagccgtggggatgccgacaacgtcgccagccgatccgactctcggagagcatgcgtataaccaccacttcaagtgcactcagttgttattcgcggtgcggctcgtcacgttggaaaggtgatggagtcttcttctccacgcatatgtatacggctagatggcccgtttgcctcatgtaccgcacggaaaaacgac

SEQ ID NO: 22777 - DNA, 130 bp, Oryza sativa
  Clone ID: PAT_MRT4530_27921C.1
tttattgtgtgaccaaatcggctagcgagtgagggaggaggtatttttgacaggggcagtttcacgctgacagcagtgtccatagcagagcgcgaagggtatagggctcatttaggaggatgagtggctg

SEQ ID NO: 22778 - DNA, 618 bp, Oryza sativa
  Clone ID: PAT_MRT4530_27922C.1
atgggggagggtggcggcatacttggagaagcggcgtacttggagacggcggcgcaggccgtagtcgtcctggatcctggtggcggcggcggagaggcagtggcgaagaggtcgaggcagtcggcggtggtcggggatcccggcgtcgggaaggtcaggatcggggaggtcggggaagtcgatggacggacggcggagaggacgaccggcggcgagggcggcggtggaggcggcggcggagagggcgaggcggcgatggagagggtggagatggcggcagagagggcggcggagatggcggcggataggtcgagacggcgacggtggagatggcggtggagatggatggcggcggtcgagagagtgagtgcggcggcggtggtgcaggccggcgtcgggaaggtcggcggagagggtgagcggcagagaggtcggcagtggagaggtcgaggcggtggtggggaggtcgaggcagcggtggagagggtggcggagagggcggagagggcggcggatttggcggcggcgaggacggcggtggagaggtcgaggcggcggtggagaggagggcggcagagaggtcgagagaggcgaggcggcggtcgagagagtgagtga

SEQ ID NO: 22779 - DNA, 513 bp, Oryza sativa
  Clone ID: PAT_MRT4530_27923C.1
atgggggagggtggcggcatacttggagaagcggcgtacttggagacggcggcgcaggccgtagtcgtcctggatcctggtggcggcggcggagaggcagtggcgaagaggtcgaggcggtcggcggtggtcggggatcccggcgtcggggaggtcagggtcggggaggtcggggaagtcgatggacggacggcggagaggacgaccggcggcgagggcggcggtggaggcggcggcggagagggcggtggagaggacggcagagatggcggcagagagggcagcggagatggcggcggagagggcagaggagaggttgaggcggcgacggtggagatgtcggcagagagggcggcggcgaggagggtctggatggcggcggagaggtcgagacggcgacggtggagatggcggtggagatggatggcggcggtcgagagagtgagtgcggcggcggtggtgcaggccggcgtcggtggagaggtcgaggcggcggtggagaggagggcgtag

SEQ ID NO: 22780 - DNA, 733 bp, Oryza sativa
  Clone ID: PAT_MRT4530_27924C.1
atcgatccagatccggcgcccactctcactcactcactctctcgaccgccgcctcgcctctctcgacctctctgccgccctctacgccctcctctccaccgccgcctcgacctctccaccgacgccggcctgcaccaccgccgccgcactcactctctcgaccgccgccatccatctccaccgccatctccaccgtcgccgtctcgacctctccgccgccatctccgccgccatccagaccctcctcgccgccgccctctctgccgccatctccgccctctccgccgccctcgccgcctccttctccaccgccgcctcctcactcactctctcgaccgccgccgtcctctccaccgccatctccaccgtcgccgcctcaacctctcctccgccctctccgccgccatctccgctgccctctctgccgccatctctgccgtcctctccaccgccatctccgccgccgcctccaccgccgccctcgccgccggtcgtcctctccgccgtccgtccatcgacttccccgacctccccgaccctgacctccccgacgccgggatccccgaccaccgccgaccgcctcgacctcttcgccactgcctctccgccgccgccactaggatccaggacgactacggcctgcgccgccgtctccaagtacgccgcttctccaagtatgccgccaccctcccccattcctccttttttccgatggatgaattgcattgtttag

SEQ ID NO: 22781 - DNA, 833 bp, Oryza sativa
  Clone ID: PAT_MRT4530_27925C.1
cttggagacaacaccgcctggaccacctctccggttagatccgcgctcaacgagattgccgccgttgcgtgggcgccgacagtgaggaagataaacgggggagaaggagtcgacggagagggagaggtcacgctgcggaagtcaatccggagatggtgagggaggcgacggagaggaagaggagcctctcgagatccacagctcgacggcgccgtcgtccgcggctccactcagcgcaaccgtcgtccgcgtcttccgaccctgtcgaggagaagtggaggcgtggagccccacctagcgccgtcgctacttggaacgtgttaacgaccaaatttagtaatttaagtatcggagatgaagataaaatcgaagcggaattcaagagatagatcattccggaaatagagcaagaatcggccgaagtccgaatcggctacgatcaggatcggcagagtccgagtcggataaggtagccgattgagccgattccgacaatgtaactcgtttgggcaaaagtctgtcgcaaagacttatggtatattagagtttgttagagataagagtcgtgtctgacaaagacatactttgatcaaatcaattggcacgctcacgaacctaaaggcaagatttttggacctgcactgaagttaagcagatattccaggccagtgtatgtttttcgcatcaacacgctgagcgccaagcgcaagaacaagaacggttgtggcgagagcaacaagaacgcgaacgggctacgaaggaggccgaagaccgacgattcatttttctacgtcccataatgttgcggaatatgaggcgctactccatggatt

SEQ ID NO: 22782 - DNA, 453 bp, Oryza sativa
  Clone ID: PAT_MRT4530_27926C.1
tcactctctcgaccgccgccgtcctctccaccgccatctccaccgtcgccgcctcaacctctcctccgccctctccgccgccatctccgctgccctctctgccgccatctccgccgtcctctccaccgccatctccgccgtcgccgcctcaacctctcctcctccctctccgccgccatctctgctgccctctctgccgccatctccgccctctccgccgctgcctccaccgccgccctcgccgccggtcgtcctctccgccgtccgtccatcgacttccccgacctccccgaccctgacctccccgacgccgggatccccgaccaccgccgaccgcctcgacctcttcgccactgcctctccgccgccgccaccaggatccaggacgactacggcctgcgccgccgtctccaagtacgccgcttctccaagtatgccgccaccctcccccat

SEQ ID NO: 22783 - DNA, 369 bp, Oryza sativa
  unsure (1)..(369): unsure at all n locations
  Clone ID: PAT_MRT4530_27927C.1
cggttcgaggagaaatgcagggggtaggatgctcngccgtggtgtnccaancantaacacgccgtcgccnaangcgaacaccaaccccaacagctacgcccctcttcctcgtctgccgctatatcctcatcgtcgcctcgtacaactccacagttgatgagccccatcgtcgtcgtcgcggcgtaccancttgctggccgctcacgaacanttaaattcaggtccttttcttacatgtactgtattgccganaggcgaaataaangataaaggttgtccntgctgttgttgtntactcnaaatcacgtcaccgaantgctgcttaacaaccttctctcgttgttttcactcttaatcgattctaaaatc

SEQ ID NO: 22784 - DNA, 710 bp, Oryza sativa
  unsure (1)..(710): unsure at all n locations
  Clone ID: PAT_MRT4530_27928C.1
aagatggaagcactaatcctgagaacgcaagcgccataacaagctttacctctagttgaagattgaaactgatgcagttcaacccgaaagctagaactcgtcgaaagtaaaagggtggcgatgcgccgagattgtattgaacgattgttatttgattacatgggttcgggtcatatttatacccgagatacaaaatatttccttgtcagacacgactcttatctctaacaaactctaatataccataagtctttgcggcagacttttgcccaaacttatctctaaggagtttacataaaatatcctaattaatagatacgattaccttttcgggacccaatccatgcgtggcaatccatatgaagcacattaactcaacccgacaacgtgtaccgagttacattgtcggaattggctcaatcggctaccttgtccgactcgaactctgccgatcctgatcgtagccgattcggacttcggccgattcttgctctatttccggaacgatctatctcttggattccgcttcgattttatcttcatctccgatacttaaatntactaaatttggttgttaacacgnttccaagtagcgacggcgctaggtggggctccacgccttcacttctcctcgacagggtcggaagacgcggacgacggttgcgctgagtggagccacggacgacgacgccatcgagctggtggatctc

SEQ ID NO: 22785 - DNA, 796 bp, Oryza sativa
  Clone ID: PAT_MRT4530_27929C.1
tcattgatcccgagggactagatgaactacaggcagaacttgtgagaaccctatgtcatcttgagatgtactttcctccaactttctttgacataatggaacatcttccggtgcacctgtgacggctccacggttggcgcccgtcacaggtgaggccactctctcgaccgccgcctcgcctctctcgacctctctgccgccctctacgccctcctctccaccgccgcctcgacctctccaccgacgccggcctgcaccaccgccgccgcactcactctctcgaccgccgccatccatatccaccgccatctccgctgccatccagaccctcctcgccgccgccctctctgccgccatctccgccctctccgccgccctcgccgcctccttctccaccgccgcctcctcactcactctctcgaccgccgccgtcctctccaccgccatctccaccgtcgccgcctcaacccctcctccgccctctccgccgccatctctgccgtcctctccaccgccatctccgccgccgcctccaccgccgccctcgccgccggtcgtcctctccgccgtccgtccatcgacttccccgacctccccgaccctgacctccccgacgccgggatccccgaccaccgccgaccgcctcgacctcttcgccactgcctctccgccgccgccaccaggatccaggacgactacggcctgcgccgccgtctccaagtacgccgcttctccaagtatgccgccaccctcccccattcctccttttttccgatggatgaattgcattgtttag

SEQ ID NO: 22786 - DNA, 1131 bp, Oryza sativa
  Clone ID: PAT_MRT4530_2792C.1
atgtggaagtacggtagtgctttgcaacagaggcccgaagaccggtccttatatggccgaggtgctactatcaaaaccatgcaccccgagcccagcctaaaaccatttttggggatttttaatagagggggcggtgtgaatccaattccacaatactccaacaattccaaagtgtccagggtgaacaagccgggccccacgcggcagccgcacggtgcgcccgaaggcggccacgcccgcgcccctatggtcgccggctacggccataggcacggcggagcggcggccgagagaggggaagggaagggggaaaagaagcggcggtccacggctcaccccgggtcgacggcgacgacggaaacggcgaccggagcggaggaaggcggcggcgcggctcgggtggacggggtcgacggtgctccggcggtcggcgagcgaaacggaggggtgaacgaggtcgccggggatgcggtgaagccgaaggtggcgacgccgaggcgggaggtggtccggggcgacgacggcggtggaccggagctcggcgacgggggtgcgggattcgcggcagcggcggcggcgctagggcgcgggcggggcggcgggagcggcgggaggaaggggatgacggagtcgttttgggacgcgacatccgtccgtttccgcctctcgccgcccttcctcctcgccggaattgagctcgcgccgtcgctctctctctccgccgtcgccgtcgagctccggtccgccgccgtcgtcgccccggaccacctcccacctcggcgccgcctccttcggcttcgccgcatcctcgctgacctcgtccacccctccgtttcgctcgccgaccgccggaacgccgtcgaccccgtcgacccgagccgcgccgccgccttcctccgctccggccgcctttttcgtcgtcgccgtcgacctagggtgagccgtggaccgccgcttcttttcccccttcccttcccctctctcggccgccgctccgccgtgcctatggccgccgccggcgaccataggggcgcgggcgccgcctcccgccggctgcgccggctgggccgccctcgggcgcgccgagtggctgccgcgtggggcccggccgtcagccgcccgcgcccttag

SEQ ID NO: 22787 - DNA, 570 bp, Oryza sativa
  Clone ID: PAT_MRT4530_27930C.1
atgggggagggtggcggcatacttggagaagcggcgtacttggagacggcggcgcaggccgtagtcgtcctggatcctggtggcggcggcggagaggcagtggtgaagaggtcgaggcggtcggcggtggtcggggatcccggcgtcggggaggtcagggtcggggaggtcggggaagtcgatggacggacggcggagaggacgaccggcggcgagggcggcggtggagacggcggcggagatggtggtggagaggacggcggagatggcggcagagagggcagcggagatggcggcggagagggcggaggagaggttgaggcggcgacggtggagatggcggtggagaggacggcggcggtcgagagagtgagtgaggaggcggcggtggagaaggaggcggcgagggcggcggagagggcggagatggcggcagagagggcggcggcgaggagggcagcggagatggcgacggtggagatggcggtggagatggatggtggcggtcgagagagtgagtgcggcggcggtggtgcaggccggcgtcgggaaggtcggcggagagggtga

SEQ ID NO: 22788 - DNA, 248 bp, Oryza sativa
  unsure (1)..(248): unsure at all n locations
  Clone ID: PAT_MRT4530_27931C.1
ttnatgataacccaaaaccaatcatttccatcattgatgaattttaaacataacgtccgcgcacaacacacacaaaattattacaacaatcatagctctccatacacagaccaccaactcacacgtaaactcgcctccaactaatttaaccttctcaaggacaatagtccacccacccgacctttcaattaaacctgataacaatttgcacaaaaaaaaactcccccaataccctgcacgttttcacc

SEQ ID NO: 22789 - DNA, 182 bp, Oryza sativa
  unsure (1)..(182): unsure at all n locations
  Clone ID: PAT_MRT4530_27932C.1
aagnaaaataaatagcaccaatctaaccacttccgaaccctcacaacgggattatagactccaccccccatgaaaagcgcgaacgcaacgcaccaaagccagaatggctttgcacttgtggcttgccgctagttttttctgcatttcgacatctataacgagtctagagcgagctaaaaagc

SEQ ID NO: 22790 - DNA, 219 bp, Oryza sativa
  Clone ID: PAT_MRT4530_27933C.1
atggtgcgcgaggccacctccgtcgccacccagtcgccgcgtgagggcgcctccgcgcttcccggccgcgcgagaccgcctccgcagccacccggccgccgccgcctgagaatttttgtcacactaaggcgcgacgccgccttgcaacttcaaaggatagtgggccggttcctccaaatcggcccacgagaggcatacggcccaatccacgatacgtag

SEQ ID NO: 22791 - DNA, 1098 bp, Oryza sativa
  Clone ID: PAT_MRT4530_27934C.1
atggctctactccgagcagccgccgccgccgacctcctccgccgccaccgccgcgccccgctcccactcttactctccgctctctcgccgcctccaccgaccaccccggaatcctgccccgacggccccagtcccgtcgccccatacttcgctccgcctccgcctccgctatgccgccgccgtcgaagctggccgcctccgcctccgcctccgcgcgtctcgtcttcctcctacgtcggcagggggatcctgctccccgcgaccttctcgatctactctcccctctctacctcctcctccgcctcccccgacggctccccggatgaggattcctcgccgccgcacccgtctcccgcggcggcgcctccgtcctcgtgggttgacaggtggctcccacaggcggcgcgcccctacgccatgcttgcccgcctcgacaagcccatcggcacctggctcctcgcgtggccctgcttctggtcaatctcaatggcggcgatgccgggggagctgcctgacatgagaatgctggcactcttcggatgtggagccgtcctcctcagaggcgctggatgcacggtcaatgatcttcttgatcgagacattgataacaaggttgagcgcaccaaaagcaggccttttgcatcaggcattctaacccctacacaaggagtgggcttccttggattgcagcttttactgggattgggcattcttctccaactaaataactatagccgtattcttggggcatcttcactttttttggtcttctcttatcccttgatgaagagattcacattttggcctcaggcgtatcttggcttgacctttaattggggagctttgttaggatgggctgccattaaagaaagcttagatcctgccatcatcctcccattgtataccgctggtatatgctggacactcgtatatgataccatatatgcacatcaggacaaagaagatgacctcaaagtaggggtcaagtccacagcattaaggtttggagatttaacaaaacactggattagtggcttcggtgttgcatgcattggcagcttagcactcagtggctacagtgctgaccttggttggtga

SEQ ID NO: 22792 - DNA, 801 bp, Oryza sativa
  Clone ID: PAT_MRT4530_27935C.1
atggtggtccacgatcaagaggtcggtggaaatcaaaggagggtgggggtggaggtggtggacttggttgataaccccaaggagattgatagggaggtctgtcaagtcctcgccatctcgtgctactcggtggcgcagtttgtcaagagactcaagacgaatggcggcggcaacgtgtcggcggtcagggaccccgacatgtggcgtgacggcctccgcattgcctcggccgtgaggccctcccccgtggcgtcgagccgccgactacttcgatcttgtgagaaatgtgaaatctttgcagagaatggcgtggacgagcacggcaagccgacgcacaaggtggtgcacagggtgacggacgccgacaacaacctccgtgccggcaacccgttccccggcgcgacggcgaacatcatgaacatggtggagagaagtttctcctaccccatccgcatcgctcacaggctatgccgcaccggatgcggcgcttcccctaccttctccttcgcccctgcggcccgcgctcgcttctccgcccccgtgcacgcgcgcgcgcgagctgcaccgcgggcctgccatcgcttcccctcccttctccttcaccccgcgctctcttctccacccccgtgcgccggccacagatgcggtcgcttcccctccccgcatcgcactgcctcccccatcccccatgcaccagccacgctgcgtggcctccgcttcacgcttcgccttcccccttccagcactggcccctggccgcatcgccttccttgtcactgcaccgtcccgtctctcccgtga

SEQ ID NO: 22793 - DNA, 408 bp, Oryza sativa
  unsure (1)..(408): unsure at all n locations
  Clone ID: PAT_MRT4530_27936C.1
atttcttgacattttttgaaatttatactncacgcactgtagactcatattcacaacatgtagtgacaaaggtttttacttctcagtattcacatcgcgtattgactctagatgtcctagtatggggcatgattcctatttaccagctacttaatgatctatttgtctatggacgcttttaggatcccattgcagagtgatcacacatctggcataggagtatgcgtgctcttgtatgtccacagtatccatattaccctgccaagcttccatgtttgagaccgcccatcagctgatacgaatccgtcagggcacaccgctaacgattgacgatttaatatgttcctgcgcatgccttctggcccttttattgtaggccctccttgtgcgagacggaccctttgggac

SEQ ID NO: 22794 - DNA, 342 bp, Oryza sativa
  Clone ID: PAT_MRT4530_27937C.1
atgactctcgccgcgatcctcctcctcgtcctcgccctggtcgcgccgccgcttgccgccgccgccgtcctcgacgacggcggcggcggccaccgcccgccgttccacatgtgcgggatggtgcagggtcggttcgctcccaacagctcgtacgaggccaacctgcggcgtgtcgccgccacgctgccagccatggtggcgaacggatcctcctcctcctcctccggcgtcgatgtcctcgtcggcgagcggcccgaccagatctccacgtcggccttctgcggcgccaactcgtcggcggcgccggagtactccgactgcggcgcctgtgtcgaaacatga

SEQ ID NO: 22795 - DNA, 468 bp, Oryza sativa
  Clone ID: PAT_MRT4530_27938C.1
atggatggacagcggcgtgaggaggctggcagcggtggcgccggcggcgcggggaagaggtcgtggatggcggtggccgcgccggtggcgcgctccctggtgcactctgcgagcgcggcggtgaaggggtcggagtgtggtgcattggtggtggtggcatcggcggtagtggtggcggacaccaccgccgacatagtgtcggcaaaggttacgtttagcttgctcgatcaaaaggggaacccgatgccatctcacaccctcacaaccccactacttaaattctctctttatggcactctacctaagaccctggggtataatagctggtataatagcttcatcagaagagacgacttagagcgatcaggacatctcaaggacgattgctttgccatcggggtccatgtggtcgtcaccaaggaagcaataccgtcgtccatcaccgtgccaccactacaagataattga

SEQ ID NO: 22796 - DNA, 239 bp, Oryza sativa
  unsure (1)..(239): unsure at all n locations
  Clone ID: PAT_MRT4530_27939C.1
tgacctttgtgcagnggaatcncatatatatccgacnggaanagatgtttgttatgtgtnccanantgtncgagttcaatcctttgtatccttncncctttttaanagctgggtgggagccttagaggagagatcaaggatagcatgtgtgtatgtacaggacttgtagagcattttgccatttacttattctatttatttgatgatggaataacctaaaaaaaaaaaaaaaaaaaaaa

SEQ ID NO: 22797 - DNA, 556 bp, Oryza sativa
  Clone ID: PAT_MRT4530_2793C.1
cggagccccatctaaaggctcctgtccgaaggcatccgcagagtgtgggacacctttgtcctagccctagggcgtcggataaaaaggtcggattaggtctctggagaagaggggttgggcttctctagatcctcctagtagagcttagaggaccccccattgaaaagtaggtaccttttttatcatgtcacaaagaactctattcttcacatagcaacaactagaatgaaaataaaaaggaatgaaaaagcatatggaaataaatgattaatttctatccgcttgaaaggcccttctccttgcctccgccccgccttgggctccttgggggaggaacgagtccaaaggtttctggttccccctacaatttgttttgcaaagatatttcaatcaaagtgaaaacttgtatctttgaagcatgtgttgtattgatggatggatcatacatggacatgttgattgtgaggtcattttgtacatttcaggaaaatcttctacagttaattagttgtttaaatattaaagtcaattcatttacttcaggtagcagtctctt

SEQ ID NO: 22798 - DNA, 264 bp, Oryza sativa
  Clone ID: PAT_MRT4530_27940C.1
atggcgagaagggggttttttaagggaaaaaatccccacgcaacgaacgacgagacaggagacgtgacgaggccaagacgcgtctattctctgacaagctgggcccgggggcttgactttcaagttccttcccgtttacgtggtgaagacaaccatggtctcggcatggccaaggcccgggctgcctttgcccccggtaggaatcgttcctcctccccgaaggaagaccatgggtgtgacctcaagtctcgacgggaggtgtga

SEQ ID NO: 22799 - DNA, 453 bp, Oryza sativa
  Clone ID: PAT_MRT4530_27941C.1
atggggcgggacccggggcggaacctttcccgcgccgccgaatgggaagggacgccgaacccccgcccggagtggtacccgcgggagcccagcgggtgcgggggagtcgccccccaaaaaaaagaaacaaagggggaaggcgaccgcgggttttcgcctccccccggcccaacgccccagacaagaatgccgccaaaacgagaaaaagacgccggcccggttcggaaaaccgatgccccgggtgttccggcggtaggggggaaaagtggaggcgcggacggggtcaacggcgatccgccgatcccgagggaggtgtcccccagtcgggagaaagaccggaccggcgccggcggctacccgaagcacggcggcgccggaacggagctcggcggcgacggcggagagagaggagcacggtgcgagcacgattcctacggcgagagcgaccggtga

SEQ ID NO: 22800 - DNA, 349 bp, Oryza sativa
  Clone ID: PAT_MRT4530_27942C.1
ttttttttttttttttttttttttttttttttttttttttttttttttttgggaaaccaaaaactttaccattcaccctttttttttttttttacacatttaattttgggcacgaccaaatttgggcatgaagaacaaaaaaattggcccaaaccaaacaccttgacttctttggcataaacattattacaacagacttacaatttggcacattatcggggggacaaaccattttatttccaacatccaaatgaagctttggacttttaaatattatttatggttaccggttaaaggattttttgggggcctcccctggatttttcacgcttttcgggaccggagaatg

SEQ ID NO: 22801 - DNA, 3006 bp, Oryza sativa
  Clone ID: PAT_MRT4530_27943C.1
atggagaatcagcctgtgctcttcagtgctgtttttatcctctatgttagctttcttgggcccttctgcgccagctccggcgaagagagctttgtctactccggctttgccagcaccggcgcagccaacctcaccctcgatggctcagccatggtcaccaccacagggctccttcagctgacagacagcatgcccaatatccaaggccacgcattctacccaactccgctccggttcaagaagcaatcgaatggcatagtccaatccttctccgtggccttcatgttcggcatcatctccccgtactccgatgcgagcaccgacggcatggccttcgtcgtcgccccaaacaagggcttccccgatgccaaggcggcgcagttcttgggcctcctcaacatcagcagcgacaacagcacaagcaaccacatgttcgccgtggaaatcgacaccgcccagaacaccgagttggacgatatcgatggctaccacgtcggcatcgacatcaacagcctccactccaagaaatcccaacacatcggcttctacaatgaccagcatggtgggctcttgaagaacctgaccctcacgggcagcaactgcaagccggtccaagtgtgggtggactacgatggagagaccacacagatcaatgtcactttggctcccatcaaagtgaccaaacctacacggccactgctctcagtccccttcaacctatccacagtgctcactgaccaagcatacattggcttctcggcagcaacaggtccgctcacctcacattactacgtgcttggatggagcttcgctatgaatgctcctgctccgcctattgaaatctccaggttgccgaggctcccttgccctggagataataggttgcagaagatcttgcagatcctattgccaattgtcgctgtagcattgatcttcattgtagtcatgatacttgtgaggaggcagcagagatatgcggaattaagggaagattgggaggtcgagttcgggccacaccggttctcatacaaggatctgttcaatgccacagaaggtttcaagagtaagcacatactcggcgtgggagggttcggaaaagtgtacaaaggagtgcttcggacatccaaacttgaggttgctgtgaaaaaggtatcacatggttcaaaccaagggatgaaagagtttatctctgaggttgttagcattggtcaccttcggcaccgcaaccttgtgcagctacttggttattgtcgacgaaagggcgaactcctactagtgtatgactatatgccaaatggtagccttgacaagtatctatatggtgaagacaacaaacctgttttaaattgggctcagaggatgcaaatcatcaaagacgtggcttctggcttattctacctccatgagaagtgggacaaggttgtcatccaccgtgacatcaaagcaagcaacgtgctcctggatagtgaaatgaatgcccggttaggcgactttggtcttgcaagattatatgaacatggcaccaacccacagaccacgcacctggttggaaccatgggattcatagccccagagctggcacgcacaggaaaggcatcccctctcaccgacgtgttcgccttcggcacgttccttcttgaggtcacctgtggccggtggccgatcagcaacagtgcgcaccacggccgaaagatgttggttgactgggttctccagcactggcaccagggttcgctgccagagacagtggacccgaagctgcacggcatctacaacgtcgatgaggcatgcctggtgttgacacttgggctgatgtgctcacacccaatacccggagcaaggcctatcatgcggcaggtcatgcaataccttgatggagatgcaccgctgccggagtttacaccggcaaccctgaactccagcttgctggcaataatgcacaatgaaggggtcgacccatacgtcgcacagtacccgtggctcagcccagatcgaccgacactgcttctctctacacatccatcatggacccaggtagttgcagatcagcgattcctcaagacagattcaaagaccaagggcccagaagctgaaaatttaacaccaacttctgtcaatctaatatcagaagttcagaacaaagacttccaccagaacaaatggcattctcaacaagaggggaaaacacagcccaagaaggatagcttcgacagatcactagttgggtgcagtgatgctgttgaccaatttgtctactccggtttcaccggcagcaacctcacccttgatggtggagccagagtcacgccaagcggcctcctggagctgaccaatggcatggttcggctgaaaggccatgccttccatccgactccactgcatctccacgagtcgcctaatggaacggtgcagtccttctccatatcgtttgtgtttgctatcctctgtgactaccctgattcatgtgggcatggcctcgccttcttcattgctccaagcaagaatttcgcaagtgcgttctggacccagtatttgggccttttcaacaacaagaacaatggagacccaaacaaccacatctttgctatcgagctcgatactgtccaaaatgatgacttacaagacatcagtaataaccacattggcatcaatatcaacagtctttactccatgaaatctcgtgatgctggcttttacgatgataagagtggtgactttaagaatttgacactcattagccagaaggcgatgcaagtttgggtaaactatgatagagaaatcacacagatcaatgtgaccatggcccccctcaatgtggaaaaacctgtgaagccactgctttctactacctacaatctatcaacagtgctcactgactcggcatatattggcttctcatcttcaacaggaacagtcagtggaaaacactatgtgctaggttggagcttcggcatgaacagcccggctccatcaattgacattgccaagcttcctcgtctaggttaa

SEQ ID NO: 22802 - DNA, 320 bp, Oryza sativa
  Clone ID: PAT_MRT4530_27944C.1
aggcagtattgatcctggtgtgtggctggctgcttcatgttttgagcagatacatatgcagtactgtcaaataaaaatttttttttggctgctgcagcagcatgtggaaattcctgggttggggtggaacccgtgtcacagcagagacccctgctacagcaatgacaaggtaagatccttaacccactaggccaccagggagctcctaaatgatgatttttgttgctatttaataaaatttaattttttcccacaaaactgtttgactttgctttgtcatcttatgtaggcagctagtttctttaatgatattcccatgc

SEQ ID NO: 22803 - DNA, 467 bp, Oryza sativa
  Clone ID: PAT_MRT4530_27945C.1
cagcttcgagcaaagtgcgtgttcttgagagactgaaaatccataatcatacattgatgcaggctgaaactcattcaggacgcccacaccaaattaggatacaccttgcatacattgggcatactgttgtagatgaccctctatatgacattgagaggaaggcaaaatttgatgaaccagaacctactagtacggctgattcttttgcatatgatggaggttatgagagacccttgcaacccgtccctggagattgtgggtaccacctacatgcacattggctaagtctttggcatccaactaccaaaggagggaccggtaaaatgaataatattgaatttgggtgctattctgtacctgactcgtacaatagctttcaatcccaggaactggggttaaattcatatatcgaagatgatcaaaatcacagctcctctgccacatatcctacagactagagaggaaca

SEQ ID NO: 22804 - DNA, 197 bp, Oryza sativa
  Clone ID: PAT_MRT4530_27946C.1
acaggcatcccaaggcatgcagagcaacacattcaggccagccaaaccttaaatccaacacacgccacaagcaccaccgggtcccaccgctcccagctcccatccctccactttccttcggtgggtcacacgcagcacaccacatgcgggcattgcactgtctccgcacacgccttgcatggcatcccatgccccgc

SEQ ID NO: 22805 - DNA, 1003 bp, Oryza sativa
  Clone ID: PAT_MRT4530_27947C.1
ccatgggacgatgggaaactggagccctcgatctctccccctcaccttgtcgcttcctcctcccccgacgccgccgcttccccaattccggctccggcggcgagcagcaggctgcggacgcgccgtcgaagctccaggaggatgtggatctccggtgtagtctccgtggcatgcctacatcggcggcgcgaatattcagcaccggcttagatcgatggcgcccctcgccgccgggcttccgtggagagcaggtatgcttccgcctctactcctagcaaggttccaaatgactagcggcaagatcaggtatgtgcagacgacctccgagactgaaccaaactcatccaggcatggaatgcggaaaaaaaatagaccatagctcatctcggcatgaatgaagaatctcacattttgaagagtctttttgatgctcagggattcatagtgcaattaatcacgatgccataatgcatgctaatgatgaccagaagcttgacgccaatcggaagtcatgatagttttttttggttgctagttcgactggtaagagctggtgctgccgagacaccatcctcagtgttcttgaagtttaagtcaacactcaataggcattggtttatttagttcttctcagccatcagaaacttcaaatagcagggccaaagtctgcaaacttttaggtaggatgcacttagaacatctcttgcatattcgctacaaagaaaaagatgatctagggactagcttctaatcacacaccaagtttatcatagaaaggtcatgcatcaagctcttctactaggaacattatcatgcaacctcaagtcctaatttaccaatatgcaccttcaggcttcagccagctcaacaagcattaaccaggcattttaagaactccattatgtccaaggatatgctgctatttaagaatctgctgaaggaaatagcaatgttgcaaagatgcaaaaatgatgcaacatggatgctcaaaccttactaccag

SEQ ID NO: 22806 - DNA, 678 bp, Oryza sativa
  Clone ID: PAT_MRT4530_27948C.1
ctacctcatccaccaccacgtccaatccttcggtccttccaccctatccgtgaggacaagctcggccgccgcgtccccgccatcaacgcggtaccggcgacggaggagccagccgacaacgcagcgatgctccatccgttgtagcatcctctcaccaagctcacgccgccgtggcgcccagaagctgctaccagcgctaactttccccaccaccatggcggtcaccgcgcatgctccgctccgtgtggcgggctcgcccgtcgccgctggcgctcgccgccgccccctctgctcccgcgtgaactgggcctgcagcagcttgggctcgatgcccaggcttgtcgcttcctcctcccccgacgccgccgcttccccaattccggctccggcggcgagcagcaggctgcggacgcgccgtcgaagctccaggaggatgtggatctccggtgtagtctccgtggcatgcctgtttattagctcgatttgattccattccatcgccaccccagaggcacccaccccgactgcaatgggcagcggtagggcgtgtatccgcactaccgtttcagcaaggttccaaatgactagcggcaagatcaggtatgtgcagacgacctccgagactgaaccaaactcatccaggcatggaatgcggaaaaaaaatagaccatagctcat

SEQ ID NO: 22807 - DNA, 162 bp, Oryza sativa
  Clone ID: PAT_MRT4530_27949C.1
atgggagattttcaccgtcaaatgaaggcagtagctggaggcaacaacaaaggtttcatgtccatctacgccaccacacagagcaacaccactgcacagagcacccaggctcctgctactacgggcgctgccgcacggtgcgatgccgctcaaagctccaag

SEQ ID NO: 22808 - DNA, 288 bp, Oryza sativa
  Clone ID: PAT_MRT4530_2794C.1
atgcgtggcagcaagtcagttagaggctgcgagacccaagcgggccagcagtgcggcggcccgttatccttccaccgttggaagcggacaggaaacgtgaggccagagctttcgctcaagccccgccggcccaactacgcaacttggaacgggcgggccatctatggcactgccaacccaggcccgcagccatacggcaacgtccacaccaccttaatgcccccgctcgggttacaagctcgcgctgctgagctcggctggaggtggtgggacgctcttgctatttaa

SEQ ID NO: 22809 - DNA, 623 bp, Oryza sativa
  unsure (1)..(623): unsure at all n locations
  Clone ID: PAT_MRT4530_27950C.1
aaaaagggtggctatgcgccgaagttgtattgatctggatatactttacagagaccccaagtgtacatatttgtaaccatgggtagatatgagtcctgatcggacactaaacaaacttttctaaagataaaaggaaaaatataaagtcctcattggacatgacccaaacttttctaaaatcaaaacttgcctaattaatagataaattaagctgccatgtcatggtccccatgattcctttttgaactcggactcttctggataagatttccatcggctgattgtgctctttcctttaaccgaacccactnaagaatcttaactaaattttggcgttnacatgaactttagatataaactacactaagaattaagttttaacttaaataacgtttaacttaacctagaacatggaaaaattccttaactcccaaatgctaaattggaatagaaacaatttgtttgcnntaatgttttgaattgaagcccnngaaacggttgaatccattaaaaaggttccttacttaaggtnaaaaatnccttcnnncngnaacccttacttnttgggntngntcaacccntaaatntatnaattacctttttttnccanngggtttcaattt

SEQ ID NO: 22810 - DNA, 212 bp, Oryza sativa
  Clone ID: PAT_MRT4530_27951C.1
aaagaccctggtctggcaagaccatttacccttgagttggagtcgtccggacaactattgacaacgtgaagtcgtaagatccaggacaaggaggccatcccccccggaccaagcagcgtctgatctttgctgggtaaccaagcttgaggatgcccccaacccttggcgggattacaaacaatcccaagaaggagtccacactcacactctgg

SEQ ID NO: 22811 - DNA, 225 bp, Oryza sativa
  Clone ID: PAT_MRT4530_27952C.1
atgaacgagaaggacaatgtccgcgtgggctcaatccaaacaacgttgttccagcacttcggcgacgatgcgagccccaagataaggaggctcgtgaaggccatgttggccacaaagcaaggggcgctagaggtgagggtggcgcttccacgcaacggcatgctgatcagcgggtgccagaccgacaagacctcgatgggcgctaccacgccagagggcattccc

SEQ ID NO: 22812 - DNA, 258 bp, Oryza sativa
  Clone ID: PAT_MRT4530_27953C.1
atgggagtgagggtgaccgggccggcgggatcgccgctcgtggcggcggtgctggcgagcctggaggaggccgccgccggcggcgggtacgagctcgtcggcacggcggcggcgcgcgaacagagtacccggccgcaccttgcccggaacccgtttggtaagatcgccgcctttgctgaggacggcgagctcgcgctcgtcgacgccgtcggtggccatgttgatggtagccgctctcatgcccgcgtgacgtcttga

SEQ ID NO: 22813 - DNA, 833 bp, Oryza sativa
  Clone ID: PAT_MRT4530_27954C.1
tatcacaagtgagccatcacttgcttttgcaaaatagagatcaaaacattgttgaagctatgggtctgattgtggatgtgaaagcacgactactaagacatgagggataatggttgggcactacttttcaaccaagtaaaaaacttttgtgaggcaaatggaattggagtgccaaatatggatgatctcatcggagttaacggtaaatctgcacgttggaagcataaggtgacttaccttcattattatcgagttgatattttcaatgttgctctagatgtaattatgggagatattaatcatagatttcattaagtttctttttatttattggtgtgcatgtcttatcttaatccaagcaactccttctctaagtttgatatgcataagtttgttcgatttgttgagatttacgctgttgattttatgacagttgactgtttgatgttgagaaatcaacttcaaacctttattctcaacatcaggagatgtgttgaattcaatgactgccatgatcttgcaaaaattgctgaaaaaatggttcagtccagaaagaacatgacttttccattagtgtattgactcattgggtttacattgatccttccagtggcaacagcatcagttgaaagattcttttcagctatgaggatcataaagacagatttacgcaacaagatagctcactattggtggtgcattacaatgagaaagagatatttggatgcctttttatatttcgttgtccatctacgaaaatcaatttttccacgcagaccaaaatacctttatttttataggcagaactcttaagtgctccacctaaaaaaata

SEQ ID NO: 22814 - DNA, 1489 bp, Oryza sativa
  Clone ID: PAT_MRT4530_27955C.1
gcacgaggctcgagtttttttttttttttttttttgtgaatgattatatcatgattgattaatgagaggagtttgtatggttttatttacgaaattatgacacggggcggcttggatgatcagagcgcgctgcagtcggcaggctggaaggagaagtcgccattggcgaggtcgtagagcacgcgcatgttctgctgctggtagttgccgatcacgctctgcctccggtacggccccgcgctggcgatcgccatgcacgccgccgccttgtccaccggcgcccagtagctctccgccggcaccgccatgtccgcgccgccgcggaagtggaacaccaccgccggcaccaccctgcccacgtcgcgccgcgccacgcacagcgcgccatcgtcggcgtccggcggcggcgccacgaggctgccgttcagccgcgccgccagctcggacgccagcgcgtcgtacgcgtcgtggacgagcgacgtgaacggcgagccggagtcgatgatgacgccgccggagaagagccccggggcgacctcccggaggtcgaacaccgtggccgggatcggcagcctcgtctccccgacggtgaggccgatgagggggaggtagtagaacggggagcccttggggcccttcacgaactgcgtggtcatcacgtcgccatggccgcccaagctcgccgacgcgccgacgaacaggtggccggtggctccgttgttgtggaagtaaggggtgaggcagtaggagaacttggtggcgccggtctgcgacaccagcgagaggcggccgcggccgaggccgatgaggccggaggcgccatggagcgcgccctggacgatccgcgtgaaggtcacgcacccgaaggcgagctccgccgttcccgactggaacgcgaacgcctcggtgccgagcgtgccggcgacgacgccggcgccgtagccggcgatgaccgagcagccggcggcgagatcgcagaagtggatgatgtcgtcgttggcggcgcagatcctcgccgcgcacggcaccggcgcgaaggtgctcgacgccgacgagttgtagtacggcagcgcctgcctggcacacaccttgcggaggcaggtggagcactgcgtccagacgaggtcgctgccggtgtcgatgagcgcctccgcgcgctgcggcgggtcgccgatgaggtactcggcgacgtactgcagcgtcgcccagcggacgggcgcgcccacgccgccgccgtcgccgccgccggccatcgcggcgtccaggaaggccagccgctgcttgccggcggcgacggcgcgccgcacgagctcctccgcggtgtagttacccttggcgtcgacgtgggtgagcttcatgtggagcccttcgcctccgtcgccggcgccgccattggtgcaagtaattagggcggtggtcgaacacatgatgagcacgagaacgaacagctttcgcgccattttttcgcgccttgttgagcgaacttgat

SEQ ID NO: 22815 - DNA, 294 bp, Oryza sativa
  Clone ID: PAT_MRT4530_27956C.1
atggcggtggcaggacgttctcccttcacgcaagacttggtggctggggcgctgacaaggttcgagtggaggggcggcaagcaacagcggctaggtccgacgctgtcggggccggaggaggaggttgtggcgatggggagtaggaggaggatgtcgtcgatgacagaggagtcctgcggtgtgctcgcgcggaggaggcatggtgcctccgaggagggcgagactgcaagggtggaggacgagatgcaagcagcgaggctgagagcgtggaggcggcacgaggaggaaaggtga

SEQ ID NO: 22816 - DNA, 2442 bp, Oryza sativa
  Clone ID: PAT_MRT4530_27957C.1
ttagatctgctctacatccagaggggaatgcctcccttgagtttgttttcttgagaaagagttctttccttctgtatgtctgatgaaaacctgcatagtgttgcttggatgcagctgattgccataatggtgtgggtggctagactgcaccccataacggctatcaaaagatagctcatttggattaacttcttccataaggtcaacaacaccatttgtcctgacatgagtaccaagatttgaggcagtagaagaagaatgaaaagcatccttctgactaacgtccgatgataccagtaaagaatccttatgggcatattgatttgacacggactccacatttgtatctttactctttttgggaggacggccacggcgcttttttgctggccctccctcagatgagccagcttgcatgtggctgtcaccattaatagcacgttcagatggtgtaagtttttgctccaattcccggcacaaattatcatcaagaagggtccgtcgtatgtctcttattaattttaatgcatgctgatgcttctcatctgatgatgctccaatctcaacaagacggaggcactgcaaagaaacataatcatagcgctcaatatgattacttgttaccaaatccttccatggattatctaaggcgtgaagctgcttaaagtcattccgccacctgttaagcacataacaggggggtatatcaaaaacatgctgacatttaagcaccgataatgtatgccgacaaacaatgccactgaactggaacaggccacagttgcattccatcctgtcggtctccatacagtgaacgacttcatattttttattcaccatttctccgcttgactcagctagatcaataactacaatggaggatgttgaatcatccaactgaacttcacaattcatggttgcgttcagctcattctggagtttagtgaacattttaaaggtgtatagtctagatagctgttcttccataggaaacttcgatactagcaccctgcttctactcaatgactcaagatcatcatcttcctccattttgtatttgttctgtaaaagattcacatagctgctaaggaatgtcaccaatttggtctctgggttgattgaatcttcaaagaaggcatttggactctcatggtggttaacagtagataacccagcccagaaggtatctttcagaaaggcggggacccagaaatggcgattttcatacagaaaagtgatccattcattatcctgaaggccaaatctactgatcaagttattccaccttgcctcaaactcgtcatccttcaaggaatcatatattacagtttccaattcggtcttcattccttcaaattgtgctgattctcctaacttttcagagatacttcttaacacatgccaatcacttattcgatggcgtgcatttggaaatacttcacgaactgcggcttttatcgcggcacaatcatccgtaactatggcattcggaggccatcctttcatacaagtcaaccacgacttcagcagccataagaagctttccgtactctcatccgaaaacaagccacagcctaacagaacaagctcaccatgatggttcacccctaggaacaaaacaaggggtgtatcaaacctatttcttaagcaggttgtatcaatccaaacagcgtcgttgaaatattggtacgctgccctggacctcgaatcggcccaaaaaacactcctcagatggccttccccgtagaaatccatgagatagaagaagttcgcctgcttcgcctgcatatccgcgaaaaagccattgatggccgctacatcatcttccccaatcttgagcctcccccaatcatcgaatatcgggacctcgatgtcgccggaggtcgagcattcccctctggcagccctcaccaccagatctttactcatcccactaggcaacgtcttgtagcacctcaggaaccgcgccgcggagggattcagcgcgtggttgtgctccagattgacatccatgaggtgcagcaggccatcgctccagagcctcgcgacgacggtggcctggcagttggtcttggccgtcggcctcgcctggtagcacgcgtcctccttcccgtccccccacttgttgcagacgagcaccaggcggcggcagaggccggccttggtgaaggacgacttcttgacgcagaccccgaacccggtgcggagggcgtagcgcttgtagaagttgagcacctcctcgtacgacttgaacaccatcccgtcccgcggcgtccggtcgtcgccgtaggccatggcgtccgtcccgtccagctcgccgcactccgccgccgccgccgccgcgtccaccatggccgcgagcgaggtggcggacgcgatgttacaggggtatgatgaggcgtggcgaggcggcgacgacgacggcgacgggtcggcgaggcg

SEQ ID NO: 22817 - DNA, 430 bp, Oryza sativa
  Clone ID: PAT_MRT4530_27958C.1
tcgctgtgcacgcacgcacgcagcttcctcggccttggaggggtgaaggggggagggaggaggagcacaacgaaggatcttggggctcgggttggtcggggtatggatcggctcggcgcgggtgtcctaatgccaagctttcttggcaagatccatggccgccgcgcgagaaccctcgtctcgtagacagccctaaagccctcgcggcaggatggtcggagcgcgtaggcaaatcgacggggaggaatcaagaatcggggcggggccttcgatcgctgcagaaaccgccatggacagctccagcaagctcgcgcgaatgcgcctgtgaaagaagacttgtagttgcagagcttgcaaaaccagattgtggaggagaagcagcgatgccaccgatcccatctctgtggatccgcgtcttcttcttctggct

SEQ ID NO: 22818 - DNA, 701 bp, Oryza sativa
  Clone ID: PAT_MRT4530_27959C.1
atgcagaatgatccccaggcttggtcttttctttaccttcaatgttcaccgctcgggtatttacacaagaacaaacgaaagaattcacatgtcaatggaggagtactcttgattagactaaatttcaagctaggtcactgcttacgagaaagcgaccgaattttagctgcttcaagatctgagatgtaacatgactacattcctagttttctatagacgagacaaaaagaccagtttgtgccacattactgtgttccgattattctgatgttagatctgctctacatccagaggggaatgcctcccttgagtttgttttcttgagaaagagttctttccttctgtatgtctgatgaaaacctgaaatggcaccatctgaacccagtatttgattgctgtcatgtccgtctgccataaggcacttgatcgtcctgaaatatattctggtacatccactggactctagagtgctctgctgttgatgtagtttggccaaactgcatagtgttgcttggatgcagctgattgccataatggtgtgggtggctagactgcaccccataacggctatcaaaagatagctcatttggattaacttcttccataaggtcaacaacaccatttgtcctgacatgagtaccaagatttgaggctgtagaagaagaatgaaaagcatccttctgactaacgtccgatgatac

SEQ ID NO: 22819 - DNA, 360 bp, Oryza sativa
  Clone ID: PAT_MRT4530_2795C.1
atggaggtggatgaagtcgggggtcgatggacattctccagggcaaatgaaggctacacgagctgcggcccggtagtcgagatgtcatggcacagggccggtgtcctgctgctaggggctcagtcctgcctgcctgtcccgggtgttccggccgtaggtgggattgggtcgcggcggcggctcggcggaggagacggctcgaacggcgcacgctcgtcggcgaacggcgatgctaggacgcaaacagagggcaccaagacggagaggacaacgcggcgaactcaccgcgaagaggcggacgaggacggcgacgacttggcgagcacgacggtggtcttcccgagcgacggcgacggctga

SEQ ID NO: 22820 - DNA, 228 bp, Oryza sativa
  Clone ID: PAT_MRT4530_27960C.1
atggccgggcgctggcgggcagaggtggcggcagcgacgagcacccctcccttggccagtggctggctggcagaggtggcggcggcatccggcgagaggggaggcggcgagctcccctccgctagatccgacgccaggggagctagtggggaggtggcgggctcctgcctggcagaggcggcggcggcgcaactaggcggcggcagcggccgcaccctccccatgcgg

SEQ ID NO: 22821 - DNA, 237 bp, Oryza sativa
  Clone ID: PAT_MRT4530_27961C.1
atgggcgatggtactggtgacgaagttcaaggcggtgaggtcaagccacaagaggtggagctcggttgtgggccatgggtggcggcgcagtggctcaggattggctcctcccaccagcgacggccctcctcccaccacgagctgcccctccccaccggcggtgcccctccgtgtgcctccccaccggcggcgcgactactgaagaagctgaagaaggaggtcaagatggatatgtaa

SEQ ID NO: 22822 - DNA, 1224 bp, Oryza sativa
  Clone ID: PAT_MRT4530_27962C.1
gaggaaattgtcctttgcctcacccgctcattgcagagaatccaaactcataatccatcagcggacttgagtggggttggactatagactatagagattctggttgcttgtgccattctccaactctgctatatagatggctttaggaagacccatactgattcagaactaatcatctttgggagaggagagatactagctacacattcagattcagagctaacatccgcagtcaccattgcttcattggaggagagatcattgggtagcaatggcagcccaccatggtagcagcaggaagacaaaggcagagcagtggctattcggtggaagatggaggagaactgtgaaggagacaaagcatcctgttgcctctgaagccaagcctccagctccaacatttcctacagccattcagaaggatggcgacatctgccttgagaagtccagagttcatcttcctggcctgggacagagggagatcatcgatatcgcgcccgggaggaagtcaatgccggaggtggagatcaacatgaaggaggtcagggagatcatcgatatcgtgcccgggaggaagtcgatgccggaggtggagatcaacatgaaggaggtcgtctctgtgcttggtgtgaaggtgatggctgcagacatgtcgccatttatgcagctgcatgctttccggtgtgctaagcggtcccatgatagcttggacaagttcagctcaaggcagctggcccatgatgtgaagaaggagtttgataaagtttatggacctacatggcattgcatcgtcggcacaagctacggctctttcgtgacgcatgcgagaggctgtttcctctacttctccatggataagatcatcgtgatgctgttcaagaccaagatcaggaaagtgttagcatcatcttgagctccatagggaccaaccatgacatatctcttgtctcaatggtcaatacacttccatcatgagaaaaaaaaagggtaattaattagtctagctctgtgagagtgaagaaacaggggaagaaaaccacctcaaataattgttttgtccgtgagttgcaagttgcagctgaacaagtactgtggttggatggtgctgatgaatactaagcaccaataggaaagcaggttgtatatgtaaattaattaataccacttggaaaaaaatgtgatgataaaaaaaaaaaaaaaaaaaaaaaaaaaaaaaaaaaaaaa

SEQ ID NO: 22823 - DNA, 1070 bp, Oryza sativa
  Clone ID: PAT_MRT4530_27963C.1
atggaggcacgcttgtatgccgagtttcgagcaaccgctagggcgaggctgatgccagctgttacactcgcggaaagttgcaagaaattcggttaccacccgccagcgccgcctttcgagatcatcaaccacccagatcttttcgagagagcatggggatgggataccatactgccgttcagtgtggcacgtactttctctcggtacaaggaatacctcgtggattattacaatcgcaaccaaaagaaacccaatgctgctgctgctgctgatctcactggagacgacgatagcctgacagctctggccaacaagtgtgccgagatggagggccatctgatgtttctgttgaagtgccgtgctggagtgtttactgaaaatgtcgagatcaagatcagccggacgagtgacaggatcaccaagcgtgcgcgtgaaacgacgacgaacgcgctggaatccgaatttcctgccgccgctgtcgcgtttaagtgtatcaccaaagaggctgagctgatgtgcgcaatgctgattcatgcggcggaagatcacccctactggtttgtattgtgcaacaaagtccggctgtatgccttaagatttatggcctacaaagagcctgaatatattcttgccgcagccgccatgatgggcatcacgcgagaagccaacttgacgtgtgagttggtgaaggaaaggcacaaggataaaaatggacgcgagttcttcagcatctttatccggactaggaccttggcatctatgtactacatactcaaagaatattctgctgtgggaaagcctactagggacaacactgctgggaaattgataagtgatgaatcggatgtcaagacctgtcctggaaaggatgtagtagaaaatgatatcctggatgactggatcgtgataagtccgaaaaaggcagagacaattgggtgactaggtcaaataataaattaatgccttcaattatgctgatgtaactcctttaatttactgatttgccttgaattattattcgaataacaagaactctaagacggaaaaaaaaaaaaaaaaaaaaaaaaaaa

SEQ ID NO: 22824 - DNA, 233 bp, Oryza sativa
  Clone ID: PAT_MRT4530_27964C.1
atgcgccacgcgtacggacggaaccggcagcaagacggatgtgccagaggtcgtgacggcaacccaggacgcgtggtccaaagttgaggacaagtacgccgttacagtgatatgcgtcgcctcgctggtatggctatggactgacataggcgccatcaaggtcatctacaggctatcacttttgcccggcgtgcttgagctcgttggaatcaggtatacagggagggttacat

SEQ ID NO: 22825 - DNA, 2182 bp, Oryza sativa
  Clone ID: PAT_MRT4530_27965C.1
atgtaaagctgaggagaatttgatggtcttccgaaatttaaagcacctaaaactgaagcttggagttatatgagatgatggatgaatattgcagggtaaagattatgtcacctttgacaattaaatttaatgtcgaatgatttttgcgcatgtatactccattttgttcgattaacttgatatctgaattgtgttttaggagcctatggggaacagcatatacaggttcctgtgcggcctctgctcgccgtcgccggagtaccagccgcacggcgcgcaccccgccgtcgcggcgctcggccgggacatccagcagttcgaggccacctcgcaggttccggatgggctgagccggcatgtagtctcctccaagaaagcgcaggctaattggtacaagaagctgatagtgacatggaagaaagccaggccgacgccgaggacgccggaggaagccgcgcggctcgtcgtcaccacgctgaagaatcatcagaaagcagacgtcgagggattcttggttttctatggccttccaattccaaatgcagcagcaagtacccctgcgcctcacactgcacacgtcccaaaacctcaaggttgcaagtttgagctgcacactctcccggtcgatgcaaaggccgtggccgacggcgacacgatcaccgtgtacattgacacggccgatcctcgggagtccggcaatgttccccgtgaaattcagaaagcggcggcggaacggacaagggcgcgcgcggccagggattatcagaaggccgacgggttgcagaagatgatagctgatgcaggatataggcaagttcctaatgcgagaggcgaggaagtgctcgcaaagaagtacaggatcaggctaagggggattgatgcgccggagagcgccatgccgtacggcaaggaggcaaaagaggcgcttctgaaaatggtgcagggaaagagcctgaaggtctatgtgtatgatgaggaccggtatggtagatgcgtcggagatatctactgcgatggggtgtttgtgcaggagcaaatgttgaagaaaggatgtgcatggcactatactgcctatgaccaacgaccagagctggccaagtgggagaaacaggcgcaatctggcaggaagggcttgtgggcggcgtcaaggccacagaagccatgggaatggaggagggacaagcgcaatggccgacccagctcggttcgcacgccacggacgcgcgacccccgccgcgccggcgccgcctcggcctcgcgacggcttccgctcgcctgcgccggcggcgagcgggaagagcttgccgcctgggcgccgggtggctggctggcctcctcctcctccagggccagatctgcggaccggaacggcgtggtgcaccacgggctcgggtgcttggtggtggcatccgctgctgtcctcgtcggaaatgcctgccacgggctgttcccgcagaagaaggtatcaagccatggatttaattggataatgtcgttgacgcccaaacctcaaggtgttaagtatgagctgcacacgctccccgtggattctaaggctgtaactgacggcgacacgattactgttcacgttgtcacagctgatcacccggggtctttgaatgtgccccaggaagttcagagaacagcggctgaccgtgccgaagcactgatgaccaagaattatcagagggctgatgaattgcagaagatcatacttgatgcagggcaagttactgactcaagaggtggacaggttctcatgaagaaataccggattaggctaagaggcatcgatgcaccagagacctcaatgccttatggcagagaagcaaaggaggagctaacaatgctggtgcagggaaagagactgaagatttctgtgtatggcaatgaccggtacagtcgattagttggagatgtcgattgcaatggggtattcgtgcaggaacacatgctgaagaaagggcttgcatggcactacattgcctatgatcaacgaccggagcttgccagggccctgtttggcacagctccagctccagctccacccctcctggagctggagctcagccaaacagtttcagctccaccaaaactgggagtggagttgggtggagctctctcacaaaatgcccttactctgcaatcttctagcccagaggccagagcaatggttctgtag

SEQ ID NO: 22826 - DNA, 573 bp, Oryza sativa
  Clone ID: PAT_MRT4530_27966C.1
atggggcggcggggcctctcccttcgctcaagcctcggtgggcgggggcaacgccgagatttgagtggagggacgccggccgtcggcactatttccggcaccgacgaggccggtcgtagtagatccggccccttcgcggccaaatcgggcaagggcggcaccggcagtgccacttctggctcgaggaggaggccgtggtggatctggggaggtgagtccaacctcccgcggctagaatgggatgagattgacagcacggtggcaaagccagctcggctagaagcagaaggcgaccccatcgggttgcgctcacggcaggagatgcaacgggtactagctgcgccaacggtatggggcaacaaggattgggggcgaagagagatactttttgagttggcaaaaagtctcttctgcctcctccgtccaggtaaatcccctagttatgttgagaagcttgaagagagggatagcccattctccgaggcgcgagatgacctgggctcccctcggcttaccatcttaagacgtagatctttatatgtctccacactccttttagggaggaatgcgtga

SEQ ID NO: 22827 - DNA, 346 bp, Oryza sativa
  Clone ID: PAT_MRT4530_27967C.1
cttaggttatactagctgccaatggcgtcgtcgggagtgggcggcgtgccggggtcgccgtgcggggcgtgcaagttcctgcggcgcaagtgcgcggcggagtgcgtgttcgcgccctacttctgcgcggaggacggggcggcgcagttcgcggcgatacacaaggtgttcggcgccagcaacgcggcgaactgctgcagcaggtggcgccgggcgaccggagcgaggtcgccgccaccgtcacctacgaggcgcaggccaggctgcgcgaccccgtctacggctgcgtcgcccacatcttcgcgctgcagcagcagctggcgacgctgcaggtgcaggtggcgca

SEQ ID NO: 22828 - DNA, 1029 bp, Oryza sativa
  Clone ID: PAT_MRT4530_27968C.1
atggcaaacgtggcgctgctgtccgccgcctcgccctccacctcctccgccgctccccggctccgccacgtcgctcgccgtcggccgtctcgccgctccgcctgcccccgaagcgcggcctccaggctctccatcatggctgcattgggcgaggatccaatcaggcaatggattctaactgaagggaaggccacgaagatcaccggggtcagttccatcggcggtggctgcattaactctgctcagtgctacaagaccgatgccagttccttctttgtgaagaccaatgggcgtattggtccatctatgtttgaaggggaggctcttggtttgaaggccatgtatgacacaaattcaatccgtgttccattgccatacaaggttgggtcattaccaactggtggttcttttataatcatggagtttattgaattcggttgctctagaggtgaccagtcagctttgggaaggaaactagctgaaatgcataaagctgccaaatctgacaagggctatggtttctatgttgacaatacaattggaagcactccgcaaattaacacttggactgccgactggattgagttttattcaaagcatagattgggcttccaattagagttgataacccaacgatttggagattcggcaatatatgataaaggtcagcgattgatcgagaatatgcatccactttttgaaggcgctgttatggagccatgcttgcttcatggggatctatggagtggaaacataagttctgatactaatggtgaacctgttatattggacccagcttgctactatggccacaacgaagcggagtttggtatgtcatggtgcgctggatttgggggggaattctatagctcctattttgaggtgatgccgaaacagccaggctttgagaagaggagggacctgtatcttctgtaccactatctgaaccactacaatctttttggctccgggtaccgctcatcagctatgtccattatcgatgactacttgaggatgctgaaggcttag

SEQ ID NO: 22829 - DNA, 626 bp, Oryza sativa
  Clone ID: PAT_MRT4530_27969C.1
atggcaaacgtggcgctgctgtccgccgcctcgccctacacctactccgccgctccccggctccgccacgtcgtcgccgtcggccgtctcgccggtccgactgcccccgaagcgcggcctccaggctctccatcaactagtgctggttctggtgaggagatgcgaactccagtattcgagatgaaccggatttgcacgaatttgccagtggctgcattgggcgaggatccaatcaggcaatggattctaactgaagggaaggccacgaagatcaccggggtcagttccatcggcggtggctgcattaactctgctcagtgctacaagaccgatgccagttccttctttgtgaagaccaatgggcgtattggtccatctatgtttgaaggggaggctcttggtttgaaggccatgtatgacacaaattcaatccgtgttccattccatacaaggttagtaaaggttgggtcattaccaactggtggttcttttataatcatggagtttattgaattcggttgctctagaggtgaccagtcagctttgggaaggaaactagctgaaatgcataaagctgccaaatctgacaagggctatggtttctatgttgacaatacaattggaag

SEQ ID NO: 22830 - DNA, 269 bp, Oryza sativa
  Clone ID: PAT_MRT4530_2796C.1
atggcggcgtcctcgactggtattgcccggcgcccgccgctcacgattgtcgcgatcatcacgggatgtgatgtcgagagcggctcccgttgccctgtgtgcgacgtgcttctcggcggccgttcaggtgatcgcggaggtcgccagtgccgcggggtgaaggggttgctcggtaggccgttcctgccaccacgcaagatcgtcgttcagaacgggatcgtaaggtgcctccctcagtattgtgttaagggtactgatgcgctgagccg

SEQ ID NO: 22831 - DNA, 120 bp, Oryza sativa
  Clone ID: PAT_MRT4530_27970C.1
atggctgtgggagacgacggcccaacggtccgcggtggacacaggcggacggcgagcaacggggagctgtcgaagataggaaagaaggcgccgcaggggcactcgttgccgccaacttag

SEQ ID NO: 22832 - DNA, 570 bp, Oryza sativa
  Clone ID: PAT_MRT4530_27971C.1
atggtggacaataaatttgtagctcttagcttcattgtgatgttgggcattgggttagccaatgcttcgagtacttctaatggaaatggcaccggatggggagagggtggtggatctattgacggggccggtggagggtccgggagtggtactggatctagtgtgagtatcgtaaatgagggaggctctgtccacggaagtggtggtggtggtggtggaggcggcaatggtggtggacggtacagtggatctgggcatggttctgggtctggtcgaggctcaagctcaagccaggtcggtccagacccataccgtgggtcttctaatgctggtggtacaggtggcggtgaaggcggtgggcgagcggatggctactatggatctagtggttatgggtctggaagtggcaccggtgttggctctagtgcatctatgaacggtgacttcccggggggtgttttctccaatgctaatgcttttggccgtggaggaggaaacgggtatagtcagaacggtgggagcggtagcggcaaaggcagcggatctgcgtatggcaacggagagccatga

SEQ ID NO: 22833 - DNA, 1112 bp, Oryza sativa
  Clone ID: PAT_MRT4530_27972C.1
tataaattctcaaggtaatttacctattttgagccaagctgtatgcacaattcctctgggtacctgggttccaaaaattggtgatcctaatggccgtccattggctatgttgcggcctaacacatctcttagcgctgccctgaatttgctggttcaagctggtgtgagctcaataccaattgtggatgacaatgactcactgcttgacacatattccagaagtgacatcacagctcttgcaaaagacaaggtgtacacacacattcgcctagatgagatgaccattcatcaggctctgcagcttggacaggatgcaaattcgcccctttggattctttaacgggcaaagatgtcagatgtgtctccggtctgacactttgttgaaagtgatggagcgattagctaatcctggggtgcgccgtgttttcattgtggaagctggtagcaaacgtgtggagggcataatatcactgagtgatattttcaagttcttgctgagctaagtgaaaatgcccgagccatctgtgttttgttctcacaactgccggagttaacaatagcagaaaaaaattgtgaatctccaacatcgatctctctggcttttggatcagacaggtgtcttttcccgataatggccaaccagagtctgtaaagtcttttttttttcccttgccccttcgttaccaaaatgtctggtgatttttatttattggattgttttgctgcttgctcggtttctgagccccccaaggagttagtagctctgttgaaagggtgggatgggcgcttagagacatattttagcatgaatcatcatcacagggaagtaagaattgaaggaaagaggggatgctctgaagcaagaaggatgaattcaatgtgttgtttttgctcaacaaccgtttttttggcgggcagtgttgcaaccatgaaaggagaaattacagtcggctccttgcttgttagacaaaaaaaaaaaagaaaaaaaagaagagaaaaactattggatatctgatgatgtagtgactgagaagcaggagtggagttgtgtaaaacctgtaccacctgatttttatgtctaaaccgcagcttactcaaaaaaaaaaaaaaaa

SEQ ID NO: 22834 - DNA, 1390 bp, Oryza sativa
  Clone ID: PAT_MRT4530_27973C.1
gtcaaagcgacgcgagcgcgagagcgaggaggagagcccgagatctcggcggcggcggcggcggcgatggcgctctccgaccgctcccgcgagtcgctcctgccgagcttcctctactcgacggcgggggcgcggccgtacaccgcgggcggcggcggcgccgccttccgcctccccgccgcggcggccccgggaggtgtaggagggggcgcgccgatcgagatccaggcgcccagggagaagatcgagatgtactcgccggcgttctacgccgcctgcacggccgggggcatcgccagctgcggcctcacccacatggcggtcaccccgctcgacctcgtcaagtgcaacatgcagattgatccagcaaagtacaagagcatcacatctgggtttggaatattggctaaggagcaaggagtcaggggcttcttcaggggctgggttcccactcttcttggctacagtgctcagggcgcctgcaagtttgggttttatgaattctttaagaagtactactcagacattgcaggacctgagtacgctcagaaatataagacgctcatataccttgctggctcagcttctgcggaggtcattgctgatgtggcattgtgccctttcgaagctgtgaaagtccgtgtgcagacacagcctggatttgctcgtgggcttggcgatgggctccccaagttcattaaatccgagggtgccttgggtctttacaaagggattgttcctctttgggggcgtcaaattccttatacaatgatgaagtttgcatcctttgagaccattgttgaacaaatctacaagcatgctgttcctgtcccgaagtcagagtgtagcaaatcattccagttgggtatcagctttgctggtggttacattgccggtgtcttctgtgctattgtttctcacccggcagataatctagtctctttcctgaacaatgccaagggtgctacagtgggtgatgctgttaagaagcttggtctctggggtctattcactcgtggactgcccctacgtattgtcatgatcggtacccttactggagctcaatggggaatttatgatgcattcaaagtcatggttggattgccaactaccggtggtgttacgccagcaccatccacttcagatgctggattgaaagctgtcagtgcctgattttctcattaggacaacttggttatttttggaacttatcgttcttcatggatggaaaatatattggtcacatgagttcaattatatttttgtttaaaatttttgtagaggatgactatgtcatctttggaatgagaggaactcgttaaaacagacaatgatatattttttttgtccaagtgtaagttctaatatttggtataaaataagatttagg

SEQ ID NO: 22835 - DNA, 166 bp, Oryza sativa
  Clone ID: PAT_MRT4530_27974C.1
tcttacgctccaaatccttattcgaatcccgttcacgccgccttcccccagccgaggcacgcgccgggacgcatccgtcgagcagcgaccatgttgtcgttttggggtgcggaggtgatgacctataagccctagacccacacccacatcctgcgccttggatggc

SEQ ID NO: 22836 - DNA, 372 bp, Oryza sativa
  Clone ID: PAT_MRT4530_27975C.1
atggctaagcaatccctagtcctaactctaatcatgttagaaccccaagttgacaaagaaacaagggctgacgtcatcaaggcggggcgcggcgccggcaagcgggccccaccggtcagcggctcggggagggcggtccacggcggatcgggtccacggaccggggaggagcggcgcgccacgcggcggccgaaccgatggcccggcgggagctcgcggccggtgcgcgcgggcctcggcgcaaaccggccccagagaccatggcgcgcgacggggcggcgcacattgcgggaacgggcacagaagggagcccggtgctacggttccgcggcgaataccgtcgtcttccgggcaactggagctctccgatga

SEQ ID NO: 22837 - DNA, 1667 bp, Oryza sativa
  Clone ID: PAT_MRT4530_27976C.1
atggcggtcaccgtggcgcgggacgtcgaggcgggcggcctggacgccagcaccagcggggccgcggacgagaagccctcgtggttcacccctaagagattacttgtgatgttctgcctcatcaacatgctaaactatgttgaccggggtgcaatagcaagtaatggtgtgaatggtagccgccaaagttgtactggtggcacatgcacatcaggttctggaattcaacacaatcctttcaggcttattggtgttggattattagtctggactattgcaacagctggttgtgggtgctcatttgatttctggtcaattactatatgccgcattattgtttctgtgctcaatatacgcttatattcttctgggaaacaatctacatcttcaggcatacaaaaaacagcatggcttgctatgttctacatgtgtatacccactggaatagcggttggctatgtttatggtggtttggttggaaatagtctgcactggcgtgctgctttctggggagagtcgattttgatgcttccttttgttattctgggctttgtaataaagccattagagctcaaaggatttaatcacagtgtgaagacaaaagagtatggtgagatgctcaatccagagcggcaagatgagacaaagcagggtgcgtctattggagttgatggtcttgcagaaacgctaccacacaagttctccatctcaagttttgggaagaaagttctaaccgaaatcaaacactttatgaaagatatgaaagaactgctccaagagaaagtctatgtgatcaatgtcttaggttacatctcttacaactttgtcattggtgcctattcctactggggccctaaggctggtcaggatatctacaatatggcgagtgcagatataatgtttggtggaataacaattgtctgtggaatatttgggactctttcagggggtttcattcttgacaagatagactcaacaatatctaatgctttcaagcttctttctggtgcaacttttcttggagcaatattttgttttggtgccttttgtttcaagagcctttatggattcatacccttcttttcagtaggagagcttttggtctttgcaactcaggccccagtaaactatgtatgccttcattgtgtaaaaccaagtttgcggccattatcaatggctatgtcaactgttgcaatccatatatttggtgatgtgccttcttcacctcttgttgggcttcttcaggacaaaatccataactggagatcgacagctcttaccttgacatctatcctcttcattgcagctatattttggtttattggcatatttgtccgtagcgttgatcgtttcaacgaacagagtgagcatgatgtccctgccgtcgagagatcaaacctcaggccattgctcgatgaaaacgaagaggcacgggcatcttagtaatctgcgcaatcattaaatccgtgtttttctcttgtagattactcttggccggattatgtccatcacgccaggaacatgtgaaatgcaaatttgcatgtgtatcggctgtacctgtaaatatagaagaaagcagaatcttttgctttgtgatttttcttttctttttgtgtacagaccacagatacaagcaacagagtatcagaactacttggtttctggtg

SEQ ID NO: 22838 - DNA, 1666 bp, Oryza sativa
  Clone ID: PAT_MRT4530_27977C.1
agattggcaaaaagcttttgcttgttagcaatatgatcacagattcacagtttacacatgaagaagtctatgggcatgttaggacatcatctctttgatcatgcaacattgcaaaatgggcagtgatcccttacaaaagaggtcccattgccaaataccacgatttacatcgaaaattgcaattgtttggatctcaaagttctgtatatcttctgtctaggatctgcaaaattctctagtaagcttcaccccagcacctacatcattgttctagtatggatcaaagttgtaaatacatctcagtttaacgctatttcacgattcagataggaaacaccggtttcacagtagaagagctctgttgtttaatgacatcctcaattgatggtcctttttcatgtacaaagttgacagattctgacagcctattcagaaggtttactagtgcaatgacctcatttcgctgcagctggagtgattgattcaaatggttctctccatcaacagagaaaagaatcttcaatgcagtaccgagaccaagaacttggagctttccccataatcgacacttctcacatccaacacaatccataattgcactgatatttctaaattgcttctgaatctcctgctttagctcagggccattttcaccttgccagagttttgcttcatcaaatggtaacgggcacgctgatcttaatttggggttgtaaagcaattgcttcactaaagactgtgttttcaagtcctcttcaggattgccggtgttgtactcagcctgctcaaggtaatctgctgccaagttggcagattcatctagaagataatcataagcaatgtgtactgaaattgaggagtgcaaccctgaaattagcttgtacagtgccttcttctcctgacacatttcttcagacggatattttggacagttttctttgtagacagagtcccatattctgcgagcagaatcaccagtatagccagtgtaacgttcagggttgagttgaagattcacataagtcatctcagctgaaatgatgtttttttcagcaacattatcagtctcatcgtcatatgtccatggattgtcggtttcaatccatcctttgaaaaccttggcatcaagggttctatcaacagtagcctgtggttttccttcctgacagatcatactatctggagaaaggccactgtaaggcttcttgaatggctcaggaaactcattctctgggcactcacagacactacaatccctaagccgacacattccatcatcaggccagaaagggcagtcacaccacaatttaaccttgaagtacctgaagaagggcaaagtgacgagctcctgcaggatcgggtgcagcacctcctcgttgatggcgtccaccgtctcgtagtcgcagcagcaatcctccaccatccccgtgtacttcctcgtcccggggcagccgcagtctccgccacgcgaggacgaggaggccgccgggaagctgcgcgagctgacggcgacggcgaggagcgccacgagcagcgcccccacccccgcggccgccgcccaccgaccccgcttccggcgcttgcctcccgccgcagccgccgcggcggcgggggcgggggcaggggcggcgccgttcgccgcgggagcgggctcctgaggaggcat

SEQ ID NO: 22839 - DNA, 475 bp, Oryza sativa
  Clone ID: PAT_MRT4530_27978C.1
ctatgggcatgttaggacatcatctctttgatcatgcaacattgcaaaatgggcagtgatcccttacaaaagaggtcccattgccaaataccacgatttacatcgaaaattgcaattgtttggatctcaaagttctgtatatcttctgtctaggatctgcaaaattctctagtaagcttcaccccagcacctacatcattgttctagtatggatcaaagttgtaaatacatctcagtttaacgcctgcagaaaccatatgttgaagaacgaaagggtatgagtatgtctttttttttaaaaaaatctgcctgaggaaaaaaattaacacttactatttcacgattcagataggaaacaccggtttcacagtagaagagctctgttgtttaatgacatcctcaattgatggtcctttttcatgtacaaagttgacagattctgacagcctattcagaaggtttactagtgcaatga

SEQ ID NO: 22840 - DNA, 527 bp, Oryza sativa
  Clone ID: PAT_MRT4530_27979C.1
cggacgcgtgggtgtgaatcttcaactcaaccctgaacgttacactggctatactggtgattctgctcgcagaatgtgggactctgtctacaaagaaaactgtccaaaatatccgtctgaagaaatgtgtcaggagaagaaggcactgtacaagctaatttcagggttgcactcctcaatttcagtacacattgcttatgattatcttctagatgaatctgccaacttgtggggacataatcttcctttgctgtatgaccgtgttctgaagtaccccgagcgtgtacaaaatttgtacttcacttacctgtttgttcttcgggctgtgacaaaggcagcagattaccttgagcaggctgagtacaacaccggcaatcctgaagaggacttgaaaacacagtctttagtgaagcaattgctttacaaccccaaattaagatcagcgtgcccgttaccatttgatgaagcaaaactctggcaaggtgaaaatggccctgagctaaagcaggagattcagaagcaattta

SEQ ID NO: 22841 - DNA, 877 bp, Oryza sativa
  Clone ID: PAT_MRT4530_2797C.1
gatgtcggtgtcaagcacgtcgcctaaccgcgccgttaaggtaggctggcgggcgcgacaccgtgtactaccgatggagatttcataggccacgaagcagcggttgttttggcgaaatgtcgaagatctgagggtccacaagacgtcggtgtcaagcacgtcgactaaccgcgccattaaggtaggctggcgggcgcgacacagtggactgccgatggagattacataggccacgaagcagcggttgtttcggcgaaacgtcgaatatctgagggtccacaacataagccacggagcagcggttgtttcggcgaaacgtcgaatatcatatgccacgaagcagcggttgtttcggcgaaacgtcgaatatgatgtcggtgtcaagcgcgtcgactaaccgcgccgttaagttaggctggcgggagcgacactgtggaatgcagatggagaattcataggccacgaagcagcggttgtttcggcgaaacgtcgaatatcataagccacgaagcagcggttgtttcggcgaaacgtcgaatatctgagggtccacaacataggccaagaagcaacggttctttcggcgaaacgtcgaatatcataggccatgaagcagcggttgtttcggtgaaacatagaatatctgagggtcgacaacataggccacgaagcagcggttgtttcggcgaaacgtcgaatatcataggccaagaagcaacggttctttcggcgaaacgtcgaatatctgaaggtccacaacataggccacgaagcagcggttgtttcggcgaaacgtcgaatatcataggccatgaagcagcggttgtttcggtgaaacgtagaatatccctccttgtatccccttgcacgtctgcat

SEQ ID NO: 22842 - DNA, 459 bp, Oryza sativa
  unsure (1)..(459): unsure at all n locations
  Clone ID: PAT_MRT4530_27980C.1
gtgtttgggggttttttttttttttttttttttttttttttttttttttttgntttcaaaacatttcattattcattatttgttttgatcactatctcgttgcatgcaacacaacaacggggtgatcctactagctattatgcaagccagctaaggctagtactggcccgcggcaaaaattctttacttctggggctcaacccggcacattgacggcagcttcgccccgtactgccttgccctggtcaacctcacccgggtcatccccggcttcttctgcttctcgccgtaataacccttcttcgacgaccccttgccgtaatacccctgcttcgacgacaaccccttgccgccgtagtactccgacaacgacaacgaccaaccttgctccaagggcattggcatgctctccttgtagctcctcaccatccggcggatggcggcgcaacggcactcgcg

SEQ ID NO: 22843 - DNA, 2141 bp, Oryza sativa
  unsure (1)..(2141): unsure at all n locations
  Clone ID: PAT_MRT4530_27981C.1
tcacttccagttctgagctctcttgcgcgccagaaacatcaccatgcgcgggaagaaggtaggcctctgcttcgcgcccgcctccacctccgccgccgccatctcagtcctcggcatataccctcctctcgggctcagtatgtgcgggttcccgcgcccctcgccgccgtcgaacacggagatctccgcgagccccgtgcgcggcgacgccatgccctcgccggtcaaccgccgctggtgctcgtgctcggcgcgccattgcctgagctcccgctccgccgccagcttactgaactccgcttcctcgacctccatggtcgccgcctcgagcgcctgcctcctctgctcgacctgcttcgccagctgcgccatcttctccaggctccgcacctccgcgtccttggcttccttgatcagcttcaccgcctccgtcacccgcttcccggcgatctcctccgtctcccgtgctcgccggctcagctcgtcgtactcttccatcgtcaatgtcacgctgccttctcccacgcccgtttcccgccgcctccttgcgttttcatcttcctgctgcagcgcggccgccgaggcagcggccatctccgccgacgtcgttgcggcgagtgtctcccgcttcgccgcttccaggcgcgcctccatggcgtcgacggcggccttggcaaggatggcctcctgcctggccttgctgacctcctcctgcgccgactgggcattcgccttggcctgcgccgcctctcgccgcgcctcctcgagcagtgcacccaacttggtctccacgctgcgctcctttgctctcgcctcctgcgccgccgtgagcgccgcggttaaccggctcagctcctcctcgagggacgggatggacgtcgccgagactccatctctccgccgcagagcggcgagctccgccttctgcttctccaggtcagcgctcagcgacgcggcggcgacgcgcaggcacttggcctcgtccttggccttatccacggtcgccttcacgtcctcgagctccttcttggtcttgtccagcttcgcccagaagctcgccgtcgccgccgctgcctcttcgccgattgttccttcgacggcgtgggcgaacagctcggctcttagggccgccagctgttcggaagccgcctccaccttgtactcgagatcagccgccgcgattagcgagttcctcagcttcttcacctcctgctcggatacctccagcaccagctgccattgatccttgtcctgctccaacacctgagccaatctcatcctcttctcctccgcttcgtcatgcgcgtggtgcgaagcgtccagctccttcttcagcgcgacgagctcggcggtgagctcctcgacgaccttgacggcctcctgcgacgaggagaccatcctccgcgctctcgccgcagcggcgtccgccttggcggcagcgaccggctgctccatccgcaggatctccagctccgccgtcaccgactgcaagtcggcgaccgcgttggcgtggcggtccctggcgacggcgagctccgccttcgccgcggtgctctcgctgacgccctgctgcgtctcccggaggcgcagctcggcgatctccgcgtcctggcgcgctcgcgcctcctcggcctgcgccttctccaagcctagcgtcagctcatcgatcacgccattggcgccgcctagctccttcaccgcctgtgccctcccggcttccgcttcttgtgatctcttcaggcactcgctcaccttttcctgcaccttgtcaagctcatcctgcgcttgcttgcgcctttctctcaaatcaagacttcctccaaacttgttggcggcgcccttgacggaatcgatgggcgccgtggtgtcgatgcgcgtctgaacggagcggttggccatctgatccgacgctttgctgctgctgtcattggaggctgatgcatggctccgatcagcttgcagttggcattgatctccctctgattcttggtgagaggcggatgaaccgagaggtgccggagcttcgtccatcccacagcataggtgtaacacaaaactgaagatatatctcatctgnatcctccccgtcgcgttccttgccgggctgagagacgtgcggnncgcgtgggtcgtccccgggg

SEQ ID NO: 22844 - DNA, 518 bp, Oryza sativa
  Clone ID: PAT_MRT4530_27982C.1
tttgttttttttttttttttgttttttttttttttttttttttttttttttttttttttttttttaaaaagaaaacaaattcttcaaggcgaactggtagaacccaaagggggctggccccaaagggtccagaattccggggggggcttcgataaacataaataataattggggggggggtctgtttggggttgccccccccgtagggggggactagaacccacccgggtcgggcatggttcctgggggctgaactatgttggcccccctcaaatttgggacatgcttttccaagggctttttgggatcctgccggcccacatgggcaatcgctggtttttaaggggggaggtaatcctcctccggcactggcttgttatatttgggggctgggttcaacatttcctgaacaggctgctcattggttttcgaatgggggtaaaaactcttaaaaatcaatccatcggcccattttttttggggaaggtaagcaacattttctcctccagttcattttt

SEQ ID NO: 22845 - DNA, 695 bp, Oryza sativa
  Clone ID: PAT_MRT4530_27983C.1
ctagctccagttagagttggacactcatcaaaagtgtttggctacatttcagctctagatctgcaaaaaaaaaagaaaataaaataaaaacaaaaatcccagcagccggcgcgcccccatcccctgcgcgcgccgcccacctccccccgctctccggcggccacccccatcccctgcgcgcgctggcctccaccggccgcgcgccgcccacctcccaccgctcttcgccggccgcccgccaccccctgccctccgccggccgcgcgccgccctccgccagccgtccgccggccgcacgccgcccttcgcccgccgagctttgtcgcctcggtagtgcacctcccggggggcgcacgcgccgtcccccatcggttgcgcgtcgtcgccgcgcgccgcccatctttctcccgcgtgaagacggagaaggagagagaacgggaggaggaggttgataggggtagttcagtggtattttcatgtaaatacactaaaattttaaagggtagtaggtcttttggagtggagtggagctgtggagcagcaaaaatctagctccacacccttgtagtataaatttgtggagtagctctgccaactccgctctaaaaaatgaaggatctgaaccgtttggcacagctccggctctaggtaagttggagttgggagctggagctgtgccaaacggggcctaagtt

SEQ ID NO: 22846 - DNA, 202 bp, Oryza sativa
  Clone ID: PAT_MRT4530_27984C.1
atgtcctcacgtcgcctctgtacccggcggagtgggggtgggtatgacccgtcacatccgagcgtcacacgaggaagggctgtgtcaggcggggggcggcgctgggttccactcgagaaccggttgttgcttagcttccgggagaaggcacgggttgaagcccagtaaaagtggagtgggatccccctcctatggagggtag

SEQ ID NO: 22847 - DNA, 449 bp, Oryza sativa
  Clone ID: PAT_MRT4530_27985C.1
catacaaggaggagcatatcaatattccataattgttaatgaaaatgtctaatcgagagataaacatcagcttaatctaaaaagaatcagtcagttccatttgtgagatttggaagctcagacagccaagagtttcttcaactagaacaaagtagcaataatcagaaactcatccaaagggtacctttattattattttttgtaatggggcgacgaaatggataacgacggctacctaggcaggagaccagctctggggatacattttgtgagagatcaaaatcctgaaaatcttctcaatcctgatattcaatctgaagcttcaccatgacaaatttcttgatggatctgcattccctaaaaaaaacccttttaatacttgatggaattgcagaccatgcactgaaatacagggcgcgcaaaacttacatatggttacaggggtaact

SEQ ID NO: 22848 - DNA, 210 bp, Oryza sativa
  Clone ID: PAT_MRT4530_27986C.1
atgtcggagaatgaactcctccaccagggaaccgtgaggcccctttttgtgagttcggccgggggcagcggacttctgggctcctattacaccgaaaaacgggagccttgctttgaccagagcgggaagaccgactccggctgggataagaggatgagaacctctcaccatcattatttgatgggatatgtcgggctgcacgtcgcctga

SEQ ID NO: 22849 - DNA, 270 bp, Oryza sativa
  Clone ID: PAT_MRT4530_27987C.1
atgtcgaacacgtaccgaggtggcggaaagaccggttgctcggcaggaactactcgcggacgtcaaaggcagaggttctggagacctgctctcccgatcaccggtgcacgccggcgagcgggatggagtagtctacgagcgacggcgcggatagaaacaaagaaccaactccaagttgaaagtgtagagaaagagcaaagcaaagaggctggcagagagccatatctcatgctcctccaagagcctggcgatagaggccagctggtctag

SEQ ID NO: 22850 - DNA, 572 bp, Oryza sativa
  Clone ID: PAT_MRT4530_27988C.1
cgggctgcaggtgggcttatacgtttttgggaaaatgaaggtgagatcttctgcatttgttgtttggtgctcttttgggaaattctgatcttgtgccttttatgtacacgcaagaagcatgccttgtatgtacccatgggatgacttcttcaagaaagaatatgatactagctagaactaggtgtatttttttttaaagtagaaacactaacgtctcaaccttgagttgaagaggactcaaaccatggtggtggggtattagtgtattactcccaccagctagttgaacacaggtaaccatgtgtttgtatttctatgaaacttgtctacaatggagtctgcattagctgtagacagatcaagacagtgaagacttgaggtagaacaatgctagctggaggggactgattaggggataagggcagcttaaaattctgcctagggaacagaatagagctggactttgggctaggggcttacttgttcatctttgtttaattaaaaaagatacataattctttgtttaattaaaaaagatacacaattcttttttacatttactggtatctgtt

SEQ ID NO: 22851 - DNA, 186 bp, Oryza sativa
  Clone ID: PAT_MRT4530_27989C.1
atgccaccgtccagcaccgtggccggaggcaacatggacgggcaagggctagcaggattgatcatggtcatgcattggcctcgtgaggacatggaactggaagagacgggggcattggaggggccggagcctctatctgcattgagattcgtactggatcagcctcgcagccgacgcgggatgtga

SEQ ID NO: 22852 - DNA, 485 bp, Oryza sativa
  unsure (1)..(485): unsure at all n locations
  Clone ID: PAT_MRT4530_2798C.1
ccggaanttccacgggtcgaacccaacgcgtcncnngcggacgnnngtgggcggaccgccgtgcggcgctttcacagcnnatcgtgtattattactttcaaggcacgnnagcccaggttcaaggttgtcaacgaagcaatggataagaccgtgtgttcaacaggagtagggcttcgtcgtgtgaccagctttacttattggtaccacatacactttcatgtagttcgtaaacgagaggcaccaaacgagaagtgcatgtgctgtaccatnntgcattcagagaacataaccctaacttctataggtatagccacatgtgcaaggaaacgagttccattcttaccgtgcttctcccaacttgatggttctagcagaatgcattatcgctatctcaacgagaagaaggctcagaggctcaagcataactagagggagatgangttcgcgtgccattcacgttcccctgnncaatacaagaagctacc

SEQ ID NO: 22853 - DNA, 644 bp, Oryza sativa
  unsure (1)..(644): unsure at all n locations
  Clone ID: PAT_MRT4530_27990C.1
cgctgctcatcaccatctccttcaccttctctttccccacactcacgccgccgcctaccacgccgtcgtcgtccttctccgggaacggccgggaactgcacctccattcccaccacctcagccgagcccctcccctctcgacctctcgcggctctctcccaacgctctctctctctctctctctcgctgtctctctccctcccttttctcaagccgtctcatggcgcctgcccacggtcggcggctggccagcaaaggcggcagcggcaaccacgccctcccctccgccagatccggcgggagggcaggcgcagtgagagggcctcctccgacgtcgaccgcaagacggcctccgcgccgctatctcatcttcccgttctctccccaccccgagcgatccatccattccccctcccctcaagcgattccccggttccccttcgcaatccgcactcaactcccttccaagatccgattccccaaccactgctcagtcgcctaaaccctagcgccgccatggattcggctacgctctcgcccaccaccaccagcacgcagcagctagatctgggactagatctgggactgggaggatgaggggtgggtgggtgtggctgcttctgcggtcatcgacgccgnccccg

SEQ ID NO: 22854 - DNA, 480 bp, Oryza sativa
  Clone ID: PAT_MRT4530_27991C.1
gtccgcctcctcgcccgcccgcccccccccttcgcctcgcccccccccccccccctcgctcccccgccgcccccccccctcccccccgccgcccccggccccgccctcccccccgcccccctccgcccctcgcccgcacgcccagcccgatccgatcgatccactgacggcctcccgcacgtaccgtacggcaacccaaccacaagacacgtacgctggctgaagttgtctcgccttcgtctcgtaaattaaccttgtttgtagccacgggttgctaggctgcctagctagctgttgttcttgcagcgttaattaattactctactcatttgcttagcttctgatcctgaaaaaagcttgcatgtagttgtagcccagcgaccgagtcacggtcacggccagttgactcggagcgagaagatttgtaaatctgggtcgagggtttgaaatacttttgaagaaaaaaaaaaaaaaaaaaaa

SEQ ID NO: 22855 - DNA, 796 bp, Oryza sativa
  Clone ID: PAT_MRT4530_27992C.1
agtaattttagattggagatctgtcttgctgttctcaagcttctcaataagagtctcgtcatcactgcaatagtcaatctcttctgctgacaggtcttttcttgctgaagtacggccccataaggtctttttgctcttatttcttgagctgcttgatttctccataaattttgctcttgctgatgatgagcgaacatttaacttttctatttggtctgtggatccatttgattcgtataattcttgttttcgattggatgtatcattgctttcaatttggcaggtgtcttcccttaccgcaccatgtcctgttcttgctgctttcttaggaggttgtaaaccctgatcgttgccattagatgctgtgccagagttattgcttttaaccttgtcatcagagacactggtcttaatgttgttgtcacattcactgccaccagatgagtgctcagtatcatcatccatgtcttcttcaatgttatcttcaccagaatcataagagtcatcctcttcagggccatcgttgtctgtggaatattccttgtcaaaatcaccgtcttcggactcagtatatgcatctgaagagtaggaaccgtcttccaagtcatcaaatatctgatcgtattcttcgagcataatgatgacgattgcttgagcatggttggcagcagctgcagcttgaagcagcgagaagaagaggtcggagaaggagtggtccatgcaagccgccaaagcagattgagacatcctattcacagctttgtgtgattcaacaatctgcatcatcttaagagtc

SEQ ID NO: 22856 - DNA, 1600 bp, Oryza sativa
  Clone ID: PAT_MRT4530_27993C.1
attgttattgaaatatcatgagggttggttacttgatttgataatattcaaaatgaaaaagattaagaatgcacctcccagaggaaatgaaccgattgttacactaggtggaattgacttgaataactccggaagtgttgtggtcaaagaagacaagaaacttttaacagtgttatttcctgatggccgcgatgggcgaactttcactctcaaggcagaaactacagaagaactcaatgaatggagaagtgcactagagaatgctctggcacaggcacctgttgtagcaaatactgttggccaaaatccaattttcagcactgacatagcagagcctgctgaagctccagctgaacagtcggacaataaatctatcattggcagacctgcagagtttgcccttgtagatgctgatggtagtccagctttcctggagaaggccttaaagttcattgaagattatggtgtcaaggtggaaggaatcctacgtcagtctgctgatgttgaagaagtcaaacgaagagttcgggactatgaaaaggggaaaaatgagttctccccagaagaggatgcacatgttattggtgactgcatcaaggacttggaagacggttcctactcttcagatgcatatactgagtccgaagacggtgattttgacaaggaatattccacagacaacgatggccctgaagaggatgactcttatgattctggtgaagataacattgaagaagacatggatgatgatactgagcactcatctggtggcagtgaatgtgacaacaacattaagaccagtgtctctgatgacaaggttaaaagcaataactctggcacagcatctaatggcaacgatcagggtttacaacctcctaagaaagcagcaagaacaggacatggtgcggcaagaaaagacctgtcagcagaggagattgactattgcagtgatgacgagactcttattgagaagcttgagaacagcaagacagatctccaatctaaaattactaaggaggcgaaagaaaattcaatcctacaagcaagtctcgaaagaaggaaagtagaattgcataaacgccgattagcactcgaaaaagaagtggaaaatttgcgagatcagctacagaaggagagaaatttgagggtctcattggagtcagggctgatgaatttgcgaagagggcaggcgtccttcccatcaacaattgacaacaagactaaggctgatcttgaggaagttgctactgctgaagctgatattttgaacttgaaacaaaagggttctgatctccgtggacaactcaacaaccaggctcaaagaatgttgatttctaagggtgagattgtcaaggatggccaagatccattggcatcaaagtggaaccttgcacagaaacaatactcaaataatccactattaggcaggcttggatctagaacagaggattccggggcaccatctgcattagccaagctgacaaatcgactcaatttcttgaaagaaagaagggcgattcttgcaagtgagatgcagaacttagatttggctcgcccgccagggcctccagctccagctccgaagagaaactccacatga

SEQ ID NO: 22857 - DNA, 499 bp, Oryza sativa
  unsure (1)..(499): unsure at all n locations
  Clone ID: PAT_MRT4530_27994C.1
taaaaaaaatgaaaggaatcctgagaaaattgaggaaagtgaagcaaagcgagacggagtcgtgggaaatatcgactccgcccgcggtggtcgtcgcgtcgccgtctcatcacatctcccccccctcctcggtcgtcagcagcggcagcatccgcggaggaagcaaccgggagcgatggtctgagagagaggaagcagaagggttattaagaaggaggaggacgagagcgccggtgagaggtcatacacgtctgagcagctggaggttgtgcgccaggtcaagaagcacaccagggactactaccagatcctcggcctcgagaaggactgcactgtggaggacgtgcgcaaggcctaccgcaagctctgcctcaaggtgcatgccgacaagaacaaggccctccggtgccgaggatgcgtttaaggccgtctacaaggccttgcagtgccttanctatgccgagagccgcaagcgctatgaccttggtgnctcggacga

SEQ ID NO: 22858 - DNA, 386 bp, Oryza sativa
  unsure (1)..(386): unsure at all n locations
  Clone ID: PAT_MRT4530_27995C.1
gtccggattcccgggtcgacccacgcgtccggtctctgatgacaaggttaaaagcaataactctggcacagcatctaatggcaacgatcagggtttacaacctcctaagaaagcagcaagaacaggacatggtgcggtaagggaagacacctgccaaattgaaagcaatgatccatccaatcgaaaacaagaattatacgaatcaaatggatccacagaccagatagaaaagttaaatgttcgctcatcatcagcaagagcaaaatttatggagaaatcaagcagctcaagaaataagagcaaaaagaccttatggggccgtacttcagtatgaaaagacctgttaggagatgagattgagtattgtggngatgtggatattctta

SEQ ID NO: 22859 - DNA, 240 bp, Oryza sativa
  Clone ID: PAT_MRT4530_27996C.1
gcttaacatccaaatttggccatttgtccattccctcttcaaaagtataaaccatttttgggtcctcaaaatttttcagaagaacatactacgaactcaacacgagcaatacaaaacttttacaaattgatctttttgctgcccccctatgcacaaatttttagaaatcgttgacgcctttttttattagttgatgcccgactgcttgacctcagggcccttggccttgatggtgaaggg

SEQ ID NO: 22860 - DNA, 1897 bp, Oryza sativa
  Clone ID: PAT_MRT4530_27997C.1
tttttttttcccgggcttttttttttttgatgatctagttataaagttgcagacccatttttttcattgtcaactatgatgtctgttaagtcaggtattctccgaaaacttgagataaaaacgacatagatatgcttcgtatacatacacatgattgcatattgatcaatcccctatggaacttgatgaattacatatccatttaagtagctaccgtttgaggcgcctcaacactatcaggaaagtatcaaggcagagtgtgtagtcatcgaaggcacttattccacaaaatttaccacgagtcaaaactaatttgtcccctccaatttgaagcctatcaaaggagcaagcgttggaaacctttacaccatggccaaagttcttgtgtgcctagctcctctggacatattactgtgctgttgcctcaaatttccggagcatgtcgcagtgcggcgtctcgtaggaaagcccccagtggcgacgctgcacctcaaccctacaattctgtgagagtattgagaagtaatcccgctcaacatgccgttcgagtgttgcacgctcagtgctctggtgtggatactgctcctcaaagttaggcaacttgacatagtatgtgactccacgtgtggtttggaatttgtgctcataagggtaagagcgggacagcgagtagaccggttcagaagatggcaggaagttgagcaacagcagcaatagaacaggcaacagctgaataagcatccggagagtggagccaccggaattttgcgccccatggccatggtgcatgccgccagtcctgaaatgaaacgtcccaaactgcccaaactgtctggtggtggcaggcgccatcccgccaaagaagaagtttctgaatatctcatccggatcaaattcatcctcataaaacccattatacgcacgggcagtggaggcagccctcctgttgtaagtcaccggctcgtccgagccaacaaggtcatagcgcttgcggctctcggcatcgctgaggcactggaaggccttggagacggccttgaacgcatcctcggcaccgggggccttgttcttgtcgggatgcaccttgagggagagcttgcggtaggccttgcgcacgtcctccacagtgcagtccttctcgaggccgaggatctggtagtagtccctggtgtgcttcttgacctggcgcacaacctccagctgctcagacgtgtatgacctctcaccggcgctctcgtcctcctccttcttcttacccttctgcttcctctctctcagaccatcgctcccggttgcttcctccgcggatgctgccgctgctgacgaccgaggtggcggcggcggcggggcctgtggggacgacgacgaggcggaggacgagggcgggtcgtcctggttgaggagaggatcgagcaggtggtcgatggggagggaggggtcgaggcgcttggccttggagaggaacttgacggcgcgggcgctgtcgccggcgtccgccgcggccttcccgatgcggaggcacttgaccgcgtcgtccttgttgccctccatggcgcctccccccgcgcagccgccgcagatctggccgcgcgacggcgagtcaccccctcctcctcctcctccgtgcgatggaccccgatcggatcggctccgcccccaaatccaatctcgccggagttggagcggagaccggatcggcgtcggcgtcggcggcggcggcgagtcgccgtgggaggggaggaagaagagaggaggggggggagatgtgatgagacggcgacgcgacgaccaccgcgggcggagtcgatatttcccacgactccgtctcgctttgcttcactttcctcaattttctcaggattccttttttttttttttagttttccctctgtttgtt

SEQ ID NO: 22861 - DNA, 478 bp, Oryza sativa
  Clone ID: PAT_MRT4530_27998C.1
attgttattgaaatatcatgagggttggttacttgatttgataatattcaaaatgaaaaagattaagaatgcacctcccagaggaaatgaaccgattgttacactaggtggaattgacttgaataactccggaagtgttgtggtcaaagaagacaagaaacttttaacagtgttatttcctgatggccgcgatgggcgaactttcactctcaaggcaaatcctatcgtttccattgcagcggacaataaatctatcattggcagacctgcagagtttgcccttgtagatgctgatggtagtccagctttcctggagaaggccttaaagttcattgaagattatggtgtcaaggtggaaggaatcctacgtcagtctgctgatgttgaagaagtcaaacgaagagttcgggactatgaaaaggggaaaaatgagttctccccagaagaggatgcacatgttattggtgactgcatcaag

SEQ ID NO: 22862 - DNA, 3628 bp, Oryza sativa
  Clone ID: PAT_MRT4530_27999C.1
ggagagactagtctcgagtttttttttttttttttttttttacgccaaaaaggataatgatatacagcaggtaattgcttctgtacagcaggaagatatgatgaaaccctcaagttaatgggcgtcgaatgcagcaggtaattgcatttgcaatagcactgtggtttaactattttctacatgaaatggtgcaacccggataaatcaatgtcgctgcaaaattacttatgaaacatcgtggtaaaaacaagacaacctgataaatttacagattacgtttacctagaactatggatatttgtccaatccacgatttatgtaaacaccaccagcatcctcttattttcttgcatgatgacgcatctcggactgggtaacctccggtaaggttacaatattgcaccacccccatcttccagaagcaggatgtgaaatagcttgtgtagcgtccatcatatatatgtgcatcgctcacatttgacacttgacagtacaaatatccgtagcctgagaatgatgccatgttaaaattctaacttctcatgtggagtctttctttggtgctggagctgtaggccctggtgggcgagccaaatttaagttttgcatctcacttgcaagaatcgccctcctttctttcaaaaaattgagccggtttgtcagcttggctaatgcaaatggcactgccccagattcctctgttctagtgctcgaataggcatttgatccaagcctgcctaacagtggattgtttgagtattgtttctgtgcaaggttccactttgatgtaaatgatccatcttggccatccttcataatcccacccttagaagataagatcctttgagccctttggctgatggtacttgattgttcattggatgcaatactcttttgatgcttgtggagagttggcttgtctatggaagaagatgaatgttgtgtggtttgcttccttgattgctcaatatctgccatgtctgtagccgatgccatgtcagacatagaattgggcccaacatttgatggtgaagtattctgttcatcttcgaaaagcttgtctgtacttaggagtcgtttgttgcaagagtcacataatgaggtggagctcatctggacattgttgttgagttgtccacggagatcagaaaccttttgcttcaagttcaaaatatcagcttcagcagtagcaacttcctcaagatcagccttagtcttgctgtcaattgttgatgggaaggacacctgccctctacgcaaattcatcagccctgactccaatgaggccctcaaatttctctccttctgtagctgatctcgcaaattttccacttctttttcaagtgctaagcggcgttcatgcaattcttctttcctccttccaagacttgcctggaggattgaattttctttcacctcctttgtaattttagattggagatccgtcttgttgttctcaagcttctcaataagagtctcatcatcactgcaaaagtcagtctcatctgccgacaggtctcttcttgctgaagcacggcccaataaggtctttttgctcttatttcttgagcttgatttctccataaattttgctcttgatgatgatgcgcgaacatttgacttttctatttgatctgtggatccatttgattcgtgtaatttttttcgatgggatggatcattgctctccatttgggaagtattctccactggtggaacagaagaaatttgattagtgtcttcccttagcacaccatgttctgttcttgctgctttcttaggaggttgaaaacccttatcattaccattagatgccttgccagagttattccttttaaccttgtcatcacattcactgccaccagaggagtactcagtatcatcttccatgtcttcttcaatgttatcttcaccagaatcataagagccatccacatcattgtccgtagaatattccttgtcaacatcgccatcttctgaatcagtatatgcatctgaagagcaggaaccgtcttccaagtcatcaaatatctcgtcgtattcctcgagcataatgatgacaattgcttgagcatggttggcagcagctgcagcttgaagcagctggaatgaaccatccccagccatactaaagtcactatcaatttcacattcaccgagaagaagaggtcggagaaggagtggtgccatgcaagccgccaaagccgatggagacatcctattcacagctttgtgtgatccaacaatctgcatcatcttaagaatcctctgcaatagttgctggtttggttccggaaaaacttcataaatcactttactcatagcatcaagcctttttgttttgtcggttcctgtgcaatcaaacatctttatccgtttgtaattcttgatacagtcaccaataacatgtgcatcctcttctggggagaactcatttttccccttttcatagtcttggactctgcgtttgacttcttcaacatcagcagactgacggaggattccttccaccttgacaccataatcttcaatgaacttcaaggccttctccaggaaagatggactaccatcagcatctacaagggcaaactctgcaggtctaccaataacagatttgtcgtccggctgttcagctggagcttcagcaggctctgctatgtcagtgctgaaaattggattttggccaacagcatttgctacagcaggtgcttgtgccagagcattctctaatgcacttttccattcattgagctcttctgtagtttccgccttcagagtgaaggttcggccgtcacggctatcaggaaataacaccgttaaaagtttcctgtcttctttgaccacaacacttccggtgttattcaagtcaattccacctagtgtaacaaccggttcatttcctctgacaggtgcattgaaattattgtaatcatgtttatcctcttcaacatggctgcactgacagccaatagccttagtgtttgcattgtcacttttcatgtccaaatagtatgcaaaagaataggtattaggatcacttctgaagaacactaatgatgcccttgtaagaataaaccagcgctttttccatgttgtccaaccaattcctttagatgagagcagtagatgcccactcttaagaacctggcaattaggacaactagttggcgaactgtcaccagtttcagatgtgtttgggtctccttccccacaccggcagatcttgtactgacctgcattctcagcagtctgtgaagatgatacttgctgataaggaatcctgaactccgaagctgacattgtcctctagatggctgacttatgaacgcaccaggatgttttttttttttccgccaatgagttgatttttctctagagactgataaacacaagaaattgaagcatgcaaacttatttattagcccctcatgcagtagcttcaaatctgtcgagttggcttccacatccaacctaagcatcagcctgcgaaccaccacggacgcgatcaggaaccctctcgtgggagcacgcgcgacgccatcgatccctcccaccgcctcctcctcctcctcctcctcctcctggttctccccttctcttccgctcctctctctctctctctctccct

SEQ ID NO: 22863 - DNA, 697 bp, Oryza sativa
  unsure (1)..(697): unsure at all n locations
  Clone ID: PAT_MRT4530_2799C.1
cagtgaattgatttaggtgacactatagaagagctatgacgtcgcatgcacgcgtacgtaagcttgtgatcctctagagctggcgcctccaagctgggcctcgcccacaccaccgccagcctcaaggacgccgccggccaatgtccacctcgccggcttccccgcctccgccgccgccgctggccaatggacttctgccaactgaccctgtcctgactgtggctgctgttccttgcacacctcctggcaccactgatgcctggcccaatggtgctgtgcctgctcactgcatgctgcaaccttggctgtgctgtcctgtccatgaacatcctgctgcctgtgtacctgcctcacctgatgtgctgtgcactgctgcactgtgttgcatctgttgctccctgctctttcccactgttcccactggcctcctcttgctgtgcctcctctgcctccctgtgctgtcctgtggctgctgtcctgttgcactgctccctggctggctggtggctgcttcctctgtgctgtcccaccctttccttgtgtgcctngaactattgcacgcctgtgcatgccctgtgctgctgacctgtatggtacacctgtgctgtgttgccttgaactgaatccacaacccaaagaatcaatccaatctgacactgtggcaaaccaacccatctggaaatggcctgtgnaaggt

SEQ ID NO: 22864 - DNA, 610 bp, Oryza sativa
  Clone ID: PAT_MRT4530_279C.1
tctcatccaggccttgatctcttcccaggtctcatgccataccccagccaatcctaaggctcaagagagaagaagccttccccaagaccacacaactgaaaaactgcccatgccagacatcaaggagacagactaattctcctttctttgcccctgccccctaatttatcttgaaactttccatctctttctttccatttggccatcataagtcaggccacgcgatcatttcttgcctagcccactggaacagattcccttatttcagttctgctcccctcaaactatctcatgaaatgaactttctaaagtgtaatcatcactcctttaaaagacttccttggtttctcaactatacgtggagttcaaactcccttgcctgctctaaagaccataggtgatcccacctgcctcctccccctttcctatcccatcaccctccccaccaccacctcttctctttggactccatgtttctgattttcctgcagtttttcaaacatactaagacatttctgagttagagtcttcacaagtgctctggtactctcatccagtcctcacctggctggtttcttctttgtctttgagatttaaatgtcatttcctc

SEQ ID NO: 22865 - DNA, 518 bp, Oryza sativa
  Clone ID: PAT_MRT4530_27C.1
cacttagccccccacggctttaccctttatgcttccggctcgtatttgtgtggaattgtgagcgggataaacaatgttgcaccaccacggaaaccagctatggacccactggatttacccccacagctgtctaatgtcgacctccactatagggaaagctgggtacgccctcgcacggtgaccggtgccggaattcccgggtgcggaccccaccgcgtgccgaagatggtgtccatgttggaagaaccaatgtggagggattgcactgtgagacccctgtgtgtgagtgttgtgggacgtgagaaattgtggaattgcattgttggtgtcgccagtgcccagtggtgaatgaaaaatgtcgccatggaaattatgagatggctgggttgttcgatggactgctccaaggtgttgttggtgatcgagaaataagttgaatgggattaatgggtatggaaattgaaattttgtttggtcatttgaggttgttcaaagttcaaaaaaaaaaaaaaaaaaaa

SEQ ID NO: 22866 - DNA, 396 bp, Oryza sativa
  Clone ID: PAT_MRT4530_28000C.1
acattcggtagagagctcgtggatccgtgatctgaaactcagagctgggatggatttgcaagttcactactaccagatggaaatgggttcaaaaccagcacagtgagacttggagcagatgttattgtattcagctgcacacaagataataggagattgacacggagtattggtctactctcttatacattccttacaaaaactggctgcaatgacatattagtaccagtggctgattatgaatttgatgcatcatctcatactctcaagaaaataatggaccgtggtgagaaacatttttcttccaatttgtccactcttttgaagtggattcctgcttgttatgaaaccgagctcccgaaggagtcgaatttgtaggaccgtgatcgtgaggat

SEQ ID NO: 22867 - DNA, 1300 bp, Oryza sativa
  Clone ID: PAT_MRT4530_28001C.1
gtgggccaactgggagttccacgtgggcttcgacatgcgggccggcacggtcatctcgctggcctccgtccacgacgccgacgccgacgccggcggcgcgcggcggcggcggcaggtgctctaccgcggcttcgtgtcggagatcttcgtcccgtacatggacccggtcgaggagtggtactaccgcacgttcctcgacgccggcgagtacggcctcggcctctgggccttcccgctccagcccggcggcgactgccccgccaacgccgcctacctcgacggccactactccggccaggacggccgccccgtcgaggccaggaacatgatctgcgtcttcgagcgctactccggcgacgtcgcgtggcgccacaccgaggccggcttccccaaccagctgatcacggaggtgcgccccgacgtgagcttggtggcgaggatggtggtgtccgccggcaactacgactacatcttggactgggagttcaagacgagcggctccatcaagctcgtggtgtctctcaccggtctcctcgaagtgaaggcgacggcgtacgcgcacgccgacgaggtggcgcaggacgcgcacggcacgctggtggcggagaacaccatcgccgtgtaccacgaccactacgtgacctaccacctcgacctcgacgtcgacggcaccaacaactccttcgtcaagaacatcgtcaccgccgtcgtgcgcgacgccgacgccgacgcggcggcagacacgccgaggcggagctactggacggtgcggcgggaggtggcggagagggaggcggacgggcaggtggacctcggcggcggcgccccggccgacctggtgttcgtcaacccggggaagaagacgaggatggggaacgaggtcgggtaccgcgtcgtccccggcggcgcgatggcggcgtcggtgctggccgacgacgacttcccgcagaggcgcgccgcctactgcaagaagcaggtgcgggtgacgccgtacagcaggtcggagaagtgggcgtcggggctgtacgccgaccagagcaccggcggcgacggcctcgctgcgtggagcgagcgggacagggcgatccgcggcgaggacatcgtgctgtggtacacggtggggctgcaccacgtgccgtaccaggaggacttcccggtgatgccgacgctgagcggcgggctcgagctccggccgtccaacttcttcgagaggaacccgctgttgacgacgatgccgatcggccatggccggcctctcgtcaactgctcgtgcgccggcggcgactccatttccagatga

SEQ ID NO: 22868 - DNA, 222 bp, Oryza sativa
  Clone ID: PAT_MRT4530_28002C.1
aagatttaaaactcggttttagggttaaaaacaaaacgaattcgattcggttaaaatactcaacggatttctttgtttcttgaggggaaagaaagaggagaccgagaggaacaaaacccctcaatcaatcggaagaatccgggtcggatttgggcggaaacggcggcgcaaaacggcggctcggcggcttgcgcggcggcggccggaggtaggggatggacc

SEQ ID NO: 22869 - DNA, 393 bp, Oryza sativa
  Clone ID: PAT_MRT4530_28003C.1
atggggggcgacgacggcggcgatgcggtgtccccaggcgacggcgcggtgacggtcgcaggcggcgaggcggtgctcccgggcggcagcacgggggtccccggcggcggcgtggaggtgctctcgggcggcggcgcgagggtccccagcggcgacacggcggcgcttgcaggcggcgaggcggcgctcccgggcggcggcgcgggggtcccccggcggcggcgcgcggcccccaggcggcggtgcggcggctccaagcgacggtgcagcggcccccagcgacggcgcggggctcccaggcggcggtgcagcggccctcaactgcgatgtggtgctcccaggtggcggcacggcagctccaggcagcggcgcatcggccccaggctgaaataa

SEQ ID NO: 22870 - DNA, 540 bp, Oryza sativa
  Clone ID: PAT_MRT4530_28004C.1
atggaattagtgagagacactgtgtcgggagatagcgagattcttggcatgggccaaccagccattggcatcgatctggaatttacctttctgggggagaaagcggctctctccgcgcctcgcctactttttcgtggggggtccgagccaggcaccacgttgaagcgtggggagctcgtggacacgacgccctaccccgatgtttccccttgtaccctcgcccttaaccacagccactggccgccggctcctcgtcctcatctgccgcgccgccgccggtggctcgccgttgaccaccgtgacgggaaagagagggaaagggacagggagagcggcgacgaccccgcgatgagcggagggatctggcacccccgagcggcgacgggcggcaacgagagagagggagaaagaagagcggcggtggacgccggtgacgggagaggcgagcggtggcggcggagagagggagaggcaacattatggcatggcatagtgggcgggcttgccggccgggaccggataaatcaaggtaactgcctg

SEQ ID NO: 22871 - DNA, 459 bp, Oryza sativa
  Clone ID: PAT_MRT4530_28005C.1
gagaacataaacagagtagatgtatatcaaattttaccagttacaatacacagaactgcatactgtcgtaccaatgaaaaaaaacaagcctgccggttatctaatgtgaagagcattccatcatacagaagatttggtttgcttaacctcaaaatgatatttttgttataatttctgccaccagttgtccctccaaatcaagcttattttattgcctgaatatagagtacatgttcccagtcataaaattctctatcttataatctccattggtcgtccagctgcatggtttaagtattcaccctgaagctttctgaatatatatataataaaacccagcaaggcatgctattgccgcaaagaaggcgagcaagattccaatgagcgtgaagtctctggttgccagcagcaagagtacaagaacaatggcaagtggagggaggaaataccgttttaagc

SEQ ID NO: 22872 - DNA, 190 bp, Oryza sativa
  Clone ID: PAT_MRT4530_28006C.1
cactgtatccagtgtgtcgtcacacttacaggttgagatcgatggacaaagttaaaactatactccgttaattaattttaccttgagaacatacctggttcatcatgtatttcatcacatgaatcttttctaaaacctttgatatacataccttgggttttgccttttcaataaccctgtgtgtagacca

SEQ ID NO: 22873 - DNA, 437 bp, Oryza sativa
  Clone ID: PAT_MRT4530_28007C.1
tctcccctctcctctctcaggcgtgctggagagggagcggcacgcggtggtgccggtgggagagggagcagcgcacgcccttcgccgtaaccagcctcctcactctcgtcggcgccgccggcagcagcggagcggtgcgcggatctggagaaagagggaggggagaaaggagaatacaacctcgtcgtcgctcctctcttctccaccgccaccaagctcgtcagcggccacccgccggagagaggagcttccccttccccttcttccacccgaacggcactatcacgtgccccttcgtccccaacacgccgctgccccactccggccgccgccactccttgcctgccgcacttcggtcgccactgctccttccccgtcccactccggccgccaccactcctccccgccgctccaccgccgccaccactccatcccgg

SEQ ID NO: 22874 - DNA, 938 bp, Oryza sativa
  Clone ID: PAT_MRT4530_28008C.1
accaataagtattttacagcatagattatccttactaaacattgattaaggtacattactggagcaacatagacgataatcacatactcacatcccactagacatgcatgagactaacaccaaagcaatttagattgcacaaacacctacatttcatacaccaatgaaaagatgcaacccttggtttccccaatggataagaacaacatccctgcattctacaacattcgctcagttgtgtcttgcaagtctgcagttcctgcaaatgctgtttcaccaatccactcaccaaggtgaaacacatcaagcagtatggaagctgcagtaccagatacattattgccattgtttagaccaaaatagctattacaaatttgattgcatgtatcctcagtggaggtcatataatccaaggtaatctgccagcccctcttgaaagcagagcatgcatgcattgcagaatcacgcttttcaactaccttagatataaaacgtcttagcttcctacaatcctttctgtaataagcacactccatatagttatcatccactacaacgacctttctttcttttttcaggtgggctaaaagtgatgcagcaactttttcctcggcatttgaaatctcagtatccatatcaccatctactctaatggtatccagctcaagagagcttgtactcttggaaatatgaactaccgcactggccacatgaccacgaccaatacgccgaacttcatatataggatctgaccctctaagctttttcatgacttcagaaacaaggagcttggaagtaatagtgacatacaaagttccctctgcaactgtcatctctggtatatgaaaatcttcaaactccgattcccagctttctcgagtagtattaatctcctcggctggattgtcctcaacactaatattgctctcatcagccat

SEQ ID NO: 22875 - DNA, 1936 bp, Oryza sativa
  unsure (1)..(1936): unsure at all n locations
  Clone ID: PAT_MRT4530_28009C.1
nnnnnnnnnnnnnnnnnnnnnnnnnnaaacatacacactcatatccaattacacgtaagtatacaaaccttgtcttttcatgtagtaatatttcttggtgtacattgcgaaattgcgtccaaaaggcgcccttatcaaaatacatatacactgagtacaaatttgaggtttgacatggtatataccctccgcacaatacaaatttagcgaatttgaaatgtaaacagcaatttagatatccaaatttattgcgataattggggatatgtcccatcaacttcgatagaagggagaaaaggcaacatactatgatagcattacttcagatatgtatgtgttgccacctaaacactgcttggagcaacacgagtaacagggtgcaaatataggctggtgcgtttaggcccaacaagtccaggtgcctctctcatatcgatttcctcaggctccatttgattaggaagtttccaatcaaaatggtaaagcaaactagccaaggggaattctacgttggccataccaagagttatacctggacatattctacggccagatccaaatggaaggaattcaaagttatttccattatagtctatacttatgttttcaaaccgctctggcttaaactcctcggcactcttccaatactttgaatccctacatattgcccatgcattcacaaacacgatagtgcccttgggcacatcataacccataaccttgcatgtctcacgacatcttcgggggcctaagagcggcactgggcaatgcattctcaaggactctttggttaccattttaagatagctcaatttggcaacatcatcatcggtaatagtgttctttccctgaaaggcttgcctcacctcatcatgcaccttcgccattactcttggtgacttgatgagctctgccatagtccagtttagagtggtgctagatgtttcgctgcctgctgaaaacatgttgtgtagaagcaacatcatggtttcgtttgtgattgggatcggtgtgtcgccttccttctgcagcctcaacagcacgtccagaaagcactcgtttccggccgccgccgcctcgtcgtcggcgccggcgccggcgccggtgctcctctccttgatctgcttccgttcttggatgatctgctccaggatgcgctccatcttcttgcgggaagcgagagccttccgcggcgccgtgccgagcatccgcgccagcttgctcgacgggaagacgtcggcgacggtgagccacgtcgtctggtccagcgcggtgcggagggcgtcgaggaactcgtcgcggtacctgctccggcgcccgccgatgcagcacctcaccacgacgtcgttgacgagctcggccaccctcgcggtgaggtccacggcctcgccggcggcggcggaggccgccaggtcgcgcacgaggcgcgccacctcctcctcgcggacgcaccggaacgacctcacccgcgccgcggtcagcagccgctgcgtgcagagcttccgcagctgccgccaccgctcgccgtagggcgcgaaggcgaggtcccggccgccgaggtagatcgcggcgatggtggtgctgacgtagcggtcggcgaacgcgaggtcctggctccggaggacgtcccgcgccgcctccggcgacgacacgaccaccgcgggaagctcgccgagccagacctgcatgaggtcgcgcccgtgcttctcggcgagcgcgcgcatcgagcggtggatggggtggctccccacgaggtggtggatgctgccgatcaccggcagcgtccatggccccggcggcaggttgagccttggcttggtggcatatgataccagcttggagatgacgacggcgacgagcaccgacacggccagagccagcagcagcagcagcttgtcctccatgcgtttgcgaggagctagtagctactaccttc

SEQ ID NO: 22876 - DNA, 1617 bp, Oryza sativa
  Clone ID: PAT_MRT4530_2800C.1
atgtcatggcagagggttggtgccctgctgctagggggctcagtcctgcctgcctgtcccgggtgtcccggccgtagggggattgggtcggtactcttgtttatggctaggatgggttgggaactatgtcacgtcttccgtccgtataccgtggtgatggataacactggtaacaaaggctatgggaatgatggatccgatgactcaagaacccaagccaatgggaatgagaaaagcatcaacgaaacctcaccagagctaatccaaattgtggttaaccaaaccaacatgttggcaacagcctttcaactattacagaatcggaacaacccagcaggggcaaccaacgttcaagtacctacagtccagcaacagtgcaagttatcagaatttctcaaaacggggcctccaacctttgccatggccgtcgatcctatggaagccagtgattggttgcgcacaatcgagaagaagctagggttgattcagtgcaccgaccaggagcgggttggcttcgcaactcatcagctggttggaccggcttcagagtggtgggatagctacgaagcatcacggccagaaggacataccatcacctggaacgagttttcatctgtattcaagagatcacatgttcccgcaggaatgatcacactaagaaaacgagagttccgctacctgaagcaaggagatttgaccgtcacagagtacctgcacgagttctatcgtttggctcactatgcaccagaagatgtggaaacggatgaagacaaacaagagaagtttctccaggggttaaaagatgagcttgcagtgcaactacttctagaggattatgaagattttgagaaacttgtggacaaagccatgcaactcgaaagtgagcataatcggatgacgaactgcaagagaaggattgtcaacatcccagtatttccaggtggtaaccaaagacagcgcactgagccacttcagatcaccggatcttctgttgcgcatcaagagtttccgccccaagaagatggacgcaatacagacaacaacactagcaatactaatgatgatgataccaccaacaaccatggttcttgccccattagtgaccactcgaataaagcgtgcaatgtcagtagcattcaccaagatgtcaacgatagtatcaatgttggaacccagaatgacaaccttagcaatttcgacactgagaaagactccaatggtgatagcaactatggtaccactgatgccaatgttagcaaggattcccaaccaccaattccaactccaagtcaaaatgatcgtccccagatggacagctcagtaaagaagacgttgatttgttacaactgcaaagaaccagggcattactcgagggactgcctgcaaccaaggcaaagtcgacctccacattaccgccaatttacacgaagcagacatcccaatcgtattgtggtcactggagcaaacgccgtacccgttgacgccaaagatatgaattatgagaagtctggaactgaagtcccatcttcaagtgccacaatccagtcgaagtcagctagaggtgcaaccagggaaaagtcaggtgaagagaagattccatctgcaacaggagattga

SEQ ID NO: 22877 - DNA, 630 bp, Oryza sativa
  Clone ID: PAT_MRT4530_28010C.1
atggatatcgctgcaagactatcagcgattcctcaagaaatcgctgatatagaaaacactaagctcgaactagagcaaatgctgggtgtcctcggggagcctttatttctggctttcgtcgatccagcagtgatcatacaagatgatatagttcttgttcagaaccaaatccgcattcttgaaaacaggaagaaggcgctgctggaagaacagcaatcgctcatcgtgatggctgcccaccacggatctaaagaagaagaggttttcttagcgggcgtgaatccggagaatagagcccaattgttggattatatggagctggatatcagtcttttaggtgatgtgatgcttcgggctaaatcaatttattggactagatacaatgtggatatcgggaaaacatttcacaggctccaatccatttgtgatctttacaacagatatcgcaagcaagtaaaccggtggtcaaggcatttgggctgtggggatctgtcaaggctctctgagtacctgatggggatcgtcatcttcgtcccggtggcggtgctggcatggttcccatttgtctcggagttccagacgagattgctattcaatcaggccttcagccgagggcttcaaagctgttag

SEQ ID NO: 22878 - DNA, 255 bp, Oryza sativa
  unsure (1)..(255): unsure at all n locations
  Clone ID: PAT_MRT4530_28011C.1
gttgaccttgtaancaccncaaanttcagannnagctacgttggcttgccacgcattacttgactgtgatgctcccctcttaccgaacttggccgtaacctccacaaagagcgactcgctgtataccgttggcatgctagctttatctgttcgggcaatacgatgcccattgtacttgttgactggtgctttggggaaattatgaggggatctctcagggtcgtgctcgtgcttgcccgtagacaaccgtgccat

SEQ ID NO: 22879 - DNA, 517 bp, Oryza sativa
  Clone ID: PAT_MRT4530_28012C.1
ctgcaggaatcggcacgaggccttgatatggaaaaggaacttcaagagtgagtatcctgcatgttgtatgttatgctgctgtgtactttgtgttgctaggtatcaactaattgtcagatgccatatcttgtacactaatgctaatatgacttgatgattttctacaaaaggatatttgctcttcattctattgctatcgatccctttttcttctttcttacaaggagccatgcccaacaaggtagcatgaaaaggcagcttgcaacatttttgtggggcatttaggttttattgtaaccttgaaaggtgagaaaggttgaatatgtcaatggtagggaatatctgagcaaccatgttaatagtaatgaccactaaatctaaaattccatggcttcaaagttgtccattaccctttatcttgattgattgcaggtctgtgtctcatggtagagtacctccttccgattttgggtgttgatgctgcttctctaagtttgaatcgctaaatatggacaga

SEQ ID NO: 22880 - DNA, 1311 bp, Oryza sativa
  Clone ID: PAT_MRT4530_28013C.1
atggacgaccctgccgtgcagccggccataggcggcaggacctcgtcgcatcccgtgctacgatcaaccctaacaccggagtcagatggcatcgtcgaaatctcaatgttggagccgtgttctgctgatgcaattgcccttcctttatcctcaattcctaccatcgagccaatggaagatgcttcaatgggttcagcagagccgatggaagatgcttcgataggttcagcaaccacaatagctccaacagagaacctatataagttgcgggttcattgggctgctgtctttcgtgattcttttactgctgatatgacctctactcaaaggagtgaaggtatgaacaatgttttcaagaaaaggtttcgtagaaagctttccctatctaaactcctagaagaatgcgacaagtgtgcaatgagtcttcgtgataatgagttggatgcagactacaaatcacgacactctacccctgtcacttatattcgagatttaccaatgctgaagactgcagctgagttgtatacaagaaggctttattcagaatttgaggaacactttaaagagcagttttctttctcatgtaaattcctgaaatctgaagggtcaatcatgacttataaggtatattgtgcaagcatgctctccgagtctttaatatcaatgaggttttcatctttccgaatctttaatatcaatgaggttttcatcttgccaactcagtatgtactaaatagatggacaaaatatgcaaaaagaggtttttattttgagaagaaacaaataagtgacaatgaaactttgagaacgcatgcagcgcgcatctctcggaaggcgacatctgttgcacagtatcaaaaagaacttcttgatgatatggaaaaagctatagacaagttggacctagaagcagataattcactgagcaaaatacacaccaaaacttatgaggtttctgaaagttctaatggatgtgttggagacatattaaaaggtaaagtatcaatcagagttcctcaggtcataaaaggtccaaagaataaaagatcaaaaactgtacttctaaagaagaaagggaagaaaggaaatgctgctaagaaaaaaggagaagatccaaagaaatcaacagacaatggagaaatgattcaagatccagatgaattgattggctcttttgatgcaaacattgatgataatatgcatgaagatttttcaactatggttgctcctccgatccatggagaatatacaagtcttttgtttggactagatcaagatgccatggctgctcggaagttacattttgattaa

SEQ ID NO: 22881 - DNA, 182 bp, Oryza sativa
  Clone ID: PAT_MRT4530_28014C.1
aatccagcaattggggaccgggtgcatttattcattaccttaattcaccttatcttacaaatcaccaccattctatacttaattaaccaccaccccaacttttctaattcaagtataaatcaacaaaaggatgacctatattctttccataccctacctactcgcttcttatcacaaaactt

SEQ ID NO: 22882 - DNA, 243 bp, Oryza sativa
  Clone ID: PAT_MRT4530_28015C.1
ttccatccgcgagagccgaacagatgacgcggggcggctgtcgcagtattccgcggtacgcccttgccggaagtgtgcacggcctgttgcggttctctcgcacagaacaaatgcacggcatgaaagctgacacggtttataaagagcgtggattactactctttcactactccagcggattaacttgatgccctggagccctttattagcttgagggccggcgagcttcacgggggcaacggt

SEQ ID NO: 22883 - DNA, 252 bp, Oryza sativa
  Clone ID: PAT_MRT4530_28016C.1
ccaccgggaaaaatttccacaattcattaacatcaataattatgattctaactgcggatagttcttcaaaatcttaacaggtacttgcgtaaccatattatatcatcgcaactacgtgtaaagctggtatctggtgctttaaactgcacaaaactacgggtgaagctgggatctggtactttaaactgcacaaaaaggaatcttgttgtgatcttaaattatgtaccctcatgtttgtctaccctcaaagac

SEQ ID NO: 22884 - DNA, 1074 bp, Oryza sativa
  Clone ID: PAT_MRT4530_28017C.1
gcacgagcgctctcgctccccggaaccaggcgagcgatggccggcggcgacctgcgcagcctcgtcgccgtgtgcgccgcggtgaccgcggccatgtggtgcgcccgcttcgccgcgcgccgcctccgccccggcctgccccgcctcgccgcgttcgtcccggtgctcgccgtcctcccgttcctcccgctcgccttccgcgcgctccacccgcgcgccatctcagggttcttcctcgcctggctcgcggagttcaagctgctgctcctcgcctcggggcagggcccgctcgacccgtccctcccgctccccgccttcgtcgccatcgccaccttccccgtcaggcagcgtgatcccaccaagaacgccgcgggatccggccttggccccgtgacctccgccgtgatggccgccctgctcgcggccatcgtgtcgctgtaccggtacaaggagcggatgaacccgtacgccctgctcgtcctctactcgctgcacgtgtacctcgcgctggagctcgtcctggcgtgcgcggcggcggcggtgcgcgcggtgatggggatggatctggagccgcagttcgacaggccctacctgtcagcgcacctgcgggacttctggggacggaggtggaacctctcggtgccggcggtgctccgcccgtgcgtcagccaccccgtgcgcgcgcgcgtcggcgagggagccgccggcttcgcggcgggggtcctcgccgcgttcttcgtctcgggcgtcatgcacgagctgatgttctactacatcacgctgcggccgccgacgggggaggcgaccgcgttcttcacgctgcacggggcgctcgccgtggcggaggggtggtgggcggcgcgcgaggggtggccgcggccgccgcgccccgtcgcgaccgcgctgacgctggcgctcgtcatgtccacggggttctggctcttcttcccgccgatcacgagggccggcgccgacaaggtggtgatcgccgagagcgaggcggtcgtcgcgttcgtgcgggacaccggcatctgggcggccgcctccgtccactcggctttgagtcttctttga

SEQ ID NO: 22885 - DNA, 1966 bp, Oryza sativa
  Clone ID: PAT_MRT4530_28018C.1
ccatcaggttgtctcgaaaaagattggagtttttggtggtttgggttgtgcggttcttgcttttgttggcgcaagcgcatggctggttctgggacatagtgagctgagatagagttcttgtgttcggtggagtttggctttggtgaatcttcgattcaagtctggagatggcgcgttttcaggaaaccaaggcgaggaatgatcaaggacctgttgctgatcatgttgggcaccaaaacctcatggaaaacctcacagatcctctggattccagtggcatggacatgatggacgaagcgcgaattcctaaggcgcggaagccatacacgataacgaagcaaagggagaaatggaccgaggacgaacataagctgttcttggaagccctgcagctccatggccgagcctggcgacgcatccaagagcacataggcaccaagactgccgtgcagatcaggagccacgcacagaagttcttctccaaggtcatcaaagaatcatctggggacaattgcaacagcttgggtgctgcatcatcaattcagattcccccgccgcggccgaagcgtaagcctgttcatccgtacccacgcaatctagggagcacagccagcaagaacgtccctgcactgaaacagctagagaagcctcagctgcaggtgcagtctctctacgaccaggacaatgggtcgccgacgtcagtgttaacagtaccacagatacgggctgatacactgggaagtgagagtggtgggtcgccaacctcgacgattgatattgaagagagatgtcctacaccaagcatagcaactgctgagttagctatggagttgcctcctacaaatgacgaggaggtcaagggcaatggcgatcatgaagaagttacatgtgacagatcaggagttccagtccttaggctatttggcaagagggttatggtgaatgatttacatcagatgtcagcccctgatgccgggaacctgcaaactgtggcagacatggaagtggacgcttcagctgagacaccaactagtggaactgggaaattctcttcccatggtgcagcagaagcaaatacatggaacccatggctgactaacacacagcagtttctgtattatcttcctaacggacaaattttctccgtgcattctgctctcccatgcttcacctaccataatgagggtgttacttgcacccagttttcaaacccacaggtggtagcctcagatcaacagcatcaacaccaaacttctgaagctgtagattacaagggtatacagagggaaggatcttggacggagtcaaatacatcctcaagcagtgtgcctgaaacagcaactcataattcagagactacagaatcatatagaaacggaaacagaaacgaagatgaaatggtaccttctccagattcaagaaaatgtgtgagcccaggttccaactgcaggcgaggctttgtgccgtacaagagatgtgttgctgatagtgaggcgctgctgaagtcacaggcgcctcaggaggaggcagacggagagatgacgaggctgtgcttataaatttttggagcctcgtagatcactgcaactatagatgcttgctactaatattttgttcacagatgagtaggaactgatgtactgcaggaggggctgctttcctgttacaagaggcagattgaaaccgcgttagtactccacaaaacagggagtggccgtggttcttgtctggccatgtacagttcaaatattctatgtttccattttcctcgtcgtgtgtttgtaatttcgctcccattgcgggagcgttcagaggtcaatggctgtcatgcaatgacaagtattttgatagagttgtagaagggttgtactgatgtaaattatacagtaacttattatctgtaagacaataacaggcgagctaaagaaaacaacgttggaaagctttgttcaaaaaaaaaaaaaaa

SEQ ID NO: 22886 - DNA, 339 bp, Oryza sativa
  Clone ID: PAT_MRT4530_28019C.1
atggggaagaggggagaggggcggtggcctcatggcgtcggcggggtggcgcggcgcagggctcgacgcggcgatgtgacgacgacgcggcgcggtagggcgcagggcgcgaggagaagcaacagcgcggcagcagcgacggcacggggctcgagggcgcggcgcggcagcggcggcacggggctcgggggagcggcgcggcacggggcgcgaggcgacgacggcgacggctcggcggtagcggcggtgcgcggcgcaaggcgatggaacggcggcgcggcgacgcgacggaaacgacggcgacggcagcacggggttaggggcggccaggcgcggtga

SEQ ID NO: 22887 - DNA, 1896 bp, Oryza sativa
  Clone ID: PAT_MRT4530_2801C.1
atggccagatgtctcgagcaagcagctcgtcttgatactaacaggcgggccccacacgtcagcgggtcaaggggcaggcacacggtggaccgcgtccaccgcggcctcgggtgcgccgtggaccaggaccacgggcggtccacgggcggcacccccaatcggcaagggaggggggaggctggctggctcgccagccagacggccgctgacgatggtggcgcgacgcggcaccggacacgggaggcagcggagggggaaaagggtaggaggagggagcactcaccatgcgccaaggtggcgagggcaacgggcggcggtggcggtccgacggcgtaccgcggacgcgaggtggaggatggcgacctggggagcgcggtggaagggccttcccttgagattgcggagctgaggaggaggggcccgaggcctaaggaggcccggaacgtcgacgcacgaccgccggagttagagggcgacgacggcgctagggtggcacgggcattacagcgcttctatgtccaagtgggattgccactggatgtcgaagtgattataccactccatccccttcgaggccagtcatggcaagtcgaggtgaaccaggacgaggaggtcgatggcctaccgaagctcgtcatgccaaagggggcgaaagtgctaactcttgttcaggctgaaaccgaagctcggaagatggtcggcgatgtgtcgatcacagaatacagccagctgcttacacggaaggcggctggccgagcgaatcgtgtgcatgatggcgatctcccctctcgggagaagccctccaaggccgatggtgatgaagggacctcgaagaagcgcaaacgcgagcaagcaaaatcggcccctcagaagcgaaaggcccctgcctccactgactctgatgccgacgatgaggacactgtcgatgaccagtacgatgaagaggagggggaggatgaggaggaggcgaaagttgcggtcgaaccggccgcgaatgagcccgccgacaaccgcaccgagacgcacggctacaccccaaccccaagcccagaccacgtcgtaactggggtggagtcgaacagctccccccttcgccggaaggatttgcatagggcaaaggcattggtttcgattgcggcgggcaaggtggtgaagggagggccagttaagaaaacctccaaaaaaaaggggttcgtcgatgtcgcctgtgttttcagtgatgacgagtcttcggatgagacctctacttcggccgctgggtggagccaagatctttcgaccgctcccgatgctgcgaccgacacgggcgaagcgggagggagcgctgcagctggtacttcaggttctgctgaccgggttgtgaaggctgctgccaggctcttcgggagccctccgcacagtccacctacttcaccgctggccatccaaaacgggaagaaggcggccgttgagacgtcggcttcagagtattcgctcacggcgccctgcttcgtcccttgggatttcgagacccgggtggatcttacccccttcatcgagggggtaagtcatctcgtttctccggctggaagtccgagcctgttcactgagttgaacgagttcaacgagggctgtaccgctgtcaaaagcttagccgtctggatacccgcagctcattgttcgaccgagcgaaccgtgagggctcgccttgacagctttaaaagtcgtcttcgggctaaggatgaagaactgggccgcaaggggctagaaatggaaaacctagccaacacccttaaggagacgaagactgagaataagcagctccaagttgagctggagaaggggagcgagcgaaggccgagatcgagcgcctcaaggctgagcttaaaaaagaacgagattagtccaccgccttga

SEQ ID NO: 22888 - DNA, 141 bp, Oryza sativa
  Clone ID: PAT_MRT4530_28020C.1
atggggatcgctgcggagtccatgcctctggttattgagggggtgattatgatccagtggtacatctctggccagagtaaaactattcgaatagtcgtgcccgcggttatgggcgggttgagcaatgtttttcgttattag

SEQ ID NO: 22889 - DNA, 1302 bp, Oryza sativa
  Clone ID: PAT_MRT4530_28021C.1
atgtttgatctgcatcaggaattgacgacggatcatgagccgccggtggtggagctcaccacggacgcggagtacgcgcaggagcagccccggctcgtccggttctttggcacgaccatcgtgctgagcctggggctactgcacgccgcttgctccctgcactgggctcatcgtcctctccctcgcggcgtcggcacggccgcgttcggcgccactgcggtgctgtgcctcgcggtgggcgcggtgtcgctgctgctctcgtggagtgctgcggcgaggatgacggcgacgaaggcgctgcccacgcggcgtgtcgagcggcggctgctcaaccggctctgcgccgcggtccacgcgtcgtccgcgctgctcatgctcgcgccggtcggcctgctggtgctcgtcgccgacaaggcgtacgcgttcgccgtggtcgtgccgttggggccggtgggagcgagcctcttccccgtcgtgcgcaatggagcccgcttcggcttcgcctggggcgcggcgcagtacgaggctcacgagcatgacctccggcgctacttcggcctcgccgccggcgtcacagtccccacctacgtagcgctactttctcatgccgtctccgatcatttcaggccggccggctcggctcaacgccggcaccatgatctgggcggcgtggacgccgtcgaatgcctcctgctgtacgcgtctaccgctggccttgcgctgatgcttcttgcgacgtcgccgccggcgctgtgcttccgtcacacgagggcagttgtcgtgaaccatttcctcggcgtcctcgccgacgcgctgctggcgttggtcggcctcgccgcgctcgtggccacggctgagatcgcaggtggcttggcagcattggcaccgaccactaacgtcatagccgcatgtgccatatttgcgaaagagcacgaggacgagccggaccgtcgtgggcaagacgataccaaagatcacctttgttcatcgtcatcgtcgcgacagcccgtggcgcccctagtggtgaattcgctggcgttcggcacggtaatgctgtcctactcggcgcttgatggcggccgtgccttcagctggccggagaaggcctgcctcgtcgccgtcgcttccctgctcgtcggcaaccttagccagatggcgctgcagcgccgcgccgtccgcacggatagcgtggtcaccactgcactgtccctctttgacaaggttaataaggtgacgttgctgattgctgcattgggttgtatggctgtgttagctacgcacaaaattactgcatcccactag

SEQ ID NO: 22890 - DNA, 436 bp, Oryza sativa
  Clone ID: PAT_MRT4530_28022C.1
atcatattatcaggggcaccattaatttcagttgatagacaatttttcatcaacggctacaagaagacatcctatacattctaacggatctatcgaaacaccggtgaacaacaaacaaacaagtcaaagaacccagccaactcacagagtttctcaccatgagatcaaaataaattctatctacaaaacataaaaccacctaactctgacaaaaaatattcaccgagaaaattttaaaaaaaaaaaaaatccttaataactaatggtcccacggcgctcgctatatcaagggctaaactaactctagctagctctttaaaactgcccctaaccaacagaaaaaagcccctgaccctgagcaaaaaaaaaaaggcacaactggccgcaaaaaggtacatgaaaatggcccccccccgtattttattttcttcaaaaa

SEQ ID NO: 22891 - DNA, 150 bp, Oryza sativa
  Clone ID: PAT_MRT4530_28023C.1
cataggtaggtgagacgccgacgctgccgtaccggaccggaatggccgagcccagcgccacccgtgcgtttttattggagcgcgcgattaacaccaccctagggtctggtttgtctttccagcgacgcaggtattatacacaaaggatgg

SEQ ID NO: 22892 - DNA, 439 bp, Oryza sativa
  Clone ID: PAT_MRT4530_28024C.1
gggtcgtaatcccactccgtatgatctgcctgttcctgaagttgattttggatggtgataattgagcctgctccgattggaacatcaaaggcttgcgatttggcagagctgctgtcgccattggtaaccctgtgatgggatatgagcacaccccttactaccggggtgattagtggattcggggagggagataccatctcccaatgggagcccgatttcgtggggctatacagacagatgctgctataaattctggtaactcaggtggcccacctagatgtgactcatatggtcatgtaattggagtaaatacagctacattcacacgtaaaggaactgggatctcctccggggtaaacttcgccattcccatcgacactgttgtacagtcagtccctaacctcattggtgtatggaacatctgtgaccaataggtttt

SEQ ID NO: 22893 - DNA, 3114 bp, Oryza sativa
  Clone ID: PAT_MRT4530_28025C.1
atgtcgaacaaacaaatattccaagtttaccatggcccaggaaatgtccgttacgggccaactggggtagatctatcagattttattgtatcaaaaaggggaattgatagaccggatgagaggagtgtatcttctataaaaggatggttaatgaggggcttgagagttgatccacagacaagtgacataacaatcaatgttatagtaagtcgggcaactgagggtttttattgggaactaatgccagttcaaaactctcgagtgtggagatggtatgtggaaaatgcattgcaacgcgggtggcctctaggtatggttccgtttgttcacccgaaggatccaggtgtgcagatgaacatggatgatggcgagggaccaagtgctgaagtaaatgagacttctgtggaggaggtcaacgcacgagaggacaggggcgtagtagctccagtgggcattcaaccaggtggagtggccgacgagggggagactgtcggtgccattgtggatgaaatggagagggaggattctgacaacgagcgtgtagaggaaggtgattcgtcagatgatgagacggatattaatccagcagaatgggctagtgaggatttttctgggctggtcgtctctgaagaggatagtgtgatatgggagtacaaagaaaatgaggttattcagggagcgatttatagtagagcagaagatatgaaggaggcggtaaaacattttgtagtgtcacttcatagagagttttgggttgccaagtccaaccggtcacaatatgaagttcggtgtgttaaggaaaaagatggttgtccctggagagtgcacgcttataaggggaaatggaaggattattggacagtgtcagtcgttaccaagcatacatgttttctacctggtgttcagaaataccacaggaacattacatgtgcatttgttgcatctgagatgtatgcgcatgtcatcgataatctcacatatgaaccaaggtcaataatccgacacatcgaagagacatacaagtatactattagctatgccaaggcctggagggccaaacagaaaataatagagatgagatttggaacttacgaagcctcgtatgacaatttgccacgcctgcttggtgttatcgaggaaagaaaccctgggagctcttacgcagtgaagaaattcccctcaattgaacatcctggcaagagtgtgctgcaaagggcgttcttagctctacatgcatgcaagatggcattcgtgaactctcgtcctgttctctgcattgatgagacattcttgacaggaaagtatcggggccagatactaacagcaataggggtagatgggaacaatcaggtattgcccatggcatttgcttttgttgagagtgagaataccgacagctggtaccggttcctgaaattggttaaaacaaaagttgttggtatgaggccaaatgtgtgcctgatacatgacagaaacgctggcattctgcgagcgatagaagagttgcagtttgggagtatggaacgaggataccctggtgagtgggaagatgtacagagtaagtggtgcatgcgtcatatgggagctaatttcttcaagcaattcaagaacaaggagctcatgaacatgttcaagaggctatgcattcagaaccaggagaaaaaattcaatgagctttggaagagattagatgagttgacagccaaatgcagtgatcagcgtgcagcggctccatcgaccgccgttgctgaccctcctcaagctcttggacctctcccaacggatagtccaacattggttagaagaactggagtggagattcggaaattttctcagtggattctgcatgaaccaaaaaagaaatgggccaaggcgtatgacacaggtggtgctagatatggaataatgacaacaaatttggcagaagtatacaactgggtgatgcgcggtgtccgtggactgccactagttggcatagtggagttcattttacatgggacatgcaggtattttaggaatcggttccaggcagttcttccctctatgccgaacaacagcattttgttcggaactttcatgcagaaaaagctagaggagttgcgtaaaaaggctatgaaacatcaagctctagtgcaagataaggcaggcaggggtatctaccgcaagagagtgaaacaggagtgtgttctcaaagccgacgacacatgtcattgctcttgtgcaaagccgaagctgctccacaggccatgcacccatgtcattgctgccgcagcggagtgtggcataccagatgcagtatatgtgtcacagtacttcagtaagcaagcaatatatcatacatggagcgacgagatttatgggttcggcatagctggggagttcacagagactaatgatgaagtactcaatattcgtgacccatcgaagctccgaggcaaggctggaaggaggaagactcgtcgcatccgcaacgatatggacgagttggaggctggcagggtgaagcgttgcagcaaatgcgatgaacgtgggcacacctacaagcattgtcctaaagacaaggagaaaccaaacgacattgctcgggcagacgcagctgtacagcggccacccgtaccgactggtccctgtccagttgcgcacgttcctaggccgactccccctccgcacggaggtttcacccagttcgctatgacgcaggccgcccacttctcccaggctgcagggtcagcgtctcaggcagctgcgtcgacatcgcactcagtgcagttctggcagtacatcgggacttcgtcacaggcagccggcacgtcgagtcagggtccaccactggaccatgctgggacctcgtcggaccacttggtgccttccaccttgctcttcgacatcactgacttcgactttgcttcaggctcgacagaggacgtcatcggcccctcacagctgggaggcgcaccgccggtgcagacgcaggaccaggcgcaggccactccgccgccagacactcgtgctacccgtgctgtgctaccggatcgtttcacctactcccaggaccacgtgcgagcacaggcccggaggaccaagcatggtcgcggcacggggcagggccagtag

SEQ ID NO: 22894 - DNA, 1110 bp, Oryza sativa
  Clone ID: PAT_MRT4530_28026C.1
atgtcccccgccgtaggccgtggcaacccgccgtcgcggtcagcctcctcctccaccatcgtggccgagacggcgaccgggtatcacctcctcaagatcaacggctactccctcaccaaggccaccacccccaccggctcgtttctcccttcgagcccgttcaccgtcggcggccaccgctggaacatcaaatactaccccaatggagatgacgtcaagaccgccgattacatatctttctttctcgtactagaagaagaagagaccaacatgggtttgacggtgcaggccaagttcaagtttagtttcgctaaccaggtgaagaagcaaccttcgctgaaatacaggcccataaagacatttaatctcgaggattcttgtggttggggctatgtggagttcatcaaaagggtagatctcgagaagtccgatgatcttagggacgattctttcaccatccggtgcgacattgtcgtcgtccgtgagatccgcaccgaggagacgaccgagatactccccgtcgaatcctttgtacccgtgcccccgtccgacatggaccagcagttcggcgacctgctggagaccgagaagggcgcggatgtggtgtttgaggtcggcggccagacgttcgccgcgcaccggtgcgtgctcgcggcgcggtcgccggtgttcagggcggcgctctacggctcgatgaaggagggcgacactgatggagtcgtgcacattgaagacatggaggcgcaggtgttcaagctgttgctccgcttcgtgtacaccgactcgttgccggagatggagacggaggaagacgtcgtatgccagcatctgctcgtcacggcggatcgatacgacctgcacaggctcaagctgatgtgcgagaacaggttatgcaagtacattggtgtaagcacggtgtcgaacatcctggcactagctgatcagcaccactgcgacgggctgaagaaggcgtgcttcagttttcttggctcaccggcgaacctgagtgctgtcgtcgccagcgacggcttcaagcatctgagcaggagctgcccctctcttatggaagaactggtcgttatgcttgcacttccgcctagtcatgcttag

SEQ ID NO: 22895 - DNA, 2523 bp, Oryza sativa
  Clone ID: PAT_MRT4530_28027C.1
atgtccaacaaacatacatttcaagtttaccatggcccaggaaacgtccgttacgggccgactagggtagatttgtcagaatttattgtaacaccaaggggaattgatagaccggctgagaggagtgtaccttctataaaaggatggttgatgaggggcttgagagttgatccacagacaaatgacataacaatctatattgtagtaagtcgggcaactgagagtttttattgggaactaatgccagttcgaaactctcgaatgtggagatggtatgtggagaatgcattgcaacgcgggtggcctctagctatggttccgtttgttcacctgaaggatccaagtgcgcagatgaacatggatgatagcgagggaccaagtgctgaagtgaaggagacttccgtggaagaggtcaacgcaccagaggaaggtggcgtagtagctccagtgggcattcaacctagtggagtggctgacgaggaggagactatcagtggcattgtggatgaaatggagagagaggattctgacaacgagcgtgtagaggaagatgattcgtcagatgatgaggatcccgatattaatccagccgaatgggctagtgaggatttttctggtctggtcatctctgaagaggatagtgtgagatgggagcacaaagaaaatgaggttattcagggagcgatttatactagagcagaagatatgaaggaggcggtaaagcattttgcagtgtcacttcatagagagttttgtattgccaagtccaaccggtcgcaatatgaagttaggtgtgttaaggaaaaagatgagtgtccctggagagtgcacgcttataagggaaaatggaaggattactggacagtgtcagtcattaccaagcatacatgttttctacctggtgttcagaaataccacaagaacattacatgtgcatttgttgcatctgagatgtatgtgcatgtcatcgataatctgacatatgaaccaaagtcaataatccgacatatcaaagagacattcaagtatactattagctatgccaaggtgtggagggccaaacagaaaataatagagatgagatttagaacttacgaaacctcgtatggcaatttgccacgcttgcttggtgttatccaacaaagaaaccctgggagctcttacacagtgaagaaattcccctcaattgaacatcctggcaaaagtgtgctgcaaaggacgttcttagctctacatgcatgcaagatggcattcgtgtactatcctcctgttctctgcattgatgggacattcttgactggaaagtatcagggccaaatactaacagcaattggggtagatgggaacaatcagttattgcccttggcatttgcttttgttgagagtgagaataccgacagctggcacgccggcatgctgcgagcgatagaagagttacagtttgggagtatggatcgaggataccctggtgagtgggaagatgtacagagtagaggctatgcaatcagaaccaagagaaaaaaattcaatgagctttggaagagattagatgagttggcagccaaatgcagtgatcagcgtgcggcggggccagcacccgccgttcctgaccctcctcaaactcttggacctctcccaacggatagtccaacattggttagaagaactggagtggagattcggaaattttctcagtggattctgcatgaaccaaaagagaaatgggccaaggcttatgacacaggtggtgctagatatgggataatggcaacaaatttggcagaagtttacaactgggtgatgcgcggtgtccgtggactcccactagttggtatagtggagttcattttacatgggacatgtaggtattttagggatcggttccaggcagttcttccctatatgccgaacaacaacattttattcggaactttcatgcagaaaaagctagaggagtggcgtaaaaaggccatgaaacatcgagctctagtgcaaggtacccaacagcacaggtttgagatactctgtcaagataaggcaggcacgggtatataccgcaagagagtgaagcaggaatgtgttctcaaagccgacggcacatgtcattgctcatgtgcaaagccgaagctgctccacaggccatgcacccatgtcattgctgcggcatcggagtgtggcataccagatggagtatatgtgtcacagtactcaacttcggcatgtttcgcccaattcactacgacacaggccacccacttctcccaggctacagggtcagcgtctcaggcagttgcatcgacctcgcactctgcacagttctggcagtacaccgggacttcgtcacaggcagccgacacgtcgagtcggggtccaccactggaccatgccgggacctcgtcgaagtacagggtggcttccgccttgctcttcgacatgtgcgacttcgacttccaggtcacgacagaggacgtcatcggcccctcacagctgggaggcgcaccgccggtgcagacgcaggactag

SEQ ID NO: 22896 - DNA, 1155 bp, Oryza sativa
  Clone ID: PAT_MRT4530_28028C.1
atggagagagtagaagcagcaggtggcagggttatcaattggaatggataccgtatcctcggtgtccttgctacttctaggtcaattggagactattacctcaagccatatgtaatagctgagcctgaggtcacagtcatggacaggacggacaaggacgagttcctcatattggcgagcgacgggctgtgggatgtggtatccaacgatgtggcctgcaagattgcgagaaattgcttaagcgggcgggcagcttccaagtacccagaatccgtctccgggagcaccgcagccgatgctgccgccctgctggtcgagctcgccatctcccgtggcagcaaggacaacatcagcgtcgtcgtggtcgagttgagacggctgaggagtagaacgacggcgagcaaagagaacggattgcacagcagagccatagagagcacgtacagggtgcaccgtgccatcgtgcccggcggatggcttagcaggccagccggccggcaggcgtgggagaagcgggacacgggcgcgggtgtgcagacgaacatggatgatggcgaggtaccaagtgctgaagtaaacgagacttctgtggaggaggtcaacgcacgagaggacgggggcgtagtagctccagtgggcattcaaccaggtggagtggctgacgagggggagactgtcggtgccattgtggatgaaatggagagggaggattctgacaacgagcgtgtagaggaaggtgattcgtcagatgatgagacggatattaatccagcagaatgggctagtgaggatttttctgggctgatcgtctctgaagaggatagtgtgagatgggagtacaaagaaagtgaggttattcagggagcgatttatagtagagcagaagatatgaaggaggcgagtaggtggtgcatgcgtcatatgggagctaatttcttcaagcaattcaagaacaaggagctcatgaacatgttcaagaggctgtgcaatcagaaccaggagaaaaaattcaatgagctttggaagagctttgcccgccatttggcgcatacgaccaatggcaccccgaagctcgtccgcccgccgacgtcgtcctcccgtggcttgccgtcgccgttcatcgtcgtcttcctccgcgccggccaccctcggtga

SEQ ID NO: 22897 - DNA, 252 bp, Oryza sativa
  Clone ID: PAT_MRT4530_28029C.1
tggtatgccacactccgctgcggcagcaatgacatgggtgcatggcctgtggagcagcttcggctttgcacaagagcaatgacatgtgccgtcggctttgagaacacactcctgcttcactctcttgcgcctcttgaacatgttcatgagctccttgttcttgaattgcttgaagaaattagctcccatatgacgcatgcaccacctactttgtacatcttcccactcaccaggaaccagtaccagctgtcg

SEQ ID NO: 22898 - DNA, 1314 bp, Oryza sativa
  Clone ID: PAT_MRT4530_2802C.1
atggaggtagagtgtctgatagtgaagattcagatcaagtctcctcagatgatgaagatgaaatggaacgtaaggcatgctctcgttgtggagaaatcggtcatgtcgccagctcgtgtgccactatatgcgttcattgcgaggaagaccatccacccgacaggtgtccaacgagcaggatcacttgtttcttttgtgaaggaactgatcatgtaccaaaagatttgccaggacagaggaatcaaaatgagaaaagaaaatgccgagtccgggaagatatctgttgcttcaattgtcaaggaatggcgaattgtcatccatgcatcccgaagcagtcctatagcccgcgttgcaacagctccaactccagcgagtgcattaccacagccccagccatcagttgacaagacagaggccagtatcggcattgtacctttggatgttccagcacagcagccaagaaatcaagtacaggatgaagaacccaagcgtaagaaagttatttacaacgcattaaccattctctgcaccgacagcctcagcaaggaattgtcgtcgatggaaaaagttgtgtctctccccgacctactccaggccaagcaaagggcaatcaacctccggagggcgataccaagcagaagaccgtcatccgcttcaaacagcaatcagaaggaagcttctcctgcgggcccgcccgccgccctcgctgacgggtggggcccacctgtcatcgccttcctcccgccgctcccgccgctcgcccgtgccctagcgccgccgccgccgcagattccgccgcatcccaccgtccctgcgcgccataatgaggggggaatcattccccgcgattccctctcccgtttcccccgtttttccctctctctctccctcggattcgtccgatttcattcccgaaaccctcgccggcgcaatcaatggcggccgagatctccgcggccgattcctccccctccggccgttctctctctctcccggcgctatataagcgttccccgtgctctcctcctccgtttccgccactcgccgcctctcctccccgtcggaatcgagcccgcaccgtcgcaccttctctccgccgtcgccgccgagctccagttcgccgccgtcgtcgctccggacctcctccccactcggcgtcacctccatcggcttcgccgcgttcccgtcgacctcgtccgcgcctccgtttcgctcgccgaccgccggagcaccgtcgtcctcgccgtcccgaaccgcgccgccgccttcttccgcttcggccgccgttcccgtcgtcgccgtcgaccggggtga

SEQ ID NO: 22899 - DNA, 833 bp, Oryza sativa
  Clone ID: PAT_MRT4530_28030C.1
ggaggaagagtcttcttctgctgctctctctcttctcttctcaattcatcctccttttgtccctatcaaaccctttttttctgtctctctctttctaccttggcattgttttctcgcaaatcttgctttctaaacccccaaaacctcccggaaaacaacccacccaccccgcgcgtggatggacggcccgcggccgccgccgccgcccaatgcgctgcgccgatcgcggttgtttccgacgaccacgccgccgccgtccgccaccgggggtctccggcattagaacccgggcagttgagaattccacgccgctacggcgggattggattagcgggcgggcggcggtcagggaagaggaggaggttctctcttgtggtcgttgccgctggaggtgatcgatcgatcggtcggtcgtctcgcggggcgatcggtcggcatgtcgacggccgccaaggaggaggcggcggcgtcggctccggcgccggcaatgggcggcgaggaggcggcggcgcgggcggcgcagaagcggtacgaggggctcctcacggtgcgggccaaggcggtcaagggcaagggcgcctggtactgggcgcacctggagccggtgctcatccccgccgccgacaccgggatgccgcccaaggccgtcaagctgcgctgcggcctctgctccgccgtcttctccgcctccaacccatcgcgcacggcttcggagcacctcaagcggggcacctgccccaacttctccgcgccaccgccgggcgccgacgcggcatccggttcgtccggttcgcagcatcagcagcagacgccacaggcggcgctgcaggcgt

SEQ ID NO: 22900 - DNA, 3102 bp, Oryza sativa
  Clone ID: PAT_MRT4530_28031C.1
atgacggccgcgtcagcagtgggtggatccggcatcagcggcgttggcagcacgcagattcggcagtgtggtggcgagggcctccaccacatcgcccgcgactgcaagcgcccccgcagcccagggtcttcgtcggactcgcagggcgaccaccgtcgcgtccttccgcgtcacgcttcgccgtcggatgccaccccgtcggcctcacgtgcctccaccccggagggttctcccgtggcggctctcgccccctctccccctcgcctcggcgctccggccaggatggtgctggcggcgccgacggtgccggtggtgccggtggcggcggcagaggcggcgccaacggtggtgcaggtggcggcggccgcggctgcgctacccctctctccgtggtgggtggtcgaacgctctgagcagatcgacgacgaggaggggcagctgcgtcgcataaataatctatcgaccaaaaaaattgcagaaatagcccctgccgcccacctctggggcggcaagctgacgtggcaaacgggggaggaacgggcgacgaacatggatgatggcgagggaccaagtgctgaagtaaacgagacttctgtggaggaggtcaacgcacgagaggacgggggcgtagtagctccagtgggcattcaaccaggtggagtggctgacgagggggagactgtcggtgccattgtggatgaaatggagagggaggattctgacaacgagcgtgtagaggaaggtgattcgtcagatgatgagacggatattaatccagcagaatgggctagtgaggatttttctgggctgatcgtctctgaagaggatagtgtgagatgggagtacaaagaaaatgaggttattcagggagcgatttatagtagagcagaagatatgaaggaggcgaaataccacaggaacattacatgtgcatttgttgcatctgagattttgggagtatggaacgaggataccccggtgtttgggaagatgtacagagtaggtgcggctccatcgaccgccgttgctgaccctcctcaagctcttggacctctcccaacggatagtccaacattggttagaagaactggattggagattcggaaattttctcagtggattctgcatgaaccaaaagagaaatgggccaaggcgtctgacacaggtggtgctagatatggaataatgacaacaaatttggcagaagtttacaactgggtgatgcgcggtgtccgtggactgccactagttggcatagtggagttcattttacatgggacatgcaggtattttagggatcggttccaggcagttcttccctctatgccgaacaacagcattttgtttggagctttcatgcagaaaaagctagaggagttgcgtaaaaaggccatgaaacatcgagctctagtgcaaggtacccaacagcacaggtttgagatactatgtcaagataaggcaggcaggggtatctaccgcaagagagtgaagcaggagtgtgttctcaaagacaacggcacatgtcattgctcttgtgcaaagccgaagctgctccacaggccatgcacccatgtcattgctgccgctgcggagtgtggcataccagatacaatatatgtgtcacagtacttcagtaagcaagcaatatatcatacatggagcggcgagatttatgggttcggcatagctgggaagttcacagagactaacgatgaagtactcaatattcctgacccatcgaagctccgaggcaaggctggaaggaggaggactcgtcgcatccgcaacgatatggacgagtcggaggctggcaaggactatcaggatcagcagcagatggagctcgccctacgggtgaaggcactacctccactcgaccacggggctcagcttgggacgttccgggcacggacgtgcggtgagctactcacggttcacgactcctttgtcgagaggctacgtgaggccggcctcctaccgatgtgtcggctggtggaggctgcggccggcgacgcggacccggccagacgatggactgtggacaggtcgctcgtagcagctttggtcgatcgatggaggccagagacgcacacttttcacttgccgtgcggtgaggttgagcagctacaggcggacgccgacgagtactcgtacagccgatgtttggaggcgtacttgctctggctttttggctgggtgatgttctgtggcggtcacgggcacgcggtcgacaagggacttgtgcactacgccaggagcatcgccgacgccgcggtaggcgaggtgcctcagtggagctggggttccgcgttgttggcggctctgtaccgtgcactttgtgagtcttgcacgaagacggatcccagcgcgacctttggtgggtgccctctctttctttctatctgggcagctgagaggattgcgatcggccaccctgaggtggaccagcacgcgtacgaggagtcactgtacgaggagcgaccagaggtcgactaccctacgatgggtactctgtggtgccgtcgtcagcgccgatgggctcacgtccaggttaggcggtcgtatcctgagtttgttatggagttcgaccgccttctgacgactgacgtcgtgtgggagccctacagtgccgcggctacccaggctcgtgcaccgttggggtttcgtgcaccgttcagcaccccgccttcctcggctaggccttctgttgtgccccccacaggtttcgcccagttcgctatgacacaggccgcccacttctcccaggctgcatggtcagcgtcacaggcagccggcacgtcgagtcagggtccaccactggaccatgctgggacctcgtcggaccccttcctgtcttccaccgtgctcttcgacatcactgacttcgacttcgcttcaggctcgacagaggacgtcatcggcccctcacagctgggaggcgcaccgccggtgcagacgcaggaccaggcgcaggccactcctctgcgggacactcgtgctacccgtgctgtgccaccggatcgtttcacctactcccaggaccacgtgcgagcacaggcccggaggaccaagcgtggtcgcggcgcggggcagggccagtag

SEQ ID NO: 22901 - DNA, 676 bp, Oryza sativa
  Clone ID: PAT_MRT4530_28032C.1
gggacaccatgcaactgagcctgtggtactgtaggtctgtagtcccaaactaacacatatccatggagggagtgttagtgaaaaagagatgaaatatgacgtaaggatgaaaatgtgtaaagtaatacaacaagccgtgtacaaaatgagtagagtgtatcagtatatcactactcaatcctaccgtgaagggtcgttactagatcgtgcgcatcgtccaggagcttccaaatgtccagctgcccagccatgctgttacactcccttatgatctcatccatgctgctatagctctctattatcagtttcctcttctgcagcacgctggccgcaattgcatatagtagcaagtcatcagttggaggggctcctaaccgcagtttccccaacgatgattttgcaattccagcacggttggctgcctgatcggcccacataacctcccatagacagagggtctgctcaaaggtcagctcccttcggaacatgaccaccaccattctgtaaacaaagaagcagtcctcagcttggagcatctccaaatgtctgtaaagatggaagtccttgtatttgattatcctggctaccatgttcagttgcctgcgaatgcccacttcatcaagcctgaaattatgacgggctttcctcataaaaccagcaaagccggacgcgtggg

SEQ ID NO: 22902 - DNA, 1839 bp, Oryza sativa
  Clone ID: PAT_MRT4530_28033C.1
atgtcgaacaaacaaatattccaagtttaccatggaccacgaaacgtctgttacgggccaactggggtagatctgtcagattttattgtatcagaaaggggaattgatagaccggctgagaggagtgtaccttctataaaaggatggttaatgaggggcttgagagttgatccacagacaagtgacataacaatcaatgttatagtaagtcgggcaactgagggtttttattgggaactaatgccagttcaaaactcccgagtgtggagatggtatttggaaaatgcattgcaacgcgggtggcctctagctttggttccgtttgttcacccgaaggatccaggtgtgcagatgaacatggatgatggcgagggaccaagtgctgaagtaaacgagacttctgtggaggaggtcaacgcacgagaggacgggggcgtagttgctccagtgggcattcaaccaggtggagtggccgacgagggggagactgtcggtgccattgtggatgaaatggagagggaggattctgacaacgagcgtgtaaaggaaggtgattcgtcagatgatgagacggatattaatccagcagaatgggctatgtcacttcataaagagtttagggttgccaagtcgaaccggtcgcaatatgaagttcggtgtgttaaggaaaaagatggttgtccctggagagtgcacgcgtataaggggaaatggaaggattattggacagtgtcagttgttaccaagcatacatgttttctacctggtgttcagaaataccacaggaacattacatgtgcatttgttgcatctgagatgtatgcgcatgtcatcgataatctcacatatgaaccaaggctacgtgaggccggcctcctaccgatgtgtcggctggtggaggctgcggccggcgacgcggacccggccagacgatggactgtggacaggtccctcgtagcagctttggtcgatcgatggaggccagagacgcacacttttcacttgccgtgcggtgaggtagcccctaccctacaggacgtatcgtacttgttggggctaccgctcgcgggagacgctgttgggccagtgaccacggctgtggactggcaggacgatctgacggcacgtttcgcactagtacagcgcgcaccgcacctcccgctcgagccgttggcacaccaccgcaacaccggacctacgaagaggtggctgcttcagttcaccgttgagcagctacaggcggaggccgacgagtactcgtacagccgatgtttggaggcgtacttgctctggctttttggctgggtgatgttctgtggcggtcatgggcacgcggtcgacaagggactcgtgcactacgccaggagcatcgccgacgccgcgacgacgttgctcgggcagacgcagctgtacagcggccacccgtaccgactggtccccgtccagctgcgcaagttcctaggccgactcctcctccgcacggagggtttcgtgcaccgttcagcaccctgccttcctcggctaggccttctgttgtgccccccacaggccgcccacttctcccaggctgcagggtcagcgtcacaggcagccggcacgtcgagtcagggtccaccactggaccatgctgggacctcgtcggaccccttcctgtcttccaccgtgctcttcgacatcactgacttcgacttcgcttcagactcgacagaggacgtcatcggcccctcacagctgggaggcgcaccgccggtgcagacgcaggtccaggcgcaggccactcctccgcgggacactcgtgctacccgtgctgtgccaccggatcgtttcacctactcctag

SEQ ID NO: 22903 - DNA, 3978 bp, Oryza sativa
  Clone ID: PAT_MRT4530_28034C.1
atgagatttggaacttacgaagcctcgtatgacaatttgccacgcctgcttggtgttatcgaaggaagaaaccctgggagctcttacgcagtgaagaaattcccctcaattgaacatcctggcaagagtgtgctgcaaagggtgttcttagctctacatgcatgcaagatggcattcgtgaactgtcgtcctgttctctgcattgatgggacattcttgactggaaagtatcggggccagatactaacagcaataggggtagatgggaacaatcaggtattgctcttggcatttgcttttgttgagagtgagaataccgacagctggtactggttcctgaaattggttaaaacaaaagttattagtatgaggccaaatgtgtgcctgatacatgacaggcacgctggcattctgcgagcgatagaagagttgcagtttgggagtatggaacgaggataccctggtgagtgggaagatgtacagagtaggtggtgcatgcgtcatatgggagctaatttcttcaagcaattcaagaacaaggagctcatgaacatgttcaagaggctatgcaatcagaaccaggagaaaaaattcaatgagttttggaagagattagatgagttgacagccaaatgcagtgatcagcgtgcagcggctccatcgaccgccgttgctgaccctcctcaagctcttggacctctcccaatggatagtccaacattggttagaagaactggagtggagattcggaaattttctcagtggattctgcatgaaccaaaagagaaatgggccaaggcgtatgacacaagtggtgctagatatggaataatgacaacaaatttggcagaagtttacaactgggtgatgcgcggtgtccatggactcccactagttggcatagtggagttcattttacatgggacatgcaggtattttagggatcgtttccaggcagttcttccctctatgctgaacaacagcattttattcggaactttcatgcagaaaaagctagaggagttgcgtataaaggccatgaaacatcgagctctagtgcaaggtacccaacagcacaggtttgagatactatgtcaagataaggcaggcaggggtatctaccgcaagagagtgaagcaggagtgtgttcttaaagccgacggcacatgtcattgctcttgtgcaaagccgaagctgctccacaggccatgcacccatgtcattgctgtcgcaacgaagtgtggcataccagatgcagtatatgtgtcacagtacttcagtaagcaagcagtatatcatacatggagcggcaagatttatgggttcggcatagctggggagttcacagagactaacgatgaaggggctcagcttgggacgttccaggcacggacgtgtggtgatctacttacggttcacgactcctttgtcgagaggttgcgtgaggccggcctcctaccgatgtgtcggctggtggaggatgatgctggcaacgcggacccggccagacgctggaatgtggaccggtccctcctagcagatttggtcgaccgatggaggccagagacgcacacttttcacttgccgtgcggtgaggtcgagcagctacaggcggaggccgacgagtactcctacagccgctgtttggaggcgtacttgctctgcctttttggctgggtgattttctgtggcgctgagaggattgcgatcggccgccctgaggtggaccagcacgcatacgaggagtcactgtgcgcggagcgaccggaggtcgactaccctacgatgggtactctgtggtgccgtcgtcaggttaagcggtcgtatcctgagtttgttatggagttcgaccgccttcagccgactgacgtcgtgtgggagccctacagtgccacggctacccaggctcgtgtgccattgggtatgtccacactctgcacaagggaccaggcgtactggatgactacggttccgatggtcttcgacatctgcgttgagcctcacgccccttttcgcgtgatgcggcagttcggcttccgtcagccctttccagtaccgtttccgacgaccgtcccagctgctgttcaccggtactcgcgcaagggtcaacagtcagctggcaactggcccgccaagttggtgacttttgttgaggactggttgctcgcaaccgaggaggtcgtggaccacgagggagagccacacactgaggaggcgtaccagggctacctacgctggtaccagccacgcacccgtactagggtcaccttcgctcccttggagcagcaggcccacgttgcgagcactagagagctctacgccaggcaccgcgaccaggacttcgctcgtgctgtcgacgacatcaacagggtcgtcgttgacggttcaatgacgatccaacgtttaggcgcggggattccgacgacattgctcgggcagacacagctgtacagcggctacccgtaccgactggtccccgtccagctgcgcacgttcctaggccgtctccccctccgcatggagggtttcgtgcaccattcagcaccccgccttcctcggctaggccttctgttgtgccccccacaggttcttcgttccataaagcctacaacattgggtcgaaggttctttgtttgtccaaatattcttgacgacgatttcatggaaccaccaaggagatgtcaatacagagaatggatagacaccataagggttctaactccacctagccgtgttgtgcagcttgaactaccagagcaatacaggtggggtggcaaggggcccaaatgcaaaaagtacgagccccaagctctttatgggctgctaaaattgcacttagccccttgctgccccagagacgctgccaagattgtcaggaggccaaagatcacaacggttgttgctcagcaaccaccaggaatccgtcgagccctcgctgacgtcagtaatctcgtcaatggccgggctgctctgcctgtcgttaatcgccagaaggctccagcagcagctgacaagtgcaggaaaccaatcaagcagcgcaacgagaacaacaaggctaagccagaagtcatcgtgatcagttcggactccgagaaacagaagaaaagtccagcccagagagcagcctcccggagggcaccaatccaaacgctcacctcgattctgaccaagtgcagcagggcttctggcggtgtgatcagcccgaaaaaggagctgatatacgacatcgatgcatctgatgctcacaacgagctggcagtgattgattacgtcgaagatatctacagattctacaggagcactgagaacacctaccggcctctctgcacctacatggtgtcacagaccgagatcaacgagagaatgagagcaatcctgactgattggctcatcgaagtgcactacaggcttatgctgatgccggagaccctgtacctcactgtctacataattgatcagtacctgtccctggagaatgtggccaggaatgagctgcagcttgtcggagtaagcgccatgttgatagcctgcaagtatgaggagacttgggctccattgcttgctattgtgttcagcgctgctcaatttgcatacgatgttcagcttgctattatgttcaatgctgttcaatttgcacatgattttaaggacttccttgtcatatcagacaactccttcagcaggcagcaggttctgagcacagagaagtccatacttaacaagctccagtggaacctgactgttccgacaatgtacatgttcatccttcgatacctgaaagctgcattgggtgacaaggagctggagcacatgacatcggtgatagcagccgctgccgtctacgctgctcggtgtacccttgggccttgccctgagcccactatggagcgatcttctggagtaccacaccggcttagccgagccacaattgctgtatgtcttcttcttcatgacttgatctttgcccatgaaatttaa

SEQ ID NO: 22904 - DNA, 457 bp, Oryza sativa
  Clone ID: PAT_MRT4530_28035C.1
acccacgcgtccgaaacccttccatcaattcttccaaggacgcttgatgagcttatgtatccttgttcgcgcagccgggggttttttgtgaactagtcgccggcgaccgccgccgccgttcgtttatacgggttcaatcgcatagatcagttcgtccaggttgagagtgtagatattcaggtatttttgcagttagagaggtctggttctcccccttaagaccccagtgatggagccgtgaactccaacatattcgacggccccctgactgaccctgacccagtgcgcttgtctacacacgttatgccactctacgcggtgcttctcaagctcggtttgttggtcttcgccatcctggccacctcccttgcccacctcgcgctccggtgcgggctccctggctacgcccggaaggtgttcgacgaaatgccccaccgggatgtggtctcctggacgt

SEQ ID NO: 22905 - DNA, 2010 bp, Oryza sativa
  Clone ID: PAT_MRT4530_28036C.1
atggagttgggtcggccggggtgtccggttgatcggcttccggattcaccgcggcacgaaaggggggctgcccgttgtctgctggggacgggggcgaaccctaagggatttaatacacaaaatagtctggaaatttgggctaaatttctgggcgtgacaattctgcatgaaccaaaagagaaatgggccaaggcgtatgacacaggtggtgcatcatatggaataatgacaacaaatttggcagaagtttacaactgggtgatgcacggtgttcgtggactgccactagttggcatagtggagttcattttacatgggacatgcagatattttagggatcggttccaggcaattcttccctctatgccgaacaacagcattttgtttggaactttcatgcagaaaaagctagaggagttgcgtaaaaaggccatgaaacatcgagctctagtgcaaggtactcaacaacaaaggtttgagatactttgtcaagataaggcaggcaggggtatctaccgcaagagagtgaagcaggagtgtgttctcaaagccaacggcacatgtcattgctcttgtgcaaagccgaagctgctccacaggccatgcacccatgtcattgctgccgcagcggagtgtggcataccagatgcagtatatgtgtcacagtacttcagtaagcaagcaatatatcatacatggagcagcgagatttatgggttcggcatagctggggagttcacagagactaacgatgaagtactcaatattcctgacccatcgaagctccgaggcaaggctagaaggaggaggactcgtcgcatccgcaacgatatggatgagtcggatgctggtagggtgaagcattgcagcaaatgcgatgaacgtgggcacacctacaagcattgtcctaaagacaaggagaaaccaaatgcggcggaggcaggactatcaggatcagcagtagatggagctcgccctacggatggcacgtcaggatacacctcagttgttggacccggcgatagatcaccgacaccggtctcaccttactgcggtacagggggctcagattgggacgttccgggcacggacgtgcggttgcgtgaggccggcctcctaccgatgtgtcggctggtggaggctgccgccggcgacgtggacccggccagacgatggactgtggaccggtccctcctagcagctttggtcgaccgatggaggccagagacgcacacttttcacttgccgtgcggtgaggtagcccctaccctacaggacatatcgtacttgttggggctaccgctcgcgggagacgctgttaggccagtgaccacgggtgtggactggcaggacgatcttacggcacgtttcgcactagtacagcgcgcaccgcatctcccgctcgagccgttggcacaccaccgcaacaccggacctacgaagaggtggctgcttcagttcaccgtcgagcagctacaggcggaggctgacgagtactcctacagccgctgtttggaggcgtacttgctctggctttttggctgggtgatgttctgtggcggtcacgggcacgggtacaaatcctaccggctttcgtcaatggctagacgccggggtgttgaggatccgaactggcgtagcgatccttgtgtatacctactaccaccttggtgccagcgtcctctttgcctatgcggtgatcgatgccaactaatggcttcgaggaatcctgatattcgaggaaggcacttttttaggtgccctaactatgaccgtgaggttcttcgttctataaagcctacaacattgggtcgaaggttctttgtttgtctaaatattcttgacgatgatttcatggaaccaccaaggagatgtcaatatagagaatggatagacactagaagggttctaactccacctagccatgttgtgcagcttgaactaccagagcaatacagggttactaaagcgcggtttgagagaggagagggatcctcacgtaggggttag

SEQ ID NO: 22906 - DNA, 1293 bp, Oryza sativa
  Clone ID: PAT_MRT4530_28037C.1
tcggaaaatctcccgtctcgtctcctccgctccttgcgccatcccgggctgaacagggaggggcgacgatctccttctggcgagcagagcaagggaggggaggggaggggatcctggtgatactatgcgtttgatgtcctctgttccttgacttggatgtaaccagttatctgcctcgtcagtaacctttttgatccttcaaacaaaaagtcagtagtacttgcacgtgattggcaaaattagtcaagacgggtgctctttgctgcgtggccgcgaggccacatgggacaaagtctaatcttgcaagcagagactgttctatggatcctaatgaaccttgctggcggatgaattcaagcttctctcctccaatgtcaaggagatgggactgcaggaatccatctgatggattgccacacaggattcatgatgctccaccttatgtatcatcactgtcatcccatagtaaaggaagtagaagtgcatttggcagtgaccagtacttgaatcaccagcattctgtatcagatggggcactgtcttattttggtagtccagctgatagtctccaggctccacgatggacgccctctcttcaaagatttgatctcggcgagttctctacacctgcaggatcaagacctgacacttctggttatccccaatccagtgagagacaattaactgcagtaagcagtttcagttctgcatcccccttctcagagtcaagtcagctggcatcttctagtaaaccaccatacttacatttaccacgcaatcatctgggaaggcgatctttcatgtcaaaaccagtgtacccgcttgtcttccgtaatccagtgtcggaagcagaagcctctgggatgcctgaagctagtaatattgggcgaacaacacctagtgatgattctcctgtgtggcggcgcagcttggcaagtcctgagctcaagttccacaatgcattgagtgagtttcggaaggtagaggcttcaccagagccaaacacaagctcaaggagggaaggattcagatggagcaatgctagtagctatgattttggatatgatggtgatgccattgacatttcagatcatattagtgtggagtcccaaagatccccgacaagttcagtgaggtttcttaagtgtggcttatgcgagagattcctgcggcagaaatcaccatggacctcaaaccggattgttcaaaattctgatatgccagtagcggcggtccttccatgtcgccatgtcttccacgcagattgtctcgaggaaagtactccaaagagtc

SEQ ID NO: 22907 - DNA, 2877 bp, Oryza sativa
  Clone ID: PAT_MRT4530_28038C.1
atgtcgaacaaacaaatattccaagtttaccatggaccaggaaacgtcggttacgggccaactggggtagatctgtcagattttattgtatcagaaaggggaattgatagaccggctgagaggagtgtaccctctataaaaggatggttaatgaggggcttgagagttgatccacagacaagtgacataacaatcaatgttatagtaagtcgggcaactgagggtttttattgggaactaatgccagttcaaaactctcgagtgtggagatggtatttggaaaatgcattgcaacgcgggtggcctctagctttggttccgtttgttcacccgaaggatccaggtgtgcagatgaacatggatgatggcgagggaccaagtgctgaagtaaatgagacttctgtggaggaggtcaacgcacgagaggacgggggcgtagtagctccagtgggcattcaaccaggtggagtggccgacgagggggagactgtcggtgctattgtggatgaaatggagagggaggattctgacaacgagcgtgtagaggaaggtgattcgtcagatgatgagacggatattaatccagcagaatgggctagtgaggatttttctgggctaatcgtctctgaagaggatagtgtgagatgggagtacaaagaaaatgaggttattcagggagcgatttatagtagagcagaagatatgaaggaggcggtaaaacattttgcagtgtcacttcatagagagtttagggttgccaagtcgaaccggtcgcaatatgaagttcgagatggcacgtcaggatacacctcagttgttggacccggcgatagatcaccgacaccagtctcaccttactgcggtgcagggggctcagcttgggacgttccgggcacggacgtgcggctacgtgaggccggcctcctaccgatgtgtcggctggtggaggctgcggccggcgacgcggacccggccagacgatggactgtggacaggtccctcctagcagctttggtcgatcgatggaggccagagacgcacacttttcacttgccgtgcggtgaggtagcccctaccctacaggacgtatcgtacttgttggggctaccgctcgcgggagacgctgttgggccagtgaccatggctgtggactggcaggacgatctgacggcacgtttcgcactagtacagcgcgcaccgcacctcccgctcgagccgttggcacaccaccgcaacaccggacctacgaagaggtggctgcttcagttcaccctttttggctgggtgatgttctgtggcggtcacgggcacgcggtcgacaagggactcgtgcactacgccaggagcatcgccgacgtcgcggtaggcgaggtgcctcagtggagctggggttccgcgttgttggcggctctgtaccgtgcactttgtgagtcttgcacgaagacggatcccagcgcgacctttggttggtgccctctctttctttctatctgggcagctgagaggattgcgatcggccgccctgaggtggaccagcacacgtacgaggagtcactgtacgaggagcgaccagaggtcgactaccctacgatgggtactctgtggtgccgtcgtcagcgccgatgggctcacgtccaggttaggcggtcgtatcctgagtttgttatggagttcgaccgccttctgccgactgacgtcgtgtgggagccctacagtgccgcggctacccaggctcgtgcgccgttgggtctgtccacactctgcaccagggaccaggcgtactggatgactatggttccgatggtcttcgacatctgcgttgagcctcacgcccctttccgcgtgatgcggcagttcggcttccgtcagccctttccagtaccgtttccgaccaccgtcccagctgctgttcaccggtactcgcgcaagggtcagcactcagctggcgactggcccgccaagttggcgacttttgttgaggactggttgctcgcaaccgaggaggtcatggactacgagggagagccacacactgaggagtcttaccaggcctacctacgctggtaccagccacgcacccgtactagggtcaccttcgctcccttggaacagcagccccacgttgcgagcactagagacctctatgccaggcaccgcgaccaggacttcgctcgtgctgtcgacgacatcaaccgggtcgtcgttgacggttcaacgacgatccaacgtttaggcgcggggattccggtacccgtagaggagcacctgacgacgtacacgcggatggtggagtcgatgcgctcgtttctccgagtgctcacctgtcgtgccgacgacgttgctcgggcagacgcagctgtacagcggccacccgtaccgactggtccccgtccagctgcgcacgttcctaggccgactccccctccgcacggagggtttcatgcaccgttcagcaccccgccttcctcggctaggccttctgttgtgccccccacaggttttgcccagttcgctatgacgcaggccgcccacttctcccaggctgcagggtcagcgtcacaggcagccggcacgtcgagtcagggtccaccactggaccatgctgggacctcgtcggaccgcttgttgtcttccaccgtgctcttcgacatcactgacttcgactttgcttcaggctcgacagaggacgtcattggcccctcacagctgggaggcgcaccgccggtgcagacgcaggaccaggcgcaggccactccttcgcgggacactcgtgctacccgtgctgtgccaccggatcgtttcacctactcccaggaccacgtgcgagcacaggcccggaggaccaagcgtggtcgcggcgcggggcagggccagtag

SEQ ID NO: 22908 - DNA, 331 bp, Oryza sativa
  Clone ID: PAT_MRT4530_28039C.1
agtcatatgctcttaatataaaggagtacaaatgtatcgtacaaaatacactcactacatctcttccaaaaaaactttgggcataacctctcttccaaactgcggcactatccggctctttattggcaggttagagctctcgcgccgctctctctctctctttctctctcacacacacactggcacacaaaactggagaaacgagcacacaacgctctgttgctcacacacacgcgctggcacacaaaactggagaaacgagcacacaatgcaatgcaagaattaagaatgagcgcgtatatatggtgagatatactacatctcagtgatg

SEQ ID NO: 22909 - DNA, 5106 bp, Oryza sativa
  Clone ID: PAT_MRT4530_2803C.1
atggccgagcaagcaaaggtgcgcaacctctctccgagtgttagcggtgacgacggggagccaaacccacgccgtcgagctcgtactccaccgccccctccgcgccaaagtcctaggcgggaggaggcgctggagaggatcgaaggatccgcgacttcgacatccacgggtgatggagaagagcggcgagatggggagcgtcgcctcctcgtctacggcgacgacagcacgccccagggcgcggtccaagctgcgggcgcgctcctacgtcacccgcccgtcgtccctgacccggagtctccagcccaacgttggctggacgacatggccaacttggtcatgatggcacggcagcgcctaggtgttggtgggcggtcctccgctaccaagacctatggcgctgctaccaccggttccgtgtcgtcaaggcggagggcgcggcgagcggcggctattgctcgccattcggccgccactccctcgtcagcacctccgacccgggaagatcagcgtggggggccaggtgcccgcatcggtatcgagcgccggcgtaatggtcgacgtgctgcccacgcaacggagggcgcctcctcgtccggagtgtcacctcaacacggacgcggggatcagccctccgtgcccccggttggtggtgttggctgtagagcctttatggcgagccttcggaacgtccgttggcccccaaggttccggcccaccatcaccgaaaaatatgacgggagcgtcaaccccgccgagtttctccaggtctacacgaccgggatcgaggccgccgggggtgatgacagggtcatggcgaatttctttcccatggccctgaagggacaggcgcggggttggctaatgaacttgccacccgcgtcggtccactcttgggaggatttgtgccagcagttcaccatgaactttcaaggcacatatccgcgcccaggtgaagaagcggacttgcacgcagtacagcgaagggatgatgagtcacttcgctcatacattcagcggttcagtcaagtccgcaacaccataccatgcatccctgcacacgcggtgatctacgcgttcagggggggtgtgcggcacaaccgcatgctcgaaaagatcgcctccaaggagccccagactaccgcggagctttttcagctcgcggaccgagtggctcgcaaggaggaggcctggacttggaacccctccggttccggtgtggcagcttcggccgcccccggatccgctgctcggacagggcggcgtgacaggaggaggaagaagaggtcagcccattccgacgacgagggtcatgtccttgccgttgagggcgctttgcgggccacccgaaaggggaggcctgcgagcgacaaaaagaaggaggccggcgctcccggtagggagcgtccgaccggcaagtggtgttctgtgcacaacacctccctccacgacctcgcggactgtcgcgcagtcaaaagtttggctgagcggacgaggaagtgggaggaggagaggaggcaggagcgccgagagggcaagtccccggcggttccctccggtaatcagcgaagtgaggccaagcagaaggcccccgccgaggacatcgatgacggcgatgatgacctgggttttcaggagcctggggccaccattgccactgtcgatgggggagcgtgtgctcacgtttctcgctggagcctcaaggccatgaagcgagagcttctggccgcggcccctactcatgaggcgacgcgtcgggcgcggtggtcggaggttgccctcacctttgaccagaccgaccacccaccatgtgttgcccggggaggacagatcgcgatggtggtttcccccaccgtttgcaacgtgaagttggggcgtgtcctcatagacgggagggggggggcagccctcaacatcctttcccccgcggcctttgacgccatcaaggctccggggatggtgctccggccgtcccagccgattatcggtgtgacgccggggcacacatggccgttaggtcatatcgacctactggtcaccttcggtggatccgccaacttccgcacagagcgggtgaacttcgatgtggcggacctcagtctgccctacaacgcggtcctagggaggcccgcgttggtgaagttcatggcggcggtccactatgcctacctccagatgaagatgccgggccccggtggccccatctctgtccatggcgacctcaaagtcgcgcttgcttgtatggagcagcgcgcggaccacctcgccgccgcggccaagcccgagggtggcgacgagaggctcgccacctccgtccccgccgccccgaggcagcgaatgatcacgtgcgacgaggtcccggaagacgcgctcgtctccttcctgcgggcaaacgctgacgtcttcgcatggagaccggcggacatgcccggggtccccagggaggtgattgagcaccgtctcgccgtgcggcctggcgcaaggccgatccggcagaaagtgcggcggcaggtcccggaacgtcaagccttcatccgcgaggaggtggcgcgacttctggaggccggattcatccgcgaggtcatccatccggagtggctggcgaacccggtggtcgttcccaaggcgaacggcaagcttcggatatgcatcgactacaccgaccttaacaaggcatgtcctaaggacccttaccccctgcctcgcatagatcagattgtcgactccactgcggggtgcgaccttttgtgttttctagatgcatactctggttaccatcagattcgcatggctagggaggatgaggaaaaaactgcattcattacccccataggaacttattgttatacgacaatgcccttcgggttaaagaatgcaggtcctacttttcaacgcactactcgaatttctttgggtagccaaataggacgtaatgctgaggcttatgtcgatgacttggttgtgaagacgcgcaaccaagagactttactttcggatctggcggaaactttcgagagtctccgctccacccgcataaagctgaaccccgataagtgtgtgttcggtgtacctgcgggcaagcttctcgggttcttggtctctgcccgaggcatcgaggccaaccccgagaagatacgagctatagagcggatgcgcccccccagcaagcttagggatgtgcaatgcgtcaccggttgcatggccgccctaagtcggttcatatcgaggctgggagagaaggcgctacccttatttaagctcctcaaacgctccgggccgtttacctggacggaggaagctgaacgtgccctcactcagttgaaggcgtatctcagctctcccccagttctggtcgccccggagccagacgaacccttgctactctacttagcggcgaccccgcaagtagttagtgcggcgttggttgtggagcgcgatgaggacaatcctcattccgcgcatccccaccctatgctggcttggcccgggagagagcagggaggagaggcccccgagccgaacggtggcccaaggcccccgacgaccggggtaggccctctgcccgcttgtccgacgacgccaggagcccccgacccccaggacggccccgaggccactgtgggaaggccgcgcctgtcgtcctccgaccccgaggtcgtcggcacagaagacgagtgcgccccgcgaggccgcttggacgaagagcgcccctgggatgtggcccctggcgaagaggatcggccccaccgaaaggcgcatcgggtcacggtggttacgtcttaccccctcggccagatcttgcataatcgagagggtacaggacgggtggtgaaatgggcaatcgaactttctgagttcgatttgcattttgaaccacgccacgctatcaagagccaggccctcgccgattttgtggcagagtggaccccggctcccgagcccgtctcagtccccgaggccagctcaggcccctcgcagccgcctcacaccgcccactgggtgatgcagttcgacggctccctgtctcttcagggcgccggtgcgggagtcacgttgacctcgccgagcggagacatcctcagatacctggttcgtctcgactttcgggcgaccaataatatggcaaagtacgaggggctccttgcgggactcagggtggcagctggactggggatccgccgcctcctggtgttaggcgactcccagctggtcgttaaccagataagactctacccgaggaccgcgaagggagtgaacgcgtccagcgcatctccaaacgctacgtgctggcgggccccgggcgggtttgagtatctgtatgtcgcaatcgacaagttcactaagtggcccgaggcttatccggtcgtcaagatcgataagcactccgcacttaagttcattaagggcattacagcccggtttggggtgcccaatcgtattattacgtataatggcacacaattcactagtgaacttttcggcgattactgcgaagacatgggtatcaagctctgcttcgcctcccctgcccaccccagaagcaatggccaagtggagcgcgccaatgcggaaatcctcagaggccttaaaaccaagaccttcaacatcctcaagaaacacggcgattcgtggatcgaggagttgccagcggtgctctgggcgaaccgaaccacaccaagccgagcaaccggggaaatgcttttcttcctcgtctatggcgcggaagcggttctcccatccgagctcaccctgaggtcccctcggaccaccatgtactgcgaggctgatcaagatcagcttcgcagagatgacctcgactacttggaagagcgaaggcggcgtgcggccctccgagccgcacgctaccagcagagcctacggcgctaccatcagcgccacgtccgggcccgatcactctgcgtcgacgacctcgtcctacgccgcgtccaaacgcgtgctggattgagcaagctctcaccaatgtgggagggtccgtatcgagtgatcggcgtcccctggccgggctccgttcggctggccacgggcgacggcacagagctgcctaacccgtggaacatcgaacaccttcgtcgcttctacccctaa

SEQ ID NO: 22910 - DNA, 342 bp, Oryza sativa
  unsure (1)..(342): unsure at all n locations
  Clone ID: PAT_MRT4530_28040C.1
ggccgcgtcccttgaggttgggagaagctcgcgtcctacaacaatctagggttcttgcttattctagatcgtaatattcagttcgtctttgttggagagaccatactgatatgctgtacacatgcagaacatatccattccataaccgaaattaagttatccgtacgaatctattttcagtggagtcaatgtgctgttattcttagatttgagatgtaaagttttcgatagtatgaactggtaaaaagaaaatttgaaacattcaagtaccaacatatgcctttgcattgcccaaaaaaaaaaaaaaaaaaaaaaaaaaaaaaaaaaaaaaanaaaaaaaaa

SEQ ID NO: 22911 - DNA, 1388 bp, Oryza sativa
  Clone ID: PAT_MRT4530_28041C.1
caacccccaaaaaagagaactttttcatcaccatccacaagcactagcaaaccgcataagccgcactagctcggtggataggaacgaagtggtcaatgggttggaactgagagagacgataatagacagagatagagattgttgctatacaagccgatgattagaggtatgaattttttgagtatttgaaaaatcattctcaatcggcatcaaggatattgaaatataaggctcttaaatatgttgtatttgatgatgatctttattatccgacgattgatggagttttacttaaagtggttatgtgtgaagtgcacgaaggaatttgtggaactcatcaatcgctcacagaatgaagtggttgattaggagagttgggtatttttagtcgaccatgctgaaggattgtttcatatattataagggatgtcaagattgccaaaggttttgagcaatttagagagcacctgcgtcagctatgaacccaataattaagccatggccgttcagaggatggggaatcgatatgaccggccagataaatccaccaccaaggaaaggtcacaatttattttggtggctacatattattttaccaagtggattaaagcaattccactgaagaaggttgattctaaggatgccattgaatatgtcaaggaacatatcatatatagatttggaataccccaaacaataaccacatatcaaggatatatctttgtgtccgatgagtttattcaatttgctaaaagtatgggcataaagttattaaattcttctccttactatgcacaaagccaatggacaggcaaaagcatccaacaaaagtttgatcaagttggtgaaaggaagattgccgaacaacctaaaaagtggcatactatattagctaagtctttatggtcttatcggatggcatgtcatggatctatacaagttccactttatcaactagtttatgggcatgaagatgttctaccatgggaaactaacatcagctcaaggagaattattttacaagatcggttaacaactgatgattatcataatttgatggttgaggagccagaagatttggtataagctagattatgtggaatggaaaaagttaaaggagacaaagaaagaattgtaaggcattataataaaaggttgtgccaaagtctttcgtggaagaaaaacttgtttggaagatgatattattgataggaataagagataacaactttgaaaagtggtcaccaaattgggaaggaactttcgggatccataaatatgtgctaaaaggggcttatatgcttaagggtcttgatgaagaagtttttggaaaaacacttaatggaaaatttttgaagaaatattacccaagtgtatgtgttaactca

SEQ ID NO: 22912 - DNA, 1036 bp, Oryza sativa
  Clone ID: PAT_MRT4530_28042C.1
tccatgtcccattctcaatgtaagcaagaacagaaaccagcatctgaagtctcttgcaatagctctgccaacaacgggtgcaatattggtgttagtttctgctattgtagttattctgttacaccaaaggaagttcaaacaaagacaaaatagacaagcaacatccctggttattgaggaacagtatcaaagggtttcatattatgcattatcaagaggaagtaatgaattttcagaagccaacctgcttggcaaaggaagatatggttctgtttttagatgtactttagacgatgagagtgcacttgttgctgtaaaagtgttcgaccttcaacaatcaggatcttcaaaaagctttgaggctgaatgtgaggctctgagaagagtacgccaccgttgtctcataaagatcatcacttgttgctcaagtattggtccacagggtcaagagttcaaggcattggtttttgagttcatgcccaatggtagcttggatggttggattcatcccaagtcaagcaatctcactcctagcaatacactcagcctttcacagagactcaacattgctgttgatatctttgatgcactggattatcttcacaatcactgccagccaccaatcatacactgtgatctgaaacctagtaatattcttctatcagaagacaagagtgctaaggttggagattttggcatatcaagaatcctcccgaaaagtagtactaaaactcttcaaagttcgaaaagctcaattggaatcagaggttccattggttatattgcaccagacatagctgatccaacaatctggcttcatgaagaagaaaatgttgcagatgttaaaaatgaaagcataaaaacaagaattattcaacagtgcttggtgtctgttcttaggctcggcatatcatgctcaaagcaacaacccagagagcgaatgatgttggcagaagctgtatcagagatgcatgcaaccagagatgaatatctcaggtcttggatggtcggccatgaagaacatagcactgtgagc

SEQ ID NO: 22913 - DNA, 387 bp, Oryza sativa
  Clone ID: PAT_MRT4530_28043C.1
atggcgacggcgaccggcctcgggcggccgtggttcatggcgttgtgcatggtggtggtttgctcgttgaccgtctcgttcgccgtcttcctctgcggccacagctccggcgtccacgacggcgatctcctcaggaagaagaagcctatgaaaccaccgccgccttcatccaagaagaagaaggtgtccacgtcgatgtccggcacggtggtcgacacgacgggcatgtatacggcggcgtacggcgtcgccgtcgtcggtggacacggtggccatggcggcggcgggtgcggtggcggcggcggcggcggtggtggaggcggttgctgcggcggcggcggtggctgtggtggtggtggtggtggcggcggcggcggcggctgttag

SEQ ID NO: 22914 - DNA, 3063 bp, Oryza sativa
  Clone ID: PAT_MRT4530_28044C.1
atggcgatacgtcggatgaggcttgcattgtccctcctctgcgtcctgatgacgatcggcaccggcacggcaagcgatgagccggcgctgcttgctctcaaggcagggctcagcgggagcagctcaagcgcgctcgcctcatggaacaccagcgccagcttctgcggctgggagggcgtgacatgcagccaccggtggccgacgagggtggcggcgctggacctgccgtcgagcaacctcaccggcacgctcccgccggccgtcgggaacctcaccttcctacggcggctcaacctgagctccaaccagctgcacggcgagatacctccggccgtcggccggctccggcgtctcctggtcctcgatatggaccacaactccatctcaggtgtgatccctgctaatctgagctcctgcatcagcttgacaatcctgcggatccagtccaacccgcagcttggcgggcgaattcctccggagctcggtaacacgctgccacggctcaagaagcttcagctcaggaagaacagcttaacagggaagatcccggcctcgctagccaacctttcgtcgttgcagcacttgtctctgagttacaacaagcttgagggtctcatccctccaggcctcggcgatatcgcaggtctgcgttatctttttctcaatgcaaacaacctttccggcgaacttccgctatctctgtacaatttgtcgtcgctgatgatgctccaggttggcaataacatgctgcatggcagcatcccttctgacattggtcgcatgcttcccggtatacaagtgtttggattggatgttaaccggtttacaggagtcatccctcattctctctccaatctttcaacactcacggatctgtacctctcagacaacaaattcaccggatttgtgcctcccaacttggggagccagctgcaagaatttgtcctcgctaacaactctttcagtgggcagctgccaaggccaattgggaacctgtcaacgacgctacaaatgctcaatttagataacaacaatatctcggggagcatacctgaggacattggcaatctggtaggcttgagctttctcgatctggggttcaattccatattatctggagtgattcctgaaagcatcgggaagctaacaaacttggttgaaatttccctgtacaataccagcctgtcaggcctcataccggcatctgttggaaatcttacaaatttgaataggatatacgcattctactgcaatttggaaggcccaatcccaccaagccttggggatctaaaaaaactgtttgttctagatttgtcatacaaccatctaaatggttcgatccccaaagaaatttttgagctgcagtcactctcgtggttcttggacttgtcatataattctctgtcaggaccccttccatcagaagttggtagcttggttaacctaaatggaatggatctatccggaaaccagctatctggacaaatacctgacagtataggaaattgtgaagtgatggaagccctctatctagaagagaactcatttgaaggaggaataccacaatctctgagcaacctaaaagggctcaccatactgaacctaaccatgaataagttatctggcaggatccccaacaccattgctaggattcccaatctgcaacagctgtttctagcacacaacaatttttcaggaccaatcccagcaactctacaaaatttgacaacgctgtggcaattagatgtgtccttcaacaaattgcaaggggaagttccagttaagggtgttttcagaaacctgacttttgcatcggttgtggggaataacttgtgcggtggaataccccagcttcacttggctccatgtcccattctcaatgtaagcaagaacagaaaccagcatctgaagtctcttgcaatagctctgccaacaacgggtgcaatattggtgttagtttctgctattgtagttattctgttacaccaaaggaagttcaaacaaagacaaaatagacaagcaacatccctggttattgaggaacagtatcaaagggtttcatattatgcattatcaagaggaagtaatgaattttcagaagccaacctgcttggcaaaggaagatatggttctgtttttagatgtactttagacgatgagagtgcacttgttgctgtaaaagtgttcgaccttcaacaatcaggatcttcaaaaagctttgaggctgaatgtgaggctctgagaagagtacgccaccgttgtctcataaagatcatcacttgttgctcaagtattggtccacagggtcaagagttcaaggcattggtttttgagttcatgcccaatggtagcttggatggttggattcatcccaagtcaagcaatctcactcctagcaatacactcagcctttcacagagactcaacattgctgttgatatctttgatgcactggattatcttcacaatcactgccagccaccaatcatacactgtgatctgaaacctagtaatattcttctatcagaagacaagagtgctaaggttggagattttggcatatcaagaatcctcccgaaaagtagtactaaaactcttcaaagttcgaaaagctcaattggaatcagaggttccattggttatattgcaccagagtatggggaagggtctacaataaccagagcaggcgatacttacagcttaggcatattgttgcttgagatgtttactggaaggagccctactgatgacattttcagggattcaatggatctgcacaagtttgttgcagcttcttttcttcaccaacccctagacatagctgatccaacaatctggcttcatgaagaagaaaatgttgcagatgttaaaaatgaaagcataaaaacaagaattattcaacagtgcttggtgtctgttcttaggctcggcatatcatgctcaaagcaacaacccagagagcgaatgatgttggcagaagctgtatcagagatgcatgcaaccagagatgaatatctcaggtcttggatggtcggccatgaagaacatagcactgtgagctaa

SEQ ID NO: 22915 - DNA, 507 bp, Oryza sativa
  Clone ID: PAT_MRT4530_28045C.1
atgcagtacaaccgtgaagtcccgttcgtccaggttattaaggccattgataagaagcgtcgcgccttcttgtggacggagcatccctactgggatggcctgaaggccccagccgagcagaccattttcgacatgttcgaggcgtccaccttcttcatgccgggagatggcgagtcaatactctttttgctcttgtcgggcatcggggatcgtcttgtgtggcgttggatgagtgaccagcgctactcggtgcgttcggtgtaccaggcgttcttctatggccaacacttttttgcattagcgctactggacggcaacctcctccagaagtgtggcatcgatggccacttggcctgccccttttgcgatcaggagcttgagacggcgaaccacatccttctcgattgtgtgttcactcggcaagactggtggtcttcctccagggcctgcttgcctgagcatctctacgccaattttgactccctggttctcctgttctcttggtag

SEQ ID NO: 22916 - DNA, 438 bp, Oryza sativa
  Clone ID: PAT_MRT4530_28046C.1
atgtcagaggagatcaacacatgcaaaaaagtgttggccatagaagaacgcctggtacaccgaacgcaccgagtagcgctggtcactcatccaacgccacacaagacgatccccgatgcccgacaagagctgtatgtgaagcaccacatcccaaataagaagaaactaggagatgacatggacagtgagggcgccgcggatgtcagaaacccaggaattgttcgccaaacaggccaaaagcaactgtgcgtgagcctcaaaggcgttggggcacgccgaagaggagatctcgaaccaaggaggccaccgagcggtcgtcgatccattgttcaaaccaaaaagagtattgactcgccatctcccggcatgaagaaggtggacgcctcgaacatgtcgaaaatggtctgctcggctggggccttcaggccatcccagtag

SEQ ID NO: 22917 - DNA, 438 bp, Oryza sativa
  Clone ID: PAT_MRT4530_28047C.1
cgattaaatgaccctttacgataccactagccgtatttgcaaggcatgttcaactttgacaaatgactaactggtggccaaggtgttattttattaccagtactttagctaagatatgtagtccatatgctgatggggtattattctgtcagaaaattcagaagatatttgttggatttgattaccactattcactttgcaaagtggcatactactacgttgagagtaagtttccgaaaagcactagagatttttcaggccacctaagtaacattgtttactacaagttaaattaatcaaggtcaaacacaaaaggatggtgcaaaatgacaagccactgcgaccgagagtaaattaaggcgagcgattcagagagaagttatggaggagtgcgtgctcaccggagtaggcgtatcccttcatggtgtagccgcgctg

SEQ ID NO: 22918 - DNA, 401 bp, Oryza sativa
  Clone ID: PAT_MRT4530_28048C.1
cacagccgggaaggagaagcacccaagctaggcagcacaccggcgacggccaacggcgcgacgacggtacgacagagcacgggaagaggaaaaacggaaaggggaggaggcgccggttctcacagagtagacgcggcggcgagaggtcgacggtgttgccggcggtgaggaagaaatggtgagaagcttcgggtcgtcggtgtcgtcgttgttcccgcggtcgtcgtgctcgacggaggggtggacggggaaggggaggaagcggcgaagcggatggtggcgacgtgggctccgatgaggttccgaccaccggtgaggggcggccggagttgcgacggtggcggcacaagaagagagcggcgcggcggccatggagagaggagagggagagggcggcggtg

SEQ ID NO: 22919 - DNA, 273 bp, Oryza sativa
  Clone ID: PAT_MRT4530_28049C.1
atggcaaagaggaagatgaaggcaatgggaaagaagaagccaaaggtgccaatgaagaagaagacaaaggcgcaaatgaagaagcagctgaaggcgtcgacgaagaagttggagacgccggcgtcggctgtggtaggagccttcacggcgctgcagatcctgccccatcctgccgaggattacctcagcgatgaggagctagaagatgattcccaagaggtgcctgggattcagaggaggacacggctctaccgctacatatttgagatctaa

SEQ ID NO: 22920 - DNA, 1464 bp, Oryza sativa
  Clone ID: PAT_MRT4530_2804C.1
atggataacactggtaacaaaggctatgggaatgatggatccgatgactcaagaacccaagccaatgggaatgagaaaagcatcaacaaaacctcaccagagctaatccaaattgtggttaaccaaaccaacatgttggcaacagcctttcaactattacagaattggaacaacccagcaggggcaaccaacgttcaagtacctacagtccagcaacagtgcaagttatcagaatttctcaaaactgagcctccaacctttgccattgccgtcgatcctatggaagccagtgattggttgcgcacagtcgagaagaagctagggttgattcagtgcaccgaccaggagcgggttggcttcgcaactcatcagttggttggaccggcttcagagtggtgggatagctacgaagcatcacggccagaaggacatactatcacctggaacgagttttcatctgtattcaagagatcacatgttcccgcaggaatggtcacactaagaaaacgagagtttcgctacctgaagcaaggagatttgaccgtcacagagtacctgcacgagttctatcgtttggctcgctatgcaccagaagatgtggaaacggatgaagacaaacaagagaagtttctccaggggttaaaagatgagcttgcagtgcaactactcctagaggattatgaagattttgagaaacttgtggacaaagccgtgcaactcgaaagtgagcataatcggatgacgaactgcaagagaaggattgtcaacatcccagtaattccatgtggtaaccaaagacagcgcactgagccacttcagatcaccggatcttctgttgtgcatcaagagttcctgccccaagaagacggacgcaatgcagacaacaacactagcaatactaatgatgatgataccaccaacaaccatggttcttgccccattcatgaccacttagatcaagcgtgcaatgtcaacatcattcaccaagatatcgacgatagtatcaatgaaggcacccagaatgacaaccctagcaattttgactctgagaaagactccaatggtgatagcaataatggcaccactgatgccaatgttagcaaggatttccaaccaccaattccaactcctagtcagaacgatcgttcccagacggacaactcagcaaagaagacgttgatttgttacaactgcaaagaaccagttgataacttgtccgaggttgactccgaagatatgaatcatgagaagttctggaacggaagcattactgaactaccgcaacctagtctgagtcagccaaaaggtgcaccctggaccaagtcaggtgaagagaagattccatccgcaacaggaggtcaagccaagcagttccgaaaggtaaagatttgctggaagtttgtcaagacgcaacggaagaagtcagacaagaagagaagaccgcccaacctatcttcttgctag

SEQ ID NO: 22921 - DNA, 422 bp, Oryza sativa
  Clone ID: PAT_MRT4530_28050C.1
gtcgaccacgcgtccgcggacgcgtgggcggacgcgtgggcttcactagataactattctatactgggaagacttgttggagaagatgcctttgtccgaattgcccctgctgtggcaggtgtagctgatgtttcaacggctcattatctcttcagggcccttgtcggttctgaaaaggggctttctttagatatagggacaacataccttggtgaacttctgaaagttcatcatgggaggcaaacacataaaagtggagatcattttttgtccgatgagcaagtcctatgcataggctctagtagaaaaagacctgttctgaaatgggaagaaaacactgcgtggcctggacacttaaccttgaccaacaaagcactctattttgaggccattggactggcaagtaccaataaaccatttga

SEQ ID NO: 22922 - DNA, 515 bp, Oryza sativa
  Clone ID: PAT_MRT4530_28051C.1
gtgaacctggtgcccctgttggctcttgggccgcttgttccatttcagaagctgcatatggagctttggatcacccagttaatgctttagaggattcccctcttatgaacttgcaggaagttttgaagtgccataagggtacaaaatctgcagttcatactggtttgcttttcctatcgaagtatctaaagaagtatagatatggttttgagtatgcatcgctagaagttaaggatcatctagagcgagtggacttctctgatttggttgacacggaaacaatgaagataaaaaggttacgactgggatttattgtaagagagctcattgaccaatacaatgccttaagaaaaaagttgaacaatatgataccttcagtttgtatttcatacaggtatttcagaaactacatgttatgcatgattctctatatgtggaaactgtttcatcaactacctccctgtttaccttacctgaaaaagaagcagcaagttacagaagtagttggtgtataa

SEQ ID NO: 22923 - DNA, 527 bp, Oryza sativa
  Clone ID: PAT_MRT4530_28052C.1
tcacctcgccaaggtcgccgagggcaccgtctcgccgaggtcgccgcccgctgcctgcggtttccagcaatcgccgcggttcgcgccgccgccgccgagcggagcagcgccccgatcgatccccttcccctcccgcgagcaaccgacgccggcggaagtcccagctgcttccgccacttcgcccggtgaagcatccgtactcacgctcatcctcttcctcatctctctttgcggtctttactacccactacgcctaacccccttttcttttttcttctccgatttcgttagccttagcttctcttccagatccgcaagcaattttcttgaattggacctaaccagagtaagagtagcagtttgttaggattggattgggagtgttagcccctgattagttgacaggagtagattaatagtgtacctccgttgaacttgtgatgaactttgctaatatatgccaaagtggcttgtcgtgattgggttagttatgagtatctactgtgccatgattagattagatgcgt

SEQ ID NO: 22924 - DNA, 304 bp, Oryza sativa
  Clone ID: PAT_MRT4530_28053C.1
ctagagcgaaaataacttggttataattccaaattttagaagcaggataaacatgaactttaaaaggaatcatgttgtgcgctcaaactaattatggtatatggaatgttagcaagactaaagaaaaagatccttagttatataattggaaaaagattatccataatggcaatcaaatagtaaagtctgcaaaatgccatcgcgcaaggttcttttaaatcactttcaatttggatgctaaaatatgcttgagtatttagtttttattctacaagtgtttacttacagtacctgtatgactttt

SEQ ID NO: 22925 - DNA, 701 bp, Oryza sativa
  unsure (1)..(701): unsure at all n locations
  Clone ID: PAT_MRT4530_28054C.1
ggcccgccccggcatggccgcgtcgctcaccgagctcgccgccgtggacgtcgagtacaagagggtaccgtgcgagtacaggcacaggagcctctctgtcagagtcgacgagagaagtcgcggacccaacgagctcaccatcagcttcctctaccaaggcggccaaaccgacatcgtcgccgtcgacgtcgcccaggttgggtcgtcgagctggaagttcatgacgagggagcacggaccgtcgtggagcatggcgaacgcgccgccggggccgctgcagatgaggctggtggtgaccggcggctacgacgggaagtgggtgtgggccgaccgggaggtcctgccgaggcggtggcgcgccggcgaggtctacgacacgggggtccagatcactgacatcgcccaggaaggctgcttcccctgcgacacgcacgagtggaagtagaagcccagccacacgtacttctcctgtcgtcacggccattttggttgggctttgatgagaaagaagacgtctctcggctcgcctccagtagagatttcactgacccgatttagagtcctcctaatccctcggcaacttcagaatttcctcctccgtttcttcttcttcttttccaactttgtacatgagctactaactaatgtgntaaagataaattaaagcaagttacaaaccgtcccgtcccattgggagccct

SEQ ID NO: 22926 - DNA, 1317 bp, Oryza sativa
  unsure (1)..(1317): unsure at all n locations
  Clone ID: PAT_MRT4530_28055C.1
taaaacgacggccantgagcgcgcgtaatacgactcactatagggcgaattggntaccgggccccccctcgaggtcgacccgcacgtcggagcgacccacactccccgtgcccgagccagagagtatggccgtctctgtccgttgctgcttcggctcctcctccctttcgcaccacgcgcgactactcctcgtcatcgttgcgttgctcgcgcctcggctcgcttccggctgcgaccgctgcgtgcgccgctccagagcggcttactacacctcctcgctcacgctgactgccggttcttgcgggtatggcacggcggccgcgaccttcaacggcggcggattcctcgccgccgcgggccccgcgctgtaccggggcggcgtcggctgcggcgcgtgctaccaggtgagatgcaaggacaagaagctgtgcagcaacgcgggcgcccgtgtcgtcgtcacggaccgcgccaggacgaaccgcaccggcctcgttctgagcagcccggcgttcgccgccatggcccgccccggcatggccgcgtcgctcaccgagctcgccgccgtggacgtcgagtacaagagggtaccgtgcgagtacaggcacaggagcctctctgtcagagtcgacgagagaagtcgcggacccaacgagctcaccatcagcttcctctaccaaggcggccaaaccgacatcgtcgccgtcgacgtcgcccagaatctaacaatcgtgtgttgggagctgcaggttgggtcgtcgagctggaagttcatgacgagggagcacggaccgtcgtggagcatggcgaacgcgccgccggggccgctgcagatgaggctggtggtgaccggcggctacgacgggaagtgggtgtgggccgaccgggaggtcctgccgaggcggtggcgcgccggcgaggtctacgacacgggggtccagatcactgacatcgcccaggaaggctgcttcccctgcgacacgcacgagtggaagtagaagcccagccacacgtacttctcctgtcgtcacggccattttggttgggctttgatgagaaagaagacgtctctcggctcgcctccagtagagatttcactgacccgatttagagtcctcctaatccctcggcaacttcagaatttcctcctccgtttcttcttcttcttttccaactttgtacatgagctactaactaatgtgtaaagataaaattaaagcaagttacaaaccgtcccgtcccattgggagcctaaacaactaacgaaaaacgaaccgaattggcgccgccgtgaaaaaaaaaaaaatataatatataatg

SEQ ID NO: 22927 - DNA, 741 bp, Oryza sativa
  Clone ID: PAT_MRT4530_28056C.1
gctttgatcgatctctcccacacggctcaaacgcgcatacacgtaaacacacaagctttgatccttctgttcgccatggacggcgaggcgacgagcttgatgatctcgccggagatccgcgacgcggtgacgaaggttgccgtgttcgtgctggtgcaggcgctggtctacctcatcctccgcagctcgtcgagcgtcttctccaaggacggcaagctgaggtcgtccatgagcttccggtcgatgcggtccatgagcgtcaggcgcttcctcgcgccgctctccgacgtccccgtcggcaccgacgagccctggccgtcgccgtcgtcctcgccgtcgccgaccttgtcgcgccgctgggctagccgccgcgaggattaattgaagcggttagtgctagcttctgggctctggccagctaggtgctagtttggttactctgaagaaacctgaattatcatgggttggtttggtttgtgattaatggaaatggaaaatttgggaactgggctctgaaagaggcagattattagagtggatcttgtagatatgtggattgaattaagttaatactgaatggtggattatttgattctttacaatttgtctgctaaaaaaaatctgtaaattggaagtatactattcagatggcgtaaatctgaagttcttatgtacatgctaatacaggagtattatactatacagtacgaagtattggattgagaaaaaaaaaaaaaaaaa

SEQ ID NO: 22928 - DNA, 292 bp, Oryza sativa
  unsure (1)..(292): unsure at all n locations
  Clone ID: PAT_MRT4530_28057C.1
cgatttagttgcccttccttttttttttttttgttggtttaatacaacattgggtgacaaaaccacccagcaccgggcaaatcagacagctacaaagcgattgataaaaacaaaaacttcgggccagcnaatgttcatcagctaatattcttcacgacaaaaccaaggccctggcttattaaaacaaggcttttagatcaccaccgatttattgtgcccccatgttcgatttatcccaaagggaaaaaatcctgaaattccgatcccaacttgtgaatgcttttagagcctc

SEQ ID NO: 22929 - DNA, 255 bp, Oryza sativa
  Clone ID: PAT_MRT4530_28058C.1
atgcaggcatgggctgatgcaattgacatatccaccaatgcattccgagatttttcgccgaacaatttccagaccaaaatgcaacaaatggactttcgcaatgacccgatctcaagactctacgaaagttcagagctgaatgctgcattggaaaccatggttaaagctgaaaggggtggcatggcatgggttcaggtgcgtttagttcacgccaaaattgaaagttttgatgtgatgaaaaagttagaagtttga

SEQ ID NO: 22930 - DNA, 177 bp, Oryza sativa
  Clone ID: PAT_MRT4530_28059C.1
atggagacaaagttcaaggacaataagctaaaaggaatgttcaatggaaggaagtccaagcaagctcaagaaggtattgaatcaagtagtgcagatcttgagagtggtgaagacaatgacaagggaaagaacatcttcggcgtatgcttcatggctcatggtgaatcagattcctga

SEQ ID NO: 22931 - DNA, 5388 bp, Oryza sativa
  Clone ID: PAT_MRT4530_2805C.1
atggccgaacgggcagtggcgcacagcctctctccgaacgctagcggtgacgacggggagcagaacccgcgccgtcgggctcgcaccccaccgtccccctctcgccgaaatcttgggcggggggaggcgctcggggaggtcgaacgatccgcgacttcgccgcccgcgggcgacgggggaggacggcgagacggggcgcgtcgccgcctcgcctacggcgatggcggcacgccccagggcacgctccaggctgcgggcgcgctcctgcgtcacccgcccgtcgtccccgatccagagactccagcccgacgttggctggatgacgtggccgacttggtcatgacggcacagcagcgcctaggcgccggcgggcggtcctccgccaccgaggcctctggcgctgccgccgccggctccatgtcgtcgaggcggaggacgcggcgagcggcggccgttacccgccgttcgtccgccattccctcgtcaacgcctccgacccaagaagatgtgcgtgggggaacggatgcccgcctcgatatcgagcgccggtgcgacgctcgtcgcgccgcccacgcaacggagggcgcttcctcgtccggagcgccacttcggtccgggcacgggggccggccccccgtgtccccggttggcggtgccggctgtcgagcctttgtggcgagccttcggaacgtccgttggctcccaaggttccggcccaccatcaccgaaaaatacgacggaagcgtcaaccccgccaagtttctccagatctacacgaccgggatcgaggctgccgggggtgacgacagggtcatggcgaatttcttccccatggccctgaaggctccggccgcccctgggtccgccgctcggtcagggcggcgggacaggaggaggaagaaggggtcggcccgttccgacgacgagggtcatgtcctcgccgtcgagggcgcttcgcgggccccccgaaaggggaggcctgcgagcgacaaaaagaaggaggccggcgctcccagcagggagcgcccgaccggcaagtggtgtaccgtgcacaacacctctctccacgacctcgctgactgccgcgcggtcaaaagtttggctgagcggacgaggaagtgggaggaggagaagaggcaggagcgctgtgagggcaagaccccggcggctcccgccggcaaccggcgaggtgaggccaagcagaaggccaccgccgaggacatcgacgatggcgacgatgacctggggttccaggagcctgaggccaccgtcgccaccgtcgatgggggagcgtgcgctcacgcttctcgccggagcctcaaggccatgaagcgagagcttctggccgcggcccctacccatgaggcgacgcggcgggcgcggtggtcggaggttgccctcacctttgaccagaccgaccacccgccgtgcgttgcccggggaggacagatcgcgatggtggtttcccccaccgtttgcaatgtgaagttgggtcgtgtcctcatagacgggggtgcagccctcaacatcctttcccctctagcctttgacgccatcaaggccccggggatggtgctccggccgtcccagccgatcatcggtgtgacgccggggaacacctggccgctgggtcatatcgacctcccggtcaccttcggtggttccgccaacttccgcatggagtgggtggacttcgatgtggcggacctcagtctgccctacaacgcggtcctggggaggcccgcgttggtgaagttcatggcggcggtccactacgcctatctccagatgaagatgccgggccccggtggccccatcaccgtccatggcgacctcaaagtcgcgcttgcttgtatggagcagcgcgcggaccacctcgccgcggcgtccaagcccacgggtggcgacgagaggctcagcacctccgtcccggccgccccaaggcagcggatggtcacgtgcgacgaggtcccggaagacgcgctcgtctccttcctgcgggcaaacgccgacgtcttcgcttggagaccggcggacatgcccggggtccccagggaggtgattgagcatcgtctcgccgtgcggccgggcgcaaggccggtccggcagaaagtgcggcggcaggccccggaacgtcaagccttcatccgcgagaaggtggcgcaacttctggaggccggattcatccgtgaggtcatccatccggagtggctggcgaacccggtcgtcgttcccaaggcgaacggcaagcttcggatgtgcatcgactacaccgaccttaacaaggcatgtcctaaggacccttaccccctgccacgtatagatcagattgtcgactccaccgcggggtgcgaccttttgtgttttctagatgcatactctggttatcatcagattcgcatggctagggaggatgaggaaaaaactgcattcattacccccataggaatttattgttatacgacaatgcctttcgggttaaagaatgcaggtcctacttttcaacgtactactcgaatttctttgggtagccagataggacgcaatgttgaggcctatgttgatgaattggttgtgaagacgcgcaaccaagagaccttactctcggatctagcggaaactttcgaaagtctccgctccgcctgcataaagctgaaccccgataagtgcgtgttcggcgtgcctgcgggcaagcttcccgggttcttggtctctgcccgaggcatcgaggccaaccccgagaagatacgagctatagagcggatgcgcccccctagcaagcttagggatgtgcagtgcgtcaccggctgcatggccgccctaagtcggttcatatcgaggctaggagagaaggcactacccctatttaagctcctcaaacgctccgggccgtttacctggacggaggaggctgagcgggccttcactcagttgaaggcgtacctcagttctcccccagtcctggtcgccccggagccagatgagccgttgctactctacctggcggcaaccccgcaggtggtcagcgcggcgttggtcgtggagcgcgacgaggacaaccctcactccgcgcatccccaccctgtgtcgactcgacccgggagagagcagggaggagaggcccccgagccgaacggcggcccgaggcccccgacggccggagctggccctccgcctgcttgtccgacggtgccaggcgcccccgacccccaggatggccccggggccactgcgggaaggctgtgcctgtcgccctctgaccccgaggtcgtcggcacagaagccgagtgtgccccgcgtggcctctcggacgaagagcgccctggagatgcggcccctggcgaagaggatcggccccgccgaaaggcgcatcgggtcacggtggttacgtcttaccccctcggccaaatcttgcataaccgaaagggtactggacgggtggtgagatgggcaatcgaactctctgaattcgatttgcgctttgaaccacgccacgcgatcaagagccaggccctcgccgactttgtggcggagtggaccccagctcccgagcctgtctccgcccccgaggccagctcgggcccctcgcagctgcctcacaccgcctactgggtgatgcagttcgacggctccctgtctcttcagggcgccggtgcgggggtcacgttgacctcgccgagcggagacgtccttagatacctggtccgccttgactttcgggcgaccaataatatggcggagtacgagggactccttgcgggactcagagtggcagctggactggggatccgccgcctcctggtgttaggcgactcccagttggtcgctaaccaggtctgtaaggagtaccagtgctctgacccgcagatggacgcttacgtgcgccaggtgcggcgtatggagcgccatttcgacgggatagagcttcggcacgtgcccagacgggataacgcggtcgccgacgaactctcaaggctcgcttcctcgcgagcccagaccccaccgggcgcctttgaagaaaggcttgcccagccgtcggcgcgacccgaccccctaggggagacggacgcgcctggacggcccccgaggcccgtcggagtcctggcctcgggacccgaggggagcgctcccagctcccctagattgattgcttggatcactgagatccaggcgtacctcgcagataagactctacccgaggaccgcgaagggagtgaacgcgtccggcgcatctccaagcgctacgtgttggtggaagggaccctctatcggcacgcggctaacggagtcctcctgaagtgcattcctcgggaacaaggcgtcgagcttctcgccgatgtccatgaaggcgagtgcggagcccactccgcctcacgcaccttggttggcaaggcctttcgccagggtttctattggccgacggctgtcaacaatgcggtcgacctggtccggcggtgcagggcgtgccagttccacgccaggcaaacccatcagctggcccaggccctgcagaccatacctctttcgtggctgtttgctgtctgggggctcaatatcctgggtccgttcaggcgggccccgggcgggttcgagtatctgtatgtcgctgtcgacaagttcactaagtggcccgaggcttatccggtcatcaagatcgataagcactccgcgcttaaattcatcaggggcatcactgctcggtttggggtgcctaaccgtatcattacggataacggcacccagttcactagtgagctcttcggtgactactgcgaagacatgggcatcaagctctgcttcgcctcccccgcccaccccagaagcaatggccaagtggagcgcgccaacgcggaaatcctcaagggcctcaaaaccaagaccttcaacatcctcaagaagcacggcgacttgtggatcgaggagctgccagcggtgctctgggcgaaccgaaccacgccaagccgagcaaccggggaaacgcctttcttcctcgtctacggcgcggaggcggtcctcccatctgagctcaccctgaggtcccctcgggtcagcatgtattgcgaggctgatcaagatcagcttcgccgagacgacctcgactatttggaagagcgaaggcggcgcgcggccctccgagccgcgcgctaccagcagagcctgcggtgctaccatcagcgccacgtccgggcccgatcactctgcgtcgacgacctcgtcctacgccgcgtccaaatgcgtgctggactgagcaagctctcaccaatgtgggagggtccgtatcgagtgatcggcgtcccccggccgggctccgttcggctggtcacgggcgacggcacagagctgcctaacccgtggaacatcgagcaccttcgtcgcttctacccctag

SEQ ID NO: 22932 - DNA, 1369 bp, Oryza sativa
  Clone ID: PAT_MRT4530_28060C.1
caaccacaatccatgatgccaccgccagcggttgcctttgtccaagctcaagtacaagcacaagtaccgacataaccgttcgtgccgcctgatgccctaggctttcgctcaagcatagacaacaaaaagatgttacctctgagttggagattacacaacaaccccataccaccttaattcatagaacccaacgattgccatgtacactggcaactttgactcaagtaaattcttgtcattttatgagttgacgtttgaagcaacacacggtgatgagaacaccaaggcgaaggtgattcacctggttctagacggttttgctaggtcatggtagctcaaccttcccccaagcagcatttactcatgggaacaatcgaggggcgttcccatcaccaactttagaggaactaataaaggataaaaaaaatgtaaaaagagctcttcggcatctggcagaagccaagctagtcagcttgtgaatttgtccgaaggttctcatatgcaaggtgcaagttcaaaacaccatcgtaacttcggtcatcaacgcggattcgacaaggcttcgcacaaggccgatcactgagaaaatcatgaggaaggagaagaaaatgcttgactacctctttcgcattactgaggattatgcatgagggaaagaagatacaaagcacagaagtgaaattcaagccaagtatgaccgagccacaaggcaggacggaagcctgagtcactaaaatagtcgcaccagttaacccaccacgataaactctgccacaactgtcatggaagaaatttcagaatgacaaggggaagcaagtgatgacggtcaaggaggtccaagcctcgcgcatgaactttcatgcaaggaaatgaagcgaacaggctcccgccaagaagaaaaagtgcagcatagataaatattgcttgtagcacgataaattcacacactcaatggataagtgccgaaatttgcagcagctgagccaaggatagtctcctcccctgaaccgccaatgggctgaagagggtgatcaaccgagagagcccgaacagtcatcacgagcggatatgccgaaggattcacaccaacgaggcaaaaagacgtacatgaccaggcgatgattcatattgctgcaaaccccaaaaccaaggtgccgcaatactgtaacaccccaatttcttttgaccccgaggatgcgaaggggatctttgttgctcaccaagacccatgcgttatcacgacgggtatttttgggtgtgaagttccgtgagtgctggttgaaggagggagttccatggacataacattttttgatatgtactgcaagatgggccttgcaacgactcagactcggcctaatgtttttct

SEQ ID NO: 22933 - DNA, 278 bp, Oryza sativa
  unsure (1)..(278): unsure at all n locations
  Clone ID: PAT_MRT4530_28061C.1
ggccgcggttttttttttttttttaagaggggcaccaccgtttagcaaatatataagatgcgggcctccatanaatgtgtcgaaaatcaacttaaagatgtgcattaagccccaaagaaggacaacaagaaagcaatctttttttggttcaagacacttgcccctttggaaaaggggggaacgagagtagggggggggggcggaggcggaagcaaatgcgggaaaggagtgtgggtccttcccacaaaaccctcttgggggggggggggggggggggg

SEQ ID NO: 22934 - DNA, 1333 bp, Oryza sativa
  Clone ID: PAT_MRT4530_28062C.1
catgcgtgaggtgctcctcctcggctcgttggtggttctcgccttgttgtcgctgttcccgtgctgctcctgtctctcgcagggagcggaggaggaggaggacgacggcgaggtgcgcttgatggggctcgccggagaggccgctggctcgcctggcagtggcggcgggttcagtgcaaatggtaaatttagctatggttatgcgagctctcctggaaaaagatcctccatggaggacttctatgacaccagaattgatggtgtcgatggagagaccgttggactgtttggtgtctttgatggtcatggtggagctcgagcagcagaattcgtcaagcagaacctcttcaccaatttaatcaagcacccaaagttattcagtgataccaagtctgcaattgctgaaacttacactagcacggactctgaacttctgaaagctgaaaccagccacaatcgagatgcagggtcgactgcctccactgcaattctcgtaggcgaccgtctgctcgttgcaaatgttggagattctagggctgtcatttgtagaggaggagatgctatagctgtgtcaagagaccacaagcctgatcagtcagacgagaggcagaggatagaggatgctggtggttttgtgatgtgggctggaacatggcgcgtgggtggtgttcttgctgtctctcgagcatttggtgacaaactcctgaagcaatatgtggttgctgatccagagatcaaggaggaggtggtcgacagctctctcgagttcctcatccttgctagtgatggcctctgggacgtggtgaccaacgaggaagctgtggccatggtgaagccaattctggattcagagcaggctgcaaagaagctcctccaggaggcctcacagaggggaagcgcagacaacatcacctgcctcgtcgtccgtttcttggagcaggagaatcacctgccagagagaccgacgaatgatcaagcctcctaacatatcaatcatagctctcttccatacacaccgttcttcattgctcttgcaagtttcttcgaccttatggttgtcttgtgccaagcagatgatgcatctgtcataagtgtcatctgtggatgctgctgtagctgaacattgtaacttgtcgggggatgtgttttttgccatctccttcgttgcttgcgttgccctgatcttgtttgagggcaacttgcaatcgcaggttaagtgttggtcctcaatcatatgatgtagctttctactaaacttgatgtaatgatatgtgtgccattctagagcaaaaaaaagggcgaggcaaaacggtatacaggatccaagctgagg

SEQ ID NO: 22935 - DNA, 357 bp, Oryza sativa
  Clone ID: PAT_MRT4530_28063C.1
atgtcccgcgccctccccagcgccctcgccggcgccctccacagccagctcagcctgctcctccccctgctcatggtggtgtttgggttggggtcaaaacaacggtgggtgcggaagaagagaagaggagacgggacgggaggggcgtcggcggcggtgggcgaaaactgcgtaggaaaggggagaattgagaaagacctttgggcaaacgcgcgcgagtgccgcgcgccgccggtggcgacggagccgcggggcgcaggcacctttcagctgacgggagcgtcattaactgttgaaccggcgtggactggtgactggtacgatgacagagacggccgtgtttatgtgcttccgtag

SEQ ID NO: 22936 - DNA, 718 bp, Oryza sativa
  Clone ID: PAT_MRT4530_28064C.1
acgagtagtatgggactaatcacgaaaaacattgttagacccgcccataaccgcgggcacggctattcgaatagttttactctggccagagatgtaccactatacccacaagacacagcctcaacatcatgtccaccatgcgtcgcgatactggaaagtacccgaatagaggatgtgacaataccccctgcacaacacaacccaccacagtgaaccgttcctggatcataatcaccccctcaataaccagaggcatggactccccagcgacccccacggacttctcgccgattctcagtctggcaccccgtaatgaaccatgctatacaaaagcactggatggttacgacgatggcaaacggcggcacgacggcggacactgaggacaccaacgcgaagagaagatcagcacggtccttaccggcacttacatggcgacgggcgatgaaaacagcggccggtgatgagcttcgaagggcgacgagatcgggatgacggtggcggcaactttacggcgaataccggcggagaaagggtggccggggtagctctcacccttgcgaagccgagggaggtgacggggctgaccggcgacggccgaggcgacggcgcacggcggctggagaggcgaccggaggtggaaagagagggagctcgcggggaggcggctagggttagggaaaaattcgggaaaaaaaagggaaacggaagaggagac

SEQ ID NO: 22937 - DNA, 3357 bp, Oryza sativa
  Clone ID: PAT_MRT4530_28065C.1
atgaagttcgatcttccgctgctgaactacgacacgcggttctcgctaaggcaagtcaagatgcgggggattctggcgcagactcatgactatgatgaggcactggataacttcggcaagaggagggccgagtggactgctgaggagatccgcaaggatcagaaggcgctcgccctaattcagttgcatcttcataatgatattttgcaggagtgtttgatagagaaaacttctgcagaactatggctgaagctggaatcgatctgtatgtccaaggatctaaccagtaagatgcagatgaagatgaagctgttcactctgaagatgaaggaggaggattcggtgatcacccacatggctgaattcaagaagatcgtggccgacctagtgtcgatggaggtgaagtatgatgatgaggacttaggtcttctactgttatgttctttgccaaattcatatgcaaatttccgtgacaccatacttttgagccgtgatgaactaaccctaaaggaagtttatgatgctctccaaaacaaggagaagatgaaaattatggtgcagaatgacgggtcgtcgtcctcaaagggcgaagctttgcatgtgagaggcagaactgaaaacagaacctcaaatgaaaagaactacgataggagaggccgttcaaagtccaagccgcctggtaataaaaagttctgtgtttattgcaagctgaaaaatcataatattgatgagtgcaagaaggtccaggctaaggaaaggaaaaacaaaaaggatggtaaggtctctgttgcttctgctgctgcttctgatgatgattctggtgattgtctggtagtatttgctggttgtgttgctggtcatgatgaatggattcttgattccgcatgttcgtttcatatttgcactaaaagaaattggtttagttcttacaagcctgtgcagaaaggggatgttgtgcggatgggagatgataacccatgtgctatcgtggggattggatcagttcagatcaagactgatgatggcatgacacgcacgctgaaaaatgtgaggtatataccagggatgtccagaaatcttatttcattgagcacgcttgatgcagaaggttacaaatattccggttcagatggcgttctaaaggtatcaaaaggttctcttgtttgtttgaaaggtgatcttaattctgcaaagttatatgtccttagagggtgtactttaactggttctgattccgctgctgctgctgttactaatgatgaacctagtaagactaacctttggcacatgcgtttgggacatatgagtcaccttggtatgacagaattgatgaagagaaacctgctgaagggctgcacttcgagtaagatcaagttttgtgagcattgtattttcggcaagcataaaagggtacagttcaacacttctgttcacaccaccaaaggtactcttgattatgttcatgctgatttatggggtccttctaagaagccctcacttggtggtgctcgttatatgcttacagttattgatgattactctagaaaggtttggccttattttttgaaacataaagatgatacctttactgcttttaagaactggaaagtaatgattgaaaggcaaactgaaaggaaggtaaaattgcttcgtactgataatggtggagaattttgttcgcatgcctttaatgattattgcagacaggaaggcattgttaggcatcacaccataccccatactccacaacagaatggtgtggccgaacgtatgaacaggaccattatatccagggcccgttgtatgctgtctcatgcaaggatgaacaagcgtttctgggctgaagctgcaagtactgcctgttatttgataaacaggtctccttctattccactaaataagaaaactcctattgaggtatggtctggtatgcctgctgattattcacagttaaaagtttttggatgcactgcttatgctcatgttgacaatggaaaattagagcctagagctgttaagtgtcttttccttggttatggttcgggagtcaaaggctataaattgtggaatcctgaaactgggaagacttttatgagcaggagtgttgtattcaatgaatctgtgatgtttactaacagtttgccctcagaacatgttccagaaaaagagttgcagcgtatgcacatgcaggtggagcatgttgatgatgatacaggtgttcaggtggagcctgttcatgagcaggatgaccataataatgatgttgctgatgatgatgctcatgatgatgttcagcaaactcctcctattttgcagctagaggaggaattacctattgctcaacgcaagtcaaaaaggacaacaaaacctcccaaacgtcttattgaagagtgtaatttgtcttactatgctttgagttgtgctgaacaggtggagaatgttcatgagccagcaacctataaagaagctgttcgttgtggtgatagtgagaattggatttctgctatgcatgaggagatgcagtctcttgagaagaacagtacatgggaggctgtacccttgcctaagaaaaagaagaccatgagttgcaagtggatcttcaagagaaaggagggtttatcttcaagcgagcctccaaagtataaggcaagttttaaaagatctaaatatgatagctgtgtttacatcaagcatgttaatggatcacctatatatttgctgttatatgttgatgatatgctgattgctgccaagagtaagattgaaatcactaagttaaagaagctgttgagtagtgagtttgatatgaaagatcttggtagtgctaagaaaattcttgatttgtcatatgctatgagtcttgttagtagatatatgtctaatcctggcaaagaacattggagggcagttcagtgcattttcaggtacctcagaggcacaacatgtgcctgcttgaagcttggaagaactgataagggccttattggatatgtgcttctattatgctggtgctctggacaggcgaagatcacttactggttatgtgtctactattggcagttgtgctcatgcaaagagttgatttggctaaaaggtttgtacgctgagctcagtggagttgaatcttgcataagtttgcattgtgatagtcaaagtgcaatttacctcactaaagatcagatgttccatgagagaactaagcacatagatatcaagtatcattttgtgcgtgatgtgattgaagaaggtaagctgaaggtggagtttgttggagttgttccaaattcacttcaagatattggccgggcttctgacgaagcggagcggaggcccaagccggaggcttgggcctgctag

SEQ ID NO: 22938 - DNA, 290 bp, Oryza sativa
  Clone ID: PAT_MRT4530_28066C.1
tttttggtaaaccattggcaaacggatgcacatttttcccatggttaggttcttattttttggcccaaggtccggaccttaaaattacagctgcagcaatccactagaaccttatattaaccataacccacaaaggaattttaaggccccctgagtcaaatcaagcagctccactttatattcttactggtggcaacattggaactgccccctgacaccccttcaggtggatcactgggattgggtggggctgggagcaactgatagcaagcaatgagtgagctagcaaa

SEQ ID NO: 22939 - DNA, 267 bp, Oryza sativa
  Clone ID: PAT_MRT4530_28067C.1
atgtcctgtgacacgcacagccgagaggaggatgccgaaaagtacgccaaggccaacgcccacaaggcctcccgcatcagcgcccaagcgagctcgtccgcgggaggtgacaactgtggtgggaggacgatggcttggagggtgaaccagtggagcatgaagaagtcgtcgaggtggcgcttgtggaggaacgtggtgtggacagtggcacatgtgatggaggagggggtggcagttggagtggagcgcgtggtacatgaggcctga

SEQ ID NO: 22940 - DNA, 4232 bp, Oryza sativa
  Clone ID: PAT_MRT4530_28068C.1
atgaagttcgatcttccgctgctgaactacgacacgcggttctcgctatggcaagtcaagatgcgggggattctggcgcagactcatgactatgatgaggcactggataacttcggcaagaggagggccgagtggactgctgaggagatccgcaaggatcagaaggcgctcgccctaattcagttgcatcttcataatgatattttgcaggagtgtttgacagagaaaacttctgcagaactatggctgaagctggaatcgatctgtatgtccaaggatctaaccagtaagatgcagatgaagatgaagctgttcactctgaagatgaaggaggaggattcggtgatcacccacatggctgaattcaagaagatcgtggccgacctagtgtcgatggaggtgaagtatgatgatgaggacttaggtcttctactgttatgttctttgccaaattcatatgcaaatttccgtgacaccatacttttgagccgtgatgaactaaccctaaaggaagtttatgatgctctccaaaacaaggagaagatgaaaattatggtgcagaatgacgggtcgtcgtcctcaaagggcgaagctttgcatgtgagaggcagaactgaaaacagaacctcaaatgaaaagaactacgataggagaggccgttcaaagtccaagccgcctggtaataaaaagttctgtgtttattgcaagctgaaaaatcataatattgatgagtgcaagaaggtccaggctaaggaaaggaaaaacaaaaaggatggtaaggtctctgttgcttctgctgctgcttctgatgatgattctggtgattgtctggtagtatttgctggttgtgttgctggtcatgatgaatggattcttgattccgcatgttcgtttcatatttgcactaaaagaaattggtttagttcttacaagcctgtgcagaaaggggatgttgtgcggatgggagatgataacccatgtgctatcgtggggattggatcagttcagatcaagactgatgatggcatgacacgcacgctgaaaaatgtgaggtatataccagggatgtccagaaatcttatttcattgagcacgcttgatgcagaaggttacaaatattccggttcagatggcgttctaaaggtatcaaaaggttctcttgtttgtttgaaaggtgatcttaattctgcaaagttatatgtccttagagggtgtactttaactggttctgattccgctgctgctgctgttactaatgatgaacctagtaagactaacctttggcacatgcgtttgggacatatgagtcaccttggtatgacagaattgatgaagagaaacctgctgaagggctgcacttcgagtaagatcaagttttgtgagcattgtattttcggcaagcataaaagggtacagttcaacacttctgttcacaccaccaaaggtactcttgattatgttcatgctgatttatggggtccttctaagaagccctcacttggtggtgctcgttatatgcttacaattattgatgattactctagaaaggtttggccttattttttgaaacataaagatgatacctttactgcttttaagaactggaaagtaatgattgaaaggcaaactgaaaggaaggtaaaattgcttcgtactgataatggtggagaattttgttcgcatgcctttaatgattattgcagacaggaaggcattgttaggcatcacaccataccccatactccacaacagaatggtgtggccgaacgtatgaacaggaccattatatccagggcccgttgtatgctgtctcatgcaaggatgaacaagcgtttctgggctgaagctgcaagtactgcctgttatttgataaacaggtctccttctattccactaaataagaaaactcctattgaggtatggtctggtacgcctgctgattattcacagttaaaagtttttggatgcactgcttatgctcatgttgacaatggaaaattagagcctagagctgttaagtgtcttttccttggttatggttcgggagtcaaaggctataaattgtggaatcctgaaactgggaagacttttatgagcaggagtgttgtattcaatgaatctgtgatgtttactaacagtttgccctcagaacatgttccagaaaaagagttgcagcgtatgcacatgcaggtggagcatgttgatgatgatacaggtgttcaggtggagcctgttcatgagcaggatgaccataataatgatgttgctgatgatgatgctcatgatgatgttcagcaaactcctcctattttgcagctagaggaggaattacctattgctcaacgcaagtcaaaaaggacaacaaaacctcccaaacgtcttattgaagagtgtaatttgtcttactatgctttgagttgtgctgaacaggtggagaatgttcatgagccagcaacctataaagaagctgttcgttgtggtgatagtgagaattggatttctgctatgcatgaggagatgcagtctcttgagaagaacagtacatgggaggttgtacccttgcctaagaaaaagaagaccatcagttgcaagtggatcttcaagagaaaggagggtttatcttcaagcgagcctccaaagtataaggcaaggttagttgctagaggttacagtcaaattccgggtgttgactataatgatgtgttctctccagtggtaaaacacagttcaattcgtacttttcttagtattgttgcttcacatgatcttgagcttgagcagttagatgtgaagactgcgtttttgcatggagagcttgaggaggacatatacatggaccaaccggaagggttcatagtgcctggcaaggaaaaatatgtgtgcaagttgaagcgatccttgtatggtttgaaacagtcccctcgtcagtggaacaagaggtttgattcatttatgttgtcacacagttttaaaagatctaaatatgatagctgtgtttacatcaagcatgttaatggatcacctatatatttgctgttatatgttgatgatatgctgattgctgccaagagtaagattgaaatcactaagttaaagaagctgttgagtagtgagtttgatatgaaagatcttggtagtgctaagaaaattcttgttatggaaattagtagagacagaaaatctggtttgctatttcttagtcaacataattatatcaagaaagttcttcagcgtttcaacatgcaaaatgctaaggctgttagtacccctattgcaccccactttaagttgtcagctgctcagtgtcctagtacagatgcagagattgagtacatgtcaagggttccttattctagtgctgttgggtctttgatgtatgccatggtttgctctcgtccagatttgtcatatgctatgagtcttgttagtagatatatgtctaatcctggcaaagaacattggagggtagttcagtggattttcaggtacctcagaggcacaacatattcatgtttgaagtttggaagaactgataagggccttattggatatgtggattctgattatgctgctgatctggacaggcgaagatcacttactggttatgtgtttactattggcagttgtgctgtgagttggagggctactttacagtctgttgttgctttgtctactactgaggcagaatatatggctatttgtgaagcatgcaaagagttgatttggctaaaaggtttgtacgctgagctcagtggagttgaatcttgcataagtttgcattgtgatagtcaaagtgcaatttacctcactaaagatcagatgttccatgagagaactaagcacatagatatcaagtatcattttgtgcgtgatgtgattgaagaagatgattggttgatttatgatacaagaagaatttgtctcaaggtggagtttgttggagttgttccaaattcacttcaagatattggccgggcttctgacgaagcggagcggaggcccaagccggagttaaaggggttttccacgttaaatcgtgtgtctccgctgtgattgtttttcggctccgccccgcggtacggtacggtatatatgccctttgctagggtttcgtggagacttgattctcttgtaagccgccataggcgtgtaacccaaaactcttgagatagtgagattgttgctggctggtgcccgtggttttttcccttgattctcttgtaagccgccat

SEQ ID NO: 22941 - DNA, 692 bp, Oryza sativa
  unsure (1)..(692): unsure at all n locations
  Clone ID: PAT_MRT4530_28069C.1
cggacgcgtgggcggacgcgtgggcggacgcgtgggcggacgcgtgggcggacgcgtgggcggacgcgtgggtggatgggtgatccatgtttcccgagccaatttaaatgggacggcgtggaatgtcggaacacaagtgataatattcctaggataatatcaatcgatctctccaacagtaacttgcatggggtgatatctagtaacttcacgttgctcacagcacttgagtatctaaatttgtcaggcaaccaattgaatggaccaattccagactccctgtgtaaactaaatgaaggatcgctcgttttcagttatgggtcaaatggtgatgtctgcaacaaaacaaacctgcccggatctaaaaaaagagctgctatcttagctatctcaatagcagctcctgtgctggtagtggtctcacttttaattgcatatttgatctggagagcgaaaggaaagtccaatatttctatcccaggaagtgaaaaatatcattgngatcgtctacaaaaaaaatgaaaatcgccatttcacctacgatgagctgaagaagcttactgataactttcaacagttcatttgagaaggaggcttcggatgcgtgtaccatggctatttagaagacaatactgaagttgccgtgaagatccgttttgaaaaatcatcgcacgggtttaatgagtttttag

SEQ ID NO: 22942 - DNA, 250 bp, Oryza sativa
  Clone ID: PAT_MRT4530_2806C.1
attaacagggatcataacattaaagtcagcgctggactgtataaacaattcgaacaggttctcagcatatattattaatatcacactagactgcatctctagctaggttttaggcacggaccaggatacgtgctggtttaacaagagcacgcaacgcgtttgattcacagagcacttattcaaagactagcgtgcgctcctatatctgagctaggttagcaccgggtttttgcttttgaacatatgtaag

SEQ ID NO: 22943 - DNA, 1887 bp, Oryza sativa
  Clone ID: PAT_MRT4530_28070C.1
atggagaccaggcgtcctctgcatccgctgctcctcttcttctcgccatggcttctgctgctgctgcttcttgttgttcaaggcgtgaggtcgctgcagttcacgcgagacgatttccctgacggattcacgtttggagccgggactgcggctttccagtatgagggtgcagctgcagaggatgggaggacaccaagcatctgggacacctacgctcactcatggaggaatccgggaggagaaacaggtgatgtggcatgtgatggctatcacaagtacaaggaagatgtaatgctaatgaatgagacaggcctggaggcttataggttcaccatttcttggtcgaggctcattccgagtgggagaggagcggttaatccaaaaggcttgcagttttacaatagtatgataaatgagctagtaaaagcaggtattcagattcatgctgttctgtaccatatagatcttccacagagccttcaagatgagtacggtggatgggttagccccaaagttgtggatgacttcgcagcatacgctgatgtgtgcttccgcgagttcggtgacagagtcgcgcattggacaacttccattgagccaaatgtcatggctcaatctggctatgacgatgggtatctcccgccaaatcgttgctcgtatccgtttggcagaagcaactgcacactaggaaattccacggttgagccatacttgttcatacaccacaccctgctagctcatgcttcagctgttagactttacagggaaaagcaccaagctgcacagaagggcgttgtcggcatgaacatatactccatgtggttctacccactcacagagtcaactgaagatattgctgccactgaaagagtaaaggatttcatgtatggatggatcttgcatcctttggtgtttggagattacccagagaccatgaagaaggccgccggttcccgtcttccattattctctgactacgaatctgagctggttactaatgcgttcgacttcattgggttgaatcattatacctcaaattatgtgagcgataatagtaacgcagtaaaggcgccgctacaggatgtcactgacgatatttcttctttgttctgggactgtaacatggttttgcttgttactcttgaggcagtttctaccagggacctcattagatcctcgggggctagagctcgcgcttgaatatcttcaggaaaagtatggaaatttcctgttttatatccaggaaaaacggtagtggatcaaatgcaaccctggatgatgtggggaggattgactgcttgacacaatacattgcagccacgctgcgatccatcaggaatggcgccaacgtgaagggatactgcgtgtggtcattcatggatcagtacgagatgtttggcgattacaaggcgcatttcggcattgttgccgtcgattttggcagcgaagaactgacaaggcagcccaggcgctctgctagatggtactcggacttcttgaagaacaatgctgtcatcaaggtggatgatggtcctgtctccacagccttccatgctcagctttgagtgatgggtgctgccactctcaacaccatcctgtacgctctcctgcaagaacaattctgttttagtgggcatatcatcacgcatctaccaattttcagagttggaagtcgtcaataggtactttggtaaaattatcacgaaacctgagattgaggccattcgcgtggtttcggggtgtgcactctggtgtatacccttcctcgatagccaactgtcgacgaaattttttcttgtaaccgtttattccctctctcttagtgccattggatgtcctttctttggtcatcccggtaggggggggagcctgcagcccggggatcca

SEQ ID NO: 22944 - DNA, 3936 bp, Oryza sativa
  Clone ID: PAT_MRT4530_28071C.1
atgggagacgcagctatccaagcatcactggaagccctcaccgccaccatcaagtcgctgcaagcctccgtcgaggcaaactcacaggccattcaactcctcaacaatcagtgcactgggtctacaagcggcaggacaagctcgggcgaacacacccaagatcgaccgccaaggtttcagaagctcgactttccgtggtacgacggcaagactgatccactcgccttcatcaaccgatgcgagtcctacttctaccagcaacacgtcatggaggaggagaaggtatggatggcttcgtacaatctcgaggatggtgcgcaaatgtggttcatacaagtccagcgagaggaaggcacaccgtcttggcgtcgcttcaccgagctacttcatttgcgctatgaaccgccgctccattccaaccccctgggcgaacttgcagcctgcaagcgtacagggtccgtggtggagtaccaggaccgtttcgaggcgctgctgccacgcgccggccacctcacggaagcacagaaggtgcagctcttcaccgctgcactacaacctccgctcagcctcgacgtcgagattcacaatcccaactcgctcgcccacgccatgagtttggcccgcaaactggagctgcgagcgcaatgcgccgcaccaccagtccgacaacaacgagatcggctcccaccgccggcaccacgtctcgccttgcctgcgccaaacgctcagccgccgacggccatcgtggaaggccgtcctgtcaagtgcctgtcacagaccaagatggaggagcgtcgtcgactcggtctctactacaactgcaacgaaaattttggccgcggccacaacaagcgccaccatgcagctgcacatcaagatcagcgacacgaccctattggcgctactcgactcgggctccaccaacaatttcatctccgaggacgcagccgcacgcacggccatgacgctacaccgacgcgctcgcatgaaggtgaccgtcgcgaatggggagcgagttccctgcctcagcgtactctggcaagcagcgtcgtcatcaatggggacaccttcacggccgacctattcgtcttaccgctggccggctatgacgtcgtcctcggcaccaactggctcgcgtctctggggccgattctctgggatttcgcctcccggactatgtcattttggcgcagcgaccgtcaagttcgctggcagggcgtggcaggacaggagacgacatcactccacaccaccacagccggcgacaacctgctcgacgcactgctcttcgcgttcgctgatgttttctccgagcctcaaggccttcctccaccacggagccgcgaccacagcatcgtcctctccccgggtgcccagccggtggctgttcggccttacagacagccgacgcgacgtggcgtttctgcgtcgactaccgccctcaatgccatcaccgttaaggacgcttttcctatcccggtcgtcgacgaactactggacaaacttcatggcgccaagttcttcaccaaactcgatctccgttcagggtaccaccaggtccagatgaatccagcagatgtcgccaagacggcgttccgcacacacgacggactgtacgagttcctggtgatgccgtttggactttgcaaggcgccggccacattccaagcattgatgaacgacgtcctgcggccgtttcttcatcggttcgtccttgtcttcttcgacgacattctcatatatagtgtcacgtgggcagaccatctccgacatctccgggccgtcctcgacactctccaacaacattggctattcgtcaagcgttccaagtgcgcgtttggggtctcctccatctcctacctaggccatatcatcaccgagtcctgcgtcgccatggatcccgccaaggtacaggccgtccgtgactggccccaaccacggtctgttcaagctgtgcgcggcttcctcggcttgacgggctactaccgcaagttcgtccgcgactacggcaccatagctgcaccactaatagcactgctcaagaaagaggggttcctgtggaacgacgacgcgaccacggcattccaggcgctcaagacggctatcacatcggcgtcggtcctggttttgcccgacttcaccaagccattcgtcgtcgaatgcgacacatcgtcccatgggttcggcaccgtactcatccaagacaagcacccggttgcctatttcagcaggccggtcgcacctcgacaccgatctctcgcggcatacgaacgtgaactgatcggcctcgtccatgccattaggcattggcggccatatctgtggggacgccgtttcttggtacgcacggaccactacagtttaaagtttctcctcgaccagcgtctcgcaaaaatcccacaacaccactgggtcggcaagctccttgggttcgacttcactgtggaatacaagccgggtgccttgaacacggtggccgatgccctctcacgtcgcgacaccgacgacggcatgatcctcgccatctctgcgccacggttcgactatgtcgagcgactctggcaagcacaggataccgatcctgccatcagggccttgggggatgagatccaagccggcacacgcgcggcgccttggtcactgatagacggcatggtggcgttcgacgcacgtctatacataccaccgtcctccccactgctcctagagttgctgactgccatccacgacgacggccatgagggggtgcagcgcaccatccaccgcatccggcgcgacttccacatccccaacgtccgccgaatggtacaggactacatcaaggcatgcgccacgtgccagaggtacaagtcagaacatcttcacccggctggactgctcatgcccctaccggtaccgatggctgtctgggccaacatcggcctcgattttgtggaggcactgccgcgcgtaggatggaaatccgtcatcctcacggtcgtcgaccgcttcagcaagtactgccacttcatccccctggcgcatccatacactgctgagtcggttgcccaagccttcttcaccgacattgtgcgtctgcatggcgtaccgcagtccatggtctccgatcgtgacccagtgttcacttccttgttctggcgagaactgatgcgactcatgggcaccaagctacacatgatgacagcattccacccgcaatccgacggccagacagaggcggccaaccgagtcatcgtcatgtacctcaggtgcttcaccggcgaccagccgcgacaatggatccactggctgccatgggccgagtacacctacaacacggcgtaccaaacgtcactacgggataccccgttttgcgtggtgtacggccgcgacccaccaaccatccgttcatatgaaccaggtgaaacacggatggcggcagtagctcgcaacatggaagacagggacaagatcctagctgacatacgctaccggctggagcaagcacaagcagttcaaaaggccttctacgaccggcaccaccgcgacgtctcctaccaggtcagtgactgggtatggctgcgtctacgccaccgcgaaccggcctcgcttcctcaagtcacaaaaggcaagctaaagccaagattttttggcccctaccaagtcaatgagctcatcaacaaccttgccgtgcggctggcactaccaccgcgcactcgtcttcacgatgtgttccacgtcagccttctcaagaagtttgtgggaatgccgccggacgcacgaccaccactgctggccatccacaacggtgctgccatcccagaacctgaacgtgctacccgcatgcggcttgctcgaggagtgcgacaagtcctcatcgagtggaagggagaaccggcaacatcggcaacatgggaagatgtggataccttcatggatcgctatccagcattctag

SEQ ID NO: 22945 - DNA, 468 bp, Oryza sativa
  Clone ID: PAT_MRT4530_28072C.1
atggggaatagagaggatggacataccgggtctgtcgttggagttcgtcggagtggaggccccgccatccgtgccgcccctatcgggattgcgcccgcgctgctgctccttgctcgcgtcgcctgccgccgtcaagatgcgcggcctcctccgcccctcgctcgcctgccgccggctgcctcctccccgaccatccacggccctcacctgcccggtcgcttgcctccgtggccgcccccgcccctcgctcgcccggccactcgcctccgccgccgcccccgtcactcgcccgcccggccgccgccgtccctaggctacacgcctgccgccgctttctgccagctcggttgccccgctgccgccgtctcccacgccgagaggagaggagaggagagttgcggcagtcggcagaagagagaaggggaaagaatggagaagagtgtagaaagaagcagagagaaggaggaa

SEQ ID NO: 22946 - DNA, 139 bp, Oryza sativa
  Clone ID: PAT_MRT4530_28073C.1
atggcctctcgggcacgcgtgcgctcgtacctctactcccgtggcattgattatcccgtggacggccccggttacagctttggtcacttcgatagtaccgatagcatgtttactttcgacagtagcaagcgcatgttcg

SEQ ID NO: 22947 - DNA, 405 bp, Oryza sativa
  Clone ID: PAT_MRT4530_28074C.1
atggcgaggcggggacggtgcacccccggtgtggctcgcctcccctccctcccagatcctgccaaaggggggaggggggaggccggtggtggccggcggcgcggggcggacgacggaggagggaggtcggtggcggaggaggacggaggtcagcggcggcgctcccaccttccagatccggctggcggccctcccatcccggatccagaagcatcgtgggggaggacggcgacggcggctgcatgcagcagcggaggccggcggtcgtcggcggcgctcccctcccctcgcggatctggcggcatcatggggagggcggtggctgaggcggcgaggaggcggaggccgaagactttggagtacggttatgtgcccctagttgtcctacccatgtctccgccctag

SEQ ID NO: 22948 - DNA, 1955 bp, Oryza sativa
  Clone ID: PAT_MRT4530_28075C.1
atccaccaaatgtactgctctagtgctgtgtttaaatgcagaggcagtggcagctacaggacaagagcaaggaggcgaacgagaacaaacaaatgcaaaagacagcacaggagaagagaggccgtgaacaacaaaagaaactcacttgtaacttcgtactaagctaaataaacaaaagaacgacgttggtcaaaggaaacaaacaaaagttggaagatactgctaaattgctaactgaacctggctgcttccactattttcaccgtcttacttcgtgctgcatgtgtcgaattcacagtggtttgctacttggtgctaattgctaccagttgctagctagctagtgctattacaggattttacttcatctcttggtccagtgagccggccatgcccatcccggcggcgccgccgtgccgcagttgaagccccggcgcgccgccgctcacgccgaggaagtccctcgtgctcagcttgccgtcgtccacgccggggaagccgccgccgacgaacaccgttccggcgccggtgccgcccccggtcgccgagagcgtgttcatcatcagctcccggagctggctctcgttctccgccgtctgagaagcagtgctcctcgacgagctctccccggacatgatgaacccggctgctccggcgggcttaccgttcagagcgccgccgccgccgccgcttccgagacctctgagtagcgagttcacgctgccggcgccgccgctgctcgtcgtcgcgcccatctgtgcggccttctggagaagcgccgtcgccgacatctgcggcggcgggacggtctggtcggacgagctgtacaaggacgagaagccgccgccgccgcccatcatgttcccggagaagatgctccccgagtcggcgttgttaccgctgttgccgtgctcgccgctgccggcgcgggcgccgttcccggcggcgacgccgttgaactgatccgggaagacgagtcgtccctcctggtggtggtggtggtggccgccgttcccgccggagaagtagctcaggttaaggaggccgccgccattgctcccctgctgctccggcagctgcattaggccgtggaacgccggcttgccgtggagcagcgaggtgtgggcctgtccgtcgtcgccgccgccgccgaggtagaacggcgaggaggacgacgacgtcggctgcgcggcgcggaacgcaggggagccggccgcggcggacgacgtggccatgaggtggtcgaactgcgcggcggcgttggcggcggtggtgatggcggaggagtggtcctggaacggttggagctggtgggaggcggccatgccggtgaggccgccgatggccatgccggcgccggcggcggcgtacagggcggcgcccatgggtggcataatcctgccgctctcctgcgccagcgcgtcgcagaaggcgcggtgggtgatgaagctgtccctcctggagaagagggtgccgcagtcgcagcggtactcgcgggtgccgcaggtcttggagtgagccttccagtcggactggacggcgtagcgcttgttgcacttgtcgcacttccacttcttctcgccgtgcttgcgggagtagtgcttcttgatgccggtgaggtcgccgagggctcgcgacgggtcgtggtggacgcaggacggctccgggcacaggtacacccgccgccgcgtctccttggggttcttctgcttcagcttccatggcaggttgtgccctcgccggtgcagctgcaggttctgctccctctggaaccccttgttgcacacctcgcacacgaacttgcttggattcccgggctgattcctcttcttcttgggcggcggcgtggccgcgaccggagcagccgcgttgttctgcaggggaggctgctgctgctgctgctgcatctgcggctcgccgagaccgaagtagtgtgcagacgaggcggctgccat

SEQ ID NO: 22949 - DNA, 2374 bp, Oryza sativa
  Clone ID: PAT_MRT4530_28076C.1
tcggttgttggcttttttttttttttttttttcacaaaaagaaatatgtggctcacataaatagaagagacttgtttacatacaaacaccaaaggtttcaagtgacaaatcgatatagttttacagaaacaacaaatggaatcgactggcagggtacttgcgaatctgctagagcaaataatgtggttataactggaaaaacaatgccggcaactcatacagctgatatataatcttaaacctttgttcattggatgaaatatatctgcagaatccattgctccctcctggtacttgtcatatgagtcacttgcttccaccattgatcaccaaggcctctggctgtggtggctcagcaatgtccttcaccacctccaccttgggagggcccgaatgccgcctcatcggagaaggcggcgccattccagcttggaaggacagcttcttcttcactgaaccaacagaggctactttctccggtggtgtctctgcaccatcggtcactgcagatccttggaggcgcaacttagctcttgcagattttgtgggagccatgtagcttggcacagatggggagcttgcgaggctctcgtcgtcacgcacggttgacgtggctatactgtgcctcctcggtcgttcagactggacactgaacacactcttcgcgtcgtcatcaacctgtgagagcccattcttcggtgtcgcggatttcttctttgcaaagatcggtgacactttagcggagggagttgaaggggattgacgggaggctggacgggtcagctttggagttgttggtgatgacttgtctggcttggatcccctacggttgaaggcttttgtgatctcaccctctccaagattcaagcttgcactcttcgctgatgcacggtcaaggttgctctccttgtcggtcccagcacgcccctcccaaggctttgctgccatccagcgttccaaccagctccatccccattgtgggttgttagggtctacaaacattgggttgactgaccttgaagtgctcttccactgatgtgaaaatgcatatgcgagcgccctctcccttcttactgcagcctcttgcctgcttataagactcgcctcaatttgttccttagactgagtgctgtcatcccactgctcccccatcctcaaactctccagctcctgtttcagcagaagctggcgctggagggcctggttctcctctgacattttcagcctccttgaacgtatctgcgactgcacccgtgctagagtctgcatgcaacgcagagtgcttgcagcttgacgcttaaccgagttaccctcaaccagtgacttcaatctgacaagtccccgcagagctcgtaatgccctccttgcctttgtaatatttgcaccaacacagtggtaaatgaaagcagctgatgaaataaatagccacgacgaattctcagacaacaggtaacctcggaaggcggtctggatcttgattgtagcttgctcttcccttgatacaccaggtggcaatgacgatgtctgtgcgggtacggggacagcctcaggtacagcctccacagtgacatgtttgctttgctcctgctcaacttcagggaccttaacctcttcaatctgttgaacaggtggaggaggtggagggggtggcaccgaaacattgacttccagagaagccgaaggggttagatctggcgggttcgggttactagctgctaattttctcctcagtctctcctccttcttctccttggattcagggctgaacaccttcttgacagctccaaaccacttccccttcttccccatcctcccaaatccttagaggagccctcagaagaagaatcaccaaatcttcctgcgaaaggaaagagaaagagggccaaataatcccccctttcggttgtgcggcaaccagcagcaacaacaacaacaaggtgtgtcagatcggcatgagaggacagcttaattctccaggaatctgcacaaatgcaatcatgtggatggtggtggtggatgaacaaggagggattctagctggagctaggactgacaggagggcacggccagcccagagccagccagagcaggaggaggaggagaaggaaaaaaatgggttcttggaagttggaagctgttgtagtagaggctgggatctcttggatgggagtggtgactggtgagagcagctgaagatgcttctttgggtacactttcttggtgcttcttgcaaattcttgcaactctctctcatcagtgggaagaggactgtggacagcttggagacagaaaagtgtgaaataataatacaactgcaatctccattatatataatacactgctaatatagaaatattttcttgaaggcatcccc

SEQ ID NO: 22950 - DNA, 278 bp, Oryza sativa
  unsure (1)..(278): unsure at all n locations
  Clone ID: PAT_MRT4530_28077C.1
cgcgaaatcaaaactgaatnccgcgttgctcgctcgttcgaaggattttcgattcgattcgatcgtgttcgaaggttttggttggtgagatgatgactacgccggtgatgatgaggagggccagggcgaggcggccgttngccgtcggcggngaggaatcgggagaacgtcgagngcganncgatgtcgttctcgcagtgcgttcgtcggttcgggaagccngcggccaagaagggctcngcgaggacgccaagacgtgcgactccggtggcggcngc

SEQ ID NO: 22951 - DNA, 342 bp, Oryza sativa
  Clone ID: PAT_MRT4530_28078C.1
atggcccaggccgggctgcaaatgcaaagcctaatagtggtgaaacaaggagaggagagcgttttgggttcaggcccgcgaagcagcagggacagaccttctcaagttgctctggacagggacaaggacaaggtggcagcatcatccagttcattggtttcaggtacaccaccgttgagagtggatctcaacaaagttagagaggcaaagagatatgctgtctttcaagcacagcatgaggggtgccttggaagctataaaagttttgattcctcgtttggtaattatcttgtccccgtcatcccaagcaatgacttctttgtgcaaattacaaataaatga

SEQ ID NO: 22952 - DNA, 1452 bp, Oryza sativa
  Clone ID: PAT_MRT4530_28079C.1
atggctgaggagagagaaagcttcgaaagtcagtgggcgccctccgatgtaacggaggaaaacttgaaggagatggtggcgcatgagcaaggtctgcaaggggaacagattactcgacacttcatcaagagccgactggcgcctattaaggagagatcccacactgccttcgagtttgatggcaaaaatgaccctaatcgtgaagatctagaatctcttgagttcaggattatgaaggagagaatgtataaaatcttctcaaatgctatcgtggttagctactcacaccttctgccagtggtaccatataacgccttcaaccctcctccaccggaattttctctgatgaaatctgatcctccactcgctcaacgccgctctcctcgccgacaaactggtcaggccaatggaggaccaaagatccagccgactactcagccgagcgacccaaagtcgactcaacagtcgggctctcgaaagaggaaactagtcttgagcgacgatgagggcgacaatgctagaaaagctagcggtaaagaagcgactggaaaacaaccaaaacaggccaacccgaagaagaaaacatccagtcatccaatacccaaaatcaggaagtcatccagaaaaccatctgacattgatccttctagaaaagactttgaactgactagcacggagattggtcctacgatagaaaccgggccgactgaccaagatcgcccgagtagtaatcaaccagcaactgataatccacaagggattgtaataaataagcagaaagaagacgaggaagtatctctgcttgcaaaaacgcttaatcaggctactcatctcgtaaatagaatccatcttagaaatgaagcaaaaactgcaacccttgaaaagctggttcctcaccttggaaccctagaagcaaccagagcccaactccatgaaaccaaggagcttgccaggaaaaccgagcatgatcttagggatcgaatcgccaagctccaagattccaactttgagctgagtggttcatccaaagatcgcaaaattaaatctcgagctcaattcgacgtcttggtcaacaaaattaagaagcttgaaggatctagggatgaagttgccaacgctgctacaccacttatccaggccatgttttttaatattaatggtccgagttcgttcgacactgtggaaatcttcgacaagctgagagctgctctggatacatatttcaagaacatcaaggaagctgaaagtatgggggagagcatggcactggcgatgaccaaatccttgtacccgaagattgatattgatgtcatagatggttttgcggatgggaaaaaggctgccgacaagatcgctgctgatgtaattgagaggtttcaggacaccgatctcaggccgactgggtctgatgatcttgatgatgaaaaactgagtgggattgacattgtatag

SEQ ID NO: 22953 - DNA, 5775 bp, Oryza sativa
  Clone ID: PAT_MRT4530_2807C.1
atggccgagcaagcaaaggtgcgcaacctctctccgagtgttagcggtgacgacggggagccaaacccacgccgtcgagctcgtactccaccgccccctccgcgccaaagtcctaggcgggaggaggcgctggagaggatcgaaggatccgcgacttcgacatccacgggtgatggagaagagcggcgagatggggagcgtcgcctcctcgtctacggcgacgacagcacgccccagggcgcggtccaagctgcgggcgcgctcctacgtcacccgcccgtcgtccctgacccggagtctccagcccaacgttggctggacgacatggccaacttggtcatgatggcacggcagcgcctaggtgttggtgggcggtcctccgctaccaagacctatggcgctgctaccaccggttccgtgtcgtcaaggcggagggcgcggcgagcggcggctattgctcgccattcggccgccactccctcgtcagcacctccgacccgggaagatcagcgtggggggccaggtgcccgcatcggtatcgagcgccggcgtaatggtcgacgtgctgcccacgcaacggagggcgcctcctcgtccggagtgtcacctcaacacggacgcggggatcagccctccgtgcccccggttggtggtgttggctgtagagcctttatggcgagccttcggaacgtccgttggcccccaaggttccggcccaccatcaccgaaaaatatgacgggagcgtcaaccccgccgagtttctccaggtctacacgaccgggatcgaggccgccgggggtgatgacagggtcatggcgaatttctttcccatggccctgaagggacaggcgcggggttggctaatgaacttgccacccgcgtcggtccactcttgggaggatttgtgccagcagttcaccatgaactttcaaggcacatatccgcgcccaggtgaagaagcggacttgcacgcagtacagcgaagggatgatgagtcacttcgctcatacattcagcggttcagtcaagtccgcaacaccataccatgcatccctgcacacgcggtgatctacgcgttcagggggggtgtgcggcacaaccgcatgctcgaaaagatcgcctccaaggagccccagactaccgcggagctttttcagctcgcggaccgagtggctcgcaaggaggaggcctggacttggaacccctccggttccggtgtggcagcttcggccgcccccggatccgctgctcggacagggcggcgtgacaggaggaggaagaagaggtcagcccattccgacgacgagggtcatgtccttgccgttgagggcgctttgcgggccacccgaaaggggaggcctgcgagcgacaaaaagaaggaggccggcgctcccggtagggagcgtccgaccggcaagtggtgttctgtgcacaacacctccctccacgacctcgcggactgtcgcgcagtcaaaagtttggctgagcggacgaggaagtgggaggaggagaggaggcaggagcgccgagagggcaagtccccggcggttccctccggtaatcagcgaagtgaggccaagcagaaggcccccgccgaggacatcgatgacggcgatgatgacctgggttttcaggagcctggggccaccattgccactgtcgatgggggagcgtgtgctcacgtttctcgctggagcctcaaggccatgaagcgagagcttctggccgcggcccctactcatgaggcgacgcgtcgggcgcggtggtcggaggttgccctcacctttgaccagaccgaccacccaccatgtgttgcccggggaggacagatcgcgatggtggtttcccccaccgtttgcaacgtgaagttggggcgtgtcctcatagacgggagggggggggcagccctcaacatcctttcccccgcggcctttgacgccatcaaggctccggggatggtgctccggccgtcccagccgattatcggtgtgacgccggggcacacatggccgttaggtcatatcgacctactggtcaccttcggtggatccgccaacttccgcacagagcgggtgaacttcgatgtggcggacctcagtctgccctacaacgcggtcctagggaggcccgcgttggtgaagttcatggcggcggtccactatgcctacctccagatgaagatgccgggccccggtggccccatctctgtccatggcgacctcaaagtcgcgcttgcttgtatggagcagcgcgcggaccacctcgccgccgcggccaagcccgagggtggcgacgagaggctcgccacctccgtccccgccgccccgaggcagcgaatgatcacgtgcgacgaggtcccggaagacgcgctcgtctccttcctgcgggcaaacgctgacgtcttcgcatggagaccggcggacatgcccggggtccccagggaggtgattgagcaccgtctcgccgtgcggcctggcgcaaggccgatccggcagaaagtgcggcggcaggtcccggaacgtcaagccttcatccgcgaggaggtggcgcgacttctggaggccggattcatccgcgaggtcatccatccggagtggctggcgaacccggtggtcgttcccaaggcgaacggcaagcttcggatatgcatcgactacaccgaccttaacaaggcatgtcctaaggacccttaccccctgcctcgcatagatcagattgtcgactccactgcggggtgcgaccttttgtgttttctagatgcatactctggttaccatcagattcgcatggctagggaggatgaggaaaaaactgcattcattacccccataggaacttattgttatacgacaatgcccttcgggttaaagaatgcaggtcctacttttcaacgcactactcgaatttctttgggtagccaaataggacgtaatgctgaggcttatgtcgatgacttggttgtgaagacgcgcaaccaagagactttactttcggatctggcggaaactttcgagagtctccgctccacccgcataaagctgaaccccgataagtgtgtgttcggtgtacctgcgggcaagcttctcgggttcttggtctctgcccgaggcatcgaggccaaccccgagaagatacgagctatagagcggatgcgcccccccagcaagcttagggatgtgcaatgcgtcaccggttgcatggccgccctaagtcggttcatatcgaggctgggagagaaggcgctacccttatttaagctcctcaaacgctccgggccgtttacctggacggaggaagctgaacgtgccctcactcagttgaaggcgtatctcagctctcccccagttctggtcgccccggagccagacgaacccttgctactctacttagcggcgaccccgcaagtagttagtgcggcgttggttgtggagcgcgatgaggacaatcctcattccgcgcatccccaccctatgctggcttggcccgggagagagcagggaggagaggcccccgagccgaacggtggcccaaggcccccgacgaccggggtaggccctctgcccgcttgtccgacgacgccaggagcccccgacccccaggacggccccgaggccactgtgggaaggccgcgcctgtcgtcctccgaccccgaggtcgtcggcacagaagacgagtgcgccccgcgaggccgcttggacgaagagcgcccctgggatgtggcccctggcgaagaggatcggccccaccgaaaggcgcatcgggtcacggtggttacgtcttaccccctcggccagatcttgcataatcgagagggtacaggacgggtggtgaaatgggcaatcgaactttctgagttcgatttgcattttgaaccacgccacgctatcaagagccaggccctcgccgattttgtggcagagtggaccccggctcccgagcccgtctcagtccccgaggccagctcaggcccctcgcagccgcctcacaccgcccactgggtgatgcagttcgacggctccctgtctcttcagggcgccggtgcgggagtcacgttgacctcgccgagcggagacatcctcagatacctggttcgtctcgactttcgggcgaccaataatatggcaaagtacgaggggctccttgcgggactcagggtggcagctggactggggatccgccgcctcctggtgttaggcgactcccagctggtcgttaaccaggtctgtaaggagtaccggtgctctgacccgcaaatggatgcttacgtacgccaagtacggcgtatgaagcgccatttcgacgggatagagcttcggcacgtacccagacgggataacacgattgccgacgaactctcacggctcgcttcctcgcgagcccagaccccaccgtgcgcctttgaagaaaggcttgcccagccgtcggcgcgacccaaccccctaggggagacggacgcgcctgaccggcccccgaggcccgtcggagtccaggcctcgggacccgaggggagcgctcctagctcccttagattgattgcttggatcgctgagatccaagcatacctcacagataagactctacccgaggaccgcgaagggagtgaacgcgtccagcgcatctccaaacgctacgtgctggtagaagggaccctctatcagcgcgcggctaatggaatcctcctgaagtgcattcctcgggaacaaggcgtcgagcttcttgccgatattcatgaaggcgagtgcggagcccactccgcctcgcgcaccttggttggcaaaacctttcgccagggtttctattggccgacagctctcaatgatgcggtcgacctggtccggcggtgtagagcgtgtcaattccacgccaagcaaatccatcagccggcccaggccctgcagatcataccactttcatggccatttgctgtctgggggctcgatatcctgggaccgtttaggcgggccccgggcgggtttgagtatctgtatgtcgcaatcgacaagttcactaagtggcccgaggcttatccggtcgtcaagatcgataagcactccgcacttaagttcattaagggcattacagcccggtttggggtgcccaatcgtattattacgtataatggcacacaattcactagtgaacttttcggcgattactgcgaagacatgggtatcaagctctgcttcgcctcccctgcccaccccagaagcaatggccaagtggagcgcgccaatgcggaaatcctcagaggccttaaaaccaagaccttcaacatcctcaagaaacacggcgattcgtggatcgaggagttgccagcggtgctctgggcgaaccgaaccacaccaagccgagcaaccggggaaatgcttttcttcctcgtctatggcgcggaagcggttctcccatccgagctcaccctgaggtcccctcggaccaccatgtactgcgaggctgatcaagatcagcttcgcagagatgacctcgactacttggaagagcgaaggcggcgtgcggccctccgagccgcacgctaccagcagagcctacggcgctaccatcagcgccacgtccgggcccgatcactctgcgtcgacgacctcgtcctacgccgcgtccaaacgcgtgctggattgagcaagctctcaccaatgtgggagggtccgtatcgagtgatcggcgtcccctggccgggctccgttcggctggccacgggcgacggcacagagctgcctaacccgtggaacatcgaacaccttcgtcgcttctacccctaa

SEQ ID NO: 22954 - DNA, 750 bp, Oryza sativa
  Clone ID: PAT_MRT4530_28080C.1
atggcgatgcagatgaactcggtagtgcacgtgtccacctcgccgtcgccgtcgccggcgacgtctcctcctccagaaggtaagcaagaacacggcgaggtggcggccgtccatgtcgtcggcgtcggcgacgacgaggcggtgatggtggtgaaggatgaagaggcgtttggcggcggcggcgtggactactccggccgcgcgcagtggctccgcgcggcggttctgggcgccaacgacgggctggtgtccgtggcgtcgctgatgatcggcgtcggcgcggtgagcgagtcgggcagggcgatgctggtctccggcgtcgccggcctcgtcgccggcgcgtgcagcatggccatcggggagttcgtgtccgtgtacgcgcagtacgacatcgaggtggcggcggcccggcgcaggaggaggcaacgccgccgacgctgcgacggcgacggcgaggaggaggggagcggccggcttccgagcccgttcaaggcggcggcggcgtcggcgctggcgttcacggtgggcgcgctgctgccgctgctggccggcgggttcgtccgcccctgggccccgcgcgtcgccgccgtgtgcgccgccacctcggccgccctcgccgggttcggggcgcttggcgcggcgctcggcggcgcgagcccggcgaggtcggcggccagggtgcttctcggcgggtgggccgccatggccgcgtgctacggcgtgctcaggctcttcgcaaacttgtactaa

SEQ ID NO: 22955 - DNA, 2656 bp, Oryza sativa
  Clone ID: PAT_MRT4530_28081C.1
gtgagaacagtctcgagtttttttttttttttttttcctctagctaaagtgccctttttttttttttttgaaacggagggagtagtatgatatatatatactccgtatgtgagaacaatatgatcttagcaccgccatgcagcttatactagcttagcttatggacaaaggtctccatatccgatctggtacaacatttgccatgattttttggggtcaatttttacagttagaatagatggctgcaagaggccggtgatgttcagccattgatttgtttcttttttttttccttgcttcagatctcccaatcaagggagatttgatcggttggcagctcactgcaaaatgctagtagtagctagacatggcttcacattggagcttcgaaatgttgaagctgtcagcatacggtccggccgtagcagattgaagcgatgtataggttctttgaccatttttccttgacatggttgctgggaaaggaggaagttcgaagagtttcttgtgtctcgtccattggcttcctctttggtatgctcaagatgaaggcagcttggtcaggagttgctgcagtcgaagttattctgtaacctgtctcccatcgccgatggatcccttcacttggatatagaaagtccaactctaccacctgatgggaatagcctgcatttcttgacatgacaactccccaacggtttccagcagtagccatagatgtcacatggaaaccttctttccactttttgttaatccacttgtaaggaaaggattcactgactttgtatgactgctgtgtgtatggagttcctttggacattacaaccaatgagcttccattggttgctcctgctattgccgttatgtaataattcttctcccactgctccataatccaatccttgtgcagaaacacttgtgaaagctcataaacttgggaacaaaagccagtcccagcatccattatgagagcccaaaaatttgcggaagaagagacacaactaatgtacagcccatcttcattgcctttttctatatgctgatgcagccttgaatcagcaacattatagtgatatctctgcttcatgggccgcctagcattataaactgagatccattgagttgctgggcttcccaacctaactttcttcttgggctgttcatcatcgtcaagatttacaaccattcttccacgtttttgcccaaccttcagagctccatcaattctgatgggccttgaagcaggcccttcaatcaaaccatcaaagagagaaataagttttggatagtttggctcttcgtcaaatttcatgttagtgaccatctctagaaaatgtttgaacggagctggacagaagcaacacagcaactctggtgaagtagccattttcttcttacaaacaagaaaactcttgttatctccctgatacccttgccaaggtaatctccctcttattaaaaagattagggtgtaagccagtgactctaaatcatccctcctgctacctgtacgacctaagtgggcatggacgctagcgtatctaattgttcccctaaagacatctggcctctgatcatagtcaacatgctgaccagatgatgcttctttccacctggatgctaaaccaagatcaatcaggaaaagcttcttctcatcaactgacccaggatgaccaagcaaaaaattctctggtttgacatcaccatgtacaaaccctttagagtgaagcttctcaagaattgatatcgcttccacagcaatgcaagcaaccatatgggcagacatcgcctgtcccactgaattccacacatcccagaggctgggaccaagcatatccattacaagaatgtagtagtctcccaaacgacccttatagtggactgatggtatgccataacaaccattgagagtgtggtaaacctgccactcgtatggagggccatagttacatcctttactgcttcggtgctcaaatttaagcgcaacctcttgcgcatctggacccgtgcgagaacctccaccagatactcttcgaccaacatagacctgaccaaatccacctttacccaacttcctatcagttatatactctggggaattgcctacttgaacccgctcaggaactggtgttgtagtggattcatcttctgccgcagcaaatttgtctccactttcgccgtccatcatcaagttcgcagctctgtcagctaccttgttcaaaccaaggtcctcctgggctttgccggtaaccgcctttctagcaataccttcagggaggtccttgcaaggttgatcctcacacaaatcaacagccctgcacccctttcctctaggcttcagagctttcctccctcctccctcagcaactgtcttgttgcctctgccagccgcagcaccaccgcgccttccagtcctcccccgcggagctggcgacaccggactcgcagctggatctgcgtcctggacgtcgtaaaccttcttggacctcagacgagctctccaaacaccaccccgcaactctggcattatcgccccatgcaactcggccttgtgctacacccttcggtgctccttccaatatcgtcgtcggaagcggatgcccgcggcggcggccggcggccccgcgggccgcctcgtgccggcgccgccaccgcg

SEQ ID NO: 22956 - DNA, 786 bp, Oryza sativa
  Clone ID: PAT_MRT4530_28082C.1
atggacggcgacgacgaccgctgggggcacgtccaccgggacatcttcggcgagatcctgaagcgcctcccgccgatcagcggccggcgccgcatccgcctcgtctgccgtcggtggcgcgacggcgtcgacgagatggagccggagatggcgacgccgacgacggcgacgacgatgcgcgccaagccgctcgccgtcctcaaggaccgccacagccggacgctctccgcgttcgtcgtcgacggcctgccgccggcgccacggtgcaccaccagatgcatctttcaacacgtcgacggcggcggcggcggccaccaccaccgacaccgatacgaccgctggcccaacaacgtcggcgaccaggtcgtcggcacctacaacggcatcgtcctcctggcgcactcccgctacgtcggcagccacaccctcgtgctgctcaaccgcgccaccggcgagcgcctcgtggtccaaccgccgccgaaggcgaaggagatcctcggcgggtcggcggcgctcagcttcccgtaccacccgctgacgggcgagtacaaggtcgtgcacctccccgtctccagctggaagaggacgctcgccgtggcggagctgctcaccgtcggcgacggcgacggcggcgccgcgtcgtggcggcaggtgccggcgccggccgggtcgacgtgctacctctcgtggggcgtcgtcagcgtcgacggcgccacgtactgggtcggcaagggcggcaagatcatgtcacttgacctggagcatgaaatcatcgccgaagtctag

SEQ ID NO: 22957 - DNA, 892 bp, Oryza sativa
  unsure (1)..(892): unsure at all n locations
  Clone ID: PAT_MRT4530_28083C.1
aacctcctgattataccacccatncgccatactctgattcaacctaccgcacacctggaccgacaatcacccaccgacaccaactcnctttggccctggtttggcctaaccttcgnctcctttactgcaccgtgccccnannctgaacctacccccccaacttgacccganactttcccaccccacaccacacttaaccgccacactcggggggacacccacactcgggaacctccccccggttagataccccgggaccccgataacacacctnaagctccgacacaccacagttttcgggngacactcgggagattcgactccaccacccgccacctaggttacctaggtccgaccgccacacctggaggcgcctccactggacacgacccgacaccctcggtttggncactcgncaccgacaaccacacccgcggacnntngagctcggcccctaacccgctgggccacaccctaggtcggggacacccacccgntttcggcacccagcctnagccttgacccanncgncccttgncaccacacccgttaactttctagtcgactcganagcctccgggggacacgacacgacccagctaagctngacccaccttggggcagactngacccacctngncaccacacccctagtttgacacccaccttggggccccccctgggttacaacccttttcaacanacccttcctcctttccctgggtggggttgggttagtctanactacacaccccgttntgaggtatcacnntagatctctcctacgntaccataccgagtagttcgaacatcacannttcgtagttgacacacacccatcancacatatagaccccaccttagacaacaacatatacacctaccttttaac

SEQ ID NO: 22958 - DNA, 381 bp, Oryza sativa
  Clone ID: PAT_MRT4530_28084C.1
ccgttgtctgctctagatggattggaatttggaaggtatgttctataaaagaaccacgagccccttttaaaatttcaagttctgaatttaacctacgactatatgtggacggagggtgacgctgatcaaactgcttatcatacaggcggagatcattcacatgctgctagcagttctcttgtttgcccttaccttgcactgcgtggttttctccattctgtgcatgtcccttctagttttagttctggtgccgaaaacagttcatttcatcggcatccaactagcttggaaggccatgcagcccacgatttgagccatacacaagtttttcatgcaccagagtcaagaaattatgaccatgacccccgctttttgaaccat

SEQ ID NO: 22959 - DNA, 221 bp, Oryza sativa
  Clone ID: PAT_MRT4530_28085C.1
aataacaagaaggaactagatatatctgtgaaggtctaggtaacaggagggtgatattgtctcaatagatgcgaaggggctaagtgatccactgcttgtggcatcccagcataaccttgataccctccccctagataaactccgggtacaccattgatcaatagacactaagagacttaagcacctcaccgcttaattaaacatatccaaccttctccata

SEQ ID NO: 22960 - DNA, 186 bp, Oryza sativa
  Clone ID: PAT_MRT4530_28086C.1
tgacaaaggacgttgctgaaggaaatgcgacaagtgaaaatgacaggccttcagcggtggacaatatggaagttgatgttggtgaaaacaaagctaaggttaaaaagaaccaggcttacctgtcggagcgatttgatcacgatgacctcgtcaattacaggatatatcggcagcgttgttttaaag

SEQ ID NO: 22961 - DNA, 642 bp, Oryza sativa
  Clone ID: PAT_MRT4530_28087C.1
atggctgagaacatggtgatggtgagtagtagtgatgaaaatcacaatcaagtggccatcgacttgtgctcggcgtcgccggttgaccggagcctctccgccgccgccggcggcagcaccaccccgagatcaccgggcttctccatggtggtggtgccggtcgagtccccggaaaaaacgactggcaaacctcagactgacgatcatgatcagcagcaagggcgtgccaaagaggtgccacttgtcaagaaggctgcggcggagttcatcggcacgttcatcctggtcttcacggtgctgtccaccgtcgtgatggacgcgcggcacggcggcgccgagaccctcgtcggcgtggcggcgtcggcggggctggccgtcgtcgccgtcgtcctctccgtggtgcacatctcgggctcccacctcaacccggcgagcaaggagctggtggccattgcgattgctgcagcgatcatgatgaacgctctcgtcggagggccgtcgacggggccgtcgatgaacccggcgaggacgatcggggcggcggtggcgacgggcgagtacaggcaaatgtggatctacctcgtcgcgccgccgctcggcgccatcgccggagcagccacttacactctcatcaagccctaa

SEQ ID NO: 22962 - DNA, 639 bp, Oryza sativa
  Clone ID: PAT_MRT4530_28088C.1
atggaagacaccaacaaaattagaggcgacttgaagtgcgattcactctccattggaagacaacaaggtccatctcatcaacaatcttctgttccagttgttacatctagcagaaaagatggacagccgcaagaatattcttgtattcaatctcccagtccagttgctacatctaacagagaacacataatacctaattgggtaccacaaattgaaatgacatttagtagcgttgttgaggctcaacaattttcgaaccattatggcggtcaaattggttttgatgttagaaaacgatttgagaatactagcaaacttgatggcaaggctatatcagctgaatttgtttgcaacaaggaaggctttagaacgaacgataaaagagatcctttgataaagactcctcgagctgtgactagaactggatgcaaagttcatatgggagttaccctaaatcgagtgctaggaaaatatgagatacatgatttggttcttgagcataatcaaatacttcaaacccttgaaacctgtcacttgttgccatcacaacgacggataactgaagtgcatgattactacgttcagactccctttgaacaaaggatgaacgaaggatttcttctttctttttgcatttaa

SEQ ID NO: 22963 - DNA, 194 bp, Oryza sativa
  Clone ID: PAT_MRT4530_28089C.1
gcgtcgagccatacgtacgactacgcgtccgcatgaactcgtatgctaggcccgaacaagacattgtgcaggagggtatggctccattagctccaatggatgcctggaaggtgatgcggattatcacacacattcattgctagacatgctctaccaaagcggttaacagaactggagagcaccactataatgtt

SEQ ID NO: 22964 - DNA, 2696 bp, Oryza sativa
  Clone ID: PAT_MRT4530_2808C.1
ttttttttttttttttttttatgtcagcaatcactaagcaacgagatttggggaaaatacaaatgatatatcatcattatggataagatgataccagttttgaagcatctaaacctacctccatttatagcattccaggaatcacttgtcaacaacttcagcttagttcatacacctaacataaccaccaccaccaccaccacagttcagaaacctagcaatcagcaactagtgttaaattgatcaaataaagcaataagccatagcttgaattgctcagcttttcgatgcagatgattattggcaaaaatatgatagtgagattcctcagtggcaatggaactttctaatgccaaaggttgcagcacccaccattcggctgagcaggcttctccttgctgcagacaacctccataaacgaatcaatcagttgtgctaccaggctcgcaggatcactcaccagagcatctacgaaggcgttcacaatgcgtcgctcctgtgccgacgccttcaggctaaaccatgtgaggaacttcacgcggaaatccttgtccatgtgcccttcatgctccagccatctaatgaccttcacactgtattcatactgcctctcaacatggttcttgcaggcggaatctggggtgctgctaacccagtcaggtttgcttggaacttctgaaagtgaagaattagagctcatgaatggtaaaacttctgatgttggcagcaactggctttcgtcgttgtcacttgcaccgtccaactttgcgagcttagctcgcttagggtgcaggtcaggacacacatcgttctcattcgagtttgccgagggtgagtcatattgaatgccccaccactgcttgttcttcagattcaactcatttttctgatgctgctccaaatcctccttgatggacatactctcggaattctgtgttgagcactggctgctgccatggttaaggcttcgtgtagagcattttacctcccattcgccatatccctgtgaacagccaaaaggcaaaaccttgaagaaatactcagtagaagggcttagacctgaaaaaagactccttgtatttggtctaagaacgtggcaagtgggctctgctggatagttggccatgtttgcacttcggtgccaaactttgcaaccatcaatctcctcagcgatattatcctggtacttcaatacaacaagcacagaaaatggagtaatctccacaaaaaatacttgaggctggggacctggcgcttccagattattgtttgtttcgaagtccagggtgctactcaatgtggagtctaccatttctagtgcacatgaacaaagtttttgaacatcagcaccacaacaaagccggttcacgatgccccgccccgtgattgcagacacttgatctaatgcacaaccaacttctttctcaagtattttcacagctgagttgattatgtttgccagttccctgtaacgttcagaccctttcaccattttatgagtcagtgacaaacgctcacacagtacatcaactcttctagattctcttgcaattgccagctgcttacgcagattcctcattagccagttcatcttcccacaccaaacacagtaaaaactaccatctgacttcttgttgcacccattcttgaaaatgccagcttttttattctttagagcacactttaggtggcatgatgtgccgcatgaatagccagagtacggtgtatcagagctgcaaaccaaccataagctaggatctttgttctcatcatatttatggcaaatgcagcaagagcaacgcttgcaatacgcatctccagagttcaaagtagcctggcatgcaacatttcggcataccgctgtgctaccagcttgggcctctctgcacattgatgagtcagactttgcacttctgctgaaatgatgtggctgttcctcattttctttcttctctgtgtcatctttgttattctgccccaaaattgaagcatttgcattatcatcctttggctgtccattctttcgtaaaactaattttaacagataagcaatcattttagattttggaacattagtgtatttcctctccttgcccaactcagcacagataagctcaagaagatctctgcgagtccaacattgtaaaatctcagaggcaccttgtggccattgtgaaacttcatatactaattctcttctgtccttcagactcattccattgtgttttcccgggtccatgaaaaatcctgaaaacagggacttttattaccacatccaccagtgaaagctcattcggctcgaggaaatccaaacacttgcagtacagagaaccttcctactctttgttcaacatatgggtctcatgcgaaactggaggattcctcggtgttcctcacgacattcgagtaaaaaacaaccaactttgcttgaccccaactctcggcgagcgaggatgcggaggacgcagcagacgccggccggctggcgccgccgctggcgagatcgacgcgacgcaggcgaggcgaggcgaggtcggcaccggcgcaagaggaggaggagtcgcacgaagcgaaccaagatcgtgtggcggaacggagcggccctggtcgcatcgggcgggttcgcctcggcccacggcaacaaaattggcccacaaataacctcgctggcccacgggcccaccgatcgcttctgg

SEQ ID NO: 22965 - DNA, 463 bp, Oryza sativa
  Clone ID: PAT_MRT4530_28090C.1
ggctctccatctttctttcttctattagacacaaaaggccttatgttttgtctacagtgtaaattaaatcctagcgatacctaaaattatgtagcccatcttatcctatcaaaacaaaacaacaatcctatggacaaaaaaacatcatggtttctggtcgaccaccggaagctacggtatcaccttccaggaccactgctctctctgcctccctccaatcgccatgatcaacgataatgcttcatttcagatggtttcagaccgtatcgctgctgaatgctccttcaaatgcaaaggggaggcttcaccaccaaattatatatgctctcctttcatgacgcatagcactgaaacagaggcacgcacatccatggtttccttgtcttgaaactttgttatctactaacgagccagctttgtttaaatataccacctttcctgaagttgcgtccatgtggagatg

SEQ ID NO: 22966 - DNA, 194 bp, Oryza sativa
  Clone ID: PAT_MRT4530_28091C.1
acatcaacagcttcaccaccacacgcatcagcccaaccatgcacacacccattcggcactggcacccagcagcatgcagggttccttgtcaagctgccgtggtgtgccatgccatccaccaaatgccgcaaccaactcagcattgtcagccagccccaaccatgcacacaggcaacacaggccatggcatcaca

SEQ ID NO: 22967 - DNA, 1638 bp, Oryza sativa
  Clone ID: PAT_MRT4530_28092C.1
ttatgagcagcttggagcaatgtgagtaactggacatacattcaggctagtgtgtttagcggcaataagtccaggtgcctcccgcatatcaagatccttgtgcaacattccattgggtagcttccagtcaaaatggtagagcaggttagccaatgcaaactccatgttggccagcccaagattaatgccaggacatattctgtgaccagagccaaatggtagaaactcaaagttactccctttgtattctatattgttgttttcgaacctctctggcttaaactcttctgcatcctcccaatacttactatccctgcatattgcccatgcattcacaaatacagatgtacccttgggtacatcataacccatgatcgtgcatgtctcacggcatttgcgaggagccaagagtggtgctggacaatgtagtctcaaggactcctttattaccatcttgagatagctaagttgggcaaggtcatcttcagtgatggtgttctttccttcaaaggcttgacgcacctcggcttgtgccttggccattactctaggggaacgaatgagttctgccatggtccaggtcagtgttgttgacgatgtatcggtgccccccgcaaaaatatcagtactgttgtgtatgctttgctcatttgatctcaatagctcatttttttgtactcgtagacttgtctcatagtcccacatcaaaagcacaactataacatcatttgtaattggcatcggtgcgccgccttccttctggagcctgagcaggacgtcgagagagcatgacttgctccccgccgccgccgtcacctgatcgccgctcgccatgtccgcttcaatttggtccctccgttcttgaatgatttgctgtatgacgcgctccatcttgttgcgggtctccagcgccctccgtggcgccgtcgcgaccatggacgcgagcttggacgacgggaagaggtcggcgacgctgagcgagaacgtctggcctaccatgtcgtttagcgcagccagatactcatcgctgtacttggaccggctcccgacggagcaccggagcacgatgtcgttgatcagccttgtgatcatctcggtgaggttcacggccgtgccgggcgctgcagcggcggcggccgacacgtcgcgcacgagccgcgccacctcctcctcgcggatgcgctggaacgagcgcacccgcgccgcggtgagcagctcctgcgtgagcagccggcggaggtggcgccaccgctcgccgtacggcgccagcgcgacgtccctgccgccgaagctgaacgcgtcggtgccgctggtcaggtggcggtcggcgaacgccaggtccttgctcctgaggatctcctgcgcggcctccggcgacgaggcgaccacggtgggcacctcgccgaaccagagctgcatgacggggccgtgctcccgggccagcctccgcatgacactgtgcacgctctcgctcgacgacacgaagtggtggatgctgccgatcagcggcagcgtgcttggccccggcggcagcttaagcctcgacggctttgtgtttgtggcacatgaaatcaccggcagcctgtgcctgtggcagactaccccttggcgcgtggcgagaagcaccatgtcgcccat

SEQ ID NO: 22968 - DNA, 1561 bp, Oryza sativa
  Clone ID: PAT_MRT4530_28093C.1
ttattgagtagctagagacatgggcgacatggtgcttctcgccacgcgcccaggagtagtctgccacaggcacaggctgccggtgatttcatgtgccgcaaacacaaagccgtcgaggcttaacctgccgccggggccaagcaggctgccatagttcggcagctctgtccacctggtgccgtcgagcgagagcgtgcacggcgtgatgcggaggctggcaagggcgcacggccccgtcatgcagctttggttcggcgaggtgcccaccgtggtcgcctcgtcgccggaggccgcgcaagaggtcctccggagcaaggacctggcgttcgccgaccgccacctgaccagcgccacggcggcgttcagcttcggcggcagggacgtcgcgctggcgccgtacggcgagcggtggcgccacctccgccggctgctcacgcaggagctgctgaccgcggcgcgggtgcgctcgttccggcgcgtccgcgaggaggactgggcgcggcttgtgtcggccgccgcggcgtcgggcggcaccgccgtgaacctcaccgagatggccgccaagctgatcaacgacatcgtgctccggtgctccgtcgggagccggtccaagtacagcgacgagtacctggcggcgctgcatgccatggtagtccagtcgttctcgctcagcgtcgccgacctcttcccgtcgtcgaagctcgcgtccatggtggcgatggcgccgcggagggcgctcgcgaaccgcaagaagatggagcgcatcatagagcagatcatccaagaacgcaaggaccaaatggagacggacaccggcgatcaggcggcggcggcggagagaaagtcatgctctctcgacgtcctgctcaggctccagaaggaaggcggcggaccgatgccaattacaaatgatgttataattgtgcttttgatggacatgtttgcggcgggcactgatacatcatcaacaacactgatatggaccatggcggagctcattcgttcccctagagtaatggcaaaggcacaagccgaggtgcggcaagcctttgaaggaaagaacaccatcactgaagatgaccttgcccaactcagctatctcaagatggtaataaaggagtccttgagactacattgtccagtaccactcttggctcctcgcaaatgccgtgagacatgcacgatcatgggttatgatgtacccaagggtacatctgtatttgtgaatgtatgggcaatatgcagggatagtaagtattgggaggatgccgaggagtttaagccagagaggttcgaaaacaacaatatagaatacaaagggagtaactttgagtttctaccatttggctctggtcacagaatatgtcctggcattaatcttgggctggccaacatggagtttgcgttggctaacctgctctaccattttgactggaagctgcccaatggaatgttgcacaatgatcttgatatgcgggaggcacctggacttattgccgctaaacacactagcctgaatgtatgtccagttactcacattgctccaagctgctcataaatg

SEQ ID NO: 22969 - DNA, 243 bp, Oryza sativa
  Clone ID: PAT_MRT4530_28094C.1
tcatacgtcggtggtgaaagaagatgagagggctactcgcgtgcgccacgctcgcccgacgcgccgacggcgcgacgtagacagcgcggcggcacctgacgggcgcgatcgaggctgaggatgcggagctgaagaggaccgcactgcactactttcacatctcgcacggcgtggagagggtgctgatagactagaggaggaggtccaaggggtacaaggactccttgatggacgagacgctga

SEQ ID NO: 22970 - DNA, 235 bp, Oryza sativa
  unsure (1)..(235): unsure at all n locations
  Clone ID: PAT_MRT4530_28095C.1
gatttcttcagagattcggttttcaagtctatttgctggcttatactctctctgtgcaaaaaataaaaaatcaaaaatcaaaaccagcgatgaatgacataggcnttgtttagttccaaagtttttttctaaactttcaacttttcccatcacatcaatctgttctacacacacaaactttcaattacatcgttctaattttcaaccaaacttccaataaaaaaaaaaaaaaaaa

SEQ ID NO: 22971 - DNA, 393 bp, Oryza sativa
  Clone ID: PAT_MRT4530_28096C.1
atgactaccatggaagacgccggcggccgcggcatgacggcattcgcgctccgcctggcgaagcgtctcgccggcggtggcggcagcagcggcaacaacaacaagaagaacatcgtcttctcgccggtgtccctgtacgccgtgctggcactggcggtggctggggccaggggcaccaccctcgacgagctcctcgcactgcacggtgcggcgtcgctcgatgacctcacggagtccatccatcgcgtcatggaggtcgatctcgccgacgagtccgcgtctggcgagccgcccatctcctatgcctgcagcgcctggcacgatgagacgctcatgctgtcatattcttccatggtcaccctgagcccatgttgccgccaccggtggtggtag

SEQ ID NO: 22972 - DNA, 668 bp, Oryza sativa
  Clone ID: PAT_MRT4530_28097C.1
cgcccggcgcctgcagccgtcgtcttgcctcgcgccgcctccggccgaccgccgcgctccaccagcgccgctgcgtccgatggatccgcaacaacctgagcccgtcagctatctctgtggagattgcggagctgagaacacactgaagccaggagatgtgatccagtgccgtgaatgtggctatcgcatcctctacaagaagcgtacccgccggagtatgtttaacccgtaaccaatttcttgaaaaaggctaccttttgttgctgtcatcgtcttttgttagagcgtcattttttgtttgatttcttgagtttccataggttagcttacacaatagtaggggcacggtggaccgggttagtgctaaagtacattgtatatagttagaacgatcaggttgtcgttcacaactcaatggccacataccatgtgcctgtgtttatctgcccaagccccaaggtggcatgatcacaaggagcccttgaactcaaacaatgaaaatctttcagccaaaattaaatgcaaacttatctttactaaaaaatgttgtatctctcgtaccctgtttttgagaactgaattttattcttgcggttatcctctagtacaatgcaagattctatctgatatatataaatgtagcttgcgatttgcatgtcatatttttt

SEQ ID NO: 22973 - DNA, 462 bp, Oryza sativa
  Clone ID: PAT_MRT4530_28098C.1
cggacgcttgggcggacgcgtgggcggacgcgtgggcggacgcgtggggcagcagcagagggtagctagttcgaacagcacactactgaagctgatcagaaggaagcagcatggcaagcaggtttagtttaaggagcagctcgccgccggcaataatgccgccgtaccggctgtcgatgtaccgggagaggccggttgtgaggcgcatcaacttcttctgcgccgagctgctcaccatggtgctcgtcgccggcactcatgatgttcgtgctgtggtttaggctccggtcgtaccggaccaagttcttcctagacgacttcaccatccccaacctcaaccggcagtgcggtgccgtgaacctgccggggaggcttaccgtcgacgagcgcacccccgaccagaatatcggcatgcactacggggccattttcgggtcggtgaacctacacctaccctgctcg

SEQ ID NO: 22974 - DNA, 395 bp, Oryza sativa
  Clone ID: PAT_MRT4530_28099C.1
gggtaccccacacaaagcatacgttaggatctggggagtaggaaaattaacacaaacacatcctaataaaattctcggaagtaccatgaacgacagcaattaaaatacggggatgcccaattgcccagattcatcttttaaagtatcattacgggccatttagcacttagcagtagacctaaactggtgtctaagtgagggcagaatttctcacagtaagtttttagttattccgatgggatttttaatatggggaatctcaaggggaaacttctggttccgggtcgaaggtaagcttttaaggagggaaaccgggtctttacgaaggcatttgggtggaagttttaatttgctcaagaaggtcctttaagggaacctcaggttttttttggagt

SEQ ID NO: 22975 - DNA, 678 bp, Oryza sativa
  Clone ID: PAT_MRT4530_2809C.1
atggcttctccttctccttctccgccgggcgacgacctcggcgcgctggtgtccgccgcgatcgcggcggcggcgaggaagctgcgcgccttcctcggcgacgactacgccaggtacgagtccgcgctgctggcgctggacatcgtggaggcgcagctccgcgcgctcccgctcggcggcggcgggcgcggcgagggcggcgacgacgacgaccccgacgtgcgggtggcgcggttggagtggaagctgcggctggacggggcgacgaacgagctggaggacctcgtcggggagatggaggcggccgtcgaggcggagaagaaggcggcgcggtggtgctgggcggcgccgtggccgtggcggcggcggcggtgcagggcggcggcggaggtggtgacagggtggctgcgttccgacgccaggaacaaggtcaggatggagctcgccgtcgggaggctcgccggcgtgtacgtccaaggcggagaactcttcgacgacgacgacgaggacggcgtggccggcgacggcgacggaacagctgcatcgcaatgcagggatggcggcgcttgtcaatcagacggtatggcaggcgaaacaaccaaggcttcgctgacgcggacgaacacgtcgtcctcgtcgtcgcacagcccacaatgcatcaacgagtgctcgcgatga

SEQ ID NO: 22976 - DNA, 200 bp, Oryza sativa
  unsure (1)..(200): unsure at all n locations
  Clone ID: PAT_MRT4530_280C.1
aggagctcgggatggcctgagcgcgcgctctccgccnccnncncnntgttcgtgtacgacatcatcgttaaccctatctgacgtnaacaanacaaaattgcaggcccangcggcnggggngccctactaccagccgnatgagatggggtaaatcggcccggacgcnatattatctnatttcanatgttcgccgtnatgca

SEQ ID NO: 22977 - DNA, 429 bp, Oryza sativa
  Clone ID: PAT_MRT4530_28100C.1
atggagaatgatgagaaggagaatggggaagaaaagttcatggcctgcgacgccaacaccgatgcttacaaaaataatgtgggacccactgacatgtggggctcacattgggcgctcaagggaccgagcggcggcaggggcgagcgggagggcgggcgctgccttcgagatggggcggtgatgacgcggcctcgaggtaggtgcgccggaaggcagtggaagaaagtaacagagaacggagggagtattgatctggtgaccatgaagagcaatgtatcaaagcaaggtttcatgagtccacttactcagatcatgtctcagccggctcctcgttttggccgctgcatcctcgacagcgcccgtagcatggggaagagaggagacgaagtggcggcgaaggagcagcaggggtggaagctcggtgcctag

SEQ ID NO: 22978 - DNA, 162 bp, Oryza sativa
  Clone ID: PAT_MRT4530_28101C.1
cgcgccgaggttatcccatggccacgacgacaagaatgcggcacccatgatcgcaagcccctcgacttgatcttcttcttcgtcctctcagctcagctcaacagcgcgcggtcacagcggtggagggcggggaaggtgagagtccgattcgggcagcgagag

SEQ ID NO: 22979 - DNA, 397 bp, Oryza sativa
  Clone ID: PAT_MRT4530_28102C.1
cataccaaattatgacatgaaatttctaattatttgtttattacaaagaccgcatttttaggatgcttaaagagaacattcgagacaaaacacaaaactaacagaccgagggccaaactatactgggctgaacccaaaggccaggttggtatagaacattacacgcccgtatgaaaaagattctactaaaaaaacaagtcgggccgggtgttacagatcacatagagcagctgataacttttttacgacaaaataaagcatatatgggtacttacaagaacatttaacccacggttttatagctggtacactatacacaactattgaaggggcttttgagggccggaaagtatattcaaaaccatcaattttctggaaacaaaccttcaaattattt

SEQ ID NO: 22980 - DNA, 402 bp, Oryza sativa
  Clone ID: PAT_MRT4530_28103C.1
atgggtatctcaaatgctctgcaatggtgggaggagtggcagctccgggttcttctcttgggcagcctcgctttccagtacttccttttcattacagcctcccggcataagtttcctatccgatcctacctcagatcctttatctggtttgtatacctcggtagcgatgccctagcaatatatgcccttgcaaccctatttaaccgtcacaagaaacaggatgttggtcacacacacaacaacgatgtcttagagattctttgggctcctatcctactgattcaccttggtggacaggatagcataactgcctacaatattgaagacaatgagctgtggatgcgacatgttctcacggcactgtcccagatcaccgtagccatctatgtggggatcctctag

SEQ ID NO: 22981 - DNA, 4260 bp, Oryza sativa
  Clone ID: PAT_MRT4530_28104C.1
atgtcgatcaggtccaatgcaagacgcctcagtcccgtgaacagaaaaagcctaaagactggacagaaactgtatactcaattaattacccgggcgaaaaattcatgcctctgtccagatgataatttcctctttgatgtcattcaccaagtgctctatcgtcctgagacattggtcgaaaattctcccgtttctttccttccaaatcagccagcataccagtatgaagaggcagtcaaaggacgctctgtagctcatccggcaacgtgctctgttctgcagccaccagtccgccagagcatatccttcatctcctggaactgcgaagaaagagaccaagaaagcttgggcggaaaatgtaaagtgaattggcagcaagtatgttctccgactatacatggtggattgggcataccttgtttggagaagttctcacaatcgctgaggctacgttggctctggtatgagtggacaagcccggaaaaaccatggataggaaccccgccgccctgtgatgacaccgatcgtgctttgtttgctgctgccaccaaaataggagatcagccgctgaaatacctagccccaaacctcttcaagcactccaaaaggaaaaacaggtcggttcttgaggcaataaccaatgatgcttggatcgaagacatccgcggaggggtgacaatacagctgcttcaggaatatatatgcgtatgggaagtgctccacaacgcaggagaggtgatccatgaaggggctgaggacacaatcctctggaggtggtcggccagtggcttgtatacggcaaaatcagcatatgtcatgcagttcatgggcaaaacgttttcggattctactgagcttgtatgggaaacttgggcaccggggaaacacaaattcttcgcgtggttgctggcgcaaaatagaatatggacggcagatcatttgcaatgcaggggctggccaaataactatttctgccaactctgtttcagaaatctcgaaacggtacaacacctcttcatggagtgccccttcacgcagcaggtatggcgggacattggtcgcaaattcagaccgcaacgtttcctacatgtgaccacagacaacactctcctcaattggtggcgcgagcaaacagatgaggcagaaaagttgcaacagaaagggctacgttcagcagtcttgaccacgctttgggagatttggatggaaaggaacgatcgcatcttcagagggaaagaatctacaccatcggcacttgctagcaagatcatagatgagcttcgtttgtgggaaatgtcaaataaaccacatattcatgataaggatgctaagtctgaatttgccacattcttgaaccagcttgcacacacccctttgaaaacagatccatcctcatgtattgctgatgttagtatggatattacgggctgttcactttcagcaaatgttacagactcttgttggatattggactcaggggcatcctttcacatgacaccggacatttcacagctccagtcatgctctttgacaaaagcatcaagtgttcagacagctgatggcaccattctaccggtttctcttcaaggcactctccaaactaaagaatacacaattccagatgtcttttatgtgcccaatctatctatgaaacttatatctgttggtcagcttaccgatatgaagtgccatgtggtttttgatgaggctgcttgttatgtactggatcgtgctacaggcaatcttgttggagctggtcatcgactcaatggtcctaggggactttatgtgcttgatcatttgcatcttcccacttctacttcctctggttttcctggaaactctgcttctgccacctctataacttccaattcctctgtttattcctctttgtcagcctcttttcctcagtggcatcatagacttggtcatttatgtggttctcgcttgtctactcttgttcaacagggtgtcctaggaaatgtctctattgagactgatttcgtgtgcaagggttgcaagctcggtaaacaagtacaacttccttatcgttctagcatgtctcggtctacctctccttttgcattagttcattcagatgtatggggtcctgccccatttcattctaaaggaggtcaccgatattatgtcatttttgtcgatgatttctctcgatacacttggatctatttcatgaaacatcgcagtgagctctatcaagtttacaaatcctttgcttccatggttcatacacagttttctacatctataaaaaattttcgttccgactccgggggagagtacttgtctaatgccttccgccagcttttaagtgaccatggaactcttccacaactttcatgtcccggtgctcatgcacaaaatggcgtcgctgaacgaaaacaccgccatatcatagagactgctcgtactcttctaattgcgtctcatgttccaccacatttttgggctgaggctgtatccacctctgtttatctaattaatcttcagccttcatcaatccttcaaggccgcagtgctggtgatcagtcgccctctcgtttgactaaatccagcgagctatcaattgatgattctaatgagctacctgttgatgatatgcctataccatcatcaccatcttctcctgcagcacgatatggtcttcgagatcgcagtaaaattatgccacatcctcgttacagttgtgcaatagctgatggtgttcaggagcctcgcacatatcaagaggctgttacaattaatgaatggaaattggctatgaatgaggaactttctgccttagagcacacgggtacatgggatgttgttcctcttccccatcatgctgttccaattacttgcaagtgggtgtttaaggtgaaaactcgctctaatggatctattgaacggtataaggcccgcttggttgctcgtggttttcagcaggaatatggtcgagattatgatgagacttttgccccagttgctcacataactactgtccgtacccttatagctgtagctgcaactcgtcaatgggagatctcacagatggacgtgaagaatgcatttcttcatggtgatttgcaagaggaagtctacatgcagcctccaccaggtttgacatgtccatctggtcatgtgttgcgcctacgccgtgctttatatggtcttaagcaatctccacgagcttggtttgagcgctttagctcagttgttctaaaagctggatttgttgctagtgagcatgattctgccctatttatccacacttcttctcgaggtcgtacaattctcttgctctatgttgatgatatgatcataacgggtgatgacgcttctcatgttgccttcgtgaagcaacgtctaagtgagcaattcatgatgactgatcttggaccactaaagtattttctgggcattgaggttgcttcaacaccgaatggttttcatttgtctcagcatcgatatactctcgacttactatctcgctctggtctaagtgatgataaaactgctgccactcctatggagcttcatctcaagattcgtcctactgatgggaatccactttcagatccttctcgataccgacatattgttggaagtcttgtatatcttgctgttactcgaccggatatctcacatgctgttcatgttctcagtcaatttactagtgcccctacatctgtccattatgctcacctattacgagtgctccgctatctacgtgggacaccatctcgtggtatatttttctcccgtgatagctcactagagcttcaagcttattcagattccacttgggcaagtgaccctgttgatcgatgctctattactggttattgtatcttcctgggatcttctcttcttgcttggaagtcaaagaaacagacagctatctctcgttcaagcgctgaggctgaattacgagctcttgcaactacaacagctgaagttatatggctccgttggctacttgcagatcttggtgttgtcctctcacaaccaacttcattgttttgtgataacacaagtgctatccaaatagcctcaaatcctgtcaaacatgaactcagcaaacacatagggactgatgcttcttttacccgatttcattatcaacacaggacaatctgtcttcattacttgccctctgaacttcaagttgctgacttcttcaccaaaccgcaaacacgagaccagcatgattttcttctttccaaactcaaggctgttgatccacctagagtttga

SEQ ID NO: 22982 - DNA, 327 bp, Oryza sativa
  Clone ID: PAT_MRT4530_28105C.1
atgccgcccaccgccatcctccatccccgcggctccggcgccgccgccggcgcctcgccacccgcccgatccgccgcccactgccgggccgccgcctcccatggcaatccctctaagcccggccacctcccccttcttcccccctcccaccccaaccccaccccgccccgggaccctaattcgccggcgccggagaagaagaggaggtcgccggagttagagaagaagcacctggagcacgaatcgaatgaatggagacatcatgcacaaatatactcataccagcagatttctaatcaaaagagccccggcaacccagcgaaatga

SEQ ID NO: 22983 - DNA, 904 bp, Oryza sativa
  Clone ID: PAT_MRT4530_28106C.1
tttatgattgaattggctgcctaacgagtggacctcgaggcggcggcggcggccgtggggtctaaaccgccggccgacgacgacgatgaccttaccacggcgacgactgtggtggagaagatggcggcggtgctgtcccgtatacggctctcttgggtacgtatattcgccgtgcgtgacttagccccaaacctcttcaagcactccaaaaggaaaaatatgtcggttcttgaggcaataaccaatgattcttagatcgaagacatccgcggaggggtgacaatacagctgcttcaggaatatatatgcgtatgggaagtgctccacaacgcaggagaggtgatccatgaaggggctgaggacacaatcctctggtggtggttggccagtggcttgtatacggcaaaatcagcatatgtcatgcagttcatgggcaaaatgttttcggattctgctgagcttgtatgttgtatgggaaacttgggcactggggaaacacaaattcttcgcgtggctgctggcgcaaaatagaatatggacggcagatcgtttgcaatgcaggggctggccaaataactatttctgccaactctgttttagaaatctcgaaacggtacaacacctcttcatggagtgccccttcacgcagtaggtatggcgggacatcgccaacaaactgattttctggatccgccactgcctacatgtgaccacagacaacactctcctcaattggtggcacgagcaaacagatgaggcagaaaagttgcaacagaaagggctacgttcagcagtcttgaccacactttgggagatttggatggaaaggaacaatcgcatcttcagagagaaagaatctacagcatcagcacttgctagcaagatcatagatgagcttcatttg

SEQ ID NO: 22984 - DNA, 882 bp, Oryza sativa
  Clone ID: PAT_MRT4530_28107C.1
atggggggctggaaaaacaagctggtttatcaaagcgggcggaaggttcttgtgcaatcagttctcaatgccattccaacctacttgctgaccgttcttaaaccaccaaaaggattcctaaatgatgttgacaaagcgcaacgaaaatttctttgggccggagaccaagaaagtttgggcggaaaatgctacgttggctctggtatgagtggacaagcccggaaaaaaacatggataggaaccccgccgccctgtgatgacaccgatcgtgctctgtttgctgctgccaccaaagtatcggtcggagatggacgaaaggcgaaattttgggaatccaactggataggagatcagccgctgaaatacctagccccaaacctcttcaaacactccaaaaggaaaaacaggtcggttcttgaggcaataactaatgatgcttggatcgaagacatccgcggaggggtgacaatacagctgcttcaggaatatatatgcgtatgggaagtgctccacaacgcaggagaggtgatccatgaaggggctgaggacacaatcctctggaggtggtcggccagtggcttgtatacggcaaaatcagcatatgtcatgcagttcatgggcaaaacgttttcggattctgctgagcttgtatggaaacttgggcaccagggaaacacaaattcttcgcgtggctgctggcacaaaatagaatatggacggcagatcgtttgcaatgcaggggctggccaaataactatttctgccaactctgtttcagaaatctcgaaacggtatagcacctcttcatggagtgccccttcatgcagcaggtatggcgggacattggtcgcaaattcagaccgcaatgtttcctacatgtga

SEQ ID NO: 22985 - DNA, 672 bp, Oryza sativa
  Clone ID: PAT_MRT4530_28108C.1
tcgtccacgcgttctggatcacacgctgcttcccttctgcaacggccgctactggcgggggttgcttagccttcggtacggcgctcgcttctattggcactaacgtgagtctcgctgttcgtcttctggcatactctatggaatcagctatctccattgcgcttttctgcctccttcctctttagctctctcgtctcgttctaattcttctctccccttcattcatccctccaactgcttttttttgtcttcgtgctccttcactcctattgtctttgcttcttcactctttgttttgtctcgtgcctcgtcttgtctctctctttctttccccactttccttctttttcttccttcctcttactcttccttctttctttttactttacctcctttcccttttcttcttctttttctttcactttcctctttctgtctcctttcctttccttcccattccttgtccttctttctctcttccttacttccttaccttctcaccttcccttctttttccttttcccttttaccttttccctttctccttcttgtcctttccttccttttctccttcccttctcctttcttccttttccttcttccccccctccttttccacccttctttccttttctcttcttctcctccttttcttcttcttttccttttcct

SEQ ID NO: 22986 - DNA, 333 bp, Oryza sativa
  Clone ID: PAT_MRT4530_28109C.1
tttggtgttttttgttactggtgtttatctcttttttttttgtttttttttttttttttttttttttcttgtttgcggggagaaactaaaaacggaccccgactttggttctggtctatgtggaaccaaagcaactttctgcggggggccaaacccggggtgcgttttaacccttgtgggcccgtgaaacccgaacccccatttaattttgcccaccttcccattttttaatggcacgcccccccacggtcgagggagaagacccttgcacatctcctggtgggttcaagaggacctatgctagaattggcttcttggccgcagggggggggt

SEQ ID NO: 22987 - DNA, 5574 bp, Oryza sativa
  Clone ID: PAT_MRT4530_2810C.1
atggccgaacgggcagtggcgcacaacctctctccgagcgctagcggtgacgacagcgagcagaacccacgtcgtcgagctcgtactccaccgcccccctctcgccgaagtcttaggcgagaggaggcgctcgagggggtcgaaagatccgcgacttcgccgcgcgcgggcgatggagaaggacggcgagacggggagcgtcgtctcctcatctacggtgatggcagcacgccccagggcgcgcttcaggctgcgggcgcgctcctacgtcacccgcccgtcgtccctgatccagagactccaacccgacgttggctagatgacgtggccaacttggtcatgacggcgcagcagcgcctaggcgccggcgggcggtcctccgccaccaaggccactggcgctgctactgccggctccgtgtcgtcgaggcggagggcgcggcgagcggcggctgttacccgccgttcgtccgctattcccatgtcaatgcctccgacccaagaagatgtgcgtgaggggccggatgcccgcctcaatatcgagcgccggcgcaatgatcgccgtgctgcccacgcatcggagggcgcttcctcgtccggagcgccacttcggttcgggcacgggggccagccccccgtgtccccggttggcggtgccggctgtcgagcctttgtggcgagccttcggaacgtccgttggcccccaaggttccggcccaccattaccgaaaaatacgacggaagcgtcaaccccgccaagtttctccagatctacacgactgggatcgaggccgccgggggtgacgacagggtcatggcgaatttcttccccatggccctgaaaggaccggcgcggggttggctaatgaacttgccacccgcgtccgtccactcttgggaggatttgtgccagcagttcaccatgaactttcagggcacatatccgcgcccaagtgaagaagcggacttgcacgcggtacagcgaggggacgatgagtctcttcgctcgtacattcagcgattttgtcaagtccgcaacaccataccgtgcatccctacacacgcggtgatctacgcgttcagggggggcgtgcggcacaaccgcatgctcgagaagatcgcctccaaggagccccagactaccgcggagctttttcagctcgcggaccgagtggctcgcaaggaggaggcctggacctggaactcctctggttccggtgtggcagcttcggttgcccccgggtccgctgctcggtcagggcggcgagacaggaggaggaagaagaggtcagcccattccgacgacgagggtcatgtcctcgctgtcgagggcgcttcacgggccacccgaaaggggaggcctgcgagcgacaaaaagaaggaggccggcgctcccagcagggagcgtccgaccggcaagtggtgttccgtgcacaacacctccctctacgacctcgcggactgccgcgcggtcaaaagtttggctgagcggacgaggaagtgggaggaggagaggaggcaggagcgccgtgagggcaagtccccggcggctcccgccggcaaccggcgaagtgaggccaagcagaaggcccccgccgaggacatcgacgatggcgacgatgacctggggttccaggagcctggggccaccattgccactgtcgatgggggagcgtgcgctcacgtttctcaccggagcctcaaggccatgaagcgagagcttctggccgcggcccctacccatgaggcgatgcggcgggcgcggtggtcggaggttgccctcaccttcgaccagaccgaccacccgccgtgcgttgcccggggaggacagatcgcgatggtggtttcccccaccgtttgcaacgtgaagttggggcgtgtcctcatagacggaggagcagccctcaacatcctttcccccacagcctttgacgccatcaaggccccggggatggtgctccggccgtcccagccgattatcggtgtgacgccggggcacacttggccgctaggtcatatcgacctcccggtcaccttcggtggatccgccaacttccgcacggagcgggtgaacttcgatgtggcggacctcagtctgccctacaacgcggtcctggggaggcccacgttggtgaagttcatggcggcggtccactacgcctacctccagatgaagatgccgggccccggtggccccatctctgtccatggcgacctcaaagtcgcgcttgcttgtatggagcagcgcgcggaccacctcgccgccgcgtccaagcccgagggtggcgacgagaggctcggcacctccatccccgccgccccgaggcagcggatgatcacgtgcgacgaggtcctggaagacgcgctcgtctccttcctgcgggcaaacgctgacgtctttgcatggagacctgcggacatgcccggggtccccagggaggtgattgagcaccgtctcgctgtacggccgggcgcaaggccggtccgtcagaaagtgcggcggcaggccctggaacgtcaagccttcatccgcgaggaggtggcgcgacttctggaggccggattcatccgagaggttatccatccggagtggctggcgaacccggtcgtcgttcccaaggcgaacggcaagcttcggatgtgcatcgactacactgaccttaacaaggcatgtcctaaagacccttaccccctgcctcgcatagatcagattgtcgactccaccgcggggtgcgaccttttgtgttttctaaatgcatactctggttaccatcagattcgcatggctagggaggatgaggaaaaaactgcattcattacccccataggaacttattgttatacgacaatgccattcgggttaaagaatgcaggtcctacttttcaacgtactactcgaatttctttgggtagccaaataggacgtaatgttgaggcctatgtcgatgacttggttgtgaagacgcgcaaccaagagaccttactctcggatctagcggaaactttcgaaagtctccgctccgcccgcataaagctgaaccccgacaagtgcgtgttcggtgtacttgcgggcaagcttctcgggttcttggtctctgcccgaggcattgaggccaaccccgagaagatacgagctatagagcggatgcgcccccccagcaagcttagggatgtgcaatgcgtcacaggctgcatggccgccctaagtcggttcatatcgaggctgggagagaaggcactacccctatttaagctcctcaaacgctccgggccgtttacctggacggaggaggctgagcgggccctcactcagttgaaggcatacctcagttctcccccggtcctggtcgccccggagccagatgagccgttgctactctacctggcggcgaccccgcaggtggtcagcgcggcgttggtcgtggagcgcgacgaggacaacccttactctgcgcatccccaccctgcgtcgactcgacccgggagagagcagggaggagaggcccccgagtcgaacggcggcccgaggcccccgacggccggagctggccctccgcccgcttgtccgacggtgccaggcgcccccgacccccaggacggccccgaggccactgcgggaaggccacgcctgtcgccctctgaccccgaggtcgtcggcacagaagccgagtgcgccccgcgtggcctcttggacgaagagcgccctaggaatgcggcccctagtgaagaggatcggccccgccgaaaggcgcatcgggtcacggtggttacgtcttaccccctcggcgaaatcttgcataatcgagagggtactggacgggtggtgaaatgggcaatcgaactttctgagttcgatttgcactttgaaccacgccacgctatcaagagccaggccctcgccgactttgtggccgagtggaccccggcccctgagcccatcttcgtccccgaggccggctcgggcccctcgcagctgcctcacaccgcctattgggtgatgcagttcgacggctccctgtctcttcagggcgccggtgcgggggtcacgttgacctcgccgagcggagatgtcctcaaatacctggtccgcctcgactttcgggcaaccaacaatatggcagagtacgagggactccttgcgggactcagagtggcggctggactggggatccgccgcctcctggtgttaggcgactctcagttggttgttaaccaggtctccaaggagtaccagtgctctgacccgcagatggatgcttacgtacgccatgtgcggcgtatggagcgccattttgacgggatagagcttcggcacgtgcccagacgggataacacggtcgccgacgaactctcaaggctcgcctcctcgcgagcccagaccccaccgggtgcctttgaagaaaggcttgcccagccgtcggcgcgacccgaccccttaggggagacggacgcgcctgaacggcccccgaggcccgtcggagtccaggcctcgggacccgaggggagcgctcccagctcccttagattgattgcttggatcgctgagatccaggcgtacctcacagataagactctacccgaggaccgcgaagggagtgaacgcgtccagcgcatctccaagcgctacgtgctggtggaagggaccctctatcggcgcgcggctaacggagtcctcctgaagtgcattcctcgggaacaaggcgtcgagcttcttgccgatatccatgaaggcgagtgcggagcccactctgcctcacgcaccttggttggcaaggcctttcgccagggtttctattggccgacggctctcaacgatgcggtcgacctggtccggcggtgcagggcgtgccagttccacgccaagcaaacccatcagccggcccaggccctgcagaccatacctctttcatggccgtttactgtctgggggctcgatatcctgggtccgtttagacgggccccgggcgggttcgagtacctgtatgtcgctatcgacaagttcactaagtggcccgaggcttatccggtcatcaagatcgataagcactccgcacttaaattcatcaggggcatcactgctcagtttggggtgcctaaccgtatcattacggataacggcacccagttcactagtgaactcttcggtgactactgcgaagacatgggcatcaagctctgcttcgcctcccccacccaccctaaaagcaatggccaagtggagcgcgccaacgcggaaatcctcaagggcctcaaaaccaagaccttcaacatcctcaagaagcacggcgactcgtggatcgaggagttgccagcggtgctctgggcgaaccgaactacgccaagtcgagcaaccggggaaacgcctttcttcctcgtctacggcgcggaggcggttctcccatccgagctcaccctgaggtcccctcgggccaccatgtactgcgaggctgatcaagatcagcttcgcagagctgacctcgactacttggaagagcgaaggcggcgcgcggccctccgagccgcgcgctaccagcagagcctgcggcgctaccatcagcgccacgtccgggcctga

SEQ ID NO: 22988 - DNA, 265 bp, Oryza sativa
  unsure (1)..(265): unsure at all n locations
  Clone ID: PAT_MRT4530_28110C.1
ctggtcgcccccanccactcacaggctcaactcaactccacccgaatccgcaagagagatagaganatacgatggcggcggcggcgggaggagggacgagggaggagatggtgtacatggcgaactggcggacaggcggagaggtacgaggagatggtggagttcatggagaangtggtgacggcggcggcggcgggccggggttgggagctcacggttgaggagangaacctnctgtcgtggcgtanaaaaacgttatcggcgc

SEQ ID NO: 22989 - DNA, 1405 bp, Oryza sativa
  unsure (1)..(1405): unsure at all n locations
  Clone ID: PAT_MRT4530_28111C.1
ctttcctctactctctgctcctgtcttgcacagccgcgagcccctgaaaccgggaggatagagcagtgctcatcgctccccgggcggctgcgatgcggcccgccggggggccatcgcaggttgatccggatccctccgcggctccgccgaatatccgtcgcgctgctgcctgctgcctgctgctgctgctatccatcctctcctctccacctcgcttccgctcgttcgttcctcctccccctcacccacctggtcgccaccccccaaccccaccggcgtccgagcccgctccgctccggcctcctcctgcgaggccatcgacatagctaaccgtagtggaagataaaggacatgaaaatggcacatatggtaactaactgtagtttcagcccttcgcctgcagttaagacgtactcgaaatctcctggttattgctgcaatgtgacccaattccagagctcaaaatgttccaatctagtgctcaaatcatgtactgcgacgagaccgaacaggccatttgtcgctcgtgctagcgctgctgtacaaggacagacacaaacaccccttactggaagtcagcaagcatctgggcactcatcctctaaacccaaaaaggtcatggttatcggtggagatggctactgcggctgggcaaccgcacttcatctctccaataaaggatacgaggttgccattctggacaatcttgtgcggcgcctttttgatcaccaacttggcctggattccctcacacccatagcctccatccagaatcgcatccgtcggtggaaggctctaaccggaaagacgattcagctctatgtgggtgatatatgtgactttgatttcctttcagaagccttcaagtctttcgagccggattctgctgtccactttggtgagcagagatcagcgccatattctatgattgatcgttcccgtgcggtattcactcagcataacaatgttatcggaactcttaatgtattatttgccattaaggagttcagtgaagaatgccatctggtcaaactaggaaccatgggtgagtatggaactccaaatattgacattgaagaagggttcatcactattacccacaatggaagaactgataccttgccttacccaaagcaagcgagctccttctaccatctaagcaaagtgcatgactcgcacaatatagcatttacatgcaaggcttggggtataagggccacggatcttaaccaaggtgttgtatatggagtgagaacagatgaaactgcaatgcatgaagaactatccaacaggtttgattatgatggcggcctttgggncagcactgnataggttctgtgtcaggntgttgtaggtcatccacttacagtttatggaaaaggtggncagacccgtggatatctgg

SEQ ID NO: 22990 - DNA, 344 bp, Oryza sativa
  Clone ID: PAT_MRT4530_28112C.1
gactacgcaaaatagaggaatacgctatcgattaatttcactgcaaagagcacgggttcattacatcacacatattcatacgctgatgcacgccttgtatccttagcgaccaggtggctaactgatcgggatcacacagctatcattcatgactgattggtacatacataaaccatactgatatgggtggttactattgtggactaattatggactgtgactatccgcaacagagtgtaccgatgctgcgagagttcactcgccgcactaggagaacgtgcatgagcaggtggagccagactagcagacttcgatcgactggacaggagggacttactttgaga

SEQ ID NO: 22991 - DNA, 482 bp, Oryza sativa
  unsure (1)..(482): unsure at all n locations
  Clone ID: PAT_MRT4530_28113C.1
tttttggggggttgggaggggaaattccccgggccncgaaaggggtgggtttaactggtccntggggtccttaaantttcccggttggttttaccccccccttggaaagntnaaagcttggaaattgggtcccctttccnttgggggntttcccggganaaaatttttttccacaaggggnaagtggggaanacttcccccctttttgaacttcccagaaattgccatttcccaaagaaaaaggttttttcacttggggccaagggcctcccaaaagggaatgnttgaatggctccanccatttggttgccattgccgaaatgcctccgggggttgggnttgaatccgcttgcancccgtttccgcnactttggnttgncgccttgttacattgggttttttccaccccccnttgttttccaannctttantnggtccnaacaanggttttngggnnnggnnttttnccntncnaanttccc

SEQ ID NO: 22992 - DNA, 1233 bp, Oryza sativa
  Clone ID: PAT_MRT4530_28114C.1
agagcaaaattgcttaacactggaaaaataatatgtgtctatatatacaacggacatggtcagctacaaacaatagctgaccaaaatcgcctaaaacaagaatcatagctagcaagaaccaacaaatgcgactcagaggtcggttgaactggttgacaacaaatattcaacaaatgcaatcacctaatgcttctagtggattttcaaaaatacaagaataaatggcaattcttcaacttaaacagaatcaataggccttgtttctggcttttctccatctacaataaccttggacttcagcaaatgagagttttgcctggatgttgaaggagctctcttaccaccactggcagattctttcagccctaggtaagtgtagactgacatgcctccaagagcaattatagctccgcaaagactggtgaatccaggatcagagttaaataccaagtaactagagagcattatgacaatagtcttgaattggcctagcacaacatgagcaagagcagaggttgcggcaagagcagtccagtttccactctgttgtaaatttgaccacaagatcttgtttacagcgctaggaataatccaagctaccgctacacaagcaccaaaaaggttgaactctaaatcagtaacggttgctacagccacaccacatgacacgacagccaatgtgataacctttcgaagggaaacttttttcttgaaaagaataaactctgctgctacaattgttggggttacagctatcttagccatttgataaaatcctacactattatgcttcaaactgatgttagctaggccagtggaaaaagacatgacagcacccaaagcaaataatgaggaaaaaggagtggattttgaaggaggagctatgggcagcaagtaaaatgccttgaggactgccatcaggacccaagcagctatgtaatgaattaaggatagtgcaactgggaagttaaacccaacagcacccatgaccattttgtttgccatgatgatcccgacagcaacaaaaaagttgaatgtcagtgcaacacttggtccgcaaaacctctgctgctggcgcttggccccttctgaagtatgaaattcattgtagagtgaacccctcagctcctccagtgctcgaccagcctcgccggcgtcgctgtccttgcgcttgatgaatcgccggccgccgccgcccccgccgccgcgcaggatggagtcccagacgcccat

SEQ ID NO: 22993 - DNA, 1842 bp, Oryza sativa
  Clone ID: PAT_MRT4530_28115C.1
atgtgggtatgcaatgcgaccgcggcactaccgcccgactgcgatctccgccagctggcccggatcgaagccctggtgctcctctgttccgtcgtcctcgcgttgctcgtcttcctcggctcctcgaggcgctacagcggcagcgccatggtccggttcatcctgtggggcgccttcgcggtgtcgtacccgctcgccgcctacaccatcggtctcatgcagtccacccctatgcaccacgagctgttcctggtctggtcctgcttcttcctcttcgtcctcgccagctccgacaccatcaccgcctactccctcgccgacgtcaagagccccgggatcatcctgctcaaccgaggcctccaggtcatctacgtcaccgtactgctccagtattactccaacgtgctctccgcgaagctcaagttgttcgtctttggagtgtggttggtcagcctggggaagattgcgttgagcgcactcagctaccggcaggccctacaatccgacgggttgcagagggacaaccagctcattactgactacatgatcaaccagaccgagtccagccatggcggcgccgaagatccaaataccaataccaataccaatcccgatcccatgctactccggcggaggtgcggcaactttcccttggccgagtccggcttgcctaagactaggaacctggttctcaatcgcctcctagaacaaggcagcactagagctttccaggtgatcgaagtggagctcggcttcctctacgacctgttctacacgaggtaccctttcgtctgccacgccgtcacgaccacattaccgcaccttgccatgtgcgccatcatggtgaccgtcggcgtgctgaccctcctctccccagcacttcgacactaccatcctacgcaccacagaagtatcatgctttacgacatcaacctcgacgtcgtcctcaccatggccatcatagtccttgtcattgttctggaggcctaccagttcgttgctgtgctcttctccgactggcagaaggtgaaggtgctgtgcaggtatgttctctggccgtcgtcgttgcagaataaccctttcatcgaggtgctgctgggtgtgctgtgctactgtggcagcggcaagtactggacgaggaagatgagacaatactccatcattcgccacgccattctcggccaccccgtcaaggactggctgtcgggcgtgactcgtgggtggctggacaatctgatgttcaacagtggtaagacccgatcagcgaagctgtcgggcgacctgcagaatgcgctcgcttctcccctgaagaaaagcggtggcgttctcagcgacggagccgccggcggcggcggcgaccaacaacgtcgtcaccgtgaaatcgcgatgagtttgtcgaggtactgcgcgtacctggtgtcgtccgcgccggatcttttgccagaccaccaatacaccacccagacgatcgccgaggcagtgctgctcgatctccgccgctgcctccacggctgtacgtcgaacgaagctgcagttcttaagctccaggacacggcaaagctagcgattcggacgccgagcacatcggcgcctgacagcatccacgtcctcggagtgaggcttgcagaagacctgatgaagatcggggaggcaaagaggtgggaggtcttggctgacttctgggcggagctgatgctgttcgtcaccccggcggacaatgcgatggcgcacgtcgagcacctgacaatgggcggcgagctcattacccacctctgggctctcctcacacacgcgggcatcgtccagcgcccttctcacgccacgcagtcacaatcggtgtga

SEQ ID NO: 22994 - DNA, 564 bp, Oryza sativa
  Clone ID: PAT_MRT4530_28116C.1
atggatctggagacggagaatcatcttgcttctttactccttgaagaggcacggagattgcagttagaggctgacagggaaggtgttcacgcgtatctgcgaaagcccaatgtaaggcatcgcctgaattcacggttcctcacagccacagttcgtggagttcaacaagcaaaccgagttgtagaggtcaataaaatgtggcgagcaagggagaaggaacttgaattggagtctaagacaaaaagaagatctattaatcgtggtgactctagaggtaaaaaacgcaggagtgatgtaagaaaccagagctcaagtccaaggatggaacaagatagcacttcttataatagttcttacttggacctggagggtgctctaggggatgatgaaatagagatgttccttcattcgagggtgaagagaggacgaggggccgttggttctaggatggatgagaccggtccatatcttaatgcttcatcacgtagtcaagacaacgtacctagtcttgatataagggtggaagaaaaatgggaactccaaattgttgatacaaaatcatag

SEQ ID NO: 22995 - DNA, 1407 bp, Oryza sativa
  Clone ID: PAT_MRT4530_28117C.1
atgtcccggacacggtgttcttcccgaacaacctggtggagccacatcgggaacccgtcgaggcgacgtgctgggcctccttggcgcgcaccccgtggttaccctggtgacgctgcaccgtacctggactttctgcagccggtattcccgacgacgaggtcgcggacggcagcgctgaggcggttgttcgaggggcccgcgaggcttgactcggctggcgtggcgcagcagtcggttgaatcggcggctcgagcgtggtggctgcatctcaaagctgccacggtgtcggccgagcttgaggaccgcgcgagcggcgactggcggccgagcttggggactgcacgagtggcgaaagcgacggccgtgcttagaggctgcgacggcaatggctgtgctcggggaaggcacatcctcacgtgggtgggcgtacgaggagagaacacgcggctgcggcgagccaaggacgcgctctgcctccgcctccaccgccgaccgcccgaactcgccgcctccatcgccggtcgcccgagcttgctctgcgttcgccggcggacgtggttggacggccacgatgccgacgaccaggacgacggaccgttcgccgcctccaccacgccaacgagagaagcagagaagggaagggaaaaaatgcagagctcgagcgtgcggccgtccatcctcgccgacccttccgtctgccccatgcgccgccgcagcaacctcatccatggcggcggcggcaagaagtgcggcggcgagcggcgctgtaagggcggcggctgcggcggcggcgtggagctgcgagggcagtggcggcggggagctggtgcgagggcggcagctgcggcatcggcggcgcggagctgcgaaatcgacagctacggcggcagcgtagagctgcgagggcggctgcggttgcgtggagctgcgagggcggcggctgcggtggcggcgtggagccgcgagggcggtggcggcggggagttggtgcgagggcggcgacgctgcgaatcacgagcttgttgcctcgctcagaagtggccgacctcgccggagccatacgcgcggggaggagtcatccctatgcgctcgcgccgccaccgcttggtcgaggacgaggtcgagctcaagctctacatccgccgccgcctcgtcgagcttgagttcctcatccccaagcagctcgagttccaccggcgagctcgaacatggagaagatggagttatggagctcctggagccggcagaagaggtagacctttgagctcgtgctcgccggcggtcggcacggaagggaaggctggggatgtgcttgagctccgtcgccgcaacgagtcccctgctccacggccaccgatctcctgctcagctccaccgctgctctctgtctgggaggaagaaggatag

SEQ ID NO: 22996 - DNA, 726 bp, Oryza sativa
  Clone ID: PAT_MRT4530_28118C.1
ctatccttcttcctcccagacagagagcagcggtggagctgagcaggagatcggtggccatggagcaggggactcgttgcggcgacggagctcaagcacatccccagccttcccttccgtgccgaccgccggcgagcacgagctcaaaggtctacctctcctgccggctccaggagctccataactccatcttctccatgttcgagctcgccggtggaactcgagctgcttggggatgaggaactcaagctcaacgaggcggcggcggatgtagagcttgagctcgacctcgtcctcgaccaagcggtggcggcgcgagcgcatagggatgactcctccccgcgcgtatggctccggcgaggtcggccacttctgagcgaggcaacaagctcgtgattcgcagcgtcgccgccctcgcaccaactccccgccgccaccgccctcgcggctccacgccgccaccgcagccgccgccctcgcagctccacgcaaccgcagccgccctcgcagctctacgctgccgccgtagctgtcgatttcgcagctccgcgccgccgatgccgcagctgccgccctcgcaccagctccccgccgccactgccctcgcagctccacgccgccgccgcagccgccgcccttacagctgaactgaacagatacatcatacaggcatacagcagcacctacggcagcagcttggcagtgcctctttttctgtctcgccat

SEQ ID NO: 22997 - DNA, 603 bp, Oryza sativa
  Clone ID: PAT_MRT4530_28119C.1
atggacacaggggaggctttcctcggctgggagcctgggattccctccaagggaatggaggggccattgccgtcgcagcctctaagcacggccgtcgctttcgccactcgtgcagtccccaagctcggccgccagtcgccgctcgcgcggtcctcaagctcggccgacaccgtggcagctttgagatgcagccaccacgctcgagccgccgattcaacctccacccaccattgtcgattggtgcagcctttacgggaacacaagcacgccgagtcaagcctcgcgggcccctcgaacaaccgcctcagcgctgccgtccgcgacctcgtcgtcgggaataccggctgcagaaagtccaggttgttcgggaagaacaccgtgtccgggacatggccggtagatgagagcaagggagcgtccaggacgaaggtgcgcgctggggagtcgcctgggaaggagacgttggaggcggcgccgcaggcgaggaagtttttggggagcgcaaggcgcgactactcactgttcgtcaacatctacttcatcttcaccaacatgtcgaacactggagacaaggagaaggagactcccatcaacaccaactga

SEQ ID NO: 22998 - DNA, 416 bp, Oryza sativa
  Clone ID: PAT_MRT4530_2811C.1
gacatgatactgaatcaacataatcttattggaaaaagcaaacacaacaacaggcgtaaatccaatagtcgaaagaaatgaaaaggaaagggtaaggcaccacaacctcgtgacaacagcaacaagcattccaacatttgtggatctaattatcatgttgcttaagattgccgtataccaaaacaccttgttctcctatatcagaaatatttcaaggagaaaaagtcttctaaccaagatatgaagctcatttcaatcttacaaatgaggcaagacctaaagttggaagttctcagcatgctcctatttaacctgagaacaatctcgatcttctctcagaggatattgcttcactttctgcgatggacgacatgctcatcgtatattgctcaacggatccactaggagatttactg

SEQ ID NO: 22999 - DNA, 394 bp, Oryza sativa
  Clone ID: PAT_MRT4530_28120C.1
gatcgggcacatgaaactggcgtacctacttccgtcggcaacaaaccagttacgcttacaagaagctcgccgcttcctcccgttacataaattggatttctcagacccctggaaatcgggcggagcaagagtatacccaaacgcgatcagggagagggagtgcggaagacgaggaaatcggatccccgcatgcggcgctgcggccaccccaggacgcaatgtaaagggcgccctgcccccgcaggcgcccccagacacattctcaaaagattcctcgaagccattagttggcatcgatcatcgcataggcagagaggacgctaacaccaaggtggtagtaggtatacacaaggatcgctacgccagtttggatcctcaacaccccggcgtctag

SEQ ID NO: 23000 - DNA, 590 bp, Oryza sativa
  Clone ID: PAT_MRT4530_28121C.1
agagaaagtctgatagattagcacttaggaattaattgtgtagcatcaagttcagacacacgaccgaacaacgagcatctacaatcaccgaccgaacagcatcccggtgtgcgcggtcgtttaaacccatgcacattccagacaaggaagttgaagttgaaactcgtcatgggacgcgattgatgcgacctgacaacgaagctctcaagcggcctgcaccacggacgccggcgccatcagcgcgctagctggcctgcgggccccggcaagctgatgtctaagagatggtcgatactgagctcattgtcaaagatctccgtatactgctggagtgcattattggtcggctgtggaggaagaggcggtacatcgtctgcatcaacctcaagctttttcgccaaaaccacctggcaccttgacattaatattgttggagctccatggagtgcttgaaccacctgccggtcacttccgcgaggcgtgaagggggtagcaagcatgaccgatgcaggcggcgttggcagcggcgggagaagtggggcagggatcgccttctaatcttggtgcgcctagagaaggtgatcaatgga

SEQ ID NO: 23001 - DNA, 1296 bp, Oryza sativa
  Clone ID: PAT_MRT4530_28122C.1
atggcaatgccattgcgggatccaacagaccgcgctgctatgtccgcgccgttgctcccgcgttccgccttcgtctcctccgcatcgttctcctccttttcgtccgtcgcctcgttctcctccacctcgtcgtcgttctccgacccggccgtcccgtcggatgtcgtcgaggcgttgccgatgtcgagggactcgttcaaggcgctcgccgtgctgagggaccaccagggctcggtgtcgtccctctcgctctgcggggagttcttgctcagcgcgtccaccggcgcagacatcgtcgcgtggcagcagccggatctccgccgcttcgcgaggttcgggcatggggaggggtccgtcaaggcgctcgccgccgcggggggcagggtgttctccgcgcaccaggacggccgcgtccgcgtctggcgggtgtcgcggcggtcggagaacgcgttcaagctcgtcgccgcgctgcccaccaccagggactacctgggcaagatcttccgccacgccagctacgtgcagacacgccgcaaccaccgccgcctctggatcgagcacgccgacagcatctcctgcctcgccgtgcacgacggcgtcgtctactcgggctcctgggacaagacgctcaaggtctggcgcatctccgacctcaagtgcctcgagtcgatccacgcccacgacgacgccatcaatgccgtcgccgccgacagcggcaccatctactccgcctccgccgacggccacgtcaaggcgtgggggaaaggcaaggcggcgcacttcctccagggcatcctcatctcccgggacggcgtgtcgtggaacgccctcgtggcgagcgccgacgccggggctcgccgcgtgtacgccgccgggtcggacgggcacgtcgtcgggtgggacagggtaggcggcaggggcagccgctggagcctctcctgcgacgtgaaggcgcacgacatggccgtgctctgcctgtgcgtcgccggcgaccttgtcttcacgggctccgccgacaagaccatcgggctgtggcgctggcagacgagcggcgacggcgacggcgccgccgccgccgccctcgccagggtgggcgtgatcagaggccatgagggccccgtgaaatgcatccaggcgagctggtgcagggtcagcaatggctgcatggtgtacagtggagggctcgacaagagcatccgagtttggtgggtgcccaatggctggaaggccaacgagcagaagcagcagcaagaaaatgacacgaaagatcacaagaactgcgtgttcttgaggtga

SEQ ID NO: 23002 - DNA, 256 bp, Oryza sativa
  Clone ID: PAT_MRT4530_28123C.1
ccccgggctgcaggaattcggcacgagggctactaccactttgggtcggatcgagcttgttgttgcctgcaaatctgcaaataatcttagctccttcagctaaagagcaagcaacggctactagcttccctcaacgccctcgtcgcttgcctcaccgtcaccgtcgtcactcgtcattcaccaacactcgtcaggcttgcgatgcagcgacgacggagaacgcggcgccgcgcggcgaagggcgagacgaggcccg

SEQ ID NO: 23003 - DNA, 180 bp, Oryza sativa
  Clone ID: PAT_MRT4530_28124C.1
acatccacgcgttcgacttgatcagttaagctcttttgcttctctaacagaccactctactatacacacacatatatacttttctgttgcatgtatatagtaagcacacctgatggtacattaagagcacacgcgagatgtatgagacccttgacctaccgtgctacaacggggaggctc

SEQ ID NO: 23004 - DNA, 453 bp, Oryza sativa
  Clone ID: PAT_MRT4530_28125C.1
atggctgccgcgcgcggccttgatgcagacttgactaaagacacacagatcaacgctaagcggcagccgtcgggctgtgccacgctgggttcgggcagtgacaagggaggtagtagactgcaggaactcgtcgaggttactgtggatctgagtgcacgccgtggaggagcggcgagcgaggaattagcacgggcgatggtagttgaccaggttgaggtagacgtcgcgcaacgcgcgcagcagtgcctgccggaggtggagtactggagcagcagcccgcggccatcgaccaccgcgcgccacgccttgcatacgccgcgggacgtggccaggctacgcgccaggaggcgcccgaggatgtcggcgagcggccaagcgcgtcgtcggactgcgccggcatccttgtctccccatcgctgccacccgcgccatgcgcccttgatgcagccttga

SEQ ID NO: 23005 - DNA, 300 bp, Oryza sativa
  Clone ID: PAT_MRT4530_28126C.1
atgaggcaagccaagtgccggcaagactacatggcaattgttaagcagagccggcagctgatagaaaagctggacgcaaagaatgaaccaaagaagaggcagaagcgatcaaagaactctgaaaaagaaaaggcggtcgccccgagctcgtctaagaaaatggaccgcgaagagctcgagaagaccatcaggggtttcctgaaggagctcgattcgactgaagctgctccaatgagaacaactggatgtacgagtgcaatgcgacctagtactatcgatcaggacttcaatactcaatag

SEQ ID NO: 23006 - DNA, 324 bp, Oryza sativa
  Clone ID: PAT_MRT4530_28127C.1
atggggccctatatctttgcagtaggcggagggaggagcacacacgggctgtcgtgcttcctattcgaggagtccacaggcggggccatctgcctcctcttccacctccatacgccaccggaggagtggaacaccgccgtcctagtggcacccattgtgctcactgttgatgctcctaaagttcgtagtggcgccggcgctggacgcaatggcagggacaagctacaccctctcgtgtgggaggaggttggcagcgcctgggacgagcgggaggaggaggtgcttcgccacaataaacacgctcgccaatgccatcttgtttga

SEQ ID NO: 23007 - DNA, 904 bp, Oryza sativa
  Clone ID: PAT_MRT4530_28128C.1
acgccgcctttctctcctccattggaggattagaacggagagagaggaaggtggggaaaattgttagatttgttcatccattatattttcttgaaaggaaaaggaaggcgaaggaattcaggtatttgcatcacatcacaatctgcaaagcaggaatacctgaaactctcatccagagttgacgaaatcatgtcaacttagaatgatatcaaggctcttgttacattcagaagatcagggcttcaggccctgcttgtttgttgctggatgaacacattcaccaggaaaccactgcaaagtgcagtgcacgtacaattccttcgatcaagtggaagggcatttcatgggcttatagatcaactttgttccaaatgtcctaaacatgatgatggtgccactttgcaaagtgaaaccacttcaagcaagttcatgtgtttatacaagttcttcaggacatcaagtgaaggtgacactgcagctgtagacaatgtattgcgcaatgatggaaatacagaagttgtcgctatccagtcgaaagaaaatggtcgcaattctaataacatattggaggatggagagaagtcagttctgtcgtcggatcattctaaaaaattgagtgcacatcatcgactgaaaatctggattactagtggacacagtggcataatcggaagatacggaaagaagttggagctaaatgctgccaatgtgcctaagcagttcccaagtgaacatgtgaatactgtatggccagattggctcatgaaggtggcccctgaggcagtgcaaggctggttccctcgtcgtgcagaatcatttgagaaattaggcaagattggagaaggaacttatagtagtgtgtacaaagctcgagatcttaaaacaggcaagattgttgctctca

SEQ ID NO: 23008 - DNA, 2005 bp, Oryza sativa
  unsure (1)..(2005): unsure at all n locations
  Clone ID: PAT_MRT4530_28129C.1
ggttttccccccgtcgcgccgcgcccctgcccctcgccactccttccgtatcgctcttgcggagcccccccgccgaccgctctctcgccctccctcccctcccctcctcctcgtcgtcctccaatccgctctccaccgcgaacgcttcccaattaaaccctactctctctctctctctctctctctctccgccctcacgttatctccgcctccttctccacgcacgcacagaagagaaaaagaaaatcatgaaagaataagcattagcaaaaggtgaggtagaaaggagaggagatatagacgaattcggttttcaagaactgcgtggtggtgaagtagggatcgatggaggtggcggcggcggactacgccggcggggtccgtgtcaagaaggaggccggaggctgcggcggcagcggggacatgttcctcgtcgatgacctcctcgacctgccgtgcgacgaggaggaggaggagacggggttgtgcggggcgtacggcggcggcggcgccggcctgggagcgggcgtcgtcggaggtggcggggatgaccgcgcggccgggaacgcgtcggccgactcgtcgacggtgacggccgtcgacagctgcagcaactcattctccggcctcgccgacggggacttctccggcgggctgtgcgagccgtatgaacaactcgcggagctggaatgggtgtccacctacatgggcgaggagaccttgcccacggaggatctccggaagcttcagctcatctccggcatccccgccgcgccgcgcgcgccgcccgctctggccgtctccgcggtgcagctgccggcaggaggcgccggcgcgctgcccacggaggcgcccgtgccggggaaggcgcggagcaagcggtcccgcgtcgcgccgtgcagctggtcgtcgcgcctgatggtcctgccgccgccgccggcgtcgccgccgtccccggcgtcggcggtcatctcgccgtccgagtcgggcaccgcggcgccggcattcccggccaagaaggcggcgaagtccgccaagaagaaggacgggccgtcccccgcgccggcgccgaacgcggccgcgcaggcggcggcggaggggaggaggtgcctccactgcgagacggacaagacgccgcagtggaggacggggcccatgggtcccaagacgctgtgcaacgcgtgcggggtgcggtacaagtccgggcggctcgtgccggagtaccggccggcggcgagcccgacgttcgtggtgtccaagcactccaactcccaccgcaaggtggtggagctgcggcgccagaaggagatgcagctcctgcaccaccaccagcagccgccgccgcacgtgggcgcgggcggcggcggcgccgccggagggctgctccacgtgacgagcccgctgctgttcgacgggccgacgtcgtcggcgccgctcttcgccggcgcggacgaattcctgatccataaccgcataagcccggactaccggcgccaggctacctaggaaactattcattagcccaggaataattcagcgataaaaacagctaatttttttttgtcctgcaaaccgcattttgggtactctttatttctcagcttcttaagtttcttttttctttnnttgagaattttagtgtttttcccccttagaagcagactctgaggagtttctttcgtagcacatttttttttcttttgattnttgnatgcaggactcttagaagaagaggaacaggagcagttttcattgtttcnncnanaannnnnntntnnnnnnnnnnnnnnnnnctcttgaggggggcccggacccaattcgccctttatgagtgtttaccgccctacatggccgtgttttacacgtgggaatggaaaacctgcgttcccactaatggcttgagaaaatcccttttcagatggtaattacaaaggccgaccatgcctttccaaatgccccctaattggatggaacccctttacgcctttaaacgggggggttgtct

SEQ ID NO: 23009 - DNA, 552 bp, Oryza sativa
  Clone ID: PAT_MRT4530_2812C.1
ttaatttgcttgacaatatcggaggtgcactgcactgcaccaacccaacggcacaggcatagtcgatctgacagacaagcaagcagggaactgaaagagagagagagaagaatataacccgatcgtctctgccttccattttgcttgtgcacagaagcttccactttctagcttgctagcttagcctgacgacgagaggaggcatgcagagctaagccgccattagcaagagaggaagaagaagaagaagaagaaggtagctgaagccatgaagccgggggggagcagcgggcggctgcacgccctgcggttcgagtcgcagaggttcaggctgctgaccatcgtcgtcggctgcttcctcatctccctcaccttcctcctctcctcccgccccgacgccaccgtcttctccaccctgagccccagggagtcgttggaagacgcacgcatgccggcgatgaagatgctgcaccgatcatcgtccggcggtctcatccgggatttccatgtcgacatcctgccgcagcagggagagagacatgctcatatgca

SEQ ID NO: 23010 - DNA, 545 bp, Oryza sativa
  Clone ID: PAT_MRT4530_28130C.1
atcgcttgcggaggaaggtggggagggcaaggaggtggcgcagagttaggcacggcggtggggcaccatggtgtcggttctccgcggctccagcgacgggcgacggcgtcgccagatctggtctccccgcttggccggggtgatcggcgacgggctcggtcgtcgccggcgccgctccgcggacctggcagggaggtggctagcagcggcgatggtggcggatgtggcggcgacgaagttggcgacgacggtggcggactgcggcgcgtgccgcgacgccggccctcatcaagaacctcaccaccacgagggaggcgcggcgccctctgacggtggcggctggacggtggtggttggacaggggtgtccgtggtggtggcggtggcggctgtcgacgatggtacctatagcggcgatggttgaaggccatcatccggctgacggtgcgtcggcggcggcggcggtatgtggaggcggggaaggggtctagcggcagggaagaaggagtccgggtgcgggcgcgccgtcaacggcgggaacaactt

SEQ ID NO: 23011 - DNA, 606 bp, Oryza sativa
  Clone ID: PAT_MRT4530_28131C.1
atatgtttttgaggccgtggcgacggggacggcacggcgacggcgcggagttgggcgtggcggtggggcgccacggtgtcggctctccgcggctccagcgacgggcgacggcgtcgccagatctggtctccccgcttggccggggtgaccggcgacgggctcggtcgtcgccggcgccgctccacggacctggcaggggggtggctagcggcggcgatggtggcgggtgtggcggcgatgaagttggcgacgacggcggcggactgcggcgcgtgccgtgacgccggccctcgtcaagaacctcgttgccacgagggaggcgtggcgccctctgacggtggcggctagacggtggtggctggacgggggtgtccgtggcggtggcggtggcgatggtggttgacggtggcggctggcgacggtggtcgctgtggcagtggcggtggcggctgtcgacgatggtacctatggcggcgatggttgaaggccatcatccggctgacggtgcatcgtcggcggcggcggtatgtggaggcggggaaggggtctggcggcggggaaggaggagtccaggtgcgggcgcgccgtcgacggcgggaacaactg

SEQ ID NO: 23012 - DNA, 682 bp, Oryza sativa
  Clone ID: PAT_MRT4530_28132C.1
gttgtctttgggctgaaacttttcggagcagatttaatggctatccctggtctttacagatttgttcaggagaccataaaaaagcaagttgcgagcatgtatttgtggccaaagacattggaagttcccataatggatccctcaaaagcttctaagaagcctgttggaattctacttgtgaaagttttaagagctcaaaacctgcgaaagaaggatctgttgggtaaatcggacccatatgtgaaacttaagatgtcagatgacaagcttccgtccaagaaaacaacagtgaagcgtagcaatctcaatccagagtggaatgaggatttcaaatttgttgtgacagaccctgaaactcaggcactggaaattaatgtctttgattgggaacaggttggcaagcatgagaaaatgggcatgaacaacattctgttgaaagaacttcccgcagatgagactaaagtcatgactgttaacttgcttaagacgatggatcctaatgatgtacaaaatgagaagtcccgtggtcagcttactctggaggtgacatataagcctttcaaggaagaggatatggagaaagaaggcatcgataatgctgatgtggtggagaaagctcctgatggtactccagctggtggaggactgctttatgttgttgtcatgaagcttaagatcttga

SEQ ID NO: 23013 - DNA, 145 bp, Oryza sativa
  Clone ID: PAT_MRT4530_28133C.1
tttttatacaaaaccaggaggattaaacgttctcctcatctctttgttagaagtgaaaaaaagaatattatgatccaggaaaactttgtcacatgccttcatgtaaaacaccaggaagctgctgccgtcataagcgccccactct

SEQ ID NO: 23014 - DNA, 681 bp, Oryza sativa
  Clone ID: PAT_MRT4530_28134C.1
gcacgaggtcatttctagcttagcttctacgccaatgcttggagatcgatcgacctatcatctccgtcgatcctcgaagtcgatatatagctaattggaccatattccatggcgatcatggcagccagagctctactcgtcgtcgccatggcagcagcggtgctcggaacggcgctcggcgccacctacaccgtcggagctccgagcggctcatgggacttgaggactaactatgaccagtgggtttccaacatcaactttcgtgccggagatcagatagtgttcaagtattctccagcggcgcatgatgtggtggaggtgaacaaggccgactacgactcatgctccagctccagccctatcgccaccttcaactccggcgatgacaccatccctctcaccgctaccggcacccgctacttcatatgtggcttcaatggccattgcaccggagggatgaaggtcgctgtcaaggttgaggccgccaccggcagcaacccggccccatcaccgatgacccctcgtccacgcacaccgacagcaatggcaccgaacgcaatgccgccaacggctggtggccggcccgtgcctccatctaactcagcaagccagcccgctggtgttgcatctctagttggtcttagtttgggtgccatagttgttggtctcatggccttctaa

SEQ ID NO: 23015 - DNA, 284 bp, Oryza sativa
  Clone ID: PAT_MRT4530_28135C.1
cccacgctttcgcccacgcgtccggggaaactcaaatttacacctgataactcttttaaaattccaaccatcaatctaacaacttctagtcaactgcttatccattacaatccactatctatatgaatcattgactttcatccagaatctattaatctatgcttttctgttggaattgtttatcttactctccttttattcatgatatattatcctatgaccattagaagcataatgactacatatggatagaagagacgtttaaaatagtgtttccttcccta

SEQ ID NO: 23016 - DNA, 186 bp, Oryza sativa
  Clone ID: PAT_MRT4530_28136C.1
ggccaacccatcttgcattgctcttcttccaagcccccttcctgcagggggaatcgaggttgcaaagggactggaccgatgaatgctaaagtgcttcttatcatgccacggggggcatgtccttgagccaggcgtcaagcgggctgccgagggggtacacgaagaaaccaaagcgagcctgcacgt

SEQ ID NO: 23017 - DNA, 221 bp, Oryza sativa
  Clone ID: PAT_MRT4530_28137C.1
cagctgtgctatatatgcttgcaaaacttgcctcatctacacgagcagtttagaggcagtttatagctctgtaatggaagaagactcatatgtactgcttcgatcatcctcacaactgttttgaatgactgccacaatgtatggatatgcctagtgcttgtgattggcaattgtgctttggtcgcgcatctaatggcagacggcttgaccctaacatatgc

SEQ ID NO: 23018 - DNA, 1413 bp, Oryza sativa
  Clone ID: PAT_MRT4530_28138C.1
cacacgttgcgctcggggccgcttcgacggagatgggcggcgccgccgccgccgccgccgtggccctgctcgcggccactcgccggcgccccgctgcgggcccgctggcgttcctcctccctcgcgcggcccgcgcggggctccacgaggctgctgctccggcggcggaggaggagaaggggaggacccggaggaggcggaggaggaggagcagcagcagccgccttctcgggccggacatccccgacacctgggactcgcccccgcgcgccgcggcgcggccgtctcccccgagcggcgccggagttgattatgactccactgcgaccattattgatggcaagtctgtcgcggaagacataaggtttcagatcgctgaagaagttcgtcaaatgaaaaatgcagtggggcatgtgcctggcctagctgttgtattggtcggcgatagaagggactctgagtcatacgtgcgatacaaaattaagggctgtgaggaggttggaataaagtccttgttggcggagttgcctgggaactgtacggaagacgtagtggtggattctgtgtcaagattcaatgaagatccatctgttcatggcattcttgtgcaactacctctaccacagcatatggatgaagaaaggattctgagcgctattagcctagagaaggatgttgatggtttccatccattgaatgttggtaatcttgccctcagaagccggaagcctttatttgtgccctgtgctgcaaaggcttgccttgagttattgctccagtctgggattgaactcatggggaaacatgtcactgtgattgggagaagcaaagttgttgggttgcccacttctttacttttacagagacaccatgccactgttagtattatccatgctttcacaacaaatccagaagagattacccgtcaatctgatattgtgatctcagctgctggagtggccaatcttgtaagaggaagctggttgaagaaaggtgcagttgtgatcgatgttggaacaaacccaattgaggatccaaccagtgattacggctatcgattaactggagatgtctgcttcgaagaagctgtgaagttggcctctgctataactccagttcctggtggtgtgggaccggtgaccattgcgatgcttcttgcgaatacacttgactcagcgaaactagcttacggcttagctactgaatcccctgaattgtaatcttgcttcactttgcctttgtaaattacttttttttcccctttttatcgctcgttgctctcacttttggctgtttgagagctgggatgtaagtgtaacatacattttgctgaataaatattgtatgattagcatgtccatgcttgcagtaaaaaaaaaaaaaaaaaaaaaaaaaaaaaaaaaaaaaaaaaaa

SEQ ID NO: 23019 - DNA, 364 bp, Oryza sativa
  Clone ID: PAT_MRT4530_28139C.1
gtcgtgcgtcgtggcattttgttcggcatgaccaggggaacccgcggttccgggggctcgccagacgccggccggaccgacccctcatcctcatctccgagcgagcgcccgcccggcgcgcacaaggagatggcccggaaggcgctgcgcgtcgtgctcaggcctggcgacgacagcgagcgcgacactgccggacttcatgaacagtgcacgcaacgtcaacggcatcccgttcatcctccgtccatcccggcgcccgcgactggcgcggctcactcctgcccagacaccaccgaatgcccatcaatggcgatcagtatgcatcgattgaaattcgcttcttgagctaaaaaaaaaaaaaaaa

SEQ ID NO: 23020 - DNA, 2220 bp, Oryza sativa
  Clone ID: PAT_MRT4530_2813C.1
atggcgtggtcaatgccaccgctggctttgttcgccgccgtgctggcgctgcagcaagctatcgccgccgccgcggcggccggagactgcccgaccacctgcggcgacgtggccgtgccgttcccgttcggcatcggcgccggctgctaccacttgcccgggttcaacctcacctgcgaccggagcagcgacccgccgcggctgctcctcggcgacgccgccgcgttccaggtgctcaacgtctccatcgtcaacgccacggtgcgcgccgcccgcgtcggcggcataaacatcacctacggcggcgggaacacgtcgtcggccgacgagggacgcggcgcttggcgggggctcggcgacggcgggccgttcgcgctgtccgaggatcgcaacgagctcgtcgtcgtctgggggtgcgacgtcgtggcgctgctcaccgacggcggggggagcggcaacagcagcaacgtcaccatcagcggctgcgcctccttctgccccggcaccgacgccggcggccaagcgatcgccgccccagcgggttccacgatgtcgctgaccgaggacaggcggtgcaccggcgtcggctgctgccagatgcccatcagcgtcggccgcgactcctaccaagtgcgtctccgccggctcaacccgagcccgccccagccgccgccgccgcagggcgccggcgacccgacggtggtgctcatcgcggagcaagggtgggtcgccgaggcctctaggtccacccgaggctacccgctcccggtcaccttcgacgagacggcggtgcccgtgttgctggggtggatgatcgcgtcgacccgcgtcggcgccgacggcgaggtgccggtgaactcgacgtgccccgccgacgccgcgcgcagcgcctgcaagagcagccacagctcgtgccgcaacgtctccagctccgcgcgcgccggctacgtctgcgactgcgacgccggcttccatggcaacccctacctcgccaccggatgccaaggtttaagcatcggtgtgggtgtcagtagtgctgcaagccttatacttatagtgatcatggcgatcttcatcatccgcaagcagaaacgcaggagggccaagaagattaggcagaagtacttcaagcagaatcgtgggcagctactgcagcaactggtagctcagagggctgacattgcagagaggatgatcataccgttgggtgagctcaagaaggcaacaaacaactttgatagagctcgtgagctcggcggcggcggccatggcaccgtgtacaaggggatcttgtccgatctccatgtcgtcgccatcaagaaatcaaagattgcagttcaaagggagatcgatgagttcataaacgaggttgccattctctcgcagataaaccataggaacgtggtgaagcttttcggatgttgcctcgagacagaagtgccattgcttgtctatgagttcgtttccaatggaaccctttacagccatctccatgtcagtggaccaagatcactaccatggagtgacagattgaggattgcaactgagacagccaaagctattgcctatctgcactcatcagtttcaatcccaataatccacagagatatcaagtccactaatatactcctcgatgacactctgacctccaaggtgtcagactttggagcttcaagatgtatcccggttgatcaaacaggggtaacaacaaaggttcagggaaccttaggatacatggatccggcatactattacactcagaggcttacagaaaagagcgacgtgtacagcttcggggtcattcttgtagagcttctcacaaggaagaagccattttctcacctgacacctgagggtgaaggtctggttgcacattttgtcacttcatttacagaaggcaatctagttggagtgttagacctgcaaatcatggaggaggcagacatgaaagttgtcgaagtagtagctacgctagctgtgacatgtgtaaatctgagaggagaggaccggcctaccatgagacaggttgagatggcacttgaaggcattcaggcatccagggaaaatgtttcaggtaatctttctgcagagaagcttggagagagcaataatgtcgcgagggatttcatgccaagccaagaaggaagaagcatgacagaagggactaggcaatatagtttggaagaagagttcttgttgtcttcaaggtaccctcggtag

SEQ ID NO: 23021 - DNA, 390 bp, Oryza sativa
  Clone ID: PAT_MRT4530_28140C.1
ccgggctgcaggaattcggcacgaggctccaacatcattgaattccggataaatatgagttagctagaccattgaatttagtagagaatgtgtgtaatttcaaatggcttaaaagtagtagctatcaagtcacgtttatacgcatattcaattattcttttgacttctactggtctccgctcttttgttggtgagctgcgcacaacatcgttgtaggcttgtagccaccttcttggaggtagatcatactcttcaccaatgaatttggaatttcttgacacctttcttgttaagatagtaaacataacataagcaaattgagtttggaatttgggtttatgcaaatggtatgttcaggagatgtggtccatgggagatagtcttatctgg

SEQ ID NO: 23022 - DNA, 1032 bp, Oryza sativa
  Clone ID: PAT_MRT4530_28141C.1
atgcctggagcagctaccaccgccgttgttgacagccgccggggcacacagcacgcggaaggccccgccaccatcctcgccatcggtactgcaaacccgacaaacattgtgcctcaggatgagtttactgattactacttcggtgtaaccaagagcgagcaccttaccgagctcaaggacaagatgaagaggatatgtctgaaatcgggcatagagaagcgctacatccatcttgatgaagagatcatctgtgcccacccaaacataatcgataaacagcagccctcccttgaaactcgcgtagaaatagccgccaccgaggtccccaagctcgctgagtctgccgcgaggaaggccattgccgagtggggccgtccagccactgacatcacccacctcatcttcagcacctactctgctctctccgagctaaccctggtatgtttttccacccctaatgaaagcaaaattgttggccatggactatttggagatggcgctggcgctatcattgtcggtgcgggctccttggccgatggtgagcgcccgctattcaagatggtagctgcctcgcagaccacaataccaggaaccgggcacgcacttggcatgcaggccactgatagcggcatagatttccacctgtccatccaggtgccgacattgatcaaggataacatccaacagactttgctcgatacctttcgatcggtcggaaataacaatcctaactggaacgacctcttctgggcagtgcaccccggcggccgcgcaatcctcgacaacatagagggtaagctccagctgcaaccatggaagcttgcggcaagccgtcaagtgttgcacgattacgggaacatgagtggtgcgacaatcgcgttcgtgcttgatgaactacgccgccgtcgggagaaagaagaacacgagctacaacagcatgaatggggagtgatgctagcgtttggaccagggatcacgattgaggcaattgtcatgcgtaacccccagctaagtggtcttaaagaaaactaa

SEQ ID NO: 23023 - DNA, 194 bp, Oryza sativa
  Clone ID: PAT_MRT4530_28142C.1
tgatggtgagctatatgattgacaatggagctgcttggacttggggtgcatgggagatggtggagggcatgcatgggagcctgtggggatgtggggcaattttgaattgcgatggtgatgaatgaatgatgttggtggtgaacaatgatgatgtgtgggctggtggtgcaatggcaatgatgatggcatgtggg

SEQ ID NO: 23024 - DNA, 1725 bp, Oryza sativa
  Clone ID: PAT_MRT4530_28143C.1
atggacccattagacactcttccagtgagatttcattacaatggggagtttgttttgcataggagggataagtcctattgcggtggtagtgaagcaatgtcctacttagagagagacaaggtgtcacttccagaaattattgggcatttgcgggatcataccaaggttatggaaaggacaatgctgcattggttgttcccaggcaaagatctcaattctggcttgagagttcttgtggatgacagagtgtgcagctatatgtcagattgcatagttgaaggtggggtggctgaagtgtatgtggtggaaccaattgtagttgatttgtcagaagatgaagaggatagtgactatgaggttgagatggatgagggtgctgaaacagattctgaaggagaggatgatagtggggatgatgttgaagttttcaaggataaatatgtgcaggagcaagctgggaagggcaaaataaaggaaggggctgagagggcagtggtggaaggtggtgatgcagctgaaagggtagtggttgaaggtggtgaacaagctgataagagaatggaggaggaataccacactgaaactgatagtgactacatgccaggagatgaatcaccatcagatgatgaggaagaggctgcaaacatacataaggagtacaagaaggtgaagaagaagatcaagactggtttcattttagggattgatggtgctggtttagaggggtcacagagcaacccaaatgtacatgctgatcaaggaaaaagtggcaatgaaacaccatatgaagagagtgactcaaaaaggtcaatagatgagcttgaaagtgatggggaggtgactactagaagtagcaagtttccaaggtacaagaagaagcaaggtgtgcctgtgtttgaacttggaatgaaatttagctctaagaagttgttcaggaaggcagtgactgcttatgccctaagtgagaggaaggtaatcaacttcatcaagagtgatcctagaagggttagggctaaatgtgactggccaagctgcccatgggtgtgtcttttgtccaagaccacaagaagagataataagctggtgacctcaagaagaatagctgagaagtatgagaagttcatactgtccaacccttcctggaacttggcccatatgaaagcaacagttcaggaggaaatgtttgctgatgcttcattttccaagttgaagagagccaagaaacttgtgatgctgaaggctatggatgccagaaaagggcaatatcaaaaattgtacaactatcagcaagagttgcttagaagcaatcctgggagtactgttgtgataacaacttggtcctttcaaacactccacagagttttgtgcagagcaaaaaaaaggaagaggttagctggtgctaccactagtgctgtcagcctaacaaacaccacaagtgctactaagcagaaggggcaacaatccaatattgtcagcatgaatgctaaggcaaagttggcaacacaggcaggtggttcggccacagtcaacctccaagcaattgtgccatactccaagggttctgcatcagcttcaattcaggttacatctgggaaggcttgtgtgtcagtctcagctcaagaaccagcaaagaagacaaaaattggtggtcctcctccacccaagaaggccaagacacctggatctattctcattcaaccaccatgggaatctgacaagctttga

SEQ ID NO: 23025 - DNA, 141 bp, Oryza sativa
  Clone ID: PAT_MRT4530_28144C.1
atggctttggggacaacagtagggagtggtgacggcgtctggtggtggtgcacgcacccgtccaaacccaggcgacgtctgcgcggtggggatgaggaggagaaggcggaagaggttgtttgcggggaggatgcggtggag

SEQ ID NO: 23026 - DNA, 807 bp, Oryza sativa
  Clone ID: PAT_MRT4530_28145C.1
atccccgggctgcaggaattcggcacgaggcacgctatctccgcggccgcaccatccgcccggtaacaccgccgcggcgccatcctcggatgacgccgcctagcatttcgaacgccgctgcgaacatcctcccacacgctgctttggctcacggctacgccactccgccgtgcctccgcagatcgcttcctccgcgcgaccgcgcatcctcccttcgccggcgccgcagtggtgcgcccttccgatggcggggctattccgcctcccccgccagcacagtcatcgtccagtgtttcatcctttccgccggccctcctcacctcacctgaatcgccgcgtcgcggttccaaaaccccaacctctagccgcctgccacacctccacttcccgctgcggccggaccctgccggcggcctataacggcaccacgagcccagaagccccgtcctcgccgcatcccccggggcccgaacctctttgccatgtgctgccctatcctcgctacaagccccgtctcgcagagcaacccggacgccgtacctcctagccgtcgccacgaacaatcagacagtccacctgcagtctacgccttcgccgcttcgcctgcagggctccggtgcggagcggagatcccaggggccagggctgcttagggatttgcgtgaggacagaggcatcctgcgatccaggtcactggtgaaaaaggggagcaaaaggccaaatgttttatgctgttgttgctcctttcttgcttgtttgctatctaatcagagccatgagtaatacgctgcttcatgtgcacccttc

SEQ ID NO: 23027 - DNA, 457 bp, Oryza sativa
  Clone ID: PAT_MRT4530_28146C.1
tttggttttttttttttttgagaaaaataatttcatccgatttgataaatctgaccaagtacgaaccaagttaagacgaaaaggaagtgacatgttctctcggatgtcacctaaatggataaaattcgtcgtcgaaattcaaacatttcaatccgaacccagaaccctgattcatcatatatactctacagacgtgagctcgagctcgttgtcatcaaccctgcaatctcctttgcaaacctttccatcaccggaggcggcagtagcatcgacgccgccaccgggtcctcgccgtcggtgttcctgcacctcaccaggaaagtcgccagcatcggctgtgccatgccgctaatgacccagtccccgcgcccaaagtttagctccgtgaagagccgcgtaaggtccgacaccacgtacaccccgtcgaacaccatgccgtgcccacgcagtgatgcca

SEQ ID NO: 23028 - DNA, 324 bp, Oryza sativa
  Clone ID: PAT_MRT4530_28147C.1
atgtcatggcacagggccggtgtcctgctgctaggggctcagtcctgcctacctgtcccgggggttccggccgtaggtggggttgggtcggtactcttgtctatggctaggatgggttggaaactatgtcacgtcttccgtctgtataccgtggtgcttccaaaatttcccaagtttgaaagagagctcgatgataaatccatggagaacatacaacgggacatgtgctacttcatccactatgagtgcgcacatcagcttgggaggtttttcgacaaggacggagttttggacctgccggagaacgaatccctatctaactag

SEQ ID NO: 23029 - DNA, 492 bp, Oryza sativa
  Clone ID: PAT_MRT4530_28148C.1
atggccccgtggtgccgaggaaggaggcgacgacgacagccaaagcaccagcgaggcggcccaggcggctggggcggtacagtggcggcaacgccactagacgaaggcgggaacgcgcctgcgatggtcaccgcgcgaaacggagggcaggccgggggagaggatgtggctgcgacgccgaggatggcgacagcacggcctaccgacgcacgggcgaggagggagaggcggctggagacggctggaggcggccggcggcatgggagagagcggacaacggcggggaggggtggtgcggccacggggagacgcgggaggaggctaaaacgagagaacggaaggagggggttccattttataggcgcggggagggagccggccacggaagagggcggaacggaggcgggaatggcggccggcggccatggaaggtggccagggatggcgcggctgttccgggcgattaatggtgctattcaagggggaaattag

SEQ ID NO: 23030 - DNA, 323 bp, Oryza sativa
  Clone ID: PAT_MRT4530_28149C.1
gtagttctgcttttagtggtggttgcggtgtttgcgtgtcagttcatgccttcgttgttgtcctacccctgctgctggtgaggaggccatgaacacgaccattgcactgagccgatcgtgagggacaggcctgccgctgaacccggatcaccattgatcaagaattggtgatgatgcctgagactgaatgacaggctggatgacctgcaggaccgaaggcatctgtggatgcttcgagccctggtcgaacttagctaagaagctccttggcgacgttgttcgccaaacaaggtctaacgccatacggacgcgctgggcggagc

SEQ ID NO: 23031 - DNA, 996 bp, Oryza sativa
  Clone ID: PAT_MRT4530_2814C.1
atgcggcgcggggcgctagggttttgcggaagcggctcacggcgcggcacgcgggtggaccaagagaaggcgggcccacgtgcagcctcacggctcgcggtggaccgcacgcgtgagctggagcggagggaggcggctgaccgggccgcagccgacgtggctgccacgcgggccgacgggaggaggaagaaggggggctccggtatccaacggcggacggtgacggtggtcaccggagcaaggcgcggcggttcgagcgggagggagaacaccgggttgacgtgcgacgggggagaggacgagccaacggctcggattgcgccgggagaggtcaagggcggcggattgcgacagcggcggccggcggcgagcaaaaggggaaatcgcgacggggtggcgagaggtcgattcaaggtgacgagagcatctccgtggctcaagggtttcatttctagggtcggatggagcagagggactctgagagaagccggcgacggcgaggcacggtgcgggttcaagcggcggcggcggcgggcttatggcggcgtcggcggcgccagggagcggtttggggaggtcctagggagctcagggatggcgttggcgagggtggtctacgagccagggcccgacgacggcgtgcgactgcacgcggcggcggaaaacagagcaacggcgagcgcaaggcgcattgtgcggcaagaggaggaatatggtggggagctcactagcgagggaggagcggcgaggtggtcgcgaaggcggggcggtgcggcaccaagagggcgcggccggggaagaagagagggagaggtggctcccggagctcctcgtcacgcgtccacacacgcaccggctcctccggtgcttggcggcggacagcgacgacgagggcgggacgagcggcaacaaggcggcgacggttgttcggctgcaatggcgcagtgggggcgagacaacgagagagggagatgggaggggctcgggtttttatag

SEQ ID NO: 23032 - DNA, 151 bp, Oryza sativa
  unsure (1)..(151): unsure at all n locations
  Clone ID: PAT_MRT4530_28150C.1
ngaccacatgcatataatacagaccattcaaaacgactttggnacnntacgtacacacacactaccaacggttcggtgacacttggcgactacactacctttacaacgctaccctcccaacactacggcggttggtanggcacttttgcgt

SEQ ID NO: 23033 - DNA, 706 bp, Oryza sativa
  Clone ID: PAT_MRT4530_28151C.1
caaaagctttggaaatgttgaaaaggcggagacaatggctgagaatcatccaggtagccaagtggttgatgagcaaaggccaggtgctgacatggacaacgaagataaagaaaagattgtcctcgagaaatacttgaagaagtacaagtacatgcatttcaatgaggcggccgcgccttctccgccgcgaggcatggccggcgccgccgccgccgtggaggacgccgggatggacgaggtccagaagcggctcatgttcgacgacgaccatcctctgtaccgtgagtctgagcttatacaggaaaactaccttggtgttagaaatgctgctcagaggaagctcttggatgagctgggcatcccagctgaagatgtgccagttgaccaattcacccctcttggtcggatgctttacaaggccccatctgatggaaaatggggtgaacacgagcttgactacctgctgttcatcgtccgcgacgtgaaggtagtcccgaacccggacgaagtggccgatgtgaaatacgtgagccgtgagcagctgaaggagctcatccgcaaagcggacgccggagaggaaggcctgaagctgtctccctggttccggctggttgttgacaacttcctcatgggctggtgggatcacgtcgagaaaggcaccctcaacgaggccgtggacatggagaccatccacaagctgaagtaa

SEQ ID NO: 23034 - DNA, 135 bp, Oryza sativa
  Clone ID: PAT_MRT4530_28153C.1
ggtaattgactaacaggcgttgtaacttattattggttcacaacataaacatggtaagaggttcaggacaccatcaaacattacaacaaagtgacaatatgcaaaagctaataagggaaaatactcgggacaaca

SEQ ID NO: 23035 - DNA, 477 bp, Oryza sativa
  Clone ID: PAT_MRT4530_28154C.1
atggtggagaggccaggtaagaagtcttcggggtcatatgaggttaatgtgacgggggagattgttgggcctgaggccaggcccaatgtgacgtgggtgatccacggttggtgggccgggctgcgcactataacaagtggtatcagagctgaaggttttaaaattggatcaagaagacatgtggaggaggaaatacgagaccggcaatggcggaacgtgaccggaatacgaggccgggcgtggccgaaggcgatcggagagatcggaggggtaacgccatggacggcgtgcccgacgcatgcggcgatcgtggatccgtggcgacaagaaggccagtgtcggaagggcgaagtcgatgagcatggcgcggcacggcggacgtgcagggccgaggacgacgagattgcggacggtgaacacgagggctgcgattgcggaatttgtgaacggatccagaagaaggacaagaaggactga

SEQ ID NO: 23036 - DNA, 337 bp, Oryza sativa
  unsure (1)..(337): unsure at all n locations
  Clone ID: PAT_MRT4530_28155C.1
gcggcggtaagcaattttactcggagcaccaaaaattgcaattttgggcaagacacgtgattcttgggagcgactttatcaaacgtgggggcaatgctttctattaggactaggtaccaaccgttgcaactgtctgcgtatttcttgcttcgaagattgaagacacaccttgcccattacaacgtgtcatcattgtggcatatgaaaccatgtaccggaaagactgtaacgctgctcacagaatctaccagaaggaagttcttgagaagcagaaagagctcattttggtaggggagacgctgntgctttcaacaattaggtttgatttcaacataca

SEQ ID NO: 23037 - DNA, 418 bp, Oryza sativa
  Clone ID: PAT_MRT4530_28156C.1
catcaacgatatttgacccgctgttgcccggaacattttcttcacgcaatcgcagccctcgtgttcaccgtccgcaatctcgtcgtcctcggccctgcacgtccgccgtgccgcgccatgctcatcgacttcgcccttccgacactggccttcttgtcgccacggatccacgatcgccgcatgcgtcgggcacgccgtccatggcgttacccctccgatctctccgatcgccttcggccacgcccggcctcgtattccggtcacgttccgccattgccggtctgatcgtgagtgaggtcgtcgcctccgcaacgtcctcgttgttgccatcaatctcatcgccacgactgatgatctcctgtcgatgcctgatccccacctcgtatttcctcctccacatgtcttcttgatccaattt

SEQ ID NO: 23038 - DNA, 650 bp, Oryza sativa
  Clone ID: PAT_MRT4530_28157C.1
gtggatccccgggctgcaggctcatttgcattgatcatctgaggttgttctttgttgtattgattatctttcacactggtgctcctgtccatattaccatgtcacagtatcaagtttctgcctttcggaggtgtcagaaacattcgatggctggttcaaggtatatatatatgcaattttgaatcactcttttcgctgctatgtgcaggcaaatgatgattgagaggaggcagtcatcacagaggtcaaggaccttgctaccgacttgcaaaaattcaccttctgaaattgttggctacagcagtgtgaaggtagtctcacttgaattagtatagattgctctttggaagtatatgtcaacagctttttcaacttcctgactttggcatgctactgagaacgccaattagggctgctctcatcagttgtttccctctgaagtttcaccgtgttctttttaaaattatataaaaagtcatataaatgttcagttatattttttttctaaaaatacctcttatgtctcaattcaccacgcgccttctacctatgtttgtcgatttaattatgtagacttatggcatcgatcaatgcgtacttatgctagatgttgcatttagaaatattagaactggtttttccaagcaggg

SEQ ID NO: 23039 - DNA, 4599 bp, Oryza sativa
  Clone ID: PAT_MRT4530_28158C.1
atgtcgaccaaccaaatccatgacatcatgaaaagggtatataacatgcatggcggaaacatagataacttgcctaaggcaccaaacaatgtgcagcatccacaaccacgcgatcgatcaatggataccgggatcatcgtggcacggtgggtggtgggcaaggcgttgaaccctgtgttagacggcttggtggaggcgtgggcggccagtcagaagctcgggcccaatgtggatgccctcaagatggagctgctctacgcgcgggccatgctcaacaacgttcgcggtagggagatccacaacaccgacctcaacgagctcctgcagaagctgcgggacttagcgtacaatgccgacgacgtgctcgacgagctcgactacttccgcatccaggacgagctcgatgacacctccgaggccgctgctgagcacgccaagggctgcgtcagcgacctcttcctcaacgctcaccacacggccaaagcggctggcaagctgttgggattctcttcatcatgctcttcttgtgctactaacaacgggcctggtgattccattaccgctgcatgctgcggttcgccacacaacaccatccatgctatcggtaaacgcctttgtttctcgacttctctagttgatgattgcgatcatgattatggctgtgtgcacgatgagagagaccatgtgaaagggaaatcaacgccaaagttgaagtttgacagggtaggtctatccaaaaaaatgaagattattgtagagcagctgcagcctgtgtgtgcaaaagttacagccattcttaatctagagctcatgggttctcatcttagcatagaatcaagcactgctaagagtcgtcccatcaccgcaccaacaagtatagagcccaccctgtatggcagagacgctgtaatgaagagaattatagatagtatcactcagggtacttgttgtgaagaatacctgactgtcttgccaattattggtcctggaggcatagggaaaaccactctcatacaacacatatataatagccaacaagtgcaaaaccatttccagatcatggtttggacatgtgtatctcaaagttttagtgtcgataagctcatagaagagatcaaagaaaaactccctagtgttgaaggtgaaaaaaagggtagtgcagaagagctgattgtacaaagattgaaatcgaaaaggtttttatttatattggatgacatttggaagtgtgaaagtgatgattggaaaaggcttttagtaccactcagaaagggacaaacaaagggtaacataattatagtgaccactcggtttctggtagtaacagaaacggttaaaacatctgataataaaattcaactggaaggtatagatgatgaagcattttgggaattattccttgcatacgtgtttggccctgaaaaatcaaaaaatgataaggatttactttgcattggaaaagatatagtgaaaaaactaaaaggctcccctcttgcggcaaaaactgttggcaaattattgagtaaccaccttgatcgagttcattggatgagagtcttagatagtaaagaatgggaattgcaagctggtgatcatgatattatgcccgcattgaagctttcctatgattatctaccgtttcatctgcaacaatgtttttcttattgtgctttgtttcccgaagattacaagttcaacaacaaagagctcattcgcttttggataggactagatattttacattccgaatctcaaaataaagcatttgaagatatagctctaagcaatatagatagtttggtcagtcatggattttttaaaagagaagaaactgatgggcatccatgctatattattcatgatctgctacataatctagcattgaaagttgcatctcttgagtgtgttagtttacattcctctaatgtgaaatcagtggaaatccggccatccattcgtcacttatctatcatcacagatggcgcaaatgatactgatggaataactgatgaaaacttcaagagtgaactgataaaactaaagaaaagactaaaggttgaaaacgtgcaaactttgatgatatttggagaagtggataaaagctttattggatgctttcatgatttgtttaaggaagcaagtgctcttcgtgtgctttatttgcccaaaatgccatttgcggtggggtccattttggatgaatttacaacacttgtccacctacggtaccttaggctagggaccaccattggcaataactttcatttaccaattaacctttccagattttatcatttaaggattttggatctggaaaaatgggataattgttttcagttgcctggagacattagtaaccttgcaaaattgcacaactttcttgtcccgggatacccaatacactcaaatatttctaatgttggaaaactgcaatttttgcaagagttaaaaggatttcaagtcaatagaaaagatgttggttttgagctaaagcaactaggttatctgatggagctaagagagcttagaattgataaccttgagaaagtacacacaaaagaagaagcggctgaagcaaaactgttaagtaaaacccgattaaggaagctagaattaaactggaaacaagggagaacaagcacaaatgctttcaacgaagatcaaatacttgagaaacttcaaccacatagcagcctccaagagctatcaatccatgggcatggaggctcttcttgcccaaaatggttgggtacagaactatctgtcaaattcttggagacttttcgtctcaagaatgtagtttggaatatccttccaccactaggggaggtgtttctggtaggcggacctggcgaagaatcaattggtcagaaaactagtcaaaattttcgtagcttgaagagattggaacttgttaagttacctaatttgagaaaatgggtagcaaaagaaattttccctacgttcttctcagttttggaagtacttattgtgagaaagtgcaatgaactagcagaactaccattttcatatcatacctattgcacatctgaagaagatgtaaaagcaacttgctttcctaggctaagagagttggaaatacataattgcccaaagatagtgtcactgcctcctatcccttacactcagaccttgtgctctgtcaatataacagatgtaggaacaggtttggaaagcttggtttactcgagtaaatcatctaagttagaaattaaaggaaacaaggatctaaaagttttagatgacaatgtgttggcttcccgtaatttacacaaactacaaaacttgacgattgagggtttcccacctttggaagagcgacaccttcaaatgctaacttcattgaagagattcagtcttttcagttcgagtattgccttcaatccaacagtagaaaggagtgatgttgagtggcggctttcaattgagaaccttatgattcaggattggaatggcagtgggaaggaattgacacagctcctctttcacctcccaaagctgtctttgttgagtcttggtggctgccgcaagaaaacactgttgagtgtagctctaacacagcagcaaaccagtgctcaagtggagagtacacaagtaactgcttctaatcatcgacagcagcaaaaagcagaggatctggatctgctggaggaggaagaagtaacacagctagatgtggatggagaagatgaagatgacgacaggttgctgctcaccaactctctagagcaattatggattgtaaactacaaggagcttatcctggtttcccatccacttcccattggtcaccacaataaggaagaagaaggaacaggaggaggttgggggctccaagccctgtgctccctgcggcaactagggataacaggatgccccttgttactctctgcctacgaggctccagcttgccttttcccatcctccctgcaatacctccagattacaggccctatggagggcgtgcagatgctggacctctcaaacttgacctctctcactaaattattcatagaagattgcggggagtatttaaggaagggcctattgcctctccttgctcagggtcagctcagcaacttaattgtctacaaaacatatgggttgtttgctggtgtattggattccatactcaggggagcgcaggaagaacaagagcagcttcatcttcttgagcattcctccaaactgcgggtgcttgaaacggatgacttggcgggaatccttgtgaagccgatctgcaggctcctctcttcctcactcaccaacctaacactccaaggaaactcagaggtggaacgcttcacaaatgaacaagaggaggcccttcagctcctcaccttccttcaagacctcaaatttattcactacgataagctgcggtgccttcctgcgggccttcatagacttaccaacctcaagagattaatgattatgaactgtccatccatccagtcactgcccaaggatggcctcccaggttcactgaaatacttcatagtccgcgacaacgagaagctcgtaaagcagtgcaagaagctcaagaaaaccaacccagaaatcgaactaattctctag

SEQ ID NO: 23040 - DNA, 174 bp, Oryza sativa
  Clone ID: PAT_MRT4530_28159C.1
atgatggagtggttatctgtttcaccgctcgtccgatccgagccgaagttaaagctgctgcagcaccggccagttgagcatttaccacagcacgtccaccgcaattcattccgtcgccatggccgtgggctccgtgcatccaccatccacccgtctcgctcagaggacgcgtga

SEQ ID NO: 23041 - DNA, 265 bp, Oryza sativa
  Clone ID: PAT_MRT4530_2815C.1
aaaaccaaaaacgcccttgtaaaatttttattgcaaaaacagagggacacaaacctagagggaaaggacccttaaaaaaaacctttaacaggacacaagggaaccgaatggggggggccccccccttcagggcgaacgggctttcacacaaaaaaaacacctcgggcaagaaaccaaaaaattgcacgccggaccccccaaggggaggggggcccaaaaagaggaggccccccccggaaaaaatgggaggccaagcatgcggagt

SEQ ID NO: 23042 - DNA, 1578 bp, Oryza sativa
  Clone ID: PAT_MRT4530_28160C.1
atggcggtgaatgtcctcgtggtggccgggcgtgtcgacaaggcgcttgagttcgccgaacggatgcgccgcgttggggttgagccagatgtgtacacatacaattgccttatcaaggggttgtgcggggctcggcgggttgttgatgccatggagatgattggtgtaatgctgcaaaatgggtgccctcctgataagattagctactatacagtgatgagcttcttgtgtaaggagaagagggtggaagaggtccgaggtttgcttcaaaggatgaggaatgatgcaggtctatttccagatcaggtcacttataatgtgctcatccatgggcttgcaaagcatggccatgcagatgaggcattggagttcttgagggaatcggaggggaaaagatttagagtggatgaggttggatatagtgcaattgtgcactcattttgtttgaatgggaggatggcggaggcaaaagagattgtaggtgagatgatctcaaaggggtgtcaacctgatgttgtgacatatagcacagtagttgatgggttttgccgcattggggaacttgatcaagcaagaaagatgatgaagcatatgtataagaatgattgcaagccaaatacagtcacacatactgctctgttaaatgggctctgcaaagttgggaaaacgtcggaggcctgggaattgctaaacaagagcgaagaggagtggtggactccaagtgatatcacttacagcgttgtaatgcatggatttagaagagaagggaaactaaaagaatcatgtgatgtggtagtgcagatgttgcagaagggtttcttccccacaactgtggagattaacttactgatccatgctctatgtaaggacagaaaaccagcagaggccaaagacttcatggaacagtgccagagcaaaggctgtacaattaatgttgttaatttcactactgtgattcatggattttctcggcagggtgatttggaatcagcactctctttgatggacgacatgtatctgagcaacaggcatcctgatgttgtaacttatactgttgttgttgatgctttgggaaagaaaggtagattaaaagaagcgacagggcttgtggagaaaatgctcaacagaggcgtgctccctacacctgttacatacaggacagtgatacatagatactgtgagaagggcaatttggaagacttgctcaatctactggaaaaaatgctagcaagacaagagatgaagagcgcatacaatcaggtcgttgagaagctatgtgctttcggtaaacttaatgaggcttacagtctcctctacaagatactgagaactgcttcagtgagagatgctcaaacatgccacattctgatggagagttttctgaatagaggcctcggacttcaggcctacaacgtggcctgtcgtatgttccggagaaatttaattcctgatgttaaattatgccaaaaagttgataatcaactggcctcagagaaaaacaaaccagttcctggaaaactcatggttaagtttgctgaaagaggtcttctgaaacaagtaaaacaagatagcaattga

SEQ ID NO: 23043 - DNA, 1266 bp, Oryza sativa
  Clone ID: PAT_MRT4530_28161C.1
atggcggcaccgggagatggggaagagaagaaggccgggagcgggaggaacaagcacgggttcccgcgcggcttccgcttcgtgccccgggaccaggagctcctcgacatcctcgacgacaagctccgcggcgccccgctcgaccgcgcgctcgacgccgtcttccacgacacgcggatcctcgacttccaccccgccaagctctacgggatgtacgcggaggacgaggagaacggctacatctacttcttcagcacgatagagttcaaggcagccaagcccaagcagaagaagtggccgcggcgcgcggcgcagggcggacggtggaaggccgtcctcggctccagccagatggtggaggttggcggcgtccccgtcggccggaagctctccatggagttctacgtcaagggggtcaggaccaactggggcatgcacgagttcgtcaggatcatcggccccaacatcgaggttgcggatcttgccgtgtaccgcctacacaagctatggacgaacggcgaggagaagccgggagacctcgccgcggacgttgccaagagcacgaaccagagtggacaagcgtcggcggcggactactaccagacttaccagaacgcggtctctcaggcgtatgcgtatgcgccgccgtacgtcctccagccaggatggagccaagggtacccctacgatgtcgcggcggcgccaccgaccgcgccctggcctgtctgttgggcgccgccgtccgcgccgggatcctatgactgctgctacgcgtccacgttttcaaggccgccgccgccaccaccaattgctgcgagcacgctggacaaggcgccgataaccagtaccgaccacggcgcatcaacgaacacttcggcggcgacacccgtggcgaacaacaagccgccgccgccaccagttgctgcgacagcgaccacgctgggcaagaagggggagggcaagggcaaggcgccgacgaccaccagtaccgatcacgccggatcaacgaacacctcggcgccacccgccgcgaactaccagccgccgccgacgacgactacgccgccgctgcagggcacgcagcacgtcttcgcacccggcgtcgtcgtcgggcatgaggacgaggagggctacctcatcgtcgacgaggtcaacacgtggcgcaacacgcagcagctcgtgctcgaggatgacgacgacgacgacgacggccgtgccgccggcgccggtgcaggtgagggtggcgcttcagcctcagggcggtga

SEQ ID NO: 23044 - DNA, 915 bp, Oryza sativa
  Clone ID: PAT_MRT4530_28162C.1
atggagttggtggtaggcgcttcggaggccaccatgaaggccctcctgggcaagttgggaaacctcctcgcccaggagtacgcgctcatcaggggtgtccgcggcgacatccagtacatcagcgacgagatggccagcatccacgccttcctcaccaatctcagcagctctggcaacgacgacggccacgacgcgcagaccaaggactggatgaagcaggtccgcgacatcgcctacgacatggaggactgcgtcgacgacttcgcccaccgtctccgtcacgatccccgcggggacggatgcctcgtcgaggtgtacagggcgctgtacgagatctacacctgcaggcctcgctgtgacatcgccgccaagctcgccgagctcaagaaccgtgctcagcaagtgggcgagcggcgcttgcgatacggcgtcgtcctcaacccgattccccctcagcgcggcgagacccgcaatggtgaccagaccacgggagagaaccaggtggccgggcgccggctcataaccgtaaaggagcccatcggcgtggcgcgcgccatcgagaaactcgaggcgtggatgaaaagccaaagtcacaagaaccgcggtgtgctagccatccatgggtttggtggcgggggcaagagcacaatcgcggcggcgctgtaccggaagcatggccaaaatttcgactgccgagcgtgggtgacgatgccccagaagtttgacgaccgtgcggtcctcaggagcatcctgagtcaggtcatgctgcctgccactgccagtggtggtggcgaccgcaggcgacgaggaggaagcagacacgcaaagattgaaaccatgtcccaggaacaactcatcaaagggctgaagaaccacctgcaaaataagagcccaaagaggaggggcggaaaatag

SEQ ID NO: 23045 - DNA, 144 bp, Oryza sativa
  Clone ID: PAT_MRT4530_28163C.1
atgccaccccaagaaagatgcgccaccttgggggataaagcgagagcgagatggaacgagagcgcgcagcagagtgggagcgaaagaaagcttcggaggtggactggactggatagagacctggagcacggcgacgcgcactcg

SEQ ID NO: 23046 - DNA, 1895 bp, Oryza sativa
  Clone ID: PAT_MRT4530_28164C.1
aaaagacactcactttggctttcttcatacttcgttggctcgttgctccttttgcatcaaatgacgagcatttaccatgatttcattcataacaagctgcagagcttcggaaggatcggtagatattttgttaattttgttgttctagcccatagattcattgccttgcatattcacccattctggattcagttgtcctacttccttctcattagcatcctaggttcagttctattgatgttcctgaagccaagcaacccagaattcagaccaggttacattgacatgctgttcttgtcaacctctgctctgacactttccagcctcatcaccatcgaaatggaggttctctcaagctcacaaattgtggttattacactgctgatgcttctcgggggtgaagtctttgtttctttcctgggcctcatgcttagactgaaccataagcacaacccagagttttcaggggacaaggtcagttcagttcctatcgagcttgatacaatcaactcggcaagcactgtgataagttgtgaagagctgcagctggaagcagcaattcctgaagttccatcttccaccattaaggatttgaagaggagcaagcgcctgaggtggttcttaggatttgtagtcttcagctattttgttgtgatccatgtcgctggctttctgctggttctctggtacataagtcgtgtctcatctgcaaaagctccactgaagaagaaagggatcaacattgcactcttctcattctcggtcacggtctcctcgtttgcgaatgtggggctcgtgccgacaaatgagaacatggcaatcttctccaagaacccgggcctcctcctcctgttcatcggccagattcttgcaggcaatacactttaccctctcttcctaaggctattgatatggttcctggggaaggtgaccaagttgagagaactgaagctcatgatcaagaaccctgaggagctacagtatgattatttgcttcctaagttgccaacggcgtttctggcatcaactgtcattggccttatggcttccttggtcacactgttcggtgctgtcgactggaattcttcagtctttgatggactcagctcttaccagaagattatcaatgcattgttcatggcagtgaacgcaaggcactcgggggagaactccatcgactgctcactcatcgcccctgctgttctagtactgttcatcatcttaatgtacttaccaccatcgacaacatttgcactgtccaatggagatgaaaaaactgcaaataagaaagcgaaaagaaaattaggtttagtggtgcagaacttggcattttcacagcttgcctgcatctcagtctttgtgatagttgcattcatcactgagaggagtcgtctcagaaatgatccactcaacttctctgctctgaacatgatatttgaaatcatcagtgcatatgggaatgtagggctatccactggttacagctgttcgaggttgcagaaactgcacccggggagcatctgccaggacaagccgtacagcttgtccggatggtggagtgatgaaggaaagttgctgctagtctttgtgatgctctatggaaggctcaaggccttcacaaaaggtacaggtgaatattggaggctatggtaaaagctgaagcctgaacaaaagcacttgcaaaggcaagtgcatcaagtgcagtatatgtaactatttagagttctgcctgaaagttcaggtttctaattgggccatagtgtataaaaatacacccaatattattcctcttaatacagtggtgcgcaatcctttagcgtattcccgaaaaaaagaacacccaatatgttgcaattgcaatataaaactgttgttctccaaaaaaaaaaaaaaaa

SEQ ID NO: 23047 - DNA, 453 bp, Oryza sativa
  Clone ID: PAT_MRT4530_28165C.1
atggcagtggcggcttgggttcgcggtaggagtagtgcttcgggggtggaggagggagatggagtggatgccgagctgcgcacgatggctgcggtgctggggaaggcgactgcgcagcgcgaggtggaccagagaggcgacgcggcacggctggaggcggcaatggtggcggagagagatggtgaacgtggcggcggcgttttggcaatgcattggggaagaggagcggtggacggggcgctgtgggtggcggcggcatggctgagcgaggcgacgctcgatggcgggaggcacctggaggcggcggtggctcggattggtggtggcgacggggtttccgcggcggtttggggaggggaagtggtggccgggctttggctcggcgctgcggagccagtggtggcggtggcatggtgcgacggcggctatggcggcggtagcacgtggctgtag

SEQ ID NO: 23048 - DNA, 3422 bp, Oryza sativa
  Clone ID: PAT_MRT4530_28166C.1
actgcccgatctgagagacccaaacgcgcgcgtgcgggggccgtactaggtgagatcagaagagtaggaattggccgacggcgacggattgcgcgggcgcaagcagcactcaagttcgctactcctcctcctccttcctgtgtagtggagcgaggcgaggcgagccgacgccatggccgcggcgcagcgctggctccctgggatcctccgccgaggggacgggctcgcgcggcgcctctactcctccgcctcctccctcctcttcgacgacacccaggagcagttcaaggagagcgtgcacaagttcgcgcaggagaccatcgccccgcacgccgccgccatcgacgcctccaaccatttccccaaggacgtcaacctctggaagctcatgggcgatttcaatctccacggcctcaccgccccagaggagtatggtgggatggggctcggctacatgtaccactgcattgccatggaggagatcagcagggcgtccggctcggtcggcctgtcttacggcgctcactccaacctctgcattaaccagctggtccggcatggcagccctgcccaaaagctcaagtacttaccaaagctaatcagtggggagcatgtgggggcattggcgatgagcgaacccaactctggttctgatgttgtcagtatgaagtgcaaagctgagaaagtagatggtggttatgtcattaacgggaataagatgtggtgcaccaacgggccatctgctcagacactggttgtgtatgcaaaaacagatatagctgctggatcaaaaggaataaccgcgttcataattgagaaggggatgcccgggttcagtactgcacagaagttggacaagcttggcatgagaggaagtgacacatgtgagcttgtgttcgagaattgttttgtgccccatgaaaacgttctcggggaagaagggaaaggtgtttatgtcatgatgtcagggcttgatctagaaagacttgtgttagctgcaggtcctatcggcctcatgcaagtatgccttgatgtagctgttccttatgttcgccaaagagagcaatttggccgtccaattggtgaatttcagttcatacaggggaaattggcagatatgtacacctccttgcagtcatcaaggtcatttgtttactcggttgctagggactgtgacaatggtaaagttgaccgcaaggattgtgctggtgtgattctctttgctgctgaaagggcaacccaggttgcacttcaggcaatacagtgtcttggtggcaacggatacataaatgagtacccaactggccgattgctgagagatgcaaaactgtttgagattggagccggtactagtgagataagaagaatgataattggccgcgagctcttcaaagaggagtgaaactattattttggaagccaggtatctgatatgtataacttggggaggtgagcatgatttggacaatttgtacacatcgtccctgatgtcctatatctgataatttgtccaagatttgtcatgactttgtatatttccaatttaataagaaataaaatgcacctttctttaaaaaaaaaaaaaaaaaaaaagaatgtgatatctggtcttggcaaggcacttcagaaaaagggccacctagtagagattattcttccaaaatatgactgcatgcagaatgaccaagttaataaccttaaggttttagatgttgttgtacaatcctactttgaaggaaatttgttcaacaacaaaatatggactgggactgttgaaggccttccagtctattttatcgagccacaacatccagcaaaattcttttggagggcacaatactatggagaacacgatgactttaaacgttttgcatacttcagccgtgcagcactggaattactttaccaatcgcagaagaaaattgacatcatccattgccatgactggcagactgcatttgtggcacctctttattgggaagcatatgcaaatctgggcttcaactcagctagaatttgcttcacctgccataattttgaatatcaaggagctgctcctgctcaagatttagcatgctgtggccttgatgttcagcaacttgatagggaagacaggatgcgggacaattcacatggcagaataaatgttgtcaagggtgcaattgtgtattccaacattgtgacaactgtatcaccaacatatgcactagaggtgcgatcagagggtggacgtggactacaagattcactcaaattacattccaggaaatttgttgggatacttaatggaatcgacacagacacatggaatccttcaacagatagacatctcaaggttcaatataatgctaatgatctccagggtaaggcagcaaacaaagcagctctcagaaagcagctaaacttatcttctacaaatgcttctcaaccactgagagagtttgagggtattgcagaccattttcagaacaataacaatatccgactgcttttgaagtatgatgattctttatcccattggatttatgcagcatctgacatgttcattgttccatccatgtttgagccatgtggcctcacacagatgattgccatgagatatggttctgtgccgattgttcggaaaaccggtggattgaatgacagtgtcttcgatttcgacgacgaaacgatacctaaggagctgcggaatggctttacgtttgtgcatcctgatgaaaaggctctaagtggtgcaatggagagagcgttcaactactacaatagaaagcctgaggtctggaaacagctggtgcagaaggacatgaggatagatttcagctgggcctcttcagcttcccagtacgaagatatctatcaaagagcagtggctcgagcgagggcagcagcatgaactctggcggtttagtgagacctgagcctttctctgacgcggcgcttgatgccacaggcacagattctgccttctgaagaagccgcaccatgcacctctctgatgtgcgaacatggcttcatctgcagcttcgattcttggaatggaacccaagatatttaaagacatgatccgtcagactcatgcaggaagccgagatgttccatagtgcagttatggaatggtcgaagaactaaaatcttggcacccattgtcgtgtcccagtgacagtgtggactatacagttatataacttatagtacgtgattgctcagtcgtgaaatttcactagcctcgatatatttatcatgcgctacggtgaaatgataagttttgttctttgtatcacttgcagtgtgctttgttatttgtgcaaagtcgtgtgtgttgtctatagaatattctttcgtcaaaagcaaagagatgagagacagaccctgctctctcccctgtttgaactctgaaatgtagaaaaaaatttcataggctc

SEQ ID NO: 23049 - DNA, 1761 bp, Oryza sativa
  Clone ID: PAT_MRT4530_28167C.1
gatcattcctttcacgcctctctctcttctctgattgattactactccactacagtactagtccaaggcgggcggagacggcgacggattgcgcgggcgcaagcagcactcaagttcgctagtcctcctcctccttcctgtgtagtggagcgaggcgaggcgagccgacgccatggccgcggcgcagcgctggctccctgggatcctccgccgaggggacgggctcgcgcggcgcctctactcctccgcctcctccctcctcttcgacgacacccaggagcagttcaaggagagcgtgcacaagttcgcgcaggagaccatcgccccgcacgccgccgtcattgacgcctccaaccatttccccaaggacgtcaacctctggaagctcatgggcgatttcaatctccacggcctcaccgccccagaggagtatggtgggatggggctcggctacatgtaccactgcattgccatggaggagatcagcagggcgtccggctcggtcggcctgtcttacggcgctcactccaacctctgcattaaccagctggtccggcatggcagccctgcccaaaagctcaagtacttaccaaagctaatcagtggggagcatgtgggggcattggcgatgagcgaacccaactctggttctgatgttgtcagtatgaagtgcaaagctgagaaagtagatggtggttatgtcattaacgggaataagatgtggtgcaccaacgggccatctgctcagacactggttgtgtatgcaaaaacagatatagctgctggatcaaaaggaataaccgcgttcataattgagaaggggatgcccgggttcagtactgcacagaagttggacaagcttggcatgagaggaagtgacacatgtgagcttgtgttcgagaattgttttgtgccccatgaaaacgttctcggggaagaagggaaaggtgtttatgtcatgatgtcagggcttgatctagaaagacttgtgttagctgcaggtcctatcggcctcatgcaagcatgccttgatgtagctgttccttatgttcgccaaagagagcaatttggccgtccaattggtgaatttcagttcatacaggtgcaacattttgttaacagacgtctggtaccaaccataacaagttatcttttaatgcaggggaaattggcagatatgtacacctccttgcagtcatcaaggtcatttgtttactcggttgctagggactgtgacaatggtaaagttgaccgcaaggattgtgctggtgtgattctctttgctgctgaaagggcaacccaggttgcacttcaggcaatacagtgtcttggtggcaacggatacataaatgagtacccaactggccgattgctgagagatgcaaaactgtttgagattggagccggtactagtgagataagaagaatgataattggccgcgagctcttcaaagaggagtgaaactattattttggaagccaggtatctgaaatgcattctcaaattgaactctatgagaattcaatagcggaatttcacgatattcttagcaagctagtggaggaaactgagaaacgatcactagagcattcagcaagtagcatgccttcagaattgtggagtaggatatctcttctgattgatggttggttgctcgagaagagaatatcctacaatgatgcaaatacattacgggaaatggtcaggaaaagggatagttgtcttcgggaagcatacttgtcatgcagaggtatgaaaga

SEQ ID NO: 23050 - DNA, 194 bp, Oryza sativa
  Clone ID: PAT_MRT4530_28168C.1
atgatgcgaacgtgcttattctacggcagcgtgcgagaagaaatgcaaggtgcagacccaaaagtctaccaaaatggccctgtagaagttgctttcaccgtttatgaggattttgcacactacaaatcaggagtatacaagcacatcacaggtgggggatcctccagagtcgacctgcaggcatgcaagcttga

SEQ ID NO: 23051 - DNA, 1075 bp, Oryza sativa
  Clone ID: PAT_MRT4530_28169C.1
ctgcaggaattcggcacgaggcaggaattcaacctatggaggaagtggttttggctgtacgcaaccctttgagctgcaatcacaaaggatagtacctgattctgaggaagaaagcttgccatctagccctgaaacttcttcaacatccaattatgatatgcctgatttagctgagcaaaacttggagcatatttacaatgttttgggtgaaatggttgataaggaagggccagttgtacttagtccagagtatgtgatgtgcggcacaacttcgcatgtggaacctcgcttaactttctcagcagacggattcaagatcgaatactgggattcttgtgaaaatgatgagatggcagctcaatattggaaaatttctgatattacctgcattgattgtaaatgggcacagagtgttggatctgtcttaataactctccatgttggatccggcacagaaactggaaattctagtcatgatagaatacagttttgtcttattgattcacagtggccaaggaaacagcaaaacatttggcatcttgcatcaagataccaagaaatatggaacaatattccatcgggtgattttgcatcagagaattggaacattgaacccagtttgtttttccctaagcaatacttttctgacactgaagaatttgaagatgttatctatcccaaaggagatcatgatgctgtttccattagcaaaagagatgttgagctgctgctacctgaaacatttgtcaacgatacaataattgacttttatgtcaagcacttgagcacaagaattgaacccgctgagaagcacaggtatcacttctttaatagcttcttttttcgcaagctggctgatcttgacaaagatcaagggagagctccagaagatggtgacacaaatatctctgcaaagattccatgtatactacacatggattctctcaagggaagtcatagtggactgaaggatatcatccaaagttatttatgggaagaatggaaggaaaggcatcctgaatcagcatcagattgttcggacaagttcttaaacttgaggtttatctccctcgag

SEQ ID NO: 23052 - DNA, 431 bp, Oryza sativa
  Clone ID: PAT_MRT4530_2816C.1
gaaaagctctcagcttttgcccccccctctcctcctcctccccacctcgagatcccatccatggcgccctcgccctccccaacatcccgcccccggatctgagccgctgcggcgggcacaacacagcgcgtgcgtgggtggcaagacgggttctttgcctttgcaactttgcaagatttgggcttttggttacttggtggttgtggattcattatatctgttgagagggatgggtgtttgattggagtgggttgggagccatgtggaagcagttactcggcaagatctcgtggaaggcgccgaaatccggcggcggcggcggcggctcgccgacggccaagtcgccgctgacgaagggcgccgggaatggggagcctcccgcgccgcccgcggccgccgcaggaggaggaggaggagcggagggggagacc

SEQ ID NO: 23053 - DNA, 921 bp, Oryza sativa
  Clone ID: PAT_MRT4530_28170C.1
atggcgatcgccgccgcgcgccggcggctgtggcgcgggctgacgactgcggccgccgcctccgtaggggtggaagcggacaccagcgccttgctcgcgcgccttgtcgccgagcctgagtaccgcgtgaaggcgacgatggaggaggcgagcggcggctcctccgcggcggccgccttctgggagcccctcgccgccgccctcctccgcgcgtcgtccccgactaaggcaaacctcgtcttggaatggaagctagagaagctaatcaaggaagggatccgtgattgtgagccctactcagtgataatccgtttctgccgagagacaaagaatgcagaatttgcaatgaaagtctttgaattcgtggaggagcttggaattcagctgaacactggcattttcaatgcccttatcaatgctttcttgtcggtaggagatctccttgctgcaatgaccttatatgaggctatggaagacatagaggattgcaagcccaactccgctacatatgatgcattcatttctgcattttcacggcttgggagtggccatgcaatgatgagctggtacctggcatcaaaggatgcaggatttactcctagcattaaggcctttgaatatttgatcacaggtttattctatgctaatgctgatcgcttgtctgatatggagcatgcaattttccagatgttggataatggcatggtttttgcccactcagaggatgttgaggctgttatctgttcttattttcgtcacaaggactttgataggttggatctattcttaaaccgaatacggagtttgtacaagctcacccggtctacttatgatatattgatttctggatatcagaggttgaatttacacggaaggctcgacttggccataaaagatatgagggaagctgggtttgcatga

SEQ ID NO: 23054 - DNA, 544 bp, Oryza sativa
  Clone ID: PAT_MRT4530_28171C.1
aggcttccggctcgtatgttgtgtggaattggtgagcggataaccatttcacacaggaaacagtctatgagccatggattgacagccaagctgctgaatgacgactctactgatgagggaaagctgggtgtacgcctggcaaggtgaccggtgccggaattgcaccgggtcagacaccaacgcgtgccgcggatcgtcgtgggcgtgcgtgcgagctgggagtctcgcataagatatgctatgctgtgtgaattggatgcaccggagtggaggaggaggatgcatgtcgtgacatgtgggaaggaaattgaattgaagctgctgtgatgcgagctttgtgtgtattagtgtgaatgggtgggtgggttgtgctgtgcttgtatgaatccgtatgaatactatgtgaattgtggcctgcctgctggctgtgctgtgcctgcgtgggaccttggataatcccttgcttataacccttgtattctttcttctacggcccaattggacatgcacataaatttccatccaaaaaaaaaaaaaaaaaaaa

SEQ ID NO: 23055 - DNA, 123 bp, Oryza sativa
  Clone ID: PAT_MRT4530_28172C.1
atgcgctacgtcgagcaaaactgcatattgattgcacattttggcgccagcaacaagcactcaagcagcattaatgctgaaggctgcaagagaagcggtgatcatcttatcatgtccgtttga

SEQ ID NO: 23056 - DNA, 1161 bp, Oryza sativa
  Clone ID: PAT_MRT4530_28173C.1
cttcaccgcgcgccgcctcctccccccgcttccaccgcgcgccgccacctctcccccttccaccgcgcgccgcctcctccccccgcttccaccgcgcgccgccacctctcccccttccaccgcgcgccgccacctctcccccttccaccgcgcgctgcctcctccccccgcttccaccgcgcgccggcacctctcccccttccaccgcgcgccgcctcctccccccgcttccaccgcgcgccgccacctctcccccttccaccgcgcgccggctcctccccccgcttccaccgcgcgccgcctcctccccccgcttccaccgcgcgccgccacctctcccccttccacgctcctccccatccactgggcgccgccacctcctccttggccaaatccgccgcgcgccgccacctcgctccccatccaccgcgccccgcttccccctctgcctcggcgaaatcctcccacctcctccacaccttcttccaagtcggcggcggcggcgagttcaaagttcgaagctgcaaagcgcggtggttccctgagccagagaaggagtgtttcgatttgggcagaaccttagttacatctaaattattattatttgactatggataactgctaataggaatactgctacttgatgggtgaaccgtagttacactgctgagatgcagaactgcgcttgtgaaccaatgttcctgattttaagaatgttcaggtacaaaagaaggtacacaagaagacagcaaagactaaccagcgagcaggcaaccataaaaagggctagcagaggtgctgtaaaaaaaatcaagaacctacaagaaccataaaagagatgatttgttttgtttttgggacctcaatacacctacaagaaccttagttacatctaaattatgtaattattgctatgtacttgaactcttatgtaatagctatttgagctgatggataactgctatataggaatactgctacttgatgggtgaacaatagttacatgatgatatgtcagaatgcatttgtgaacaatagttatgaatagttgaatattgtgttatgcatgtgtgtaacttactgaaaggtgataatccgtgttgcaaaatttggagtgaaaaaaaaaaaaaaaaaaaaaaaaaaaaaaataaaacaccacaa

SEQ ID NO: 23057 - DNA, 287 bp, Oryza sativa
  unsure (1)..(287): unsure at all n locations
  Clone ID: PAT_MRT4530_28174C.1
ncgttctagtatcgcgatcagcacgcccttttttttttttttttttttttttaggnnngcccatacacgttntgtgagctcttaccctcattgaattgccactctctaacccatgatttatcacttgttgtcttgctcttggccgctcacttatctgtgttggggcaccttttggtctcaccatctgctgcgcgggggggctttgtccctgctccgtctccgcttttagtttctcccctttcttttttgccccccgggtgccttgcccgtgccctttttgtgacgtt

SEQ ID NO: 23058 - DNA, 190 bp, Oryza sativa
  Clone ID: PAT_MRT4530_28175C.1
gaaccttttcatctgcaagcactacatcaaaaaatgctaaagctgtctcaagatcttcagcaattgaggctgttgcttgttccttatcatgggacgacaccacttcagaatcagcattacctgacacccgagggcaggcttcttttctccctgatgtacatgacgataaaccggacatgccatggggggg

SEQ ID NO: 23059 - DNA, 315 bp, Oryza sativa
  Clone ID: PAT_MRT4530_28176C.1
atggtggatttgaagcacacggccggccacgccggcgcacggagagtcaagctgttccgggtggcgtggcggccggccagggcggtggtggaggtgggggcgccgctggtaccgccgccgtgtgaccgtgcgaggctcggctgcggcgccggcgggcggaggtggctgttcggtgcgtttcggcagctgcgggtgcggtggctggcaatgctgtacactcagatccttccatctgtgacggcctctaatatgtctggaaatagcgggccgtcacaaggaagtcatctcaatcggggcgaaaaagtgctcgattga

SEQ ID NO: 23060 - DNA, 298 bp, Oryza sativa
  Clone ID: PAT_MRT4530_28177C.1
gtaggcttctcctccccctcccggttcggtatcgcatcggtgccggtccggttcgttttgggcatatcctcaggttcggagccttagtggtaaaacatggtggcgccggtatgttgagtaccgatgcttcgtcggcgggctcgcttgggccaccgacgacctctgcctggaagccgccttctccacctacggcgagatcctcgagtccaagatcatcaacgatcgtaagacgggaaggtctcgcggcgttctgttttcggaacgttttcgagcgagcaaggccatgcgcgacggcatc

SEQ ID NO: 23061 - DNA, 1501 bp, Oryza sativa
  Clone ID: PAT_MRT4530_28178C.1
caccgattgcgacggcccctccttactcccccccccattccctaccctaccgcctccagatcccaccctctcgccaccgcgacgcttgccggaggttcggttccagccatgcggatccggaggaacgcctccagggtgctcgggtcagcctacttcaccacacagtcggaagcatcacgcgcatatatgagcaacctcccaccgacatcgtccgcgcctgcgcctgttgcatatggcggcggcggcggcgatcttggtggtcctatggtcactccagacgatgcttgccagctaagcctgtcgccatgggatctgccatatgagctcgaagatcctgatcccctggaggctccgttcgacaggtacatggcgtgcatcccttttagggcaagctttgtgtccgacagcgacaacaacgatgatgatcagatggaggtggacgaagacaagagttggaatcaggtggagaatgaggaggtgaatgatcagcagcaaccagctgaccacaaggtggaccaaagtggtgatccggcagccagaaagatgaaggggaagatgaacgagagcagcatggtggtgatggagatgcaagatgctgacaagcaggctggtgtttggtactgcaacaagaatgatggcaagaaatggcactgccgaaacatcgtcgacgggcccaagaccctgtgtgactaccacctagcaaagagccgctcttactacacccgcactggtgaggcaggtgctgcagctagttccaagtcaggccgagcaaaggcaccagctattgccaagccaaagtccagttccaaacgaactccagcaggtgagtcaagtgctcaaaacaactctattgcagcagcagcagcagcagcagtgagtgtgctgccaaccatctcctcccagccatccaagaggaaggcaagcaatggcttattaggtggtgatgcctactatttctatgatatgttcgtcccataccgcaagaaggatcgtggtggtagcagcagcaaacagcaagccggtgctgaggagaaggagatcctgccacaagataatgccgtcgccatggaagagaaaatggacggcaagaaactgtacgatggtgtttacaactcgtctgattactcctcggacactgctagcgacgacgagagcgacgaagactataccgttggtggtgccagcaagcgccgtaccaagaaaaggaaaatgaagctttcagtgaagaaggtgcagttctcgaagatgacgaagaagcgtgtgaaagaacggtcgcttaagtccctgctctaagagttctaattcgatcggttgtctgtgggacagtttcagtttagccgtgttgtcgcttaatggcatatcatgtatggatttaagacgtgtcccgtttaaataaatgtttgaaccttgtgatgtttaaaaaaaaaaaaaaaaaaaaaaaaaaaaaaaaaaaaagacccaggaaataatacatccacctttggaaaaaaaaaaaaaaaaa

SEQ ID NO: 23062 - DNA, 334 bp, Oryza sativa
  Clone ID: PAT_MRT4530_28179C.1
cgatcctcctcaagcttgataaagcaaaatcttttgattctgtcaactggccatatcttctcgaccgcttgagagatcttggttttggccaggtggataaattgggtcacctccattatagcaagcacgtcatccaaggatattctctccccgttcccagcccaacaaaaaaacttttccaagctcctacctccgacttcctctacacatcaggaaaattcatgagaaggatgaactcgactactcaagttagagaattcattctcctgcggcagctcattcagcaggtgcaccttcacaaggagaggggtaccgagctcgaattcgccctata

SEQ ID NO: 23063 - DNA, 381 bp, Oryza sativa
  Clone ID: PAT_MRT4530_2817C.1
atggcgaggacggcagccggcggagtggagcggacggcggcggcggcgtggggcagccttgacgcgctcgtcggccgcctccgcgccgccttcgaggaacacggcggccaccccgaggccaacccgttcggtgcccgcgccgtccgcctctacctcgcgagatccgcgatagccaggccaaagcgcccgcccacctcgtcttactctcaggccgccgccgccgccacctccccggcgagcccagccgctagcccgacgtcgccggagagatcagccgaagtgggagcttgcgtcgccatcgccgtcaccatggggtgcgcgccactctcgccagccgcccaccaccgcggctcctatcgcacgctcgctcgccgccgctag

SEQ ID NO: 23064 - DNA, 1818 bp, Oryza sativa
  unsure (1)..(1818): unsure at all n locations
  Clone ID: PAT_MRT4530_28180C.1
ggcgaattcgagctcggtaccccctatattgccctattgccaaaaaaagcataatgcttgcagagtgggggatttcaggccaataagcttcattcatgctttcggcaaaatgttctctaaactcctagcaaattgattgacaccgaaactacaacaattggtatccaaaaatcagagtgccttcattaagaggagaaacataaaggacaactttcctgttgtcaataacatggtaaaagaacttcattcatccaaaattctagcgatcctcctcaagcttgataaagcaaaatcttttgattctgtcaactggccatatcttctcgaccgctttgaggnaaagggatttttggccaggtggataaattgggtcacctccattatagcaagcacgtcatccaaggtgatcctaaatggcagggcagggaccggctttcaacatgaccggggtttacgtcaacgcgaccctctctctcccatgttactcatccttgcgatagacccgctgcaaaagctttaatccgccgcccaacaaacatgtattctacagcccttgcacggaagaacacatggttcaacatagccttatgcgcagatgatggggtggtgttcacaagaccggacaaataggaactccaagcggtacatgccattctacaaaatttcggacgtgctacaacgatgaccacgaatctggaaaagagcaaagtatatgcaatcaggtgcaacgaccccaatctgcaggatattctctccccgttcccagcccaacaaaaaaacttttccaagctcctacctccgacttcctctacacatcaggaaaattcgtaagttggatgtccaaccgcttatagactggtttgcagctagactaccaacgtggaaaggaaggttgcttaacaaaacaagtcagttagtgttgattaagtccaccctttcagccctgccgacatacccacctcacagtatcccacctaaagaagtggactgaaaacaatatggacaaatttcatcgaggtttcctctagacaggttcggaacagacacggttcgattggacgcatatgacaaaccatggtaaggttccatcctaccttgtgatgaaacggataggtagcttgtgaaggaccgatgatagatggtaggtcacccaaggagctaatcccatgtctgtatcaactcgtgaccagaaaagaaaaaacaggacagtagcacgggaattccaaggtcatttctggctaaggcagatgagaaggatgaactcgactactcaagttagagaattcattctcctgcggcagctcattcagcaggtgcaccttcacaaggagagagaagacaaattaacatggaggtggacatcaaatggtgcttactcagccaattcagcttatcgggtccaattcctaggaagcatacaggatgataggttcggatatacatttggaaggcaaagatggaaaataaatgcaaatttttcggctggctcatggtgcaaaggaaaatcctaacctccaacaaactatagatccagggttgggaaagcaacccaatttgctccctctgcgggcttgagacagagacagcgaggcacctttcgcgaaacaggtttggagcatgatttggatgagactgggtctccataagctagctcagcttggctcgtggcctagctcgagccagcttgtttggctcgcgagctcaaccacccaaaatggcgactgtgggtctgcaatggtggaagctccaatccggggatcctctagagtcgacctgcaggcatgcaagcttgagtattctatagtgtcacctaaatag

SEQ ID NO: 23065 - DNA, 360 bp, Oryza sativa
  Clone ID: PAT_MRT4530_28181C.1
ggggcaacaatttctggcctacatccttttcaaggcaattggcatgagcccaattcccctacttttaattgggaattccccatgaaaagatttgggaaatggccaaaatctatacccccatcaggggcagaaaccggcaaactaattacgtattgccatttccaacataatgaatgaatgatcttacctacaaaaaagccctggaaatggccaaaaaaacatccatcagctgggcgttatgctttcttcagttaaaaattaagaggggccccttttggtaatgaaggatttactggaggtcttcactaaaagccctgtaaaggaaaaccctgaaccttttgcagaattgctttggatcaa

SEQ ID NO: 23066 - DNA, 243 bp, Oryza sativa
  Clone ID: PAT_MRT4530_28182C.1
atgcctagcccaccaccccacaactcaggcaggcccatgaggccaccgacccaccatgctgcgcgtcatcctctgctatacaaagcttgcgcctccaccctcccccaaaagctccccacagccagaacggaatctagccataggatgggaggagctccaccgaaaggatattggtcggccggcaaccgagaagaaagcgtcaccgccaccagccgcttactcgctcacgtcgccagctgttga

SEQ ID NO: 23067 - DNA, 264 bp, Oryza sativa
  unsure (1)..(264): unsure at all n locations
  Clone ID: PAT_MRT4530_28183C.1
agaagaccatctttggttatgagttatctatattacatacaacaaaaccnttcctcatttaatcattattacattcacacacctactaatttcctttttgtggggcgaggaatatatgtacgagcacattgcaccaattttgatcagagaggatcatggtggaggccctctatttatatgactcaacaggcttcatcttctgcttgatggccgctaccagttggatgtaggcttctatccacgcgctcttcatcgcgggggctt

SEQ ID NO: 23068 - DNA, 1977 bp, Oryza sativa
  unsure (1)..(1977): unsure at all n locations
  Clone ID: PAT_MRT4530_28184C.1
atgcccctcgcgtttcgtttctcccggattctcaatccgcgcctcaacccgtccacgaatcttggcctcgcgctcgcctcctctttctcctcctcgtcccgcccagagcagccggagctgcccggggcccgcggtggcggcggtgggttcccggcgaccatcagggaaggaagggcggagatcttcgccgacgactccaactcggtgttctacaacaaggcccaggttaacaacagggatctttccattgctgtattgagatcgtttatttcgagaagacgtgaagagcatgatatccaattaagaagaggcagtcatgctgaactaccgccgaaacatcacgctgaagaattgggccacataagaggatcatctgaggacaaggcattgagtgaagaaattagctatagagcaccaaaagttcttgaggctttagctgcatcgggattaagagccattaggtatgcccttgaagtagatgggattggggaagttatagctgttgacaacaatgaaggtaataactacaatttagccactcacacaatttataaaaaactggtatttaaggttgaccttgacccttatggatctcctgcagcatttctggattcagcagttcagtgcgttgcagatggtggtattttgatgtgctcagctacagacatggctgtgcttgctggtggcaatgcagaagtttgcttttccaagtatgggtcttatccactaaagggcaaacactgccatgagatggccctgaggattcttcttgcttgtattgagtcgcatgccatccgccacaagcgctatatagttcctataatatcagtgcacatggatttctacattagggacaagaggaatatcgccctaccaaatttttcccctcttgtgcctcaggaatgtgctgaatgtggccataactttgttatggggggacctatatggagtgatcctatgcatgacaaagaatgggctgcttccatcttgtcaagtatccaagctatgagttgtgcatattcagcgtatgcaaagatttcagctataatgacatcagtatcagaggaattgcctaaagcacctttatttgttagtcttcacaatttgtgtgcaacactgaagtgcaccaatccaaccattgctacgtttcaatctgctatcagaaatgctggttatcaaatatcaggcagtcatgtggatcccttggctcttaaaacggatgcccctatgtctgtaatttgggacatcatgcgatgttgggtcaagattcatgctgtaaagtatcgacctggaaatcatccaggtaccaggatactgtcccaagagcctaaattacaggcaaaattttcccatgtacctgggggtttagcagtacagaagagcccaagatttgtacctaatcctgaaaaatattggggtcctaagacaaaggctgggagacaaccaaagagattaccagtggacaatttataaatatnttactgacagtatggttcccaactaggagattgagatcagttgcattcttttgttagaaaaccaagcatatacaagctcaagttcaagctcagtttctggaggcatgtatgtcctttcgaaaatttggtggtcattacagattactaacggtcagttgcgtgggttggtgttaactacaggcatgtccacctttgctacaattttcaactgcaccaaactctggcattggccaaattttgtgaagatgccaatccaacatatcctaaatactctaccataccttaccatgccaatatttggtgattttctagaaacttcacataatacccaacaagaatatttgccaaggtaacaaatcaaactacaccccatatacctctacctttccaaatcttaggatcgtcaaacatgcccaaattttggtgttcccaaaagttgccaagatttattttggcatcaaagtgaacaacccctacattttcaaaaaaaaaaaaaaaa

SEQ ID NO: 23069 - DNA, 215 bp, Oryza sativa
  Clone ID: PAT_MRT4530_28185C.1
atggcggacatcgaggcggcgctgcctccgccgccgccccagcaggcgccgccgcagccaccgaggtgggcctccgcggcggcggccctgcgcggggtcgctgacgtcctggtgtacagctacgtcaccgcgatgtgggtgaacgccgccgtcttctctcgctgggcctgcggcgaggactccccggctgcggccgttaccatggactcatggag

SEQ ID NO: 23070 - DNA, 264 bp, Oryza sativa
  Clone ID: PAT_MRT4530_28186C.1
tggatagagagagagaaggtcagggatgcaggctggggctcggttcgtctcgcctgcgatgaagcgaaccagcgactggatactttcgcaagaactcccaagcgatattaccatcaaagtcgacgatgccgccttcaacctgcacaagcttccattggcatccaggtgcggctacatcaagaagcaggtgtcaggagtcggcggcaacaaggcgacgcacctggagatcgccggcatgcccggcggctccaagtcgatcgagct

SEQ ID NO: 23071 - DNA, 801 bp, Oryza sativa
  Clone ID: PAT_MRT4530_28187C.1
atggacgacgttggcggcgggaaggtgaagaaggcggcgggcgggaggaaggccggcaggccaaggaagaaggcggtgacgcgctccgtcaaggccgggctccagttgcccgtcagccgtatcgggcgctacctcaagaaaagccggccggttgatctcctctccgccgcttcttccccatcggccgcgtcgaccctcttccacgccgcgtcgatgatgccaccgaccctcttccgcaccgcgtgcctccggaactccgtccgcttgagaacttgcacgggtaggcgggcgatcaagtttttgggtagtgcttcaagcgcgactgctcttgttcttcgcggctactgctgctgcatcggcgccttcaccaagatgtcaacggagattggagacaagaagatgaacgacatcaacggaggcaatactgccttaaaatccagcgcgccgtcgcagccgccgaaaaagggcatgaaggggtatgggtcggcgacggctgcacgccctcttcctcgcctccacctcaccaacctcgccgccgcggctgctcccgatttgcggtgcccctcgcgcgccgcccgttgtccaaggccatcacgggcatcgacgacggcgtctcgctcctcgccgacgcgccgtccgccgccaccgggaggcccgtcgccactcccgccgcctacgggaggtccgccccgcccccgcctgagggcgcgccgctacgacgtcgtcgacgagtccggcaccgacaacggcgaggagtacgacgccaccgacgacggcgagtgcgacccaaagacccaatag

SEQ ID NO: 23072 - DNA, 534 bp, Oryza sativa
  Clone ID: PAT_MRT4530_28188C.1
atggccggaggggggcggtgcggctcccctaactctcctctccctcaggtctactctccctcggcagctaggaacggcggatccggcaacggcgacacgagggggctatggatccggcgatggcgacgcgagggggcggcagatccggcgacggagacagatccggtgatgagcgtcttcttcctcgccgtcatggtggtcgtattcttcgtcgtcatggaggcggcggcacgacccccctcgggcagcggcggtggtactgctcccctaccctccctctcccccgaccacgcccttccagatctggcggatgggcgatggcagtggcgtgaccaaagggggaagggccggcagcggcgggggtggaaatgtgaggtacgggcagaccttgctatagtagtgtgccgtcggaatctgcattacactttagtaaatgctacaacacacggttattttggggacattctaaaggacgatattttgagtatgacaaaatctgctattgaacacctccgcttcgttgatttagcttga

SEQ ID NO: 23073 - DNA, 222 bp, Oryza sativa
  Clone ID: PAT_MRT4530_28189C.1
atggcgaaggctgtggaacaaagacggctaaggccaaaaagccgtgtgggtacctcgcaggaccagtcatatggggcgaagggtgtagacttcgctttagcagatgttgaatcattagaatctgttgaacaagaatatatggctggaagtgaaggaactcatgttatggatgacaaccaggaaggactctacgatgatgctgagattgactatgataattag

SEQ ID NO: 23074 - DNA, 340 bp, Oryza sativa
  Clone ID: PAT_MRT4530_2818C.1
gcccacaccctgctgaaaagaggccgggtaaagcagcatccttggacccattgcctctggcctcccaaacatttattttttgcatttttgcttgtgtttgtgagctcaagcaaagactgcaagagaagaatcaaagtgtgcaagcaacttcatccctatccccctatatagacaggtaaaaactaaaagtggtagtagatgaaaagatcaaaaactttgatttcaagggtacacctagtacaagcctgatttgtcaaaagaacaacaaaaatcttgtgaagaacagtgtgtctgaatgtctgatgcgtgtgtgctgctgctgttcttcttcttcttctca

SEQ ID NO: 23075 - DNA, 1224 bp, Oryza sativa
  Clone ID: PAT_MRT4530_28190C.1
ctgcagtgaatcggcacgaggcccgtctcctcgtcctcatccacggcgagtccgcgtcatccacacgagcccacccaaaacccaaaaccctactgcgcccatggcttcgccgccgccgccgccgccgcagccacctagcccctccgccgccacggcgggggcggcagcggcgccggtggacgcgctgttcctccagaacctgatgagccgggtccagctccgcccgcccttcctcgacaccaactccttcctcacccaggacctcgacgagttcctcctcaacgagttcgccgcgctgtcggccgccgcgggggcctccgacgatgacgacgacggcgaggatggggaaggggagggatccgatggggaggtggtctccggggaggcgaggcggcggcggacgctggcgagggaggaggccaagctggagaaggagatcgtgcggctcgtgctcgccggggaggcggaggaggcgctcaagcccaactccggccagtccgtcgccgtcggcgaccaccacatctgcgtcggcttccacgacgattccggcggtgtgtaccgcgtctgggagtggcacggccacgtcatgatcttcgacgacgaggatggctattccgcggagtacatctacggcaaccacttcgagcccctcgccgccgccaccgccagggcgaaggagaaggagagggagaagagggagaaggagctcagctcgggcctccgcgatttgatcctgggcgacactggcagcggcgccaatggctccaaggagaatggcaagggtggggcacccagggtggtgcgcaggaacgtcgtcaatgcccctgcggcgcctgcgaggtaataaaactcctctttagctctagcgcgtgtattgatggaagcgaggcatcaatccgagaaacagaagcaaaataatgatttgatctttccttttcttctgtagttgccgctgagggcggtttcttttgttctgatcagaaatgctatatactttgcttctgttatgatacacagtgtacccaactgggttttgagatgggagtatttgttccatatactacacatatgctgttccattatgtgcttaaatttttgctgctcatgtgaaagaacttatgcttgctgcacctgtcgattgtgaacttatgagttattatcactattgtaaagaatttggttcatgctttcaatacaaattggagagaatggtcttccctgtgc

SEQ ID NO: 23076 - DNA, 651 bp, Oryza sativa
  Clone ID: PAT_MRT4530_28191C.1
atgggttgggttggcaccttcttccccggcaccgtgggctccaagccgattccctgcacatgtgtcatcccaaaaatgtctctaaaatcacgcatgcctcccaacttcgatgcatatgcttgcccgcgccgccggcctccaccccgagtcccctgcggccgccaagttgttcctgctattgctgtcgttgttcaaggctcgaccgaggagggtcgtcaagacgccatcaggctgggggattcgtttccccaagcagtcgtcgcgccactcgccgccggagcttgcgagacgaagccgcaccacgccgcgccacactccctgctcgacctctccatcaggagattgaaggtagaagaggagggctggactctgcatctccatcgggagtgtggcggcgcgccgacgccgaactcccggggattctttggctgcgccgggagcaacggtgtcgtttacatcgccgacggctatgatgagaccaagaacgcgctcagcttcaccggatgtctcctcgccgactccctccgccgccgagcaagccgacgccgcctgcgggtggtgagggttaggggtgcccggtcccgctactgttgcctcctgcgcgaggactttggcaaggtgcggagaatagttgccgacgagcgcctccat

SEQ ID NO: 23077 - DNA, 883 bp, Oryza sativa
  unsure (1)..(883): unsure at all n locations
  Clone ID: PAT_MRT4530_28192C.1
cgggactaaaatgtactccatatctcagttcgcattncatgtcancatcnatagtcattaacatccggtacctactgcataagtgcaaatgcagacttgagaatgtagaccatttcatacaagtaacattacagcaaacatcagcgatgctatctcatattagtatcaaagcagaccatgaatacaaagctgttgacttagcagttatatccgtgcaacaaaaatcacagcgagaccagaaggaccagacaaatccaccttcctgatcatctcttcttaaaaccatatttcttgcgctcatagaagagatcggtcttggcgcttccaaggttgacaatcttaggacatccatctcggtccttttcttgctgagtgcactccttgcagtagtaagcatctgagatgccaacccctccacagataacacaccttccctggaaggatccatagttgcactcatcacagacccgaacaagcgtacacgggcgcacgtaggagtcacagatgacacacttgccatcacatttctcacataaacgaccaatcgcaatgccaggctgcttcctgcacatgatgagatcaggatgatgctttgccatggctgtcaaatgctaacctggggatggagggagtggggacttggcgaagctgcgaggccgctcgccgccgccgccggggaaccgggggagagaggatgatgctgcggggaggaagaggcgaggcggcgagcccggcggcgaagaagaagtggggtttcgcggcggcgcgacctcgcgacgcgttgtgtcctttaattgctccgcgagaaggagagtgggggaatcgcgagggagcgagaggggtcccgaactcgcgacggtgagatttggactttcccggccgg

SEQ ID NO: 23078 - DNA, 158 bp, Oryza sativa
  Clone ID: PAT_MRT4530_28193C.1
gtggacaatgcctcgagcttgctagaaatggcgttggcatggagttctccaagacccttatacccgctaatcaggtcttcacagggaacggggacgacgagggacaaaggatcatccccaccgtacccctcgccacacccaacagggacaacccctag

SEQ ID NO: 23079 - DNA, 227 bp, Oryza sativa
  Clone ID: PAT_MRT4530_28194C.1
gtctcgcgttggcggtggacggcgcgttccaggtgcggcactgtacttgcctggcggaggacgcacattggcgtgcgccggtcggctcccaatggtgggcccaccgcgcgcggggggggggttgcctacttttattgtgcccagactctaggatggctgtaagcgtctttgcctcgtacagcatgatctccgctggggcgggggctttttggggccgccgccctgtt

SEQ ID NO: 23080 - DNA, 322 bp, Oryza sativa
  Clone ID: PAT_MRT4530_28195C.1
actcctcttctgaactaacccaaagatcaggtcggaggcggaggcaaacacgagaagaagatgccgcggcggcctagcggcggcggcggcggcgctggtcccgcggcggccgcggtgcgcaaggtccccctgcggaagcttctgcgtgcggcgtcggtggcgtgcggcgtgcagttcgggtgggcgctgcagctctccctgctgaccccctacgtccaggagctcggcatcccgcacgccttcgccagcctcgtctggctctgcggccccctctccggcctcctcgtccagcccctcgtcggccacctctccgaccgcatcg

SEQ ID NO: 23081 - DNA, 344 bp, Oryza sativa
  Clone ID: PAT_MRT4530_28196C.1
atttatttctattcacaaacgaatgggggtggagaattttaagacgcggaattcacaccatacaaactttccgtatacaaaacttaattattattaagtacaacaaatcttacattctttcatctatcctataaggttatacacctaaaccacacaaataacatatgcacgagccctcttacttcactaacaaatcaactggtgcttaagtagccaaccatccataatgggatcagtatcacttgtcagtttccactacgacaacgtggccggccatgagcttacatgaagcggccaacgcccagataaacgccctttgcaggatcttcaccacgagctctact

SEQ ID NO: 23082 - DNA, 612 bp, Oryza sativa
  Clone ID: PAT_MRT4530_28197C.1
atggagctcgtagtccgtcgggcaccgaagtccaaaggcgatggcaagggccgcgaaggaactcttttggaggagcaatggaggccatgggccactggacggatgggcaatgaggatgtcggcggtgaacagaggctcactggcggggtcagtgaggcgacgaggacaccgtcgaaggaagctgaggccgtcgtggaagccgaggcggtagaggtagaggagcgctgggcggagctggtcgcggatgctgaggtcgtcggtgaggaaggcgaagatcaggagctccgccgggacaccgatgtggaggcggtcgacttcgaccatgatgacgacgacctcatggacgacgccgccgccgaaaccatgccggcgctagcccctcgcctctgctccaccatcgcgggtggcggcatcgacaggggtgcagaggtcggccttcatcgagtcgacgacgttcttgcggagcttcatcatgtagagggcctcgtcgatgatcgatcccgttctcagcgttggcgccggcgccgagtaaagcatgcgaaggccgccgcggcggacgcgcacgatgttgccgcgcatgatgcggagaggcggcgcgccggccggcaatag

SEQ ID NO: 23083 - DNA, 171 bp, Oryza sativa
  Clone ID: PAT_MRT4530_28198C.1
atggggtttagcaagcacaagcatctggatgggaggatgaagcacaagctactcaaggggtattcactctacactgtaagccagggctttgttgctattctggtattaccaccccaaaattgttctttgccaatgacactgacaaatggacttggactgttgctgctgtga

SEQ ID NO: 23084 - DNA, 516 bp, Oryza sativa
  Clone ID: PAT_MRT4530_28199C.1
gaaatagttcgatcccgagaggacctgaaccgctacacatccaagaagcaccagcgccaaatacccatcctgacacgggagtagtacataatacataccggcgctttagtgtctgtaattggaatgagacatctaaatccttaacgaggatccattggaggcaattctggtccacaccgcggtaattccagctccaatagcgtatatttaagttgtccagttaaaaagctcgtagttggacttggccggccgccgtcccctcacggcgagcaccgactgctcgaccttctccgcgatgcgctcctgccttaactgccggtcgtcctccggccctactttgaagaattagagtgctcaaccaaccctcgctctggatacattaccatggacatcatagatccgtctattttgcctcggatcgaatgataatagcatcgggcatctattcatatcagagtgaatctggattatgaagcgacctgcgaaccattgcccaggagtttcataaaaaaaaaa

SEQ ID NO: 23085 - DNA, 1731 bp, Oryza sativa
  Clone ID: PAT_MRT4530_2819C.1
atggcgtcgtcggcgctcatctgcgacaccgagcagtggaagggcctccagattggtagagctcactatgatttcgtgttttggtgcggggagcaggcgcatgttggggagattcagaaaacgcacctgcgccatctgatgcatgatgttgagcgctgcaaggcaatgacagcgtgcttgttgattgacagtgagtatgaaggcatatatctggattactcgaggcagcgtgcgactggcgaaaccatggagaagctgtttaaattggccgaggctgcaaagctcaaggagaagattgagaagatgtttagaggtgacaagataaatagcacagagaacagatcagtgcttcatgtagctctaagggctccaagagacgaagtaataaatagcaatggggtcaatgtggttcccgaagtttggggtgtaaaagataaaatcaagcaattttcagaaacttttaggagtggatcatgggttggggcaactggtaaagcattgacaaatgttgtgtcagtaggaataggtggtagctttcttggtcctctgtttgtgcatgctgccctccagacagatccagaagctgcagaatctgccaaagggcggcaattaagatttcttgcaaatgtcgaccctgttgatgttgcacgaagcatcaaagatttagatcctgaaacaacacttgttgtggtagtctcgaagaccttcacaacagctgaaacaatgttaaatgctcgaactcttaaggagtggattgtctcttctcttggacctgatgctgttgcaaaacatatgattgctgtcagtaccaatcttgagcttgtggagaagtttggaattgacccgaaaaatgcttttgcattttgggactgggttggtggccgctatagtgtttgcagtgctgttggtgtcctgcccttatctcttcagtatggctttccgattgttcagaaatttttggagggtgcagccagcatcgacaaacactttcgttcatcttcatttgagaaaaatattcctgcaatactgccctattcccaagcacttgagaaatttgcaccgcatattcagcagcttagcatggagagtaatggaaagggtgtctccattgatggtgttcaactgccctttgagagtggtgaaattgattttggtgaacctggaaccaatgggcaacacagcttctatcaattaatccatcagggaagagttattccttgtgattttatcggtgtcgtaaaaagccagcaacctgtttacttgaaaggggaaattgtgagcaatcatgacgaattgatgtccaatttctttgctcagcctgatgcgcttgcttatggaaagcagttcactggatatttccagactcctgaacaactgcatagcgagaaagtacctgaacatcttatccctcataagacttttcagggcaaccgaccatcgcttagtttattgctgccctcattatctgcttatgagattggacagcttttagccatctacgagcaccggattgcagtccagggtttcctatggggaataaactcatttgaccagtggggagtggaactgggcaagtctcttgcctctcaagtgagaaaatctctacatgcatcccgcgttgaaggaaagcctgtcctggggtttaacagcagtactacaagtttgctgacacgatatcttgctgttgagccatccactccttacaacactaccacactgccgaaagtttga

SEQ ID NO: 23086 - DNA, 273 bp, Oryza sativa
  Clone ID: PAT_MRT4530_281C.1
atgccgcaggtgataatgaagaagaggggtggcaggcaggtgaccatattggcgacaaaggagatagaaaggcaattcccgctggagggtgtgccgagggtggaggggcagtggacgggcgagcgggaccccaacaatgacaaggttcaattttcagttgtgaatgacaaggaagaggagaagcaactgatgggcgagcaaagagtgggaagcatggtagaggtggcagccggcgagacatgcacaaactatcaaaaaggaacccaacaataa

SEQ ID NO: 23087 - DNA, 432 bp, Oryza sativa
  Clone ID: PAT_MRT4530_28200C.1
ctagtccaagacattgcactctgcttcccgggcagcggcggcgctgtccacgaggaaattaagcaactccgccttggcgcgcgttgccgctgtgcttggtgcctctcgagaccaatgccatgaggtcgccgggatttcgccgtcgcagacggggatggcgacggagccgagcgcatttgcgagattgtgacgagttgcaaaattgtgtgggccagaatgcttccgcgagggcccaactctactggatgctttggtgggcttcggcctctcaaccactattggatggatgcgacggtgccccgccggattcaagttataaatcttaatttcctggtgccggattgtcatacaacaacgcccggcgaggtctcctgtggtggcctgcttctcactctttgtcaggcatcgatgaaggtaattcacttcctccat

SEQ ID NO: 23088 - DNA, 765 bp, Oryza sativa
  Clone ID: PAT_MRT4530_28201C.1
atgaggtcgccgggatttcgccgtcgcagacggggatggcgacggagccgagcgcatttgcgagattgtgacgagttgcaaaattgtgtgggccagaatgcttccgcgagggcccaactctactggatgctttggtgggcttcggcctctcaaccactattggactggaccgagcgctcactagtacggaacaatccctaccctcttcccggccggcggcggtggcgctccgccgtcagcgtgcaccaccatgctcgccgacgccctcgtgcccctcgatgggattcactggatgcgacggtgccccgccggattcaagttataaatcttaatttcctggtgccggattgtcatacaacaacgcccggcgaggtctcctgtggtggcctgcttctcactctttgtcaggcatcgatgaagttgccaggagaccaagaggaacagagaatcgaagtcgagacggagatgctcaggcaagcatgccctagacgaaggccaccaatcctggagggggcgcagccagtgacgggaaacgccaccgccgcgccacgcctcatcgccgggacgtctacgaccaccactgccgcagccgtcatcgccgtcgacctcaccggcgccgcatccacgtcaagccgcgacgacaacgacgatgtccggcgcctcttcctccacgaactcctcaaccggtcggtatctaaaccctctccctttcatctacaatgtcgttcatcaaacccaaatagaaccacccgactagatctaacc

SEQ ID NO: 23089 - DNA, 952 bp, Oryza sativa
  Clone ID: PAT_MRT4530_28202C.1
ctagcttgacggtgattgccaaggaaacagcccccgcttcgcctcctgcgtgggcgactcgagcggcggaaatctagccgccaccgcccccctccaactctcatctctgcctcgccgccgcctgagcgagtggccggcaaagctggcggggctcgcggcggcggtcacccccggttccggcgcggaggaccaaaagatggagccggccacatcaatgccggcattgaggcgggtgcacggaagaggtggaggcggggaaggcgccgccggatcaccggcggcgtcgtcgatcttggaggggccaggaggcgtgaggtggtggcggccctgtgatgggggcggccggatctggcgccccttggccagatccgttgccctaccggccggaaggacgacaccgagcggcggttgcgggagagaatcttggcggcggcgcagcggagtgtgggcgctcgtggtgatgatggcagcggctggccgagctttgacagccggatccatggtcgccttggccggatctagtcgggtcggcggcgttgcgggcgcttgtggcgacgggtcacgcttggtcaacccgtgcagcagaggatggcaacggcatggcagcgggctaggcttggtggctagagggacgatgtggtggtccggcaatgtacgaagtgcgggtgggttgtgtggttttggatgacgctggcgaaagccttggctggcctttgattggcttgacaacagcggcgccattaggcgtcgtttccctccttggaggcgttgttatggcgccttctctcactaccaaaaccttcccgtgcaacgatggtcgttcgtgggcccccggcgaggccttcacctcctgggttccattcttggatgtggtgagcgtccaactttcttcgttttcttctaggtgaagtcggagctgttttgttgtggtgcaatgaagtttggcaacgat

SEQ ID NO: 23090 - DNA, 255 bp, Oryza sativa
  Clone ID: PAT_MRT4530_28203C.1
acattaaaattatattgttactataaggtgccattgaaggacaaagcggcaaggaaaagacacagtggaaacaggaaaggatggccccccgaacaacctaacagagatggatcgcacccacatgcaagttagcccaaaaaaatgatgaatcactaaaaggctgcagaaaaactatagctggggacaagttcttccgcacggcatacaaaatcaggggagcagaagccctactggcccaatactgcaaaaaggtag

SEQ ID NO: 23091 - DNA, 558 bp, Oryza sativa
  Clone ID: PAT_MRT4530_28204C.1
ggcaaccacgagccgcctccgcgcgtgggctcggcgcacacagcagatcggcgaggtctgagcgcatcgtcctcaacaccgagtagaccggccggccgcggcggccatcatcgctcctaccatggccaaggagctcctcgccttccccggtgtcgccgtaccgtacgtgcagcagtttcttgacaagaacgatggcatactgaagtgatgccaaattgccaactgccaagttttcttgtgcttcttttccaggtgccttagctccgggagcacgatccattctcgatgctaggcagttagctttttctcccctttagctcctttttgctttgtcaggcaggggaggcagttttgctttgcctctataagagacagtgcgattattaggctgggcaagtgttaaaccgttgctgggatttgttggatctatcaaagttggtcgggtggtatctcttgggtgaaatagtactactgccagccactactcctattcttagttttccaggagctcggtgggagaggcggctcctggtggcagccatggttggcagtgccaca

SEQ ID NO: 23092 - DNA, 219 bp, Oryza sativa
  unsure (1)..(219): unsure at all n locations
  Clone ID: PAT_MRT4530_28205C.1
cccgcgcgcgcgacaacagcggacacccctggccccaacggccaacccccgcatccgacccggggcgtcgccgagaggcgcgcgaaggcgctcgcggttgcggcgctggaggccgccggtgaacgcgcggccgctctagagaatccctcgaggggcccaagctacgcgtacccagctttcttgacaagtgtcccatagtgagtcgataagnagccggcc

SEQ ID NO: 23093 - DNA, 522 bp, Oryza sativa
  Clone ID: PAT_MRT4530_28206C.1
atgccgtcgcccccatctccgccgccgtcgccaccgctccggctgccactagccgccgcgccgagccgagccatgtcatcgctgccgcgggttcgaaagcgcgagggccacctcgtctgcaaattgtccgtcgtcaaccgccaccgggaacaacctttcacagcacaccacgccaccactaccgcatcgtgcgccgctgcccgccacggctggccggcccaggatcgagctgtgcccgtgccgctgcagccgtccgatctaccgctcggtagattggggccgttcggctgccgcccacgtggctgccacgtcaatgccacatgtgtgtgccatgtggtgcgccgcaccccagtccttggactcggtccactgcggaccggcgcccttgtgcaccgacaggtggggcccgccggccggctccgcttccctcctgatgacatcagcaggatggaggttatgttactcgaaggagtaggcttcatccgtgccgtcaaggatgcttgtggaatgaaggtgatctaa

SEQ ID NO: 23094 - DNA, 906 bp, Oryza sativa
  Clone ID: PAT_MRT4530_28207C.1
atgtcgtcttccgccggtccatccaccgctccatcggctgagtacgcagagcatcttgcaaatctgattgtgatccctagcttgtcccgcgagcatcagtactttctcggtccgattggtaactctcaccgggcagagtttattagtgctgaaatcaataggatcccctacaggatagccaatcctagcctaggccactggaaaaacaccttcaagtcttggccttctctagagaaaagctggcccgcatggtacaagcgcatatcggctagcaagcagagccactgggatgagctgggaatcggccaggctttagccctaaccatagcaaattcggctaaagatgaacccttgatagcttctgcagcctatttctggtccaacacccttaatgcttttatgttcaaccaagggccgatgacccctactctgcttgacatcacaatgataactggcttggacattacctcatcggctaaccacatgaacctgaactccaagaacaaatttgatttcaagactaagagtataggaggatggtcagggttcatttctgctaatatgggccagggatctgttaacccccgagagcacacagcctatctgttagtgtggctagaaaagatcaaaccaactagcatgccctttcacccagaagcaagatttgttcctgcactagagctaaacagatctctcaagatttttgatggggaaaataaggggctctcaccggcttttataggcggcgaaggcggcggagggagagaagccgatgacagcacggcgcggctttgggagagaggcggcggcgcgtgtcgattttcaaatgggcggcaatggcggctcagtggtcggcgttggctcacagcggcgcgtggcatagctcagtggttggcgatggcttga

SEQ ID NO: 23095 - DNA, 411 bp, Oryza sativa
  Clone ID: PAT_MRT4530_28208C.1
atggagcaacaggctcagctgcgtgatgctctcaacgatgcactgaagcaggaagtggagaggcttaagattgctacgggtgagatggcaaagtcaaatgatgcgtataatacaggaatgcagcaggtcccgtacagcccttccttcttccagctatctgaccaacacgcagttcagcaccatgcaggcgttcagcagctgccacatcaattccaacaacctcatccaagtgtccctagccaccagatgctatcccacccaaattccctctctgatatgatgcagcaagactcgcttgggcggctccaagggctggacattggcaaaggaccagtggctgtgaaaaatgaggcagaggtagtggtgaagtctgagggtagttcaatatctgcagggggtgaggggcactga

SEQ ID NO: 23096 - DNA, 411 bp, Oryza sativa
  Clone ID: PAT_MRT4530_28209C.1
aaaaaaaaaatttggggattttattattgggcaaggggaagttacaaaaaaacaggggtaaattttataccctttttcaaaaaaaaaaaattggtttttttttttttaaaaaaaaaaaaaaatggaaaggtcatgacctctggacagggggggtggatccttaaaaatccaataaaaagggggccccatcctttttttaaaatttgaaaaaatgggttttttgaaaagggttttaattcggtggaaacctttgaccggggggaacaaacccttttacgggccccggttttttaggggggcttaaaaagggaaatttccactgggctcaaagggcctggtatacatataaaacacccttcaaaaatttaaggcggtggaatatgggtacttttgggggggccataattgttt

SEQ ID NO: 23097 - DNA, 2505 bp, Oryza sativa
  Clone ID: PAT_MRT4530_2820C.1
accatatcacgtactaccgggcgttttgccttttttcagcccacagagacttctcgggccgggaaataaacaaacaaaccaaaaaaaataaaatcgagaaaaaagtggagatataaattcaatcgcaggaagcgaagcgcggatccgcttcctcatccaccgatcgccccctccttcatcctccggtagcagtcatggcgtcgtcggcgctaatctgcgacaccgagcagtggaagggcctccaggcgcacgtcggggcgattcagaagacgcacctgcgcgatctgatggatgatgccgagcgctgcaaggcaatgacagctgagtatgaaggcatatttctggattactcgaggcagcgtgcaactggcgagaccatggagaagctgtttaaattggcagaggcggcaaagctcaaggagaagattgagaagatgtttagtggtgacaagataaatagcacagagaacagatctgtgcttcatgtagctctaagggctccaagagacgaagtaataaaaagtgatggggtcaatgtggttcccgaagtttggggtgtaaaagataaaatcaagcagttttcagaaacttttaggagtggatcatgggttggggcaactggtaaagcattgacaaatgttgtgtcagttggaataggtggtagctttcttggtcctctgttcgtgcatgctgccctccagacagatccagaagctgcagaatctgccaaagggcgacagttaagattccttgcaaatgttgaccctgttgatgttgcacgaagcatcaaagatttagatcctgaaacaacacttgttgtggttgtctcaaagaccttcacaacagctgaaacaatgttaaatgctcgaactctcaaggagtggattgtctcttctcttggacctgatgctgttgcgaaacatatgattgctgtcagtaccaatcttgagcttgtggagaagtttggaattgaccctaaaaatgcttttgcattttgggactgggttggtggtcgctatagtgtttgcagtgctgttggtgtcctgcccttatctcttcaatatggttttccgattgttcagaaatttttggagggtgcagccagcatcgacaaacacttccgttcatcttcatttgagaaaaacatacctgtactccttggtttgctgagtgtgtggaatgtttcctttcttggatatccagctagagcaatattgccctattcccaggcacttgagaaatttgcaccacatattcagcagcttagcatggagagtaatggaaagggtgtctctattgatggcgttcaattgtcctttgagactggtgaaattgattttggtgaacctggaaccaatgggcaacacagcttctatcaattaatccatcagggaagagttattccttgtgattttatcggcgtcgtgaaaagccagcaacccgtttacttgaaaggggaaattgtgagcaatcatgacgaattgatgtccaatttctttgctcagcctgatgcacttgcttatggaaagacccctgaacaactgcacagcgagaaagtacctgaacatcttatctctcataagacttttcagggcaaccgaccatcacttagtttattgctgccctcattatctgcttatgagattggacagcttttatccatctacgagcaccggattgcagttcagggtttcctatggggaataaactcatttgaccagtggggagtggaactgggaaagtctctggcttctcaagtgagaaaatctctgcatgcatcccgcatggaaggaaagcctgtccaggggttcaacagcagcactgcaagtttgctgacacgatatctcgctgttgagccatccactccttacaacactacaacaatgccgaaagtttaatatgatgtgtttggcacgctattttctttgagttaaacaaggttgagccggcatattctgtaataagtttatttatgttccttttgaagttgttacaggcttacagcccgttttacagtaccatagttttgttgtttttttctttttatttactccgacttccaggagaacaaaatggaaaagaaaaaggaaaggaaactattttgcaataaataaattaattcgtgtcagcatgaggaaactatcactaaattaataggagtatgtggtttgaaaaaaaaaaaaaaaaaaaaaaatgtaaattacctcgggggggggcccggtacccttgtcgcccgaaactatttcttcagcaaactatcactaaattaggagtatgtggtttgaaaatctgtctgggtgttctttcatacgttttgtttggagaatatgtgtatgctgccaccgtgccacctgatactcatctgctactacgacagttcgacacatatgttttttctgctactgggacactcatttgtttttcttgtcgattcctgggttccaattcacccataaattcataataggaatttatttggacaatgtcatgctacttggattttgg

SEQ ID NO: 23098 - DNA, 942 bp, Oryza sativa
  Clone ID: PAT_MRT4530_28210C.1
atggatttggatacaccatcgtgctcttcaactcgttctgccgtgccgccgtcggtaacgtccaaggtctcctcgcctggggactggggagtacatcgaccctggtccttggctcctgagacagcgtgtggtctgtctctgtgtcgagcgcggttacgaagcctccgctacatgctctggaacccgtgctccactgcctgcgccactgtctctccccccgggccagccgcgacggcggccatgcgcttccaccccctgcaccgcttccggcaaagtccgcagggaacccgctccgtcgtcctgcactggctggttgcagctgcagaagctggtatctggcggccgacacgagagggcgaccgacaacgcgagcgccgcgtcggcggagagggcggccgaggcaggagaggagcggtgacgcgcatgggccggcgggagaggaaggggacgcgggaggtggccctagctgcggcggccggtgggagaggagatggtgtcgacggtgaggaggatgctcgtcacggtcggcgagcgcggcgcacacgcggcgggccgaggaaggtagcggggacgacgatgagaggaggtggagcacgaatctggacagcggactgtggcggcggagcgactgaggtcgagcagcgtgacctggccgcgtccccctcaccagccaacgcgggagatctggtggtggtgcggccggaggcccggactagagcgtcggagcatgccgactaccaccacaaccgcctcttgctgctatggatcgccgcggccacctcctcgccggccatcccgctcgaacgccgtcttcttgctgccccaaaggctgctgcaacattgcgcatggaggatatggggcggcgcccctggccccaccgtccgcccgcgctagagaagcggaaggccgagcaccgccttggccccgccgtcctgcgctag

SEQ ID NO: 23099 - DNA, 384 bp, Oryza sativa
  Clone ID: PAT_MRT4530_28211C.1
gaccaaagcaaagccgaaaacccagctgttacagtaataagctcggcgagataccaaatcataaacttctaaaacaaactttgcaaaaacaaggacaattggccaagggagaaagaaaggttaacacaacctggggatggggcattaataaacccgtttccaaatccttggtcatgaaacaggggcgcttgaacatcttgttccggagcaccacggaggacttgttgagctgcgccaacgggatgccaaggagggggagcaacatgagagacatgttgaacatgttcgggggggcaaccatgcacaccttcatcttattcttcttcaaaccgacctcgtacgggatcagcgcgaacacgccctgatcacgaacgcctatggtga

SEQ ID NO: 23100 - DNA, 747 bp, Oryza sativa
  Clone ID: PAT_MRT4530_28212C.1
ccggccgagagggttttcggcaccgagctcgcgccgccgccatcgcacccaccgaaggagggagaggaacccaaagctcggcgccatggtgaacgtgccaaaaactaagaagacttactgtaagaacaaggaatgcaggaagcacaccctacacaaggttacccagtacaagaaaggaaaggatagcctttctgctcaggggaagcgtcgttatgaccgcaagcagtcaggatatggtgggcagacaaagcctgtttttcacaagaaggccaagacaacaaagaagatcgttctgaagctgcagtgccagagctgcaagcactactctcagcacccgatcaagaggtgcaagcactttgaaatcggtggagacaagaagggcaagggaacttcactcttctaagatgctgatattgccctgttccccaattctctgccaggagttagcattaagaatgttcttgtcttgcctttctagtacaagttatatatcctcttgttttcagtcaggtctttttgatacataactacactactagtatgtatgtgatgacaagtgattatcgttgtcacgatcattttgattttcggcgttcccttaggattggctggagatgctgtgtgattgcaacttgtgagtagtccagtcagcttctctgccccatttcactggatcaaaaggatgaaaacctgtcatactgtattgttccaaaaaaaaaaaaaaaaaaaaaaaaaaaaaaaaaaaaa

SEQ ID NO: 23101 - DNA, 1204 bp, Oryza sativa
  Clone ID: PAT_MRT4530_28213C.1
ttttttttttttttttttttttttttttttttttagctaccatcagatcagtaaatacactcaattttgtcgagatacaacacaagtctccgaaaactgccaatcaattacctccacttaagaggtgtatgcaatacatctgtgcattgtaacatactgatataaaaacaagatatcctatatcttctcttctcttctcttctcttctcaccctagagagatccactacacctcaacgataaaagcttgccttggggcatagcttctctacagatccatcttgtggcccatctacaggccgtagcttaatttcatagatctttggccacaattttccggtcacaaataatctttgattttcttcatcccaagctataccatttagaacatcgatttccgtattgccagaattccacaagtgttgcctcagctcatgaagaaagatccagcccaccactaggccatcttcatgggagactctagctatgcaatctgtctgccagacatttgcccatacttcaccgtttatatattccagttcattaagataggggacttcattatcttgatatttcacagtcactgtcttcatgacttgaattgactttggatcaagctggtataaccttgaagtaccatcactgccaaaaagaacttttccatcagtagccaacccccacccatcactcattttatgggtaaaactctcacgtttgctaaagttatgtcgatcatagataaacccctgattcttcatccaaacaacttgaaacaatttgtcattgagaagcgtgagaccttctccaaacaatcgtccatccatttcatgctgaactaaaacttttccagttttaagatcaaccctccggaccgatgacctgtgataaaggccagttgactcgaaaaaagtgtcatttcctccatacaagagaccctgggtaaaggcgtatggatcgtggggatattctcggagcaggtcaaaagagtagaaggttgtggataccgggcggcggaggagggctgctggtgcggcgttggctagccatggagcgtagccgtagggatgggcagcagcgaggacgacgatgacaaggaggaagaggagcgcggcagcggcgatgagcgggaggcggcggaggtaaagcgggggcggtggtgcggcggcggcggagggggcggagatggagaggttggcgggaggcat

SEQ ID NO: 23102 - DNA, 484 bp, Oryza sativa
  Clone ID: PAT_MRT4530_28214C.1
cccacgcgtccggtgcgcctggaaatcgtcctctaatatatttgtttcacatcaaacaaggtgttctattcttgtgttcttcctttctgatcccaaagttagattgatccccttaaccttttatcatacaaaaaagtgttatagactcatattctcttcatttcgtttcaaagtataatgcttcctaggaattcagttttgtactataatataagctttcctacaaggattcaaattccgtttcaaaataaatctaagcaattcaaaatttaaaagttgacaatcgaagtaaccaaaagggaattttttttacttaaccttagtatttactaaataaccaagaaattcttatattttggaatggaggggaagttcacgacattctcattttttaacagctcaaacaactcccaaattgttatcttctctaattgagttaaatctttgataattcaggaatgccagggcttaccgcctatgctgg

SEQ ID NO: 23103 - DNA, 1083 bp, Oryza sativa
  Clone ID: PAT_MRT4530_28215C.1
atgaccaccgggtatgatgctatcgaccaacataatcagcacaaccatatggacaatggaggtgatgaattcttactgtcgttatatggcttcacccagcatgatgacaacacccttgtggctgatgtagttgatggcattactcaacacggtgaccacaaccagattaccaacgaagggggagtggagagaagggaccggggaaataatatgggacgttgtctccaaaggttaaaccgagcgtgccgtggcaagctgcaagttgtcataactgaagggaatataaggccagtggttcctcttgttgctgcaaagtttgcaactgaatgcaacatcatagttaggaaccatgtgcctatactcccgcattggaagctatacaaggaaaaacctgcatctgcgtacgttaatctgttcttaggaaaactaaaggccaagtttgacataaacatagaggatgatacagttaaaatggcttgtactgagatgatgaagtccgcagttcgccaacaaagatacaggctgaagcaaaaatattttgatccttttccactacatttggttacaaaaacttctcctgtcaaattcatgagtaatgaacagtggactcaactcctagaatcatggaagagtccccaaaagatggagatgtgtcaaaagaacaaagaaaaccgagggaatgttaagtaccatcacacaaccggatctcgtgcctacatggttcatgttgaaaatttgactcggatggaaaacaagctatctacaacaacagaaggtgaagaacttaagtcagcggctcaagttgttgctgatgtgcttgctgagaacaccaagaagaatcggttcttgaagaatgtggggttccataatgcccagcctagattcagtgagcagagcactgagacagaactagaagcggagaaaaggaccaatgctgagcttcgtgcacaggtggctgatttgtcaaacaaagtgcaagaatctgagcaggcaaggattaaagaccgagaggagatgaagaggagtcaatctgagatggaagcaaaacttaatcttttgctcagtcaaattcgaccaagttaa

SEQ ID NO: 23104 - DNA, 1911 bp, Oryza sativa
  Clone ID: PAT_MRT4530_28216C.1
atggccggcggcgaggcgcatgcggcgctgcaggcggtggcgcagagcctccggtggacctacagcctcctctggcagctctgcccccaccaagggagctcgctggtgtggggggaggggcactacaacggcgccgtcaagacgcggaagtcgacggtgatgcagccgccgccggcggaggaggaggacgacgccgaccacgcggcgcgccaccggagccggcagctgagggagctctacgactggctgcagcaggccggggagaactccagcggcggcgtgcagacgtcgtcgacgacggcgagccggcggccgggggcggctctgtcgccggaggacctgacggagacggagtggttcttcctcatgtcggcatcctactccttccctcccggcatcgggttacctggaagggcatttgcaaggagaggccatgtatggctcactggagcaaatgaagttgacagcaaagtattcctaagagcaattcttgccaagacagttgtgtgcattcctgttgtcgatggcgtcctggaaattggaactacggaaaaggtggaggaagatatgggcctgattcagtatgcaaggggcatcttcatggatcaacatggcatccacatgaagcctaccctctcacagcactcaacatccaacccagtcacccactgtactcatcagcatccaatccaggttcagatgcaactaggtatcaccagccaaacaaagtttgattattcagatgagctcaatgcagatgaggagaatgatgacacagaagaagagggcatgtcaggttcagacactaacaacactgacactgaaaggaattcaggccagctgcaacttcaaatgcaagaccaactgaacatggtgagcaatgaccaccagacaataccaaataatgcagtttccagtgagctaatgcagtgtgagatgtcagaagtggtaagagatggctgctcaaataatattttagaggatgaaatccaaatgctgatggattgccaaaacagtaattgtcagttaaatttgcaagggccagatgagccttgtcactcttggcattttctctgcgaggagttacaaaatgattaccagccagctactgaagatcaagtggcatcacctgaaaatacccattacccaaaaacactcatgacaatcctacattacaacacgctgcgacagcaagagatgaacatcaagaactacttgccagtttcagagaaatcatcattctccagatggactactcctgaaggaagtgatgacaacaagaccatgatcagtccaggcaccacacagagaatgctcaagagcatcctgatgattgttcccagtagtcactgcagttacaggggagcagaaacacctgaatcaaggggcgggaaaggcgcaagtggatgccatccaagaagtgaatcctacccgtatccaccgatggacaaggcgtcgatactaggcgacacgatcgagtacgtgaagcagctaaggaaccgcatacaagagctcgagtcgtcgtcgtcgtcgtcacgagcagccgcccgggcgccatcggcggcggccgccgggaggcggaggaagagatccgccgccgccgccactgccacggcggcggaagggatgagcagcagcaatggccgcaatggcggcgaggcggcggaggtggtgcaggtgtccatcatcgagagcgacgcgctgctggagctccggtgcggttgcggcggcggcggcggcggtgtggtgctgctccgggtgatgcaggcgatgcaggagctccagctggaggtcaccgccgtccaggcctcgtgcgccggtggcgagctgctcgccgagctgcgcgccaaggtcgtcgttatgatcctgatctgcatgaaaatgcaaatgcaaatgcaaatgcagaattaa

SEQ ID NO: 23105 - DNA, 1510 bp, Oryza sativa
  Clone ID: PAT_MRT4530_28217C.1
gttacctggaagggcatttgcaaggagaggccatgtatggctcactggagcaaatgaagttgacagcaaagtattcctaagagcaattcttgccaagacagttgtgtgcattcctgttgtcgatggcgtcctggaaattggaactacggaaaaggtggaggaagatatgggcctgattcagtatgcaaggggcatcttcatggatcaacatggcatccacatgaagcctaccctctcacagcactcaacatccaacccagtcacccactgtactcatcagcatccaatccaggttcagatgcaactaggtatcaccagccaaacaaagtttgattattcagatgagctcaatgcagatgaggagaatgatgacacagaagaagagggcatgtcaggttcagacactaacaacactgacactgaaaggaattcaggccagctgcaacttcaaatgcaagaccaactgaacatggtgagcaatgaccaccagacaataccaaataatgcagtttccagtgagctaatgcagtgtgagatgtcagaagtggtaagagatggctgctcaaataatattttagaggatgaaatccaaatgctgatggattgccaaaacagtaattgtcagttaaatttgcaagggccagatgagccttgtcactcttggcattttctctgcgaggagttacaaaatgattaccagccagctactgaagatcaagtggcatcacctgaaaatacccattacccaaaaacactcatgacaatcctacattacaacacgctgcgacagcaagagatgaacatcaagaactacttgccagtttcagagaaatcatcattctccagatggactactcctgaaggaatagtcactgcagttacaggggagcagaaacacctgaatcaaggggcgggaaaggcgcaagtggatgccatccaaggtgatttcagtgccaaccatgtgctgaaagagaggagaagaagagagaagctcaatgagaagttcataattctgcgatctttggtacctttcatgacaaagatggacaaggcgtcgatactaggcgacacgatcgagtacgtgaagcagctaaggaaccgcatacaagagctcgagtcgtcgtcgtcgtcgtcacgagcagccgcccgggcgccatcggcggcggccgccgggaggcggaggaagagatccgccgccgccgccactgccacggcggcggaagggatgagcagcagcaatggccgcaatggcggcgaggcggcggaggtggtgcaggtgtccatcatcgagagcgacgcgctgctggagctccggtgcggttgcggcggcggcggcggcggtgtggtgctgctccgggtgatgcaggcgatgcaggagctccagctggaggtcaccgccgtccaggcctcgtgcgccggtggcgagctgctcgccgagctgcgcgccaaggtcgtcgttatgatcctgatctgcatgaaaatgcaaatgcaaatgcaaatgcagaattaa

SEQ ID NO: 23106 - DNA, 410 bp, Oryza sativa
  Clone ID: PAT_MRT4530_28218C.1
gcgcaccgccacgtgccgcgaggagggtgctgccacagagccacttctagagaagaggatgatgccaccgagaatagggcgtcgcccgccagggaaggagctccgctagggaaggcgccgtgcgagggcgccatgagtcgtggcagcgggggagggggagcaggagcagtggcgctgccggcaggggtgggacagtgtgacgggaaaagttgccggtgggaaggagctccgctggccgtggggagggcgccgcggctgaggtgccggctgcaaaggttagtgcgccgctcgccggggaaggcgtcatgcgagggcaccgtgggccgttgcgaagggggagagggagtgggagcggcggcgctgctagtgtgggtggaggaggtggaggggaaaagtccccgccgggaaag

SEQ ID NO: 23107 - DNA, 213 bp, Oryza sativa
  Clone ID: PAT_MRT4530_28219C.1
acaaccttaaggggcccggattttggtggcaggaacacttccaaaagggtgaacaatggtttactggttcccggatggaaattaccctgtttaaaacttcccacagggaccaccttttgttacaaaagaaatcatgtaaacaggtgttcaaaaagggattccctttaaccctccacctagggagggagctcaaatgaaccgtcccctaaacaa

SEQ ID NO: 23108 - DNA, 2242 bp, Oryza sativa
  Clone ID: PAT_MRT4530_2821C.1
ctcccaaatggcatatgccgagctccacgttaacatcataatgacctaaatactgagtgacggaagacacgggaagaaatcggaaaaaggaaaaaaaaatctgagatataaaaattagtaattcgcaggaagcgaagcgcggatccgcttcctcacccaccgatcggcttcttccccccacgctagcagccatggcgtcgtcggcgctcatctgcgacaccgagcagtggaagggcctccaggcgcatgttggggagattcagaaaacgcacctgcgccatctgatgcatgatgttgagcgctgcaaggcaatgacagctgagtatgaaggcatatatctggattactcgaggcagcgtgcgactggcgaaaccatggagaagctgtttaaattggccgaggctgcaaagctcaaggagaagattgagaagatgtttagaggtgacaagataaatagcacagagaacagatcagtgcttcatgtagctctaagggctccaagagacgaagtaataaatagcaatggggtcaatgtggttcccgaagtttggggtgtaaaagataaaatcaagcaattttcagaaacttttaggagtggatcatgggttggggcaactggtaaagcattgacaaatgttgtgtcagtaggaataggtggtagctttcttggtcctctgtttgtgcatgctgccctccagacagatccagaagctgcagaatctgccaaagggcggcaattaagatttcttgcaaatgtcgaccctgttgatgttgcacgaagcatcaaagatttagatcctgaaacaacacttgttgtggtagtctcgaagaccttcacaacagctgaaacaatgttaaatgctcgaactcttaaggagtggattgtctcttctcttggacctgatgctgttgcaaaacatatgattgctgtcagtaccaatcttgagcttgtggagaagtttggaattgacccgaaaaatgcttttgcattttgggactgggttggtggccgctatagtgtttgcagtgctgttggtgtcctgcccttatctcttcagtatggctttccgattgttcagaaatttttggagggtgcagccagcatcgacaaacactttcgttcatcttcatttgagaaaaatattcctgtactccttggtttgctgagtgtgtggaatgtttcatttctcggatatccagctagagcaatattgccctattcccaggcacttgagaaatttgcaccacatattcagcagcttagcatggagagtaatggaaagggtgtctctattgatggcgttcaattgtcctttgagactggtgaaattgattttggtgaacctggaaccaatgggcaacacagcttctatcaattaatccatcagggaagagttattccttgtgattttatcggtgtcgtaaaaagccagcaacctgtttacttgaaaggggaaattgtgagcaatcatgacgaattgatgtccaatttctttgctcagcctgatgcgcttgcttatggaaagactcctgaacaactgcatagcgagaaagtacctgaacatcttatccctcataagacttttcagggcaaccgaccatcgcttagtttattgctgccctcattatctgcttatgagattggacagcttttagccatctacgagcaccggattgcagtccagggtttcctatggggaataaactcatttgaccagtggggagtggaactgggcaagtctcttgcctctcaagtgagaaaatctctacatgcatcccgcgttgaaggaaagcctgtcctggggtttaacagcagtactacaagtttgctgacacgatatcttgctgttgagccatccactccttacaacactaccacactgccgaaagtttgacacgacacgtttggcacgctattgtcttgagttaaacaagattactagagtcttcatatcttgtaataagtttaagttcgttttggagttgttacaggcttacagccagttctacagtactgtagtttcgttgttttcctttactccgacctccaggaaacgaaatggaaaagaaaaaaaaaggaaactgttgttgaataaataaatcaagtcgtgtcagcatgaggaagctgtcattaaataaattaggtgaaaccccgcgcattgctgcgagaatttagtatgaagatatacattaaaacattatgtaaattatgttggatgataatttaatatgtttgtgtttg

SEQ ID NO: 23109 - DNA, 429 bp, Oryza sativa
  Clone ID: PAT_MRT4530_28220C.1
atggagatccaatatgagcttacttcagatagggatccgaataggagtcctacgggccttggaggcccgagtgatggatcctatatattcgtgaggggtgtgaccggcggaggtattgtatcaccatgggagtacagcgaggagaacgcacgaggaggagaaggtcgagccggtgcgatcgactacttcctctacatcgacgcgcactacttggcgagagttccttcgacttctcagcgtcttcttccgctgcacagcgcgttgagtggtaacgatctatgatctaatactaggaaaacgatatgtgggagaggtaagtccacatgcatactggacaggtagggagggtatactgacctttttttatcattttgtatttgtataaatcataaaatatttttttccatccaactaaaaaggaaaatagaa

SEQ ID NO: 23110 - DNA, 660 bp, Oryza sativa
  unsure (1)..(660): unsure at all n locations
  Clone ID: PAT_MRT4530_28221C.1
taatataattttctgacacactatactcatataatagataatatgtcattgttgtgtggttaatatgtcaagaaacactaatggaactagggcggagaccgggcctcgagggccgctgatgttcaagcgaagacaacnggaagttatctcatattaaaacatttcaacagtatatatcaaatggcatgaccatatggtgaacaaaattagcacattttagaggacattttcaacaatgctatacctctttgcatggaaagagtactagtctatgctagcatttcataggttcatgctatattacccacatgatcagttggcaaacaaaattttgcaaccttaaaacatcatatgattgctccagctgttttgaatggacagaacatccataaggaattaaggtcttaggtaaatttgatttggacatttctaaggggttgtatgcgctctgtgtatgtgctttgcagctattttgatgctaattttgattctgaattcaagggaaacaaaacattggatataaggtactttactttatcccatagaatttgagcttgcaggtggatggtaaaagcgacaggcaggtcgattgcattctcctcgcttaaaatcacggcaacttcaacttgggtattcatcacctattagaaaatgtttgga

SEQ ID NO: 23111 - DNA, 909 bp, Oryza sativa
  Clone ID: PAT_MRT4530_28222C.1
atggacatcaccggcgcgggcgctatgggaggaggatccacggccgccaccgccgccgcggcggcgggggccgggtggaagacgccggtgtcgatggtgctggtgcagctgttcatcacggggcagatcctgctgtccaaggtgtccatcggcggtggcatgttgatcttcgtgctgcttgcgtacaacagcttcttcgccgtcgtcttcctcctccccttcgcgctcatcttcgagagaggcaagtggagggacatggattggggtgcattcggatggatctttctcaatgcgttcattgggtactctgtgccaatgagcctctactactatggcctcaaggataccacatcatcctattccgttatctttcttaatataactcccctgttcaccttcatcctctcacttatgttcaggttggaggcattcaaacttagaagcatacctggagtactgaaaatagcgagcatactgctttccattggagggacaatgcttataagcctttacaaaggcaagtcattgcatctctgggattctatcatacaacaccaaaatgaacacaagtcagcaaccaatcagctaagaggaacaattctattggttggcagcagcttcacctttgcttgctggtttcttattcagggtaatttttacttctttgagaagggggcacttgcaacagccgggaaatatatattgaattcatgggcaataactaagcgaggcccaacctatcccacaatgttcagtccattatcagtcgtcttcactgttgtgttggattcagtccttctaggaaatgatattacaattggaagtcttctaggcacagcattggtgattgtcgggctctacctttttctctgggccaaagcacgagaaatacctaagaagtcaacatag

SEQ ID NO: 23112 - DNA, 627 bp, Oryza sativa
  Clone ID: PAT_MRT4530_28223C.1
caaatatgctatatctttatagtttttataatttaagagctttttaaatacaaacatgttaaattatcatcaacataattcacataatgtttcaatgtatatttttattatgttttataatatcctatatacttatagagttcgtcctcacttagttagtgcttaaatgattaatctatagtccaaattatctttctccttttttcctctaattaagtcctatcacatcaattgtttttagcctttagatgattaatctacggtccaaactatctccctacttttcttcttccataaagtcataccaccttacattttacgtttgaatcaccattctacatactatttaaatttaaattatcaaaaactacattaatttacttaatctgatattatctagctattttacacgttatttttttattattatcatattaaatttccgcagtaatgcgcagggtttcaactagttgtttggaaaataatgctagctgatcagtagctctctccactatcgttctgtgcgttacatgtcaacttctgttagatatggccggtgataagtaattagcaagcaaattcaccttgactaatggttataaattctgtcgctttcatgatcttcag

SEQ ID NO: 23113 - DNA, 662 bp, Oryza sativa
  Clone ID: PAT_MRT4530_28224C.1
acccgttcatcctctcacaccatgcttcctcgttgtttcctctccgttttgttcttgcgctagccactgctttccccggtcctgttcacctgcgcgcacaggtaaacgggacgagcaggcctccagaagtccgtcctcttgtgtacctacacgagtaggcaggcgatcaagtttttggggagcgctctcaggtgcgacggctctgtgttatctacgtcaggctctgcttcccctacgtcaacatctctgctgctgttgctagaggtggcttaggcgcagggagtggtggctctactggaggagactgatccgggaacgtcaacaccaacggaggcaatactgcctcatcatctagcgatgttttattgttaatgctcatcgcaatgacagtattgtgctatcatgtgaatgttgatgattattttataaaaagcacactactactcatgttgttcagtaccgtcactagatctactcatattataaatatcatgtttattattatgttattatggattaaaatatgcagaattataaccatatttccaacaattactccccttttgccgcaattctctgttgtaagttacgctggtcatctgatggtaaaaacgaaagaaggaacccagtttgagcggatgaaccctcgaagattaatgaca

SEQ ID NO: 23114 - DNA, 6710 bp, Oryza sativa
  Clone ID: PAT_MRT4530_28225C.1
atggcggcggcattagcatggcggttcaatggaaccaatggaggcgcagatctggaacacaaagttcaagagtcagagccaccaactcctgtctcagtgatgagaatggtcaagaaccgtgccaatgtggaggatgaggagacactttcaagtgttgctcaatgtattgagcagttaaggcaaggttcttcatccacccaagagaaagagaactccctgaagcagttattggatcttcttgaaacaagagacaccacatttggagctgttggatcacatgcacaggctgtccctatacttgtttctctccttagatctggttcatctggtgttaagatgctggctgctactgtcctggggtctctttgcaaggaagaggagctaagggtgaaggttctgcttggtggttgcatccctcccttgcttgctcttctcaggtccaagtcagctgaaagccaaactgcagctgccaaaactatttatgctgtttctcaaggtggtataagagaccatgttggatcaaagattttctcaacagaaaatgttgttcctgtactgtgggagcagctcaaagttagcctcaagaatgagagtttagtggatggcctgctaactggagcattgaagaatttatcaaaaaacactgatgggttttggtcagctactgtgcaatgtggtggagttgatatacttataaagctggttgcttctggacaagcaaataccctagcaaatgcatgcaatcttcttggggctttgatgatggaagactcatctgtttgttctaaagttctatcgggagaaacaacaaaacaactcctaaagttacttggtcctggtaatgaaacttacattagagctgaagctgctggtgctctcaaatccctttctgcacagagtaaagaagcccggcgccagatagctaattctaatggaattcctgctcttataaatgctactattgctccatcaaaagagttcatgcaaggtgaatctgctcaggcattgcaagaaaatgctatgtgtgcattggcaaatatatctggtggtttatcttatgtaatatcaagccttggtgaaagtctagaatcatgctcttcacctgcacagattgctgacactgttggtgcattagcctcagccttgatgatatatgacactaattcagaatctatcagtgcttcagaccccctagtcgttgagaaaacactgatgaaacaatttaagcctaaggcaccattccttgtacaggaacgtgtgattgaagctttggccagcttgtacagtaatccagttctctgcaggacacttgcagattctgatgcaaaacgcttgcttgttggtttgataaccatggcaggtactgaggttcaagatgacctcaccaaatcactttttgctctctgcaagaaggattgtgatctatggcaagctctgcaaggtcgtgaaggtgttcagctcttgatttctttacttggtctttcctcagaacagcagcaggaatgtgctgttgctttgcttgcgcttctgtcaaaggagaatgatgagagcaaatgggctatcacagctgctggtggcattcctcctcttgttcagattttagaaactgggtctcccaaagctaaagaagattcagcaaccatccttggcaatttgtgcaaccacagtgaagacatacgggcatgtgttgaaagtgctgatgctgtgcctgctttactatggcttctgaaaaatggaagtgacaatggaaaggagatagcatctaaaacactgaatcatctcattcacaaatcagatacaggaactattagtcagttgtctgctcttttaactagtgaacaacctgaatcaaaagtttatgttctggatgctttgaaaagcttgctttctgtggcaccccttaatgatattctgcatgaaggaagtgctgcaaatgatgcagttgagactatgatcaaaattctcaactcacctaaagaagaaactcaggctaaatcagcatctgctcttgctggactgtttcattgtcgcaaggacttgcgagaaactcatattgcagtgaagacactttggtcagtcatgaagctgattgatgtgcagacagataaaatactaatggcggcctcatcctgccttgctgccatttttctgtcaatcaagcaaaataaggatgttgctgcaattgggcgggatgcattagctccacttgtctcacttgcaaattctacagttctagaagtagcagaacaagcgaccagagctttggcaaacctttttcttgatcatgaattatctctgcaagtatcttttgaagaaattatcttccccataacacatgtgcttagagagggatctattgatggaagaactcatgcagcagcagcaatagctcgccttttacagtgccggccaattaaccaacctctttcagatactattaaccgatcaggtgctgtccttgctctagctgggcttttggaagctgctaatggtgaagctgctgcaacatcagaagttgttgatgcgctggtgctattatcaaaaccaaaggtgtcaagtgggcataccaaagctccatggacagttcttgcagaaaatccccacaccatacttcctcttgtgtcatgtgtagcggatgcagcaccttcattgcaagacaaggccatagaagttttatcgaggctctgttctgatcaacatgatattgtgggtggtttggtttcagaaatcccaggctgcatatcatcagttgcacggcgagtcattgggtccaacatgcttaaagttaaagttggtggatgtgctcttcttgtttgcgcagcgaaagagcattgtcagaagcagatagagattctcagtgactcaagcttgtacattcaactaatccattctctagtcagtatgattcatatgacaaacttgccttctgaaaatgggagtggtgaaaacatatcagacattaaaatttctagacactccaaagaaaataacaacagcgatgaaactgtgtgccgcactgctgtaatctcaggtaacatgattccgctatggctgcttgctgtttttgcacgccatgacagcaaaacaagggctgaaattctagaagctggagcagtcgaaatgcttatggagaagatttctcaaaatgcattcctatatgtgggtgaagaagatagcaccgcatgggtctgtgccttacttcttgctttgctatttcaagaaagagagataaatcgatctaatgcagcattgcactcaattcctgtgctctcaaacttgttgaggtcagatgaacaagcatacaggtactttgctgcacaagctttggcaagtctggtttgcaacggtagcagaggaactcttcttgctgttgctaattctggggcggccactggacttatttctttgcttggatgtgctgaggttgatatagctgatcttttggaattatcagaggagttcatgttggttcctaatcctgatcaaattacactggaaaggctttttagagttgatgatatcagggttggcgcaacttccagaaaatctattcctcttcttgttgacctactcaaacccattccagaaagacctggtgctcctttcttggcgttgggtcttctgacacaattagctattgattgccccccaaacatgatgctaatggctgaagctggaatcctagaggcacttaccaaatacttgtcacttagcccacaagatgcaacagaagaagctacaactgatttgttaggcattctttttagttgcgcagaaataaggcacaatgaagcagcacttggtactgttaaccaacttgtggcagtccttcgtctaggaggaagaaattcacgctacagtgctgcgaaggcattagagagcttatttattgcagaccatgtcaggaacagtgagtcagctcgccaggctattcaaccacttgtagaaattctgagtactggcatggagagggagcagcatgcagctacatcagcacttgttaggctgctttctgacaatccatcaagagcacttacggttgcagatgttgagatgaatgcagtggatgtcctgtgccggattctttcttcggattcttcagctgagttgaaaggagatgctgctgaactatgctgtgtgctatttgcaaatacaaggatccgctctacatcagctgcagcccggtgtgtggagcctttggttgctttactcgtttgtgaagctaacccagcccagctttctgtagtccgtgcactggacaggcttctagatgatgagcaactagcagaattagttgcggcccatggggcagtcattcctcttgttggccttttgtttggcaaaaactacacgctccatgaggcagttgctagagctttggtaaaacttggaaaggataggccaggttgcaaattggaaatggtcaaggctggtgtaattgagagcattctagatattctgcatgatgctccagatttcctttgcattgctttggcagaaatgcttcggattttgacaaacaatgctagcatagctaaaggtccatcggcagccaaagtagtccagccccttttctctttactatccaaggcagatattggtcctgaggggcagtacagcactttgcaggttcttgtgaatattttagagcatcctgaatgccgtgctgattacaatttgacaccccggcaaactattgagccagtcatttctttactgaattcctctccgcctgctgtccaacaattagctgcagaactcctatcacatcttattctagaagagaacctccagaaggacacaataacggagttggccatccctcctctaattcaagttctttcatcgggtttgccaaacttgcagcaaagggctataaaagctcttgctaaccttgcattagcttggccaaatacgattgcaaaggagggtggtgtttttgagctgtccaagtacagtactgagtttttccttgaggtgcctgttgcagtactagtgcagttactcagatcaggaacagaaagtactgtcgttggtgcactgaatgcattgcttgtattggagagtgatgattcgacaagtgcggaggcaatggctgagagtggtgctgtggaagctttgctggatctcttgaggagtcatcagtgtgaggaagctgctgccagactcattgaagcacttctgaacaatgtaagaataagggaggcgaaggctgctaaaaatgctattgcacctttgtccatgtaccttctggatcctcagacacaatctcaacaaggaaggttgcttgctgctcttgctcttggagatcttttccaaaatgagggtcttgctcgttctactgatgctgttgccgcatgccgtgctctagtaaatcttcttgaagaccagccaactgaagagatgaaagtggtagccatttgtgccttgcagaatctagtgatgtatagccgagcaaataagagggcagttgcagaatcgggtggcgtccaggttctgctggatcttatcagttcaagcaatcctgatacctctgttcaggcagctatgtttgttaaacttctattcaataaccacactatccaagagtatgccactagtgaaacagtcagagttataactgcttcaattgagaaggacatatgggcatctgggagtgctaatgaggagtatcttaaggctcttaacgctctacttagtaacttccctcgcttaagggtcactgaacctgctaccttatgcattcctcatcttgtaacatctctcaagactggttctgaggcaacccaggaagctgcactggactcactgtatcttcttagacaagcatggggagcttgtgcagcagaaatatttaaagctcagtcagttgctgcctcagaggctattccgctacttcagtacttgatacagtctggcccacctcggttccaagaaaaggcagaattgcttcttcagtgcttgcctggtactttgacagttactataaagcgtggcaacaatctaaggcaatcagttggaaatcctagcgcattttgcaagcttactcttggaaataatccgccaaggctgacaaagattgtctcaactggtgcaacacctgaatgggatgaagcctttgcgtgggcgtttgacagccctccaaaggggcagaagcttcatatctcctgcaaaaacaatagcaaattcggaaagaaatcatttggtaaggtgacaatccagatcgatcgggttgtcatgctgggctccgttgctggcgaatacaccttgctaccagagagtaaaagcggtcctaataggaacctggaaattgaattccaatggtcaaacaaatgacaagtatctacatagttaggttatctgtgtaagttaaaatccataagaagttgagagagtgttcttgttttccatactctgctataaacgttaccatatttgtgcatcagtgtaaatagcctgcagagaaatttgtcgttttgttgtacctttctgtgagataaaagagaacagatgagtcatattttgtactgattgtaatgaattgattcatttttttccacgggatttttatttgtaaatggtgtaaatgcttccgcactcctataagctgcacggatcttaaagtcaattaaaaaggtgtatgtttgtactgaaaaaaaaaaaaaaaaaaaaaaaaaaaaaaaaaaaaaaaaaaaaaaacaaaacaaaaa

SEQ ID NO: 23115 - DNA, 291 bp, Oryza sativa
  Clone ID: PAT_MRT4530_28226C.1
atgggttttggtgaaagcacccagggcaatcaacgtaagcttgatggtcctgggaaagtgtcaactgaattatccctagtcaatctagaagctaaaaatttgcatcctaaacctgagtgcaaccaacctattagaaaaggtcagagacccggctttttactgaaagccatatcggcagtgttcagctggggttgccagcgacaaagaggagttcaacaaaatacagaccaggaacagcaaccagactggcgaacaagtagcgaacgatctagattccagccgaaactctaa

SEQ ID NO: 23116 - DNA, 2428 bp, Oryza sativa
  Clone ID: PAT_MRT4530_28227C.1
ctagatcgcgagcggccgctcgcgatctagaacgcttcctctcccccccggttgctgctgctgcagctgagcctccgttcttggaagcgagagagagggagggaggagggaggcaattggtgaggcttttggaggaggaaagggaagcttcgggccccagcatcctcctcctcctcttgctcactcaccacgctctcctctcaccaaactctctcttatctccttccaagatcccaaccccttttcttctttttttttgtttgttcttgttaggatcattttcttgatctttcaagctcagctccagcactccccccgttcgtttccagctgcagcagagatcttggttagttggatttttagcttccgtgttttttgagcgagttcttggttaattgctccaatccgagaaaaatcaccaagtgtcctttgcttccctccctccccccttgttttctgggcttcgattcgatcgaattcgaatccccgtcccaaatttatttattttcccacccctcctttgtgtaaaaagcgggttccatcgcgtcacccgcacggctcgtccgatcgaaaagcagcttgaagaagaaaaagtgagagttcttgattcgattctggtcgtagcagcagcagcagcagcgtcttcactggttcgttctttgtttatttataaggagcagcgcccaatccgagctgctgctcctccaccgcggcggcggcggcggcggtgtttgatcgatgcttgccttggtggccaccttcgtcttggcctgcctcgtgttcttgtcgaagccatgcgcgcgtgagatgagattgttcctgtcgacgctgtgccaagaactcgccctcgcgctgctcgggttcctggccgggctccggctgctcggcggcgtcggcgccggcgcggcggccgagaccaccatgccgctgatgccgtccttcaagaggaagcgcgcggcggccgtggaggagggcggcggcggcggaggaggaggaggcggcgaggaggccggcggcgagccgtcggtgctcgacctgccggagctcgccatcgagtgcattctcgcgaggcttcccccctccgagctgcggaacatggccggcgtctgccgctccatgcgggagcgctgccgcggcgaccacctctgggagcgccacatgtcggagaagtggggcggcgtcctcggccacgccgcgagggaggagtggaggacgtacctcgcgtcggcggccgacacgggcggcgccgcggcgtcgtgctcgctcgccggcggcggcaggcaccggaggtggctcgccgcgctgtcctgcgtctgcccggtggtgtcctggatgcgtcccagggccgacggcggcagcggcggcaagtcggccggccccgtgctcgatgattcgatcatgtcgtggtatctgtccatggagagtggcaagttctggttcccggctcaggtctacaaccgtgagcatgggcatgttggattcatgatgtcatgctacgatgcagagctcagctatgatttccacagtgataccttccgtgcaaggtatccaccacacggacgacggaccgtagtcttggaggacggggtacactgggatagggtcagggcacctccagtagacactcacgcacatgatctccatgcctctgactgcttacacgaactccggccaggcgataacattgagatccaatggagaaggaacaaggaattcccctatggctggtggtatggagttgttggccacttggagtcatgtgatggaagtgagcacttttgtcggtgtcatcttagtgacactgttgttctggagttcaaccaatacacacctggttcaagatggaggcaggcgctggtgaaccggaaggaccacagggaagagggcaatgagggcgacggtttctacggtggaatcaggaagctccgcagcaaggatgagatctcaaagtggagacagttgtggccaacagacattcttgagtagcaaggacagagattattattccactgttgttattcatcaagttgccaaattgatgctctccaattgctcattctgtattctgaaacctgacgaaaacgccacccatctcctccactcaagttgtatacacaaaggattggaacatggggtgacaaaatttggtagcttgggacacaattgtgaaacttactgtaaggcacggatgcacagattgcttctgtaaacgggcgttaactgaacatgtatcaagtctacagcattgtatgtgactgctgcagcctgtgcctctgcatgttgttgtagctgtagagcagaaagatcaaatgtaaattacattgttagctccaatttaatttacggcatttcaggatgccgtctcacggttaccctatcaaaaaaaaaaaaaaaaaaaaaaaaaaaagaaggaagaagcagaagaaaa

SEQ ID NO: 23117 - DNA, 618 bp, Oryza sativa
  Clone ID: PAT_MRT4530_28228C.1
ctagacgcgggacccacatgtttgttccatcttcctccatcctccctcttctgtcttccctatctcttccttcatgccgcgacctcccgcgcggatggtgtcgagggaggcggcggcggctcccgagccctctctcgcggatggcgtcgaggagacgaaggtggcgatgcgggcggcggcccccgagccctcccgtcgcaaatggcgtcgaggatagcgacgacagtggcggcggcggctccggagccctcccgtcacggatggggtcgaggacagcgatggcggtggctcccgagccctctcctgcagatggcgtcgaggatggtggctcccgaacctcctgtcgtgaatagcgttcaggacggtgttggctcccgagccctcccgcgtcggatggctcggcggcggtggctcccgaaccctcccgcgcggatggtgtcgagggaggcggcggcggttcccgagccctctctcgcggatggcgtcgaggacgaaggtggcgatgctggcggcgtcccccgagccctcccgtcgcaaatggcgtcgaggacagcgacgacagtggcggcggcggctccagagccctcccgtcacggatggggtcgaggacagcgatag

SEQ ID NO: 23118 - DNA, 311 bp, Oryza sativa
  unsure (1)..(311): unsure at all n locations
  Clone ID: PAT_MRT4530_28229C.1
cgctcctgccgcctcgcctttcgcccccctccatctcgccaacgccaccgccaccgcctccgcctccgccaccccctncgcccgccgcccgccgcccctcctcccctgcgccgccgcatccgcaccgcccaaccccgccggccaccgaggacgcggaaaccgcacctcactcccggtctcccacgcctccctctcctcttttagtcagaacgcggacgccctcctctctcgcagccgtcgttggagcgagcaccgccactccaatcgccggcaatccccttcgccgtgcgcacccgtcgttggagcgagag

SEQ ID NO: 23119 - DNA, 791 bp, Oryza sativa
  unsure (1)..(791): unsure at all n locations
  Clone ID: PAT_MRT4530_2822C.1
cacgaggctgtgcgagagattcatcagccggccggaagcagttcaatcccgaagcaatttcacttttcctaaatcctaatcccttcgcttgtcgccgatgagcgcggcgacggaggaggggcggccggacggcgaggaggattcgccgcgcgcggaggcgttcctggagatcctcggccgggtccagccgggggatgcggaagcggagctctcctcctgcggcatcggcccgacggcggaggtcgcggagcaggtgctcaggtcccgcgtctgctactcccgccccaaatccgccgtccgcttcttcgtctggtcgggccggtcggtgaagcacaccggctacgcctggaacctcctcgtcgacatcctcggcaaggccgacatggaggagcccatgtgggacgccgtccgcaccatgaacaaggagggcggcggcctcgtcaccgtcgccaccttcgcctccatcttctcctcctactgcgccagcggcaacctcaggaaggccgtcgaggccttcgacgtcatggggaagtacggcgtggagccggacgccgtcgccctcaactccctcctctccgccatgtgccgcggggagggccgcgcgcaggcggcgcaggacctgttcgagcgcaccaaggccaccgtcgcgcccgacgcggacaccttcgggattctcctcgaggcgtgngagaaagaggggaacgcccagcgcgccaagagcaccttcggcgagatgattgtccgcgtcggctgggacgccggcaacatgcccgcgtacgacgccttcctct

SEQ ID NO: 23120 - DNA, 171 bp, Oryza sativa
  Clone ID: PAT_MRT4530_28230C.1
atgaagaggggaacacgcggcgaaggcaccaagctgcgaggccacaacctccacaatgcggcgatgctgttctcccccatgccgctcgaccccaagaacacatgcctaaaagtggaaaacgatatggtggtggtgcggaagcgtcggacaatggataaaacgatagggtga

SEQ ID NO: 23121 - DNA, 325 bp, Oryza sativa
  Clone ID: PAT_MRT4530_28231C.1
atgcagctcaacccgaaagcaagaactcgtcaaaacaaaaagaaagtaaaagggtggcgatgcatcgagattgtactgaacgtgactctgtccatgcgtggcaatcctcatgaagtacatcaacccaacccgacaatgtatgccgtatcatattgtcggattcgactcaatcggctaaccctatccaactcgaactctgccgatcttgatcatagtcgattcggactccagccgattcttactctgtttccggaatgatctccatctcgaactccgtttcgattccttcttcatctccgatacttggattacaaaatttggttgt

SEQ ID NO: 23122 - DNA, 227 bp, Oryza sativa
  Clone ID: PAT_MRT4530_28232C.1
atggtcagcagcgtgcagaaccgcataaccccaacacgacgaagagagtggagcgacatcttctgggagaacattgaggttgctctccggttcaacaggagcctagtgagaacttgcaacctcagggcactcttcatgtgtaagattgaagcagtggagcagagcccggggggtgctgttgggcattctttaaagaaagctcatggtgtctttctgcctgagtcaat

SEQ ID NO: 23123 - DNA, 1329 bp, Oryza sativa
  Clone ID: PAT_MRT4530_28233C.1
gggcacaaagcattactggctaatggctatagcagtatatacagatacattataccctgacatatccaggaccaaccattcaccgtactgatcaaaatctgatgcacagaatcatcagaaccaatggcccacaaaacaattaattatcctccacaagactaagggtaaaagggatggaaggactcctgtcctgtgatgagattatattctgcagtttattttccaagcagacggcgtgcccgagtgtttgctcccttgatcctgaagttcagttcgtcgtagtccttctctgaatctcccaaagcctttgtttgtctgtcaatctcagtgcccatgtcaaccgccatgcctttcagctcggtcaatatgttacttagatcagataggccatcatcctgctttgccttctccatctccactttctggagggctgaagttggctcggaatggaattggcgtgcattcgattgaggtgggtgatccgatagtcccagtttgtgcctttgttccacatggctgcccttccgaatgaaggaatcatctctagttagcataggccccctgatttctccattcttttttggcttccactttttggaaaatatacccccaagatcacccagcagcttctcgctcctggagagatcctggtcgatgtcgagggtcatcatgtgcgtgcgcgtgatctgctggcccctgctggtgtatggtgacgaggctcttggacgcggtatccctcatctcctcggcgatgcggacgcagccctgcacccgctgagtggtctcctccgccttgtacgccgcgtagccctccagctcctgcaccgactgggcctccacgccgccggtgtcgcggaagtcgttcctgtaccggctcctcgccgccgccgacgaggcggagaagccatccccgccgccgaagagggagccccgctggtcggccggaggaggcacggaggaggccctcgccggtctctgctccctcccgccatcgtcggagtcggagtcgaaggggttgctgctccgcgacggcttcttggatgcgaagaacgatctcctcccgctcatctcgaaaactccttgggtcagattccgcagcaagcaagtttctctgcggacagatcggaagaattagtagtaggcaagaagaacaaggaagagcagcacatagcaagaggatatataacagtagaaagcaagggcggatggtaaaagcgaggacttggtcgcgcgaaggcagaaccgcaatcgcgtgcgttgcctctggaccgctgaccctgtcctcctgctcctcctactcccttcctgcctcgtgccgaattcctgcag

SEQ ID NO: 23124 - DNA, 274 bp, Oryza sativa
  Clone ID: PAT_MRT4530_28234C.1
acgaacaaatctcttgaatgatgatgctacaagcatgaacaatcctattgaataatactagaacatccggctggtgcccattgtctagcctgaaatcctcctgtacggcaaacatggtatccacaggaccttctatgcgtcgcagaaagcaatgtcagagaccttgttatacatggccaacaacacttggatacacgaggtcatgcttgtaaagacaagcatgccgacacccgatgctgagtgtacagactggagctcctctgaacaaggatct

SEQ ID NO: 23125 - DNA, 240 bp, Oryza sativa
  Clone ID: PAT_MRT4530_28235C.1
atggttgagggagcgaaggggtcggtggtggtgtgcttcgcggtggcagcggcggcgccggacttcgtggtagggaatgttgcgatcccgtgggtgattgggtccttcttcctcttctccgaccacttcattgtgtggtcggcgatgggctttgacgagctcccttccctcaaggccgagccgccgccgctccacctcaagttgtgccatcagtgcgcctcgagggacaatgagccgtag

SEQ ID NO: 23126 - DNA, 520 bp, Oryza sativa
  unsure (1)..(520): unsure at all n locations
  Clone ID: PAT_MRT4530_28236C.1
ggaatcggcacgagggccaatttatattctttcttaatctcgacggtttttcctgtttccaactagaagcgcgtgtccctggctccccgccccgcactctaccgccgannagaagccaggaagggagtaggaggagcaggaggacagggtcagcggtccagaggcaacgcacgcgattgcggttctgccttcgcgcgaacaagtcctcgcttttaccatccgcccttgctttctactgttatatatcctcttgctatgtgctgctcttccttgttcttcttgcctactactaattcttccgatctgtccgcagaggtacgcgcagttatttctggaccttcttgatagttaagaaacttgcttgctgcggaatctgacccaaggagttttcgagatgagcgggaggagatcgttcttcgcatccaagaagccgtcgcggagcagcaaccccttcgactccgactccgacgatggcgggagggagcagagaccggcgagggcctcctccgtgcctcctccg

SEQ ID NO: 23127 - DNA, 4467 bp, Oryza sativa
  Clone ID: PAT_MRT4530_28237C.1
atgcgggccccacatggcagtgacacgggtggcggtccgcggtggaccgagtccacagaccggggaggaggcggcacaccacgtggcgctgatgtggcgccgacacggcggccatgcggcagccacgtgggcggccaaatggacggccccgatctaccgcccggtagatcggacggcggaggcggctcgcggccgggcgcgcacgggcacggctcaagccgacctgccagccgtggcgcgcgatggcgcggcgcgacgcaaggcggcgaacggccagcggcggagagcggcggcgaccgacggcgagcggcgatgcacggcgagcgacggcggcgcggccccgagcggcaaggcggcggcgctaagagggagagggggaaagacggcggggagatgctcacggaggattcggccggcacggaggggcgacggcgaacggcgacgaggaatgaccgggagacgacggcgaacggcggacggtctccggaaccacctagcgaacatgatgaaagggggttagagagagagagagagaggacgatggaagagggcgaggacgccggccgaaggcagcggccatggcggtgctcaccggtgcacggtgcggagtgggttccggtggcggattccgacggaggagaggtggacgggacggcccgtacgacggcgaacgcgacagcatcgacggcacggcttggcacgacggctagcggcgaccggagcggtggtggcggcggcggcggcggagaggagggcgacggcgctagggcagtagagggcacgggggagctcggcgaaatggagaaaaagagagaggggagggcgcttacagattcaagtgataaacgaaagagagaagaaaggaacaaatatcaacgtgaatggcgtgcaaggaagaaggccaagttaagtggtaccggtaatgttacatctgacagtccagtgctagcaacaactatttcagcgacagaacttagtgaagggggtgaggtcgggcgatctgcaatctccagcacagaaaagaaagaagaaaggaatagaaagcaacgtgagtaccgtgagaggaagaaggctgagtcaaagagggttagtgaagatgatgctacactgagtgtactagataaggaaaatattgatccagatgatccaatcgattggcttcatagaaatgatatgtataaacgacaaaaaaagaagagtgaatccgagatcattgagcaaaaccaacaatcacccttctcagatggaattatgcaatgtcatactacacaaataccaaatgttcatgaggccattccagataacgactacgttgaattcgatagtgcattattcgagcctgcaaatgaaggtggtgtcgacgacggtcgtgttgaggacgaacaaggtgcggacaatgattttgatgaagccagtcaagttttggaggacgatggatacgagtcatatcgtgttggtgtgcataatgatgcaaagtatttcagaaagcacatacagtacttcaactctcatttctcattcacgagccttggagagacccttgaccaacgagtcagcactgcagcgggtactgaagatgctgatgcactggctcatagggtttggaggtctcctgaccttgatatcaaccttgtccgagtcattctaggtattttggccaagaacccatacgtacaaaccttcaaaagagtcggatccatgcctaatttagatgactacatgattgagctcaacaccaatgtaacacctgaccaacgaagatataatgcccccacggcctcgcagggcgtggttgatgtgctttcttctggagagacaagtggttcggcggttggtaagagggttgtgctacctcgctcttttcctggaggtgatcgcgacatgcagcgaaggtttctcaatgcgatggctcttgtccagcgttttgggaggccagattactttatcacaatgacctgcaacccatactgggatgagataacggaaaatctcgaacctggccagttaccgcaagatcgaccagaccttgtcgcaagaattttcagggctaagttgcgagacatgctggatctatttgtgaagaaaaaatattttggagaggttcaggcttatgcgcacgtcactgagtttcagaagaggggactaccacatgaacacatcctattgatcatgaagtcaggcagtaaattgacaaccccagatgagtacgataaagtgatttgcgcggagataccagacaaggccaaataccctgagctacatcttcttgccatcaagcatatgctccacggaccatgcggcacattgaacaagaattgtgcttgtatggtggatggagagtgtcgcttcgactttcctcgacaattcaatcaggcaacacaacaagggaaggactcgtaccctttgtacaggaggcgagatgacagatggcgtgtcaagattagaggtgctgagttagacaacaggatgcttggtttcccactgttcggtatctatccagctgttttgcagctccaacttcatcttcctaacatgcagtatgtcacgtataatgaggatggtaatcttgaggatgttgtcaatcgaccatcttcttctaggacaactcttacggagtattttaaaatgaatcaagtagacccagaagcaaggaaattgctatacaaggagttccccgaacactatcgctggataattggacagaatgtgtggcagaaaaggaaaacgcagagaggtcaagttggacgggttgtgtacgctcaccctggagaaggggagagatacaacttgagagttcttctcaaccatgtgcgaggtgctacctcgtttgaagatttgaggacaatgtcagtcaccgatatccgtgcattatgggacaatcacaaggctacaatgtctgaagattatagccgagggaacactaaccctgcagcagtagagcagatggtgctacgagatatacgtgatttgcttcattccatggggaacgatatcacggagtatggtcttctcgagatcagtgatataggtgaacgtaccaacgacgtaatgacagagattatagaggaacttaacgtgctagtggaccaagaccatctagacatatacacatcccttaatgacgagcagcgtgcaggatttgatgagataattgataatgtaactaataagaagagccagatattttttatcgacggcccaggtggcactggcaaaacgtttatgtacaaggcgcttcttgctagagtgcgatccgagggattaatagctattgcaactgcgacgtctgctgttgagacacttgataggtatcttcaagacattatgggttatttattgccatttggaggcaaggttgttgtttttggcggtgacttcagacaggccaaggtttatcatagctttgactctgttgatgatgaccctcacaatagctatcctctggattaccttaactctatcactccaaatgaaacttgcttgctgcggaatctgacccaaggagtgttcgagatgagcgggaggagatcgttcttcgcatccaagaagccgtcgcggagcagcaaccccttcgactccgactccgacgatggcgggagggagcagagaccggcgagggcctcctccgtgcctcctccggccgaccagcggggctccctcttcggcggcggggatggcttctccgcctcgtcggcggcggcgaggagccggtacaggaacgacttccgcgacaccggcggcgtggaggcccagtcggtgcaggagctggagggctacgcggcgtacaaggcggaggagaccactcagcgggtgcagggctgcgtccgcatcgccgaggagatgagggataccgcgtccaagagcctcgtcaccatacaccagcagggccagcagatcacgcgcacgcacatgatgaccctcgacatcgaccaggatctctccaggagcgagaagctgctgggtgatcttgggggtatattttccaaaaagtggaagccaaaaaagaatggagaaatcagggggcctatgctaactagagatgattccttcattcggaagggcagccatttggaacaaaggcacaaactgggactatcggatcacccacctcaatcgaatgcacgccaattccattccgagccaacttcagccctccagaaagtggagatggagaaggcaaagcaggatgatggcctatctgatctaagtaacatattgaccgagctgaaaggcatggcggttgacatgggcactgagattgacagacaaacaaaggctttgggagattcagagaaggactacgacgaactgaacttcaggatcaagggagcaaacactcgggcacgcccgcgggaggctaaggtggacgggataatgatgtggacactggcgccagtcctggagctggaacgcatcgctgtcgactccggtggtgacccagatgccatccaccactgcgcggcttag

SEQ ID NO: 23128 - DNA, 542 bp, Oryza sativa
  unsure (1)..(542): unsure at all n locations
  Clone ID: PAT_MRT4530_28238C.1
cggcaccacaagccctgtcctctccgcaccccccgggggccgaacctccttgccgtgtgctgccatatcctcgctgcgagccctgtctcgcagagaaacctggacgccatacctcctagccgtcgccacgaacagctccatcggaaactccgcacccgccatatatgccttcgtcgctttgcctgcagggctccggtgcggagcgtggggccaaagctgctgcgtgaggatagaggcagcctgcgatctaagtcactggtggaaaaggggagcaaaaggccgaatgttttctgctgttgttgctcctttcttgtttgcatctgattagatccatgagtaatacgctccttcgtatgcaccctcccccagcttaaaatacttcatgtaccttgccaataacaagactttgatnttggttgcgttntattcaagcttctctggcctgatcttccttttttttttcatttcttgatgtcctggctgatgagacgataccaagagaaccatctgttgcttcatgcaactgatgaacatgacccaac

SEQ ID NO: 23129 - DNA, 2409 bp, Oryza sativa
  Clone ID: PAT_MRT4530_28239C.1
ggtaaagcagatttactttctggaatcacgatcaaaggaaagacaatagcattttttttttttttttataccaactatgaataacaccctgaaaatgccaaatcatgagatattcgataactgaataattctttctctcatcacaagaaaatagacagataattaatgtctgcaagggacagattccactgtaacgaaacaccaaagcacataagcttaacggtagcgacgaagagagacggtctggttgcgcttccaggtggccctgcgggaaggtctggccttgtggtgagtgtggcctttgccgcgcaggccacggtacttcttgccagcagaggtgaggccacggagctcacggtgcttgtgcacaggcttgcagagccagttgatccttgggtcattgcggatagcgctgtgagcaacatccacaaggatgatctcaaagtacttgtaggtggagtcctcattcacccagtaggagttgagcaccctgagtccacccagcttgcgtccagctctctcctcagcaactgacctcttgttcctctggaacttgagctgggtaataccctggtgctatgacatggccgagacggcccgaacacccgaccggccgctggccacgctgccgccgccgccgccgccgctgcgatgagcaccgcgtccacgatgaacgacgttgttgctgttaccaccagagctgccggcgcgcgaccggacgctgtgctccggctgcgccgccctctgcttgctgctctgccgggagcggttcagcgggctgcgcgcgccggcgtggctgctgctgccctgctcgaccacctcgtcgccgttgttcgtcgagcgcgacgcgctccacgtccggtccgtggactccaccgagttgggctcccacgacggcgtccacgggttgccggagacgctgttgctcccggcggactcctgcggctcggtctcgccgccgccgccgcggatgtccccccgtggggcggtggcgtgcctcttgtgcacgcccggctccgcgaggtcgtccatgccgccgccgagcggcgcgttgaccgatcccctgtcgttggcggagcggtcgggctcgcaggagtggctgtccgacgacgaggagttgaggtcggccacggcgtcgaggatggagcacgccttggagacgcacgccgggagcgagaagctgggcagcgtcgcggcggtggcggccacggaggtggtgttctgctgctggtggtagctctggatgtcctcgaggagctgggtggcgtacgagttggtgttctggtcgaagtcccgcgacgcccggcgagaccgggccttcgtgttgaggctctcggccgtggcactggccgtgcgcgtcgccgtcgtcttagacgcgggcggcgccgccgcaacgaggaccgtctcctccacgaccttcggcttctcctttgaacgctccgtggccttctggggagcggcggcgatggcgagcgcgttttccgaaattttcttgtggtgattggcaccattgttgttgcggagggagttctcgtcgatctccgccatggggctgcgcctgtacggcgacgagctccggctcagcgaaggcgtctgcgccgccgtcatctgcccgcctccagcattctcattccctgcagccaccatcctcgcaggcgagcttgatctcggagacgcgcacctcttgccggacgcggccgcgggcgacggcgcgcgcgccttctccctcgccgggacggacaccatcttccccggctgctgtctcaccacccgctctccgccgccgccgcctccgccggaacctgccggagccggtgcaggggacacaccttcggcacgccgcccaggcgatcggctcgctctacggctgccgccgccgctgctcctctcccgactaccagagcgcttccgctgcggcgagccccggtgaggcgacggcctggacaccgcgccgccatgcctctcccaatcgcgctcctcatccccaccaccaccacacccgggtctcctctcctgatcaaagtcgtagctcctcttcgacctccggtgaccggcccccgtctcgctcgacgccgccctcccggacgagctccggctgaggcggccgcactggatgaggatcgcgtccacctcctccttggtgcagctcgacgtccgcaccggcatggtgggcaccaccaccaccggcctcctctcctccacattcacggccccggacttcgtcttcacgacgaacaccgccttcttgtctcccgccgcctccaccgccctgcccgccctcgtcttcttgcccttgtcgtccgcggcgatcttgccggacttcctcttcacctgcggggaggtggtggcctctgcaccaccgtgcggtggcgtcgtctccttctgcgtcttgctgcagcagagacccat

SEQ ID NO: 23130 - DNA, 2258 bp, Oryza sativa
  Clone ID: PAT_MRT4530_2823C.1
atgcggcggcggggggatcaatgcgacgacgacgagatcgacgcggcggcactcggggtggcacatcgggtcgtcggtcgccagcagaccttcctaggtaggcccttctctctagcctacctcctctccatcttcttcccgagcgcaggagcagcaacggcgcgaggtgacggcatgagtgttctctcgtttgcattgcagggatcatcaaccgcgcgtcatggttggtacaacatcgtttgtggtgtagcgattgcacgatattctggacttgttctggttggtagccacgttgcaaacgtcgcgctcgatcaaagcgagagttatcctctcaccagaagatcgggccataagagagagtgtcatcaggtagcagtcatggcgtcgtcggcgctaatctgcgacaccgagcagtggaagggcctccaggctcactatgatttcgtgtttcgccacgcatgcgggggcgagcaggcgcacgtcggggcgattcagaagacgcacctgcgcgatctgatggatgatgccgagcgctgcaaggcaatgacagctgagtatgaaggcatatttctggattactcgaggcagcgtgcaactggcgagaccatggagaagctgtttaaattggcagaggcggcaaagctcaaggagaagattgagaagatgtttagtggtgacaagataaatagcacagagaacagatctgtgcttcatgtagctctaagggctccaagagacgaagtaataaaaagtgatggggtcaatgtggttcccgaagtttggggtgtaaaagataaaatcaagcagttttcagaaacttttaggagtggatcatgggttggggcaactggtaaagcattgacaaatgttgtgtcagttggaataggtggtagctttcttggtcctctgttcgtgcatgctgccctccagacagatccagaagctgcagaatctgccaaagggcgacagttaagattccttgcaaatgttgaccctgttgatgttgcacgaagcatcaaagatttagatcctgaaacaacacttgttgtggttgtctcaaagaccttcacaacagctgaaacaatgttaaatgctcgaactctcaaggagtggattgtctcttctcttggacctgatgctgttgcgaaacatatgattgctgtcagtaccaatcttgagcttgtggagaagtttggaattgaccctaaaaatgcttttgcattttgggactgggttggtggtcgctatagtgtttgcagtgctgttggtgtcctgcccttatctcttcaatatggttttccgattgttcagaaatttttggagggtgcagccagcatcgacaaacacttccgttcatcttcatttgagaaaaacatacctgcaatattgccctattcccaggcacttgagaaatttgcaccacatattcagcagcttagcatggagagtaatggaaagggtgtctctattgatggcgttcaattgtcctttgagactggtgaaattgattttggtgaacctggaaccaatgggcaacacagcttctatcaattaatccatcagggaagagttattccttgtgattttatcggcgtcgtgaaaagccagcaacccgtttacttgaaaggggaaattgtgagcaatcatgacgaattgatgtccaatttctttgctcagcctgatgcacttgcttatggaaagacccctgaacaactgcacagcgagaaagtacctgaacatcttatctctcataagacttttcagggcaaccgaccatcacttagtttattgctgccctcattatctgcttatgagattggacagcttttatccatctacgagcaccggattgcagttcagggtttcctatggggaataaactcatttgaccagtggggagtggaactgggaaagtctctggcttctcaagtgagaaaatctctgcatgcatcccgcatggaaggaaagcctgtccaggggttcaacagcagcactacaagtttgctgacacgatatctcgctgttgagccatccactccttacaacactaccacactgccgaaagtttaacacgacacgtttggcacgctattgtcttgagttaaacaagattactagagtcttcatatcttgtaataagtttaagttcgttttggagttgttacaggcttacagccagttctacagtactgtagtttcgttgttttcctttactccgacctccaggaaacaaaaaaaaaaaaaaaaaaggggcggcc

SEQ ID NO: 23131 - DNA, 840 bp, Oryza sativa
  Clone ID: PAT_MRT4530_28240C.1
ctccccctaaaccccgcaccgccgccgccgccgccgccgccgccgcctagccccgccgccatgctgcgccgcctcgccgccgccgcgccgcgggccttcttctcgtcgtcgaccccgcacgcgccgccgccgccggcggggtacacccagcgccgcgagtacgggctggtccccatggtgatcgagcacacctcccgcggggagcgggcgtacgacatcttctcgcgcctcctcaaggagcggatcgtctgcatccacgggccaatcaccgacgacacggcctccctcgtcgtcgcccagctgctcttcctcgagtccgagaaccccgccaagcccgtccacctctacatcaactcccccggcggggtcgtcaccgcgggcctcgcgatctacgacaccatgcagtacatccgctccccggtcaccacgctctgcatcggccaggccgcgtccatggcctcgctcctcctcgccgcgggcgcgcgcggcgagcggcgggcgctccccaacgcgcgcgtcatgatccaccagccgtcgggcggcgcgtcggggcaggcgtccgacatcgccatccacgccaaggagatcctcaaggtgcgcgaccgtctcaacaagatctacgccaagcacacgagccaggccatcgaccgtatcgagcagtgcatggagcgggacatgttcatggatccagaggaggcgcacgactgggggctcatcgacgaggtcatcgagcaccgcccagtttcactggtttctgatgccgtcggcagcgatctgccaaacctaggcgggggcggagatggggctaacaaggcaactgatgaaccatctccagcttga

SEQ ID NO: 23132 - DNA, 265 bp, Oryza sativa
  Clone ID: PAT_MRT4530_28241C.1
gttggagccattgactctgatcaactgtgtgcggctattatctcgcttgatgcaggtctaccaccgcatgttgctagctattgcatgacttatgggtatctagcccacaaacctctctatctctacgcagaccatcagcttgaggcaaataactgcggagcagatcgtgttgaaacactccggtggggaatgattcagggtcgcaactatcctgtttttgttcattataacactatatatcgtgtccaataaaatgtgcttacaa

SEQ ID NO: 23133 - DNA, 305 bp, Oryza sativa
  unsure (1)..(305): unsure at all n locations
  Clone ID: PAT_MRT4530_28242C.1
caaaggaggggttactccgtggccgccgccgtggcaaaaagganccccgccggaaagggcggacgaanaaaaaagtggccgcggcngtggccaanccncacgattgcgaaaggccccccnangaaaaaaacnggcgtgggttcccngaccccggtgaccgcggttnctaccggcccgggccggcngcgcnaaaggaagttngaccnccgcngaaacntccncncctaanctgctctcccanctcccaaanaagantnggctgccancntganacacatcctccacctttcccgtccgtccaagcc

SEQ ID NO: 23134 - DNA, 288 bp, Oryza sativa
  Clone ID: PAT_MRT4530_28243C.1
atggccgacgttggcggtggttccaccggagaccaaggggacgagagcgatccggcgcatggaccaggccatccaacagaagccactgcagactgtgcatcggagccgggatgctctggtacgctctggatgcacaaagtgtgccgcaccatggccgccatgctgctccggttcatctatgatatgtccccggctgaggccaatgcccctgcagtgtcggcgagctgcttaagccgcatcgccggccatcagtctgttcctggaccccggagaagaaagggagactag

SEQ ID NO: 23135 - DNA, 474 bp, Oryza sativa
  Clone ID: PAT_MRT4530_28244C.1
atattttggtgtttggtaccttttaaatttaaacctatgttgcaaaaattaggcaaaaggatgtgacgtaattattatggggaacccgtgtggcccaacgatgttttatatatttttctagtagtacttctacgtacttttgcatgtaagggttgttcggttactaacattgtcataaatcataactcactttagttaagtgtggcttgtcataattttttccctacaaatttttggtatggtaagttgaactgttattagatggtacctaataggttattaggtgttcttataatgctttcaatgccgacatacttatggataatatcttttctagataatatcaataaatttcaaaatccatttcgtcacctaatggctaccatcgtctttttaatctataccgctgtaactgtttggttagatacgggagtaacattacccactgaaaaatccaacttagttcactaagat

SEQ ID NO: 23136 - DNA, 586 bp, Oryza sativa
  Clone ID: PAT_MRT4530_28245C.1
gtggaggtcgagggaatagtgaagctccgaccgctgagagagagagaaggggcgccggtgctccgatggtggaacggcttcgacggcggcggccaagcgtgttcccgagcgacgcgcacccggggaagtcggtggctggccgagagagaggaggagttggccggaacggcgagtagaagagcttctcttcggctgcaagggaggtggttgtggtggcttgatggagtggatagggaagaggggaaactagaaaaatggattcccctcgtcgaggcaagcccgatggcgcgagggtttgggttgtggagctacggtgaaggagatcggccgacggtggcggcagccggtcatgaggaagaaagagagagaaagagagggagagagagacctcggatatgtgggagaaaaagggacggcttgccggtatttataggctttggaggtcggttctcaaaggaggtcgtcgtcttggtcacggcggcaatgtcgtgaagaagagaacgacggcaccggtccttccatccgattggtcgatcatgtcggtttggtgcagtggctggcgtcagcggtgtgaggtggcgctgac

SEQ ID NO: 23137 - DNA, 268 bp, Oryza sativa
  Clone ID: PAT_MRT4530_28246C.1
tgatgcctcgcgcccccccgatgtctgggcacacaccatgtccgaggatgttccgcaggctgccggagaggggactttggagcgcgcggcagggcgagcctcccggcagttttgcaacgatggacaatccacccacggtcggaggtggtaatcatgctactggcgtggcgagatctggctactagctaggcctacgtgtagctaactgtgacatgtatgatggatgtgggttactaaaataattagtgttttccatttttttgaaaca
